United States Patent Application Publication US 2024/0409597 A1 - sequence listing, part 2

SEQ ID NO: 1099 - DNA, 1656 bp, Homo sapiens
  source 1..1656: mol_type = genomic DNA
cgccgctgcgctggtaagcctgtgttttggttcgctatggcccgtactaagcagactgctcgcaagtcgaccggcggcaaggccccgaggaagcagctggccaccaaggcggcccgcaagagcgcgccggccacgggcggggtgaagaagccgcaccgctaccggcccggcaccgtagccctgcgggagatccggcgctaccagaagtccacggagctgctgatccgcaagctgcccttccagcggctggtacgcgagatcgcgcaggactttaagacggacctgcgcttccagagctcggccgtgatggcgctgcaggaggccagcgaggcctacctggtggggctgttcgaagacacgaacctgtgcgccatccacgccaagcgcgtgaccattatgcccaaggacatccagctggcccgccgcatccgtggagagcgggcttaagaagtggcggttcggccggaggttccatcgtatccaaaaggctcttttcagagccacccacatcagcacttggaagaagctgtaccgcttgccctccgtgctcctccggcattagagcggggaaggcacttccgcttaggctcccaacaaaacggggtcgggtccccctgctgcggtgccgtcttgagctttgccgacttcggccaattggcctatccgcactggccgggctgcggacgctttcctgggcgccggctcgcgggctttggcggtccggctccccccgcgcgtgaccggggccctgcgtggcgggggggccggggcaggagagacggggcgtcgggcacgaggccaggggtcactagggggacgctcagggctcgcggtcctgagcgcggctggcctttgcggaagtggagcgccacacgcccgtgcttcgcgcccaaaccggcctcacccggcgcggccatccggctagggagggaaatgaccacctcggcctcgccggggttctgcggacaaacgtggggagaactgcgctggggctgccgttcagtccccgcgccacctccactagcacagtggtaacccccatatcctgcccctaagccaaaattcccgggggcacggggtgtgggcggaattttgtgaatctgggctttatcgagccgttccctgtccatgtccacagaaggagattcactattccagtgaaggcactcggtcctcttagaagctgcatggtatgtctggattttctgtccagactcagtagttcctttacgttgttttcgtcggacatgtgggcagacgctggtgcccgagttcagatccttgggaagacagtagatcagacaggaagaacgtgggcctccgttgggcaaatgaagctcttcgccttaggaaatcgtgacaggaggccacagaggtgatctctacagtctctgggagctgggaagtccaaggcctcttagtgggaaagtgaggcagggtcttgcagagcccactctacacacggccagatacaaatggctgtagaggtcttagataacaccttctcggtcatttatttgcacctcagaagaagccagggcttcggttttctgtttgtttcatcacagttgacaggttaaaagcattcactgcagcgatctatgagaattaagaggggagaaggggaaatggaataaaacttcgttttgtaaagct

SEQ ID NO: 1100 - DNA, 1577 bp, Homo sapiens
  source 1..1577: mol_type = genomic DNA
gggcctcgccggcgccgtcaagtagcctgggggacaggccggcgcggctgggagcgggtgggcggccgggaggccggagcagcacggccgcaggacctggagctccggctgcgtcttcccgcagcgctacccgccatgcgcctgccgcgccgggccgcgctggggctcctgccgcttctgctgctgctgccgcccgcgccggaggccgccaagaagccgacgccctgccaccggtgccgggggctggtggacaagtttaaccaggggatggtggacaccgcaaagaagaactttggcggcgggaacacggcttgggaggaaaagacgctgtccaagtacgagtccagcgagattcgcctgctggagatcctggaggggctgtgcgagagcagcgacttcgaatgcaatcagatgctagaggcgcaggaggagcacctggaggcctggtggctgcagctgaagagcgaatatcctgacttattcgagtggttttgtgtgaagacactgaaagtgtgctgctctccaggaacctacggtcccgactgtctcgcatgccagggcggatcccagaggccctgcagcgggaatggccactgcagcggagatgggagcagacagggcgacgggtcctgccggtgccacatggggtaccagggcccgctgtgcactgactgcatggacggctacttcagctcgctccggaacgagacccacagcatctgcacagtcaggaccggcctctccgattcttacccgccttgctgtctgtctcttggatgttggcgtggcgtgggccacgcatggatccgtggccggaacacgcacacccagccaggctacagctccagagtatggatagctgccttctctccagcctgtgacgagtcctgcaagacgtgctcgggcctgaccaacagagactgcggcgagtgtgaagtgggctgggtgctggacgagggcgcctgtgtggatgtggacgagtgtgcggccgagccgcctccctgcagcgctgcgcagttctgtaagaacgccaacggctcctacacgtgcgaagagtgtgactccagctgtgtgggctgcacaggggaaggcccaggaaactgtaaagagtgtatctctggctacgcgagggagcacggacagtgtgcagatgtggacgagtgctcactagcagaaaaaacctgtgtgaggaaaaacgaaaactgctacaatactccagggagctacgtctgtgtgtgtcctgacggcttcgaagaaacggaagatgcctgtgtgccgccggcagaggctgaagccacagaaggagaaagcccgacacagctgccctcccgcgaagacctgtaatgtgccggacttaccctttaaattattcagaaggatgtcccgtggaaaatgtggccctgaggatgccgtctcctgcagtggacagcggcggggagaggctgcctgctctctaacggttgattctcatttgtcccttaaacagctgcatttcttggttgttcttaaacagacttgtatattttgatacagttctttgtaataaaattgaccattgtaggtaatcaggaggagaa

SEQ ID NO: 1101 - DNA, 1247 bp, Homo sapiens
  source 1..1247: mol_type = genomic DNA
gctctacctcttggacttccaacttctgtgagtcaacatagtgcctcttgcatttaagaaacatctcatcacactcttatcagcattgagtttaaatttcaattagtgagaactgaggaaaaaccaagaagcctgcattccacagatcaagatgttgcagaggctccgcgttcttgtgagagtatgttccgagctctctgacctgtcaccatgggatcactcttttgaagagacttcctggaggacactgatgacatgtctgcaggaaaaatgatgagaactctcatcaccacacacccactgcccctgcttctattgccgcagcagctgctgcagctggtgcagtttcaagaggtggatacagattttgatttcccagaagaagataaaaaagaagaatttgaagagtgtttggaaaaattttttagtacagggcccgccagaccacctaccaaagaaaaagtcaaaagacgtgtccttattgaacctggaatgccactaaatcatatagagtactgtaaccatgaaatcatgggaaaaaatgtttactacaaacaccgttgggtggcagaacattacttccttcttatgcaatatgacgagctccaaaaaatctgttacaacagatttgtgccatgtaagaatggaattaggaaatgtaacaggagcaaaggtcttgtagaaggagtgtattgtaatttaacagaagcatttgaaataccagcgtgtaaatacgaatcactttataggaagggctacgtccttatcacttgttcatggcaaaatgaaatgcaaaaacgtattcctcatactataaatgatctcgtggagccacctgaacacagaagtttcctcagtgaggatggtgtctttgtcatatcgccctagcagagcgttctctgagagcttagggtgggaggaatatttctctccatactgatccttatagatcaaagttgagaatggtaattttgcttccattcactttaatcacccaccttcctttcttcctttcccaacacctcacaaaagcaccttaggctaggttcacagacggtgctctgagatgtggtctcatgcaggtcccctaagttagcatgccttgaatgtgttacggatacagatgcctgcagtggaaggatgaccagcaccaagaggaaaaggaaatggttgcctgaagtgtgctccaaagacacatccatgtgattctctagttcagcagaaagaataaaaattgcttcaatcta

SEQ ID NO: 1102 - DNA, 2172 bp, Homo sapiens
  source 1..2172: mol_type = genomic DNA
gccagaggggctaggatgagagacagagggtgtgatggtgggtgctgggagatgtagccgaccttggggctggtggctgggggagtgggtagcctgggaaaggccaggatgtggacggactggtatggcattgagcctgaagtggtccaacttggggttccccagtgcctaggaaagttgtccccttgaatgtcagtgtgaaggtgaaggaggaagcagatgcctgttcatatggaaacaaagacctggctgtgaagaggggaggcggacaccaaagtcctgacacttgggcgggacagaattgatctgtgagagactcatctagttcataccctaggtgaccctgggggtggcatgggggtagattagagatcccagtctggtatcctctggagagtaggagtcccaggagctgaaggtttctggccactgaactttggctaaagcagaggtgtcacagctgctcaagattccctggttaaaaagtgaaagtgaaatagagggtcggggcagtgctttcccagaaggattgctcggcatcctgcccttcccagaagcagctctggtgctgaagagagcactgcctccctgtgtgactgggtgagtccatattctctctttgggtctcaattttgccttccctaatgaaggggtaagattggactaggtaagcatcttacaaccatttgtggtcatgagagctggggtggggaaggattgtcacttgacccccccagctctgtttctaagtgctgaaagagctccaggctatgctacgggaggagaagccagctactgaggaaaagccagctactgagaaaaagcgggagtggtttaccattctcctcccccacctttcaccagagaagaggacgttgtcacagataaagagccaggctcaccagctcctgacgcatgcatcatgaccatgagacacaactggacaccagacctcagccctttgtgggtcctgctcctgtgtgcccacgtcgtcactctcctggtcagagccacacctgtctcgcagaccaccacagctgccactgcctcagttagaagcacaaaggacccctgcccctcccagcccccagtgttcccagcagctaagcagtgtccagcattggaagtgacctggccagaggtggaagtgccactgaatggaacgctgagcttatcctgtgtggcctgcagccgcttccccaacttcagcatcctctactggctgggcaatggttccttcattgagcacctcccaggccgactgtgggaggggagcaccagccgggaacgtgggagcacaggtacgcagctgtgcaaggccttggtgctggagcagctgacccctgccctgcacagcaccaacttctcctgtgtgctcgtggaccctgaacaggttgtccagcgtcacgtcgtcctggcccagctctgggctgggctgagggcaaccttgccccccacccaagaagccctgccctccagccacagcagtccacagcagcagggttaagactcagcacagggccagcagcagcacaaccttgaccagagcttgggtcctacctgtctacctggagtgaacagtccctgactgcctgtaggctgcgtggatgcgcaacacaccccctccttctctgctttgggtcccttctctcaccaaattcaaactccattcccacctacctagaaaatcacagcctccttataatgcctcctcctcctgccattctctctccacctatccattagccttcctaacgtcctactcctcacactgctctactgctcagaaaccaccaagactgttgatgccttagccttgcactccagggccctacctgcatttcccacatgactttctggaagcctcccaactattcttgcttttcccagacagctcccactcccatgtctctgctcatttagtcccgtcttcctcaccgccccagcaggggaacgctcaagcctggttgaaatgctgcctcttcagtgaagtcatcctctttcagctctggccgcattctgcagacttcctatcttcgtgctgtatgttttttttttcccccttcactctaatggactgttccagggaagggatgggggcagcagctgcttcggatccacactgtatctgtgtcatccccacatgggtcctcataaaggattattcaatgg

SEQ ID NO: 1103 - DNA, 7986 bp, Homo sapiens
  source 1..7986: mol_type = genomic DNA
atgcggcacggcgtcgcctgggcgctgctggtggccgcggccctggggcttggggcgcgcggggtgcgcggcgcggtggcccttgccgacttctacccgttcggcgccgagcgcggcgacgccgtcacccccaagcaggacgacggcggctcggggctgcggccgctctcggtgcccttcccgttcttcggtgccgagcactccggactctacgtgaacaacaacgggatcatctccttcctgaaggaggtttctcagttcaccccagtggccttccccattgccaaggaccgctgcgtggtggcagccttctgggcagatgtggacaaccggcgtgcaggcgacgtgtactaccgggaggccaccgacccagccatgctgcgccgagccacggaggacgtcaggcactacttccccgagctcctggacttcaatgccacctgggtttttgttgccacctggtaccgagtgaccttctttggaggcagttcctcatcccctgtcaacacattccagactgtgctcatcacagacggcaagctctccttcaccatcttcaactatgagtccatcgtgtggaccacaggcacacacgccagcagcgggggcaacgccactggcctcgggggcatcgcagcccaggctggcttcaacgcaggcgatgggcagcgttacttcagtatccccggctcgcgcacagcagacatggccgaggtggagaccaccaccaacgtgggtgtgcccgggcgctgggcgttcagaatcgatgatgcccaggtgcgcgtggggggctgcggccatacaacgtccgtgtgcctggccctgcgcccctgcctcaacggcggcaagtgcatcgacgactgcgtcacgggcaacccctcctacacctgctcctgcctctcgggcttcacggggcggaggtgccacctggacgtgaacgaatgtgcctcccagccctgtcagaatggtgggacctgtactcacggcatcaacagtttccgctgccagtgcccggctggctttgggggacccacctgtgagacagcccaatccccctgtgacaccaaagagtgtcaacatggtggccagtgccaggtggagaatggctctgcggtgtgtgtgtgccaggccggatacaccggagcagcctgcgagatggatgtggacgactgcagccctgacccctgcctgaatggaggctcttgtgttgacctagtggggaattacacctgcttgtgtgccgagcccttcaagggacttcgctgtgagacaggagaccatccagtgccagacgcctgcctctcggccccttgccacaatgggggcacctgtgtggatgcggaccagggctacgtgtgcgagtgccccgaaggcttcatgggcctggactgcagggagagagtccccgatgactgtgagtgccgcaacggaggcagatgcctgggcgccaacaccaccctctgccagtgccccctgggattctttgggcttctctgtgaatttgaaatcacagccatgccctgcaacatgaacacacagtgcccagatgggggctactgcatggagcacggcgggagctacctctgcgtctgccacaccgaccacaatgccagccactccctgccatcaccctgcgactcggacccctgcttcaacggaggctcctgcgatgcccatgacgactcctacacctgcgagtgcccgcgcgggttccacggcaagcactgcgagaaagcccggccacacctgtgcagctcagggccctgccggaacgggggcacgtgcaaggaggcgggcggcgagtaccactgcagctgcccctaccgcttcactgggaggcactgtgagatcgggaagccagactcgtgtgcctctggcccctgtcacaacggcggcacctgcttccactacattggcaaatacaagtgtgactgtcccccaggcttctccgggcggcactgcgagatagccccctccccctgcttccggagcccgtgtgtgaatgggggcacctgcgaggaccgggacacggatttcttctgccactgccaagcagggtacatgggacgccggtgccaggcagaggtggactgcggccccccggaggaggtgaagcacgccacactgcgcttcaacggcacgcggctgggcgcggtggccctgtatgcatgtgaccgtggctacagcctgagcgcccccagccgcatccgggtctgccagccacacggtgtctggagtgagcctccccagtgccttgaaatcgatgagtgccggtctcagccgtgcctgcatgggggctcttgtcaggaccgcgttgctgggtacctgtgcctctgcagcacaggctatgagggcgcccactgtgagctggagagggatgagtgccgagctcacccgtgcagaaatggagggtcctgcaggaacctcccaggggcctatgtctgccggtgccctgcaggcttcgttggagtccactgtgagacagaggtggacgcctgcgactccagcccctgccagcatggaggccggtgtgagagcggcggcggggcctacctgtgcgtctgcccagagagcttcttcggctaccactgcgagacagtgagtgacccctgcttctccagcccctgtgggggccgtggctattgcctggccagcaacggctcccacagctgcacctgcaaagtgggctacacgggcgaggactgcgccaaagagctcttcccaccgacggccctcaagatggagagagtggaggagagtggggtctctatctcctggaacccgcccaatggtccagccgccaggcagatgcttgatggctacgcggtcacctacgtctcctccgacggctcctaccgccgcacagactttgtggacaggacccgctcctcgcaccagctccaggccctggcggccggcagggcctacaacatctccgtcttctcagtgaagcgaaacagtaacaacaagaatgacatcagcaggcctgccgtgctgctggcccgcacgcgaccccgccctgtggaaggcttcgaggtcaccaatgtgacggctagcaccatctcagtgcagtgggccctgcacaggatccgccatgccaccgtcagtggggtccgtgtgtccatccgccaccctgaggccctcagggaccaggccaccgatgtggacaggagtgtggacaggttcacctttagggccctgctgcctgggaagaggtacaccatccagctgaccaccctcagtgggctcaggggagaggagcaccccacagagagcctggccaccgcgccgacgcacgtgtggacccggcccctgcctccagcaaacctgaccgccgcccgagtcactgccacctctgcccacgtggtctgggatgccccgactccaggcagcttgctggaggcttatgtcatcaatgtgaccaccagccagagcaccaagagccgctatgtccccaacgggaagctggcgtcctacacggtgcgcgacctgctgccgggacggcggtaccagctctctgtgatagcagtgcagagcacggagctcgggccgcagcacagcgagcccgcccacctctacatcatcacctcccccagggatggcgctgacagacgctggcaccagggaggacaccaccctcgggtgctcaagaacagaccgcccccggcgcgcctgccggagctgcgcctgctcaatgaccacagcgcccccgagacccccacccagccccccaggttctcggagcttgtggacggcagaggaagagtgagcgccaggttcggtggctcacccagcaaagcagccaccgtgagatcacacgtccctggcaactgttcagaaaacccctgtcagaacggaggcacttgtgtgccgggcgcagacgcccacagctgtgactgcgggccagggttcaaaggcagacgctgcgagctcgcctgtataaaggtgtcccgcccctgcacaaggctgttctccgagacaaaggcctttccagtctgggagggaggcgtctgtcaccacgtgaaacaaagtaagagtcagacactggagaaatcttaaggatttaagacgttcttgttacactccaccaacctcacgagtttctaacacccaggaagatgaggtctaaaaactggatgaaaaaggacaccctgagaaaaggtcctagctggagtcagtcccctctgtgacctctctcctcaggcctctagaggacagatggccaggcctgtgcacacaccagcccaccctgagagacccctctgggaccaaccacctgtgagtcctgcgatgcgtttaagcagcctgtgccctcacccaagctgcagttcctgaaggtgtagtctgtgtctctgcggatgagatgacagctcgccattccccggaatcagtgaggctgtcagtcagccacgcttctgcagtatgcagaaacctgttcttagactccaaagccagagaaagaattctcccttcgaggcccaacaaattgagaaggaactgtgatggaccacttccaaaacagagacgggggcaggggctgaagggcagagaccaggtgatgtcagaaggaaagccgggttgcagacacagccgcccctgctctggtcctccagcgtgtttatgacgctcgtgcaggtcgacgagccatcctatggactagttaacactaaggtggagttcagacttttttagacaacggcgcgactggcagcctttctctatcaagggtcagacggtaaacgttttcagctttgcagaccagaggtccctgtggctacagtagcgcagacacagccacaggcatgtcattgaatggctgcggctatgttccaataaaaacttatttacaataacaggtggtggccaaattggcccatgggccttatttggtgaaccctgttctatgagatcacctaggcttcagccttaaacagtggaagccatcccctgaatgacaagtcacaagggtatcaaagaaagacccctgaattttcatggaaaaagctattcagacccctgcttggaaagctaaggcacactgccacgaagcagcaaggacgccttacaagtctcagtgcaacagagatggacacctgggctgggctggacaatgtttaaggttccttttagtccatgactcaagtgatactgttttaggctatcaggtagtaaacacgatcttagacatccccatctttgtaagcagaacagtacggcacttcaccacatctgcttcccaccatgcttctaagcagctgtcttccccctgctaatgttacaaccaaagcagccaccccacctcctctcgtgttgagcctcacgaccgctgacccagctggaaagccagcgccctgccgcgtcaccctgactctgctcagagccagcattccagccacaaagagggcctccttcctttcctctttcataaaaatgttttttgaagagttagagtatattttaggctttttatctttattaaaatttcatgtgcatgtgtctgtgtattctgcaatttgtcattttcagaaagaaggaacaggcaattcgcgaagtttcacctgtactcccgagctgttccccaggctccagacccacttgagagcagaaggtggagctcaatgaagggtctcgagctcagcgaagggtcactgggtgaactgagagaaaccacgttcacaaacgcgtactgcggacttcctgccgccctgggacctgtcactgtttgtccatgtaagctacagcattactagcagatgctaagatcgagtgatatcactggaaaagtaggtgaatcctactaggaaactttctactccctactaggacctcaagcccctcagccacacagcaaatgctaatatgctccagtgttagcttagaagccttgtgtcaacaagaactggctcctgagtcccaagcttggtgccacacagcaaatgctaatatgctccagtgttagcttagaagccttgtgtcaacaagaactggctcctgagtcccaagcttggtgccacacagcaaatgctaatatgctccagtgttagcttagaagccttgtgtcaacaagaactggctcctgagtcccaagtgctgtcacaggacttgcccattgggatgttttccacattaaatatcaagtaaaaagacttcctggtgctcaggaattacagttcgttcttgaaacattccaaagaggccaccacagcttttcccatgtggcttcttttaaaaactcaaatggcttccttgaaaatactcaaagtccacccaaggaaattagtaataatagaatcagaaaactgtcaggagcataaagatttctgtatcaaaatgaaagaagcaatcctgagttgctgaattacccatctgctaatgaaaccgggatggactgatcatctaaccaagtgcagactgaggattctacttagtcctccgactgggtacaacaacagcctaggttctagggagggtggcagtgaccgggatgccacaatggaagagaaaatgaaaacactggcacagtgaaatgtctcatttccaaacagttttgcctatggccaagcaaggcaataaagacaaactctcccttttccccattgcgtgtgggctgccaggtacaagtaagggaatctttgctgtgcccactgtcctccagtagagaacccaacaggcaagggccccactcaggtatcagctcacctcctgcacctccccttagcaggaactccttccactggcaaaggactgccactgccatctgactcaactgtggcgatgtggacggagtcaccgagctgcttttcttttgcaaaacaaaagtctttttctttgcagtcacgctgtaagacgaggctgctggagaaaacaaaagcacctagatttcagtgctgaatccccacaattgcatgcagctcacacctaccaggggtattccagtgcataggggaaaggaacccggctgaaaaaccagctccttatttttcttttaaataaaataatacgatcctaagtccatttaccatctgaagttgtcacgagtgaacagtcacattactgttgtggaccaggccttagatgagtttctcaggctcagcactgacattctgggccggatcatcctctcttgtgggaccatcctgtgcactgcaggatgtttcacagcacccctggcctctacccactagaatcctacaatctaccagatcctaggatctagttgatcctagaatgctaccaaggagacttgaattttggtcccatcatcaaaaatgccttctgcatcaatcctatgccagtttcccctaaaagagggctaactggaatgttctaggatgtaccaatcctccaggaccctcttagagctcatgccatcagagacaggcctctatctcagggatcaccccggctgacatcaaattcctcttctcttttcccaacatttcaaattgttcttcggactcattgagttccctaaggtgacacgcccccccccccccccacacccaccttggggggtcacggattgctccctgtggccctggcttcagcccacctgctccatgaccctatgctcttctcctctggttctcgaagctgtctgtaaccagggcaggggagataactgtatgggaccattccctggcctccacctgccccagcactctccaggccagcacagtctggcactacagactacagggccggagacaccaggcttggaagtgaccactggccaagagctgacataaaagccaacttccccaaacaggaagggcctgttcttcacaaagataaagaaaactgccagcattttgctggccttaagaagccatgcaaaattaaccagtacatcatgaattaacttcttttactctgctgtgcactgaataccattatgaagcaatatacttttggattaaaaataagcatttttgtggaaaatctgctacatgttttcataaaataaagtgctatgatgtactaaaa

SEQ ID NO: 1104 - DNA, 1346 bp, Homo sapiens
  source 1..1346: mol_type = genomic DNA
gcgcagcagccaggagcgcccacggagctggacccccagagccgcgcggcgccgcagcaggtgggtgacaccccgccccggccggccggagacccgagcccatcgccgtcagccagccagggccgcgcgggttccaggaaggatgttacctttgacgatgacagtgttaatcctgctgctgctccccacgggtcaggctgccccaaaggatggagtcacaaggccagactctgaagtgcagcatcagctcctgcccaaccccttccagccaggccaggagcagctcggacttctgcagagctacctaaagggactaggaaggacagaagtgcaactggagcatctgagccgggagcaggttctcctctacctctttgccctccatgactatgaccagagtggacagctggatggcctggagctgctgtccatgttgacagctgctctggcccctggagctgccaactctcctaccaccaacccggtgatcttgatagtggacaaagtgctcgagacccaggacctgaatggggatgggctcatgacccctgctgagctcatcaacttcccgggagtagccctcaggcacgtggagcccggagagccccttgctccatctcctcaggagccacaagctgttggaaggcagtccctattagctaaaagcccattaagacaagaaacacaggaagcccctggtcccagagaagaagcaaagggccaggtagaggccagaagggagtctttggatcctgtccaggagcctgggggccaggcagaggctgatggagatgttccagggcccagaggggaagctgagggccaggcagaggctaaaggagatgcccctgggcccagaggggaagctgggggccaggcagaggctgaaggagatgcccccgggcccagaggggaagctgggggccaggcagaggctgaaggagatgcccccgggcccagaggggaagctgggggccaggcagaggccagggagaatggagaggaggccaaggaacttccaggggaaacactggagtctaagaacacccaaaatgactttgaggtgcacattgttcaagtggagaatgatgagatctagatcttgaagatacaggtaccccacgaagtctcagtgccagaacataagccctgaagtgggcaggggaaatgtacgctgggacaaggaccatctctgtgccccctgcctggtcccagtaggtatcaggtctttctgtgcagctcagggagaccctaagttaaggggcagattaccaataaagaactgaatgaattcatccccccggccacctctctacccgtccagcctgcccagaccctctcagagg

SEQ ID NO: 1105 - DNA, 2921 bp, Homo sapiens
  source 1..2921: mol_type = genomic DNA
aagtaattgtccgtgtcaggaaggtaggcgtgccaagccgcggctctgcggagaaaccacgaccaccgcggccgccggaaacccaaagcgctccagagcgtccccgggtggccgggcagcaccagggacagcgcccgggactccactggggaccggctcctgggcttcccagcgtcgcgggtagaggtacagctgctccgtgtgccgcaggctccagattctcgccaccccacccctccctcagaaactcggactgctctcgtctgccgtgtggttctcttttcttccgaaaggccagtgtcttatctctccacttcaagtccagaggacttgctcagtctcctccccttaagtcatttccaccatcctcaggcagctgtgggaagccgagagtcctggactgttcgtccgggtgccagcgctggcagtcccagtccgtccggtgcagcagcccggcgcattcccctctctccctccctcttgctctccctccctttctgtcttcctctctttcctcctctactgctccctccctctcttgcctcttaagtttcctgcaccgtgaatccaactgtgccaagccttggctcccgcgaaccaatcctgagcgcgacccgggcactgggacggcgactccgccaaagctggacgaggcagccggacccgtctgcgctcgagcatggagacggagcgcctgggagggcacgtccggggcgctggagacgccaggcccgagtagcttctccatggagcctgcccagagcggtcccttctcgcaggattcgccccaagtcctgtgcggctgctgagagcgctccttgctctgtaaagtggatgtcaggtggatctatgtttctgaaggaacaaagactcaaagaaggcaccgccaaggaagtttgagacgcgggagaatgcaggctgcgtgctggtacgtgcttttcctcctgcagcccaccgtctacttggtcacatgtgccaatttaacgaacggtggaaagtcagaacttctgaaatcaggaagcagcaaatccacactaaagcacatatggacagaaagcagcaaagacttgtctatcagccgactcctgtcacagacttttcgtggcaaagagaatgatacagatttggacctgagatatgacaccccagaaccttattctgagcaagacctctgggactggctgaggaactccacagaccttcaagagcctcggcccagggccaagagaaggcccattgttaaaacgggcaagtttaagaaaatgtttggatggggcgattttcattccaacatcaaaacagtgaagctgaacctgttgataactgggaaaattgtagatcatggcaatgggacatttagtgtttatttcaggcataattcaactggtcaagggaatgtatctgtcagcttggtaccccctacaaaaatcgtggaatttgacttggcacaacaaaccgtgattgatgccaaagattccaagtcttttaattgtcgcattgaatatgaaaaggttgacaaggctaccaagaacacactctgcaactatgacccttcaaaaacctgttaccaggagcaaacccaaagtcatgtatcctggctctgctccaagccctttaaggtgatctgtatttacatttccttttatagtacagattataaactggtacagaaagtgtgccctgactacaactaccacagtgacacaccttactttccctcgggatgaaggtgaacatgggggtgagactgaagcctgaggaattaaaggtcatatgacagggctgttacctcaaagaagaaggtcacatctgttgcctggaatgtgtctacactgctgctcttgtcaactggctgcaaaatacactagtggaaaacactctgatgtaatttctgcccagtcagcttcatccctcagtataattgtaaatcatcacagattttgaattcacacctgaagacatgctctcacatatagaggtacacaaacacaccgtcatgcacatttcagcttgcgtctatcatgattcctgttgagagggctttcattgtctgactcataatggttcaggatcaactatcatcaaacggaaggattaactagacagagaatgtttctaacagttgctgttatggaaatctcttttaaagtcttgagtacatgctaatcaataatctccactcatgcattcctactgcttggagtagctgtactggtaaatactactgtaggagtatctgcttgttaaaatggaaaaatgtgtctttagagctcagtattctttattttacaaacacaacaaaatgtagtaacttttttccagcatacagtaggcacattcaaagtggtccaagatggctcttttttctttgaaaggggcctgttctcagtaaagatgagcaaacatttggaatttacatgtgggcagacattgggataacaactttcatcaccaatcattggacttttgtgaagttgacaccagctaaggctgcttaaaataagttctgatcattatataagaagggaaatgcctggcagacaccatgtaagttataagtgtctgtcttatctttactacacatattgtaacaaattcaatatcctagtcttcatttgtatgaatggtttgtattgtacatagtttaaccaagtgttatttgagctgcttattaatattaacttgtacttgtctctctgcttgttattggttaagaaaaaaggatatgaggaattcattttatcaatgtagctgtgaaggccattaaaaagacaaacttaatgtacagagcatttattcagatcaagtattgttgaaagctatacatatacaacattacagtctgtctgtatttagatattttatttctggaaaaaatgaaatgtacataaaaataaaacacttaaagttgagtttcaata

SEQ ID NO: 1106 - DNA, 5435 bp, Homo sapiens
  source 1..5435: mol_type = genomic DNA
ggcgcgctcgcatctggcgctgtccggagcccgctcgcgacgcacagggacgggaggcccggtttccacgggagaggctgcggactgcgggccccgtcccgaggccgggggagtgggagacacccggcgacccccgagaggcgattctggcagtggtggcggtggcggtggcggtggcggcctactcgccccctggaagcaccgccccgcctgggtggcgcgcgcgccggctcctcctcttcccctccgccgcggcccgccccggcccgcaaacccaaacactccaggcgcccgcccgccgcgcgtgattctcgcctcgccgcagcccagccctgcgcgccttgcccggcggcccccgcccggccgctccgggcccctggccccgcggagcgatgctgctgctggctgccgccttcctcgtggccttcgtgctgctgctgtacatggtgtctccgctcatcagccccaagcccctcgccctgcccggggcgcatgtggtggttacaggaggttccagtggcatcgggaagtgcattgctatcgagtgctataaacaaggagcttttataactctggttgcacgaaatgaggataagctgctgcaggcaaagaaagaaattgaaatgcactctattaatgacaaacaggtggtgctttgcatatcagttgatgtatctcaagactataaccaagtagagaatgtcataaaacaagcacaggagaaactgggtccagtggacatgctggtaaattgtgcaggaatggcagtgtcaggaaaatttgaagatcttgaagttagtacctttgaaaggttaatgagcatcaattacctgggcagcgtgtaccccagccgggccgtgatcaccaccatgaaggagcgccgggtgggcaggatcgtgtttgtgtcctcccaggcaggacagttgggattattcggtttcacagcctactctgcatccaagtttgccataaggggattggcagaagctttgcagatggaggtgaagccatataatgtctacatcacagttgcttacccaccagacacagacacacctggctttgccgaagaaaacagaacaaagcctttggagactcgacttatttcagagaccacatctgtgtgcaaaccagaacaggtggccaaacaaattgttaaagatgccatacaaggaaatttcaacagttcccttggctcagatgggtacatgctctcggccctgacctgtgggatggctccagtaacttctattactgaggggctccagcaggtggtcaccatgggccttttccgcactattgctttgttttaccttggaagttttgacagcatagttcgtcgctgcatgatgcagagagaaaaatctgaaaatgcagacaaaactgcctaatcttcttaccccttggaagaagactgtttccaaataatttgaacagcttgctgctaaatgggacccaatttttggcctatagacacttatgtattgttttcgaatacgtcagattggaccagtgctcttcaggaatgtggctgcaagcaaggggctagaagttcacctcctgacagtattattaatactatgcaaatatggaataggagaccatttgattttctaggctttgtggtagagaggtgaaggtatgagaattaatagcgtgtgaacaaagtaaagaacaggattccagaatgatcattaaatttgtttctatttattcttttttgcccccctagagattaagtccagaaatgtactttctggcacataaagaaatcttgaggactttgtttaaaccttccataaaaaaacaattttcggtttctcgggttctctctctctctctctctgtctctctgtctctctgtctctctgtctctctgtctctctgtctctctctctctctctctttctttctttgtgtattttattcaagatgagttggacccattgccagtgagtctgaatgtcactgacagccctgtgttgtgctcaggactcactctgctgctggtggaaactcatggcttctctctctctttgatcccataaagctacgagggggacgggagagggcagtgcaatgggaagtaaagagatattttccagtaggaaaagcaatgctttcttgtctttagactcaaatgcttagggaacgtttcatttctcattcatggggaaaggcagcctccttaaatgttttctgaagagcggtaaaatctagaagcttaagaatttacagttccttcaataaccatgatgacctgaagttcacctatcccattttagcatctacttgtttttcccatctcttcctttccaattttgcttatactgctgtaatatttttgtaaaaaaaaaaaaaaaggaaaaaaaagaccagctaaaattttcgacttgactttttaacttaactcatgaattaattaaagcaaatgaaaaaattaaaaagtgtgactttttctcggagcatatatgtagcttttaggaaaggctgatgatggtataaagtttgctcattaagaaaaaaagacaaggctgattttgaagagagttgcttttgaaataaaatgatcacctgttctttatgtgactctcccactgaacctgcagacattatttttataccacatgctaaggaagcccactcatctaactctgtagccctggaaaccctcttggcccctgaatgttgtttccaggttataggatctgtgttcattagtggattttgacagcaagtgcctctgatgagttttagccaacattccccgttgcatcctgctcattgttcacactcctctgacttgaggagagctgccttcaccttgatcttgtaacctgtcttccttgcatatacggtagcacattccagatcacttcggtgagaaaagacctctgtttttgaagaggaaactttcttaaattgtaaaataaaacttaaaaaacataaaaactctatacaaaaattgaagacctaaaaattatagcataccttttttttgctcttgagtttttgaagctcttgactttaaatgacttaactttttaaaaaataagatgttttatggctttaacccatgtttttattaagatctgagaatagcatattttaaacactgatagatacagaagaaattattatttaatatataaattgcttggaatgatttcattgcagcttgtaaggatgggttgatgccagaatggtttcataaatctttcagtcttacagagccaaagtttgcagattatatcgagttgcgttgtgcagctgctaaaatggaatcatagctttttataatttgcagaaaacaattgcattaatgtctggatgtttctcagttttattcttttctcataaatgttcctcgaatgttggcaccttctactgctgatctatattagaatctagtccaagaaagtgtctgatttaataacattaaatagttatttcaatatattttttcaaattatcctcatagaacctgttgcctccagtgagatggtaatctactacccgaataaatttaagagcacctgttgagagcccctgttttgcggtagaagacaattgtccctatcccaatttccactgaaatatgagagcagatttgcagagaccatcatgtcagagaagaaatttccttgtcagagatgttaaagggctacagtcccttagcaaagaaacttcgaaatctaagttggtttgtgtttttctaaatttgataccgtaattcatttggcagcaaaatctgacttgaactgatgtgagagtattgtactttatatttatgctacttcattgtgacttaattttccctgaagaaatatccatggatttgattataggttttcccttagatgctgtggaggtgttttgtaatattcaaaatatgcccatattgcctttttaaaaccccaaagattatgaattctgaaacacatccagcccagcgggttttggataaggggttgtaggcatttaagcagcctcacataatgggctgacttcatccaaaacatgaaaatattacaaggcaaattctattttttatattttttggttcaatgcttgaacaacttgtttttctgctgggggaagaaaaaaagaaccaaccctgagtgtgattgttacggaaactaatgactttgtttttaaaggatcacattgattcaacaccttctattggacccagaagtgcgtaaatattacctatggtagtaaacgtttaattatcattcagtttaaatgttggccttctgtatgtagccaagaacagctcattttgtgaatttcagtttttaagtggctgctttttgatttggttgtattattttattataatgtatttgcaagtatattaaaaaattaacattgagccataaaaatccccaaatatgttcaaggacttcataattgaaaaatatatagaaaacaatccttacttctttttacaaaaacaaaatcatgggaattattcttttctatatatttagttataaatctttctctgggccgggcgtggtggctcacgccagtaatcccagcactttgggaggctgagacaggcgaatcacgaggtcaggagttcgagaccagcctggccaacatggtgaaaccccgtctctactgaaaatacaaaaaattagctggacacggtggcaggcgcctgtgtgtggcgggcgccagctactcaggaggctgaggcaggagaatcgcttgaacccaggaggcagaggttgcagtgagccaagattgcgccactgcactccagcctaggtgacagtgcgagactctgtctcaaaaaaaaaaaaaaagaaaaaaaatctttatctggatctgttaaaccatatattattgatcattgcaagtgaaattttgagagattgtttctagtatttaggtgatgaaaacatttggtaatattgctttggttcaaagaattttatgtctttatctttctagaagaaagcaattatatatatatttttgctaaattacataaacatttaattacatcaggttctaatttaaacatgtattactcacttgaggccacttttaaatattcatactctttgacataagatgctttgtatatttctcatttcttttagttcttagtaagtcagctttaaaaagtacctgccaaccagaaccttccatattctggactaaatcttgctcttcggattatacttcagtgcagtaactgtggatttgcaattttgaaggggagatagtagctattatattttacacttgcttgatgtgataactctaaagactttttaactgataaaagcgcacatggctattttgatacacaaagttgtgtttgctactttagaagcttttgtggcagaattgtaatctaattttcataccttgtatttctgaatcacaacaaaaaaataaatggggaacaagactta

SEQ ID NO: 1107 - DNA, 1737 bp, Homo sapiens
  source 1..1737: mol_type = genomic DNA
cgaatacaaagagccatacgaccttcggtttcaggtttagctgtgcctcccagtgactataatgacaaggaagctgtaaatgtatttgagttaagcttttgcgagaaaccctacagcttggggcctgggctcctctgaccatcctcattgagaaaggaaagtgagtccagagaagttgatgcttcctacctgttggagcggcccagcagtgtaagcgtggttgttactgccccatccgccatgtccttcagtgccaccattctcttctcccctcccagtggcagcgaggccagatgctgctgctgcgcctgtaagagtgagactaatggaggcaacacaggctcccagggtgggaatcctcctcccagcacccccatcacagtgactggacatggcttggctgttcagagctcagagcagctcctgcatgttatctaccagcgggtcgataaggcagtgggtttggctgaagctgctctgggtcttgccagggccaacaatgagttgttaaaacgtctccaggaggaagtgggtgacctgaggcaagggaaagtgtccatccctgatgaagatggggaaagccgggcacatagttccccacctgaggagcctgggcctctcaaggaaagtcccggggaagcctttaaggctctgtctgccgtggaagaggagtgtgacagcgtgggcagcggcgtgcaggtggtgattgaggagctgcggcagctgggagcagcctcagtggggcctgggcctttgggcttcccagcaactcagagggacatgcggctcccagggtgcacgctggctgccagcgaggcggcccccctgctcaatcctctggtggatgattacgtggcctctgagggtgcagtacagcgagttctggtccctgcttatgccaagcaactctcaccagccacacaactggcaatccagcgggcaaccccagagacaggaccagaaaatggaaccaagctgccaccaccccgccctgaggacatgctcaatgccgctgctgcgctggacagtgccttggaagagtcaggccctgggagcactggggagctgagacactctctagggctgaccgtttccccatgcaggaccagaggaagtgggcagaagaactccaggcgcaagcgggatcttgtactctctaaactggtccacaatgtgcataaccacatcaccaatgacaagagattcaatgggtctgaaagcatcaagtcctcttggaatatttcagtagtgaagtttcttctggaaaagctcaagcaagagctggtgaccagtccccacaattacactgataaggagctaaaaggagcctgtgtggcctacttccttactaagaggcgtgagtaccgcaactccctgaacccctttaaaggcctgaaggaaaaagaggagaagaaacttcgaagtcgccgatatcggctttttgccaaccgatccagtatcatgaggcattttggacctgaggaccaacgtctgtggaatgatgtgacagaggaactgatgtcagatgaagaggacagtcttaacgagccagacagactgccttctgctgaagcccagctccttccaccagaactttacaatcctaatttccaagaagaggaagatgagggaggggatgagaatgcacctggctccccatcttttgaccaaccccacaaaacctgctgtcctgacttgaactcattcattgaaatcaaggtggaaaaggatgaataa

SEQ ID NO: 1108 - DNA, 1230 bp, Homo sapiens
  source 1..1230: mol_type = genomic DNA
ggagctccggctgcgtcttcccgcagcgctacccgccatgcgcctgccgcgccgggccgcgctggggctcctgccgcttctgctgctgctgccgcccgcgccggaggccgccaagaagccgacgccctgccaccggtgccgggggctggtggacaagtttaaccaggggatggtggacaccgcaaagaagaactttggcggcgggaacacggcttgggaggaaaagacgctgtccaagtacgagtccagcgagattcgcctgctggagatcctggaggggctgtgcgagagcagcgacttcgaatgcaatcagatgctagaggcgcaggaggagcacctggaggcctggtggctgcagctgaagagcgaatatcctgacttattcgagtggttttgtgtgaagacactgaaagtgtgctgctctccaggaacctacggtcccgactgtctcgcatgccagggcggatcccagaggccctgcagcgggaatggccactgcagcggagatgggagcagacagggcgacgggtcctgccggtgccacatggggtaccagggcccgctgtgcactgactgcatggacggctacttcagctcgctccggaacgagacccacagcatctgcacagcctgtgacgagtcctgcaagacgtgctcgggcctgaccaacagagactgcggcgagtgtgaagtgggctgggtgctggacgagggcgcctgtgtggatgtggacgagtgtgcggccgagccgcctccctgcagcgctgcgcagttctgtaagaacgccaacggctcctacacgtgcgaagatgtggacgagtgctcactagcagaaaaaacctgtgtgaggaaaaacgaaaactgctacaatactccagggagctacgtctgtgtgtgtcctgacggcttcgaagaaacggaagatgcctgtgtgccgccggcagaggctgaagccacagaaggagaaagcccgacacagctgccctcccgcgaagacctgtaatgtgccggacttaccctttaaattattcagaaggatgtcccgtggaaaatgtggccctgaggatgccgtctcctgcagtggacagcggcggggagaggctgcctgctctctaacggttgattctcatttgtcccttaaacagctgcatttcttggttgttcttaaacagacttgtatattttgatacagttctttgtaataaaattgaccattgtaggtaatcagga

SEQ ID NO: 1109 - DNA, 3112 bp, Homo sapiens
  source 1..3112: mol_type = genomic DNA
gcgccgcgagcccggcgaagtcctcagcccgccccgcttgcccactccccacttcccgagccggctccgtgtttagggagggcagtgatcacgcaagccggagcggcgggctgacgttggacgagctgccaggtagctgaaagcaggcagccaggcagccgagacacttcccagcgattccagcctgggctccgcaggaagcctcgctgaatcccagccagctggttctaaccttccagaatcgcaatcccttctccccacagccagccctcgccaagcaagcagcaggatgtttgcagtgtcgcgcccagggctctgagactgagcctgccatccactcgcacgcctttctttcagggcttttcggctgttggctacactgatgtgacccccctccctttttggaatgatggggatctttttggtgtatgttggatttgttttcttttccgttttatatgtacaacaagggctttcttctcaagcaaaatttaccgagtttccgcggaacgtgacggcgaccgaggggcagaatgtggagatgtcctgcgccttccagagcggctccgcctcggtgtatctggagatccaatggtggttcctgcgggggccggaggacctggatcccggggccgagggggccggcgcgcaggtggagctcttgcccgacagagacccggacagcgacgggaccaagatcagcacagtgaaagtccaaggcaatgacatctcccacaagcttcagatttccaaagtgaggaaaaaggatgaaggcttatatgagtgcagggtgactgatgccaactacggggagcttcaggaacacaaggcccaggcctatctgaaagtcaatgccaacagccatgcccgcagaatgcaggccttcgaagcctcgcccatgtggctgcaggatatgaagccccgcaagaacgtctccgcagccatccccagcagcatccatggctctgccaaccaacgaacgcactccacctccagccctcaagtggtagccaaaatccccaaacaaagtccacaatcaggtgcgaggatagctacaagccatggactttctgtcctgcttcttgtttgtggctttgtgaagggtgctttgctttaatctaaagtgctgacttttttccaatatcactttctcttcttaaagcaaagagcaaatcgcctgtaaaatctacggagcggacagcaaagttgaccctaaactccaagcaccaccctgcacccactgtactctaattcactacacaaggagcgcctgcttccggaagcataaatgaagaggctatcacatgctttgttgatcatattttctttggcaaaacactgatcttttattttaagagaattaacgtgaagtgatagaacgttttctaatagcaagatctattttttcccttttctttcggcgactaaaatcatctcactgactgctcaagggttggcctgaatgtcatcaggatagggaatatttactatggataccactaatttcctactaaaggacccagcatcttcaggaagcaaacagagatcaaaaggctacagaacagaagctatcatcagacaaaaccccctttttaggggaagaacaaaactatcaacactgcaagtcaacaaggaggacattactttaaggaataacatgagaaagaaatttttttattttcccctttttttcttggatttttcttctttttcttgattacagttcttgttcaatggtggcaagtgctggttatggccaatctccgtcaatcctaggaggtttatagaactacattttgagtgttctatatttcagtgtattttaattcattttgcaattcctgtgtatgcaaacctgataaattctgtaaattgcttatagtatgtgtgctataacttcaaagtagatgtactgcgaccctcatgcaagctgatttttatcattatatatataaatatatacttaagaatatctgtgtgttgggccaatgaccaactttttttgacgaagcatttgtttttcgttgataattcatacactgcgtgaattttgtaattcattgtttcacttccacaggtttgacagctgcagatggtctctattgtcctctgcttcattctggaaagtgcatattcaaaattgtatcagtctctgatcgatgaattaattttgttatgtctgtgctaagttggaatttactatgttcctttatacatggtgtttattgaggtttgagagtctcttgactgtgaagaatgtacactgtctggttttgacagctatttctgtattattatcattataatcttgtcaaatagaaatgttgcttctagaaaatttgcctaggaggcgaatgtggggaaggtgaagcactcaccataattccctaaattcatgttagaacatttcttgctatggttaaaaatgctgcttcctttgacctttatgaatttctgtacctttgtcattctgttacctttgtcattctgttatttgcgctaattatattttaatgtctcctaattaaaaattaaaatttggttgttggctaaatacaatatgcaaaagatgatggcaggtccccgactaaagaagattaatgtgttcagttttcactggttaagtgaattataattttaaatattccattcttatttatgtctttatgataattcagactattttattttgaacctgttttctactctggcaaagaaagataggcagaactattagtgttccatatacattatggaatagataaagcttgagagataaatgacctaagttttccttccagagagactcttccattttctctcattacaaaaccagaagatcagctatgtggggccatcagctcccagcctaaggtcctataacccgaagcttgaaggcaatcagtacctctgcttttcaaaggtaaatgcattcattttctttgattcagttataagcaagtatatattttcataatattcttgacattacctgagaaataatacttcatgctaaatcttttactgccacttttctcattcatttggtttatcatttcagtttaatgagaaaaattaataaaggttttgattgcactattttattaaccta

SEQ ID NO: 1110 - DNA, 600 bp, Homo sapiens
  source 1..600: mol_type = genomic DNA
acaagcacatgaacatgaagccggccactgcctctgctctgctcctgctcctgctgggcctggcctggacccaggggagccacggctggggtgcggacgcgtcatcactgcagaaacgtgcaggcagagacgatcagaactacaattacaaccagcatgcgtatcccactgcctatggtgggaagtactcagtcaagacccctgcaaaggggggagtctcaccttcttcctcggcttcccgggtgcaacctggcctgctgcagtgggtgaagttttggtaggcaatttcttgcaaccaccaccgaggccccgaaaagcactggtcgtcagggagctcctccccttggcccccagcctgtgccagccctggcccggctgccacacctctgtttcctaggctggggacccagcttgtctctccttgtttcttcccactgcactgtggtgcttcagtggccaccagcctcgtcacatacaccagcatctttctgtacctcctccctttggtgacctgaagtcactgtgacagttctccaggaaggaggagcttcctacttttgagtttctctgtggaaataaaacatgaatcttgtttcccta

SEQ ID NO: 1111 - DNA, 1614 bp, Homo sapiens
  source 1..1614: mol_type = genomic DNA
cggcgccggaagcacgggtccgggccctcccgcggggcgggtactcgtctcccggccgagcgacttcagctcggggacctgccccatggccgctccccagcaggacagggaaaccgccgaggtggggggcttcttgtccgtcccagcccccccaactcaggccctctcgctgcccctggcgaccaccgcgtgcgcccttccccagggcgggcgcagtcctggacgcctccgccgagcgtgactgcgtgcattttctctcctttcccttcccaacctgcggagagaagacagccccagagccgctgtctccatcctctgctgatgcctgctgtctttatgttggcctcgtcgtccgcactgcagtgtggcaggggcgtccctcgtttcccgcggactgaggtgggcgccgggcattcagtaaacgaagaaaccaaagcggagaaggttgggaatcaaacgtctgtcatacctgccaccagcagacaagcggctttgggtacctcctggacccaaagacgaactcagcccctccaggagcgcagtcattggcaccctcgtgggaacaatgccagtgggatgggtggccaccggatgtttccggggcccctcagaggcccagcagcgcaggtcttggagaatgaatgtgggtcactgggccgcgctgcagagggccggtcctgagtcgcttcctggaggagaggcccatggccagcacttggcttcgcctggaggaagaagcacgtgctaaaccacgagcgttcagggtttgtctgtttgataaaagatgctggctttgacacaccaactgacaaagtctttcataggttggagctgctaggttgtgcccctgcccctcctgaaaattagccacacgaaaggaagggtctggaaggtggcagggaagccagcagagaccagggaagtggcagcagcatggggcaggggcacacaggaaggagatggagcttgcgggagcccccactgccactccgacagggagccctgccccgtgccctgctgatgttgacactgaccccggctctattatttcagtttttccttgtaatttctgaaaatctagcaacaagttgagcaatgaaaaaaagtaaaaaagttaaaattgtgttagaaattatgactgtaaagaaattttgaaactaatgaagaaaaaattgccaaaattgccaaagcttttaggactcttaaaaatatagtaacattgagtattatgaactaaagactcatactattatatcagtgtctggtagtgaatttggatggaggactgtctagtaacttcttaacaaaacattgattagaagtctttcttggcggggcgccgtggctcacgcctgtaatcccagcactttgggaggcgaggcaggtagatcatgaggtcaggagatcgagaccatcctggctaacatggtgaaaccccgtctctactaaaaaaaatacaaaaaaactaggcaggtgtggtggtgggcccctggagtcccagctactcgggaggctgaggcaggagaatggcgtgaacccgggaggcggagcttgcagtgagccaagatcgcgccactgtactccagcctgggcaacagagcgaggctccgtctc

SEQ ID NO: 1112 - DNA, 778 bp, Homo sapiens
  source 1..778: mol_type = genomic DNA
tggaagataagattccccgccatgttatcctccgtggtgttttggggactaattgccctcattggcacttccaggggctcataccccttcagtcactcaatgaagcctcacctacatccacgcctgtaccacggctgctatggggacatcatgaccatgaagacctctggggccacttgtgatgcaaacagtgtgatgaactgcgggatccgtggttctgaaatgtttgctgagatggatttgagggccataaaaccttaccagactctgatcaaagaagtcgggcagagacattgcgtggaccctgctgtcatcgcagccatcatctccagggaaagccatggcggatctgtcctgcaagacggctgggaccacaggggacttaaatttggcttgatgcagcttgataaacaaacgtaccaccctgtcggtgcctgggatagcaaagagcacctttcacaggctactgggattctaacagagagaattaaggcaatccagaaaaaattccccacgtggagtgttgctcagcacctcaaaggtggtctctcagcttttaagtcaggaattgaagcgattgccaccccatcggacatagacaatgacttcgtcaatgatatcattgctcgagctaagttctataaaagacaaagcttctaggcaaagctctgtgggtgggccaggttggcagagtgctcagatggccgcctttgagagttttacgtgaatgtgttgtatacaacactggcaaagaaatgattaaaatcatgaaagaaaa

SEQ ID NO: 1113 - DNA, 427 bp, Homo sapiens
  source 1..427: mol_type = genomic DNA
gcatgcgcgttgcgcgccggacgcggaacgtctgccggtgtccccgcgctgctggtcccggggtccctgaaccgcgggcggccccgctccctctgctggccatggcccccccgcccgcgtgccggtccccgatgtcaccgccgccgccgccgctgctgctgctgctgctgagtctggcgctgctgggcgcccgggcccgcgccgagcccgccgggagtgccgtccccgcgcagagccgcccatgcgtggactgccacgccttcgagttcatgcagcgcgccctgcaggacctgcggaagacagcctgcagcctggacgcgcggacggagaccctactgctgcaggcagagcgccgtgccctgtgtgcctgctggccagcggggcactgaggaccacgctgctccgtgtgaataaatgcccagtggca

SEQ ID NO: 1114 - DNA, 961 bp, Homo sapiens
  source 1..961: mol_type = genomic DNA
cggggcccggcgtcaagctccgcctccgcgccccattggctggcatcacctccgcgcgcctgactgacagcgcgcataggggcggggcgccgccaccgcttccgccgggccatggggccgcgcgtgctgcagccgccgctgctgctgctcctgctggcgctgctgctggcggcgctgccgtgcggtgccgaagaggcctcgccgctgcgccccgcgcaggtcacgttgtcgccgccgccggccgtgacgaacgggagccagccgggcgcgccacacaacagcacgcacacgcgtccgccgggggcgtcgggctcggcgctgacgcgctccttctacgtgatcctgggcttctgcggcctgaccgcgctctacttcctgatccgggcgtttaggttgaagaagcctcagcggaggcgatacggcctcctcgccaacactgaggaccccacggagatggcctcgctggacagcgacgaggagacggtgtttgagtcccggaatctgagatgatgctgagccagggaggcggcccttccagcagccatgagggaaggacaggagatggggcccaccccagtgcccagcaaccccctgctccaccgctcattcccctgctggccccggggctggtctcacccagtgccaacccgagagctccttttggaacctgcacagcccgccgacctgttgccacctgcacccaccgctggaccatgcagcctcgcctcctggatgctgtcccagcctggccgagggtcccaggtgaagactggagggaccccaacagccaccgcccaggacgctgaggctcccttgcctgactgtgacttgtgcctctctcctgcccccgtggggacatggcagcccagagccaaggctgggtgggcaggtgacccaaggaacctttctgggaacaccttctcgccgggctgggaacaataaatgcagccatgtctctgca

SEQ ID NO: 1115 - DNA, 1038 bp, Homo sapiens
  source 1..1038: mol_type = genomic DNA
gttgctatgttgcccaggctggtcttgaagtgccttgacctcctaaagtgttggaaccacagacgtgagccactccacccagcctaaaacttcatcttctttggatgagatgaacacttttaacaagagaacaggactctatataaatcgctgtgggctcaccacctctaaggaggagcactgactgaagacagaaaaattgatgaactgaagaagacatggtccattatgccttacaaacttacacagtgctttgggaattccaaagtactcagtggagagaggtgtttcaggagccgtagagccagatcgtcatcatgtctgcattgtggctgctgctgggcctccttgccctgatggacttgtctgaaagcagcaactggggatgctatggaaacatccaaagcctggacacccctggagcatcttgtgggattggaagacgtcacggcctgaactactgtggagttcgtgcttctgaaaggctggctgaaatagacatgccatacctcctgaaatatcaacccatgatgcaaaccattggccaaaagtactgcatggatcctgccgtgatcgctggtgtcttgtccaggaagtctcccggtgacaaaattctggtcaacatgggcgataggactagcatggtgcaggaccctggctctcaagctcccacatcctggattagtgagtctcaggtttcccagacaactgaagttctgactactagaatcaaagaaatccagaggaggtttccaacctggacccctgaccagtacctgagaggtggactctgtgcctacagtgggggtgctggctatgtccgaagcagccaggacctgagctgtgacttctgcaatgatgtccttgcacgagccaagtacctcaagagacatggcttctaacatctcagatgaaacccaagaccatgatcacatatgcagcctcaaatgttacacagataaaactagccaagggcacctgtaactgggaatctgagtttgacctaaaagtcattaaaataacatgaatcacattaaa

SEQ ID NO: 1116 - DNA, 1505 bp, Homo sapiens
  source 1..1505: mol_type = genomic DNA
ggaaaagtagcctaaagtcagtataactaaagggtggaacgaggtgggacaaggtccggaattgctgctcagtgatgtgtgtgtgcctgccgctggtggagctgagactgctcatctcagaaggatggggatgcttgatttcctggccaggttgtcccagcacagtggggattggccctgttgtatgacgaagacagcacatggtggcagagatagatactaacccatggactttccaagggagggaataggtctttggagggtatgcaagacaaaggtagacactggataaagaacccggtagtgcccaggtattaccccatctgggccattactcccacactcaggaaccagacgttgtgggtgaggacatgctgtccctcctgccaagtaataacttccttcccagccaggatcctgccccaagtaggaatatagctctgcatttacagcagctcctgctcagaccttgtcaaaaccaccctgcagcttaggattaaggagcatggtcacaggaaggtggggtttcagggcatcccctcaggaactgcccatctccccagaattccaaaatgaaggtccatatgcttgtaggtgtgctggtcatggtgggcttcacagtaggaaagggtaagtggggcccaggggcagggagggaggaaggggtaactgagtccaggaagggggtggagcgtggccatggataatcgggcttcctactggcccagggtatttgagagtgacccagtgcctccatccctccttctgcctccccagttcctgttcccgacatccggacgtgccacttctgcctcgtagaagacccttctgtaggatgcatttcaggctcagagaagtgtaccatcagcagctcatccctgtgcatggtgatcaccatctattatgatgtcaaggttcgcttcatcgttcgaggctgtggacagtacatttcctaccgctgccaagaaaaacgcaacacctactttgcagagtactggtatcaggcccagtgctgtcagtacgattattgcaactcctggtcaagcccccaactccagagctctctgccggagccccatgacaggcccctggccctgcctctgtctgactcccagattcagtggttctaccaggccctgaacctctccctgcccctccccaatttccatgctgggacggagcctgatggcctggaccccatggtcacactgtccctgaacctgggcttgtcttttgctgagctgcgccgcatgtacttgttcctcaatagttcaggacttttggttcttccccaggctggactcttgacacctcacccttcctgaattccacagtgcaaatatctttctgtaacaccctcagcatcctgcactgccctctctgaaaacacccacattctttggtcactgtgatttcttaggcctccgtctgttgtaccactagcatctatatgacttttgtgtaattttctctcttgaactctggtgctgtttttttgtttgttt

SEQ ID NO: 1117 - DNA, 998 bp, Homo sapiens
  source 1..998: mol_type = genomic DNA
gtgtgctagtaagtgtgcacgtacgatggaaaatgaatgaagaatgaggacattccaccactctccaagttatcaagatgaagacccaagatggtggcattcactctgaaggtagcctggaaagtgggagacacgctttgcccactccctgtggttgactagagcccccagcccagtgcagcctaggggtgtaaggatcaagatccattcaataagagacccttcctcccaagctgtgagctgtgggtgccagttagtcccatttgtgaccttgggaacttagtgttcccagcaagaaagggggtggctggcttgtctccagttcttatatccaaggtgcagcagctgagcattccaaattcgggaaccaccagaaaggctggcctctcttcaacatgggatcttctggacttttgagcctcctggtgctattcgtcctcttagcgaatgtccagggacctggtctgactgattggttatttcccaggagatgtcccaaaatcagagaagaatgtgaattccaagaaagggatgtgtgtacaaaggacagacaatgccaggacaacaagaagtgttgtgtcttcagctgcggaaaaaaatgtttagatctcaaacaagggaaacaataacaacttccaatccaaagccaactgcctgaacacctgcaagaataaacgctttccctgattggataaggatgcactggaagaactgccagaatgtggctcatgctctgagtactgttcctgtacctgacggatgctccagactggcttccagtttcactctcagcattccaagatcttagcccttcccagaacagaacgcttgcatctacctcctcttcctccatctttggctcttttgatgcacaatatccatccgttttgatttcatctttatgtcccctttatctccaacttctagaactcccagtttatacctgtgtcactctcaattttttccagtaaagtacttgatgtagtcctgtgccttga

SEQ ID NO: 1118 - DNA, 766 bp, Homo sapiens
  source 1..766: mol_type = genomic DNA
ggagaaaatgcccctggaaagggttaagggccaggacaggaatggggcaggaggtgcacggatcctgctgggcactgggagcagggggcggccaaaggcagtgggtgggcaggtccatgcctcccctggccccccagctctgcagggcagtgttcctggttcctatcttgctgctgctgcaggtgaagcctctgaacgggagcccaggccccaaagatgggagccagacagagaaaacgccctctgcagaccagaatcaagaacagttcgaagagcactttgtggcctcctcagtgggtgagatgtggcaggtggtggacatggcccagcaggaagaagaccagtcgtccaagacggcagctgttcacaagcactctttccacctcagcttctgctttagtctggccagtgtcatggttttctcaggagggccattgaggcggacattcccaaatatccaactctgcttcatgctcactcactgaccctccctccctcctgggctccaggtcacaactcccaaaggagatgcaggcatggctctctgcctctgatcaccatcactgtatctcaaggttcagcagcagagataccagttgccatcagtgctaactgactgcctctccaggttcggagtttcatctcccagggccagagacagcagacccacatccttctctcccacacctctcctggttttgttcaggacagcagattagaggcaggaggcaatgacaataaaataacgataaaatcctgagaacaa

SEQ ID NO: 1119 - DNA, 2042 bp, Homo sapiens
  source 1..2042: mol_type = genomic DNA
gtctgtccgccgtctcagactagaggagcgctgtaaacgccatggctcccaagaagctgtcctgccttcgttccctgctgctgccgctcagcctgacgctactgctgccccaggcagacactcggtcgttcgtagtggataggggtcatgaccggtttctcctagacggggccccgttccgctatgtgtctggcagcctgcactactttcgggtaccgcgggtgctttgggccgaccggcttttgaagatgcgatggagcggcctcaacgccatacagttttatgtgccctggaactaccacgagccacagcctggggtctataactttaatggcagccgggacctcattgcctttctgaatgaggcagctctagcgaacctgttggtcatactgagaccaggaccttacatctgtgcagagtgggagatggggggtctcccatcctggttgcttcgaaaacctgaaattcatctaagaacctcagatccagctgacaacatgaccaaaatctttaccctgcttcggaagtatgaaccccatgggccattggtaaactctgagtactacacaggctggctggattactggggccagaatcactccacacggtctgtgtcagctgtaaccaaaggactagagaacatgctcaagttgggagccagtgtgaacatgtacatgttccatggaggtaccaactttggatattggaatggtgccgataagaagggacgcttccttccgattactaccagctatgactatgatgcacctatatctgaagcaggggaccccacacctaagctttttgctcttcgagatgtcatcagcaagttccaggaagttcctttgggacctttacctcccccgagccccaagatgatgcttggacctgtgactctgcacctggttgggcatttactggctttcctagacttgctttgcccccgtgggcccattcattcaatcttgccaatgacctttgaggctgtcaagcaggaccatggcttcatgttgtaccgaacctatatgacccataccatttttgagccaacaccattctgggtgccaaataatggagtccatgaccgtgcctatgtgatggtggatggggtgttccagggtgttgtggagcgaaatatgagagacaaactatttttgacggggaaactggggtccaaactggatatcttggtggagaacatggggaggctcagctttgggtctaacagcagtgacttcaagggcctgttgaagccaccaattctggggcaaacaatccttacccagtggatgatgttccctctgaaaattgataaccttgtgaagtggtggtttcccctccagttgccaaaatggccatatcctcaagctccttctggccccacattctactccaaaacatttccaattttaggctcagttggggacacatttctatatctacctggatggaccaagggccaagtctggatcaatgggtttaacttgggccggtactggacaaagcaggggccacaacagaccctctacgtgccaagattcctgctgtttcctaggggagccctcaacaaaattacattgctggaactagaagatgtacctctccagccccaagtccaatttttggataagcctatcctcaatagcactagtactttgcacaggacacatatcaattccctttcagctgatacactgagtgcctctgaaccaatggagttaagtgggcactgaaaggtaggccgggcatggtggctcatgcctgtaatcccagcactttgggaggctgagacgggtggattacctgaggtcaggacttcaagaccagcctggccaacatggtgaaaccccgtctccactaaaaatacaaaaattagccgggcgtgatggtgggcacctctaatcccagctacttgggaggctgagggcaggagaattgcttgaatccaggaggcagaggttgcagtgagtggaggttgtaccactgcactccagcctggctgacagtgagacactccatctcaaaaaaaaaaaaaaaaa

SEQ ID NO: 1120 - DNA, 2324 bp, Homo sapiens
  source 1..2324: mol_type = genomic DNA
caaacctcgtcccaactcccacccaccggcgtttctccagctcgatctggaggctgcttcgccagtgtgggacgcagctgacgcccgcttattagctctcgctgcgtcgccccggctcagaagctccgtggcggcggcgaccgtgacgagaagcccacggccagagttaatagagtggatacaaccttgctgaagatgaagaatatacaatattgaggatatttttttcttttttttttcaagtcttgatttgtggcttacctcaagttaccatttttcagtcaagtctgtttgtttgcttcttcagaaatgttttttacaatctcaagaaaaaatatgtcccagaaattgagtttactgttgcttgtatttggactcatttggggattgatgttactgcactatacttttcaacaaccaagacatcaaagcagtgtcaagttacgtgagcaaatactagacttaagcaaaagatatgttaaagctctagcagaggaaaataagaacacagtggatgtcgagaacggtgcttctatggcaggatatgcggatctgaaaagaacaattgctgtccttctggatgacattttgcaacgattggtgaagctggagaacaaagttgactatattgttgtgaatggctcagcagccaacaccaccaatggtactagtgggaatttggtgccagtaaccacaaataaaagaacgaatgtctcgggcagtatcagatagcagttgaaaatcaccttgtgctgctccatccactgtggattatatcctatggcagaaaagctttataattgctggcttaggacagagcaatactttacaataaaagctctacacattttcaaggagtatgctggattcatggaactctaattctgtacataaaaattttaaagttatttgtttgctttcaggcaagtctgttcaatgctgtactatgtccttaaagagaatttggtaatttggttgatgtggtaagcagataggtgagttttgtataaatcttttgtgtttgagatcaagctgaaatgaaaacactgaaaaacatggattcatttctataacacatttatttaagtatataacacgttttttggacaagtgaagaatgtttaatcattctgtcatttgttctcaatagatgtaactgttagactacggctatttgaaaaaatgtgcttattgtactatattttgttattccaattatgagcagagaaaggaaatataatgttgaaaataatgttttgaaatcatgacccaaagaatgtattgatttgcactatccttcagaataactgaaggttaattattgtatatttttaaaaattacacttataagagtataatcttgaaatgggtagcagccactgtccattacctatcgtaaacattggggcaatttaataacagcattaaaatagttgtaaactctaatcttatacttattgaagaataaaagatatttttatgatgagagtaacaataaagtattcatgatttttcacatacatgaatgttcatttaaaagtttaatcctttgagtgtctatgctatcaggaaagcacattatttccatatttgggttaattttgcttttattatattggtctaggaggaagggactttggagaatggaactcttgaggactttagccaggtgtatataataaaggtacttttgtgctgcattaaattgcttggaaaatgttaacattatattatataagagtatcctttatgaaattttgaatttgtataacagatgcattagatattcattttatataatggccacttaaaataagaacatttaaaatataaactatgaagattgactatcttttcaggaaaaaagctgtatatagcacagggaaccctaatcttgggtaattctagtataaaacaaattatacttttatttaaatttcccttgtagcaaatctaattgccacatggtgccctatatttcatagtatttattctctatagtaactgcttaagtgcagctagcttctagatttagactatatagaatttagatattgtattgttcgtcattataatatgctaccacatgtagcaataattacaatattttattaaaataaatatgtgaaatattgtttcatgaaagacagatttccaaatctctcttctcttctctgtactgtctacctttatgtgaagaaattaattatatgccattgccaggtagaagtttggaataattgtttagtctctcctattagatgtggacatttttgtttttgtttttgttttcagggatgaaataaaatatattatttctacct

SEQ ID NO: 1121 - DNA, 785 bp, Homo sapiens
  source 1..785: mol_type = genomic DNA
aaaccataccatatcccaccagagagtcgcagacactatgctgcctcccatggccctgcccagtgtatcttggatgctgctttcctgcctcatgctgctgtctcaggttcaaggtgaagaaccccagagggaactgccctctgcacggatccgctgtcccaaaggctccaaggcctatggctcccactgctatgccttgtttttgtcaccaaaatcctggacagatgcagatctggcctgccagaagcggccctctggaaacctggtgtctgtgctcagtggggctgagggatccttcgtgtcctccctggtgaagagcattggtaacagctactcatacgtctggattgggctccatgaccccacacagggcaccgagcccaatggagaaggttgggagtggagtagcagtgatgtgatgaattactttgcatgggagagaaatccctccaccatctcaagccccggccactgtgcgagcctgtcgagaagcacagcatttctgaggtggaaagattataactgtaatgtgaggttaccctatgtctgcaagttcactgactagtgcaggagggaagtcagcagcctgtgtttggtgtgcaactcatcatgggcatgagaccagtgtgaggactcaccctggaagagaatattcgcttaattcccccaacctgaccacctcattcttatctttcttctgtttcttcctccccgctgtcatttcagtctcttcattttgtcatacggcctaaggctttaaagagcaataaaatttttagtctgca

SEQ ID NO: 1122 - DNA, 1051 bp, Homo sapiens
  source 1..1051: mol_type = genomic DNA
cgggctcagagcgcacccagccggcgccgcgcagcactgggaccctgctcgccctgcagcccagccagcctgctccgcatccccctgctggtctgcccgccgacctgcgcgccctcgctgccgcccgtgtgcgcccctcgaccccagcggcaccatgcatctctcccagctgctggcctgcgccctgctgctcacgctgctctccctccggccctccgaagccaagcccggggcgccgccgaaggtcccgcgaaccccgccggcagaggagctggccgagccgcaggctgcgggcggcggtcagaagaagggcgacaaggctcccgggggcgggggcgccaatctcaagggcgaccggtcgcgactgctccgggacctgcgcgtggacaccaagtcgcgggcagcgtgggctcgccttctgcaagagcaccccaacgcgcgcaaatacaaaggagccaacaagaagggcttgtccaagggctgcttcggcctcaagctggaccgaatcggctccatgagcggcctgggatgttagtgcggcgccccctggcggcggatcgggaactggctccgttgtgctgaggtcatctttggtcatcagcctccagcatctggaaacacctccaacgcaatgtggcttttacatttctttctttctttctttttttttcctggtactgggaatacacaacaccagctgttttattattatttggggagggggttgtgattttattatttgtttttttaaaatgaaaaataaaaagttatatattatatatatattatatacatgaaacacacacacctacaccgacttgatgacaagggacagtttttaagagactgacagaaccagctgtaaaacattgctgtttgtaaattcatgtcatgcataaatgtatttatgttgtaaagctatttatattgtttataaagagatatttataaaaattttatttatgtaactaaatgaaagaagtcaatcattgtaatgtttttgtcctaactagttaaaaaaaatgtaaaaaaaaaaaagtcattccatgaa

SEQ ID NO: 1123 - DNA, 477 bp, Homo sapiens
  source 1..477: mol_type = genomic DNA
ccggggtccctgaaccgcggtaagggcggtggtgcgggcgtccgaatgggcgttttctagatacggggcgcggactagaggctcgctgggcccggagaccggcggactggagtcggggaaccggagggcggccccgctccctctgctggccatggcccccccgcccgcgtgccggtccccgatgtcaccgccgccgccgccgctgctgctgctgctgctgagtctggcgctgctgggcgcccgggcccgcgccgagcccgccgggagtgccgtccccgcgcagagccgcccatgcgtggactgccacgccttcgagttcatgcagcgcgccctgcaggacctgcggaagacagcctgcagcctggacgcgcggacggagaccctactgctgcaggcagagcgccgtgccctgtgtgcctgctggccagcggggcactgaggaccacgctgctccgtgtgaataaatgcccagtggca

SEQ ID NO: 1124 - DNA, 890 bp, Homo sapiens
  source 1..890: mol_type = genomic DNA
ggtgatcttggttacttaaaggctctaagcttgagttttctcatccatcaaaacacacacctgactaggtaatgctccagtgacttaataccaatgacattttcatgttgtccacaaattctgagtagaaaccttttcaagcctgtagcctctctgagagctgactgttattaactgaatgagaggatgtcagcaaacagagttaatagagtggatacaaccttgctgaagatgaagaatatacaatattgaggatatttttttcttttttttttcaagtcttgatttgtggcttacctcaagttaccatttttcagtcaagtctgtttgtttgcttcttcagaaatgttttttacaatctcaagaaaaaatatgtcccagaaattgagtttactgttgcttgtatttggactcatttggggattgatgttactgcactatacttttcaacaaccaagacatcaaagcagtgtcaagttacgtgagcaaatactagacttaagcaaaagatatgttaaagctctagcagaggaaaataagaacacagtggatgtcgagaacggtgcttctatggcaggatatgcggatctgaaaagaacaattgctgtccttctggatgacattttgcaacgattggtgaagctggagaacaaagttgactatattgttgtgaatggctcagcagccaacaccaccaatggtactagtgggaatttggtgccagtaaccacaaataaaagaacgaatgtctcgggcagtatcagatagcagttgaaaatcaccttgtgctgctccatccactgtggattatatcctatggcagaaaagctttataattgctggcttaggacagagcaatactttacaataaaagctctacacattttcaa

SEQ ID NO: 1125 - DNA, 522 bp, Homo sapiens
  source 1..522: mol_type = genomic DNA
aacaacatcctgggattgggacacactttctgggcactgctggccagtcccaaaatggaacataaggaagtggttcttctacttcttttatttctgaaatcaggtcaaggagagcccctggatgactatgtgaatacccaggggccttcactgttcagtgtcactaagaagcagctgggggcaggaagcagagaagaatgtgcagcaaaatgtgaagaggacaaagaattcacctgcagggcattccaatatcacagtaaagagcaacaatgtgtgataatggctgaaaacaggaagtcctccataatcattaggatgagagatgcagttttatttgaaaagtaaatgtatctttcagagtgcaagactgggaatggaaagaactacagagggacgatgtccaaaacaaaaaatggcatcacctgtcaaaaatggagttccacttctccccgcagacctagattctcacctgctacacacccctcagagggactggaggaatccagacaacgatgcgcaggg

SEQ ID NO: 1126 - DNA, 950 bp, Homo sapiens
  source 1..950: mol_type = genomic DNA
atgcagaccttcccagttgctggggcgctggaccctgctatactggacacaaggtaggagcactcagaagggacaccgtcatctgctgctgtcgccatggcgattattcaacgccctgcctcttcaccccaggaaaaccttcgcggaacccgtcaccatggaaacgaactctctggactcttagcgcgccctgggctggccctgctgggtggacaggagaggagcaaaacgcaacaaagacgggattaattactcggaggccgcgccccctccgaagaaggccccaccctgccccggcctcacccctccccgaaataattcgaggaaatattccgcgaatgctgggtaagtttgttcctgtcaattgggaaccccctcaaccacttccattccccaaatacctgcgctgctaccgatgcctcttggagaccaaggagttagggtgccttctgggatctgacatctgcctcaccccagctggcagcagctgcatcactctccacaaaaagaacagcagcggttctgacgtcatggtgagtgactgccgaagtaaggagcagatgagtgattgttcaaatacccgaacttctccggtgtctggcttctggatattctctcaatactgcttcctggatttctgcaatgaccctcaaaacagagggctctatactccttagtgtgactgcagcaaactttggtgtaaaattccaccagtttccagccaccttcctgacttctatctgggcttggccaggacttctagtccctcataccagccctccttgcctccctccagccactggaccccagccttggctcttcctcttggttgacgcccttcagcacacttactgctactctgtacccccagccctactgcccaccaggtttcctctcttgtcccctagtccctggatgtttctcccaaataaatttgtgtgtaaactgtt

SEQ ID NO: 1127 - DNA, 684 bp, Homo sapiens
  source 1..684: mol_type = genomic DNA
atgggggccgtcatgggcaccttctcatctctgcaaaccaaacaaaggcgaccctcgaaagacatcgcctggtggtattaccagtatcagagagataagattgaagatgagctggagatgaccatggtttgccatcggcccgagggactggagcagctcgaggcccagaccaacttcaccaagagggagctgcaggtcctttatcgaggcttcaaaaatgagtgccccagtggtgtggtcaacgaagacacattcaagcagatctatgctcagtttttccctcatggagatgccagcacgtatgcccattacctcttcaatgccttcgacaccactcagacaggctccgtgaagttcgaggactttgtaaccgctctgtcgattttattgagaggaactgtccacgagaaactaaggtggacatttaatttgtatgacatcaacaaggacggatacataaacaaagaggagatgatggacattgtcaaagccatctatgacatgatggggaaatacacatatcctgtgctcaaagaggacactccaaggcagcatgtggacgtcttcttccagaaaatggacaaaaataaagatggcatcgtaactttagatgaatttcttgaatcatgtcaggaggacgacaacatcatgaggtctctccagctgtttcaaaatgtcatgtaa

SEQ ID NO: 1128 - DNA, 1361 bp, Homo sapiens
  source 1..1361: mol_type = genomic DNA
cctgctgggaggcgaagaccaggcgggcactgttgcccggcgacgctccggcgctgggtccccgaggcccggcccctccccgggaggaggtgggcttcgagtcacgtgacccgtgccctacgggagggggtgcggtcggggacccggcaggaggcggccgagaagagaggaccgtgggggcgttcgcgtggctcccagcccgggaccccacccccgctggacagtgggggaaactgaggcctgagcggagtgaccaccccggctatggccagccagcctccagggagcgcgagtgctgctgacaggggccaacgctggtgttggtgaggagctggcctatcactacgcgcgtctgggctcccacctggtgctcactgcccacactgaggctctcctgcagaaggcgggctggactacctcgtgctgaaccacatcggcggcgccccggccggcacgcgagcccgcagcccccaggcaactcgctggctcatgcaggtaaactttgtgagctacgtgcaactgacgtcgcgggcgctgcccagcctgacggacagcaagggctccctggtggtggtgtcctcgctgctcggccgcgtgcccacgtcgttctccactccctactcggcggccaagtttgcgctggacggcttcttcggctccctgcggcgggagctggacgtgcaggacgtgaacgtggccatcaccatgtgcgtcctgggcctccgagatcgcgcctccgccgccgaggcagtcaggagctcaacgtcacggccgcggcagcctgagcaccggggggtgcccctccagtcccagacggcaatgttcctccctccaactgtccctggagccagaacactcacagagacacccctgagagggtggccacagcccaagatgaagtcatcaagacagaaaagcaaaaccgagaaaaacgacgggcacctggaaccagtcacggcttgggaggtgcaggtgccccgtgttaggcgcctttgtcggggacttgcaaggcctcacctgtttggccatgattgatgacgtgactgcttccattttgcagatgaggaaactaaggctcagagaggccacgccacccttgagccacccatggacccctctccatctcctgcctgcgcctttaagtccctgatttattctttccattcattccatctgggaggaacccccccaactcctgccagcttcccctagctggggtctctggtactcttcacacctgcaggggcgtctacactgttcgtctacctggtggcagggtctgagcgggaggaggagggaaagagtgtgttctgagctggacccagcctcttgttcgagaataaaaactcttcttctcttgc

SEQ ID NO: 1129 - DNA, 596 bp, Homo sapiens
  source 1..596: mol_type = genomic DNA
gaaccctgagccgcctgcgcggatcggcgtccgcagcgggcggctgctgaggggtgactgttctttcagctcccagcactggagcgctcggcccctgccgcactggatgccagcagttactaaaagtgagcctggcatttcagctgccttgaggtgcagtgttggggatccagagccatgtcggacctgctactactgggcctgattgggggcctgactctcttactgctgctgacgctgctggcctttgccgggtactcagggctactggctggggtggaagtgagtgctgggtcaccccccatccgcaacgtcactgtggcctacaagttccacatggggctctatggtgagactgggcggcttttcactgagagctgcagcatctctcccaagctccgctccatcgctgtctactatgacaacccccacatggtgccccctgataagtgccgatgtgccgtgggcagcatcctgagtgaaggtgaggaatcgccctcccctgagctcatcgacctctaccagaaatttggcttcaaggtgttctccttcccggcacccagccatgtggtgacagccaccttcccctacaccac

SEQ ID NO: 1130 - DNA, 496 bp, Homo sapiens
  source 1..496: mol_type = genomic DNA
agtccagcgtctcctgggcctagattccccagctgctgttctctggaggggcccccgacagctgctctcgggagccgcctcccgacacccgagccccgccggcgcctcccgctcccggctcccggctcctggctccctccgcctcccccgcccctcgccccgccgccgaagaggccccgctcccgggtcggacgcctgggtctgccgggaagagcgatgagaggtgtctgaaggtggctattcactgagcgatggggttggacttgaaggaatgccaagagatgctgcccccacccccttaggcccgagggatcaggagctatgggaccagaggccctgtcatctttactgctgctgctcttggtggcaagtggagatgctgacatgaagggacattttgatcctgccaagtgccgctatgccctgggcatgcaggaccggaccatcccagacagtgacatctctgcttccagctcctggtcagattccactgccg

SEQ ID NO: 1131 - DNA, 3971 bp, Homo sapiens
  source 1..3971: mol_type = genomic DNA
gacgctcggacaaagccaggcagcgttggcagccccagacccgaccccaaaggcctgagactggggtgactgggacctaagagaatcctgagctggaggcccccgacagctgctctcgggagccgcctcccgacacccgagccccgccggcgcctcccgctcccggctcccggctcctggctccctccgcctcccccgcccctcgccccgccgccgaagaggccccgctcccgggtcggacgcctgggtctgccgggaagagcgatgagaggtgtctgaaggtggctattcactgagcgatggggttggacttgaaggaatgccaagagatgctgcccccacccccttaggcccgagggatcaggagctatgggaccagaggccctgtcatctttactgctgctgctcttggtggcaagtggagatgctgacatgaagggacattttgatcctgccaagtgccgctatgccctgggcatgcaggaccggaccatcccagacagtgacatctctgcttccagctcctggtcagattccactgccgcccgccacagcaggttggagagcagtgacggggatggggcctggtgccccgcagggtcggtgtttcccaaggaggaggagtacttgcaggtggatctacaacgactccacctggtggctctggtgggcacccagggacggcatgccgggggcctgggcaaggagttctcccggagctaccggctgcgttactcccgggatggtcgccgctggatgggctggaaggaccgctggggtcaggaggtgatctcaggcaatgaggaccctgagggagtggtgctgaaggaccttgggccccccatggttgcccgactggttcgcttctacccccgggctgaccgggtcatgagtgtctgtctgcgggtagagctctatggctgcctctggagggatggactcctgtcttacaccgcccctgtggggcagacaatgtatttatctgaggccgtgtacctcaacgactccacctatgacggacataccgtgggcggactgcagtatgggggtctgggccagctggcagatggtgtggtggggctggatgactttaggaagagtcaggagctgcgggtctggccaggctatgactatgtgggatggagcaaccacagcttctccagtggctatgtggagatggagtttgagtttgaccggctgagggccttccaggctatgcaggtccactgtaacaacatgcacacgctgggagcccgtctgcctggcggggtggaatgtcgcttccggcgtggccctgccatggcctgggagggggagcccatgcgccacaacctagggggcaacctgggggaccccagagcccgggctgtctcagtgccccttggcggccgtgtggctcgctttctgcagtgccgcttcctctttgcggggccctggttactcttcagcgaaatctccttcatctctgatgtggtgaacaattcctctccggcactgggaggcaccttcccgccagccccctggtggccgcctggcccacctcccaccaacttcagcagcttggagctggagcccagaggccagcagcccgtggccaaggccgaggggagcccgaccgccatcctcatcggctgcctggtggccatcatcctgctcctgctgctcatcattgccctcatgctctggcggctgcactggcgcaggctcctcagcaaggctgaacggagggtgttggaagaggagctgacggttcacctctctgtccctggggacactatcctcatcaacaaccgcccaggtcctagagagccacccccgtaccaggagccccggcctcgtgggaatccgccccactccgctccctgtgtccccaatggctctgcgttgctgctctccaatccagcctaccgcctccttctggccacttacgcccgtccccctcgaggcccgggcccccccacacccgcctgggccaaacccaccaacacccaggcctacagtggggactatatggagcctgagaagccaggcgccccgcttctgcccccacctccccagaacagcgtcccccattatgccgaggctgacattgttaccctgcagggcgtcaccgggggcaacacctatgctgtgcctgcactgcccccaggggcagtcggggatgggccccccagagtggatttccctcgatctcgactccgcttcaaggagaagcttggcgagggccagtttggggaggtgcacctgtgtgaggtcgacagccctcaagatctggtcagtcttgatttcccccttaatgtgcgtaagggacaccctttgctggtagctgtcaagatcttacggccagatgccaccaagaatgccaggaatgatttcctgaaagaggtgaagatcatgtcgaggctcaaggaccccaacatcattcggctgctgggcgtgtgtgtgcaggacgaccccctctgcatgattactgactacatggagaacggcgacctcaaccagttcctcagtgcccaccagctggaggacaaggcagccgagggggcccctggggacgggcaggctgcgcaggggcccaccatcagctacccaatgctgctgcatgtggcagcccagatcgcctccggcatgcgctatctggccacactcaactttgtacatcgggacctggccacgcggaactgcctagttggggaaaatttcaccatcaaaatcgcagactttggcatgagccggaacctctatgctggggactattaccgtgtgcagggccgggcagtgctgcccatccgctggatggcctgggagtgcatcctcatggggaagttcacgactgcgagtgacgtgtgggcctttggtgtgaccctgtgggaggtgctgatgctctgtagggcccagccctttgggcagctcaccgacgagcaggtcatcgagaacgcgggggagttcttccgggaccagggccggcaggtgtacctgtcccggccgcctgcctgcccgcagggcctatatgagctgatgcttcggtgctggagccgggagtctgagcagcgaccacccttttcccagctgcatcggttcctggcagaggatgcactcaacacggtgtgaatcacacatccagctgcccctccctcagggagtgatccaggggaagccagtgacactaaaacaagaggacacaatggcacctctgcccttcccctcccgacagcccatcacctctaatagaggcagtgagactgcaggtgggctgggcccacccagggagctgatgccccttctccccttcctggacacactctcatgtccccttcctgttcttccttcctagaagcccctgtcgcccacccagctggtcctgtggatgggatcctctccaccctcctctagccatcccttggggaagggtggggagaaatataggatagacactggacatggcccattggagcacctgggccccactggacaacactgattcctggagaggtggctgcgcccccagcttctctctccctgtcacacactggaccccactggctgagaatctgggggtgaggaggacaagaaggagaggaaaatgtttccttgtgcctgctcctgtacttgtcctcagcttgggcttcttcctcctccatcacctgaaacactggacctgggggtagccccgccccagccctcagtcacccccacttcccacctgcagtcttgtagctagaacttctctaagcctatacgtttctgtggagtaaatattgggattggggggaaagagggagcaacggcccatagccttggggttggacatctctagtgtagctgccacattgatttttctataatcacttggggtttgtacatttttggggggagagacacagatttttacactaatatatggacctagcttgaggcaattttaatcccctgcactaggcaggtaataataaaggttgagttttccacaa

SEQ ID NO: 1132 - DNA, 1533 bp, Homo sapiens
  source 1..1533: mol_type = genomic DNA
tacttaggaagcctgtggtgagaacaacaacagtgcctgagaatcccacggctctggggaagtgagccccgaggatgaggctgctcgcctggctgattttcctggctaactggggaggtgccagggctgaaccagggaagttctggcacatcgctgacctgcaccttgaccctgactacaaggtatccaaagaccccttccaggtgtgcccatcagctggatcccagccagtgcccgacgcaggcccctggggtgactacctctgtgattctccctgggccctcatcaactcctccatctatgccatgaaggagattgagccagagccagacttcattctctggactggtgatgacacgcctcatgtgcccgatgagaaactgggagaggcagctgtactggaaattgtggaacgcctgaccaagctcatcagagaggtctttccaggtgccttctactgtgagaagctgccgggtcccagcggggctgggcgaattgtggtcctcaacaccaatctgtactataccagcaatgcgctgacagcagacatggcggaccctggccagcagttccagtggctggaagatgtgctgaccgatgcatccaaagctggggacatggtgtacattgtcggccacgtgcccccggggttctttgagaagacgcaaaacaaggcatggttccgggagggcttcaatgaaaaatacctgaaggtggtccggaagcatcatcgcgtcatagcagggcagttcttcgggcaccaccacaccgacagctttcggatgctctatgatgatgcaggtgtccccataagcgccatgttcatcacacctggagtcaccccatggaaaaccacattacctggagtggtcaatggggccaacaatccagccatccgggtgttcgaatatgaccgagccacactgagcctgaaggacatggtgacctacttcatgaacctgagccaggcgaatgctcaggggacgccgcgctgggagctcgagtaccagagcacactgcagcgctactacgtctataactcagtcagctactctgctggggtctgcgacgaggcctgcagcatgcagcacgtgtgtgccatgcgccaggtggacattgacgcttacaccacctgtctgtatgcctctggcaccacgcccgtgccccagctcccgctgctgctgatggccctgctgggcctgtgcacgctcgtgctgtgacctgccaggctcaccttcttcctggtaacgggtaacgggggcagcgcccaggatcacccagagctgggccttccaccatttcctccgcgcctgaggagtgaactgaaataggacaaccgaatcaggaagcgaagccccaggagctgcagccatccgtgatcgcgccactgcactccagcctgggtgacaaagccagactctctccaaaaacaaaccagaaacagaaaagaaatgacgacccaagacccccctacaagcatacttcttttgcgtattatgtttaactcacaaaacaaagctcatcatgcgtttg

SEQ ID NO: 1133 - DNA, 561 bp, Homo sapiens
  source 1..561: mol_type = genomic DNA
gtcgcggccgggaagcgtgggaggaggcccagcggcgagctggctttctcctggccacttgccggggagcatattaatgaaaagtgccataaactgaaaaaccaaacatgagggtagcaggtgctgcaaagttggtggtagctgtggcagtgtttttactgacattttatgttatttctcaagtatttgaaataaaaatggatgcaagtttaggaaatctatttgcaagatcagcattggacacagctgcacgttctacaaagcctcccagatataagtgtgggatctcaaaagcttgccctgagaagcattttgcttttaaaatggcaagtggagcagccaacgtggtgggacccaaaatctgcctggaagataatgttttaatgagtggtgttaagaataatgttggaagagggatcaatgttgccttggcaaatggaaaaacaggagaagtattagacactaaatattttgacatgtggggaggagatgtggcaccatttattgagtttctgaaggccatacaagatggaacaatagttttaatgggaacatacgatg

SEQ ID NO: 1134 - DNA, 930 bp, Homo sapiens
  source 1..930: mol_type = genomic DNA
tgcacccagcccatgttcacattttaattgtggaagccaggtgacggatggtggcaccatcaagcaaaagatcttcaccttcgacgccatgttctccaccaactactcacacatggagaactaccgcaagcgagaggacctggtgtaccagtccactgtgaggctgcccgaggtccggatctcagacaatggtccctatgagtgccatgtgggcatctacgaccgcgccaccagggagaaggtggtcctggcatcaggcaacatcttcctcaacgtcatggctcctcccacctccattgaagtggtggctgctgacacaccagcccccttcagccgctaccaagcccagaacttcacgctggtctgcatcgtgtctggaggaaaaccagcacccatggtttatttcaaacgagatggggaaccaatcgacgcagtgcccctatcagagccaccagctgcgagctccggccccctacaggacagcaggcccttccgcagccttctgcaccgtgacctggatgacaccaagatgcagaagtcactgtccctcctggacgccgagaaccggggtgggcgaccctacacggagcgcccctcccgtggcctgaccccagatcccaacatcctcctccagccaaccacagagaacataccagagacggtcgtgagccgtgagtttccccgctgggtccacagcgccgagcccacctacttcctgcgccacagccgcaccccgagcagtgacggcactgtggaagtacgtgccctgctcacctggaccctcaacccacagatcgacaacgaggccctcttcagctgcgaggtcaagcacccagctctgtcgatgcccatgcaggcagaggtcacgctggttgcccccaaaggacccaaaattgtgatgacgcccagcagagcccgggtaggggacac

SEQ ID NO: 1135 - DNA, 1140 bp, Homo sapiens; identical to SEQ ID NO: 240
  source 1..1140: mol_type = genomic DNA

SEQ ID NO: 1136 - DNA, 1346 bp, Homo sapiens
  source 1..1346: mol_type = genomic DNA
gattggccggggggatgcgggggatgcgggcggcggggttaagcgcgtcgccaccgcccccgcctaggcgagagcccagagagctgaacctgcatcccggacctgcggcgaccgtcgtacaccatgggcctccacctccgcccctaccgtgtggggctgctcccggatggcctcctgttcctcttgctgctgctaatgctgctcgcggacccagcgctcccggccggacgtcaccccccagtggtgctgggctggtttacaacaaaacatccagggccacccagtttcctgatggtgtggatgtacgtgtccctggctttgggaagaccttctcactggagttcctggaccccagcaaaagcagcgtgggttcctatttccacaccatggtggagagccttgtgggctggggctacacacggggtgaggatgtccgaggggctccctatgactggcgccgagccccaacggcagccgcaggcctggaaggacaagtatatccgggccttcgtgtcactgggtgcgccctgggggggcgtggccaagaccctgcgcgtcctggcttcaggagacaacaaccggatcccagtcatcgggcccctgaagatccgggagcagcagcggtcagctgtctccaccagctggctgctgccctacaactacacatggtcacctgagaaggtgttcgtgcagacacccacaatcaactacacactgcgggactaccgcaagttcttccaggacatcggctttgaagatggctggctcatgcggcaggacacagaagggctggtggaagccacgatgccacctggcgtgcagctgcactgcctctatggtactggcgtccccacaccagactccttctactatgagagcttccctgaccgtgaccctaaaatctgctttggtgacggcgatggtactgtgaacttgaagagtgccctgcagtgccaggcctggcagagccgccaggagcaccaagtgttgctgcaggagctgccaggcagcgagcacatcgagatgctggccaacgccaccaccctggcctatctgaaacgtgtgctccttgggccctgactcctgtgccacaggactcctgtggctcggccgtggacctgctgttggcctctggggctgtcatggcccacgcgttttgcaaagtttgtgactcaccattcaaggccccgagtcttggactgtgaagcatctgccatggggaagtgctgtttgttatcctttctctgtggcagtgaagaaggaagaaatgagagtctagactcaagggacactggatggcaagaatgctgctgatggtggaactgctgtgaccttaggactggctc

SEQ ID NO: 1137 - DNA, 2179 bp, Homo sapiens
  source 1..2179: mol_type = genomic DNA
tacgcgctgcgggaccggcaggggaacgccatcggggtcacagcctgcgacatcgacggggacggccgggaggagatctacttcctcaacaccaataatgccttctcgggggtggccacgtacaccgacaagttgttcaagttccgcaataaccggtgggaagacatcctgagcgatgaggtcaacgtggcccgtggtgtggccagcctctttgccggacgctctgtggcctgtgtggacagaaagggctctggacgctactctatctacattgccaattacgcctacggtaatgtgggccctgatgccctcattgaaatggaccctgaggccagtgacctctcccggggcattctggcgctcagagatgtggctgctgaggctggggtcagcaaatatacagggggccgaggcgtcagcgtgggccccatcctcagcagcagtgcctcggatatcttctgcgacaatgagaatgggcctaacttccttttccacaaccggggcgatggcacctttgtggacgctgcggccagtgctggtgtggacgacccccaccagcatgggcgaggtgtcgccctggctgacttcaaccgtgatggcaaagtggacatcgtctatggcaactggaatggcccccaccgcctctatctgcaaatgagcacccatgggaaggtccgcttccgggacatcgcctcacccaagttctccatgccctcccctgtccgcacggtcatcaccgccgactttgacaatgaccaggagctggagatcttcttcaacaacattgcctaccgcagctcctcagccaaccgcctcttccgcgtcatccgtagagagcacggagaccccctcatcgaggagctcaatcccggcgacgccttggagcctgagggccggggcacagggggtgtggtgaccgacttcgacggagacgggatgctggacctcatcttgtcccatggagagtccatggctcagccgctgtccgtcttccggggcaatcagggcttcaacaacaactggctgcgagtggtgccacgcacccggtttggggcctttgccaggggagctaaggtcgtgctctacaccaagaagagtggggcccacctgaggatcatcgacgggggctcaggctacctgtgtgagatggagcccgtggcacactttggcctggggaaggatgaagccagcagtgtggaggtgacgtggccagatggcaagatggtgagccggaacgtggccagcggggagatgaactcagtgctggagatcctctacccccgggatgaggacacacttcaggacccagccccactggagacaccaatgaatgcatccagttcccattcgtgtgccctcgagacaagcccgtatgtgtcaacacctatggaagctacaggtgccggaccaacaagaagtgcagtcggggctacgagcccaacgaggatggcacagcctgcgtggggactctcggccagtcaccgggcccccgccccaccacccccaccgctgctgctgccactgccgctgctgctgccgctgctggagctgccactgctgcaccggtcctcgtagatggagatctcaatctggggtcggtggttaaggagagctgcgagcccagctgctgagcaggggtgggacatgaaccagcggatggagtccagcaggggagtgggaaagtgggcttgtgctgctgcctagacagtagggatgtaaaggcctgggagctagaccctccccaagcccatccatgcacattacttagctaacaattagggagactcgtaaggccaggccctgtgctgggcacatagctgtgatcacagcagacagggtcgctgccctgatggcgcttacattccagtgggtctaatgaccatatcttaggacacagatgtgcccagggaggtggtgtcactgcacaggaagtatgaggactttagtgtcctgagttcaaatcctgattcaggaactcacaaagctatgtgaccttacaccagtcacttaacttgttagccatccattatcgcatctgcaaaatggggattaagaatagaatcttggggttagtgtggagattagattaaatgtatgtaagacacttggcacaaaacctggcacatagtaaaggctcaataaaaacaagtgcctctcactgggctttgtcaacacgtga

SEQ ID NO: 1138 - DNA, 1235 bp, Homo sapiens
  source 1..1235: mol_type = genomic DNA
taagatgcggaggagggtgacgcactagctctccagttcgcccgttcctggcctgacccccaccaaggcccataccgcagtaggctcctcgggctgcccctcggttgacaatggtctccaggatggtctctaccatgctatctggcctactgttttggctggcatctggatggactccagcatttgcttacagcccccggacccctgaccgggtctcagaagcagatatccagaggctgcttcatggtgttatggagcaattgggcattgccaggccccgagtggaatatccagctcaccaggccatgaatcttgtgggcccccagagcattgaaggtggagctcatgaaggacttcagcatttgggtccttttggcaacatccccaacatcgtggcagagttgactggagacaacattcctaaggactttagtgaggatcaggggtacccagaccctccaaatccctgtcctgttggaaaaacagatgatggatgtctagaaaacacccctgacactgcagagttcagtcgagagttccagttgcaccagcatctctttgatccggaacatgactatccaggcttgggcaagtggaacaagaaactcctttacgagaagatgaagggaggagagagacgaaagcggaggagtgtcaatccatatctacaaggacagagactggataatgttgttgcaaagaagtctgtcccccatttttcagatgaggataaggatccagagtaaagagaagatgctagacgaaaacccacattacctgttaggcctcagcatggcttatgtgcacgtgtaaatggagtccctgtgaatgacagcatgtttcttacatagataattatggatacaaagcagctgtatgtagatagtgtattgtcttcacaccgatgattctgctttttgctaaattagaataagagcttttttgtttcttgggtttttaaaatgtgaatctgcaatgatcataaaaattaaaatgtgaatgtcaacaataaaaagcaagactatgaaaggctcagatttcttgcagtttaaaatggtgtctgaggttgtactattttggccaagtctgtagaaagctgtcatttgattttgattatgtagttcatccagcccttgggcattgttatacaccagtaaagaaggctgtactcaagaggaggagctgacacatttcacttggctgcgtcttaataaacatgaatgcaagcattggca

SEQ ID NO: 1139 - DNA, 1196 bp, Homo sapiens
  source 1..1196: mol_type = genomic DNA
aaaaaccttccacccgtcagtctagaaggataagagaaagaaagttaagcaactacaggaaatggctttgggagttccaatatcagtctatcttttattcaacgcaatgacagcactgaccgaagaggcagccgtgactgtaacacctccaatcacagcccagcaaggtaactggacagttaacaaaacagaagctgacaacatagaaggacccatagccttgaagttctcacacctttgcctggaagatcataacagttactgcatcaacggtgcttgtgcattccaccatgagctagagaaagccatctgcaggtgttttactggttatactggagaaaggtgtgagcacttgactttaacttcatatgctgtggattcttatgaaaaatacattgcaattgggattggtgttggattactattaagtggttttcttgttattttttactgctatataagaaagaggtgtctaaaattgaaatcgccttacaatgtctgttctggagaaagacgaccactgtgaggcctttgtgaagaattttcatcaaggcatctgtagagatcagtgagcccaaaattaaagttttcagatgaaacaacaaaacttgtcaagctgactagactcgaaaataatgaaagttgggatcacaatgaaatgagaagataaaattcagcgttggcctttagactttgccatccttaaggagtgatggaagccaagtgaacaagcctcagtgacacaagtcaaattcatagtttcactctgggttttttgttgttgtgtggttattattctcactacagaaagactgagtttcatgctcctggctatgtcagatgtgaattttcatgggaataataatcaaccttgcagcaagccaaagcaatgcctcgcttgggttcttcatgttcttactacccagcgttttttaccacctagatgggcctctctaagtctatttgctcaatgaaccttatcccaaacttgttgttttcatggtgtctgaaagaatgtgatgtcagcttttagaatgaaatcagtgttaaggtacctccagtgaaccaaacatgtgtcttaaatctaagccactgaaaacagaagggaatgtccaaggcaaatacaaatcatacacagcttgtaacaacatacagcctttctatgtgaaataatggaataaactaaagagtttctg

SEQ ID NO: 1140 - DNA, 2443 bp, Homo sapiens
  source 1..2443: mol_type = genomic DNA
atggggaaactgaggcctgggagagtggagtggctggcctcaggccacacggaaaggccccacctcttccagaacctcctgctcttcctgtgggccctgctgaactgtggtttgggggtcagtgctcagggtccgggcgagtggaccccgtgggtgtcctggacccgctgctccagctcctgcgggcgtggcgtctctgtgcgcagccggcgctgcctccggcttcctggggaagaaccgtgctggggagactcccatgagtaccgcctctgccagttgccagactgccccccaggggctgtgcccttccgagacctacagtgtgccctgtacaatggccgccctgtcctgggcacccagaagacctaccagtgggtgcccttccatggggcgcccaaccagtgcgacctcaactgcctggctgaggggcacgccttctaccacagcttcggccgcgtcctggacggcaccgcctgcagcccgggtgcccagggggtctgcgtggctggccgctgccttagcgccggctgtgatgggttgttgggctcgggtgccctcgaggaccgctgtggccgctgcggaggcgccaacgactcgtgccttttcgtgcagcgcgtgtttcgtgacgccggtgccttcgctgggtactggaacgtgaccctgatccccgagggcgccagacacatccgcgtggaacacaggagccgcaaccacctggcactgatggggggcgatgggcgctacgtgcttaatgggcactgggtggtcagcccaccagggacctacgaggcggccggcacgcatgtggtctacacccgagacacagggccccaggagacattgcaagcagccgggcccacctcccatgacctgctcctacaggtcctcctgcaggagcccaaccctggcatcgagtttgagttctggctccctcgggagcgctacagccccttccaggctcgtgtgcaggccctgggctggcccctgaggcagcctcagccccggggggtggagcctcagccccccgcagcccctgctgtcacccctgcacagaccccaacgctggccccagacccctgcccaccctgccctgacacccgcggccgcgcccaccgactactccactattgcggcagtgactttgtgttccaggcccgagtgctgggccaccaccaccaggcccaggagacccgctatgaggtgcgcatccagctcgtctacaagaaccgctcgccactgcgggcacgcgagtacgtgtgggcgccaggccactgcccctgcccgatgctggcaccccaccgggactacctgatggctgtccagcgtcttgtcagccccgacggcacacaggaccagctgctgctgccccacgccggctacgcccggccctggagccctgcggaggacagccgcatacgcctgactgcccggcgctgtcctggctgagcccctgcaggagccccggccacacacagcaagaaagatacatctgaccagcctcaacgtcaacgtatttcccctctcaccctggcttccaggcagctctgaaatacgtcccacctgtgcagctatgtgactccctcccacacacgcttaagacacctctgcatgcagtcaaagccactgtcacaagccggcaggcactggtgaggaggcactaaggagactctgacttttatttcgcctctctccttggctgccaggaagctcatagctatttatactcagaaagtttaacgctgctttctttctctttgcgcgcgtcacacttgcttggagacactgtcatgaacgagcatgacaccctgctgccctgggtacccagaagatcatctgtttacttcccagacactgtgctgtctctgctctctgctactcacacacaccctcatgtgtgaagggcagagacactgtcacaaacaggcatgccccttagaagacatgcctaaccaggcactgtaacgtaccaacgtaccaatttccccttttcccctggctaccaggaaactcggagacaatcttttcagcctcagcatttctggctggatttccacccatcaacacgtgcttgctcctcctttttttttttttctgaggtagacccttgctctgtcacctaggctgaagtgcggtggtgcaatcatggctcactgcagcctcaaattcctgggctcaagcgatcctcccacctcagcctccacagcagctggaactccaggtgtgaatcaccatgcccggctaacttttaaattttttgtagagatggggtcttgctacgttgcccacactgctctccaactactggcctcaaacgatcctcctgcctcggcctcccaaagcactggaatttcaggcatgcactatcgtactggctgttcaccccccttttattcctctttaatttttacaagcactttttaaaaaaaaattttactttaagttc

SEQ ID NO: 1141 - DNA, 772 bp, Homo sapiens
  source 1..772: mol_type = genomic DNA
attgctgggcggttcttgccggaagcggagagcggctgatcgcagtccggaggtgaggcggaactctgaggcagatatcctccctttcctcctcggctgctgctcttactttgacaagccaggctaacattgaagcaggtggtccattatggctgacatgcaaaatctggtagaaagattggagagggcagtgggccgcctggaggcagtatctcatacctctgacatgcaccgtgggtatgcagacagtccttcaaaagcaggagcagctccatatgtgcaggcatttgactcgctgcttgctggtcctgtggcagagtacttgaagatcagtaaagagattgggggagacgtgcagaaacatgcggagatggtccacacaggtttgaagttggagcgagctctgttggttacagcttctcagtgtcaacagccagcagaaaataagctttccgatttgttggcacccatctcagagcagatcaaagaagtgataacctttcgggagaagaaccgaggcagcaagttgtttaatcacctgtcagctgtcagcgaaagtatccaggccctgggctgggtggctatggctcccaagcctggcccttatgtgaaagaaatgaatgatgccgccatgttttatacaaaccgagtcctcaaagagtacaaagatgtggataagaagcatgtagactgggtcaaagcttatttaagtatatggacagagctgcaggcttacattaaggagttccataccaccggactggcctggagc

SEQ ID NO: 1142 - DNA, 1479 bp, Homo sapiens
  source 1..1479: mol_type = genomic DNA
tctgaggccgtgtacctcaacgactccacctatgacggacataccgtgggcggactgcagtatgggggtctgggccagctggcagatggtgtggtggggctggatgactttaggaagagtcaggagctgcgggtctggccaggctatgactatgtgggatggagcaaccacagcttctccagtggctatgtggagatggagtttgagtttgaccggctgagggccttccaggctatgcaggtccactgtaacaacatgcacacgctgggagcccgtctgcctggcggggtggaatgtcgcttccggcgtggccctgccatggcctgggagggggagcccatgcgccacaacctagggggcaacctgggggaccccagagcccgggctgtctcagtgccccttggcggccgtgtggctcgctttctgcagtgccgcttcctctttgcggggccctggttactcttcagcgaaatctccttcatctctgatgtggtgaacaattcctctccggcactgggaggcaccttcccgccagccccctggtggccgcctggcccacctcccaccaacttcagcagcttggagctggagcccagaggccagcagcccgtggccaaggccgaggggagcccgaccgccatcctcatcggctgcctggtggccatcatcctgctcctgctgctcatcattgccctcatgctctggcggctgcactggcgcaggctcctcagcaaggtcctagagagccacccccgtaccaggagccccggcctcgtgggaatccgccccactccgctccctgtgtccccaatggctctgcgttgctgctctccaatccagcctaccgcctccttctggccacttacgcccgtccccctcgaggcccgggcccccccacacccgcctgggccaaacccaccaacacccaggggcgtcaccgggggcaacacctatgctgtgcctgcactgcccccaggggcagtcggggatgggccccccagagtggatttccctcgatctcgactccgcttcaaggagaagcttggcgagggccagtttggggaggtgcacctgtgtgaggtcgacagccctcaagatctggttagtcttgatttcccccttaatgtgcgtaagggacaccctttgctggtagctgtcaagatcttacggccagatgccaccaagaatgccaggaatgatttcctgaaagaggtgaagatcatgtcgaggctcaaggacccaaacatcattcggctgctgggcgtgtgtgtgcaggacgaccccctctgcatgattactgactacatggagaacggcgacctcaaccagttcctcagtgcccaccagctggaggacaaggcagccgagggggcccctggggacgggcaggctgcgcaggggcccaccatcagctacccaatgctgctgcatgtggcagcccagatcgcctccggcatgcgctatctggccacactcaac

SEQ ID NO: 1143 - DNA, 2403 bp, Homo sapiens
  source 1..2403: mol_type = genomic DNA
cacatgccccgtttgctgcctgaacctctccacaaagactcccagatcctgtagaattgaatttaatcatctcctgacaaaagaatgcaatttcaactgaccctttttttgcaccttgggtggctcagttactcaaaagctcaagatgactgcaacaggggtgcctgtcatcccaccactggtgatctcctggtgggcaggaacacgcagcttatggcttcttctacctgtgggctgagcagagcccagaaatactgcatcctcagttacctggagggggaacaaaaatgcttcatctgtgactctagatttccatatgatccgtatgaccaacccaacagccacaccattgagaatgtcattgtaagttttgaaccagacagagaaaagaaatggtggcaatctgaaaatggtcttgatcatgtcagcatcagactggacttagaggcattatttcggttcagccaccttatcctgacctttaagacttttcggcctgctgcaatgttagttgaacgttccacagactatggacacaactggaaagtgttcaaatattttgcaaaagactgtgccacttcctttcctaacatcacatctggccaggcccagggagtgggagacattgtttgtgactccaaatactcggatattgaaccctcaacaggtggagaggttgttttaaaagttttggatcccagttttgaaattgaaaacccttatagcccctacatccaagaccttgtgacattgacaaacctgaggataaactttaccaagctccacacccttggggatgctttgcttggaaggaggcaaaatgattcccttgataaatactactatgctctgtacgagatgattgttcggggaagctgcttttgcaatggccatgctagcgaatgtcgccctatgcagaagatgcggggagatgttttcagccctcctggaatggttcacggtcagtgtgtgtgtcagcacaatacagatggtccgaactgtgagagatgcaaggacttcttccaggatgctccttggaggccagctgcagacctccaggacaacgcttgcagatcgtgcagctgtaatagccactccagccgctgtcactttgacatgactacgtacctggcaagcggtggcctcagcgggggcgtgtgtgaagactgccagcacaacactgaggggcagcactgcgaccgctgcagacccctcttctacagggacccgctcaagaccatctcagatccctacgcgtgcattccttgtgaatgtgaccccgatgggaccatatctggtggcatttgtgtgagccactctgatcctgccttagggtctgtggccggccagtgcctttgtaaagagaacgtggaaggagccaaatgcgaccagtgcaaacccaaccactacggactaagcgccaccgaccccctgggctgccagccctgcgactgtaacccccttgggagtctgccattcttgacctgtgatgtggatacaggccaatgcttgtgcctgtcatatgtcaccggagcacactgcgaagaatgcactgttggatactggggcctgggaaatcatctccatgggtgttctccctgtgactgtgatattggaggtgcttattctaacgtgtgctcacccaagaatgggcagtgtgaatgccgcccacatgtcactggccgtagctgctctgaaccagcccctggctacttctttgctcctttgaatttctatctctacgaggcagaggaagccacaacactccaaggactggcgcctttgggctcggagacgtttggccagagtcctgctgttcacgttgttttaggagagccagttcctgggaaccctgttacatggactggacctggatttgccagggttctccctggggctggcttgagatttgctgtcaacaacattccctttcctgtggacttcaccattgccattcactatgaaacccagtctgcagctgactggactgtccagattgtggtgaacccccctggagggagtgagcactgcatacccaagactctacagtcaaagcctcagtcttttgccttaccagcggctacgagaatcatgctgcttcccacacccatctgtttagaaccagatgtacaatattccatagatgtctatttttctcagcctttgcaaggagagtcccacgctcattcacatgtcctggtggactctgctgcagtgcagtggcacaatctcggctcactgcaacctccgcctcctgagtgcaagcaattctcctgcttcagcttcccgagtagctgggattacaggcacccgccaccacacctggctaatttttgtatttttagtagagatggggtttcaccacattggccaggctggtctcaaactcctgacctcaggtga

SEQ ID NO: 1144 - DNA, 2735 bp, Homo sapiens
  source 1..2735: mol_type = genomic DNA
ctcaaggctcctccacacacacacccgctgaaccctgagcaccctgagctgctgagatggggcgggccggggctgccgccgtgatcccgggcctggccctgctctgggcagtggggctggggagtgccgcccccagcccccaccttcggctctccttccaagagctccaggcctggcatggtctccagactttcagcctggagcgaacctgctgctaccaggccttgctggtggatgaggagcgtggacgcctgtttgtgggtgccgagaaccatgtggcctccctcaacctggacaacatcagcaagcgggccaagaagctggcctggccggcccctgtggaatggcgagaggagtgcaactgggcagggaaggacattggtactgagtgcatgaacttcgtgaagttgctgcatgcctacaaccgcacccatttgctggcctgtggcacgggagccttccacccaacctgtgcctttgtggaagtgggccaccgggcagaggagcccgtcctccggctggacccaggaaggatagaggatggcaaggggaagagtccttatgaccccaggcatcgggctgcctccgtgctggtgggggaggagctatactcaggggtggcagcagacctcatgggacgagactttaccatctttcgcagcctagggcaacgtccaagtctccgaacagagccacacgactcccgctggctcaatgagcccaagtttgtcaaggtattttggatcccggagagcgagaacccagacgacgacaaaatctacttcttctttcgtgagacggcggtagaggcggcgccggcactgggacgcctgtccgtgtcccgcgttggccagatctgccggaacgacgtgggcggccagcgcagcctggtcaacaagtggacgacgttcctgaaggcgcggctggtgtgctcggtgcccggcgtcgagggcgacacccacttcgatcagctccaggatgtgtttctgttgtcctcgcgggaccaccggaccccgctgctctatgccgtcttctccacgtccagcagcatcttccagggctctgcggtgtgcgtgtacagcatgaacgacgtgcgccgggccttcttgggaccctttgcacacaaggaggggcccatgcaccagtgggtgtcataccagggtcgcgtcccctacccgcggcaggcatgtgccccagcaagacctttggcaccttcagttccaccaaggacttcccagacgatgtcatccagtttgcgcggaaccaccccctcatgtacaactctgtcctgcccactggggggcgccctcttttcctacaagttggagccaattacaccttcactcaaattgccgcggaccgggttgcagccgctgacggacactatgacgtcctcttcattggcacagacgttggcacggtgctgaaggtgatctcggtccccaagggcagtaggcccagcgcagaggggctgctcctggaggagctgcacgtgtttgaggactcggccgctgtcaccagcatgcaaatttcttccaagaggcaccagctgtacgtagcctcgcggagcgcggtggcccagatcgcgttgcaccgctgcgctgcccacggccgcgtctgcaccgaatgctgtctggcgcgtgacccctactgcgcctgggacggggtcgcgtgcacgcgcttccagcccagtgccaagaggcggttccggcggcaagacgtaaggaatggcgaccccagcacgttgtgctccggagactcgtctcgtcccgcgctgctggaacacaaggtgttcggcgtggagggcagcagcgcctttctggagtgtgagccccgctcgctgcaggcgcgcgtggagtggactttccagcgcgcaggggtgacagcccacacccaggtgctggcagaggagcgcaccgagcgcaccgcccggggactactgctgcgcaggctgcggcgccgggactcgggcgtgtacttgtgcgccgccgtcgagcagggctttacgcaaccgctgcgtcgcctgtcgctgcacgtgttgagtgctacgcaggccgaacgactggcgcgggccgaggaggctgcgcccgccgcgccgccgggccccaaactctggtaccgggactttctgcagctggtggagccgggcggaggtggcagcgcgaactccctgcgcatgtgccgcccgcagcctgcgctgcagtcactgcccctggagtcgcggagaaagggccgtaaccggaggacccacgcccctgagcctcgcgctgagcgggggccgcgcagcgcaacgcactggtgaccagactgtccccacgccgggaaccaagcaggagacgacaggcgagagaggagccagacagaccctgaaaagaaggacgggttggggccgggcacattgggggtcaccggccgatggagacaccaaccgacaggccctggctgagggcagctgcgcgggcttatttattaacaggataacccttgaatgtagcagccccgggagggcggcacaggtcgggcgcaggattcagccggagggaagggacggggaagccgagctccagagcaacgaccagggccgaggaggtgcctggagtgcccaccctgggagacagaccccacctccttgggtagtgagcagtgagcagaaagctgtgaacaggctgggctgctggaggtggggcgaggcaggccgactgtactaaagtaacgcaataaacgcattatcagcc

SEQ ID NO: 1145 - DNA, 465 bp, Homo sapiens
  source 1..465: mol_type = genomic DNA
ctatttatgttgcacaagattgtacaggtttacaattctgatgtaattgataaacagagtgcttccatgacttctgataatgcagatgacaaagctgttattattctagttcctgttagacttggtggagaaagaaccaacaccgactacttagaatttgtgaagggtattttaagcctggaatattgtgtgggtattattggtggcaaacctaaacagtcatattactttgctggatttcaagatgacagtttgatttacatggatcctcattactgccaatcttttgtagatgtcagcataaaggatttccctcttgaggtcattttgtgatccagtattttaattcagaaaaatttgagaatacataaatgaaacatgtaattattacatggttttgattgttttcccagttggtgcttttacagactaaagtaattttacagaataaaataacttaaatca

SEQ ID NO: 1146 - DNA, 873 bp, Homo sapiens
  source 1..873: mol_type = genomic DNA
gggagccactgggactactgggtccgggagggggaagggagggctgcgagcccgaacgcgcggcgagaaggccgaggggagggaggggagcgaggagcgggaggaggaagggagggagccgaggcgagggggaggcggcgcctgggcccgagccgccccagccctggctcctctccccggaacaggcccccgacagctgctctcgggagccgcctcccgacacccgagccccgccggcgcctcccgctcccggctcccggctcctggctccctccgcctcccccgcccctcgccccgccgccgaagaggccccgctcccgggtcggacgcctgggtctgccgggaagagcgatgagaggtgtctgaaggtggctattcactgagcgatggggttggacttgaaggaatgccaagagatgctgcccccacccccttaggcccgagggatcaggagctatgggaccagaggccctgtcatctttactgctgctgctcttggtggcaagtggagatgctgacatgaagggacattttgatcctgccaagtgccgctatgccctgggcatgcaggaccggaccatcccagacagtgacatctctgcttccagctcctggtcagattccactgccgcccgccacagcaggttggagagcagtgacggggatggggcctggtgccccgcagggtcggtgtttcccaaggaggaggagtacttgcaggtggatctacaacgactccacctggtggctctggtgggcacccagggacggcatgccgggggcctgggcaaggagttctcccggagctaccggctgcgttactcccgggatggtcgccgctggatgggctggaaggaccgctggggtcaggag

SEQ ID NO: 1147 - DNA, 867 bp, Homo sapiens
  source 1..867: mol_type = genomic DNA
attgcgtagttccgaataccctcggccacacctggccttctccatgctcggaataacttcctgcagcgaccaacaggctaaagagggggaaggtctggagggatccagcaccggctcctcctccggcaaccacggtgggagcggcggaggaaatggacataaacccgggtgtgaaaagccagggaatgaagcccgcgggagcggggaatctgggattcagaactctgagacgtctcctgggatgtttaactttgacactttctggaagaattttaaatccaagctgggtttcatcaactgggatgccataaacaagaaccaggtcccgccccccagcacccgagccctcctctacttcagccgactctgggaggatttcaaacagaacactcctttcctcaactggaaagcaattattgagggtgcggacgcgtcatcactgcagaaacgtgcaggcagagacgatcagaactacaattacaaccagcatgcgtatcccactgcctatggtgggaagtactcagtcaagacccctgcaaaggggggagtctcaccttcttcctcggcttcccgggtgcaacctggcctgctgcagtgggtgaagttttggtaggcaatttcttgcaaccaccaccgaggccccgaaaagcactggtcgtcagggagctcctccccttggcccccagcctgtgccagccctggcccggctgccacacctctgtttcctaggctggggacccagcttgtctctccttgtttcttcccactgcactgtggtgcttcagtggccaccagcctcgtcacatacaccagcatctttctgtacctcctccctttggtgacctgaagtcactgtgacagttctcc

SEQ ID NO: 1148 - DNA, 528 bp, Homo sapiens
  source 1..528: mol_type = genomic DNA
ggtcgcgcggagattgctgggcggttcttgccggaagcggagagcggctgatcgcagtccggaggtgaggcggaactctgaggtggtccattatggctgacatgcaaaatctggtagaaagattggagagggcagtgggccgcctggaggcagtatctcatacctctgacatgcaccgtgggtatgcagacagtccttcaaaagcaggagcagctccatatgtgcaggcttacattaaggagttccataccaccggactggcctggagcaaaacggggcctgtggcaaaagaactgagcggactgccatctggaccctctgccggatcatgtcctcctccccctccaccatgcccccctcctcccccagtctctaccatttcatgctcatatgagtctgcttcccgctcatcactgttcgcgcagattaatcagggggagagcattacacatgccctgaaacatgtatctgatgacatgaagactcacaagaaccctgccctgaaggctcagagtggtccagtacgca

SEQ ID NO: 1149 - DNA, 935 bp, Homo sapiens
  source 1..935: mol_type = genomic DNA
tgcaaaagaggagcggctgggctgggggactccatgcgggggcgatggacagggcggcgctcctgggactggcccgcttgtgcgcgctgtgggcagccctgctcgtgctgttcccctacggagcccaaggaaactggatgtggttgggcattgcctccttcggggttccagagaagctgggctgcgccaatttgccgctgaacagccgccagaaggagctgtgcaagaggaaaccgtacctgctgccgagcatccgagagggcgcccggctgggcattcaggagtgcgggagccagttcagacacgagagatggaactgcatgatcaccgccgccgccactaccgccccgatgggcgccagccccctctttggctacgagctgagcagcggctgtcgccaagttgatgtcagtagactgccgctgccacggagtttccggctcctgtgctgtgaaaacatgctggaaaaccatgtcttcttttgaaaagattggccatttgttgaaggataaatatgaaaacagtatccagatatcagacaaaacaaagaggaaaatgcgcaggagagaaaaagatcagaggaaaataccaatccataaggatgatctgctctatgttaataagtctcccaactactgtgtagaagataagaaactgggaatcccagggacacaaggcagagaatgcaaccgtacatcagagggtgcagatggctgcaacctcctctgctgtggccgaggttacaacacccatgtggtcaggcacgtggagaggtgtgagtgtaagttcatctggtgctgctatgtccgttgcaggaggtgtgaaagcatgactgatgtccacacttgcaagtaaccactccatccagccttgggcaagatgcctcagcaatatacaatggcattgcaaccagagaggtgcccatccctgtgcag

SEQ ID NO: 1150 - DNA, 4065 bp, Homo sapiens
  source 1..4065: mol_type = genomic DNA
agtcagtccgcgaggagagtccgcggtggcggcgacggtggcgagagccgcgggggccgtaggaagccaaccttccctgcttctccggggccctcgccccctcctccccacaaaatcagggatggaggcgcctccccggcaccctcttagcagccctccccaggaaaagtgtcccccctgagctcctaacgctccccaacagctacccctgccccccacgccatggggcccggggccccttttgcccgggtggggtggccactgccgcttctggttgtgatggcggcaggggtggctccggtgtgggcctcccactccccccatctcccgcggcctcactcgcgggtccccccgcacccctcctcagaacggcgcgcagtgtacatcggggcactgtttcccatgagcgggggctggccagggggccaggcctgccagcccgcggtggagatggcgctggaggacgtgaatagccgcagggacatcctgccggactatgagctcaagctcatccaccacgacagcaagtgtgatccaggccaagccaccaagtacctatatgagctgctctacaacgaccctatcaagatcatccttatgcctggctgcagctctgtctccacgctggtggctgaggctgctaggatgtggaacctcattgtgctttcctatggctccagctcaccagccctgtcaaaccggcagcgtttccccactttcttccgaacgcacccatcagccacactccacaaccctacccgcgtgaaactctttgaaaagtggggctggaagaagattgctaccatccagcagaccactgaggtcttcacttcgactctggacgacctggaggaacgagtgaaggaggctggaattgagattactttccgccagagtttcttctcagatccagctgtgcccgtcaaaaacctgaagcgccaggatgcccgaatcatcgtgggacttttctatgagactgaagcccggaaagttttttgtgaggtgtacaaggagcgtctctttgggaagaagtacgtctggttcctcattgggtggtatgctgacaattggttcaagatctacgacccttctatcaactgcacagtggatgagatgactgaggcggtggagggccacatcacaactgagattgtcatgctgaatcctgccaatacccgcagcatttccaacatgacatcccaggaatttgtggagaaactaaccaagcgactgaaaagacaccctgaggagacaggaggcttccaggaggcaccgctggcctatgatgccatctgggccttggcactggccctgaacaagacatctggaggaggcggccgttctggtgtgcgcctggaggacttcaactacaacaaccagaccattaccgaccaaatctaccgggcaatgaactcttcgtcctttgagggtgtctctggccatgtggtgtttgatgccagcggctctcggatggcatggacgcttatcgagcagcttcagggtggcagctacaagaagattggctactatgacagcaccaaggatgatctttcctggtccaaaacagataaatggattggagggtcccccccagctgaccagaccctggtcatcaagacattccgcttcctgtcacagaaactctttatctccgtctcagttctctccagcctgggcattgtcctagctgttgtctgtctgtcctttaacatctacaactcacatgtccgttatatccagaactcacagcccaacctgaacaacctgactgctgtgggctgctcactggctttagctgctgtcttccccctggggctcgatggttaccacattgggaggaaccagtttcctttcgtctgccaggcccgcctctggctcctgggcctgggctttagtctgggctacggttccatgttcaccaagatttggtgggtccacacggtcttcacaaagaaggaagaaaagaaggagtggaggaagactctggaaccctggaagctgtatgccacagtgggcctgctggtgggcatggatgtcctcactctcgccatctggcagatcgtggaccctctgcaccggaccattgagacatttgccaaggaggaacctaaggaagatattgacgtctctattctgccccagctggagcattgcagctccaggaagatgaatacatggcttggcattttctatggttacaaggggctgctgctgctgctgggaatcttccttgcttatgagaccaagagtgtgtccactgagaagatcaatgatcaccgggctgtgggcatggctatctacaatgtggcagtcctgtgcctcatcactgctcctgtcaccatgattctgtccagccagcaggatgcagcctttgcctttgcctctcttgccatagttttctcctcctatatcactcttgttgtgctctttgtgcccaagatgcgcaggctgatcacccgaggggaatggcagtcggaggcgcaggacaccatgaagacagggtcatcgaccaacaacaacgaggaggagaagtcccggctgttggagaaggagaaccgtgaactggaaaagatcattgctgagaaagaggagcgtgtctctgaactgcgccatcaactccagtctcggcagcagctccgctcccggcgccacccaccgacacccccagaaccctctgggggcctgcccaggggaccccctgagccccccgaccggcttagctgtgatgggagtcgagtgcatttgctttataagtgagggtagggtgagggaggacaggccagtagggggagggaaagggagaggggaagggcaggggactcaggaagcagggggtccccatccccagctgggaagaacatgctatccaatctcatctcttgtaaatacatgtccccctgtgagttctgggctgatttgggtctctcatacctctgggaaacagacctttttctctcttactgcttcatgtaattttgtatcacctcttcacaatttagttcgtacctggcttgaagctgctcactgctcacacgctgcctcctcagcagcctcactgcatctttctcttcccatgcaacaccctcttctagttaccacggcaacccctgcagctcctctgcctttgtgctctgttcctgtccagcaggggtctcccaacaagtgctctttccaccccaaaggggcctctccttttctccactgtcataatctctttccatcttacttgcccttctatactttctcacatgtggctccccctgaattttgcttcctttgggagctcattcttttcgccaaggctcacatgctccttgcctctgctctgtgcactcacgctcagcacacatgcatcctcccctctcctgcgtgtgcccactgaacatgctcatgtgtacacacgcttttcccgtatgctttcttcatgttcagtcacatgtgctctcgggtgccctgcattcacagctacgtgtgcccctctcatggtcatgggtctgcccttgagcgtgtttgggtaggcatgtgcaatttgtctagcatgctgagtcatgtctttcctatttgcacacgtccatgtttatccatgtactttccctgtgtaccctccatgtaccttgtgtactttcttcccttaaatcatggtattcttctgacagagccatatgtaccctaccctgcacattgttatgcacttttccccaattcatgtttggtggggccatccacaccctctccttgtcacagaatctccatttctgctcagattccccccatctccattgcattcatgtactaccctcagtctacactcacaatcatcttctcccaagactgctcccttttgttttgtgtttttttgaggggaattaaggaaaaataagtgggggcaggtttggagagctgcttccagtggatagttgatgagaatcctgaccaaaggaaggcacccttgactgttgggatagacagatggacctatggggtgggaggtggtgtccctttcacactgtggtgtctcttggggaaggatctccccgaatctcaataaaccagtgaacagtgtga

SEQ ID NO: 1151 - DNA, 3678 bp, Homo sapiens
  source 1..3678: mol_type = genomic DNA
ctcccgacacccgagccccgccggcgcctcccgctcccggctcccggctcctggctccctccgcctcccccgcccctcgccccgccgccgaagaggccccgctcccgggtcggacgcctgggtctgccgggaagagcgatgagagagatgctgcccccacccccttaggcccgagggatcaggagctatgggaccagaggccctgtcatctttactgctgctgctcttggtggcaagtggagatgctgacatgaagggacattttgatcctgccaagtgccgctatgccctgggcatgcaggaccggaccatcccagacagtgacatctctgcttccagctcctggtcagattccactgccgcccgccacagcaggttggagagcagtgacggggatggggcctggtgccccgcagggtcggtgtttcccaaggaggaggagtacttgcaggtggatctacaacgactccacctggtggctctggtgggcacccagggacggcatgccgggggcctgggcaaggagttctcccggagctaccggctgcgttactcccgggatggtcgccgctggatgggctggaaggaccgctggggtcaggaggtgatctcaggcaatgaggaccctgagggagtggtgctgaaggaccttgggccccccatggttgcccgactggttcgcttctacccccgggctgaccgggtcatgagtgtctgtctgcgggtagagctctatggctgcctctggagggatggactcctgtcttacaccgcccctgtggggcagacaatgtatttatctgaggccgtgtacctcaacgactccacctatgacggacataccgtgggcggactgcagtatgggggtctgggccagctggcagatggtgtggtggggctggatgactttaggaagagtcaggagctgcgggtctggccaggctatgactatgtgggatggagcaaccacagcttctccagtggctatgtggagatggagtttgagtttgaccggctgagggccttccaggctatgcaggtccactgtaacaacatgcacacgctgggagcccgtctgcctggcggggtggaatgtcgcttccggcgtggccctgccatggcctgggagggggagcccatgcgccacaacctagggggcaacctgggggaccccagagcccgggctgtctcagtgccccttggcggccgtgtggctcgctttctgcagtgccgcttcctctttgcggggccctggttactcttcagcgaaatctccttcatctctgatgtggtgaacaattcctctccggcactgggaggcaccttcccgccagccccctggtggccgcctggcccacctcccaccaacttcagcagcttggagctggagcccagaggccagcagcccgtggccaaggccgaggggagcccgaccgccatcctcatcggctgcctggtggccatcatcctgctcctgctgctcatcattgccctcatgctctggcggctgcactggcgcaggctcctcagcaaggctgaacggagggtgttggaagaggagctgacggttcacctctctgtccctggggacactatcctcatcaacaaccgcccaggtcctagagagccacccccgtaccaggagccccggcctcgtgggaatccgccccactccgctccctgtgtccccaatggctctgcctacagtggggactatatggagcctgagaagccaggcgccccgcttctgcccccacctccccagaacagcgtcccccattatgccgaggctgacattgttaccctgcagggcgtcaccgggggcaacacctatgctgtgcctgcactgcccccaggggcagtcggggatgggccccccagagtggatttccctcgatctcgactccgcttcaaggagaagcttggcgagggccagtttggggaggtgcacctgtgtgaggtcgacagccctcaagatctggtcagtcttgatttcccccttaatgtgcgtaagggacaccctttgctggtagctgtcaagatcttacggccagatgccaccaagaatgccaggaatgatttcctgaaagaggtgaagatcatgtcgaggctcaaggaccccaacatcattcggctgctgggcgtgtgtgtgcaggacgaccccctctgcatgattactgactacatggagaacggcgacctcaaccagttcctcagtgcccaccagctggaggacaaggcagccgagggggcccctggggacgggcaggctgcgcaggggcccaccatcagctacccaatgctgctgcatgtggcagcccagatcgcctccggcatgcgctatctggccacactcaactttgtacatcgggacctggccacgcggaactgcctagttggggaaaatttcaccatcaaaatcgcagactttggcatgagccggaacctctatgctggggactattaccgtgtgcagggccgggcagtgctgcccatccgctggatggcctgggagtgcatcctcatggggaagttcacgactgcgagtgacgtgtgggcctttggtgtgaccctgtgggaggtgctgatgctctgtagggcccagccctttgggcagctcaccgacgagcaggtcatcgagaacgcgggggagttcttccgggaccagggccggcaggtgtacctgtcccggccgcctgcctgcccgcagggcctatatgagctgatgcttcggtgctggagccgggagtctgagcagcgaccacccttttcccagctgcatcggttcctggcagaggatgcactcaacacggtgtgaatcacacatccagctgcccctccctcagggagtgatccaggggaagccagtgacactaaaacaagaggacacaatggcacctctgcccttcccctcccgacagcccatcacctctaatagaggcagtgagactgcaggtgggctgggcccacccagggagctgatgccccttctccccttcctggacacactctcatgtccccttcctgttcttccttcctagaagcccctgtcgcccacccagctggtcctgtggatgggatcctctccaccctcctctagccatcccttggggaagggtggggagaaatataggatagacactggacatggcccattggagcacctgggccccactggacaacactgattcctggagaggtggctgcgcccccagcttctctctccctgtcacacactggaccccactggctgagaatctgggggtgaggaggacaagaaggagaggaaaatgtttccttgtgcctgctcctgtacttgtcctcagcttgggcttcttcctcctccatcacctgaaacactggacctgggggtagccccgccccagccctcagtcacccccacttcccacctgcagtcttgtagctagaacttctctaagcctatacgtttctgtggagtaaatattgggattggggggaaagagggagcaacggcccatagccttggggttggacatctctagtgtagctgccacattgatttttctataatcacttggggtttgtacatttttggggggagagacacagatttttacactaatatatggacctagcttgaggcaattttaatcccctgcactaggcaggtaataataaaggttgagttttccacaa

SEQ ID NO: 1152 - DNA, 2290 bp, Homo sapiens
  source 1..2290: mol_type = genomic DNA
cgcggatcggcgtccgcagcgggcggctgctgaggtgagggccgggccagaggagaggcatacccactggggcgtaggtctgggactccccctgtccgccctggcgcgacctcaggactctccgtgtcccctccgtgacccccgcggcccgggccgctctttgcatcttgtcttgcccacagctggcctcggccaggtccgagggcctggatgcgaccttggggcagcccctactcttccgggcagcccacttccgcggccaccggtgcagggcatgccccggggccgtggaggtgagggaaagaggcgcgagtcgcgttttaactccgcccccgtcccccaaggccgcgcctcgcagcctgggctgcaaactttagcgtcctttaagttacagacgtgcgtggggctccgtgaggaggtgggcgaagagaaaggctctgagtaaataggcaaggcccggggtgagcaggggctggaatccgaaagtgggaggcggcggccccccaccctccatagtccttccgccctctgctagcaccgaagtttagcccaggacgggggccgtttaagggcccggccctccgccgccgcgcacgtgagcggcaccaggaagctggctgggcgcagccttccctgaggctcgctggcaccggccgcacgcgtccatcccgggcctctgagcggagggggagccgaggctagagggagggcgcagtctgcccaaggtcagcggcagcggcagtttctgggcgccaagtgtgattggagtactccaggaagaggggcgtgaccagagctctagcgaagagacctgacattgtaaagctaggtttggcttctgatttccacagggggtttgagaatgggacgagggtgctttagagggaccggtaggctttccctgaggacggtaatcagggcatgatggttggctcagtggttatttcctgggcaggggtgactgttctttcagctcccagcactggagcgctcggcccctgccgcactggatgccagcagttactaaaagtgagcctggcatttcagctgccttgaggtgcagtgttggggatccagagccatgtcggacctgctactactgggcctgattgggggcctgactctcttactgctgctgacgctgctggcctttgccgggtactcagggctactggctggggtggaagtgagtgctgggtcaccccccatccgcaacgtcactgtggcctacaagttccacatggggctctatggtgagactgggcggcttttcactgagagctgcagcatctctcccaagctccgctccatcgctgtctactatgacaacccccacatggtgccccctgataagtgccgatgtgccgtgggcagcatcctgagtgaaggtgaggaatcgccctcccctgagctcatcgacctctaccagaaatttggcttcaaggtgttctccttcccggcacccagccatgtggtgacagccaccttcccctacaccaccattctgtccatctggctggctacccgccgtgtccatcctgccttggacacctacatcaaggagcggaagctgtgtgcctatcctcggctggagatctaccaggaagaccagatccatttcatgtgcccactggcacggcagggagacttctatgtgcctgagatgaaggagacagagtggaaatggcgggggcttgtggaggccattgacacccaggtggatggcacaggagctgacacaatgagtgacacgagttctgtaagcttggaagtgagccctggcagccgggagacttcagctgccacactgtcacctggggcgagcagccgtggctgggatgacggtgacacccgcagcgagcacagctacagcgagtcaggtgccagcggctcctcttttgaggagctggacttggagggcgaggggcccttaggggagtcacggctggaccctgggactgagcccctggggactaccaagtggctctgggagcccactgcccctgagaagggcaaggagtaacccatggcctgcaccctcctgcagtgcagttgctgaggaactgagcagactctccagcagactctccagccctcttcctccttcctctgggggaggaggggttcctgagggacctgacttcccctgctccaggcctcttgctaagccttctcctcactgccctttaggctcccagggccagaggagccagggactattttctgcaccagcccccagggctgccacccctgttgtgtctttttttcagactcacagtggagcttccag

SEQ ID NO: 1153 - DNA, 1569 bp, Homo sapiens
  source 1..1569: mol_type = genomic DNA
agtgcatgacacagccagttaaatgcctctgtgagtttaccatctgaaaggaggcaaatcctgactttcgtttcttctctctactagctggcaatatagcaactatgaagagaaaagctactaataaaattaacccaacgcatagaagacttttttttctcttctaaaaacaactaagtaaagacttaaatttaaacacatcattttacaacctcatttcaaaatgaagacttttacctggaccctaggtgtgctattcttcctactagtggacactggacattgcagaggtggacaattcaaaattaaaaaaataaaccagagaagataccctcgtaccattaaagacatgatcaccaggatggaccttgaaaacctgaaggatgtgctctccaggcagaagcgggagatagatgttctgcaactggtggtggatgtagatggaaacattgtgaatgaggtaaagctgctgagaaaggaaagccgtaacatgaactctcgtgttactcaactctatatgcaattattacatgagattatccgtaagagggataattcacttgaactttcccaactggaaaacaaaatcctcaatgtcaccacagaaatgttgaagatggcaacaagatacagggaactagaggtgaaatacgcttccttgactgatcttgtcaataaccaatctgtgatgatcactttgttggaagaacagtgcttgaggatattttcccgacaagacacccatgtgtctcccccacttgtccaggtggtgccacaacatattcctaacagccaacagtatactcctggtctgctgggaggtaacgagattcagagggatccaggttatcccagagatttaatgccaccacctgatctggcaacttctcccaccaaaagccctttcaagataccaccggtaactttcatcaatgaaggaccattcaaagactgtcagcaagcaaaagaagctgggcattcggtcaatggaattttctgggccgaatacagaggcgggtcatactccttaagagcagttcagatgatgatcaagcctattgactgaagagagacactcgccaatttaaatgacacagaactttgtacttttcagctcttaaaaatgtaaatgttacatgtatattacttggcacaatttatttctacacagaaagtttttaaaatgaattttaccgtaactataaaagggaacctataaatgtagtttcatctgtcgtcaattactgcagaaaattatgtgtatccacaacctagttattttaaaaattatgttgactaaatacaaagtttgttttctaaaatgtaaatatttgccacaatgtaaagcaaatcttagctatattttaaatcataaataacatgttcaagatacttaacaatttatttaaaatctaagattgctctaacgtctagtgaaaaaaatatttttaaaatttcagccaaataatgcattttatttataaaaatacagacagaaaattagggagaaacctctagttttgccaatagaaaatgcttcttccattgaataaaagttatttcaaattg

SEQ ID NO: 1154 - DNA, 1073 bp, Homo sapiens
  source 1..1073: mol_type = genomic DNA
tttctgcacgtctgcaaaaggaagggagggaagcactccatcatctcactgggaagaacggcacgggcatacctgcagctactggggttccactgggcttgagggtcgatttttcaccttttgaaggacaagatgcattggaagatgttgctgcttctgctgttgtattacaatgctgaggcttctatgtgccacaggtggagcagggctgtgctcttccctgccgcccaccggccaaagaggtcctcatcactgccattgaacccagtcctgcagacctccctggaggaggtggagctgctctacgagttcctgctggccgaacttgagatcagccctgacctgcagatctccatcaaggacgaggagctggcctccttgcggaaggcctcagacttccgcaccgtctgcaacaacgtcatccccaagagcatcccagacatccgccggctcagcgccagcctctccagccaccctggcatcctcaagaaagaagactttgaaaggacagtgctgaccctggcctacacagcctaccgcacagccctgtcccacggccatcagaaggacatctgggcgcagtccctcgttagcctcttccaggccctgaggcacgacttgatgcgctcctcacagccgggagtacctccctgagagactggcccacaccaggacctcagagcagggaccagcacagtaatccagaaagtcttcattctctactccatttacagagaccagcaacaaaactcttaccgctgacacagagcagcagagatcaaacagtaaccccgatgctcttttctccttgtagtttcctggaagacacatctgattcatgccatcatgtgacctgggctggaagaaagggctggaatggtcattcaagacgcctccatgggcagaatggtttgcctatggcaggcagaattctgatatgcttcaacccagagcagtggccacacactcaagagtgagaacaggccgggcacagaggctcacgcctgtaatcccagcactttaggaggctgagacaggaggattatttgaggtcaggagttcaagaccagcct

SEQ ID NO: 1155 - DNA, 747 bp, Homo sapiens
  source 1..747: mol_type = genomic DNA
aggcccttccgcaatcggagccctcacagaggccaaactgatataaatctgcttaggaggcctgattcacagacgctacaggatggagcggggcgcaggagccaagctgctgccgctgctgctgcttctgcgggcgactggtttcacatgtgcacagacagatggccggaacggctacacggcggtcatcgaagtgaccagcgggggtccctggggcgactgggcctggcctgagatgtgtcccgatggattcttcgccagcgggttctcgctcaaggtggagcctccccaaggcattcctggcgacgacactgcactgaatgggatcaggctgcactgcgcgcgcgggaacgtcctaggcaatacgcacgtgctggggcgaatggagtgagccgctgtggtgtcgcggcggcgcctacctagtggctttctcgcttcgcgtggaggcacccacgaccctcggtgacaacacagcagcgaacaacgtgcgcttccgctgttcagacggcgaggaactgcaggggcctgggctgagctggggagactttggagactggagtgaccattgccccaagggcgcgtgcggcctgcagaccaagatccagggacctagaggcctcggcgatgacactgcgctgaacgacgcgcgcttattctgctgccgcagttgaacggcgccgccgccgccgctctctcccgggccaggaggctagtcccacctcttgctattaaagcttctctgagttg

SEQ ID NO: 1156 - DNA, 709 bp, Homo sapiens; identical to SEQ ID NO: 820
  source 1..709: mol_type = genomic DNA

SEQ ID NO: 1157 - DNA, 1996 bp, Homo sapiens
  source 1..1996: mol_type = genomic DNA
cctacagtggggactatatggagcctgagaagccaggcgccccgcttctgcccccacctccccagaacagcgtcccccattatgccgaggctgacattgttaccctgcagggcgtcaccgggggcaacacctatgctgtgcctgcactgcccccaggggcagtcggggatgggccccccagagtggatttccctcgatctcgactccgcttcaaggagaagcttggcgagggccagtttggggaggtgcacctgtgtgaggtcgacagccctcaagatctggtcagtcttgatttcccccttaatgtgcgtaagggacaccctttgctggtagctgtcaagatcttacggccagatgccaccaagaatgccagcttctccttgttctccaggaatgatttcctgaaagaggtgaagatcatgtcgaggctcaaggacccaaacatcattcggctgctgggcgtgtgtgtgcaggacgaccccctctgcatgattactgactacatggagaacggcgacctcaaccagttcctcagtgcccaccagctggaggacaaggcagccgagggggcccctggggacgggcaggctgcgcaggggcccaccatcagctacccaatgctgctgcatgtggcagcccagatcgcctccggcatgcgctatctggccacactcaactttgtacatcgggacctggccacgcggaactgcctagttggggaaaatttcaccatcaaaatcgcagactttggcatgagccggaacctctatgctggggactattaccgtgtgcagggccgggcagtgctgcccatccgctggatggcctgggagtgcatcctcatggggaagttcacgactgcgagtgacgtgtgggcctttggtgtgaccctgtgggaggtgctgatgctctgtagggcccagccctttgggcagctcaccgacgagcaggtcatcgagaacgcgggggagttcttccgggaccagggccggcaggtgtacctgtcccggccgcctgcctgcccgcagggcctatatgagctgatgcttcggtgctggagccgggagtctgagcagcgaccacccttttcccagctgcatcggttcctggcagaggatgcactcaacacggtgtgaatcacacatccagctgcccctccctcagggagcgatccaggggaagccagtgacactaaaacaagaggacacaatggcacctctgcccttcccctcccgacagcccatcacctctaatagaggcagtgagactgcaggtgggctgggcccacccagggagctgatgccccttctccccttcctggacacactctcatgtccccttcctgttcttccttcctagaagcccctgtcgcccacccagctggtcctgtggatgggatcctctccaccctcctctagccatcccttggggaagggtggggagaaatataggatagacactggacatggcccattggagcacctgggccccactggacaacactgattcctggagaggtggctgcgcccccagcttctctctccctgtcacacactggaccccactggctgagaatctgggggtgaggaagacaagaaggagaggaaaatgtttccttgtgcctgctcctgtacttgtcctcagcttgggcttcttcctcctccatcacctgaaacactggacctgggggtagccccgccccagccctcagtcacccccacttcccacttgcagtcttgtagctagaacttctctaagcctatacgtttctgtggagtaaatattgggattggggggaaagagggagcaacggcccatagccttggggttggacatctctagtgtagctgccacattgatttttctataatcacttggggtttgtacatttttggggggagagacacagatttttacactaatatatggacctagcttgaggcaattttaatcccctgcactaggcaggtaataataaaggttgagttttccacaa

SEQ ID NO: 1158 - DNA, 1313 bp, Homo sapiens
  source 1..1313: mol_type = genomic DNA
ccgggccagaggagaggcatacccactggggcgtagctgccttgaggtgcagtgttggggatccagagccatgtcggacctgctactactgggcctgattgggggcctgactctcttactgctgctgacgctgctggcctttgccgggtactcagggctactggctggggtggaagtgagtgctgggtcaccccccatccgcaacgtcactgtggcctacaagttccacatggggctctatggtgagactgggcggcttttcactgagagctgcagcatctctcccaagctccgctccatcgctgtctactatgacaacccccacatggtgccccctgataagtgccgatgtgccgtgggcagcatcctgagtgaaggtgaggaatcgccctcccctgagctcatcgacctctaccagaaatttggcttcaaggtgttctccttcccggcacccagccatgtggtgacagccaccttcccctacaccaccattctgtccatctggctggctacccgccgtgtccatcctgccttggacacctacatcaaggagcggaagctgtgtgcctatcctcggctggagatctaccaggaagaccagatccatttcatgtgcccactggcacggcagggagacttctatgtgcctgagatgaaggagacagagtggaaatggcgggggcttgtggaggccattgacacccaggtggatggcacaggagctgacacaatgagtgacacgagttctgtaagcttggaagtgagccctggcagccgggagacttcagctgccacactgtcacctggggcgagcagccgtggctgggatgacggtgacacccgcagcgagcacagctacagcgagtcaggtgccagcggctcctcttttgaggagctggacttggagggcgaggggcccttaggggagtcacggctggaccctgggactgagcccctggggactaccaagtggctctgggagcccactgcccctgagaagggcaaggagtaacccatggcctgcaccctcctgcagtgcagttgctgaggaactgagcagactctccagcagactctccagccctcttcctccttcctctgggggaggaggggttcctgagggacctgacttcccctgctccaggcctcttgctaagccttctcctcactgccctttaggctcccagggccagaggagccagggactattttctgcaccagcccccagggctgccacccctgttgtgtctttttttcagactcacagtggagcttccaggacccagaataaagccaatgatttacttgtttca

SEQ ID NO: 1159 - DNA, 873 bp, Homo sapiens
  source 1..873: mol_type = genomic DNA
gggagccactgggactactgggtccgggagggggaagggagggctgcgagcccgaacgcgcggcgagaaggccgaggggagggaggggagcgaggagcgggaggaggaagggagggagccgaggcgagggggaggcggcgcctgggcccgagccgccccagccctggctcctctccccggaacaggcccccgacagctgctctcgggagccgcctcccgacacccgagccccgccggcgcctcccgctcccggctcccggctcctggctccctccgcctcccccgcccctcgccccgccgccgaagaggccccgctcccgggtcggacgcctgggtctgccgggaagagcgatgagaggtgtctgaaggtggctattcactgagcgatggggttggacttgaaggaatgccaagagatgctgcccccacccccttaggcccgagggatcaggagctatgggaccagaggccctgtcatctttactgctgctgctcttggtggcaagtggagatgctgacatgaagggacattttgatcctgccaagtgccgctatgccctgggcatgcaggaccggaccatcccagacagtgacatctctgcttccagctcctggtcagattccactgccgcccgccacagcaggttggagagcagtgacggggatggggcctggtgccccgcagggtcggtgtttcccaaggaggaggagtacttgcaggtggatctacaacgactgcacctggtggctctggtgggcacccagggacggcatgccgggggcctgggcaaggagttctcccggagctaccggctgcgttactcccgggatggtcgccgctggatgggctggaaggaccgctggggtcaggag

SEQ ID NO: 1160 - DNA, 628 bp, Homo sapiens
  source 1..628: mol_type = genomic DNA
aagccgagctgggcgagaagtaggggagggcggtgctccgccgcggtggcggttgctatcgcttcgcagaacctactcaggcagccagctgagaagagttgagggaaagtgctgctgctgggtctgcagacgcgatggataacgtgcagccgaaaataaaacatcgccccttctgcttcagtgtgaaaggccacgtgaagatgctgcggctggcactaactgtgacatctatgaccttttttatcatcgcacaagcccctgaaccatatattgttatcactggatttgaagtcaccgttatcttatttttcatacttttatatgtactcagacttgatcgattaatgaagtggttattttggcctttgcttgatattatcaactcactggtaacaacagtattcatgctcatcgtatctgtgttggcactgataccagaaaccacaacattgacagttggtggagggttattttaactcagtataggagctagaggaagagatttccgaagtctgcaccccgcgcagagcactactgtaacttccaagggagcgctgggagcagcgggatcgggttttccggcacccgggcctgggtggcagggaagaatgtgccgggatccgcctca

SEQ ID NO: 1161 - DNA, 1287 bp, Homo sapiens
  source 1..1287: mol_type = genomic DNA
aaagctggacgaggcagccggacccgtctgcgctcgagcatggagacggagcgcctgggagggcacgtccggggcgctggagacgccaggcccgagtagcttctccatggagcctgcccagagcggtcccttctcgcaggattcgccccaagtcctgtgcggctgctgagagcgctccttgctctgtaaagtggatgtcaggtggatctatgtttctgaaggaacaaagactcaaagaaggcaccgccaaggaagtttgagacgcgggagaatgcaggctgcgtgctggtacgtgcttttcctcctgcagcccaccgtctacttgagttttcaaagtaagaaaattacaaaacaagctaacagaggtttgtcttcttcctagagtgggcaagatctttagaaccacaactcaggtttgacttggtcacatgtgccaatttaacgaacggtggaaagtcagaacttctgaaatcaggaagcagcaaatccacactaaagcacatatggacagaaagcagcaaagacttgtctatcagccgactcctgtcacagacttttcgtggcaaagagaatgatacagatttggacctgagatatgacaccccagaaccttattctgagcaagacctctgggactggctgaggaactccacagaccttcaagagcctcggcccagggccaagagaaggcccattgttaaaacgggcaagtttaagaaaatgtttggatggggcgattttcattccaacatcaaaacagtgaagctgaacctgttgataactgggaaaattgtagatcatggcaatgggacatttagtgtttatttcaggcataattcaactggtcaagggaatgtatctgtcagcttggtaccccctacaaaaatcgtggaatttgacttggcacaacaaaccgtgattgatgccaaagattccaagtcttttaattgtcgcattgaatatgaaaaggttgacaaggctaccaagaacacactctgcaactatgacccttcaaaaacctgttaccaggagcaaacccaaagtcatgtatcctggctctgctccaagccctttaaggtgatctgtatttacatttccttttatagtacagattataaactggtacagaaagtgtgccctgactacaactaccacagtgacacaccttactttccctcgggatgaaggtgaacatgggggtgagactgaagcctgaggaattaaaggtcatatgacagggctgttacctcaaagaagaaggtcacatctgttgcctggaatgtgtct

SEQ ID NO: 1162 - DNA, 610 bp, Homo sapiens
  source 1..610: mol_type = genomic DNA
ggaggtgaggcggaactctgaggacatagacctggaggcttctgctgctgctgcaggccaaggaatggaaaggtggtccattatggctgacatgcaaaatctggtagaaagattggagagggcagtgggccgcctggaggcagtatctcatacctctgacatgcaccgtgggtatgcagacagtccttcaaaagcaggagcagctccatatgtgcaggcatttgactcgctgcttgctggtcctgtggcagagtacttgaagatcagtaaagagattgggggagacgtgcagaaacatgcggagatggtccacacaggtttgaagttggagcgagctctgttggttacagcttctcagtgtcaacagccagcagaaaataagctttccgatttgttggcacccatctcagagcagatcaaagaagtgataacctttcgggagaagaaccgaggcagcaagttgtttaatcacctgtcagctgtcagcgaaagtatccaggccctgggctgggtggctatggctcccaagcctggcccttatgtgaaagaaatgaatgatgccgccatgttttatacaaaccgagtcctcaaagagtacaaagatgtggat

SEQ ID NO: 1163 - DNA, 3523 bp, Homo sapiens
  source 1..3523: mol_type = genomic DNA
ctcctcctcctcccctccgtcggtcagtcagtccgcgaggagagtccgcggtggcggcgacggtggcgagagccgcgggggccgtaggaagccaaccttccctgcttctccggggccctcgccccctcctccccacaaaatcagggatggaggcgcctccccggcaccctcttagcagccctccccaggaaaagtgtcccccctgagctcctaacgctccccaacagctacccctgccccccacgccatggggcccggggccccttttgcccgggtggggtggccactgccgcttctggttgtgatggcggcaggggtggctccggtgtgggcctcccactccccccatctcccgcggcctcactcgcgggtccccccgcacccctcctcagaacggcgcgcagtgtacatcggggcactgtttcccatgagcgggggctggccagggggccaggcctgccagcccgcggtggagatggcgctggaggacgtgaatagccgcagggacatcctgccggactatgagctcaagctcatccaccacgacagcaagtgtgatccaggccaagccaccaagtacctatatgagctgctctacaacgaccctatcaagatcatccttatgcctggctgcagctctgtctccacgctggtggctgaggctgctaggatgtggaacctcattgtgctttcctatggctccagctcaccagccctgtcaaaccggcagcgtttccccactttcttccgaacgcacccatcagccacactccacaaccctacccgcgtgaaactctttgaaaagtggggctggaagaagattgctaccatccagcagaccactgaggtcttcacttcgactctggacgacctggaggaacgagtgaaggaggctggaattgagattactttccgccagagtttcttctcagatccagctgtgcccgtcaaaaacctgaagcgccaggatgcccgaatcatcgtgggacttttctatgagactgaagcccggaaagttttttgtgaggtgtacaaggagcgtctctttgggaagaagtacgtctggttcctcattgggtggtatgctgacaattggttcaagatctacgacccttctatcaactgcacagtggatgagatgactgaggcggtggagggccacatcacaactgagattgtcatgctgaatcctgccaatacccgcagcatttccaacatgacatcccaggaatttgtggagaaactaaccaagcgactgaaaagacaccctgaggagacaggaggcttccaggaggcaccgctggcctatgatgccatctgggccttggcactggccctgaacaagacatctggaggaggcggccgttctggtgtgcgcctggaggacttcaactacaacaaccagaccattaccgaccaaatctaccgggcaatgaactcttcgtcctttgagggtgtctctggccatgtggtgtttgatgccagcggctctcggatggcatggacgcttatcgagcagcttcagggtggcagctacaagaagattggctactatgacagcaccaaggatgatctttcctggtccaaaacagataaatggattggagggtcccccccagctgaccagaccctggtcatcaagacattccgcttcctgtcacagaaactctttatctccgtctcagttctctccagcctgggcattgtcctagctgttgtctgtctgtcctttaacatctacaactcacatgtccgttatatccagaactcacagcccaacctgaacaacctgactgctgtgggctgctcactggctttagctgctgtcttccccctggggctcgatggttaccacattgggaggaaccagtttcctttcgtctgccaggcccgcctctggctcctgggcctgggctttagtctgggctacggttccatgttcaccaagatttggtgggtccacacggtcttcacaaagaaggaagaaaagaaggagtggaggaagactctggaaccctggaagctgtatgccacagtgggcctgctggtgggcatggatgtcctcactctcgccatctggcagatcgtggaccctctgcaccggaccattgagacatttgccaaggaggaacctaaggaagatattgacgtctctattctgccccagctggagcattgcagctccaggaagatgaatacatggcttggcattttctatggttacaaggggctgctgctgctgctgggaatcttccttgcttatgagaccaagagtgtgtccactgagaagatcaatgatcaccgggctgtgggcatggctatctacaatgtggcagtcctgtgcctcatcactgctcctgtcaccatgattctgtccagccagcaggatgcagcctttgcctttgcctctcttgccatagttttctcctcctatatcactcttgttgtgctctttgtgcccaagatgcgcaggctgatcacccgaggggaatggcagtcggaggcgcaggacaccatgaagacagggtcatcgaccaacaacaacgaggaggagaagtcccggctgttggagaaggagaaccgtgaactggaaaagatcattgctgagaaagaggagcgtgtctctgaactgcgccatcaactccagtctcggcagcagctccgctcccggcgccacccaccgacacccccagaaccctctgggggcctgcccaggggaccccctgagccccccgaccggcttagctgtgatgggagtcgagtgcatttgctttataagtgagggtgcatgtccgttccgaggaatgggatttaatgacctttgatgccaacccatatgacagcgtgaaaaaaatcaaagaacatgtccggtctaagaccaaggttcctgtgcaggaccaggttcttttgctgggctccaagatcttaaagccacggagaagcctctcatcttatggcattgacaaagagaagaccatccaccttaccctgaaagtggtgaagcccagtgatgaggagctgcccttgtttcttgtggagtcaggtgatgaggcaaagaggcacctcctccaggtgcgaaggtccagctcagtggcacaagtgaaagcaatgatcgagactaagacgggtataatccctgagacccagattgtgacttgcaatggaaagagactggaagatgggaagatgatggcagattacggcatcagaaagggcaacttactcttcctggcatgttattgtattggagggtgaccaccctgggcatggggtgttggcaggggtcaaaaagcttatttcttttaatctcttactcaacgaacacatcttctgatgatttcccaaaattaatgagaatgagatgagtagagtaagatttgggtgggatgggtaggatgaagtatattgcccaactctatgtttctttgattctaacacaattaattaagtgacatgatttttactaatgtattactgagactagtaaataaatttttaaggcaaaatagagcattcaaagcca

SEQ ID NO: 1164 - DNA, 2245 bp, Homo sapiens
  source 1..2245: mol_type = genomic DNA
ggccccggagctccacccatgtccccttggtgctgccgcttcttgtacttctgctgctggccccggctaggcaggccgccgcccagcgctgcccacaggcctgcatctgtgacaactccaggcgacacgttgcctgccggtaccagaacctcactgaggtgccagacgccatccctgagctgacccagcggctggacctgcagggcaatttgctgaaggtgatccccgcagccgccttccagggcgtgcctcacctcacacacctggacctgcgccactgcgaggtggagctggtggccgagggcgccttccgtggcctgggccgcctgctcctgctcaacctggcctccaaccacctgcgtgagctgccccaggaggcgctggacgggctgggctcgttgcggcggctggagctggaggggaacgcactggaggagctgcggccggggacgttcggggcactgggtgcgctggccacgctaaacctggcccacaacgccctggtttacctgcccgccatggccttccaggggctactgcgcgtccgctggctgcggctgtcgcacaacgcgctcagcgtgctggcccccgaggccctggctggcctgcccgccctgagacggctcagcctacaccacaacgagctccaggctctgcccgggcctgtcttgtcccaggcccgcggcctggcccgtctggagctgggccacaacccgctcacctacgcgggcgaggaggacgggctggcgctgcccggcctgcgggagctgctgctggacggcggggccctgcaggccctgggtcccagggccttcgcacactgtccgcgcctgcacaccctcgacctccgcgggaaccagctagacaccctgcccccgctgcagggcccgggccagctgcgccggctgcggctgcaggggaatccgctgtggtgcggctgccaggcgcggcccctactcgagtggctggcgcgggcgcgcgtgcgctcggacggcgcgtgccaggggccgcggcgcctgcggggcgaggctctggacgccctgcggccctgggacctgcgctgccctggggacgcggcgcaggaagaggaagagctggaagagcgggctgtggccgggccccgcgcccctccgcgcggccctccgcgcggccccggggaggagcgggcagtcgcgccttgccctcgcgcctgcgtgtgcgtccccgagtcccggcacagcagctgcgagggctgcggcctgcaggcggtgccccgcggcttccccagcgacacccagctcctggacctgaggcggaaccacttcccctcggtgccccgagcggccttccccggcctgggccacctggtgtcgctgcacctgcagcactgcggcatcgcggagctggaagcgggcgccctggccgggctgggccgcctgatctacctgtacctctccgacaaccagctcgcaggcctcagcgctgctgcccttgaaggggctccccgcctcggctacctgtacctagaacgcaaccgtttcctgcaggtgccaggggctgccctgcgcgccctgcccagcctcttctccctgcacctgcaggacaacgctgtggaccgcctggcacctggggacctggggagaacacgggccttgcgctgggtctacctgagtggaaaccgcatcaccgaagtgtcccttggggcgctgggcccagctcgggagctggagaagctgcacctggacaggaatcagctgcgagaggtgcccactggggccttggaggggctgcctgccctcctggagctgcagctctcgggcaacccactcagggccttgcgtgacggagccttccagcctgtgggcaggtcgctgcagcacctcttcctgaacagcagtggcctggagcagatttgtcctggggccttttcaggcctggggcccgggctccagagcctgcacctgcagaagaaccagcttcgggccctgcctgccctgcccagtgccaggagaacccccatcaaaggaagacagtgtggagcagataaggtggggaaggagaagggtcgtctctgagcacggagcaggctggtcctgccttgacccagcccggtggctcttactctcgccaggaacaggctccgacgagatcttcctggcaccctgagggtcgtcctccagcaggggcttcttggacccctgtctgaggggtcgcgtcttagtgggcgggattcttttccctttgaataaaaatggattcaaaccca

SEQ ID NO: 1165 - DNA, 2446 bp, Homo sapiens
  source 1..2446: mol_type = genomic DNA
acttggctctgcctccgctgactctagcgccatggcccggcacctgctcctcccccttgtgatgcttgtcatcagtcccatcccaggagccttccaggactcagctctcagtcctacccaggaagaacctgaagatctggactgcgggcgccctgagccctcggcccgcatcgtggggggctcaaacgcgcagccgggcacctggccttggcaagtgagcctgcaccatggaggtggccacatctgcgggggctccctcatcgccccctcctgggtcctctccgctgctcactgtttcatgacgaatgggacgctggagcccgcggccgagtggtcggtactgctgggcgtgcactcccaggacgggcccctggacggcgcgcacacccgcgcagtggccgccatcgtggtgccggccaactacagccaagtggagctgggcgccgacctggccctgctgcgcctggcctcacccgccagcctgggccccgccgtgtggcctgtctgcctgccccgcgcctcacaccgcttcgtgcacggcaccgcctgctgggccaccggctggggagacgtccaggaggcagatcctctgcctctcccctgggtgctacaggaagtggagctaaggctgctgggcgaggccacctgtcaatgtctctacagccagcccggtcccttcaacctcactctccagatattgccagggatgctgtgtgctggctacccagagggccgcagggacacctgccagggtgactctggggggcccctggtctgtgaggaaggcggccgctggttccaggcaggaatcaccagctttggctttggctgtggacggagaaaccgccctggagttttcactgctgtggctacctatgaggcatggatacgggagcaggtgatgggttcagagcctgggcctgcctttcccacccagccccagaagacccagtcagatccccaggagcccagggaggagaactgcaccattgccctgcctgagtgcgggaaggccccgcggccaggggcctggccctgggaggcccaggtgatggtgccaggatccagaccctgccatggggcgctggtgtctgaaagctgggtcttggcacctgccagctgctttctggacccgaacagctccgacagcccaccccgcgacctcgacgcctggcgcgtgctgctgccctcgcgcccgcgcgcggagcgggtggcgcgcctggtgcagcacgagaacgcttcgtgggacaacgcctcggacctggcgctgctgcagctgcgcacgcccgtgaacctgagcgcggcttcgcggcccgtgtgcctaccccacccggaacactacttcctgcccgggagccgctgccgcctggcccgctggggccgcggggaacccgcgcttggcccaggcgcgctgctggaggcggagctgttaggcggctggtggtgccactgcctgtacggccgccagggggcggcagtaccgctgcccggagacccgccgcacgcgctctgccctgcctaccaggaaaaggaggaggtgggcagctgctggaatgactcgcgttggagccttttgtgccaggaggaggggacctggtttctggctggaatcagagactttcccagtggctgtctacgtccccgagccttcttccctctgcagactcatggcccatggatcagccatgtgactcggggagcctacctggaggaccagctagcctgggattggggccctgatggggaggagactgagacacagacttgtcccccacacacagagcatggtgcctgtggcctgcggctggaggctgctccagtgggggtcctgtggccctggctggcagaggtgcatgtggctggtgatcgagtctgcactgggatcctcctggccccaggctgggtcctggcagccactcactgtgtcctcaggccaggctctacaacagtgccttacattgaagtgtatctgggccgggcaggggccagctccctcccacagggccaccagatgacctcagcaccgcccctcctgtgccagatgacggaagggtcctggatcctcgtgggcatggctgttcaagggagccgggagctgtttgctgccattggtcctgaagaggcctggatctcccagacagtgggagaggccaacttcctgccccccagtggctccccacactggcccactggaggcagcaatctctgccccccagaactggccaaggcctcgggatccccgcatgcagtctacttcctgctcctgctgactctcctgatccagagctgaggggctagggtcccagcaccacttcccccttctccaccctctacttcccgcccagtggggctggaatgtggcccagccggctggaacctcaagggccccacccaccgagattgcagcggctctggctaattgggcctcagtgcccgggctattttg

SEQ ID NO: 1166 - DNA, 730 bp, Homo sapiens
  source 1..730: mol_type = genomic DNA
agtcatgcgttttatggcaggccctgcagggagccagagtctgggtcccctgtgcttccacagcagcccccaagccctctacacggtcctcttaatagtgctggtcatgatgagcttggtgtttggtaagtttgttcctgtcaattgggaaccccctcaaccacttccattccccaaatacctgcgctgctaccgatgcctcttggagaccaaggagttagggtgccttctgggatctgacatctgcctcaccccagctggcagcagctgcatcactctccacaaaaagaacagcagcggttctgacgtcatggtgagtgactgccgaagtaaggagcagatgagtgattgttcaaatacccgaacttctccggtgtctggcttctggatattctctcaatactgcttcctggatttctgcaatgaccctcaaaacagagggctctatactccttagtgtgactgcagcaaactttggtgtaaaattccaccagtttccagccaccttcctgacttctatctgggcttggccaggacttctagtccctcataccagccctccttgcctccctccagccactggaccccagccttggctcttcctcttggttgacgcccttcagcacacttactgctactctgtacccccagccctactgcccaccaggtttcctctcttgtcccctagtccctggatgtttctcccaaataaatttgtgtgtaaactgtt

SEQ ID NO: 1167 - DNA, 1257 bp, Homo sapiens
  source 1..1257: mol_type = genomic DNA
gcagagatgaagttccaggggcccctggcctgcctcctgctggccctctgcctgggcagtggggaggctggccccctgcagagcggagaggaaagcactgggacaaatattggggaggcccttggacatggcctgggagacgccctgagcgaaggggtgggaaaggccattggcaaagaggccggaggggcagctggctctaaagtcagtgaggcccttggccaagggaccagagaagcagttggcactggagtcaggcaggttccaggctttggcgtagcagatgctttgggcaacagggtcggggaagcagcccatgctctgggaaacactgggcacgagattggcagacaggcagaagatgtcattcgacacggagcagatgctgtccgcggctcctggcagggggtgcctggccacaatggtgcttgggaaacttctggaggccatggcatctttggctctcaaggtggccttggaggccagggccagggcaatcctggaggtctggggactccgtgggtccacggataccccggaaactcagcaggcagctttggaatgaatcctcagggagctccctggggtcaaggaggcaatggagggccaccaaactttgggaccaacactcagggagctgtggcccagcctggctatggttcagtgagagccagcaaccagaatgaagggtgcacgaatcccccaccatctggctcaggtggaggctccagcaactctgggggaggcagcggctcacagtcgggcagcagtggcagtggcagcaatggtgacaacaacaatggcagcagcagtggtggcagcagcagtggcagcagcagtggcggcagcagtggcggcagcagtggtggcagcagtggcaacagtggtggcagcagaggtgacagcggcagtgagtcctcctggggatccagcaccggctcctcctccggcaaccacggtgggagcggcggaggaaatggacataaacccgggtgtgaaaagccagggaatgaagcccgcgggagcggggaatctgggattcagaactctgagacgtctcctgggatgtttaactttgacactttctggaagaattttaaatccaagctgggtttcatcaactgggatgccataaacaaggaccagagaagctctcgcatcccgtgacctccagacaaggagccaccagattggatgggagcccccacactccctccttaaaacaccaccctctcatcactaatctcagcccttgcc

SEQ ID NO: 1168 - DNA, 2994 bp, Homo sapiens
  source 1..2994: mol_type = genomic DNA
aaaaatgcataaagagccaagtgcttatattctggccaagttatgaggctctgagaacaagagcttgaggggaagactgttaaccccatccacgccaccagaattagctctttcccttttggtttgcaagcactgcctgtaaagccctcgcatgagaggccagcctgctagggaaatccaggaatctgcaacaaaaacgatgacagtctgaaatactctctggtgccaacctccaaattctcgtctgtcacttcagacccccactagttgacagagcagcagaatttcaactccagtagacttgaatatgcctctgggcaaagaagcagagctaacgaggaaagggatttaaagagtttttcttgggtgtttgtcaaacttttattccctgtctgtgtgcagaggggattcaacttcaatttttctgcagtggctctgggtccagccccttacttaaaggccataagatgttttattgaaagaaactttcaatatcaagtaatccaaccaaccttctaagataagccttttccttcaacacaaagaagtgcattttgccaaatctggaaagcatgaagactgggctttttttcctatgtctcttgggaactgcagctgcaatcccgacaaatgcaagattattatctgatcattccaaaccaactgctgaaacggtagcacctgacaacactgcaatccccagtttaagggctgaagctgaagaaaatgaaaaagaaacagcagtatccacagaagacgattcccaccataaggctgaaaaatcatcagtactaaagtcaaaagaggaaagccatgaacagtcagcagaacagggcaagagttctagccaagagctgggattgaaggatcaagaggacagtgatggtcacttaagtgtgaatttggagtatgcaccaactgaaggtacattggacataaaagaagatatgagtgagcctcaggagaaaaaactctcagagaacactgattttttggctcctggtgttagttccttcacagattctaaccaacaagaaagtatcacaaagagagaggaaaaccaagaacaacctagaaattattcacatcatcagttgaacaggagcagtaaacatagccaaggcctaagggatcaaggaaaccaagagcaggatccaaatatttccaatggagaagaggaagaagaaaaagagccaggtgaagttggtacccacaatgataaccaagaaagaaagacagaattgcccagggagcatgctaacagcaagcaggaggaagacaatacccaatctgatgatattttggaagagtctgatcaaccaactcaagtaagcaagatgcaggaggatgaatttgatcagggtaaccaagaacaagaagataactccaatgcagaaatggaagaggaaaatgcatcgaacgtcaataagcacattcaagaaactgaatggcagagtcaagagggtaaaactggcctagaagctatcagcaaccacaaagagacagaagaaaagactgtttctgaggctctgctcatggaacctactgatgatggtaataccacgcccagaaatcatggagttgatgatgatggcgatgatgatggcgatgatggcggcactgatggccccaggcacagtgcaagtgatgactacttcatcccaagccaggcctttctggaggccgagagagctcaatccattgcctatcacctcaaaattgaggagcaaagagaaaaagtacatgaaaatgaaaatataggtaccactgagcctggagagcaccaagaggccaagaaagcagagaactcatcaaatgaggaggaaacgtcaagtgaaggcaacatgagggtgcatgctgtggattcttgcatgagcttccagtgtaaaagaggccacatctgtaaggcagaccaacagggaaaacctcactgtgtctgccaggatccagtgacttgtcctccaacaaaaccccttgatcaagtttgtggcactgacaatcagacctatgctagttcctgtcatctattcgctactaaatgcagactggaggggaccaaaaaggggcatcaactccagctggattattttggagcctgcaaatctattcctacttgtacggactttgaagtgattcagtttcctctacggatgagagactggctcaagaatatcctcatgcagctttatgaagccaactctgaacacgctggttatctaaatgagaagcagagaaataaagtcaagaaaatttacctggatgaaaagaggcttttggctggggaccatcccattgatcttctcttaagggactttaagaaaaactaccacatgtatgtgtatcctgtgcactggcagtttagtgaacttgaccaacaccctatggatagagtcttgacacattctgaacttgctcctctgcgagcatctctggtgcccatggaacactgcataacccgtttctttgaggagtgtgaccccaacaaggataagcacatcaccctgaaggagtggggccactgctttggaattaaagaagaggacatagatgaaaatctcttgttttgaacgaagattttaaagaactcaactttccagcatcctcctctgttctaaccacttcagaaatatatgcagctgtgatacttgtagatttatatttagcaaaatgttagcatgtatgacaagacaatgagagtaattgcttgacaacaacctatgcaccaggtatttaacattaactttggaaacaaaaatgtacaattaagtaaagtcaacatatgcaaaatactgtacattgtgaacagaagtttaattcatagtaatttcactctctgcattgacttatgagataattaatgattaaactattaatgataaaaataatgcatttgtattgttcataatatcatgtgcacttcaagaaaatggaatgctactcttttgtggtttacgtgtattattttcaatatcttaataccctaataaagagtcc

SEQ ID NO: 1169 - DNA, 873 bp, Homo sapiens; identical to SEQ ID NO: 1159
  source 1..873: mol_type = genomic DNA

SEQ ID NO: 1170 - DNA, 1873 bp, Homo sapiens
  source 1..1873: mol_type = genomic DNA
gtccctagagacagcctggaaagattgggtgccagctgcagagaggagagcaaggcgaccaaacgcaggctgtggctgcctgcagcccatcctgcccccagcacctagagtcatctttagaaatgcaagcctgatcgtggaatccaccttcctaacacccttcagtgccctcctcttcgttacacccttactatacaaacgatagtccatggaccagcagcatcaacataaccagggagcttgttagaaatgtagaatctggtccatcccaaacctgacgaagcagaagctgcattttgccaagatcccagggaatttgtgtgcccgttatggtttgcgaagtgcttcccaagagaacatacggcaagccagagggatctttgcagatcttgctcctttcattctctggcctcatcttgtcgctctcctccatccgtgcccacatccccactgtactggaccgcttgcagctccttgaatgcagcatagtcttgttttcttttttgcagtgattctacatctttcccatcttctccacctggatgcctccatccatcctttcagacttcccttctctagcaaacctttcttgctaattcccatgtctaacacaacacttccccatactgcatggccattatcctttctgcatcagactgtgagcaccttgaaggcagtggcagtgactcattcattgtggcatctgcagattccagtggactgccaggcatgcaatagaaaatcaaaaaagatttactgctaaataatcctcaactccagtggcagctccatgtgccatttctcttccgctctggcctcggctcttcctgtgcctacctggggcttggctttcacctaggtgtctgcatggaagggagagcgacctggaggaccatcgccaatccatcaatagcctcccggttgagatgacttcagctctgatttggaagagctatgatattgtttataggagtgaattaatatgtgtaaaggttacaaagtaaacagttaaattaaattaattgtgctggagcaggtcaaacaggcttctgagagatgaacatacacatctctattaactccacattcagtgagtgtgggtaacttgaaattggctgggtcaccatttacatcatagaaattggcaaatagtacaaattagggctccctcacccctactcgggcatagagctggtacactagcacacctctggttatacatgcatgcgtgtgccaccagaacaaaacacctaacagcaggcacgttgcctctgttgcccaccattacagctcccgcacggagcagacagactcatggcaggaattgaatgcatgtttgtcgagtggaagcatgaacaaatccacaaaatgcccaagatgaggcaaagaaggacattggctcaaatgttaaacataagttaggagctgagataatgcccagaggaaaaatgttctgtaattctaagtaaaacccatctctaaggcaggatgctgcttatgagggctccacagacagatgggggaggcctgggtcctgcccttggaaagagtctgacagctcgacttctggaaacagccatctgcacaggtcaacatcttcttagctgacagggagcagatttgcagaccacatcacatttgaaattccagaagaaacttcttggagtctgctcttgtgcaaatgagcctagaaagcccgttaactttgggtggaggcttccactgtttggctatcccaagtgggcccaaagctaaggaaaacccaccagccctttgcttcctgcttcctctatttgtttgccccaggaaatcagaggtgatgacatgatttggcttgggcacgacaggaataaacgatatttaagagacgtca

SEQ ID NO: 1171 - DNA, 812 bp, Homo sapiens
  source 1..812: mol_type = genomic DNA
gttcaggaagtcatcaccttctcttgtcagggcatttctggggaccaacagctggccgaggctcagggatagagacggctgctccagctaaaggtgaatgttggagacacagtcgcgatgctgcccaagtcccggcgagccctaactatccaggagatcgctgcgctggccaggtcctccctgcatggtatttcccaggtggtgaaggaccacgtgaccaagcctaccgccatggcccagggccgagtggctcacctcattgagtggaagggctggagcaagccgagtgactcacctgctgccctggaatcagccttttcctcctattcagacctcagcgagggcgaacaagaggctcgctttgcagcaggagtggctgagcagtttgccatcgcggaagccaagctccgagcatggtcttcggtggatggcgaggactccactgatgactcctatgatgaggactttgctgggggaatggacacagacatggctgggcagctgcccctggggccgcacctccaggacctgttcaccggccaccggttctcccggcctgtgcgccagggctccgtggagcctgagagcgactgctcacagaccgtgtccccagacaccctgtgctctagtctgtgcagcctggaggatgggttgttgggctccccggcccggctggcctcccagctgctgggcgatgagctgcttctcgccaaactgccccccagccgggaaagtgccttccgcagcctgggcccactggaggcccaggactcactctacaactcgcccctcacagagtcctgcctttcccc

SEQ ID NO: 1172 - DNA, 3588 bp, Homo sapiens
  source 1..3588: mol_type = genomic DNA
agcctagagctggggcgaggtgggcatcaccactaggaatttctcctgaggcagtgagaagaggggacaaaggtttcaggactctctagctccttctgctctccccagtggacccctctgtctggcactgccatgccacttagctggggtcagcgtgggcctggggtgtggaatgtcccaccagggtatgacgggctgtagcttgcctggcaggcctgttggggctttcccagagcacagctcctggaaggaggggctgtgggctgccaggtgaggtgacttgggaagccttggccccacccccaggctggccccacccccagtccagcgtctcctgggcctagattccccagctgctgttctctggagggagatgctgcccccacccccttaggcccgagggatcaggagctatgggaccagaggccctgtcatctttactgctgctgctcttggtggcaagtggagatgctgacatgaagggacattttgatcctgccaagtgccgctatgccctgggcatgcaggaccggaccatcccagacagtgacatctctgcttccagctcctggtcagattccactgccgcccgccacagcaggttggagagcagtgacggggatggggcctggtgccccgcagggtcggtgtttcccaaggaggaggagtacttgcaggtggatctacaacgactgcacctggtggctctggtgggcacccagggacggcatgccgggggcctgggcaaggagttctcccggagctaccggctgcgttactcccgggatggtcgccgctggatgggctggaaggaccgctggggtcaggaggtgatctcaggcaatgaggaccctgagggagtggtgctgaaggaccttgggccccccatggttgcccgactggttcgcttctacccccgggctgaccgggtcatgagcgtctgtctgcgggtagagctctatggctgcctctggagggatggactcctgtcttacaccgcccctgtggggcagacaatgtatttatctgaggccgtgtacctcaacgactccacctatgacggacataccgtgggcggactgcagtatgggggtctgggccagctggcagatggtgtggtggggctggatgactttaggaagagtcaggagctgcgggtctggccaggctatgactatgtgggatggagcaaccacagcttctccagtggctatgtggagatggagtttgagtttgaccggctgagggccttccaggctatgcaggtccactgtaacaacatgcacacgctgggagcccgtctgcctggcggggtggaatgtcgcttccggcgtggccctgccatggcctgggagggggagcccatgcgccacaacctagggggcaacctgggggaccccagagcccgggctgtctcagtgccccttggcggccgtgtggctcgctttctgcagtgccgcttcctctttgcggggccctggttactcttcagcgaaatctccttcatctctgatgtggtgaacaattcctctccggcactgggaggcaccttcccgccagccccctggtggccgcctggcccacctcccaccaacttcagcagcttggagctggagcccagaggccagcagcccgtggccaaggccgaggggagcccgaccgccatcctcatcggctgcctggtggccatcatcctgctcctgctgctcatcattgccctcatgctctggcggctgcactggcgcaggctcctcagcaaggctgaacggagggtgttggaagaggagctgacggttcacctctctgtccctggggacactatcctcatcaacaaccgcccaggtcctagagagccacccccgtaccaggagccccggcctcgtgggaatccgccccactccgctccctgtgtccccaatggctctgcctacagtggggactatatggagcctgagaagccaggcgccccgcttctgcccccacctccccagaacagcgtcccccattatgccgaggctgacattgttaccctgcagggcgtcaccgggggcaacacctatgctgtgcctgcactgcccccaggggcagtcggggatgggccccccagagtggatttccctcgatctcgactccgcttcaaggagaagcttggcgagggccagtttggggaggtgcacctgtgtgaggtcgacagccctcaagatctggttagtcttgatttcccccttaatgtgcgtaagggacaccctttgctggtagctgtcaagatcttacggccagatgccaccaagaatgccaggaatgatttcctgaaagaggtgaagatcatgtcgaggctcaaggacccaaacatcattcggctgctgggcgtgtgtgtgcaggacgaccccctctgcatgattactgactacatggagaacggcgacctcaaccagttcctcagtgcccaccagctggaggacaaggcagccgagggggcccctggggacgggcaggctgcgcaggggcccaccatcagctacccaatgctgctgcatgtggcagcccagatcgcctccggcatgcgctatctggccacactcaactttgtacatcgggacctggccacgcggaactgcctagttggggaaaatttcaccatcaaaatcgcagactttggcatgagccggaacctctatgctggggactattaccgtgtgcagggccgggcagtgctgcccatccgctggatggcctgggagtgcatcctcatggggaagttcacgactgcgagtgacgtgtgggcctttggtgtgaccctgtgggaggtgctgatgctctgtagggcccagccctttgggcagctcaccgacgagcaggtcatcgagaacgcgggggagttcttccgggaccagggccggcaggtgtacctgtcccggccgcctgcctgcccgcagggcctatatgagctgatgcttcggtgctggagccgggagtctgagcagcgaccacccttttcccagctgcatcggttcctggcagaggatgcactcaacacggtgtgaatcacacatccagctgcccctccctcagggagcgatccaggggaagccagtgacactaaaacaagaggacacaatggcacctctgcccttcccctcccgacagcccatcacctctaatagaggcagtgagactgcaggtgggctgggcccacccagggagctgatgccccttctccccttcctggacacactctcatgtccccttcctgttcttccttcctagaagcccctgtcgcccacccagctggtcctgtggatgggatcctctccaccctcctctagccatcccttggggaagggtggggagaaatataggatagacactggacatggcccattggagcacctgggccccactggacaacactgattcctggagaggtggctgcgcccccagcttctctctccctgtcacacactggaccccactggctgagaatctgggggtgaggaggacaagaaggagaggaaaatgtttccttgtgcctgctcctgtacttgtcctcagcttgggcttcttcctcctccatcacctgaaacactg

SEQ ID NO: 1173 - DNA, 1624 bp, Homo sapiens
  source 1..1624: mol_type = genomic DNA
ggaaactgttttccaatttgattcttattggaaagcataacaaccagccagggcctgtgctgctggagcgggcagttatgtgcagggagacagctggttacggctggctcctggcctcgacggagcttctcagcctcttggagcctctgtcccctcagctgctgaaggaacacatctcctgcacttctcaagttgctgccggtgcgaaggtgactccagattctgcagtttgggctccgtagctgctcagcaaatgtcagcaggtccagaagcaaggctcctcagctgcagagtgaatgcaaatgccccttctgctctcctgcagctgcggcaggtggaagagctgtcgggggtgggaagggggcttggagggataaggatgggctggggagggctcccaaggcagtggacactgtgggctctggggactgcatggctgtggagggggcatgtgctgttgggctcccagcctcttggggtcctctctgtgccaagatagagcctgttaccctccctgagcaggtgtgagcagacacctgtcccctgccctgcatgggaagtgaacgatccactaagtggggaggtcagggtcagatccccggccttcccatgcaggatgactgctcaggcccaggacagtgggtggtcaacagaaaccccatccctgcccatagagggtgcttcccagttcacagtgacacagcctggcctgctcctcttccagccacccaaggcaagacacagagcaggaggctgaggctggtgtgagggaaagggggatgcagcaaggggatacctcaaccttgcccgagctacagacaggtgaggacttctccctcacctggtgttttccactgcattctgaagagcaggtgacacccaccccagggtggatccaggatggatctctgggtttcctgccatctacaatgaccctcctcatttcccctggctagctgccccctaggatggagaatgcatcatggtcactgacacttggcgcccttttccagcctcaatggcctggcagagccagtggggacacagcaataatgtgggtggcagtaataacagcagctgaaccacctgagcaccatcctgacgaggcatagcctgagctctgtgaacagtgaagtccatctggtctctcagtggcctgagagtgactctaactattatcctcattctctgaaggaggaaaacaaggcaaggggatttaaataatttttaaaggtcagataccttcacaaaggctgaagtgggagtcagatgatagtgtctgggtggagaccccatactcttaccctcaactctgagccatctgctatacaacatctatttgctgagtggaaggtgtgtagcctgaaccatgctcacttctggtccagagctctttcctcagggccctgggacattcacgtttagtgtacagtggtatatgtatgctgaattcctacattaggccagccacatagtcagcactgattgctaaaagaataactgaataaggataaatgcttgaggggatggataccccattctccatgatgcgattatttcacattccctgcttgtatcaaaacatctcatgtaccccataaatatatacacctactatgtactc

SEQ ID NO: 1174 - DNA, 2415 bp, Homo sapiens
  source 1..2415: mol_type = genomic DNA
acagttcaggaaacttaaaaggatggcatatggaagttgagtgaaggagaaagagagggaagtagaaaagaggagaaaaatgttaagcaaaaaaggtattttcccttggatattaacttgcatatctgaagaaatggcattccggacaatttgcgtgttggttggagtatttatttgttctatctgtgtgaaaggatcttcccagccccaagcaagagtttatttaacatttgatgaacttcgagaaaccaagacctctgaatacttcagcctttcccaccatcctttagactacaggattttattaatggatgaagatcaggaccggatatatgtgggaagcaaagatcacattctttccctgaatattaacaatataagtcaagaagctttgagtgttttctggccagcatctacaatcaaagttgaagaatgcaaaatggctggcaaagatcccacacacggctgtgggaactttgtccgtgtaattcagactttcaatcgcacacatttgtatgtctgtgggagtggcgctttcagtcctgtctgtacttacttgaacagagggaggagatcagaggaccaagttttcatgattgactccaagtgtgaatctggaaaaggacgctgctctttcaaccccaacgtgaacacggtgtctgttatgatcaatgaggagcttttctctggaatgtatatagatttcatggggacagatgctgctatttttcgaagtttaaccaagaggaatgcggtcagaactgatcaacataattccaaatggctaagtgaacctatgtttgtagatgcacatgtcatcccagatggtactgatccaaatgatgctaaggtgtacttcttcttcaaagaaaaactgactgacaataacaggagcacgaaacagattcattccatgattgctcgaatatgtcctaatgacactggtggactgcgtagccttgtcaacaagtggaccactttcttaaaggcgaggctggtgtgctcggtaacagatgaagacggcccagaaacacactttgatgaattagaggatgtgtttctgctggaaactgataacccgaggacaacactagtgtatggcatttttacaacatcaagctcagttttcaaaggatcagccgtgtgtgtgtatcatttatctgatatacagactgtgtttaatgggccttttgcccacaaagaagggcccaatcatcagctgatttcctatcagggcagaattccatatcctcgccctggaacttgtccaggaggagcatttacacccaatatgcgaaccaccaaggagttcccagatgatgttgtcacttttattcggaaccatcctctcatgtacaattccatctacccaatccacaaaaggcctttgattgttcgtattggcactgactacaagtatacaaagatagctgtggatcgagtgaacgctgctgatgggagataccatgtcctgtttctcggaacagatcggggtactgtgcaaaaagtggttgttcttcctactaacaactctgtcagtggcgagctcattctggaggagctggaagtctttaagaatcatgctcctataacaacaatgaaaatttcatctaaaaagcaacagttgtatgtgagttccaatgaaggggtttcccaggtatctctgcaccgctgccacatctatggtacagcctgtgctgactgctgcctggcgcgggacccttattgcgcctgggatggccattcctgttccagattctacccaactgggaaacggaggagccgaagacaagatgtgagacatggaaacccactgactcaatgcagaggatttaatctaaaagcatacagaaatgcagctgaaattgtccagtatggagtaaaaaataacaccacttttctggagtgtgcccccaagtctccgcaggcatctatcaagtggctgttacagaaagacaaagacaggaggaaagaggttaagctgaatgaacgaataatagccacttcacagggactcctgatccgctctgttcagggttctgaccaaggactttatcactgcattgctacagaaaatagtttcaagcagaccatagccaagatcaacttcaaagttttagattcagaaatggtggctgttgtgacggacaaatggtccccatggacctgggccagctctgtgagggctttacccttccacccgaaggacatcatgggggcattcagccactcagaaatgcagatgattaaccaatattgcaaagacactcggcagcaacatcagcagggagatgaatcacagaaaatgagaggggactatggcaagttaaaggccctcatcaatagtcggaaaagtagaaacaggaggaatcagttgccagagtcataatattttcttatgtgggtcttatgctt

SEQ ID NO: 1175 - DNA, 799 bp, Homo sapiens
  source 1..799: mol_type = genomic DNA
ctgccggtgagcgccagcttcagggtcccacccccccatgcctggctcttggctgaacatttcttcccagcgcttccagcagccagaggcaggcgcccaagctcgctggctgttgctgagggcctgtagagatgctgcccccacccccttaggcccgagggatcaggagctatgggaccagaggccctgtcatctttactgctgctgctcttggtggcaagtggagatgctgacatgaagggacattttgatcctgccaagtgccgctatgccctgggcatgcaggaccggaccatcccagacagtgacatctctgcttccagctcctggtcagattccactgccgcccgccacagcaggttggagagcagtgacggggatggggcctggtgccccgcagggtcggtgtttcccaaggaggaggagtacttgcaggtggatctacaacgactgcacctggtggctctggtgggcacccagggacggcatgccgggggcctgggcaaggagttctcccggagctaccggctgcgttactcccgggatggtcgccgctggatgggctggaaggaccgctggggtcaggaggtgatctcaggcaatgaggaccctgagggagtggtgctgaaggaccttgggccccccatggttgcccgactggttcgcttctacccccgggctgaccgggtcatgagcgtctgtctgcgggtagagctctatggctgcctctggagggatggactcctgtcttacaccgcccctgtggggcagacaatgtatttatctgaggccgtgtacc

SEQ ID NO: 1176 - DNA, 531 bp, Homo sapiens
  source 1..531: mol_type = genomic DNA
tagggggtcattgcctcaatagttccctcttggtgactggccagccctgtggtgacaggcacccagtgctggacttaaggggccacaagcgaaagttggccacaccacctgctgcccaggagtcatcccgccggcggtccaggaagggtcatctgccagcccccgtgcagccgtatgaacacggctgccttgaggtgcagtgttggggatccagagccatgtcggacctgctactactgggcctgattgggggcctgactctcttactgctgctgacgctgctggcctttgccgggtactcagggctactggctggggtggaagtgagtgctgggtcaccccccatccgcaacgtcactgtggcctacaagttccacatggggctctatggtgagactgggcggcttttcactgagagctgcagcatctctcccaagctccgctccatcgctgtctactatgacaacccccacatggtgccccctgataagtgccgatgtgccgtgggcagcatcctgagtgaaggtgagg

SEQ ID NO: 1177 - DNA, 3832 bp, Homo sapiens; identical to SEQ ID NO: 826
  source 1..3832: mol_type = genomic DNA

SEQ ID NO: 1178 - DNA, 1095 bp, Homo sapiens
  source 1..1095: mol_type = genomic DNA
gaccttccgcgcggacggtgggcaggcgacggcggcgtgtggatggaggccttcgcccttggcccagcgcggcggggcaggcggcggacccgggccgccggctccctgctctctcgggccgccatcctcctctttatctccgccttcctggtgcgggtgccctcatcagttggacacttggttcgattaccaagagcttttcgcttgaccaaagattcagtgaaaatagtgggatcaacaagttttccagtgaaagcgtatgtcatgctccatcaaaagagtccacacgtgttatgtgtaacgcaacaactgcgaaatgctgaactgatagacccatcattccaatggtatgggcctaaaggaaaagttgtttcagaaaaccgcactgcacaaataacatccacaggaagccttgtattccaaaattttgaggagagtatgagtggaatttatacatgtttcctcgaatataaacctactgtggaagaaattgttaaacgtcttcaactaaaatatgctatatatgcttatcgtgagcctcattattattatcagttcacagctcgatatcatgcagctccctgcaatagcatttataatatttcttttgagaagaaacttcttcagattttaagcaaactgcttcttgacctttcatgtgaaatttccttacttaagtctgaatgccatcgcgttaaaatgcaaagagctggtttgcaaaatgaattgttctttgcattttcagtttcatctctagacactgaaaaaggacccaagcgatgtacagaccataactgtgaaccttacaaaagactttttaaggctaaaaatctcatagagagattttttaatcaacaagtagaaattcttggcagacgtgcagaacaattacctcaaatatactatattgaaggtactctccaaatggtttggattaatcgctgctttccaggatatggaatgaatgtccagcaacatccaaaatgtcctgagtgctgtgtgatctgcagccctggatcatataacccccgtgatggaattcattgccttcaatgcaatagcagcctggtgtatggagcaaaaacgtgcttataa

SEQ ID NO: 1179 - DNA, 4326 bp, Homo sapiens
  source 1..4326: mol_type = genomic DNA
gctggccctggtactgtgcactgtggacagccgcccgcccgcccagctggccctcagccacgccggtcgcctcttggcctcctcgacagcagcctctgtccccaacaccctgcgcctggagctgcgagggccacagcccagggatgagggtttctacagctgctctgcccgcagccctctgggccaggccaacacgtccctggagctgcggctggagggtgtgcgggtgatcctggctccggaggctgccgtgcctgaaggtgcccccatcacagtgacctgtgcggaccctgctgcccacgcacccacactctatacttggtaccacaacggtcgttggctgcaggagggtccagctgcctcactctcattcctggtggccacgcgggctcatgcaggcgcctactcttgccaggcccaggatgcccagggcacccgcagctcccgtcctgctgccctgcaagtcctctatgcccctcaggacgctgtcctgtcctccttccgggactccagggccagatccatggctgtgatacagtgcactgtggacagtgagccacctgctgagctggccctatctcatgatggcaaggtgctggccacgagcagcggggtccacagcttggcatcagggacaggccatgtccaggtggcccgaaacgccctacggctgcaggtgcaagatgtgcctgcaggtgatgacacctatgtttgcacagcccaaaacttgctgggctcaatcagcaccatcgggcggttgcaggtagaaggtgcacgcgtggtggcagagcctggcctggacgtgcctgagggcgctgccctgaacctcagctgccgcctcctgggtggccctgggcctgtgggcaactccacctttgcatggttctggaatgaccggcggctgcacgcggagcctgtgcccactctcgccttcacccacgtggctcgtgctcaagctgggatgtaccactgcctggctgagctccccactggggctgctgcctctgctccagtcatgctccgtgtgctctaccctcccaagacgcccaccatgatggtcttcgtggagcctgagggtggcctccggggcatcctggattgccgagtggacagcgagccgctcgccagcctgactctccaccttggcagtcgactggtggcctccagtcagccccagggtgctcctgcagagccacacatccatgtcctggcttcccccaatgccctgagggtggacatcgaggcgctgaggcccagcgaccaaggggaatacatctgttctgcctcaaatgtcctgggctctgcctctacctccacctactttggggtcagaggtgaggggagggggctccatctcccaggccactctgcacaaaagcccagctcttaggcccaaaggcttccttccctgtatccctcctgctgcagcatgatttgcctgtcgactctaaactgattgctcggggcacccttgtgtggagagcttcagcgataaagcaaaagttagaaggtgtcatcttgggtgggtccccttggaaggaagcactgggggcctgcagctgtggctgctctgagtcccgctctgtgttccagccctgcaccgcctgcatcagttccagcagctgctctgggtcctgggactgctggtgggcctcctgctcctgctgttgggcctgggggcctgctacacctggaggtgggtctggagctgggagtgggccagaagattggggtaaggcagcccacctcgtcttctccccaaattcccccaggtcctttaggacctcctattaagttcacaggctgcctacttcccagactgcccctccaaattggaaatcccttctagaattgtccctaaatcctccttgctgtagtttccttctttcctcctctctgccctggctgtgctaaagcaagggctagggaggaagacagaggaagcacccactctccatgaggttcccacgctcttgtggtctggagccagcctgtggggagcgggagaggaatgggggcaggaggtggggaggggagaggctctctgagtccactccgggccttgcagaaggaggcgtgtttgtaagcagagcatgggcgagaattcggtggagatggcttttcagaaagagaccacgcaggtatccattcaacacacacgggcagatataatacccagctaacccacagtgccaactggcatctggagactgctgtcatttagaggatggtgcctgggaccaaggggaggttggggagagtgtgcagggaaccaggagcccctcaggagataggagagccctgttctgctcggggcagagggaatccctgtgtcagctggcggctggcttagaggactaggggagactttctggacttggcagcatcccctccatttccaagacacgtatgttctgactcccccacctttgttctgaggcctcttccccactcccaagcctgcccgtcacctgggcagaagtgaaagtcagtttctcctcccctgtggtgtgtcccttctgcagctgattcacctggtaggccagggctccaagtcacacttccagccatgcacactcccaccaatcctcttgggaccccacctgaggctgggggcctgggggcctgccctggctcccagaggcctcctgtgaccagggttttctctgtgggaagctcattgatcctgatgcagccacatgtgagacctcaacctgtgccccacccctgggctgaccagtggtgttgcctgccctccggaggagaaagtggccagaatctgtgatgactccagcctatgaatgtgaatgaggcagtgttgagtcctgcccgcctctacgaaaacagctctgtgacatctgactttttatgacctggccccaagcctcttgcccccccaaaaatgggtggtgagaggtctgcccaggagggtgttgaccctggaggacactgaagagcactgagctgatctcgctctctcttctctggatctcctcccttctctccatttctccctcaaaggaagccctgccctttcacatccttctcctcgaaagtcaccctggactttggttggattgcagcatcctgcatcctcagaggctcaccaaggcattctgtattcaacagagtatcagtcagcctgctctaacaagagaccaaatacagtgacttcaacatgatagaattttatttttctctcccacgctagtctggctgttacgatggtttatgatgttggggctcaggatccttctatcttccttttctctatccctaaaatgatgcctttgattgtgaggctcaccatggccccgctttgtccacatgccctccagccagaagaaggaagagtggaggtagaagcacacccatgcccatggtggacgcaactcagaagctgcacaggacttttccactcacttcccattggctggagtattgtcacatggctactgcaagctacaagggagactgggaaatgtagtttttattttgagtccagaggacatttggaattggacttccaaaggactcccaactgtgagctcatccctgagacttttgacattgttgggaatgccaccagcaggccatgttttgtctcagtgcccatctactgagggccagggtgtgcccctggccattctggttgtgggcttcctggaagaggtgatcactctcacactaagactgaggaaataaaaaaggtttggtgttttcctagggagagagcatgccaggcagtggagttgcctaagcagacatccttgtgccagatttggcccctgaaagaagagatgccctcattcccaccaccaccccccctacccccagggactgggtactaccttactggcccttacaagagtggagggcagacacagatgttgtcagcatccttattcctgctccagatgcatctctgttcatgactgtgtgagctcctgtccttttcctggagaccctgtgtcgggctgttaaagagaatgagttaccaagaaggaatgacgtgcccctgcgaatcagggaccaacaggagagagctcttgagtgggctagtgactccccctgcagcctggtggagatggtgtgaggagcgaagagccctctgctctaggatttgggttgaaaaacagagagagaagtggggagttgccacaggagctaacacgctgggaggcagttgggggcgggtgaactttgtgtagccgaggccgcaccctccctcattccaggctcattcattttcatgctccattgccagactcttgctgggagcccgtccagaatgtcctcccaataaaactccatcctatgacgcaa

SEQ ID NO: 1180 - DNA, 1496 bp, Homo sapiens
  source 1..1496: mol_type = genomic DNA
ggcagagatgaagttccaggggcccctggcctgcctcctgctggccctctgcctgggcagtggggaggctggccccctgcagagcggagaggaaagcactgggacaaatattggggaggcccttggacatggcctgggagacgccctgagcgaaggggtgggaaaggccattggcaaagaggccggaggggcagctggctctaaagtcagtgaggcccttggccaagggaccagagaagcagttggcactggagtcaggcaggttccaggctttggcgtagcagatgctttgggcaacagggtcggggaagcagcccatgctctgggaaacactgggcacgagattggcagacaggcagaagatgtcattcgacacggagcagatgctgtccgcggctcctggcagggggtgcctggccacaatggtgcttgggaaacttctggaggccatggcatctttggctctcaaggtggccttggaggccagggccagggcaatcctggaggtctggggactccgtgggtccacggataccccggaaactcagcaggcagctttggaatgaatcctcagggagctccctggggtcaaggaggcaatggagggccaccaaactttgggaccaacactcagggagctgtggcccagcctggctatggttcagtgagagccagcaaccagaatgaagggtgcacgaatcccccaccatctggctcaggtggaggctccagcaactctgggggatccagcaccggctcctcctccggcaaccacggtgggagcggcggaggaaatggacataaacccgggtgtgaaaagccagggaatgaagcccgcgggagcggggaatctgggattcagggcttcagaggacagggagtttccagcaacatgagggaaataagcaaagagggcaatcgcctccttggaggctctggagacaattatagggggcaagggtcgagctggggcagtggaggaggtgacgctgttggtggagtcaatactgtgaactctgagacgtctcctgggatgtttaactttgacactttctggaagaattttaaatccaagctgggtttcatcaactgggatgccataaacaagaaccaggtcccgccccccagcacccgagccctcctctacttcagccgactctgggaggatttcaaacagaacactcctttcctcaactggaaagcaattattgagggtgcggacgcgtcatcactgcagaaacgtgcaggcagagacgatcagaactacaattacaaccagcatgcgtatcccactgcctatggtgggaagtactcagtcaagacccctgcaaaggggggagtctcaccttcttcctcggcttcccgggtgcaacctggcctgctgcagtgggtgaagttttggtaggcaatttcttgcaaccaccaccgaggccccgaaaagcactggtcgtcagggagctcctccccttggcccccagcctgtgccagccctggcc

SEQ ID NO: 1181 - DNA, 4298 bp, Homo sapiens
  source 1..4298: mol_type = genomic DNA
gcccgggagctctccctggtccccggcgccgcctccttccctcccggctccccgctccccgctcccgtggctgccgccgccccggggaagaagagacaggggtggggtttgggggaagcgagagaggaggggagagaccctggccaggctggagcctggattcgaggggaggagggacgggaggaggagaaaggtggaggagaagggaggggggagcggggaggagcggccggcctggggccttgaggcccggggagagccggggagccgggcccgcgcgccgagatgttgctgctgctgctactggcgccactcttcctccgccccccgggcgcgggcggggcgcagacccccaacgccacctcagaaggttgccagatcatacacccgccctgggaagggggcatcaggtaccggggcctgactcgggaccaggtgaaggctatcaacttcctgccagtggactatgagattgagtatgtgtgccggggggagcgcgaggtggtggggcccaaggtccgcaagtgcctggccaacggctcctggacagatatggacacacccagccgctgtgtgaatcgaacgccacactcagaacggcgcgcagtgtacatcggggcactgtttcccatgagcgggggctggccagggggccaggcctgccagcccgcggtggagatggcgctggaggacgtgaatagccgcagggacatcctgccggactatgagctcaagctcatccaccacgacagcaagtgtgatccaggccaagccaccaagtacctatatgagctgctctacaacgaccctatcaagatcatccttatgcctggctgcagctctgtctccacgctggtggctgaggctgctaggatgtggaacctcattgtgctttcctatggctccagctcaccagccctgtcaaaccggcagcgtttccccactttcttccgaacgcacccatcagccacactccacaaccctacccgcgtgaaactctttgaaaagtggggctggaagaagattgctaccatccagcagaccactgaggtcttcacttcgactctggacgacctggaggaacgagtgaaggaggctggaattgagattactttccgccagagtttcttctcagatccagctgtgcccgtcaaaaacctgaagcgccaggatgcccgaatcatcgtgggacttttctatgagactgaagcccggaaagttttttgtgaggtgtacaaggagcgtctctttgggaagaagtacgtctggttcctcattgggtggtatgctgacaattggttcaagatctacgacccttctatcaactgcacagtggatgagatgactgaggcggtggagggccacatcacaactgagattgtcatgctgaatcctgccaatacccgcagcatttccaacatgacatcccaggaatttgtggagaaactaaccaagcgactgaaaagacaccctgaggagacaggaggcttccaggaggcaccgctggcctatgatgccatctgggccttggcactggccctgaacaagacatctggaggaggcggccgttctggtgtgcgcctggaggacttcaactacaacaaccagaccattaccgaccaaatctaccgggcaatgaactcttcgtcctttgagggtgtctctggccatgtggtgtttgatgccagcggctctcggatggcatggacgcttatcgagcagcttcagggtggcagctacaagaagattggctactatgacagcaccaaggatgatctttcctggtccaaaacagataaatggattggagggtcccccccagctgaccagaccctggtcatcaagacattccgcttcctgtcacagaaactctttatctccgtctcagttctctccagcctgggcattgtcctagctgttgtctgtctgtcctttaacatctacaactcacatgtccgttatatccagaactcacagcccaacctgaacaacctgactgctgtgggctgctcactggctttagctgctgtcttccccctggggctcgatggttaccacattgggaggaaccagttccctttcgtctgccaggcccgcctctggctcctgggcctgggctttagtctgggctacggttccatgttcaccaagatttggtgggtccacacggtcttcacaaagaaggaagaaaagaaggagtggaggaagactctggaaccctggaagctgtatgccacagtgggcctgctggtgggcatggatgtcctcactctcgccatctggcagatcgtggaccctctgcaccggaccattgagacatttgccaaggaggaacctaaggaagatattgacgtctctattctgccccagctggagcattgcagctccaggaagatgaatacatggcttggcattttctatggttacaaggggctgctgctgctgctgggaatcttccttgcttatgagaccaagagtgtgtccactgagaagatcaatgatcaccgggctgtgggcatggctatctacaatgtggcagtcctgtgcctcatcactgctcctgtcaccatgattctgtccagccagcaggatgcagcctttgcctttgcctctcttgccatagttttctcctcctatatcactcttgttgtgctctttgtgcccaagatgcgcaggctgatcacccgaggggaatggcagtcggaggcgcaggacaccatgaagacagggtcatcgaccaacaacaacgaggaggagaagtcccggctgttggagaaggagaaccgtgaactggaaaagatcattgctgagaaagaggagcgtgtctctgaactgcgccatcaactccagtctcggcagcagctccgctcccggcgccacccaccgacacccccagaaccctctgggggcctgcccaggggaccccctgagccccccgaccggcttagctgtgatgggagtcgagtgcatttgctttataagtgagggtagggtgagggaggacaggccagtagggggagggaaagggagaggggaagggcaggggactcaggaagcagggggtccccatccccagctgggaagaacatgctatccaatctcatctcttgtaaatacatgtccccctgtgagttctgggctgatttgggtctctcatacctctgggaaacagacctttttctctcttactgcttcatgtaattttgtatcacctcttcacaatttagttcgtacctggcttgaagctgctcactgctcacacgctgcctcctcagcagcctcactgcatctttctcttcccatgcaacaccctcttctagttaccacggcaacccctgcagctcctctgcctttgtgctctgttcctgtccagcaggggtctcccaacaagtgctctttccaccccaaaggggcctctccttttctccactgtcataatctctttccatcttacttgcccttccatactttctcacatgtggctccccctgaattttgcttcctttgggagctcattcttttcgccaaggctcacatgctccttgcctctgctctgtgcactcacgctcagcacacatgcatcctcccctctcctgcgtgtgcccactgaacatgctcatgtgtacacacgcttttcccgtatgctttcttcatgttcagtcacatgtgctctcgggtgccctgcattcacagctacgtgtgcccctctcatggtcatgggtctgcccttgagcgtgtttgggtaggcatgtgcaatttgtctagcatgctgagtcatgtctttcctatttgcacacgtccatgtttatccatgtactttccctgtgtaccctccatgtaccttgtgtactttcttcccttaaatcatggtattcttctgacagagccatatgtaccctaccctgcacattgttatgcacttttccccaattcatgtttggtggggccatccacaccctctccttgtcacagaatctccatttctgctcagattccccccatctccattgcattcatgtactaccctcagtctacactcacaatcatcttctcccaagactgctcccttttgttttgtgtttttttgaggggaattaaggaaaaataagtgggggcaggtttggagagctgcttccagtggatagttgatgagaatcctgaccaaaggaaggcacccttgactgttgggatagacagatggacctatggggtgggaggtggtgtccctttcacactgtggtgtctcttggggaaggatctccccgaatctcaataaaccagtgaacagtgtgactcgg

SEQ ID NO: 1182 - DNA, 577 bp, Homo sapiens
  source 1..577: mol_type = genomic DNA
gggacgcggactcgggagtgcgcacattcgcagcccgggcagccctgctgcgcaccgggcctcgcgccccgcgccccgcgccccgcgccccgcgccccgcaccgctttgctgaattggcctgggaatgctgcccctggaaggcattggacagaacagggacagtcctgttgcgtgaggggcatgggcctccaggatcatgtggtatgtcagcaccaggggcgtagccccacgggtcaactttgagggggccctcttctctggctatgcacctgacgggggcctctttatgcctgaagagctcccacagttggacagagggaccctgtgccagtggagcacactctcctatcctggcctggtgaaggagctgtgtgccctcttcattggctctgagctccttccaaaagatgaattaaatgatctgatcgaccgagccttcagcagattccgtcacagagaagtggtccatctgtccaggttgaggaatgggctgaacgtgttggagctgtggcatggcgtcacatatgcatttaaggacctgtccctgtcctgcacaacacagttcctgcagtactt

SEQ ID NO: 1183 - DNA, 356 bp, Homo sapiens
  source 1..356: mol_type = genomic DNA
gacccacaagaacagagtcgagcaaggaaacgtgcaacagtgatacaaaagtctggctttgctaaagtcacacatccagtaagtggccgaagcagatcttcagacccacagtttggctgccaaaggaccacagtgagtatttctaatgctgaaacaagagggtgcagctctgcagcccagacggctgggcctcagggaaccctcccagcctccatgccgcctttcctgatcaccctcttcctctttcactcttgctgcctccgagcaaatggccacctccgtgaaggaatgacattgctgaagactgagtttgcacttcacctctaccagagtgtggccgcgtgtagaaatgagac

SEQ ID NO: 1184 - DNA, 922 bp, Homo sapiens; identical to SEQ ID NO: 819
  source 1..922: mol_type = genomic DNA

SEQ ID NO: 1185 - DNA, 462 bp, Homo sapiens
  source 1..462: mol_type = genomic DNA
atgactatccacatcctcatcctgctgttgctcctcgccttctccgcccaaggggacctggacactgcagccaggcgaggccagcaccaggtcccccagcaccgcgggcacgtctgctacctgggcgtatgccggacccaccgcctggcggagatcatatactggattcgctgtctccaccaaggagccctcggggaaggccagccacgagccccaggacccctacagctatgggcgccgccggtggcgcgaggcggaagcccggctcggttcccaggattccggcctgcagcgagggggctagcgcagtgcccagctcgctgggtgacctcgggcacggctcgtcccctcctcggcttcagtttgcctatctgtatgttggagcttctactccacatttcttctcccctaactccagcccctgaaaccgtcttccccagtccctccccgggctgcgactag

SEQ ID NO: 1186 - DNA, 553 bp, Homo sapiens
  source 1..553: mol_type = genomic DNA
gttctcccattgtcagccagtctatttccagattgtttgaacttctctggccgcacaatacaggaaggaagactaaagcagcaaagggacctacagcgtctgcagcatgggctggttaactaggattgtctgtcttttctggggagtattacttacagcaagagcaaactatcagaatgggaagaacaatgtgccaaggctgaaattatcctacaaagaaatgttggaatccaacaatgtgatcactttcaatggcttggccaacagctccagttatcataccttccttttggatgaggaacggagtaggctgtatgttggagcaaaggatcacatattttcattcgacctggttaatatcaaggattttcaaaagattgtgtggccagtatcttacaccagaagagatgaatgcaagtgggctggaaaagacatcctgaaagaatgtgctaatttcatcaaggtacttaaggcatataatcagactcacttgtacgcctgtggaacgggggcttttcatccaatttgcacctacattgaaattggacatcat

SEQ ID NO: 1187 - DNA, 668 bp, Homo sapiens
  source 1..668: mol_type = genomic DNA
ttgctgggcggttcttgccggaagcggagagcggctgatcgcagtccggaggcagatatcctccctttcctcctcggctgctgctcttactttgacaagccaggctaacattgaagcaggtggtccattatggctgacatgcaaaatctggtagaaagattggagagggcagtgggccgcctggaggcagtatctcatacctctgacatgcaccgtgggtatgcagacagtccttcaaaagcaggagcagctccatatgtgcaggcatttgactcgctgcttgctggtcctgtggcagagtacttgaagatcagtaaagagattgggggagacgtgcagaaacatgcggagatggtccacacaggtttgaagttggagcgagctctgttggttacagcttctcagtgtcaacagccagcagaaaataagctttccgatttgttggcacccatctcagagcagatcaaagaagtgataacctttcgggagaagaaccgaggcagcaagttgtttaatcacctgtcagctgtcagcgaaagtatccaggccctgggctgggtggctatggctcccaagcctggcccttatgtgaaagaaatgaatgatgccgccatgttttatacaaaccgagtcctcaaagagtacaaagatgtggataagaagcatgt

SEQ ID NO: 1188 - DNA, 799 bp, Homo sapiens
  source 1..799: mol_type = genomic DNA
ctgccggtgagcgccagcttcagggtcccacccccccatgcctggctcttggctgaacatttcttcccagcgcttccagcagccagaggcaggcgcccaagctcgctggctgttgctgagggcctgtagagatgctgcccccacccccttaggcccgagggatcaggagctatgggaccagaggccctgtcatctttactgctgctgctcttggtggcaagtggagatgctgacatgaagggacattttgatcctgccaagtgccgctatgccctgggcatgcaggaccggaccatcccagacagtgacatctctgcttccagctcctggtcagattccactgccgcccgccacagcaggttggagagcagtgacggggatggggcctggtgccccgcagggtcggtgtttcccaaggaggaggagtacttgcaggtggatctacaacgactccacctggtggctctggtgggcacccagggacggcatgccgggggcctgggcaaggagttctcccggagctaccggctgcgttactcccgggatggtcgccgctggatgggctggaaggaccgctggggtcaggaggtgatctcaggcaatgaggaccctgagggagtggtgctgaaggaccttgggccccccatggttgcccgactggttcgcttctacccccgggctgaccgggtcatgagtgtctgtctgcgggtagagctctatggctgcctctggagggatggactcctgtcttacaccgcccctgtggggcagacaatgtatttatctgaggccgtgtacc

SEQ ID NO: 1189 - DNA, 800 bp, Homo sapiens
  source 1..800: mol_type = genomic DNA
actgccggtgagcgccagcttcagggtcccacccccccatgcctggctcttggctgaacatttcttcccagcgcttccagcagccagaggcaggcgcccaagctcgctggctgttgctgagggcctgtagagatgctgcccccacccccttaggcccgagggatcaggagctatgggaccagaggccctgtcatctttactgctgctgctcttggtggcaagtggagatgctgacatgaagggacattttgatcctgccaagtgccgctatgccctgggcatgcaggaccggaccatcccagacagtgacatctctgcttccagctcctggtcagattccactgccgcccgccacagcaggttggagagcagtgacggggatggggcctggtgccccgcagggtcggtgtttcccaaggaggaggagtacttgcaggtggatctacaacgactgcacctggtggctctggtgggcacccagggacggcatgccgggggcctgggcaaggagttctcccggagctaccggctgcgttactcccgggatggtcgccgctggatgggctggaaggaccgctggggtcaggaggtgatctcaggcaatgaggaccctgagggagtggtgctgaaggaccttgggccccccatggttgcccgactggttcgcttctacccccgggctgaccgggtcatgagcgtctgtctgcgggtagagctctatggctgcctctggagggatggactcctgtcttacaccgcccctgtggggcagacaatgtatttatctgaggccgtgtacc

SEQ ID NO: 1190 - DNA, 3845 bp, Homo sapiens; identical to SEQ ID NO: 1077
  source 1..3845: mol_type = genomic DNA

SEQ ID NO: 1191 - DNA, 2158 bp, Homo sapiens
  source 1..2158: mol_type = genomic DNA
ggtgcgtcccccaacctgatgctagcccctttcctgttacttctcacccacagcaggagccccttgtctttcaggccatgcagccatgttccgggagccctaattgcacagaagcccatggggagctccagactggcagccctgctcctgcctctcctcctcatagtcatcgacctctctgactctgctgggattggctttcgccacctgccccactggaacacccgctgtcctctggcctcccacacggatgacagtttcactggaagttctgcctatatcccttgccgcacctggtgggccctcttctccacaaagccttggtgtgtgcgagtctggcactgttcccgctgtttgtgccagcatctgctgtcaggtggctcaggtcttcaacggggcctcttccacctcctggtgcagaaatccaaaaagtcttccacattcaagttctataggagacacaagatgccagcacctgctcagaggaagctgctgcctcgtcgtcacctgtctgagaagagccatcacatttccatcccctccccagacatctcccacaagggacttcgctctaaaaggacccaaccttcggatccagagacatgggaaagtcttcccagattggactcacaaaggcatggaggacccgagttctcctttgatttgctgcctgaggcccgggctattcgggtgaccatatcttcaggccctgaggtcagcgtgcgtctttgtcaccagtgggcactggagtgtgaagagctgagcagtccctatgatgtccagaaaattgtgtctgggggccacactgtagagctgccttatgaattccttctgccctgtctgtgcatagaggcatcctacctgcaagaggacactgtgaggcgcaaaaaatgtcccttccagagctggccagaagcctatggctcggacttctggaagtcagtgcacttcactgactacagccagcacactcagatggtcatggccctgacactccgctgcccactgaagctggaagctgccctctgccagaggcacgactggcataccctttgcaaagacctcccgaatgccacagctcgagagtcagatgggtggtatgttttggagaaggtggacctgcacccccagctctgcttcaagttctcttttggaaacagcagccatgttgaatgcccccaccagactgggtctctcacatcctggaatgtaagcatggatacccaagcccagcagctgattcttcacttctcctcaagaatgcatgccaccttcagtgctgcctggagcctcccaggcttggggcaggacactttggtgccccccgtgtacactgtcagccaggcccggggctcaagcccagtgtcactagacctcatcattcccttcctgaggccagggtgctgtgtcctggtgtggcggtcagatgtccagtttgcctggaagcacctcttgtgtccggatgtctcttacagacacctggggctcttgatcctggcactgctggccctcctcaccctactgggtgttgttctggccctcacctgccggcgcccacagtcaggcccgggcccagcgcggccagtgctcctcctgcacgcggcggactcggaggcgcagcggcgcctggtgggagcgctggctgaactgctacgggcagcgctgggcggcgggcgcgacgtgatcgtggacctgtgggaggggaggcacgtggcgcgcgtgggcccgctgccgtggctctgggcggcgcggacgcgcgtagcgcgggagcagggcactgtgctgctgctgtggagcggcgccgaccttcgcccggtcagcggccccgacccccgcgccgcgcccctgctcgccctgctccacgctgccccgcgcccgctgctgctgctcgcttacttcagtcgcctctgcgccaagggcgacatccccccgccgctgcgcgccctgccgcgctaccgcctgctgcgcgacctgccgcgtctgctgcgggcgctggacgcgcggcctttcgcagaggccaccagctggggccgccttggggcgcggcagcgcaggcagagccgcctagagctgtgcagccggctcgaacgagaggccgcccgacttgcagacctaggttgagcagagctccaccgcagtcccgggtgtctgcggccgc

SEQ ID NO: 1192 - DNA, 1324 bp, Homo sapiens
  source 1..1324: mol_type = genomic DNA
taagagtagaatcgtgtcgcggctcgagagcgagagtcacgtcccggcgctagcccagcccgacccaggcccaccgtggtgcacgcaaaccacttcctggccatgcgctccctcctgcttctcagcgccttctgcctcctggaggcggccctggccgccgaggtgaagaaacctgcagccgcagcagctcctggcactgcggagaagttgagccccaaggcggccacgcttgccgagcgcagcgccggcctggccttcagcttgtaccaggccatggccaaggaccaggcagtggagaacatcctggtgtcacccgtggtggtggcctcgtcgctagggctcgtgtcgctgggcggcaaggcgaccacggcgtcgcaggccaaggcagtgctgagcgccgagcagctgcgcaacgtgacctggaagctgggcagccgactgtacggacccagctcagtgagcttcgctgatgacttcgtgcgcagcagcaagcagcactacaactgcgagcactccaagatcaacttccgcgacaagcgcagcgcgctgcagtccatcaacgagtgggccgcgcagaccaccgacggcaagctgcccgaggtcaccaaggacgtggagcgcacggacggcgccctgctagtcaacgccatgttcttcaagccacactgggatgagaaattccaccacaagatggtggacaaccgtggcttcatggtgactcggtcctataccgtgggtgtcatgatgatgcaccggacaggcctctacaactactacgacgacgagaaggaaaagctgcaaatcgtggagatgcccctggcccacaagctctccagcctcatcatcctcatgccccatcacgtggagcctctcgagcgccttgaaaagctgctaaccaaagagcagctgaagatctggatggggaagatgcagaagaaggctgttgccatctccttgcccaagggtgtggtggaggtgacccatgacctgcagaaacacctggctgggctgggcctgactgaggccattgacaagaacaaggccgacttgtcacgcatgtcaggcaagaaggacctgtacctggccagcgtgttccacgccaccgcctttgagttggacacagatggcaacccctttgaccaggacatctacgggcgcgaggagctgcgcagccccaagctgttctacgccgaccaccccttcatcttcctagtgcgggacacccaaagcggctccctgctattcattgggcgcctggtccggcctaagggtgacaagatgcgagacgagttatagggcctcagggtgcacacaggatggcagg

SEQ ID NO: 1193 - DNA, 824 bp, Homo sapiens
  source 1..824: mol_type = genomic DNA
tctccggggcgtggcgaagaggggcggagtcacgagcggggcggtgagacttcctgcccagtcgcgggccagcctagcgcttcagccggcggctcatttccggtgggggcgccgcgcccagtgagggcccggaagtgggtcgcgcggagattgctgggcggttcttgccggaagcggagagcggctgatcgcagtccggagcaggtggtccattatggctgacatgcaaaatctggtagaaagattggagagggcagtgggccgcctggaggcagtatctcatacctctgacatgcaccgtgggtatgcagacagtccttcaaaagcaggagcagctccatatgtgcaggcatttgactcgctgcttgctggtcctgtggcagagtacttgaagatcagtaaagagattgggggagacgtgcagaaacatgcggagatggtccacacaggtttgaagttggagcgagctctgttggttacagcttctcagtgtcaacagccagcagaaaataagctttccgatttgttggcacccatctcagagcagatcaaagaagtgataacctttcgggagaagaaccgaggcagcaagttgtttaatcacctgtcagctgtcagcgaaagtatccaggccctgggctgggtggctatggctcccaagcctggcccttatgtgaaagaaatgaatgatgccgccatgttttatacaaaccgagtcctcaaagagtacaaagatgtggataagaagcatgtagactgggtcaaagcttatttaagtatatggacagagctgcaggcttacattaaggagttccataccaccg

SEQ ID NO: 1194 - DNA, 1606 bp, Homo sapiens
  source 1..1606: mol_type = genomic DNA
gagaccgacccgccacccgccgtagcccgcgcgcccctggcactcaatccccgccatgtgggggctcctgctcgccctggccgccttcgcgccggccgtcggcccggcccagtctcagaccccaatgacctattccttgaggcccctgcgtcgggatcctctgaccctctagactttcagcatcacaattacaaggccatgaggaagctgatgaagcaggtacaagagcaatgccccaacatcacccgcatctacagcattgggaagagctaccagggcctgaagctgtatgtgatggaaatgtcggacaagcctggggagcatgagctgggggagcctgaggtgcgctacgtggctggcatgcatgggaacgaggccctggggcgggagttgcttctgctcctgatgcagttcctgtgccatgagttcctgcgagggaacccacgggtgacccggctgctctctgagatgcgcattcacctgctgccctccatgaaccctgatggctatgagatcgcctaccaccggggttcagagctggtgggctgggccgagggccgctggaacaaccagagcatcgatcttaaccataattttgctgacctcaacacaccactgtgggaagcacaggacgatgggaaggtgccccacatcgtccccaaccatcacctgccattgcccacttactacaccctgcccaatgccaccgtggctcctgaaacgcgggcagtaatcaagtggatgaagcggatcccctttgtgctaagtgccaacctccacgggggtgagctcgtggtgtcctacccattcgacatgactcgcaccccgtgggctgcccgcgagctcacgcccacaccagatgatgctgtgtttcgctggctcagcactgtctatgctggcagtaatctggccatgcaggacaccagccgccgaccctgccacagccaggacttctccgtgcacggcaacatcatcaacggggctgactggcacacggtccccgggagcatgaatgacttcagctacctacacaccaactgctttgaggtcactgtggagctgtcctgtgacaagttccctcacgagaatgaattgccccaggagtgggagaacaacaaagacgccctcctcacctacctggagcaggtgcgcatgggcattgcaggagtggtgagggacaaggacacggagcttgggattgctgacgctgtcattgccgtggatgggattaaccatgacgtgaccacggcgtggggcggggattattggcgtctgctgaccccaggggactacatggtgactgccagtgccgagggctaccattcagtgacacggaactgtcgggtcacctttgaagagggccccttcccctgcaatttcgtgctcaccaagactcccaaacagaggctgcgcgagctgctggcagctggggccaaggtgcccccggaccttcgcaggcgcctggagcggctaaggggacagaaggattgatacctgcggtttaagagccctagggcaggctggacctgtcaagacgggaaggggaagagtagagagggagggacaaagtgaggaaaaggtgctcattaaagctaccgggcacctt

SEQ ID NO: 1195 - DNA, 8152 bp, Homo sapiens
  source 1..8152: mol_type = genomic DNA
aggatttctttgaagaaaaatgtgcttcttgaatcaactgcagtctctcctctgcataagagctcttaagggtactagcaggatagaagcaaatgaaactgaaagctcatctgcagctcagaaaagcaaagacatggaattttaaagagtgaaggtagcatggtgtcggccatgggtgaacaagacacagccagacaatgtggaccaatttcttcaaactacggcttttctgctgtctgcttgcagtgttgatggtggtggtgctggtcatcaatgttactcaggtagagtacttggaccatgagactgtttcagccactttcatcgacagcagtggacagtttgtttcctcccaggtgacaggaattagccgaaatccctactgtggctatgatcagcagaccctgtccagccaggagcgcatggaggaggactccttgctggctgccttgcaccggcaggttcctgatgtgggcccagtcccctttgtgaagagcactgacccttcttccagctactttgtcatcttgaactctgctgccttctttaaggtgggaagccagcttgaggtgctggttcatgtgcaggattttcaaagaaagcccaagaagtatggtggagactacctgcaggccagaattcactccctcaagctgcaggctggggctgtgggcagggtggtggattaccagaatgggttttacaaggttttctttactttgctatggccaggcaaagttaaagtatccgtatctctggtccaccccagtgaagggatcagagttcttcagcgcttacaggaagataaaccagacagggtctatttcaagagtctcttccgttcaggaagaatttctgaaactactgagtgcaacgtgtgtcttcctgggaatctgcccctgtgtaactttacagacctctacactggggagccctggttctgcttcaaaccaaagaagctcccttgcagcagcagaattacccatttcaaaggtggatacctgaaaggtctcctaaccgctgcagagagtgctttcttccagagtggtgtcaatatcaaaatgccagtcaactccagtggacctgattgggtaactgtgattcccaggagaataaaagaaactaacagtctagaactatctcaaggctcaggaacttttccttctgggtattattataaagaccagtggaggcccagaaagtttaagatgcgtcagtttaatgaccctgacaacattacagagtgcttacaaagaaaagtggtgcatttatttggtgactcaacaatcaggcaatggtttgaataccttactacatttgttccagatttagtggagtttaacttgggtagtcccaagaatgtgggtcccttccttgcagtggaccagaagcacaacatcctgctcaaataccgctgccatggtccacccatccgcttcacgactgtctttagcaatgagctccattatgtggcgaatgagctgaatggcattgtgggagggaagaacacagtggttgccatagctgtatggtctcacttcagcaccttccctttggaagtgtacatccggcggctcaggaacatccgtcgagcagtggttcggctcctcgatcgaagcccaaagaccgtggtggtcatccggacggccaacgcccaagagctgggacctgaggtgagccttttcaacagcgactggtacaactttcagctggacaccatccttcggaggatgttctcaggggttggagtatatctcgtcgatgcctgggagatgaccctggcccattatctaccgcacaagctgcatccagatgaagttattgtgaagaaccagctggacatgttcttgtcctttgtgtgccccttggaaacctagcctgtcttggaagggactggaggaatcatattcaatgaccttctcaattgacctgagttacagaaagtggccccagtgagagatgactgcccttaataagtataaaatttcaaaaagatctggacttaatatgatgacttataaggagcttagaaaatgcaggttacatttatatctacctataggattttatccaatgttgacttagccatggtagaactcttaactgcatctacacactatattgctcttgtaaccaaagatgctaatgagtgtatttgaattagcttctcctaggaggggtgactactttgctaaagagtatgaaaaatgttttgatggaagggacaagtttggttggtagtagagtgtttgtagcttatctggtaaaggaaattgagtgcatctgcatgcatagcacaagtaatccatcttctggcggttaactagagaaagcttatagtcagaggctcttgtgaatgcactgaagactgctgtgtctcaggagtttctcttgatgatctaccttttctgaattacttgaaaaggccaatgtgcttggttcgagttttttagtgaatatttacaatttcctgcttttatctagaaaagaagcaaaagggaaatatgaaagcagtatatataaaatctgtgctttggaattgatatttgcatttggtgattgttttttatttgattcagctaaattttatgtgttgaatacttactctagaataactacttttggaactggaagggggaaatctgtaaatggaaatttatttttatgttctgaaatttgagggtttaggaattgacttttgtgtaaagaatgctacgatattataaagctgtggaagttttttccactagtttcaggtgtttttttttttgttgttgttgttgttattttgaactacttaccaaaattagaagttaaaatctaattagaaattaataagatactaaaattcatgacagttttttgtttgtttgtttgtttgttttttggtatttcttgatttgggcataaaaggcacacccattctctcatgcttggaagaagctgctattcctactggctatctaagaagaatggaattattaattttatttgacttattaattttaaacgagtttaatttgggatcatttagtaagtactcttttctttttgagctgtgatagattatagtctagtttaagttgctcctaagtagacagatgaagaaactagggaggctttagagaggaagacagatgcttgaagtatgaacaatatatacccttagaagaatgggtcaaataatttgggtttttaatttaaaataggagggccccagatcttactttcctgtccttgaggaacaccttcaagtttttaaagtattttagggggaaagaagatttttaattgtttctgagcctaatgaggtaataaaatatattaaaatagtttaattttaatggtccttacgctttacagtacctaaggatcacttgtagtatctgacaaaaatgcagaattaaagagtcatggcagggtgtggtagctcaagcctgtaatcccagcactttgggaggccaggcaggaggattgcttgaggccaggagtttgagaccagcctgggcaacatagtaagacctcatctctacaaaaaataaaaaattatccaggtgtgggccgacagtcccagctactagggaggctaaggcagggtgattgattgagcccagtagtttgaggctgcagtgagttatgattgcgccactacactcccacttgggcaacagacaagagatcttatctctaaaaaatttttgttaaataataaaagaattaaggccagggatgttggctcacatctgtaatcccagcagggattatagtctcgggaggctgaggtgggcggattgcttgagcccggaaggtcaagaccagcctgggtgccatggtgaaaccccatctctacaaaaaaatacaaaaactagctgggtgtggtggcaccacctgtagtccccgctacttaggaggctgaggtgggaggattgcttgagcccaggaggcagaaggttgcagaggttgcagtgagccttgattgtgccactgtactccagtctgggcaacagggcaagaccctgtctctaaaaaaaaaaaaaaaaaaaaaagagggaccatgatgcctctgggatttatgaaaccaacctttgtggcgagtgctcagtgattctgatgcaatggtggtattccacactgtgagaaacactaagagaagaggtaagatagaatgagggaataaacatggcttgtttattattttgggggatttaccaataactggtttaattctgttcatgatccaatagtattggtgatattagctccattttatagatgaggaactcatgtttagatctgaaataaggtatgtgagagtccatatctcttttcagctaaacttgtgagactttcgtaaagaagcgtttgtatttatttatttgtttttgagacagggtcttgctcttttgcccaggctggagtgcagtggcatgatatggctcactgcagccttgacttcctgggctcaagggatccttctgcctcagcctcctgagtagctgggactacaggtatgtaccaccatgcccagctaatttttgtatctttttgtagagactacattttgccatgttgtccaggctggtcttaaactcctgagctcaagcatctgcccacctcagcttcccaaagtgctgggattacaggtgtgagccactgtgcccagctgagagtttttcttgtcgtgaaagaacttgacatttcctcaaggatttataaaggaggctgaggagtaattttcccaggagaattttaaaaagaaagcgggcattgctcctccagtggtttggaatgatgccacttgattgtgcaaatgatttcttatgatcttgtctggttttctgttattttttgatttggtgacatagctctcaaagatttggtgacacagcttcttgagtcactttcatctctcttaaaaaaattttttttttaacaacttttaagttcaggggtacatgtgccagtttgtttcataggtaaacttacgtcatgggggtttgttgtatagatgatttcatcacccaggtgttaagcctagtacccattagtaatttttcctgatcctctccctcctcctaccctccaccctccaatagaccccagtgtgtgttgttgccctttatgtgtccatgtgttctcatcatttagctctcacttatcagtgagaacaactttcatcccacatctaatttgtctttcttcactctggtgtggaaattttgatagagattccaatatcacttaaacgtttcccagaatatttagatagaataatttagtttcttctgaaaagtttattttaggctagtgccacatggttgtgaatattagcatggtagccaaataatagtttgtttaaatgtatatttcccaatataaatataaggggcatcataatttttaaaaactataaaatctagaagaaaaatctatggataaaatccataattctatcatctgaatgcaatgaacattagcatttaggtatattttcttgcaggttttttaaccatatacttatagagaatatgtaatttgggtctgtgttttttacatataaatatttttctatgttaaatagtcttcataagttaattataaagatctgcttaatagttctgctactgcagttttcattattagataagttggtcattatagttggacatttaggtttacaatattaaagcagtggtttatatcaatttcagtggtttaaaatatgaatttctattttggaatgaaagtattaatttaatgtagtgaatctcatattccagaactgagatgattgatttgatgctatttgtgacagacagaacccataataaagcctttctatgcaagttacattttatagaattatcctactaaaagtaacctttcttcagcgaatgcaaaacagacctttggtgttccagtatgattcattttgccattctgaacaactatcattttaattaagaccatttaactgacacttcctggattcagttattaagtttcagattgaaacttgatccagtttaataactgaatccagtttcacatttatcaatctgaaaacttagtttgcagattggtaaatcagggtacttgacaagaataaatatggtacgcctttatatattcatgtgttacatgccagaaatgagtctgtttctggaccctgttcaaggaaatagtgatgactgagagaggtacagggaaataaacacccaagggaaacaacagaaataagcctccccaactttctaaaaaactgctcagcattatctctgtggattctgggtaaattcagctttttaacatcagctagtcactaatgccagaaattccacttcaagtgtatttattttcttgtgttaagcattattctacctggtttatgtctacaatgtagtattagtgtacttaggattcttgacacctcagtgtgcaataaataaaattttgaagttgttgtttttcatttgaaggtgagaccacagcccctgagtgctaaggggacctgggaatcctaggggaatggaggtggtggacgataagaggatggttgagggcaggagtttaaaggacacagaagctaggagagcagaaaatgtactccaccaccttctgtctaacttgtctcttaaaagtgcttttacattttaactttttaaaaaaatgtgggccgggcatagtggctcatgcctgtaatcccagcactttgggaggccgaggtgggcggatcacctgaggtcaagagttcaagaccagcctgaccaatatgatgaaaccccatctctactaaaaatacaaaaatagccaggtgtggtggcacatgcctgtcatcccagctactcaggaggctgaggtgggagaatcgcttgaacccgggaggtggaggttgcagtgagccgagatcatgccattgcactctagcctgggcaacgagagtgaaactctgtctcaataaataaataaataaataaaaaataaaaaagtgtgaacttaaatatatttatatgtgtgtacatatattttcttttttaatattctggttaaatgagaggccatcgggcctctttttaagagtctaatgatgtgtatatctaatgcccattccagctggattgtaacactgcttggggaagataacttaaaaaaaagtagtaccgagattacagcagctagtgtcctaaatggaaaagaagtgaaactaaatgtcataggagaaatcctttcagttttgtgcagtggttcatttgctgttaaatctaccccattaccattccccttactccttgaaaataaagtgatcttcatgttacaggaccattgctttatttatgtcacagatttcttgtcctttaattagtcagtgaaggcacatgattgcgatactactttttgattgccgtattgtaaaagctatatggtaaaaggtaactccctccacccgcccactgcaccctcacgtttaggggccacacagaaaaagcgaaataagatgaggtgaatctaatgagaaggcaactctaatgcccatcaggagattcactaggacattttaaaaggacgtctttaaggaaaaagttttgtttgtagatgttgcctctgattcctccctgcggctccagtccaggtcttggagccggccctcgaggggaatgtccgggactcgggtcggtacctttttggtctgggaatttccagtgtgcagaaaaaaaatccacaaatctaggcctcgctgccccctccctgcctcctctggccctcctcagtgcccacgcaacccggttcgaaagagaggatgaccgtattctgcattttagaaaacaggctcttagcttcccccgcccccgtcctcactagagtggagaactgaaagcgaacgctataaagggcgccagtgagaggggctggcctcctcttgccacgaggtcagacggcgagttcttagagaaaaaggctgcttagctgctgcttatcatgtaacctcaaaaggaaactgatcgtctttctcatgctgtcacgtacttgggttattatcgctgattacagctggaaacaattgatttgctcttacgtatttgtgtgacttgactcttcaaacacaaaggtatatttttattatctgatattttattaaaatatcttaaatggt

SEQ ID NO: 1196 - DNA, 12891 bp, Homo sapiens
  source 1..12891: mol_type = genomic DNA
gactgcttgcattaaaggacttcctcatcctttttttcatgaaactgagcttgcttaatcagagatggagcaaactgactgcaaaccctaccagcctctaccaaaagtcaagcatgaaatggatctagcttacaccagttcttctgatgagagtgaagatggaagaaaaccaagacagtcatacaactccagggagaccctgcacgagtataaccaggagctgaggatgaattacaatagccagagtagaaagaggaaagaagtagaaaaatctactcaagagatggaattctgtgaaacctctcacactctgtgctctggctaccaaacagacatgcacagcgtttctcggcatggctaccagctagagatgggatctgatgtggacacagagacagaaggtgctgcctcacctgaccatgcactaagaatgtggataaggggaatgaaatcagagcatagttcctgtttgtccagccgggccaactctgcattatccttgactgacactgaccatgaaaggaagtctgatggggaaaatggtttcaaattctctcctgtttgttgtgacatggaggctcaagctgggtctactcaagatgtgcagagcagcccacacaaccagttcaccttcagacccctcccaccgccacctccgcctcctcatgcctgcacctgtgccaggaagccaccccctgcagcggactctcttcagaggagatcaatgactacccgcagccagcccagcccagctgctccagctcccccaaccagcacgcaggattcagtccatctgcataacagctgggtcctgaacagcaacataccattggagaccaggcatttcctgttcaaacatggatctggttcctctgcgatcttcagtgcagccagtcagaactaccctctgacatccaataccgtgtactcgccccctcccaggcctcttcctcgaagcaccttttcccgacctgcctttacctttaacaaaccttacaggtgctgcaactggaagtgcacagcattgagcgccactgcaatcacagtgactttggccttgttactagcctatgtgattgcagtgcatttgttcggcctgacttggcagttgcaaccagttgaaggagagctgtatgcaaatggagttagcaaagggaacagggggaccgagtccatggacactacttactctccaattggaggaaaagtttctgataaatcagagaaaaaagtgtttcagaagggacgggcgatagacactggagaagttgacattggtgcacaggtcatgcagaccattccacctggtttattctggcgtttccagattactatccaccatccaatatatctgaagttcaatatttctttagccaaggactctctgctgggaatttatggcagaagaaacattccacctacacatactcagtttgattttgtaaaactaatggatggcaaacagctggtcaagcaggactccaagggctctgatgatacacagcactcccctcggaacctgatcttaacttcgcttcaggagacaggtttcatagagtatatggatcaaggaccttggtatctggcgttttacaatgatggaaaaaagatggagcaagtattcgtgttaactacagcaattgaaataatggatgactgttcaaccaattgcaatggaaatggagagtgtatctctggccattgtcattgtttcccaggattccttggacctgactgtgctagagattcctgccctgtgctgtgtggtgggaatggagaatacgagaaaggacactgtgtctgccggcatggctggaaggggccagagtgtgacgttccggaagaacaatgcattgatccaacatgctttggccacggcacctgcatcatgggagtctgcatctgtgtgccaggatacaaaggagaaatatgcgaggaagaggactgcctagacccaatgtgttccaaccatggcatctgtgtaaaaggagaatgtcactgttctactggctggggaggagttaactgtgaaacaccacttcctgtatgtcaagagcagtgctcaggacacggaacttttcttctggacgctggagtatgcagctgtgatcccaagtggacaggatctgactgctcaacagagctgtgtaccatggagtgtggtagccatggagtctgctcaagaggaatttgccagtgtgaagaaggctgggtaggaccaacatgtgaggaacgctcctgtcattctcattgtactgagcatggccaatgcaaagatggaaaatgtgagtgtagccctggatgggagggcgaccactgcacaattgctcactacttagatgctgtccgagatggctgcccagggctctgctttggaaatggacgatgtaccctggatcaaaatggttggcactgtgtgtgtcaggtgggttggagtgggacaggctgcaatgttgtcatggaaatgctttgtggagataacttggacaatgatggagatggtttaaccgactgtgtggatcctgactgttgtcaacaaagcaactgttatataagtcctctctgccagggctcaccagatcctcttgacctcattcagcaaagccaaactctcttctctcagcacacttcaagacttttttatgatcgaatcaaattcctcattggcaaggacagtactcatgtcattcctcctgaggtgtcatttgacagcaggcgtgcctgtgtgattcgaggccaagtggtggccatagatggaactcctctagtgggagtgaatgtcagtttcttgcaccacagtgattatgggtttaccatcagccggcaagatggaagctttgacctcgtggccatcggtggcatctctgtcatcttaatcttcgaccgatcccctttcctgcctgagaagagaacactctggttgccttggaatcagtttattgtggtagagaaagtcaccatgcagagagttgtatcagacccgccatcctgcgatatctccaactttatcagcccaaaccctattgtgcttccttcaccgctcacatcatttggagggtcctgtccagagaggggaactattgttcctgagctgcaggttgtacaggaggaaattcccattccctccagctttgtgaggctgagttacctgagcagccgcacccctgggtataaaaccctgctacggatccttctgacacattcaacgattcctgtaggcatgataaaagtacacctcacagtagctgtggaagggcgactcacacagaagtggtttcccgccgcaattaatcttgtctacacatttgcttggaacaagaccgacatctatggacagaaggtttggggcctggcagaggctttggtatctgtgggatatgaatatgaaacgtgccctgactttattctctgggagcaaaggacagtcgttttacaaggttttgagatggatgcttctaacctaggaggctggtctttgaataagcatcacattttgaatcctcaaagtggaatcatacataaagggaatggagaaaatatgttcatttcccagcagcccccagtcatatcaaccataatgggtaatggacaccaaaggagtgtagcctgcaccaactgcaatggcccagcccacaacaacaaactctttgctcctgtcgccttagcttctggccctgatggcagtgtgtatgttggcgacttcaattttgtaaggagaatatttccctcgggaaactccgttagtattttggaattaagaaacagagataccagacatagcacaagtcctgctcacaaatactatctggctatggaccctgtgtctgaatcactctatctatcagacaccaatactcgcaaagtctacaagttgaaatctcttgtggagacgaaagatctgtccaagaattttgaagtggtggcaggaactggtgatcagtgccttccctttgaccagagtcattgtggagatggtgggagagcatcggaagcttcactgaatagccctcgaggcatcacagttgataggcatggatttatttactttgtggatgggactatgattcgcaaaattgatgagaatgctgtgatcacaactgtaatcggctcaaatggtctgacttccacacaaccactgagctgtgactcaggaatggacatcactcaggtgcgattagagtggccaacagaccttgcagtaaatcctatggacaattcattgtatgtcttggataacaacattgtgctgcaaatttctgagaacaggcgtgttcggatcatcgcaggacgccccattcactgccaggtgccaggcatcgatcatttcctggtcagcaaggtagcaattcactccactctagagtcagcgagggccatcagtgtctcccacagcgggctgctcttcatagctgaaacagacgagaggaaagtaaaccgcattcagcaagtaaccaccaatggggagatctacatcatcgctggtgcccccactgactgtgactgcaaaattgatccaaactgtgactgtttttcaggtgatggtggctatgccaaagatgcaaagatgaaagccccttcctccttagcagtgtcgcctgatggaaccctctatgtggcagacctcggaaatgttcgaattcgtaccatcagcaggaaccaagcccacctgaatgacatgaacatttatgagattgcttcacccgctgatcaggaactgtaccagttcactgtaaatggaacccacctacacaccctgaacttgataacaagggactatgtttataacttcacctacaattctgaaggtgacttgggcgcgattaccagcagcaatggcaattcagtgcacattcgccgtgatgcaggcggaatgccgctatggcttgtggtgcctggcggacaagtatactggctgactataagcagcaatggagtcctgaaaagagtgtcagcccaaggctataatctggccttaatgacctatccaggaaacacagggcttctggctaccaaaagtaacgaaaatggatggacaaccgtttatgagtatgaccccgagggacacctgaccaatgcaacgtttcccactggagaggtcagcagcttccacagtgacctggagaagctgacaaaagtggagctagatacttccaaccgtgaaaatgtcctcatgtcaaccaacttgacggcaactagtaccatatatattttaaaacaagaaaatactcaaagtacctatcgggtgaatccagatggttccctgcgtgtcacttttgccagcgggatggagatcggcctcagctcagagccccacatcctggcaggggcagtcaaccctaccctgggcaaatgcaacatctcattgcccggagagcacaatgcaaacctcatcgagtggcggcagaggaaggagcaaaacaaaggcaatgtttcggcttttgaaaggaggctgagggcccacaacagaaacctactctccatagattttgatcatataacccgcacaggaaagatctatgatgaccatcgaaaattcacccttcgaattctttatgaccagactgggcgacccattctgtggtctcctgtaagcagatataatgaagtgaacatcacatattcaccttcgggattggtgacgtttattcaaagaggaacgtggaatgaaaaaatggaatatgaccagagtgggaaaattatttcaagaacttgggctgatgggaaaatttggagctatacctacttagaaaaatctgtgatgcttctcctacacagccagcggcgttacatctttgagtatgaccaaccagattgtctgctctcagtcaccatgcctagcatggtgcgtcacagcttacaaaccatgctttcagtgggctactaccggaacatctacaccccaccggacagtagcacttcttttatccaagactatagtcgagatggccgattgctacagaccctgcatctggggacagggcgcagagtcttatacaagtacaccaagcaagcaaggctttctgaggttctctatgataccactcaggtcacattaacatatgaagagtcttctggagtgattaagacaatacacctgatgcatgacggattcatctgcacaatcagatacaggcaaacaggacctcttattggacgccagattttcagattcagtgaagaaggccttgtgaatgcacggttcgactacagctacaacaatttccgagtcacaagcatgcaagctgtaatcaatgaaacccctttgcctatagatctttaccgatatgttgatgtctctggcagaacagagcagtttggaaaattcagtgtaattaattacgatttaaatcaggtcataactactacagtgatgaaacacaccaaaatcttcagtgccaatggacaagtcattgaagtccaatatgaaatcctaaaggcaattgcctactggatgaccattcaatatgataatgtgggccgcatggtaatatgtgacataagggtaggagtagatgccaatataacaaggtacttctatgaatacgatgctgatgggcaacttcagactgtttctgtaaatgacaaaacccagtggcgttatagttacgatctgaatggaaacatcaacctcttaagccatgggaagagtgctcgtcttactcctctccgatatgacctccgagaccgcatcaccagattaggagaaattcagtataaaatggatgaagatggctttctgaggcagaggggaaatgatatttttgaatataattctaatggcctgctgcagaaagcctacaataaggcttctggctggactgtgcagtattactatgatgggcttgggcgacgtgtcgcgagtaagtccagcctagggcagcaccttcagttcttttatgcagaccttaccaaccccataagagttactcatttgtacaaccacacaagctcggagattacatctctgtattatgatctccaaggtcaccttattgccatggagttaagcagtggtgaagaatattatgtagcctgtgataatacaggtaccccactagctgtgttcagcagccgaggtcaggtcataaaggagatactatacacaccttatggcgatatctatcatgacacttaccctgactttcaggtcattattggttttcatggaggactctatgatttccttactaaattagtgcacctggggcaaagggattatgatgttgttgctggcagatggacaacgcctaatcatcacatatggaaacagttgaacctccttcctaaaccattcaacctctactcctttgaaaataactacccagttggcaaaattcaagatgttgcaaagtataccacagacatcagaagttggttggagctatttggtttccaattacacaatgtactacctggatttcccaaacctgaattagaaaatttagaattaacttacgagcttctacggcttcagacaaaaactcaagagtgggatcctggaaagactatcctgggcattcagtgtgaactccagaaacagctcaggaatttcatttccttggaccaactacctatgactccccgatacaatgatggacggtgccttgaaggagggaagcaaccaaggtttgctgctgtcccttctgtttttgggaaaggtataaaatttgccatcaaggatggcatagtaacagctgatattataggagtagccaatgaagatagcaggcggcttgctgccattctcaataatgcccattacctggaaaacctacattttaccatagaggggagggacactcactacttcattaagcttgggtctctggaggaagacctggtgctcatcggtaacactggggggaggcggattctggagaatggtgtcaatgtcactgtgtcccagatgacttctgtgttgaatgggaggactagacggtttgcagatattcagctccagcatggagccctgtgcttcaacatccggtatgggacaactgtcgaagaggaaaagaatcacgtgttggagattgccagacagcgcgcagtggcccaggcctggactaaggaacaaagaaggctgcaagagggggaagaggggattagggcatggacagaaggggaaaagcagcagcttttgagcactgggcgggtacaaggttacgatgggtattttgttttgtctgttgagcagtatttagaactttctgacagtgccaataatattcactttatgagacagagcgaaataggcaggaggtaacaaaaatatctctgcctttgcgtcaccaaagactgcctgtttttaaaacataaaatggtttattgtattggttttctagatcagaactctgtatatgtaaatatggaggaaaaacatatccaactgcctttcaatgtgacggaagatggtattttaatattgtttgtttaaactctttaagaaatgacagagatttttagttcttgtgtggcagtattcaaaataacacaagtagaactcaaacagctaaaaacagttttcagaaagcaccactttcaatttgccgagccatgcatatgttccaatatccagaaagaacccaaggttctctatctctattgtgagaagcagtttcatccttaactgttggcagaacttacgggctatttgaataggtggtgcaatagtatctgaaacttgcctttcgaaagactgccagccctttgacgttttccagatctgttataggaaacttaaaaacaggtgtaaaatgtcttcagccaccatctcctagagtgaggacccaattgcccttccttcttgattattcctccttgcttgttaaagtaaatgccatattgttgtgctgtgttttggcgtgtggtggctgggttctgtctaccatgcttccctgtgggtgtggtaaccagactgtatagccgctatttgctcgtgtgtacatgataccaaagcagctggccagcgtgacctctctcacacgacctgttttgactcaattttttactaaaagttgttcagctgtattggtatcatgtaaacatagcttttattaacctgggtaggaatttctcatttatatataggatgtgttttggtcatagtttcacattagtgattcagtatctatacactgacccaatggttttgtgcacatgaacggtaatttacttaaaagtatgattctggtacaaaaacaaacaaaggctttagcaggcatacgtgtctgggatgccgatacatacattaactactactgcagaaattcataagagccaaaaccttaaaaaaatagacctggtacttaagtgaaagtactaaagggaagaccagaccaaacatcacagcagttgctgccacattgtttcagcccacttagatttatctttcaaatgtacaattctgtattgaacatctcccagccatcttcaggaaatcgaatcaagtaaatcctttccaaccgaaaacatttcaactaactatagagaggcagactcatttttactaaaataatttatacagttagttattttcgttctccgtacttacccatttatctttatttaatcgtctctactgcctaggaaaataactattttccaggacgggttatttgttctgcgatcatttaaaatttggagaaaggtcaggattagtgttaatatcagctgcagtttctcaatctctaggaatcctgcagtaaaacaagccccttggtgagctggaagatttgtgcccagtgacaaagagatagtttgtaaaatgctgtgtaattgtaagttaccacaaatgaaaatacatgacagcacaatgtggcccgtagaaaattcccctgagccagcttctgcactttcatcaccgaatctgaacatttgctatgtctgaaggcaaatttatgatggaatgttagtttggattctttccagatgctacctaaatgcagtgtggggtcattgccttgctttgcgatgacagtttctttgaaaatatgcaaagtcataagctcatgttaaggtttttcaagagtctgcctcctactacacaaaggaaagcaagggaaaggaaatgaccctggcaaacagtagggaagggtgtattcaaacatttcattttcaaaaccttcgggttagaataccacttacacatgtattctgagagacagaattcatgaggaactcatctctctttataactggaaacacaccagcttgatatattgctaatccatactaaaatcatattattgggttttttctgaatcaggcctgtattaatggtacagtatttattcagaatggaattctaaaattactaacaaacttgttgaaaatttgaatacctccacaccaacctaaaaatggaccttaagttcctagaacctctgatgttcttttaaattaatggaaaaataatttgtgaactgtatatagagagtgcattcataaatgtgattatgtattttatcacaaatccaaaatgtcaatattagagtctattttgcttatattttaagcaattatacgtttttgcaattcattgatgatgtatcattttcaaactgctttaaatatccattagaaacaaatatttgaagcttttacttaatagtgattaccttgaactgtgcatttctagtttgtaatacgtatttggttggttcgtgcctttagtttgttaaagttacatttgtattatattcaggaaatgcactttttattacttacagctgtggttttaatactgccttgaactattattattctttttacaactcctaaagcttgagggaggaaagaaaaaaaaaacaaaactactaatcagtagtaaatcgaagagaaacattttggcatttcttaagaagaagatggagatattgagtatatcacttcctattcagctgaatagaaagaatgccttcattgacttgcagttctgcagtttaaattattgaaagaacaattcgtttgcatttcctgatgaaagtaaaagcatttttcagagaaacatatgaatttctcatacccagcagacagatggctgacactgcacagccacacaccattcgagtaagttaaagtgagagcatagtagttggactctcctatgaagaacattctgggctggaggcagggaatactccatggttgtttctttttcctacttaagcccattttgtttgtgcttttctgttttgttttgttttcactcttgcactacagtctagagatccaaatgaactgaaaagttcaaagtttaacacatttaaatatgtttacttttagttgtcattctaatcgttattgattagaagcatgactcctgaaggaaagggaaataaatctcaattcatactaacttgcaacaaaacacttttaccatataaataagtatatgatttatttttaacccaaaaaatgtataaaataagtgtgtcctttactgtcaatttatctagaagatctataatatatagactacatatatataatatatacaacatagccaaatgtatgaaaacttgacaatgtataatttggaattcacatgctacctatgtagacaggtatgaaattaagttataattttcatgagacattttcatcactgttgacacagtttcaagcattccatcatgttattttgactctttttcttttttttttctttaaaaatatatttttaactagaccaggccccactataatatcacttaagagagtcagggcaaagtttttgcatttatgaagatgtgttcatgtaagggtgattgtaatggagttcattggtaatagaagcaaaagtacagtaacgaagtattgaaaagaaaattttggagacattggagcatattatatatagcttgtggaaagacataaggctacagatggaatggaacattcctgttttcttgaagaaattcacatacacatagctgacctgactagtacttcagctcttccacagccttctataaaggttctttcttctgcaaagaaaacaaaacaaaacaaaacaaaacaaaaaaaacaaaaaaagcgcaaaaaacaaaaaaacaaaaaaaagcaaagtaaaatttaaaaatacagaaaacaaacaacaaaaaagaattcaaccataaatagtgactattattttcagtgtgtccttcatgtgaaagctattaaggaccaaatatactactgttcataagaagaaattactttctaaacagtaactgaaaatacttagagttaaacttgctgtggattttgtcttggcagttgtcatcttacattatttgtcaaaggaaatgtgtttggcagttaaaaatctttccttagatttagtggtggactttaacctcttaaataaatgttagtatatcagattgtgtccttgaaaaatattttacttgtatgaatcatgacaacgtctaaatctttactattcttctggcaaaagcatcagtaagaaagaaggcgaaaaagagaagtatagcctttatgtcagaaaaacattctttttagctgcttactttctcatgaaaagtaaagatgtttacagtgtatgccaagttttcagtttctgtataacaacaggtagaggttctaatcatattgaaaattgtgttataatggtctgagccatgttgctaggaaacaataggttccaattttgtattcctgctctcctgtgctgaaaagtgactggatactgtacaggttcatgttctctggctgcagttaaatggtcttttgcattttgctctggctttcaggccagaagcatgcatttttctacaagagcatcacaacaacatgctgtaaatatttaaagttaaacattatgtgttgatatttgaaagaaaagtactttgaatatttcatttttaaaaaataaaattgccaatg

SEQ ID NO: 1197 - DNA, 486 bp, Homo sapiens
  source 1..486: mol_type = genomic DNA
cgacgctccggcgctgggtccccgaggcccggcccctccccgggaggaggtgggcttcgagtcacgtgacccgtgccctacgggagggggtgcggtcggggacccggcaggaggcggccgagaagagaggaccgtgggggcgttcgcgtggctcccagcccgggaccccacccccgctggacagtgggggaaactgaggcctgagcgggcccacacaggaccatgaaggtgcttctcctcacagggctgggggccctgttcttcgcctattattgggatgacaacttcgacccagccagcctccagggagcgcgagtgctgctgacaggggccaacgctggtgttggtgaggagctggcctatcactacgcgcgtctgggctcccacctggtgctcactgcccacactgaggctctcctgcagaaggcacggtggctcacgcttgtagtcagcactttgggaggccgaggaaagtggatcacctga

SEQ ID NO: 1198 - DNA, 2413 bp, Homo sapiens
  source 1..2413: mol_type = genomic DNA
acaagtcctggtgtctttaaaaggatcagcttgaggaataaggctcgtctgagagctgtgacattcatctgactctagtgaaagtccaacagccactccctttttggcctccaactgggcaccatgagggcctgcatctccctggtattggccgtgctgtgtggcctggcctgggctggaaaaatagaatcctgtgcatctcgatgtaatgagaaatttaaccgggacgctgcctgccagtgtgaccgccggtgtctctggcatgggaactgctgtgaagactatgaacatctgtgtactgaggaccacaaagagtcagagccattgccacagctggaggaagagacagaagaggccctcgccagcaacttgtactcggcacccacctcctgccagggccgctgctacgaagcctttgacaagcaccaccaatgtcactgcaatgcccgctgccaagagtttgggaactgctgcaaggattttgagagcctgtgtagtgaccacgaggtctcccacagcagtgatgccataacaaaagaggagattcagagcatctctgagaagatctacagggcagacaccaacaaagcccagaaggaagacatcgttctcaatagccaaaactgcatctccccgtcagagaccagaaaccaagtggatcgctgcccaaagccactcttcacttatgtcaatgagaagctgttctccaagcccacctatgcagccttcatcaacctcctcaacaactaccagcgggcaacaggccatggggagcacttcagtgcccaggagctggccgagcaggacgccttcctcagagagatcatgaagacagcagtcatgaaggagctctacagcttcctccatcaccagaatcgctatggctcagagcaagagtttgtcgatgacttgaagaacatgtggtttgggctctattcaagaggcaatgaagagggggactcgagtggctttgaacatgtcttctcaggtgaggtaaaaaaaggcaaggttactggcttccataactggatccgcttctacctggaggagaaggagggtctggttgactattacagtcacatctacgatgggccttgggattcttaccccgatgtgctggcaatgcagttcaactgggacggctactataaggaagtgggctctgctttcatcggcagcagccctgagtttgagtttgcactctactccctgtgcttcatcgccaggccaggcaaagtgtgccagttaagcctgggaggatatcccttagctgtccggacatatacctgggacaagtccacctatgggaatggcaagaagtacatcgccacagcctacatagtgtcttccacctaatagaacttcgagccagaaaggggcatgagggctcttgcgagactgaagtgctatcttctctggactagagagaagagggagaggactggaagggatcaccaaatctcaaagcaatgagaagcattcctaaatcccaaagtgcccacatgggaaagagataaaatgtacaaattagaaaaatgtggataaacagtcaaacctttatcctctagaattttggcaatgttgactaagaaacagagtccaagcagagaaggtaggaaccctccatagctctctgccctgatgtgtgggggaactaggaagaagtcctttgacctcaccaggcctcatgcttccctttaatgtaaagggaaggggtttgcccactttcctctttttggggttggtgagagggcaaaccctgatatttttactgtgaaggtgttttcagttgttcttaggaagaacagctgatagaaattcaagattactataatggctgttattatacacagctctgtaaactaccactcagccctgtgttggggtcctcaaagaagtaaggccacagtaatcaagcaagggcctttggttttttccagagttagatcctctcagaacagagtctgggagaactccaatgctgaatggagaagggtaataggttggtgcagtgaatgggctgggggtggggtggccttctccaggcctgagtgtttttgtgtccagctcagtatctgcaacaagaagtttcccacttgtggatgtttagtgcagccacagacttgtattttgatccccaatttttttttgaaagagttctcctcataggaggatgattcagcatcagaagaagaaggaacccatagcttggtgtcattaacataattattttaagccttatccagcagccataatttgaataactctacgagaccagagagactgtagttccctattttaacctcaattatgcatttgtcccccaaccccactgagaactaaatgctgtaccacagagccgggtgtgaactatggtttagaaggttcaagtttccaattaaagtcattgaag

SEQ ID NO: 1199 - DNA, 709 bp, Homo sapiens; identical to SEQ ID NO: 820
  source 1..709: mol_type = genomic DNA

SEQ ID NO: 1200 - DNA, 1513 bp, Homo sapiens
  source 1..1513: mol_type = genomic DNA
ccgtcatccccctgcagccacccttcccagagtcctttgcccaggccaccccaggcttcttggcagccctgccgggccacttgtcttcatgtctgccagggggaggtgggaaggaggtgggaggagggcgtgcagaggcagtctgggcttggccagagctcagggtgctgagcgtgtgaccagcagtgagcagaggccggccatggccagcctggggctgctgctcctgctcttactgacagcactgccaccgctgtggtcctcctcactgcctgggctggacactgctgaaagtaaagccaccattgcagacctgatcctgtctgcgctggagagagccaccgtcttcctagaacagaggctgcctgaaatcaacctggatggcatggtgggggtccgagtgctggaagagcagctaaaaagtgtccgggagaagtgggcccaggagcccctgctgcagccgctgagcctgcgcgtggggatgctgggggagaagctggaggctgccatccagagatccctccactacctcaagctgagtgatcccaagtacctaagagagttccagctgaccctccagcccgggttttggaagctcccacatgcctggatccacactgatgcctccttggtgtaccccacgttcgggccccaggactcattctcagaggagagaagtgacgtgtgcctggtgcagctgctgggaaccgggacggacagcagcgagccctgcggcctctcagacctctgcaggagcctcatgaccaagcccggctgctcaggctactgcctgtcccaccaactgctcttcttcctctgggccagaatgagggggtgcacacagggaccactccaacagagccaggactatatcaacctcttctgcgccaacatgatggacttgaaccgcagagctgaggccatcggatacgcctaccctacccgggacatcttcatggaaaacatcatgttctgtggaatgggcggcttctccgacttctacaagctccggtggctggaggccattctcagctggcagaaacagcaggaaggatgcttcggggagcctgatgctgaagatgaagaattatctaaagctattcaatatcagcagcatttttcgaggagagtgaagaggcgagaaaaacaatttccagatggctgctcctcccacaacacagccacagcagtggcagccctgggtggcttcctatacatcctggcagaataccccccagcaaacagagagccacacccatccacaccgccaccaccaagcagccgctgagacggacggttccatgccagctgcctggaggaggaacagacccctttagtcctcatcccttagatcctggagggcacggatcacatcctgggaagaaggcatctggaggataagcaaagccaccccgacacccaatcttggaagccctgagtaggcaaggccagggtaggtgggggccgggagggacccaggtgtgaacggatgaataaagttcaactgcaactg

SEQ ID NO: 1201 - DNA, 682 bp, Homo sapiens
  source 1..682: mol_type = genomic DNA
acaggacgaaggtaagaaaagccagcctatgttacaggacaaaggccgtcgctttgtaaaagcttgaagtgcagtttgctgctgagtacagaagacctttgcaaacagagaggggagattttctctgtaaggttgcaaacaagagcaggtcctggaagataagattccccgccatgttatcctccgtggtgttttggggactaattgccctcattggcacttccaggggctcataccccttcagtcactcaatgaagcctcacctacatccacgcctgtaccacggctgctatggggacatcatgaccatgaagacctctggggccacttgtgatgcaaacagtgtgatgaactgcgggatccgtggttctgaaatgtttgctgagatggatttgagggccataaaaccttaccagactctgatcaaagaagtcgggcagagacattgcgtggaccctgctgtcatcgcagccatcatctccagggaaagccatggcggatctgtcctgcaagacggctgggaccacaggggacttaaatttggcttgatgcagcttgataaacaaacgtaccaccctgtcggtgcctgggatagcaaagagcacctttcacaggctactgggattctaacagagagaattaaggcaatccagaaaaaattccccacgtggagtgttgctca

SEQ ID NO: 1202 - DNA, 4564 bp, Homo sapiens
  source 1..4564: mol_type = genomic DNA
ccggggccctacacgccagacctggctcggggtgggagtgcagaggcaaccaaaaaggaacccacacctccctccagggcccggggcgctgtcagacggggcagcaaccaggagattccctgggcctgcaggaagcccttccgcggaccgaaagattgttccccattttggagatgaagaaactgagactcaaagcagctgagtgaccttcccaaggacacacactgaactgggcggtgatcaggatctgaatgcacagggcgggtgttcagcgattgtttactacgttgaacgtgacctccaggaaagcagttctggccgagatcccctgacaacgcaaagcaagaagtaacgtggaaggaggctccccaagctggctggccattttgctgctgtgtgtggaggtgctgccagtggcatgcccaaacccaaagctggaagaggaataaattacaagtggtcaaggttgcatccttttgagcccaggacctgcttgtaagccgagagggttctctggccctaatctagccaagcaccatggagagaatcagtgccttcttcagctctatctgggacaccatcttgaccaaacaccaagaaggcatctacaacaccatctgcctgggagtcctcctgggcctgccactcttggtgatcatcacactcctcttcatctgttgccattgctgctggagcccaccaggcaagaggggccagcagccagagaagaacaagaagaagaagaagaagaagaagaagaaggatgaagaagacctctggatctctgctcaacccaagcttctccagatggagaagagaccatcactgcctgtttagttaggcaggaagcagaggtgtttcctttctggggctaagcctccttctgaccacacacagacatttcaggaacccctgaaataatgcactatgtccatgtccacagagtaactactcaaccaaggaacaaacctcagactaagtgtcccagtggagggcagtcccagggaccacgtggacaattcttggatactgtcttggcagctatgtgtccaatagcaatgctccttactgcagacccaggcatgcctcccacctgtctctggcataccccacatgcaaagcacaaagaacatttatccatacatctcaatatggttcccaagtgtgtgcacatgcacgtaacacacacacacacaaattcaggtagcaggtacgtgggcaagtatattctgctcatcaaatggtcattggctatgtactttgtgcagggaagtacattatctacagtcacaaaaatgtctcatgggaaagccttgccagattcagacacatatatacaatttcctaaccagcaaggcccccatacaccatctattccataaaccactcaggttacagatgcatgctttcctatttctaactctacacataaacttttactggaagtactcataattggacattccagcaacctgctacagtccccacccttgtgtgtcttgatacagacacaccaagtttctgtgcctctgacccctcacctgtgccaagatgtttaaagtgtgatggttcaaaattcattgaaagctcttttcttgtaactcatgacaaagtccgtcctcattgccactgagaggtgtttaatgtgatccaagacctctctgtgaaacattacccccgcaaaccactcagcaaagtgcctttctccaagcaagaacaaagagctcttggtggtgactgctagaaaattatggaagcccactcatttatgtcagtggactgcaactgtgtacctgtgcaatgtttacagatggaaagggtgaggagatgctacacctgagctaggtatctcctatataaccaaagtttccagcagggaaggaactagacaatcatcagtgcagtctcacagaaggcaacactggaagtgatgtcataaggttgtgatgtgtgcacggtatggcacaggtgggatgcagaggtaacagagtttaaatgaaagtaggatgaagctataaagaggtttatttatatttatattgaagctcaggcaagtgccttgcacacagtaggtacttataactaactgtggttactgttggatatgtgatgttgttaagggtaagcttgtaatacctcaccagttctccccgagtgatcttctcttctaagtgagcccactaattgctgcaatggatgaaattgggtgtttaatgctggagagcacatgtaggtgacacatgtgccttgaggtatgtgaggacatgtaaattagatccacagtgagctgaggagggctttccccgccagagtgaggttgggaagcagagttaatccacttataggatgaactgcttggtatttttattgtattgtgactgtattacaaagatggacaattcactccttgggagcaagttatgctctagaagtttatttacaaatatgctgggcagctctcttgaaatattttcccaaggaagctattctacacagtggcaaaattgctatctaattaataatgtagctaaactatgatatttatagtagcaaaaaactaaattctataagattgcattaaaggaaagatatattctatttgctcacttgggctgcttggtactcacctgccctccaggtgtactttaggcctgtggagggtgggcatttagtggtgacccttgcaccagggttttctaacagatgaccctgtgaatcataatttaaacctgcatatattttatagccagtcacatttgccctctcaccctatatggccataaactgcctaagcactcaggcctcccactcatcaacccctttgaccagagaaagaagcactctggttctctatccccttgtcacatagagagtttgtcatggggcctctggctgtgcccttcacataacagaatgacttgccatctgcctgcaccaaacccagggatgtggaagacatctccccacaactgccactgctcaccaggacaagctgcccttcctgtctccacctctcagtccccctagaatggatggctggggagaggtggaggctgacagctgagacgtagtgtcagatatgatctaggagggcggatcaccgggatccgggaccatacaagtaacatggtttccatggcaactgcttgctcctttgaattaagacagcagtcagttgtcattgccatgacaaggcctctatctccaggcacaatgtccctgctgtctcctaatccaatggacttgctctcaccccagggatgaaacacccagaaactcacttctcagtcacttccacagccgatgactcagaagagccaaacccagaatggggcctctcttttccccatcacagactcccctgacaacctttcctggcgtaactagaggagtcccagtgcaggataggccctaaacgttttgttaaataaacaggtgcatgaaaggagcctaaggccattgttgatatccactctcttctttccacttccttctcatctttttctccatgttttatgcttctctgattccctcttctgcctgcaccagaccagccccagccctttattcctctccattttcactccttccagcctctgtccctgaactgccactggcaacccatgggacctcaggaccagagactgcttgactcatctggggagggtaagttcacgggggacaaaaaaatgattcctaaagaagaggcttcctagaccagcacaggctcgagaaagacatcccctaggcctggacttctgagcagctttagccaggctccggacggcagccagaggaggcctttccccattgctcctttccccattgctcaatggattccatgtttctttttcttggggggagcagggagggagaaaggtagaaaaatggcagccacctttccaagaaaaatataaagggtccaagctgtatagtatttgtcagtatttttttctgtaaaattcaaacacacacaaaagaaaaatttatttaaataaaatactttgaaaatgaaaagtcttgatgtagtcagatggttactctcttaacattaggtattacccccactcagacatcactcagaaatgatcaatgcagggactctttctgtgacacaaatgtcccagccctccctggtcaccgccttcgccatggtagagtcataggtctgaggatgaggaatgtggctgtctcacccttgcttgcaaaacagatggccttggagaccagactccctcaaaggtgccagctacaggaaaaatatactgatgttccttggcaacacttacagaactttccatcaatgaggtccatcaatggcttcttaaaggaaaaggggggaaatagcaaaaacctaaggaagaatggacctttgagttaaatccagtgtttgttgggaaaggagggatcaaaaacctctatagtagccactagggcaaaaactgtgtgtatgtgtgtgtgtaagtgtgtgtacactgttcaatatggttcaatatggtaccaatagccacatgtgactatttaaattcattgcaatgaaataaaattaaaggtatactagctc

SEQ ID NO: 1203 - DNA, 1033 bp, Homo sapiens
  source 1..1033: mol_type = genomic DNA
gtcaatagatgaaacaaatacttcatcctgctctggaaaccactggaatggaacaaagaggctgcagcaaatgcccaaaagtgggcaaaccagtgcaattacagacacagtaacccaaaggatcgaatgacaagtctaaaatgtggtgagaatctctacatgtcaagtgcctccagctcatggtcacaagcaatccaaagctggtttgatgagtacaatgattttgactttggtgtagggccaaagactcccaacgcagtggttggacattatacacaggttgtttggtactcttcatacctcgttggatgtggaaatgcctactgtcccaatcaaaaagttctaaaatactactatgtttgccaatattgtcctgctggtaattgggctaatagactatatgtcccttatgaacaaggagcaccttgtgccagttgcccagataactgtgacgatggactatgcaccaatggttgcaagtacgaagatctctatagtaactgtaaaagtttgaagctcacattaacctgtaaacatcagttggtcagggacagttgcaaggcctcctgcaattgttcaaacagcatttattaaatacgcattacacaccgagtagggctatgtagagaggagtcagattatctacttagatttggcatctacttagatttaacatatactagctgagaaattgtaggcatgtttgatacacatttgatttcaaatgtttttcttctggatctgctttttattttacaaaaatatttttcatacaaatggttaaaaagaaacaaaatctataacaacaactttggatttttatatataaactttgtgatttaaatttactgaatttaattagggtgaaaattttgaaagttgtattctcatatgactaagttcactaaaaccctggattgaaagtgaaaattatgttcctagaacaaaatgtacaaaaagaacaatataattttcacatgaacccttggctgtagttgcctttcctagctccactctaaggctaagcatcttc

SEQ ID NO: 1204 - DNA, 4510 bp, Homo sapiens; identical to SEQ ID NO: 933
  source 1..4510: mol_type = genomic DNA

SEQ ID NO: 1205 - DNA, 658 bp, Homo sapiens
  source 1..658: mol_type = genomic DNA
acaacttcaagggaggtgccctgtggttgccccatgcttccctcctggccaccaggaatcaggacaagcaaagaacacgacattcacagtccagggaggtcacacagtccggaaaggtacaaagggtttggagaactcacttcatttggtttgggagcctccgcaggtggacacggtctggcatcctgcacttgctgccctctgacacctgggaagatggccggcccgtggaccttcacccttctctgtggtttgctggcagccaccttgatccaagccaccctcagtcccactgcagttctcatcctcggcccaaaagtcatcaaagaaaagctgacacaggagctgaaggaccacaacgccaccagcatcctgcagcagctgccgctgctcagtgccatgcgggaaaagccagccggaggcatccctgtgctgggcagcctggtgaacaccgtcctgaagcacatcatctggctgaaggtcatcacagctaacatcctccagctgcaggtgaagccctcggccaatgaccaggagctgctagtcaagatccccctggacatggtggctggattcaacacgcccctggtcaagaccatcgtggagttccacatgacgactgaggcccaagccaccatccgcatggacaccagtgcaa

SEQ ID NO: 1206 - DNA, 1524 bp, Homo sapiens
  source 1..1524: mol_type = genomic DNA
cgaagaccaggcgggcactgttgcccggcgacgctccggcgctgggtccccgaggcccggcccctccccgggaggaggtgggcttcgagtcacgtgacccgtgccctacgggagggggtgcggtcggggacccggcaggaggcggccgagaagagaggaccgtgggggcgttcgcgtggctcccagcccgggaccccacccccgctggacagtgggggaaactgaggcctgagcgggcccacacaggaccatgaaggtgcttctcctcacagggctgggggccctgttcttcgcctattattgggatgacaacttcgacccagccagcctccagggagcgcgagtgctgctgacaggggccaacgctggtgttggtgaggagctggcctatcactacgcgcgtctgggctcccacctggtgctcactgcccacactgaggctctcctgcagaaggtggtagggaactgccggaagctgggcgcccccaaggtcttctacatcgcggcggacatggcctcccctgaggcgcccgagagcgtggtgcagtttgcgctggacaagctgggcgggctggactacctcgtgctgaaccacatcggcggcgccccggccggcacgcgagcccgcagcccccaggcaactcgctggctcatgcaggtaaactttgtgagctacgtgcaactgacgtcgcgggcgctgcccagcctgacggacagcaagggctccctggtggtggtgtcctcgctgctcggccgcgtgcccacgtcgttctccactccctactcggcggccaagtttgcgctggacggcttcttcggctccctgcggcgggagctggacgtgcaggacgtgaacgtggccatcaccatgtgcgtcctgggcctccgagatcgcgcctccgccgccgaggcagtcaggagctcaacgtcacggccgcggcagcctgagcaccggggggtgcccctccagtcccagacggcaatgttcctccctccaactgtccctggagccagaacactcacagagacacccctgagagggtggccacagcccaagatgaagtcatcaagacagaaaagcaaaaccgagaaaaacgacgggcacctggaaccagtcacggcttgggaggtgcaggtgccccgtgttaggcgcctttgtcggggacttgcaaggcctcacctgtttggccatgattgatgacgtgactgcttccattttgcagatgaggaaactaaggctcagagaggccacgccacccttgagccacccatggacccctctccatctcctgcctgcgcctttaagtccctgatttattctttccattcattccatctgggaggaacccccccaactcctgccagcttcccctagctggggtctctggtactcttcacacctgcaggggcgtctacactgttcgtctacctggtggcagggtctgagcgggaggaggagggaaagagtgtgttctgagctggacccagcctcttgttcgagaataaaaactcttcttctcttgc

SEQ ID NO: 1207 - DNA, 2096 bp, Homo sapiens
  source 1..2096: mol_type = genomic DNA
gtccctagagacagcctggaaagattgggtgccagctgcagagaggagagcaaggcgaccaaacgcagggtaaggtctggaggtgctcatagttcactacgggacatgtacatggaagtgaataattatgtcacaaggtgccaagggggctagttacctcacataggatcttagaaaaggtctcctggagaccatgtctgagctggtcctgaggtgtgagtagggattctccgcagggcggggaaggacttgaaagagtctggcaatatggagcacatcaggattatggaagctgtggctgcctgcagcccatcctgcccccagcacctagagtcatctttagaaatgcaagcctgatcgtggaatccaccttcctaacacccttcagtgccctcctcttcgttacacccttactatacaaacgatagtccatggaccagcagcatcaacataaccagggagcttgttagaaatgtagaatctggtccatcccaaacctgacgaagcagaagctgcattttgccaagatcccagggaatttgtgtgcccgttatggtttgcgaagtgcttcccaagagaacatacggcaagccagagggatctttgcagatcttgctcctttcattctctggcctcatcttgtcgctctcctccatccgtgcccacatccccactgtactggaccgcttgcagctccttgaatgcagcatagtcttgttttcttttttgcagtgattctacatctttcccatcttctccacctggatgcctccatccatcctttcagacttcccttctctagcaaacctttcttgctaattcccatgtctaacacaacacttccccatactgcatggccattatcctttctgcatcagactgtgagcaccttgaaggcagtggcagtgactcattcattgtggcatctgcagattccagtggactgccaggcatgcaatagaaaatcaaaaaagatttactgctaaataatcctcaactccagtggcagctccatgtgccatttctcttccgctctggcctcggctcttcctgtgcctacctggggcttggctttcacctaggtgtctgcatggaagggagagcgacctggaggaccatcgccaatccatcaatagcctcccggttgagatgacttcagctctgatttggaagagctatgatattgtttataggagtgaattaatatgtgtaaaggttacaaagtaaacagttaaattaaattaattgtgctggagcaggtcaaacaggcttctgagagatgaacatacacatctctattaactccacattcagtgagtgtgggtaacttgaaattggctgggtcaccatttacatcatagaaattggcaaatagtacaaattagggctccctcacccctactcgggcatagagctggtacactagcacacctctggttatacatgcatgcgtgtgccaccagaacaaaacacctaacagcaggcacgttgcctctgttgcccaccattacagctcccgcacggagcagacagactcatggcaggaattgaatgcatgtttgtcgagtggaagcatgaacaaatccacaaaatgcccaagatgaggcaaagaaggacattggctcaaatgttaaacataagttaggagctgagataatgcccagaggaaaaatgttctgtaattctaagtaaaacccatctctaaggcaggatgctgcttatgagggctccacagacagatgggggaggcctgggtcctgcccttggaaagagtctgacagctcgacttctggaaacagccatctgcacaggtcaacatcttcttagctgacagggagcagatttgcagaccacatcacatttgaaattccagaagaaacttcttggagtctgctcttgtgcaaatgagcctagaaagcccgttaactttgggtggaggcttccactgtttggctatcccaagtgggcccaaagctaaggaaaacccaccagccctttgcttcctgcttcctctatttgtttgccccaggaaatcagaggtgatgacatgatttggcttgggcacgacaggaataaacgatatttaagagacgtca

SEQ ID NO: 1208 - DNA, 1687 bp, Homo sapiens
  source 1..1687: mol_type = genomic DNA
atccatgctaaaggtaaacaaactgcaacttatatctgcaatttattttggtatagacaagaggtatgccagtagcacactggtggcttcagaagaaattctcaacacctagctcgccagagagtctatgtatgggattgaacaatctgtaaactaaaggatcctaatcatgaaaataagtatgataaattataagtcactattggcactgttgtttatattagcctcctggatcatttttacagttttccagaactccacaaaggtttggtctgctctaaacttatccatctccctccattactggaacaactccacaaagtccttattccctaaaacaccactgatatcattaaagccactaacagagactgaactcagaataaaggaaatcatagagaaactagatcagcagatcccacccagacctttcacccacgtgaacaccaccaccagcgccacacatagcacagccaccatcctcaaccctcgagatacgtactgcaggggagaccagctgcacatcctgctggaggtcaaatgtgggtgtagagattatggaaaaattcaatacaattagtgtctccaaatgcaacaaagaaacagttgcaatgaaagagaaatgcaagtttggaatgacatccacaatccccagtgggcatgtctggagaaacacatggaatcctgtctcctgtagtttggctacagtcaaaatgaaggaatgcctgagaggaaaactcatatacctaatgggagattccacgatccgccagtggatggaatacttcaaagccagtatcaacacactgaagtcagtggatctgcatgaatctggaaaattgcaacaccagcttgctgtggatttggataggaacatcaacatccagtggcaaaaatattgttatcccttgataggatcaatgacctattcagtcaaagagatggagtacctcacccgggccattgacagaactggaggagaaaaaaatactgtcattgttatttccctgggccagcatttcagaccctttcccattgatgtttttatccgaagggccctcaatgtccacaaagccattcagcatcttcttctgagaagcccagacactatggttatcatcaaaacagaaaacatcagggagatgtacaatgatgcagaaagatttagtgactttcatggttacattcaatatctcatcataaaggacattttccaggatctcagtgtgagtatcattgatgcctgggatataacaattgcatatggcacaaataatgtacacccacctcaacatgtagtcggaaatcagattaatatattattaaactatatttgttaaataacacaaaagtctgaaattcattcacttaagtaaaaaaatttattgactgtctactagcaggccagatgctgtgtttggctctgaattcccaactagcaagagcagagaatctacattatggctgatccataagccaccaattcagctaaatgagatgtttctaatctgggcttccacttaaaaataaaactaaaaatactcatgaaaagagcctacccttcttgatcagagccatacccctcttcaccaatgggaagtcaagacacctatgggtaaaagttctctctgatgcatgaaaactcagagtgataaagtaattttaaaataaaaatttggagaaagca

SEQ ID NO: 1209 - DNA, 1896 bp, Homo sapiens
  source 1..1896: mol_type = genomic DNA
atgtcctcaaatacaatgcttcaaaaaacgctgctgatcttgatctctttttcagtagtaacctggatgatttttataatttctcagaacttcacaaagctttggtctgctctaaacttatccatctctgtccattactggaacaactccgcaaagtccttattccctaaaacatcactgataccattaaagccactaacagagactgaactcagaataaaggaaatcatagagaaactagatcagcagatcccacccagacctttcacccatgtgaacaccaccaccagtgccacacacagcacagccaccatcctcaaccctcgagatacatactgcaggggagaccagctggacatcctactggaggtgagggaccacttgggacagaggaagcaatatggtggggatttcctgagggccaggatgtcctccccagcactgacggcaggtgcttcaggaaaggtgatggacttcaacaatggcacctacctggtcagcttcactctgttctgggagggccaggtctccctgtctctgctgctcatccaccccagtgaaggggcgtcggctctctggagggcaaggaaccaaggctatgataaaattattttcaaaggcaaatttgttaatggcacctctcatgtcttcactgaatgtggcctgaccctaaactcaaatgctgaactctgtgaatatctggatgacagagaccaagaagccttctattgtatgaagcctcaacacatgccctgtgaggctctgacctacatgaccacccggaatagagaggtatcttatcttacagacaaggaaaacagccttttccacaggtccaaagtgggagttgaaatgatgaaggatcgtaaacacattgatgtcactaattgtaacaagagagaaaaaatagaagagacatgccaagttggaatgaagcctcctgtccctggtggttatactttacaaggaaaatggataacaacattttgcaaccaggttcagttagacacaattaagataaatggctgtttgaaaggcaaactcatttacctcctgggagactctacactacgtcagtggatctactacttccccaaagttgtaaaaacactgaagttttttgatcttcatgaaactggaatctttaagaaacatttgcttctggatgcagaaagacacactcagattcaatggaaaaaacatagctatcccttcgtcactttccagctctactctctgatagatcatgattatatccctcgggaaattgaccggctatcaggtgacaaaaacacagccatcgtcatcacctttggccagcactttagaccatttcccattgacatttttattcgcagggccatcggtgttcaaaaggctattgaaagactgttcctaagaagcccagccactaaagtgattattaagacagaaaacatcagggagatgcacatagagacagagaggtttggagacttccatggttatattcactatcttatcatgaaggatattttcaaagacctcaacgtgggcatcattgatgcctgggacatgaccattgcatatggcactgacactatccacccacctgatcatgtgattggaaatcagattaacatgttcttaaactacatttgctaagggataaatactatacaaaatcactaggaaccaatctctgcacataatcccacatgtattgtaaagtaagttttactcattttaggaactaaggaaaataaatttaaaagaatctgtttggggaggaaggctatgtaaggacaatgacaactgataagggatgcaaaaccaagagaatcattcatgaagaatgactataccatgcctggttctgatgctcgtttaaaatattaaaaaagttttttaaaagcc

SEQ ID NO: 1210 - DNA, 924 bp, Homo sapiens
  source 1..924: mol_type = genomic DNA
gtagttcacggctgccccggctccaggcctgtggaaatcgaatcaagggtttctggagtggagtgattccagctgctttgagctgaaggaaaagtagcctggccagtaaagcgtccgtgtgctggaggagtgcagccacccatcccggcgggccttgcaggacgaccgacaccaggaaggctttgtgccaggcccagcagccacccccagccgccttatgcaagtgggtacatgccctcgccagacgccagctttctgatctgcgtctttagattttttccatcgcctaagcgttacttctccactgatcggtgagtttagtgatggccagagctcactggaggacaatggacttggataaccaaaggtcagggcttggtcataacaatgactttattaccgggaaggacgagtcaaaaaataggaaggcctgggaaccctcaggctcgccactctaggttttagagacctgaaacatcacagaagcttctgagtggttctgaagattcaagaggtttgcaggttgctatgttaatgttgtttgtctttggagtcttacttcatgaagtctcactgagtggtcagaatgaagctcctcctaatactcacagcattccaggcgaacctctgtataactatgccagcatccgcttgccagaggagcacattcccttctttttgcacaacaataggcatattgccactgtctgtaggaaagactctctttgtccatataagaaacacctagagaagctaaagtactgctggggttatgagaaatcctgcaaaccagagttcaggtttggttacccagtttgcagctatgtcgacatgggatggacggacactcttgagtcagctgaggacatattttggaaacaagctgactttggatatgccagagagaggctggaggagatgcat

SEQ ID NO: 1211 - DNA, 1462 bp, Homo sapiens
  source 1..1462: mol_type = genomic DNA
tggagggagaggagagattaaagtgaggagagagctacaaccaagtaagcaagtgtcagggctcaccaaccatgcaaggacagggcaggagaagaggaacctgcaaagtccatgaagcagaaacatcaaaaagcatgggatttggaatttgagacctgactttgaagcccacacagaacacagacaagtcaaccatgctatttgggcaaagacctgaccttgaagatgggaagtgccctcttcgtcaagaaggagctgcagctgcaggcaaatttcttgggcaatgtcaagaggctgtatgaagcagaagtcttttctacagatttctccaacccctccattgcccaggcgaggatcaacagccatgtgaaaaagaagacccaagggaaggttgtagacataatccaaggccttgaccttctgacggccatggttctggtgaaccacattttctttaaagccaagtgggagaagccctttcaccctgaatatacaagaaagaacttcccattcctggtgggcgagcaggtcactgtgcatgtccccatgatgcaccagaaagagcagttcgcttttggggtggatacagagctgaactgctttgtgctgcagatggattacaagggagatgccgtggccttctttgtcctccctagcaagggcaagatgaggcaactggaacaggccttgtcagccagaacactgagaaagtggagccactcactccagaaaaggtggatagaggtgttcatccccagattttccatttctgcctcctacaatctggaaaccatcctcccgaagatgggcatccaaaatgtctttgacaaaaatgctgatttttctggaattgcaaagagagactccctgcaggtttctaaagcaacccacaaggctgtgctggatgtcagtgaagagggcactgaggccacagcagctaccaccaccaagttcatagtccgatcgaaggatggcccctcttacttcactgtctccttcaataggaccttcctgatgatgattacaaataaagccacagacggtattctctttctagggaaagtggaaaatcccactaaatcctaggtgggaaatggcctgttaactgatggcacattgctaatgcacaagaaataacaaaccacatccctctttctgttctgagggtgcatttgaccccagtggagctggattcgctggcagggatgccacttccaaggctcaatcaccaaaccatcaacagggaccccagtcacaagccaacacccattaaccccagtcagtgcccttttccacaaattctcccaggtaactagcttcatgggatgttgctgggttaccatatttccattccttggggctcccaggaatggaaatacgccaacccaggttaggcacctctattgcagaattacaataacacattcaataaaactaaaatatgaattcatctgtcaacaga

SEQ ID NO: 1212 - DNA, 568 bp, Homo sapiens
  source 1..568: mol_type = genomic DNA
gagatgaagcctgatagatccgcccaggtgtaggtgaaatggtagagcctcaggggtaatagattctgtgctctcatgctgaagtttagtgctgtgtcttgactggctctctagcatcagtgtgatgggctgctcctggtacagttacaaagtgaacatgcttcttgctgctcacatttatccctaatctggagggcaacctggagctaggtaagaacagaacagccctttgacttcaacgcatggacaaaggacaacaaaggcaaatatttaaaaaaaccatccatgggacagtctaacataacaaagggaattattcatcaagaagaggccctttagcagggtatttaaagtgcccaggtacttacaataacaagttggactgaacacattgtatctcaggaattaagaatttttcctaaaagaagtttccagattgtttgaacttctctggccgcacaatacaggaaggaagactaaagcagcaaagggacctacagcgtctgcagcatgggctggttaactaggattgtctgtcttttctggggagtattacttacagcaagag

SEQ ID NO: 1213 - DNA, 1293 bp, Homo sapiens
  source 1..1293: mol_type = genomic DNA
gcagagatgaagttccaggggcccctggcctgcctcctgctggccctctgcctgggcagtggggaggctggccccctgcagagcggagaggaaagcactgggacaaatattggggaggcccttggacatggcctgggagacgccctgagcgaaggggtgggaaaggccattggcaaagaggccggaggggcagctggctctaaagtcagtgaggcccttggccaagggaccagagaagcagttggcactggagtcaggcaggttccaggctttggcgtagcagatgctttgggcaacagggtcggggaagcagcccatgctctgggaaacactgggcacgagattggcagacaggcagaagatgtcattcgacacggagcagatgctgtccgcggctcctggcagggggtgcctggccacaatggtgcttgggaaacttctggaggccatggcatctttggctctcaaggtggccttggaggccagggccagggcaatcctggaggtctggggactccgtgggtccacggataccccggaaactcagcaggcagctttggaatgaatcctcagggagctccctggggtcaaggaggcaatggagggccaccaaactttgggaccaacactcagggagctgtggcccagcctggctatggttcagtgagagccagcaaccagaatgaagggtgcacgaatcccccaccatctggctcaggtggaggctccagcaactctgggggaggcagcggctcacagtcgggcagcagtggcagtggcagcaatggtgacaacaacaatggcagcagcagtggtggcagcagcagtggcagcagcagtggcggcagcagtggcggcagcagtggtggcagcagtggcaacagtggtggcagcagaggtgacagcggcagtgagtcctcctggggatccagcaccggctcctcctccggcaaccacggtgggagcggcggaggaaatggacataaacccgggtgtgaaaagccagggaatgaagcccgcgggagcggggaatctgggattcagggcttcagaggacagggagtttccagcaacatgaggaactctgagacgtctcctgggatgtttaactttgacactttctggaagaattttaaatccaagctgggtttcatcaactgggatgccataaacaaggaccagagaagctctcgcatcccgtgacctccagacaaggagccaccagattggatgggagcccccacactccctccttaaaacaccaccctctcatcactaatctcagcccttgcc

SEQ ID NO: 1214 - DNA, 517 bp, Homo sapiens
  source 1..517: mol_type = genomic DNA
ggtatctcagcaaccgctgggcatccggaggatgtggggacgcggagctgagaggctccgggctagctaggtgtaggggtggacgggtcccaggaccctggtgagggttctctacttggccttcggtgggggtcaagacgcaggcacctacgccaaaggggagcaaagccgggctcggcccgaggcccccaggacctccatctcccaatgttggagtagagacagggttttgccctgttggccaagctggtcttgaactcctgacctcaagtgatccacccgcctcggcctcccaaagtgttgggattacaggcgtgagccatcgtgcccagccagattctccatttctaacaagttcccaggtgatgtcgatgaagctggaatccgacacgtgacggtctgtccgccgtctcagactagaggagcgctgtaaacgccatggctcccaagaagctgtcctgccttcgttccctgctgctgccgctcagcctgacgctactgctgccccaggcagaca

SEQ ID NO: 1215 - DNA, 844 bp, Homo sapiens
  source 1..844: mol_type = genomic DNA
cctgcggccccagcctctcctcacgctcgcgcagtctccgccgcagtctcagctgcagctgcaggactgagccgtgcacccggaggagacccccggaggaggcgacaaacttcgcagtgccgcgacccaaccccagccctggcctgcagcatggcccagctgttcctgcccctgctggcagccctggtcctggcccaggctcctgcagctttagcagatgttctggaaggagacagctcaggtatctatcgctgtgaggtccagcacggcatcgatgacagcagcgacgctgtggaggtcaaggtcaaaggggtcgtctttctctaccgagagggctctgcccgctatgctttctccttttctggggcccaggaggcctgtgcccgcattggagcccacatcgccaccccggagcagctctatgccgcctaccttgggggctatgagcaatgtgatgctggctggctgtcggatcagaccgtgaggtatcccatccagaccccacgagaggcctgttacggagacatggatggcttccccggggtccggaactatggtgtggtggacccggatgacctctatgatgtgtactgttatgctgaagacctaaatggagaactgttcctgggtgaccctccagagaagctgacattggaggaagcacgggcgtactgccaggagcggggtgcagagattgccaccacgggccaactgtatgcagcctgggatggtggcctggaccactgcagcccagggtggctagctgatggcagtgtgcgctaccccatcgtcacacccagccagcgctgtggtgggggcttgcctggtgtcaagactctcttcc

SEQ ID NO: 1216 - DNA, 2687 bp, Homo sapiens
  source 1..2687: mol_type = genomic DNA
gaccaagcattttcaggagttgaaagagaaaatggacgagctcctgcctttgatccccgtgctggaacagtacaaaacagatgctaagttaatcacccagttcaaggaggaaataaggaatctgtctgctgtcctcactggtattcaggaggaaattggtgcctatgactacgaggaactacaccaaagagtgctgagcttggaaacaagacttcgtgactgcatgaaaaagctaacatgtggcaaactgatgaaaatcacaggcccagttacagtcaagacatctggaacccgatttggtgcttggatgacagaccctttagcatctgagaaaaacaacagagtctggtacatggacagttatactaacaataaaattgttcgtgaatacaaatcaattgcagactttgtcagtggggctgaatcaaggacatacaaccttcctttcaagtgggcaggaactaaccatgttgtctacaatggctcactctattttaacaagtatcagagtaatatcatcatcaaatacagctttgatatggggagagtgcttgcccaacgaagcctggagtatgctggttttcataatgttacccctacacatggggtggattctctgacatcgacctaatggctgatgaaatcgggctgtgggctgtgtatgcaactaaccagaatgcaggcaatattgtcatcagccaacttaaccaagataccttggaggtgatgaagagctggagcactggctaccccaagagaagtgcaggggaatctttcatgatctgtgggacactgtatgtcaccaactcccacttaactggagccaaggtgtattattcctattccaccaaaacctccacatatgagtacacagacattcccttccataaccaatactttcacatatccatgcttgactacaatgcaagagatcgagctctctatgcctggaacaatggccaccaggtgctgttcaatgtcacccttttccatatcatcaagacagaggatgacacataggcaaatgtgacatgttttcattgatttaaacagtgtgatttgtgataaactctataagaccccttccgtttttttcttcactattatttttcatcatttctccaaagcaaagcatttttattgtaaagttggtgtttcaaaaacatagctgagcttgtctaacttaccatgttggaaacacatcttaacttctaaatttacaaggcctatcatgtccttgtcatgaaaagcactaaaaaaaaaaagagtttaagtggctaaagtcatagttttgcaagagattaatgatctgccttatattagagtcagagactaatggtggcttaaatgcacgaatgtctttttttttaaaactgtcattttttactgtcttttgctccatatcaggaaatattttggtaggaattaggagaacaaaaagcacttttatcccatttatttctttaaaaaatgtaaggatttcatttatattgaaaaataatattaatcattttgctgttaacacaattctctgatgcggtgctgtacagtcatttttaaatctcttgctaacattttattggcagtatgtatttctaccattgtaaccaccattgtgctattgtatctcttcacttctgtgaaagtaatattttttataaaatacactgaaatttaacctcagtaattgagtccattttcaagtgtggtcaagaataatcttcttggcttacccctttacataagcattataaactaaaatgaaaaccaaaccagacacctgacatagagtctttattttaccccaagttttttgggccactgacattgaatgcaacaactgatttcatacaactgagttactctgttcactccactgaatgcaacccatatagtttcttgcacaaggtgcatctggattccaaatattggatttgagttgactctactcatttattatacactaaagaaattttgttcttcatagttaaatgtactagcatttaatttatattttacatacaacttgcaataatgaaattccttatgtcaggaccctgaaaataagcacatttgaaaactcttagaaaaaaaaaattctgtaatgtcctctagatttagattatgagccctgaggagttattggcaagatttgtgcaaaataaaatatggggagacttgggagttgtctttgtggtttcaaaagtgtaaataaccaattcagaaaacaaaatggaaaaacgaccccttgttaccttgattcactgtatgtggaaaaataatgtaaccaaaagggaagagctttaataatacttatgttaataactctatgaaacatataagctaactatatatcaaacatttcattgagtttggatgtattttccacatattaaaaaaatagttccctaaggcagctttatggaaactaatataggttggttttacaatttaaaaagtatattctataataaataataaaacaaattgttttaaatgtttagtttcacacatacatagtaccatgattttctttgaaagataaggatgtaatgatttagataaagcatcatgtaaagaaatcctaacatttaagtgtaattcatttcaaatgtcacaagtaaagcatcatcctcaaatatctcactgtcaaaattgtagaattaaataacccaatcttgaaactg

SEQ ID NO: 1217 - DNA, 702 bp, Homo sapiens
  source 1..702: mol_type = genomic DNA
ggaggtgaggcggaactctgaggcagatatcctccctttcctcctcggctgctgctcttactttgacaagccaggctaacattgaaggtggtccattatggctgacatgcaaaatctggtagaaagattggagagggcagtgggccgcctggaggcagtatctcatacctctgacatgcaccgtgggtatgcagacagtccttcaaaagcaggagcagctccatatgtgcaggcatttgactcgctgcttgctggtcctgtggcagagtacttgaagatcagtaaagagattgggggagacgtgcagaaacatgcggagatggtccacacaggtttgaagttggagcgagctctgttggttacagcttctcagtgtcaacagccagcagaaaataagctttccgatttgttggcacccatctcagagcagatcaaagaagtgataacctttcgggagaagaaccgaggcagcaagttgtttaatcacctgtcagctgtcagcgaaagtatccaggccctgggctgggtggctatggctcccaagcctggcccttatgtgaaagaaatgaatgatgccgccatgttttatacaaaccgagtcctcaaagagtacaaagatgtggataagaagcatgtagactgggtcaaagcttatttaagtatatggacagagctgcaggcttacattaaggagttccatac

SEQ ID NO: 1218 - DNA, 4510 bp, Homo sapiens; identical to SEQ ID NO: 933
  source 1..4510: mol_type = genomic DNA

SEQ ID NO: 1219 - DNA, 710 bp, Homo sapiens
  source 1..710: mol_type = genomic DNA
ccccaaacctgccaccgacggccacttccgtttccccgatagtatttggggatctcgaagcgatacttccggctccccccaggtccccaagctttacttttgtggggcacgacgagaaagtccgcagccccaaacattcccagaggtccacttgggccagtggtactttatcgcaggggcagctcccaccaaggaggagttggcaacttttgaccctgtggacaacattgtcttcaatatggctgctggctctgccccgatgcagctccaccttcgtgctaccatccgcatgaaagatgggctctgtgtgccccggaaatggatctaccacctgactgaagggagcacagatctcagaactgaaggccgccctgacatgaagactgagctcttttccagctcatgcccaggtggaatcatgctgaatgagacaggccagggttaccagcgctttctcctctacaatcgctcaccacatcctcccgaaaagtgtgtggaggaattcaagtccctgacttcctgcctggactccaaagccttcttattgactcctaggaatcaagaggcctgtgagctgtccaataactgacctgtaacttcatctaagtccccagatgggtacaatgggagctgagttgttggagggagaagctggagacttccagctccagctcccactcaagataataaagataatttttcaatcctca

SEQ ID NO: 1220 - DNA, 2970 bp, Homo sapiens
  source 1..2970: mol_type = genomic DNA
atggcggccgcgggcttggtcgctgtggcagcggctgccgagtactctggcacggtagcgtcgggaggtaacctccctggtgttcactgcggcccaagctccggggcaggccctggttttggcccgggctcgtggagccgctctctcgatcgagccctggaggaggcggcggtcactggggtgctgagcctgagcggccggaaactgagggagtttccccggggagcggccaaccacgacctgacggacaccacccgggcggacctgtcgcgaaatcgcctttcagaaattcctatagaagcatgtcactttgtttctctggaaaatctcaacttgtaccaaaattgtattcgttatattccagaggcaattttaaacctacaagctctaacattcttaaatattagtcggaaccaactgtcaacattgccggtacacttgtgtaatttgccattgaaagtcttaattgctagtaataacaaattggtgtcacttccagaagaaattggacaccttagacatttgatggaacttgatgtgagctgcaatgaaattcaaactataccttcccaaattggtaacctggaggccttgagagaccttaatgtaagaagaaatcacctagtacatttgcctgaagagctggcggagttgcctttgatacggttagacttctcatgcaataaaattaccacaatccctgtttgttatcggaacctcaggcacctacagacgatcaccctagataacaatccactacaatcacctcctgcacagatatgtataaaaggcaaagtccacatatttaaatacctgaacatacaagcttgtaagattgctccagatctgccggattatgataggagaccgttgggttttggctcctgccatgaagaactgtactcaagtcgcccttatggagcccttgattcaggcttcaatagtgtggacagtggtgataagagatggtcagggaatgaacctacagatgaattttcagatctgcctcttcgagtagcagagattactaaagaacaaagactacgaagagaaagccagtaccaagagaaccgcggcagtttggtagtaacaaacggcggagtggaacatgatctggatcagattgactacatagacagctgcaccgcagaggaagaggaggccgaggtgagacagcccaagggaccagacccagacagccttagttcacagtttatggcgtatattgaacagcggcgaatctctcatgagggttcaccagtaaagccagtagccattagggagtttcaaaaaacagaagatatgagaagatatttacatcaaaacagggttccagctgagccatcttccctcctgtcactatcagcaagtcacaatcagctgtcacacacagacctggaacttcatcagagaagggagcagttagtagagcgcactcggagagaggctcagcttgctgccctgcagtatgaggaggagaaaataaggaccaagcagatccagagagatgctgtcctggactttgtcaaacaaaaagcatcacaaagtccacaaaaacagcacccgctcctagatggcgtagatggtgagtgccccttcccatccagaaggtctcagcacactgatgatagtgccttgtgcatgtcgctgtcagggttgaatcaagtgggctgtgctgctaccctgcctcattcttctgccttcacgcctcttaagagtgatgacagacctaatgctctattaagttcacctgcaacagaaacagttcatcattcccctgcatattcttttcctgctgctatccagagaaatcagcctcagcgccctgaaagcttccttttccgagcaggtgtcagggcagaaaccaacaaaggtcatgcttcaccccttcctccatctgctgcacctaccactgattctacagattccataacaggacagaattcaagacagagagaagaagagctggaattaatagaccaactgcgtaaacatattgagtaccggttgaaagtgtctctaccttgtgatctcggagcagctctaactgacggtgttgttctttgccatttggccaatcatgtgcgacctcgatctgtcccaagcattcatgttccctcaccagctgtacctaaattaacaatggcgaaatgcaggcgaaatgtggaaaatttcctagaagcttgcagaaaaattggtgtacctcaggagcaattatgtttgcctctccacattttagaagagaaaggtttgagccaggttgcagtgacggtccaggctctcctggaacttgccccacccaagcaacagcagcaccagttatctgctgtttgaggatccccaggacggtgggcactggcctggccaaaacaaggaacaggacaccgtgattgctgctgccagctgtctgcttaaacaaagctcttgtgtgttctcagaagggaccgttcccatgattcctaacaggaatattttgcttcatttctccattttaggggaggttatttccatttccattgaatttttttacgaagacaccattggttttctcagatgaaacttctcttactgaaaacccagcacctaacttggctgtgttttcctggagagcaggcgtgtttcacgtgccagaaagcacatcttctgtgttaggcacaagcatgctgtgccattgtttttacctggtctcaagacaactggtctgctggtttctaaacttggttgttcattagactctcctggagtatttgttaaaatacagattcacattcagtagagctggggtaaggcctaggaatctgcattttcaacaaccattgcacatgtttttgtttttgttggagaaggagttctgctcagtcgcccaggctagagtgcagtggcataatctcagctcactgcaacctccgcctcccgggctcaagcgattctcctgcctcagcctcccgagtagctgggacaacaggtgcc

SEQ ID NO: 1221 - DNA, 1109 bp, Homo sapiens
  source 1..1109: mol_type = genomic DNA
tctgcctgctgtcgggggcgggctggccaggccgaggccggagcaggcaggcatccccgggagttgtctcttttcatgccagcgccaacaggaggctgtctggacacactgattactcactcaccagcctccttcttttgttcaccagcccccctcttttgtccaccagcccagcctgactcctggagattgtgaatagctccatccagcctgagaaacaagccgggtggctgagccaggctgtgcacggagcgcctgacgggcccaacagacccatgctgcatccagagacctcccctggccgggggcatctcctggctgtgctcctggccctccttggcaccacctgggcagaggtgtggccaccccagctgcaggagcaggctccgatggccggagccctgaacaggaaggagagtttcttgctcctctccctgcacaaccgcctgcgcagctgggtccagccccctgcggctgacatgcggaggctgctcgtgtgggccacctcaagccagctgggctgtgggcggcacctgtgctctgcaggccagacagcgatagaagcctttgtctgtgcctactcccccggaggcaactgggaggtcaacgggaagacaatcatcccctataagaagggtgcctggtgttcgctctgcacagccagtgtctcaggctgcttcaaagcctgggaccatgcaggggggctctgtgaggtccccaggaatccttgtcgcatgagctgccagaaccatggacgtctcaacatcagcacctgccactgccactgtccccctggctacacgggcagatactgccaaggtcacctcccaaactccaatatgcctcactctgcaatggggaccaaaccaaagacaccaggcgtgccagcaatcggaagccttgtgaggtgcagcctgcagtgtgtgcacggccggttccgggaggaggagtgctcgtgcgtctgtgacatcggctacgggggagcccagtgtgccagtgagtcctgccccagggcccccaaagagccagctcctctcaagaccccccttcaatggggcatcagctcccaggagcccgctgtgtgcctctctttccaactcattcagtga

SEQ ID NO: 1222 - DNA, 583 bp, Homo sapiens
  source 1..583: mol_type = genomic DNA
gagccgcctgcgcggatcggcgtccgcagcgggcggctgctgaggggaaattcacgttacctctccacgtgccgaccaaggctctgagacccccagctgccttgaggtgcagtgttggggatccagagccatgtcggacctgctactactgggcctgattgggggcctgactctcttactgctgctgacgctgctggcctttgccgggtactcagggctactggctggggtggaagtgagtgctgggtcaccccccatccgcaacgtcactgtggcctacaagttccacatggggctctatggtgagactgggcggcttttcactgagagctgcagcatctctcccaagctccgctccatcgctgtctactatgacaacccccacatggtgccccctgataagtgccgatgtgccgtgggcagcatcctgagtgaaggtgaggaatcgccctcccctgagctcatcgacctctaccagaaatttggcttcaaggtgttctccttcccggcacccagccatgtggtgacagccaccttcccctacaccaccattctgtccatctggctggctacccgccgtgtc

SEQ ID NO: 1223 - DNA, 922 bp, Homo sapiens; identical to SEQ ID NO: 819
  source 1..922: mol_type = genomic DNA

SEQ ID NO: 1224 - DNA, 922 bp, Homo sapiens; identical to SEQ ID NO: 819
  source 1..922: mol_type = genomic DNA

SEQ ID NO: 1225 - DNA, 1569 bp, Homo sapiens
  source 1..1569: mol_type = genomic DNA
gagccgggaggcgcggccggcatggaggcgctgctgctgggcgcggggttgctgctgggcgcttacgtgcttgtctactacaacctggtgaaggccccgccgtgcggcggcatgggcaacctgcggggccgcacggccgtggtcacgggtatcagttcctgtggccggacccgtgaggcgtttaacctgctgcttcgggtgaaccatatcggtccctttctgctgacacatctgctgctgccttgcctgaaggcatgtgcccctagccgcgtggtggtggtagcctcagctgcccactgtcggggacgtcttgacttcaaacgcctggaccgcccagtggtgggctggcggcaggagctgcgggcatatgctgacactaagctggctaatgtactgtttgcccgggagctcgccaaccagcttgaggccactggcgtcacctgctatgcagcccacccagggcctgtgaactcggagctgttcctgcgccatgttcctggatggctgcgcccacttttgcgcccattggcttggctggtgctccgggcaccaagagggggtgcccagacacccctgtattgtgctctacaagagggcatcgagcccctcagtgggagatattttgccaactgccatgtggaagaggtgcctccagctgcccgagacgaccgggcagcccatcggctatgggaggccagcaagaggctggcagggcttgggcctggggaggatgctgaacccgatgaagacccccagtctgaggactcagaggccccatcttctctaagcaccccccaccctgaggagcccacagtttctcaaccttaccccagccctcagagctcaccagatttgtctaagatgacgcaccgaattcaggctaaagttgagcctgagatccagctctcctaaccctcaggccaggatgcttgccatggcacttcatggtccttgaaaacctcggatgtgtgcgaggccatgccctggacactgacgggtttgtgatcttgacctccgtggttactttctggggccccaagctgtgccctggacatctcttttcctggttgaaggaataatgggtgattatttcttcctgagagtgacagtaaccccagatggagagataggggtatgctagacactgtgcttctcggaaatttggatgtagtattttcaggccccacccttattgattctgatcagctctggagcagaggcagggagtttgcaatgtgatgcactgccaacattgagaattagtgaactgatccctttgcaaccgtctagctaggtagttaaattacccccatgttaatgaagcggaattaggctcccgagctaagggactcgcctagggtctcacagtgagtaggaggagggcctgggatctgaacccaagggtctgaggccagggccgactgccgtaagatgggtgctgagaagtgagtcagggcagggcagctggtatcgaggtgccccatgggagtaaggggacgccttccgggcggatgcagggctggggtcatctgtatctgaagcccctcggaataaagcgcgttgaccgcc

SEQ ID NO: 1226 - DNA, 761 bp, Homo sapiens; identical to SEQ ID NO: 929
  source 1..761: mol_type = genomic DNA

SEQ ID NO: 1227 - DNA, 1140 bp, Homo sapiens; identical to SEQ ID NO: 240
  source 1..1140: mol_type = genomic DNA

SEQ ID NO: 1228 - DNA, 3845 bp, Homo sapiens
  source 1..3845: mol_type = genomic DNA
gatcccagaagtaggaggggcgtcttcccctcgtgggccctgagcgggactgcagccagccccctggggcgccagctttggaggcccccgacagctgctctcgggagccgcctcccgacacccgagccccgccggcgcctcccgctcccggctcccggctcctggctccctccgcctcccccgcccctcgccccgccgccgaagaggccccgctcccgggtcggacgcctgggtctgccgggaagagcgatgagaggtgtctgaaggtggctattcactgagcgatggggttggacttgaaggaatgccaagagatgctgcccccacccccttaggcccgagggatcaggagctatgggaccagaggccctgtcatctttactgctgctgctcttggtggcaagtggagatgctgacatgaagggacattttgatcctgccaagtgccgctatgccctgggcatgcaggaccggaccatcccagacagtgacatctctgcttccagctcctggtcagattccactgccgcccgccacagcaggttggagagcagtgacggggatggggcctggtgccccgcagggtcggtgtttcccaaggaggaggagtacttgcaggtggatctacaacgactccacctggtggctctggtgggcacccagggacggcatgccgggggcctgggcaaggagttctcccggagctaccggctgcgttactcccgggatggtcgccgctggatgggctggaaggaccgctggggtcaggaggtgatctcaggcaatgaggaccctgagggagtggtgctgaaggaccttgggccccccatggttgcccgactggttcgcttctacccccgggctgaccgggtcatgagtgtctgtctgcgggtagagctctatggctgcctctggagggatggactcctgtcttacaccgcccctgtggggcagacaatgtatttatctgaggccgtgtacctcaacgactccacctatgacggacataccgtgggcggactgcagtatgggggtctgggccagctggcagatggtgtggtggggctggatgactttaggaagagtcaggagctgcgggtctggccaggctatgactatgtgggatggagcaaccacagcttctccagtggctatgtggagatggagtttgagtttgaccggctgagggccttccaggctatgcaggtccactgtaacaacatgcacacgctgggagcccgtctgcctggcggggtggaatgtcgcttccggcgtggccctgccatggcctgggagggggagcccatgcgccacaacctagggggcaacctgggggaccccagagcccgggctgtctcagtgccccttggcggccgtgtggctcgctttctgcagtgccgcttcctctttgcggggccctggttactcttcagcgaaatctccttcatctctgatgtggtgaacaattcctctccggcactgggaggcaccttcccgccagccccctggtggccgcctggcccacctcccaccaacttcagcagcttggagctggagcccagaggccagcagcccgtggccaaggccgaggggagcccgaccgccatcctcatcggctgcctggtggccatcatcctgctcctgctgctcatcattgccctcatgctctggcggctgcactggcgcaggctcctcagcaaggctgaacggagggtgttggaagaggagctgacggttcacctctctgtccctggggacactatcctcatcaacaaccgcccaggtcctagagagccacccccgtaccaggagccccggcctcgtgggaatccgccccactccgctccctgtgtccccaatggctctgcctacagtggggactatatggagcctgagaagccaggcgccccgcttctgcccccacctccccagaacagcgtcccccattatgccgaggctgacattgttaccctgcagggcgtcaccgggggcaacacctatgctgtgcctgcactgcccccaggggcagtcggggatgggccccccagagtggatttccctcgatctcgactccgcttcaaggagaagcttggcgagggccagtttggggaggtgcacctgtgtgaggtcgacagccctcaagatctggtcagtcttgatttcccccttaatgtgcgtaagggacaccctttgctggtagctgtcaagatcttacggccagatgccaccaagaatgccaggaatgatttcctgaaagaggtgaagatcatgtcgaggctcaaggaccccaacatcattcggctgctgggcgtgtgtgtgcaggacgaccccctctgcatgattactgactacatggagaacggcgacctcaaccagttcctcagtgcccaccagctggaggacaaggcagccgagggggcccctggggacgggcaggctgcgcaggggcccaccatcagctacccaatgctgctgcatgtggcagcccagatcgcctccggcatgcgctatctggccacactcaactttgtacatcgggacctggccacgcggaactgcctagttggggaaaatttcaccatcaaaatcgcagactttggcatgagccggaacctctatgctggggactattaccgtgtgcagggccgggcagtgctgcccatccgctggatggcctgggagtgcatcctcatggggaagttcacgactgcgagtgacgtgtgggcctttggtgtgaccctgtgggaggtgctgatgctctgtagggcccagccctttgggcagctcaccgacgagcaggtcatcgagaacgcgggggagttcttccgggaccagggccggcaggtgtacctgtcccggccgcctgcctgcccgcagggcctatatgagctgatgcttcggtgctggagccgggagtctgagcagcgaccacccttttcccagctgcatcggttcctggcagaggatgcactcaacacggtgtgaatcacacatccagctgcccctccctcagggagtgatccaggggaagccagtgacactaaaacaagaggacacaatggcacctctgcccttcccctcccgacagcccatcacctctaatagaggcagtgagactgcaggtgggctgggcccacccagggagctgatgccccttctccccttcctggacacactctcatgtccccttcctgttcttccttcctagaagcccctgtcgcccacccagctggtcctgtggatgggatcctctccaccctcctctagccatcccttggggaagggtggggagaaatataggatagacactggacatggcccattggagcacctgggccccactggacaacactgattcctggagaggtggctgcgcccccagcttctctctccctgtcacacactggaccccactggctgagaatctgggggtgaggaggacaagaaggagaggaaaatgtttccttgtgcctgctcctgtacttgtcctcagcttgggcttcttcctcctccatcacctgaaacactggacctgggggtagccccgccccagccctcagtcacccccacttcccacctgcagtcttgtagctagaacttctctaagcctatacgtttctgtggagtaaatattgggattggggggaaagagggagcaacggcccatagccttggggttggacatctctagtgtagctgccacattgatttttctataatcacttggggtttgtacatttttggggggagagacacagatttttacactaatatatggacctagcttgaggcaattttaatcccctgcactaggcaggtaataataaaggttgagttttccacaa

SEQ ID NO: 1229 - DNA, 1606 bp, Homo sapiens
  source 1..1606: mol_type = genomic DNA
agacgcgcccagacggccgcgatggcgctgttggccggcgggctctccagagggctgggctcccacccggccgccgcaggccgggacgcggtcgtcttcgtgtggcttctgcttagcacctggtgcacagctcctgccagggccatccaggtgaccgtgtccaacccctaccacgtggtgatcctcttccagcctgtgaccctgccctgtacctaccagatgacctcgacccccacgcaacccatcgtcatctggaagtacaagtctttctgccgggaccgcatcgccgatgccttctccccggccagcgtcgacaaccagctcaatgcccagctggcagccgggaacccaggctacaacccctacgttgagtgccaggacagcgtgcgcaccgtcagggtcgtggccaccaagcagggcaacgctgtgaccctgggagattactaccagggccggaggattaccatcaccggaatgtatgccgccggcaaagcagccacctcaggtgttcccagcatttatgcccccagcacctatgcccacctgtctcccgccaagaccccacccccaccagctatgattcccatgggccctgcctacaacgggtaccctggaggataccctggagacgttgacaggagtagctcagctggtggccaaggctcctatgtacccctgcttcgggacacggacagcagtgtggcctctgaagtccgcagtggctacaggattcaggccagccagcaggacgactccatgcgggtcctgtactacatggagaaggagctggccaacttcgacccttctcgacctggcccccccagtggccgtgtggagcgggccatgagtgaagtcacctccctccacgaggacgactggcgatctcggccttcccggggccctgccctcaccccgatccgggatgaggagtggggtggccactccccccggagtcccaggggatgggaccaggagcccgccagggagcaggcaggcgggggctggcgggccaggcggccccgggcccgctccgtggacgccctggacgacctcaccccgccgagcaccgccgagtcagggagcaggtctcccacgagtaatggtgggagaagccgggcctacatgcccccgcggagccgcagccgggacgacctctatgaccaagacgactcgagggacttcccacgctcccgggacccccactacgacgacttcaggtctcgggagcgccctcctgccgaccccaggtcccaccaccaccgtacccgggaccctcgggacaacggctccaggtccggggacctcccctatgatgggcggctactggaggaggctgtgaggaagaaggggtcggaggagaggaggagaccccacaaggaggaggaggaagaggcctactacccgcccgcgccgcccccgtactcggagaccgactcgcaggcgtcccgagagcgcaggctcaagaagaacttggccctgagtcgggaaagtttagtcgtctgatctgacgttttctacgtagcttttgtatttttttttttaatttgaaggaacactgatgaagccctgccatacccctcccgagtctaataaaacgtataatcac

SEQ ID NO: 1230 - DNA, 2481 bp, Homo sapiens
  source 1..2481: mol_type = genomic DNA
agaagggagcgggagggggctccgggcgccgcgcagcagacctgctccggccgcgcgcctcgccgctgtcctccgggagcggcagcagtagcccgggcggcgagggctgggggttcctcgagactctcagaggggcgcctcccatcggcgcccaccaccccaacctgttcctcgcgcgccactgcgctgcgccccaggacccgctgcccaacatggattttctcctggcgctggtgctggtatcctcgctctacctgcaggcggccgccgagttcgacgggaggtggcccaggcaaatagtgtcatcgattggcctatgtcgttatggtgggaggattgactgctgctggggctgggctcgccagtcttggggacagtgtcagcctgtgtgccaaccacgatgcaaacatggtgaatgtatcgggccaaacaagtgcaagtgtcatcctggttatgctggaaaaacctgtaatcaagacgagcacatcccagctcctcttgaccaaggcagtgaacagcctcttttccaacccctggatcaccaagccacaagtttgccttcaagggatctaaatgagtgtggcctgaagccccggccctgtaagcacaggtgcatgaacacttacggcagctacaagtgctactgtctcaacggatatatgctcatgccggatggttcctgctcaagtgccctgacctgctccatggcaaactgtcagtatggctgtgatgttgttaaaggacaaatacggtgccagtgcccatcccctggcctgcagctggctcctgatgggaggacctgtgtagatgttgatgaatgtgctacaggaagagcctcctgccctagatttaggcaatgtgtcaacacttttgggagctacatctgcaagtgtcataaaggcttcgatctcatgtatattggaggcaaatatcaatgtcatgacatagacgaatgctcacttggtcagtatcagtgcagcagctttgctcgatgttataacatacgtgggtcctacaagtgcaaatgtaaagaaggataccagggtgatggactgacttgtgtgtatatcccaaaagttatgattgaaccttcaggtccaattcatgtaccaaagggaaatggtaccattttaaagggtgacacaggaaataataattggattcctgatgttggaagtacttggtggcctccgaagacaccatatattcctcctatcattaccaacaggcctacttctaagccaacaacaagacctacaccaaagccaacaccaattcctactccaccaccaccaccacccctgccaacagagctcagaacacctctaccacctacaaccccagaaaggccaaccaccggactgacaactatagcaccagctgccagtacacctccaggagggattacagttgacaacagggtacagacagaccctcagaaacccagaggagatgtgttcattccacggcaaccttcaaatgacttgtttgaaatatttgaaatagaaagaggagtcagtgcagacgatgaagcaaaggatgatccaggtgttctggtacacagttgtaattttgaccatggactttgtggatggatcagggagaaagacaatgacttgcactgggaaccaatcagggacccagcaggtggacaatatctgacagtgtcggcagccaaagccccagggggaaaagctgcacgcttggtgctacctctcggccgcctcatgcattcaggggacctgtgcctgtcattcaggcacaaggtgacggggctgcactctggcacactccaggtgtttgtgagaaaacacggtgcccacggagcagccctgtggggaagaaatggtggccatggctggaggcaaacacagatcaccttgcgaggggctgacatcaagagcgtcgtcttcaaaggtgaaaaaaggcgtggtcacactggggagattggattagatgatgtgagcttgaaaaaaggccactgctctgaagaacgctaacaactccagaactaacaatgaactcctatgttgctctatcctctttttccaattctcatcttctctcctcttctcccttttatcaggcctaggagaagagtgggtcagtgggtcagaaggaagtctatttggtgacccaggtttttctggcctgcttttgtgcaatcccaatgaacagtgataccctccttgaaatacaggggcatcgcagacacatcaaagccatctgtgggtgttgccttccatcctgtgtctctttcaggaaggcattcagcatgcgtgagccataccatcctccatcctgattacaaggtgctccttgtagcaaattatgagagtgagttacgggagcagtttttaaaagaaatctttgcagatggctatgatgttatgtgttcggtgttgtaccatgagtagtattgacttcccttgagatatgatgtacaatgtgcttgtgaaattgacttaccctcttcactta

SEQ ID NO: 1231 - DNA, 237 bp, Homo sapiens
  source 1..237: mol_type = genomic DNA
tcttctcctgacccagcatcgctcatcacaatgaagaaccaagacaaaaagaacggggctgccaaacaatccaatccaaaaagcagcccaggacaaccggaagcaggctcctttgattctctagacctggaaaaggtgtccctaggcagagccctggcagggcgctcagagctggggatttcctgcctggaacaagggacctggagaatgtttttgcgtgggatgatgtgctggtca

SEQ ID NO: 1232 - DNA, 929 bp, Homo sapiens
  source 1..929: mol_type = genomic DNA
gtttgttcgggaagtggatccgccgctgccggagcagcccgaagggagctgcggatcgcgaggccagtaccgaccccgcccgcccgcgcgcaccgcccccgcccgccatggcccgggactacgaccacctcttcaagctgctcatcatcggcgacagcggtgtgggcaagagcagtttactgttgcgttttgcagacaacactttctcaggcagctacatcaccacgatcggagtggatttcaagatccggaccgtggagatcaacggggagaaggtgaagctgcagatctgggacacagcggggcaggagcgcttccgcaccatcacctccactgcagagactgcactgcggtccctcccccagcccgaggcccacggaggttcctcgggggacagtctcagtttcgtgccgttatttaaagaattctctccatgtttttgtatcgggaggtgccatcggcacttcctcccccgccctcctcgagtgccaagaaggtgttggaccagcccgcccttccctactggtgccccctcctccccggccaaggcgcctggacctggcgaggacgctgcccgccgagcggactgattcgcagagtctgtacatagtgtatattgctctacccggccgcacaccacgtcctgctctggcttttgccttcttgatgccagcctgctgcaacagaccctccccgcgcccctccccagcccatcttactgcaagcagcgtcctgaggagacagcggcacgttctagctgcgtctgcggccagcccgtgccagtggagtgggctccgcgttgctcattctctccgacaggttgtcagcctctgtccccgctgcacagggtcttgccccttctccggggcctgtgccagctcccttccctccccgttgtcctgtccccacagccattctgggagctgggg

SEQ ID NO: 1233 - DNA, 676 bp, Homo sapiens
  source 1..676: mol_type = genomic DNA
gtcacttctccaagtagtgaatcatgttaactacttgattgcattgcattttatagatttattttctttctttctttttccttcatctagatcattcgtaactgaggcacacttgccttttgcaactaagctctactgaattccaaagctatagaaatatccatcttgacctggaaagtctgtttctttgctagtccagaaggttttttttaacatgaacaagatcctctcaagcactgtttgctttggactcctaactttgttatccgtgttgagttttttacaatctgtgcatggacgaccatatcttacccaaggaaatgaaatatttccagataaaaaatatacaaatcgtgaggaactattgctggctctactgaataaaaattttgatttccaaagacctttcaacactgacctagccttacctaacaaactggaagaacttaaccagctggaaaagctaaaagaacagctagtggaggagaaggattctgagacgtcctatgctgtagatggtctattctcttctcatcctagcaaacgagcttgcttttggaaatactgtgtttaaagctttttctctggatgcaaaaaaagataagaatatcaggaaaatatatgtatctactcactctgctgtaggcagaccccctgaaactattgctgtggaata

SEQ ID NO: 1234 - DNA, 2920 bp, Homo sapiens
  source 1..2920: mol_type = genomic DNA
gttcagtgactgagacaaactggaggtgaaaggagctggtactgtccactgtgctgtcggtgctgaacctgagacgcgagcggaccagttgctccagcacctgaaggcaacgccctcttgcaccctctgtgccctgtgggacccgcttcaccaacaggacccatatcaacttgacaaaggagtgtggtatcggacgtgggagagagtcctctgtttgccacctgggcgctcattcaggcgtgactttggagatttctatagttttagaccaaactatttttttttccccagctaagacgatcttttgagagttttttttttttattgtgatttatatttccacagcgtttaggaatctttctgggggacttttgtgactgttaaaataaggtgaaaagcaataaggatgtttaagtgctggtcagttgtcttggttctcggattcatttttctggagtcggaaggaaggccaaccaaagaaggaggatatggccttaaatcctatcagcctctaatgagattgcgacataaggaaaaaaatcaagaaagttcaagagtcaaaggatttatgattcaggatggcccttttggatcttgtgaaaataagtactgtggtttgggaagacactgtgttaccagcagagagacagggcaagcagaatgtgcctgtatggacctttgcaaacgtcactacaaacctgtgtgtggatctgacggagaattctatgaaaaccactgtgaagtgcacagagctgcttgcctgaaaaaacaaaagattaccattgttcacaatgaagactgcttctttaaaggagataagtgcaagactactgaatacagcaagatgaaaaatatgctattagatttacaaaatcaaaaatatattatgcaagaaaatgaaaatcctaatggcgacgacatatctcggaagaagctattggtggatcaaatgtttaaatattttgatgcagacagtaatggacttgtagatattaatgaactaactcaggtgataaaacaggaagaacttggcaaggatctctttgattgtactttgtatgttctattgaaatatgatgattttaatgctgacaagcacctggctcttgaagaattttatagagcattccaagtgatccagttgagtctgccagaagatcagaaactaagcatcactgcagcaactgtgggacaaagtgctgttctgagctgtgccattcaaggaaccctgagacctcccattatctggaaaaggaacaatattattctaaataatttagatttggaagacatcaatgactttggagatgatgggtccttgtatattactaaggttaccacaactcacgttggcaattacacctgctatgcagatggctatgaacaagtctatcagactcacatcttccaagtgaatgttcctccagtcatccgggtgtatccagagagtcaggctagagagcctggggtaactgccagtcttaggtgccatgcagagggcataccaaagcctcagcttggctggttgaagaatggaattgatattacaccaaagctttccaaacaactcacgcttcaagcaaatggcagtgaggttcacataagcaatgtgcgctatgaagatactggagcatacacttgtatcgcaaagaatgaagcaggagtggatgaagacatctcttctctttttgtggaagactctgctagaaagacccgtctgggaattgggaacatgttctatgttttttatgaagatggaatcaaagtgatacaacccatagaatgtgaatttcagaggcacattaagcctagtgaaaagctccttggatttcaggatgaagtctgtcccaaagctgagggagatgaagttcagaggtgtgtgtgggcatcagctgttaatgtcaaagacaagttcatttatgttgcacagccaactttggacagagtccttattgttgatgtgcagtcccaaaaagttgttcaggcagtgagcacagaccctgtcccagttaaattacactatgacaaatcacatgatcaggtctgggtgctaagctggggtaccttggagaagacatcaccaacactacaggtaattaccctggccagtgggaatgtgcctcaccacacgatccacacccaaccagtgggaaagcaatttgacagagtggatgattttttcattcccaccacaacactcattatcacccatatgaggtttggatttattcttcataaagatgaagctgcactacaaaaaattgatcttgaaaccatgtcatacatcaagacaattaacttgaaggactataagtgcgttcctcagtcattggcatatacacacttgggaggctactacttcattggctgcaaacctgacagcaccggagcagtttccccacaggtcatggtggacggtgtaactgactcagtcattgggttcaatagtgatgtgacgggcactccatatgtctctccagatggccactaccttgtcagcattaatgatgtgaaaggtcttgtaagggttcagtacattaccatcagaggagaaatacaggaggcttttgatatttacacaaatctgcacatatctgatctggcatttcaaccatcctttactgaagcccaccaatataacatctacggtagttcaagcacacaaactgatgtgctctttgtggagctctcttctgggaaggtcaagatgataaagagtctcaaggaaccactcaaggcagaagaatggccttggaaccggaaaaacaggcaaatccaggacagtggcttgtttggtcaatacctgatgacaccttccaaggactctctcttcatcctagatggacgactcaataaattaaactgtgagatcactgaagttgaaaaaggaaatacagtcatttgggttggagatgcctaa

SEQ ID NO: 1235 - DNA, 739 bp, Homo sapiens
  source 1..739: mol_type = genomic DNA
ctgatcgcagtccggaggcagatatcctccctttcctcctcggctgctgctcttactttgacaagccaggctaacattgaaggtggtccattatggctgacatgcaaaatctggtagaaagattggagagggcagtgggccgcctggaggcagtatctcatacctctgacatgcaccgtgggtatgcagacagtccttcaaaagcaggagcagctccatatgtgcaggcatttgactcgctgcttgctggtcctgtggcagagtacttgaagatcagtaaagagattgggggagacgtgcagaaacatgcggagatggtccacacaggtttgaagttggagcgagctctgttggttacagcttctcagtgtcaacagccagcagaaaataagctttccgatttgttggcacccatctcagagcagatcaaagaagtgataacctttcgggagaagaaccgaggcagcaagttgtttaatcacctgtcagctgtcagcgaaagtatccaggccctgggctgggtggctatggctcccaagcctggcccttatgtgaaagaaatgaatgatgccgccatgttttatacaaaccgagtcctcaaagagtacaaagatgtggataagaagcatgtagactgggtcaaagcttatttaagtatatggacagagctgcaggcttacattaaggagttccataccaccggactggcctggagcaaaacggggcctgtggcaaaaga

SEQ ID NO: 1236 - DNA, 5912 bp, Homo sapiens
  source 1..5912: mol_type = genomic DNA
gcgttccttgcggcccggccgacctcgcgggcttgggcctgggcgggcaccgacggagcggccctggctgcagcctcccggcgccagcgaagacaggctgagatgcggctgctcctgctcgtgccgctgctgctggctccagcgcccgggtcctcggctcccaaggtgaggcggcagagtgacacctggggaccctggagccagtggagcccctgcagccggacctgtggagggggtgtcagcttccgggagcgcccctgctactcccagaggagagatggaggctccagctgcgtgggccccgcccggagccaccgctcttgtcgcacggagagctgccccgacggcgcccgggacttccgggccgagcagtgcgcggagttcgacggagcggagttccaggggcggcggtatcggtggctgccctactacagcgccccaaacaagtgtgaactgaactgcattcccaagggggagaacttctactacaagcacagggaggctgtggttgatgggacgccctgcgagcctggcaagagggatgtctgtgtggatggcagctgccgggttgtcggctgtgatcacgagctggactcgtccaagcaggaggacaagtgtctgcggtgtgggggtgacggcacgacctgctaccccgtcgcaggcacctttgacgctaatgacctcagccgaggctacaaccagatcctcatagttcccatgggtgccaccagcatcctcatcgacgaggctgctgccagcaggaacttcctggctgtgaagaatgttcgtggggaatactacctcaatgggcactggaccatcgaggcggcccgggccctgccagcagccagcaccatcctgcattacgagcggggtgctgagggggacctggcccctgagcgactccatgcccggggccccacctcggagcccctggtcatcgagctcatcagccaggagcccaaccccggtgtgcactatgagtaccacctgcccctgcgccgccccagccccggcttcagctggagccacggctcatggagtgactgcagcgcggagtgtggcggaggtcaccagtcccgcctggtgttctgcaccatcgaccatgaggcctaccccgaccacatgtgccagcgccagccacggccagctgaccggcgttcctgcaatcttcacccttgcccggagaccaagcgctggaaggcagggccatgggcaccctgctcagcctcctgtggaggaggctcccagtcccgctccgtgtactgcatctcgtctgacggggccggcatccaggaggccgtggaggaggctgagtgtgccgggctgcctgggaagccccctgccattcaggcctgtaacctgcagcgctgtgcagcctggagcccggagccctggggagagtgttctgtcagttgtggcgttggcgtccggaagcggagcgttacttgccggggtgaaaggggttctttgctccataccgcagcgtgctccttggaagaccggccacctctgactgagccctgtgtgcatgaggactgccccctcctcagtgaccaggcctggcatgttggcacctggggtctatgctccaagagctgcagctcgggcactcggaggcgacaggtcatctgtgccattgggccgcccagccactgcgggagcctgcagcactccaagcctgtggatgtggagccttgtaacacgcagccctgtcatctcccccaggaggtccccagcatgcaggatgtgcacacccctgccagcaacccctggatgccgttgggccctcaggagtcccctgcctcagactccagaggccagtggtgggcagcccaggaacacccctcagccaggggtgaccacaggggagaacgaggtgaccccaggggcgaccaaggcacccacctgtcagccctgggccccgctccctctctgcagcagcccccataccagcaacccctgcggtcgggctcagggccccacgactgcagacacagtcctcacgggtgctgccccgatggccacacggcatctctcgggcctcagtggcaaggctgccctggggccccctgtcagcagagcaggtacgggtgctgccctgacagggtatctgtcgctgaggggccccatcacgctggctgcacaaagtcgtatggtggtgacagcaccgggggcatgcccaggtcaagggcagtggcttctacagtccacaacacccaccagccccaggcccagcagaatgagcccagtgagtgccggggctcccagtttggctgttgctatgacaacgtggccactgcagccggtcctcttggggaaggctgtgtgggccagcccagccatgcctaccccgtgcggtgcctgctgcccagtgcccatggctcttgcgcagactgggctgcccgctggtacttcgttgcctctgtgggccaatgtaaccgcttctggtatggcggctgccatggcaatgccaataactttgcctcggagcaagagtgcatgagcagctgccagggatctctccatgggccccgtcgtccccagcctggggcttctggaaggagcacccacacggatggtggcggcagcagtcctgcaggcgagcaggaacccagccagcacaggacaggggccgcggtgcagagaaagccctggccttctggtggtctctggcggcaagaccaacagcctgggccaggggaggccccccacacccaggcctttggagaatggccatgggggcaggagcttgggtccagggcccctggactgggtggagatgccggatcaccagcgccacccttccacagctcctcctacaggattagcttggcaggtgtggagccctcgttggtgcaggcagccctggggcagttggtgcggctctcctgctcagacgacactgccccggaatcccaggctgcctggcagaaagatggccagcccatctcctctgacaggcacaggctgcagttcgacggatccctgatcatccaccccctgcaggcagaggacgcgggcacctacagctgtggcagcacccggccaggccgcgactcccagaagatccaacttcgcatcatagggggtgacatggccgtgctgtctgaggctgagctgagccgcttccctcagcccagggacccagctcaggactttggccaagcgggggctgctgggcccctgggggccatcccctcttcacacccacagcctgcaaacaggctgcgtttggaccagaaccagccccgggtggtggatgccagtccaggccagcggatccggatgacctgccgtgccgaaggcttcccgcccccagccatcgagtggcagagagatgggcagcctgtctcttctcccagacaccagctgcagcctgatggctccctggtcattagccgagtggctgtagaagatggcggcttctacacctgtgtcgctttcaatgggcaggaccgagaccagcgatgggtccagctcagagttctgggggagctgacaatctcaggactgccccctactgtgacagtgccagagggtgatacggccaggctattgtgtgtggtagcaggagaaagtgtgaacatcaggtggtccaggaacgggctacctgtgcaggctgatggccaccgtgtccaccagtccccagatggcacgctgctcatttacaacttgcgggccagggatgagggctcctacacgtgcagtgcctaccaggggagccaggcagtcagccgcagcaccgaggtgaaggtggtctcaccagcacccaccgcccagcccagggaccctggcagggactgcgtcgaccagccagagctggccaactgtgatttgatcctgcaggcccagctttgtggcaatgagtattactccagcttctgctgtgccagctgttcacgtttccagcctcacgctcagcccatctggcagtagggatgaaggctagttccagccccagtccaaaatagttcatagggctagggagaaaggaagatggactcttggcttcctctctctggctggcaaagggagttatcttctggaatacattagctctttcaaaaacccacccagtgtttagcctcaacggcagccagttaccagcttctctctgtagccttcagcagtgtttgcatctctgacataaccacaggctgctgttttcaagaagagcaatctgtttggataagaaaaacctttactttacagcttccctttataatttgttacacaggaatagttaaatgcatttgtttgtttgttttttgagacagagtttcactcttgttgcccaggctggagggcaatggcgcgatctcagctcactgcaacctccgtctcctgggttcttgattctcctgtgtcagccttctgagtagctaggattacagatgcctatcaccatgcctgggtaatttttgtatttttagttgagatggggtttcaccatgttggccaggctggtctcgaacttctgacctcagatgatctgcccgcctcagcctcccaaagtgctgggattacaggcatgagccaccacgcccagccatcaatgcattttttttattttttttttgagacagagtttcgcacttcttgcccaggctggagtacaatggtgcgatcttggctcactgcaacctccacctcctgggttcaagcgcttctccagcctcagcctcctgagtagctgggattacaggtatgtgccaccatgcctggctaattttgtatttttagtagagacggggtttctccatgttggtcagactggtcttgaactcccgacctcaggtaatccgcccgcctcggcctcccaaaatgctgggattagaggtgtgagccactgtgcccagcccatcaatgtgttttaaagctagctgtcagggttccacttaatttaaagctgggcagggagatgtgtaatgatttcaaagttaacacctgtttgttttctaaagggcatgccaagtcctgctgtatcagggaagtattctgtgctaaaatcagcgatggttcattgctctagtctctctcacccttctaggcagtgcatcagtcagctctaaatctggtgcagagggttaacagcataacccttgttggcaaaatggaatagatgttaagacctcaaatagggatttgggatgaaacagctgcagttagcactgttatctgagcatgaaagaactggaaacgctccttacgtcgagatgttggaccttgaagccctcctgaggccaacatgcaaatctggctgtgacggttcatctgacacctgtgtaaagctgaccagcctgctctgtacagtgacaatgaggagcccctctcttccttaagtaggaatctgtgaagcaaaatgtttgctgccaaagacaaatcagactgtcagtcattaaaaacagcattagcaggatgaggatagcaatggggaagggttgtgggcaatgcagtaacagggaaatggcttcagaaatggtttgagttggaagacaacattcttcatctctcaggacttctaattccttgatgctaaaagaagaggcatggattctatgagcttccaagtccctttccactttaaccttctacaaatctttcagaggactgcctagtagcaaaggttattcctggacacaggaaagacgggcattacagggaccaaagctctgaaaggtgacttttattaccaacacactggctggaaaagggacaaaccacatcacgggtgagtgatacttctcagtcttctctactcattcaacaaaggaaatgtgggctggggcagaggtcttttttcatttaatactggaaaaatattgaagagcatccatgttcacttatggctggttttgctatagaaattggaaaataaaggccacttttttgaaatccccagtttaatt

SEQ ID NO: 1237 - DNA, 3205 bp, Homo sapiens
  source 1..3205: mol_type = genomic DNA
caaaggtcatgcttcaccccttcctccatctgctgcacctaccactgattctacagattccataacaggacagaattcaagacagagagaagaagagctggaattaatagaccaactgcgtaaacatattgagtaccggttgaaagtgtctctaccttgtgatctcggagcagctctaactgacggtgttgttctttgccatttggccaatcatgtgcgacctcgatctgtcccaagcattcatgttccctcaccagctgtacctaaattaacaatggcgaaatgcaggcgaaatgtggaaaatttcctagaagcttgcagaaaaattggtgtacctcaggacaatctttgttccccttccgacatccttcagctaaacctcagcgttaaaagaactgttgaaacgctcctttctcttggggcacactcagaagaatccagttttgtctgtctctctctgcagcttctgggttttgtggcattttactgtactgtgatgttaactctctgtgtgctttattactggctcttccccgctcgctgaaagattgcactccggtgactttctgcctcattcctgtgcttggtaaaggaggtttgtttctcatccagaattatttacataagtgctttttctccctgctggccctcaaagagctaacccataaaggaggtaaatcctttctttatatttgcagatgagcaccccctcacattagtaaacatttacgattgctaacaaagagtaaaagaccagcattttttctcctggtcatccgtccattctcctggcctgtggccttgtttctcttaccataaatgctgaagcatttttactaatacaattctgaacttgtacttcgaatatgacatgtagagctttatttccaagtcacacaatacaactcccatctggccatttttccgtgcctcagcacaagtgttgaattgtggagtgactgaacctttgcagcagctgctcacgaggagaaccgtcgtgccttttctggttttggccgcacccggttacttagatttctgctttgaactgtgtcctgagatcctgaatccccgctttgtcggtaggcacaggtccatataagcatttgcggtctggacgtttcaaaggtattggccataattttaataattttagtttggtcagaatgttcagtttgaagatcacccacattccctagactgctcttctgagcccagtctatacgctgtatgtgctgcacacgagcagatgggctggagctggcctctcagggtgggcaccttccagattgtgtttgttatgtgtgactgaggttcactcccagcattctgtttaaatttggaatttatgtgatttctaacatattcaaaccttcttaatagtgaaacagtagcaggagaagtattagggcagcagtccctgttctgtgctcaaggcagtgaatattgtctagctctttcagaatgcgtagcacttagctgctagacgttaatgctggaaactataattgcggttagattctagtttcataagtggtgtttctgaatattcaggaaccttctgaactctgttaacaaaattgggataaaggatgaactcaagtgtgaagagagattgtgaggagcataatatccggtttagaattcagcctgagggaggagcataacatctgggtgtagaattcagcctgaggggctcactggtttggttttcttccatatgaaatgggacagctattttcacaggtcaaaagactgttcactattaatgctgaaacactcaacactgtgatgatgaaaacttcagttttctgtgtcagtaggtgcctttcagactttggggaattgggttggttatatttttaagatgtctcagagttgaaacacctgttaaaaaacacacacaggctctcatgtggtttaggggttgtaattgtacattctcttgagaacacacggcactccctctagtccagctgggaggtgagggtgccccagaaagcacaggcttctgagtgtgaacaccggccgcgcaggtcctagggcgctgctgagaggaagagaccagggaatcagccttggagaaagcacgtctcttccgacagcaaaacactgggcaggttcattttaagtatcatttatctagacttgcagttgcactcaaagtatttctacaaagttgctagtttttttagatcaaaagattacagttacctcattttatcaaaataagtattaaataaaaagtaagcacaagtaccaataactgcctcaaaaatacttgttatatattttattgtaactggttttataaaatttcctagtaatatcgtctcaatgaaaagcaaaacaaaaaacaaaaaacaaaaaaacccaactagttgttttaacaaacatatataatctttttttagtggcaccagaattctatattctgttctttgtaagagcaatctcttttctttttggaatatttaatcttaacagaaagctagtgataaatgctgttcttaagatttgcctttttctctcacaagaaagggttaacctaacaaattaacgatgcacacattaaggaagcgtttaacttcctcaagcaaacagtgtcaacacttctcacatgttggtaatcaacatgttcctgcctaagcttacatagtagttccctggaataattcaggctgttaaataccaggatattaaatcctttacattttcaaatactgcttttaattctgtaattcagatttttaattcagacaggcccttccatgaattattcaaattagggggaagtttctcaagagctcaggatacactgagtttcttgccctatctggtctggaaaccctggttttcacagtcaggattataatgcagatagcgtagaactcatgcaggctgagttatgttttcaaactatctttcattcttgtggtagggaacttaccctcaagtgtagtatcttttactcttgagccatctggtagcgtggaattgtttttctatttttcacctgcctattttatagacctgtattgaccttttattcatcagggataaaggatgttgctttcaccctgcggtattgttttccctctgttgtatgtatagatatatgctacttgtcaattttccaattttgaaaatgatctgtatgtacttttagttgtattaataaagtgacagtgagtgtcagacacca

SEQ ID NO: 1238 - DNA, 1257 bp, Homo sapiens
  source 1..1257: mol_type = genomic DNA
gggagccactgggactactgggtccgggagggggaagggagggctgcgagcccgaacgcgcggcgagaaggccgaggggagggaggggagcgaggagcgggaggaggaagggagggagccgaggcgagggggaggcggcgcctgggcccgagccgccccagccctggctcctctccccggaacaggcccccgacagctgctctcgggagccgcctcccgacacccgagccccgccggcgcctcccgctcccggctcccggctcctggctccctccgcctcccccgcccctcgccccgccgccgaagaggccccgctcccgggtcggacgcctgggtctgccgggaagagcgatgagaggtgtctgaaggtggctattcactgagcgatggggttggacttgaaggaatgccaagagatgctgcccccacccccttaggcccgagggatcaggagctatgggaccagaggccctgtcatctttactgctgctgctcttggtggcaagtggagatgctgacatgaagggacattttgatcctgccaagtgccgctatgccctgggcatgcaggaccggaccatcccagacagtgacatctctgcttccagctcctggtcagattccactgccgcccgccacagcaggttggagagcagtgacggggatggggcctggtgccccgcagggtcggtgtttcccaaggaggaggagtacttgcaggtggatctacaacgactgcacctggtggctctggtgggcacccagggacggcatgccgggggcctgggcaaggagttctcccggagctaccggctgcgttactcccgggatggtcgccgctggatgggctggaaggaccgctggggtcaggaggtgatctcaggcaatgaggaccctgagggagtggtgctgaaggaccttgggccccccatggttgcccgactggttcgcttctacccccgggctgaccgggtcatgagcgtctgtctgcgggtagagctctatggctgcctctggagggatggactcctgtcttacaccgcccctgtggggcagacaatgtatttatctgaggccgtgtacctcaacgactccacctatgacggacataccgtgggcggactgcagtatgggggtctgggccagctggcagatggtgtggtggggctggatgactttaggaagagtcaggagctgcgggtctggccaggctatgactatgtgggatggagcaaccacagcttctccagtggctat

SEQ ID NO: 1239 - DNA, 888 bp, Homo sapiens
  source 1..888: mol_type = genomic DNA
gacgcggagctgagaggctccgggctagctaggtgtaggggtggacgggtcccaggaccctggtgagggttctctacttggccttcggtgggggtcaagacgcaggcacctacgccaaaggggagcaaagccgggctcggcccgaggcccccaggacctccatctcccaatgttggagagacagggttttgccctgttggccaagctggtcttgaactcctgacctcaagtgatccacccgcctcggcctcccaaagtgttgggattacaggcgtgagccatcgtgcccagccagattctccatttctaacaagttcccaggtgatgtcgatgaagctggttcgtgaactgcactttaacatgatgtagaaattttacaaactagtagagtaagggggtggctgcaggctggagaggaagtccaggctaaacgcctggcaacttgaggtggtttccgcccccttgctcgctgaggttccctcccaggaatccgacacgtgacggtctgtccgccgtctcagactagaggagcgctgtaaacgccatggctcccaagaagctgtcctgccttcgttccctgctgctgccgctcagcctgacgctactgctgccccaggcagacactcggtcgttcgtagtggataggggtcatgaccggtttctcctagacggggccccgttccgctatgtgtctggcagcctgcactactttcgggtaccgcgggtgctttgggccgaccggcttttgaagatgcgatggagcggcctcaacgccatacagttttatgtgccctggaactaccacgagccacagcctggggtctataactttaatggcagccgggacctcattgcctttctgaatgaggcagctctagcgaacctgtt

SEQ ID NO: 1240 - DNA, 917 bp, Homo sapiens; identical to SEQ ID NO: 374
  source 1..917: mol_type = genomic DNA

SEQ ID NO: 1241 - DNA, 1833 bp, Homo sapiens
  source 1..1833: mol_type = genomic DNA
gggtagtgagccggctgagaggcatggagacgcaggaacttcggggggccctggctcttctcctcctttgctttttcacatctgccagtcaggatctgcaggtaattgacctgctgactgtgggcgagtctcggcagatggtagctgtggcagagaagatccggacagccttgctcactgctggggacatctacctcttatccaccttccgcctgccccccaagcagggtggtgtcctctttggcctctattctcgccaagacaacactcgatggctggaggcctctgttgtaggcaagatcaacaaagtgaccaatgcactgcactccattctaggtgaaggaaatgtccctgatccgaaacaccattatggagtgtcaggcttccatgagcagcgttcccactgcagccccaatccctgcttccgaggtgtggactgcatggaagtgtacgagtacccaggctaccgctgtgggccctgcccccctggcctgcagggcaacggcacccactgcagtgacatcaatgagtgtgctcacgctgacccctgtttcccgggctccagctgcatcaacaccatgcccggcttccactgtgaggcctgtcctcgagggtacaagggcacacaggtgtctggtgtgggcattgactatgcccgggccagcaaacaggtctgcaatgacatcgatgaatgcaacgatggcaacaatggtggctgtgacccaaactccatctgcaccaacactgtgggctctttcaagtgtggtccctgccgcctgggtttcctgggcaaccagagccagggctgcctcccagcccggacctgccacagcccagcccacagcccctgccacatccatgctcactgtctctttgaacgcaatggtgcagtgtcctgccagtgtaacgtgggctgggctgggaatgggaacgtgtgtgggactgacacagacatcgatggctacccagaccaagcactgccctgcatggacaacaacaaacactgcaaacaggacaactgccttttgacacccaactctgggcaggaagatgctgataatgatggtgtgggggaccagtgtgatgatgatgctgatggggatgggatcaagaatgttgaggcatccccaatggattggacaattgccctaaagtccccaacccactacagacagacagggatgaggacggggtgggagatgcttgcgacagctgccctgaaatgagcaatcctacccagacagatgcagacagcgacctggtgggggatgtctgtgatactaatgaagacagaccttcacctcacctggctgactgccaggggtctgattgtatggagagcaggctccagagactcccaggcagaagcgaagggaaggacaaggagtacctttaaatcctttatttggtacctgttcttctgattagcgatggggatgggcatcaggacaccaaggacaactgcccacagctgccaaatagctcccagctggactctgataacgatggacttggagatgagtgtgatggggatgatgacaatgatggcatcccagattatgtgcctcctggtcccgataactgccgcctggtacccaatcccaatcagaaggactcagatggcaatggcgttggtgatgtgtgtgaggatgactttgacaatgatgctgtggtcgaccccctggatgtgtgtcctgaaagtgcagaggtaacgcttacggattttcgggcctatcagaccgtcgtcctggatcctgagggtgatgctcagattgacccaaactgggttgtgctcaaccagggcatggaaatcgttcagaccatgaacagtga

SEQ ID NO: 1242 - DNA, 1084 bp, Homo sapiens
  source 1..1084: mol_type = genomic DNA
gctctacctcttggacttccaacttctgtgagtcaacatagtgcctcttgcatttaagaaacatctcatcacactcttatcagcattgagttttgtctgcaggaaaaatgatgagaactctcatcaccacacacccactgcccctgcttctattgccgcagcagctgctgcagctggtgcagtttcaagaggtggatacagattttgatttcccagaagaagataaaaaagaagaatttgaagagtgtttggaaaaattttttagtacagggcccgccagaccacctaccaaagaaaaagtcaaaagacgtgtccttattgaacctggaatgccactaaatcatatagagtactgtaaccatgaaatcatgggaaaaaatgtttactacaaacaccgttgggtggcagaacattacttccttcttatgcaatatgacgagctccaaaaaatctgttacaacagatttgtgccatgtaagaatggaattaggaaatgtaacaggagcaaaggtcttgtagaaggagtgtattgtaatttaacagaagcatttgaaataccagcgtgtaaatacgaatcactttataggaagggctacgtccttatcacttgttcatggcaaaatgaaatgcaaaaacgtattcctcatactataaatgatctcgtggagccacctgaacacagaagtttcctcagtgaggatggtgtctttgtcatatcgccctagcagagcgttctctgagagcttagggtgggaggaatatttctctccatactgatccttatagatcaaagttgagaatggtaattttgcttccattcactttaatcacccaccttcctttcttcctttcccaacacctcacaaaagcaccttaggctaggttcacagacggtgctctgagatgtggtctcatgcaggtcccctaagttagcatgccttgaatgtgttacggatacagatgcctgcagtggaaggatgaccagcaccaagaggaaaaggaaatggttgcctgaagtgtgctccaaagacacatccatgtgattctctagttcagcagaaagaataaaaattgcttcaatcta

SEQ ID NO: 1243 - DNA, 355 bp, Homo sapiens
  source 1..355: mol_type = genomic DNA
ttgctttgctgttagcctgttggaccttcgagcctagctgctcgcacaggactcggccacctgcccttcctgcaccgactggccaggagttcagagcctcatgctgagccaggaggagctccgggtgacgcatacggcaggatcgggattgagaggctgaaaaactcaagaggtttggatatggaccttcttcaattcctggccttcctctttgtcctgcttttgtctgggatgggagccacaggcaccttgaggacctccctggacccaagcctggagatctacaagaagatgtttgaggtgaagcggcgggagcagctgttggcactgaagaacctggcacagctgaacgaca

SEQ ID NO: 1244 - DNA, 3249 bp, Homo sapiens
  source 1..3249: mol_type = genomic DNA
acccctcacacacaggtgaaggcgtggctgtagaacctcagaccccctggtctcctcaggaatgaaggtcattgccatcctcaccctcctcctcttctgctcccccacccacagcagtttctggcagtttcagaggagggtcaaacacatcacggggcgaagtgccttcttctcatattacggatatggctgctactgtgggcttggggataaagggatccccgtggatgacactgacaggcacagcccctcatctccctctccctacgagaagctgaaggagttcagctgccagcctgtgttgaacagctaccagttccacatcgtcaatggcgcagtggtttgtggatgcacccttggtcctggtgccagctgccactgcaggctgaaggcctgtgagtgtgacaagcaatccgtgcactgcttcaaagagagcctgcccacctatgagaaaaacttcaagcagttctccagccagcccaggtgtggcagacataagccctggtgctagggacaccacagggtccctctcatcatccagcatccgctctagtgttgctcttccaggaagccttctcagatcatccccaacaggcccctgttcttccactgggagggaggacaaaatgtctcccgcagggcagctcacccttcagcattctgaccaaggggactccctgtcgttcagcatcagagggctggagagcagaaatgggaaagatgagatgcctgccctgcaggagctggcattctgtggagtggggaggactacaaatgcatggatatagaagtaagagacacattagactgtagtaagtgctatgatgcagtaaaacaaagggacgggatagagatgcacccaaccccacatcccagggtttccaggaggggagaagccccaggatctaccccaaactctctcttcacccccactgcaaaccgggacacagagcagacttgagcgccaggcccatgcccagctctagctggcaacaaagccaccactttccttgcccctctgcgtcctcagtttttatgatgtcattcttagcttttcttatcaagaggcagaatctgttttccccatcccatgaatctgaactggtcttgtggcttagtttggtcaatagaatgttgtgggagggatggtttaccagttttgagctaggcctcaggaggtctagggcatgtctactctctcttaggacagctgcccccaccctgcaaaaaagcctgggctagcctgctggaggatgagagcccacctggatcagttgtctcagctgatttcagacacgtgagagagagctcagcgagactcagcttgtagctgactacagatgtgtgagggaacctggctgagaccaaaacaactgtccagctgagcccaggctaaactgccaacatgcagaattgtgagctaaataaaggctgctgttctaagtcactgggttttggtatggtttgttaggcagccataactaacaggtgtaattggtccttattcccttattcactgagagtgatgggttctcagccctgagctggacttggaggccatggaaatgcagtggacatggcctttgttccttaccttgaaggtgtggaaggaggtcaagttcatggaataatggagaacacacagctgtaatcgtttgcttgttcagggaacacacatttattgagcacttgctatgtgccaggcacagtgccaggcagtagggatccagatatttaaagaaaacaaacaaaaatcaggtccaaaactcctggggagaatgctgagagtggtatcagcttttaggaattcagacacaaaatctggattgaaaaatggacagatgtgaagacagaaaaagacaccagatgtggagtgtcagtggagggtctgggggcccaggctcctgcgctctggctggctcagcttgtactatcatgtgggtgactggcctgctcttctgtcccacacacatgggtggaaattgcaactgcagatgggcagcttgaggtttacgaacatcagggagactgtaagccggccatgagggaagcagctgtagaaaggtgggcatggaaccaaggtggccaggcccaagccagcaggcacccccccaccttggggatcctgaccactgcagagaccagctccagactgtgaaggtgcctggctgaccgacacaatggaggaagaggggtgagggccaggcttagggtgggggatagggttcccgtgtgagatccaggccgtgtttttaaaaaaaatttttgagacagagtctcactctgtcatccaggatggagggccatggcacgatcgcagctcactgcaacctccacctcctgggtgcaagtgattctcctgcctcagcctcccaagtatctgggattacaagcgcccaccaccatgcccagctaatttttgtatttctagtagagacagggtttcatcatgctggccaggctggtctggaactcctgacctcaactgatccacccacctcagcctcccaaagtgctgggattacaggcatgagccactgcacccagccccaggccatctttttcactccctcctctcttccatcccctaaatctataagacagaaatgatgggcccttgatggtatgcaagccccatttgtttggcattgatgccctgattcttggagagctgagatgggagtgtagaagaatgggcagactctctctgggaaagcctactgtcctcgaagggaaatcatccattccatgagcacatgttactgaagacctactccaagccaggccctctgcaccagactccacggagctcttggaccaaagggaaaacaagtaagcaggggattgcagaacaagctgggggtgccaggattggggtgggcatggggagcaatgcccacctcctggaggatgagggaagctttcctgaggactgctgggggtctgacatctcatctgagacttgaagatgaggaggagttaggagggccggtggggccatgcagagcctcccaggttgaggtctggagaaaagcagcatatgtctatgcaagctccttgtccacctgccttgcccatctctgctgaaggctctttatcatttgtccctgcagcccaaaaacctgggtgttgaattatcatattccacatcccacacccaatctgttggcactaccttcacaatgcatctagattctgtatttataaaatgcttccatcaaatgtttacatggaaaaaaaaaaagagag

SEQ ID NO: 1245 - DNA, 451 bp, Homo sapiens; identical to SEQ ID NO: 649
  source 1..451: mol_type = genomic DNA

SEQ ID NO: 1246 - DNA, 4635 bp, Homo sapiens
  source 1..4635: mol_type = genomic DNA
atggcagcaatgtatcaccaaaccagtacttccctcttcccgctgaagggaaattcacagaagctatagttgatgcagagccgaaatatctgatagttgtgcgacctgctccacctccaagtcaaaagaagtcatgttcaggtaaaactcgttctcgcaaacctctgcagctggtggttggcactctgacaccgagctcggtcttcctgtcctggggtttcctcatcaacccacaccatgactggacattgccaagtcactgtcccaatgacagattttatacaattcgctatcgagaaaaggataaagaaaagaagtggatttttcaaatctgtccagccactgaaacaattgtggaaaacctaaagcccaacacagtttatgaatttggagtgaaagacaatgtggaaggtggaatttggagtaagattttcaatcacaagactgttgttggaagtaaaaaagtaaatgggaaaatccaaagtacctatgaccaagaccacacagtgccagcatatgtcccaaggaaactaatcccaataacaatcatcaagcaagtgattcagaatgttacccacacctagtccagaagtgcccaagtccaaacccgctctggaacctgccacgatacaaccggagcccttggtgcccacaactgcctcaaaaccatctgagagacctaaaaccacacacagaccagatgcacctcaaattcagcctgtctctgagcctgttccatttgaaactgaagctccctcaatgaccatagttcccaccacagacattgagcctgtaactgtgagaactgaggctacagtgacaacattagctccaaaaacatcgcaacgaacaagaacacgtcgtccacgtcccaaacataaaaccacgccacgcccagagacactgcagaccaaactagactttggacctattactcctgggacatcttcagctccaacaacaacaacaaaaagaacccgtcgtccacatcccaaacctaaaaccacgccccatccagaagtacctcaaactaaactggttcctgctacaatctttgaaccagtttctcctataaaagaggctccagggacaacattcgttcctgttacagacctcgagcctgttacttttagaactgagatccctgcaacaaccttagctaccaaaacatcaaaaagaacccgccctccacgtcccagacctaaaactacaccgagccctcaggcacctgagaccaaacctgttcctgctacagtcctagaacctgtcactcttagacctgaggcctcaacaacattagcttccaaaacatcacaacggacacgtcgtccacgtctcagaacaaaaaccacaccacgtcctgaagcacctgaatccaaaccagttcctactgcggagctcaaacctgttacactcagaactgagacttgggtgacaacacaagctcctaaaacatcacaacgaactcgtcgtccacgtcccaaaactaaaaccacaccaagtcctgaggttcctcaaaccaaactggtttctgatgttctggaatcggttacacttagtactgagtcaccaaaggagaccatagcaccagccaaaacagactatgtatatcccactgccaaagcaccactctggccagaggagccaaagactgaagttgtggaatctattacatatgtatctgaaccacctgagaccacactagaaacgtcgcctctgccttctcaatctataaccctacccagcccagatgagcctcagactgaacctgctcccaagcagacaccacgtgctcctcctaagccaaaaacatcaccacgcccaagaatcccacaaacacaaccagttcctaaggtgccccagcgtgttactgcaaaaccaaaaacgtcaccaagtccagaagtgtcatacaccacacctgctccaaaagatgtgctccttcctcataaaccataccctgaggtctctcagagcgaacctgctcctctagagacacgaggcatcccttttatacccatgatttccccaagtcctagtcaagaggaactacagaccactctggaagaaacagaccaatccacccaagaacctttcacaactaagattccacgaacaactgaactagcaaagacaactcaggcgccacacagattttatactactgtgaggcccagaacatctgacaagccacacatcagacctgttctgaataggacaactacaagacctactaggcccaaacccagtgggatgcccagtgggaatggagtgggaacaggggtcaagcaagcacccaggccatcaggtgctgatagaaatgtatcagtggactctacccaccccactaaaaagccagggactcgccgcccacccttgccacccagacctacacacccacgaagaaaacctttaccaccaaataatgtcactggaaagccaggaagtgcaggaatcatttcatcaggcccaataactacaccacccctgaggtcaacacccaggcctactggaactcccttggagagaatagagacagatataaagcaaccaacagttcctgcctctggagaagaactggaaaatataactgactttagctcaagcccaacaagagaaactgatcctcttgggaagccaagattcaaaggacctcatgtgcgatacatccaaaagcctgacaacagtccctgctccattactgactctgtcaaacggttccccaaagaggaggccacagaggggaatgccaccagcccaccacagaacccacccaccaacctcactgtggtcaccgtggaagggtgcccctcatttgtcatcttggactgggaaaagccactaaatgacactgtcactgaatatgaagttatatccagagaaaatgggtcattcagtgggaagaacaagtccattcaaatgacaaatcagacattttccacagtagaaaatctgaaaccaaacacgagttatgaattccaggtgaaacccaaaaacccgcttggtgaaggcccggtcagcaacacagtggcattcagtactgaatcagcggacccaagagtgagtgagccagtttctgcaggaagagatgccatctggactgaaagaccctttaattcagactcttactcagagtgtaagggcaaacaatatgtcaaaaggacatggtataaaaaatttgtaggagtgcagctgtgcaactctctcagatacaagatttacttgagcgactccctcacaggaaaattttataacataggtgatcagaggggccatggagaagatcactgccagtttgtggattcatttttagatggacgcactgggcagcaactcacttctgaccagttaccaatcaaagaaggttatttcagagcagttcgccaggaacctgtccaatttggagaaataggtggtcacacccaaatcaattatgttcagtggtatgaatgtgggactacaattcctggaaaatggtagatgctgcacaaagttaccttctgtttcatcattgcaaacaaaaatcattgaaaatactatgccgcattcatttaaagctattttgtttactatgtataaaagtctacaatctaattaatagcaatactagatgtttattattagaaaagattgctgagagtatttatcaggttttacaaagtcattttaagaaagcaagatactgatgttaacagaataacatttttggggaagctggctccctattcatggtattttaagagatcatttgtatattatttatcacactgttgtaatgatgttttgagatacttttataacaaaattaacatcaaaaaggtatatactttttaaaaaaaatttacttttattgatgtgtactcttcctattgatgagttaattccataaatctctacttagtttaacttattggatcaaattatcttcagcatgtatatctggggaaaaaaggtccgaattttcacatttatatttaaacttcaattttttatatttaaacttcaattttttagcaacagctgaatagctttgcggaggagtttaatagttacacattcatgctaatatacatttcctttaaacatccacaaattcttaaaaagattgaatcagtaaatttcatttcagctaaaaatggagtctaatatattgtttcaaaagatacatttttacccaccataaatgttacaatatctgaatatgctttgtcaaactatccctttatgcaatcgtcttcatattgtttttatgattctaatcaagctgtatgtagagactgaatgtgaagtcaagtctgagcacaaaaagataatgcacgatgagattgcctaccattttataggatatttactatgtatttatacgttaagacctctatgaatgaatgtatcagagaatgtctttgtaactgtttaattcaatctgtaataaaaatctaactaactaactcatttatttctattaaaaaggtattgtcctttaggcggggaatgggaatccttgctgcactgttgcagtcattctgaaaggacctttccctgtacttacctttcaacatgcttcaatcttatcaacgctacattttgtatttttcaaacaagtataaattctgcaataaagagatgtagttttttttt

SEQ ID NO: 1247 - DNA, 416 bp, Homo sapiens
  source 1..416: mol_type = genomic DNA
caaatggacctgtcttgtggttcaagggaacagggccaaaccggaaattaatctacaatttcaaacaagagcagaatccaagacctcccaagaacagacctgcaggcagagcaggctccagggcccaccatgatgcccatacctgcctctcggccctgcctgagagaaacagcacaaactatttcgtccaaccctgctgctgcctccggctgctgggactcacaggcttgctgtcaaaataatccaaacagggaaggaacgtacaagtaaataacaaaagcccccatactcttctgactccctggagacagctactttttaggagtttcatttgccttcttcaagagagctttcttccactgacataaaatgccagcttgatcgtacaataaatctgtctatttacctgggtccaa

SEQ ID NO: 1248 - DNA, 1953 bp, Homo sapiens
  source 1..1953: mol_type = genomic DNA
cgaggtcctcctcccagggcccggggctggggagcggaagccatcagtgggctcggaggacactgtcccagccaggacacggccatcggtcactaatctgcagcaccggaatgtccccaggccaatcagcgggcccagcctgactcctggagattgtgaatagctccatccagcctgagaaacaagccgggtggctgagccaggctgtgcacggagcgcctgacgggcccaacagacccatgctgcatccagagacctcccctggccgggggcatctcctggctgtgctcctggccctccttggcaccacctgggcagaggtgtggccaccccagctgcaggagcaggctccgatggccggagccctgaacaggaaggagagtttcttgctcctctccctgcacaaccgcctgcgcagctgggtccagccccctgcggctgacatgcggaggctggactggagtgacagcctggcccaactggctcaagccagggcagccctctgtggaatcccaaccccgagcctggcgtccggcctgtggcgcaccctgcaagtgggctggaacatgcagctgctgcccgcgggcttggcgtcctttgttgaagtggtcagcctgtggtttgcagaggggcagcggtacagccacgcggcaggagagtgtgctcgcaacgccacctgcacccactacacgcagctcgtgtgggccacctcaagccagctgggctgtgggcggcacctgtgctctgcaggccagacagcgatagaagcctttgtctgtgcctactcccccagaggcaactgggaggtcaacgggaagacaatcatcccctataagaagggtgcctggtgttcgctctgcacagccagtgtctcaggctgcttcaaagcctgggaccatgcaggggggctctgtgaggtccccaggaatccttgtcgcatgagctgccagaaccatggacgtctcaacatcagcacctgccactgccactgtccccctggctacacgggcagatactgccaagtgaggtgcagcctgcagtgtgtgcacggccggttccgggaggaggagtgctcgtgcgtctgtgacatcggctacgggggagcccagtgtgccaccaaggtgcattttcccttccacacctgtgacctgaggatcgacggagactgcttcatggtgtcttcagaggcagacacctattacagagccaggatgaaatgtcagaggaaaggcggggtgctggcccagatcaagagccagaaagtgcaggacatcctcgccttctatctgggccgcctggagaccaccaacgaggtgattgacagtgacttcgagaccaggaacttctggatcgggctcacctacaagaccgccaaggactccttccgctgggccacaggggagcaccaggccttcaccagttttgcctttgggcagcctgacaaccacgggtttggcaactgcgtggagctgcaggcttcagctgccttcaactggaacgaccagcgctgcaaaacccgaaaccgttacatctgccagtttgcccaggagcacatctcccggtggggcccagggtcctgaggcctgaccacatggctccctcgcctgccctgggagcaccggctctgcttacctgtctgcccacctgtctggaacaagggccaggttaagaccacatgcctcatgtccaaagaggtctcagaccttgcacaatgccagaagttgggcagagagaggcagggaggccagtgagggccagggagtgagtgttagaagaagctggggcccttcgcctgcttttgattgggaagatgggcttcaattagatggcgaaggagaggacaccgccagtggtccaaaaaggctgctctcttccacctggcccagaccctgtggggcagcggagcttccctgtggcatgaaccccacggggtattaaattatgaatcagctg

SEQ ID NO: 1249 - DNA, 949 bp, Homo sapiens
  source 1..949: mol_type = genomic DNA
gtgtacgtgtgtgagcactgccagggctggcgaagaaccagccgccgcctttagtccgagccgccgggccacccaacacaagggcaggtctcgctgccggagaagcctgggctccgaaccagcctgcacgcggctcagtgtgctccgccgcctgggaactcgcacccgaggagcgcagggggcaaggagcccctcaccctccctctcgtccgcccgcccgcctccccagctgcggaccgcgcgcttgctggtctcaggcgctggatttactcgcttttcaatttttcgtaccctccctcccttttttttttggtcccccactccccgctacgaccccctttccccgcttgattgtcaagcctaaccttgcccgcgtagtcatgggatgtctaattttatttgcatctaggctgctgagagcgctccttgctctgtaaagtggatgtcaggtggatctatgtttctgaaggaacaaagactcaaagaaggcaccgccaaggaagtttgagacgcgggagaatgcaggctgcgtgctggtacgtgcttttcctcctgcagcccaccgtctacttggtcacatgtgccaatttaacgaacggtggaaagtcagaacttctgaaatcaggaagcagcaaatccacactaaagcacatatggacagaaagcagcaaagacttgtctatcagccgactcctgtcacagacttttcgtggcaaagagaatgatacagatttggacctgagatatgacaccccagaaccttattctgagcaagacctctgggactggctgaggaactccacagaccttcaagagcctcggcccagggccaagagaaggcccattgttaaaacgggcaagtttaagaaaatgtttggatggggcgattttcattccaacatcaaaacagtgaagctgaacctgttgataactgggaaaattgtagatc

SEQ ID NO: 1250 - DNA, 3718 bp, Homo sapiens
  source 1..3718: mol_type = genomic DNA
cgattgctcatcgctgggcctggaagatcacacagagggtttggcttggagtgactcctccaagcagggtctgcaccgccctgtgggctcaaggagggagaggagctgtggagaaatgctttgatgtctcttgcagatgaaacagtggagggggagtgggcaagactgggccaccatgggccacttgtctctgaggtgtgcaaagaggtgccagagggccacttggcagcggggctggttgggggccctgcatggagtcccctgtgtctgttgtctcacgagtcggtgtccaccagagaccctgcatgatccgcagcagtcctggcccgttagacctttctgtgtaaaagaaatgttctattgtgttctgtccaagacagttaccactggccgcatgtggcccccaaggcttgggatgtggctcttgccactgaggcctggatgtgggcgtttcatcgcatttgaatgagtctgaacctgtctttgaagagcctagggccagtgtgtgccacattcaactgtgcagggcagtgtccgctcatggttgggttcagaggatctgactgcgggtgccacacatgtgctagctcacgcgagtctcacgacagccttgctccatggaagaggaagtggagcctcgggaagggtgacagcagtggggtctttagctggagtggcccaagcccattgcggatggagggatggatttggccatttgtcaaacagctaccgagcacccactgtacatgtggctttgtgctgggacattgaggagggcaggagaaggaaggcagacaaacacccgggccgggctccagcaagccctgggttccgggctatgtcaggtgctcagggctgaacctggcatgtcttgcagcctctggctcccaatctgagaagggtggaccctgggctcccatgcgatgcagcggtagggggggtgccctttgccagcaggtgggagccgtctgtctgcagagctcagtccctgtagaggtggtggagctgcctgtgggaggccagggaggcgaggaaggaagccaagcccacagccctgggaaagcccaaggagtcggttggagattattttgggcatctctaccaccaaattgccggcttcctctgctagtctttcccctggagaaccgttttgagcagaagcaaaaccacagggcaaggagaagcttagaggagcacattaactctctgtggacccaggaacagcctgcgggcacctgcgtcctgctcctgtgggcctgactgctgcaaagcccctggcggggtggagggagctaagcgtcatcggggtggccctcagggcacctctgttctagtggatgacaggatggtggggaagctggtgcgtatgtggtgtagagacgttcgtattctagttccagaacccctccctcttccccagcccccttttttcttcctcccccaagtacttcccagagcccccctttctgtttccttcctggacaggcactcactgttgtaccgatgaggttgtaacagaaacactgggaagcctcacagcagccggagggggcaccacaaggagccttcctgtttccaccattagccaagcaaatgaagcagaatactgaactgcctgagtgccactgtcatggaaaacacgcccaggaaaatcccctctgcacacccagcaggggtttgccttggggggtccaggaccccatatatctgtcttcctttctgttgtcctgctccgtattttaggagcttcccacagtggccccatagtatgtttactcacagtcacgttaggaaccatggcgctgtgctgtgtacatacctcaggtgccgtttggcttagatatcgttgtaggcactgcagagggaactctaattaaagatagagatgtccaagcatggctgtcgtgcagaggggactaagggtgctgtgtgtggtcagcgttcccaggcagtggtaggaagcctgggggcctgacactgactgagcccccccactgctcccccaggaggcctggaggctgacgaggcactgccctcagggctgccgcccaccttcatccgcttcagccaccactcctacgcccagatggtgcgtgtgctgaggcggacggcctcccgctgcgcccacgtggccaggacctacagcatcgggcgcagcttcgacggcagggagctgctggtcatcgagttctccagccgccccggccagcacgagctgatggagcccgaggtgaagctcatcggcaacattcatggcaacgaggtggcgggccgggagatgctcatctacctagcccagtacctgtgctctgagtacctgcttggtaacccccgcatccagcgcctgctcaacaccacccgcatccacctgctgccctccatgaaccctgacggctatgaggtggcagctgccgagggtgccggctacaacgggtggacgagcgggaggcagaacgcgcagaacctggatctgaaccgaaatttcccggacctgacgtccgagtactaccggctggcggagacccgcggcgcacgcagcgaccacatccccatcccccagcactactggtggggtaaggtggccccggagacaaaggcaatcatgaagtggatgcagaccataccctttgtgctctcagccagccttcatgggggcgacctggtggtgtcctaccccttcgacttctccaagcacccccaggaggagaagatgttttctcccacgcccgacgagaagagggagccccctcctcagcacagacctgtcctgcttggtggggccctgatgagctcatgcagggtgagcccttcgcctgcctgacccaccaggagcctctgcccaagatgttcaagctgctgtccagagcctacgctgacgtccaccccatgatgatggacaggtcggagaataggtgtggaggcaatttcctgaagagggggagcatcatcaacggggcggactggtacagcttcacgggaggcatgtccgatttcaactacctgcacaccaactgctttgagatcacggtagagctgggctgtgtgaagttcccccccgaggaggccctgtacatactctggcagcacaacaaggagtcactcctgaatttcgtggagacggtgcaccggggcatcaaaggtgtggtgacagataaattcggcaagccagtcaaaaacgcccggatctcagtcaaaggcattcgccacgacatcaccacagccccagatggtgactactggagactgctgcccccaggtatccacattgtcattgcccaagcccctggctacgccaaagtcatcaagaaagtcatcatccccgcccggatgaagagggctggccgtgtggacttcattctgcaacctctggggatgggacccaagaactttattcatgggctgcggaggactgggccccacgacccactgggaggtgccagctctttgggggaggccacggagcccgacccgctccgggcgcgcaggcagccctcggccgacgggagtaagccctggtggtggtcctacttcacatcgctgagcacccacaggccacgctggctgctcaagtactagccccggccccagcacccgccaggatgtggagaccgaggcccatctccgcatcccgggctcctggctcttgattttgtctgccacagacatcccacaaagccgctgccattttattaaagtgttttgatccactttgcactgg

SEQ ID NO: 1251 - DNA, 882 bp, Homo sapiens
  source 1..882: mol_type = genomic DNA
atgtcctctggcggcggctcccggggcctcctggcgtggcttctgctccttcagccctggcccgggcagaactgggcgggcatggcggcgccacgcctcccgtcccctctcctctcagaggagggcggcgagaaccccgaagcgagcccggctccaggacctgaagcgggccccccactcaatctgtttacgtcctttccaggtgactcactgctgtgtggccgaacccctctgagaatcgtgggaggagtggacgcggaggaagggaggtggccctggcaggtgagcgtgaggaccaaaggcaggcacatctgcggcggcaccctggtcaccgccacgtgggtgctgacggcaggccactgcatttccagccgtttccattacagtgtcaagatgggagatcggagtgtctataatgaaaacacaagtgtggtggtctcagtccaaagagcttttgtccaccctaagttctcaacagttacaaccattcgaaatgaccttgcccttctccagctccaacatcctgtgaattttacctcaaacatccagcctatctgcatccctcaggagaatttccaggtggaaggtaggaccaggtgctgggtgaccggatggggcaaaacaccagaacgagagaaacttgcatcagaaattcttcaggatgtggaccaatacatcatgtgctatgaggaatgtaataagataatacagaaggccttgtcatctactaaggatgtaataataaaagggatggtctgtggctataaagaacaaggaaaggattcttgtcaaggagattctgggggccgcttggcctgtgaatataatgacacatgggtccaggtagggattgtgagctggggcatcggctgtggtcgctga

SEQ ID NO: 1252 - DNA, 4464 bp, Homo sapiens
  source 1..4464: mol_type = genomic DNA
ttgcacgccggggtccttgcccgctccctctctctgccaccgctcaaagcctgggagaacgcttttgaaagcgaatcaggaaattacttatcaatctgaagccccaaagaattatgaataatcctcgctgccaaagggaaggggattttgagcaaaagctccacatctgcgcacactagagttcaaagactccagctgttggaaggtcttgtgagcaatagccaaagatgtttgtcttgctctatgttacaagttttgccatttgtgccagtggacaaccccggggtaatcagttgaaaggagagaactactcccccaggtatatctgcagcattcctggcttgcctggacctccagggccccctggagcaaatggttcccctgggccccatggtcgcatcggccttccaggaagagatggtagagacggcaggaaaggagagaaaggtgaaaagggaactgcaggtttgagaggtaagactggaccgctaggtcttgccggtgagaaaggggaccaaggagagactgggaagaaaggacccataggaccagagggagagaaaggagaagtaggtccaattggtcctcctggaccaaagggagacagaggagaacaaggggacccggggctgcctggagtttgcagatgtggaagcatcgtgctcaaatccgccttttctgttggcatcacaaccagctacccagaagaaagactacctattatatttaacaaggtcctcttcaacgagggagagcactacaaccctgccacagggaagttcatctgtgctttcccagggatctattacttttcttatgatatcacattggctaataagcatctggcaatcggactggtacacaatgggcaataccggataaagaccttcgacgccaacacaggaaaccatgatgtggcttcggggtccacagtcatctatctgcagccagaagatgaagtctggctggagattttcttcacagaccagaatggcctcttctcagacccaggttgggcagacagcttattctccgggtttctcttatacgttgacacagattacctagattccatatcagaagatgatgaattgtgatcaggaccaagatccctgtggtaaacactctgattgaatctggggttccagaaggtggaacaagcaggaatgggatccaaagagactcccactcagattctaaagcatttaaagacaattctagcagaatttatcaaaacaagatgaaacacagaaaagttgaaaccacaacaaaatgaattctattaaagaatagccccagatataaattctcttgaaagcaatgttcataaatatttaagcaaattaaagacaatgttaacaaattttctattaaatgccctgagtgataaaaccagttggcaataatattgccttattaaatcttcaaaaaatatattttagtctgttatttaagaaaaacataacatcccaaaatctttgacaattctcgaaaggctatatagtaagtcaaaaaccaaaggtaagagatgctaactatttttcaagcaagctacagagaaatgataaatgttttttgttttattatttattccttcatgtttgtatatattcactcaacaaccctttaatgagcctgtaaggaccagacactgtggcgctgaatcagatttaataatgagttaagacaaagcccctacctatgggctagtgtgtggtgatcaaactatcacaattcagtgtgatgagcagcatagcaaacagatggatttgaagctaaaagcacacagggtctgctattcctgaggctgggggccagagaagcttttacgcatggaaaaacactaatcatgccaaggtgtatgtgtttaagggggtgtgatggatgcaaagggaatgaggaattcagcactgcattctctttgcaccctcaatgcatgattggtattctcaacagcaaaggggtgaaaaatctagagacagaggaggcctggcaggggtgataaaaatggagattgaaatgaagagaaatagccagcaggtgattcttctgaatcctttagtgtgatggtttcccaagacaaacatttgtcctaatagctttctcataaatatgggcaccactttacattgtggtaagacattgcttctcatggatctgctaggtatttatttcaaataaagcaaggcatatgttcactgatttacgagtaagctgatgagagcaatgaacaggagaaggagggagagagccaaatgtctgagtaaacagatatcccttccaagtctcacacctcccttagtcccactcttgcttgtgtcagcaccttgttcttcactgaactgcaattcttcaattattctcttccatgattttgtctgatctaccatttctatggtttatggtaatagtattccctttatccctcccttttggtaacttccaatcctccttctatgtattcctttctctgctcattgacttataaatagttttcatacctcttatgtttgaatcaccatgctagattctgtgaagacagaagagtatcaagattaatatattaatagtatagctctgactggtaaatttcttttttttaatcttccccaatttaaattttttaatttaaaagtaaattttactgtcgaaaatgcaaacttggggagggcggaaacatcacacacaaggtttccacttcacacttggagggttgcatggcggctgggcaaaggtgctccccacttcccagatggtgcggcggctggccagaggcactcttcacttcccagacagaggggcggccgggcagaggtgctcctcacttcccagagggtgcaggagccagctctgactagtaaatttctaaggataccagaaaggaaatggcatgcacacacacaaaaaatacctaaattttggatgagaaaatgataaaatatgctaagttctaggctggaaataagggcaaaatgctgtgaaagaagaggaaatgtttacttccaaattaggatgtgacagagaagggatagggaaatcctctctgctcattgggccttacatgatgggtgacacttggagtggcacaagttgggggaaagcgcacttgagacagaggtaatgatggggacgaagtgagaacagagacccagaaggagaatcaatggaccatatttgtaagagctttgaaagccagcctgagaattggaggatttattcataagaaagtgtagagaccctgtgtatttcagagctggatactgccattaccacagatgaaagttgcaatgatctagcagttgtgtgcaaaggcaaggcttgcttttcctgtctttcaaccctatcttgcttttcctgtctttcaaccctatcttgctttcattgtcttcatcttcctgccatactttgtgcacttattgctctccttctgagtcaggacatgtgtacaggagaccaagaacaatgagtattagaaaaaaaggagacagcaaaggtggtttgaggtagtcacctgcttacagataacagccaaagatagaattccaagttataaagcataaaaaagagccaacagaagtaactaatccgggaaaagtgaacatatgggccctttaaagactacaagatttgctagataaactggaaatggagaagttattgcagacagtcatgaaccacaaatcactgtgattaaaattttcttctgatcgtaatccacgaatgcattcattttttggacattgcttacttatcttttaaatgtttcttttattacaaagcctattttgagtagcttttaaaactgaatttcctttaattggtttgaagcctagagatgaatttcgttttcaaatatctggtgggatggtaatggggattagagaactgacatgagaaaagaggagctgttttggtattaaacgaataaaatcttaagcaaatataggtgtcttttattcttaaaaaatagcagatacagtttatccacatttgtaaatatttgtataaagaaagtagcaaaacagttttggtttaaaaagttccaagtctcattgcaatcattctttgtaaaggctgacttgtaatgaatatgtattaagcaatatttattgactatacaccatcttgttctagaagagtttaaagccacttaagaagataaataagatataaaaagaaaacagcagtcaaaagcagatgagaagaaatgggaaaaacaaaaaaaaaagaaaataatgaggctaatataatgctgtgtgtacatgaacatgaatgtgcctgtgttacacattttcaggccacaaatgtttctttgtgcccctgcatgcacaagggtatttccaggtcatttatcattgtgaacagtgttgcttatgataaaaaatagattctataaactctaaatatactttttttctaccactctgtgtaaaagatcatgaacgtaaataaattttagatatg

SEQ ID NO: 1253 - DNA, 3968 bp, Homo sapiens; identical to SEQ ID NO: 1078
  source 1..3968: mol_type = genomic DNA

SEQ ID NO: 1254 - DNA, 1289 bp, Homo sapiens
  source 1..1289: mol_type = genomic DNA
cggcgcgctggagcgttttccggccgtgcgtttgtggccgtccggcctccctgacatgcagccctctggaccccgaggttggaccctactgtgacacacctaccatgcggacactcttcaacctcctctggcttgccctggcctgcagccctgttcacactaccctgtcaaagtcagatgccaaaaaagccgcctcaaagacgctgctggagaagagtcagttttcagataagccggtgcaagaccggggtttggtcgtgacggacctcaaagctgagagtgtggttcttgagcatcgcagctactgctcggcaaaggcccgggacagacactttgctggggatgtactgggctatgtcactccatggaacagccatggctacgatgtcaccaaggtctttgggagcaagttcacacagatctcacccgtctggctgcagctgaagagacgtggccgtgagatgtttgaggtcacgggcctccacgacgtggaccaagggtggatgcgagctgtcaggaagcatgccaagggcctgcacatagtgcctcggctcctgtttgaggactggacttacgatgatttccggaacgtcttagacagtgaggatgagatagaggagctgagcaagaccgtggtccaggtggcaaagaaccagcatttcgatggcttcgtggtggaggtctggaaccagctgctaagccagaagcgcgtgaccgaccagctgggcatgttcacgcacaaggagtttgagcagctggcccccgtgctggatggtttcagcctcatgacctacgactactctacagcgcatcagcctggccctaatgcacccctgtcctgggttcgagcctgcgtccaggtcctggacccgaagtccaagtggcgaagcaaaatcctcctggggctcaacttctatggtatggactacgcgacctccaaggatgcccgtgagcctgttgtcggggccaggtacatccagacactgaaggaccacaggccccggatggtgtgggacagccaggcctcagagcacttcttcgagtacaagaagagccgcagtgggaggcacgtcgtcttctacccaaccctgaagtccctgcaggtgcggctggagctggcccgggagctgggcgttggggtctctatctgggagctgggccagggcctggactacttctacgacctgctctaggtgggcattgcggcctccgcggtggacgtgttcttttctaagccatggagtgagtgagcaggtgtgaaatacaggcctccactccgtttgctgtga

SEQ ID NO: 1255 - DNA, 1447 bp, Homo sapiens
  source 1..1447: mol_type = genomic DNA
gcagagatgaagttccaggggcccctggcctgcctcctgctggccctctgcctgggcagtggggaggctggccccctgcagagcggagaggaaagcactgggacaaatattggggaggcccttggacatggcctgggagacgccctgagcgaaggggtgggaaaggccattggcaaagaggccggaggggcagctggctctaaagtcagtgaggcccttggccaagggaccagagaagcagttggcactggagtcaggcaggttccaggctttggcgtagcagatgctttgggcaacagggtcggggaagcagcccatgctctgggaaacactgggcacgagattggcagacaggcagaagatgtcattcgacacggagcagatgctgtccgcggctcctggcagggggtgcctggccacaatggtgcttgggaaacttctggaggccatggcatctttggctctcaaggtggccttggaggccagggccagggcaatcctggaggtctggggactccgtgggtccacggataccccggaaactcagcaggcagctttggaatgaatcctcagggagctccctggggtcaaggaggcaatggagggccaccaaactttgggaccaacactcagggagctgtggcccagcctggctatggttcagtgagagccagcaaccagaatgaagggtgcacgaatcccccaccatctggctcaggtggaggctccagcaactctgggggatccagcaccggctcctcctccggcaaccacggtgggagcggcggaggaaatggacataaacccgggtgtgaaaagccagggaatgaagcccgcgggagcggggaatctgggattcaggggcaagggtcgagctggggcagtggaggaggtgacgctgttggtggagtcaatactgtgaactctgagacgtctcctgggatgtttaactttgacactttctggaagaattttaaatccaagctgggtttcatcaactgggatgccataaacaagaaccaggtcccgccccccagcacccgagccctcctctacttcagccgactctgggaggatttcaaacagaacactcctttcctcaactggaaagcaattattgagggtgcggacgcgtcatcactgcagaaacgtgcaggcagagacgatcagccgggtgcaggatggcaggaggtggcagctgtaacttccaagaactacaattacaaccagcatgcgtatcccactgcctatggtgggaagtactcagtcaagacccctgcaaaggggggagtctcaccttcttcctcggcttcccgggtgcaacctggcctgctgcagtgggtgaagttttggtaggcaatttcttgcaaccaccaccgaggccccgaaaagcactggtcgtcagggagctcctccccttggcccccagcctgtgccagccctggcc

SEQ ID NO: 1256 - DNA, 1172 bp, Homo sapiens
  source 1..1172: mol_type = genomic DNA
agctcctaaccgcgagtgatccgccagccttggcctcccaaggtgccgggattgcagacggagtctggttcactcagtgctcaatggtgcccaggctggagtgcagtggcgtgatctcagctcgctacaacctccatctcccagccgcctgccttggcctcccaaagtgccgagattgcagcctctgcctggccgccaccccgtctgggaagtgaggagcgtctctgcctggccgcccatcgtctgggatacgaggagcctctctgcctggctgcccagtctggaaagtgaggagcgtctctgcccggccgccatcccatctaggaagcgaggagcgcctcttccccgccgccatcccatctaggaagtgaggagcgtctctgcccggccgcccatcgtctgagatgtggggagcacctctgccccgccgccctgtctgggatgtgaggagcgcctctgctgggccgcaaccctgtctgggaggcaaaatgaagctgaatctggtgcagatctttttcatgttgctgatgctgctgctgggcctggggatgggcctggggttgggacttcatatggctacagcagtcttggaggagagtgatcaaccgctcaatgaattttggtccagtgactcacaggacaaagctgaggccactgaggagggagacggcacccaaaccacagaaacgctggtgcttagcaacaaagaagtggtgcaacctggctggccagaagatcccatcctcggtgaagatgaggttgggggtaacaagatgctcagagcctcagctctctttcagagcaacaaagactatcttaggcttgaccagacagatagagaatgcaatgatatgatggcacacaagatgaaggagcccagtcagagttgcatagcccagtatgcattcatccatgaggatctaaacacagtcaaagctgtctgtaacagtcctgtcattgcctgtgagctcaaggggggaaaatgtcacaaaagctcccgaccttttgatttgacattgtgcgagctgtcccaaccagaccaggtcactcctaactgcaattacctaacttctgttataaaaaagcacattattataacctgtaatgacatgaagcgccagttaccaactggacaatgaagcaactcatcatcttttttctcttcaccttct

SEQ ID NO: 1257 - DNA, 3121 bp, Homo sapiens
  source 1..3121: mol_type = genomic DNA
gcgagccacggcgccgggggcggccaaggggaggcgggatgagtctgcgagccggctgagcgcgccgaggagccggccggggcaccgccggggacatggcgtcttggctccggagaaagctgcgtggcaagaggcggccagtgatagcgttctgcctcttgatgatcctatctgcgatggctgtcacccgctttcccccacagcgtccatccgccggcccagaccctggtcccatggagcctcagggggtaactggcgcccctgcaacccatatccggcaggctttgagctccagccggaggcagcgggcaagaaacatgggcttctggagaagccgtgctttgcccaggaactccatcttggtctgtgctgaggagcaaggccatagagcaagagtggacagaagcagggagtccccaggaggggacctcaggcatccagggagggtgaggagggacattactttgtcaggacatccaagactcagtactcagcatgttgtgctcctgagggaggatgaggttggagatccaggaaccaaagacctgggccacccccagcatggcagtcccatccaggagacacagagtgaggtggtcaccctggtcagtccactcccagggagtgacatggcagctttaccggcttggagagctacttctgggctgacactctggccccatacagcagaaggcagggatctgctgggagctgagaacagagccttgactggtgggcaacaagcagaggatcccaccttggcctcaggagctcatcagtggcctggctctgttgagaagctgcaagggtcagtatggtgtgatgctgagacgctgttgagcagctcgaggactggtgggcaggctcccccatggctgacagaccacgatgtgcagatgctccgtctgttggcacagggggaggtggtggacaaagccagggtccccgcccatgggcaggtgctacaggttggcttctccactgaggctgcccttcaggacctgtcctctcccaggctcagccaactctgttcccaagggctctgtggcctgatcaagaggcctggggacctgcctgaggtcctgtccttccacgtagatcgtgtgctggggctgcgccggagcctacctgctgtggcccgccgcttccatagccccctcctgccctaccgatacacagacggtggagcaaggcctgtcatctggtgggcacccgatgtgcagcacctgagcgacccagatgaggatcagaactctctggccttgggctggctgcagtatcaggccctgctggcacacagctgcaactggccaggccaggccccgtgcccgggcatccaccataccgagtgggcacgcctggcgctcttcgacttcctgttgcaggtccacgaccgcttggatcgctactgctgtggcttcgagcctgagccctcagacccctgtgtggaagagaggctccgagagaaatgccagaacccagccgagctgcggctggtccacatcctggtccggagcagcgatccatctcacctggtctacatcgataacgctggcaaccttcagcaccctgaggacaagctgaactttcggctgctggagggcatagatgggtttcctgagtctgccgtgaaggttctcgcatcagggtgtctacagaacatgctgctgaagtcgctgcagatggacccagtgttctgggaaagccaaggcggagcccaggggctgaagcaggtcctccagaccctggagcagcgaggacaggtgctgctgggacacatccaaaagcacaacctcacactcttcagggacgaggacccataagccgcacacagccctgagtcaatgagcatccatcctgatggccacattttcttgggctcactcatcttgaggacaaatgggaaaagccagaagccagaggggcacaaggatgtcacgggatatttcacctgcctgggatggtggaggtagtatggggttttcaatctcaaagcgtccctttctgccttctcggctctggctatttattcccttgcaccaacaaatacattcgaaaatgttctgtgagctgctcaagaaactgtaaaaatgtgtgatgcacgtgcatatgcagagtgggagaactttgtgtgtgtgtagaggtgtgtaggtgtgggtggcatgtgtgcccgcctgcatgcaatacctgagaccaacctaataaaggtacaatcttcatagaactgcacttgcagcctggagttgctctggctgaaagtagactcaggcttaagaaatgaaacataatgcgtttgtctttatagactttaaattttcaattattactcagttatgtttttggtttaaaaaattataaaagtctaaaagtaatacatgctcagtaaaaacaagtccataaaaaatagaagcatatgacaaaaagcataagtcccacaaactccctagcggtgtgtatgtgtgtgtgtgttattcatggtcacactacatgcaaattaaaaaatgaaagtgtggtcatgctttgtcaactcactatatttttactttattaactatattctgtatcagccatctgaattgacccaatctttattggtgactgcatgaaattccaaggcagggatgtgtcatattttctttagctggtcccataatcatgaacatttaagtagctccaatttttcatcaattacagacattgccgccatgaacatgattgcatggcgtgcaagtatttctgcgaggtagatttccgtacgggatttctggggcaaagggtatgggcattcagtattctgagagaaactgccaaattgctctctgaaatggtggtgtcaatttacatttctcccaagagggtaggagactgattatttttctacaccttcaccaacacttggcattctcagacttttgggttttttttggcctatttaggaggaaaaccgattttaaaagctgcatttccttaatcatgaatgaagtcatctttccacttatttgccagacatttgtattttcttttctgcattgtctttttgttttaagatgtttgccctttgcttgttaatttgttggaaatctttgactctaataagtgtgatcaatcttttctctgctga

SEQ ID NO: 1258 - DNA, 911 bp, Homo sapiens
  source 1..911: mol_type = genomic DNA
ccccaaacctgccaccgacggccacttccgtttccccgatagtatttggggatctcgaagcgatacttccggctccccccaggtccccaagctttacttttgtggggcacgacgagaaagtccgcagccccaaacattcccagaggtccacttgggccagtggtactttatcgcaggggcagctcccaccaaggaggagttggcaacttttgaccctgtggacaacattgtcttcaatatggctgctggctctgccccgatgcagctccaccttcgtgctaccatccgcatgaaagatgggctctgtgtgccccggaaatggatctaccacctgactgaagggagcacagatctcagaactgaaggccgccctgacatgaagactgagctcttttccagctcatgcccaggtggaatcatgctgaatgagacaggccagggttaccagcgctttctcctctacaatcgctcaccacatcctcccgaaaagtgtgtggaggaattcaagtccctgacttcctgcctggactccaaagccttcttattgactcctaggaatcaaggtaaggggttaaaatctcataaaacaggattaggactcaccaagtcttctggtgttacagggtgaaagaggctcgtgtgatgtcaccagagggatgtggctaagagctgtgatgtcacctgagggaggcaggatgggttctgggctactcaaaagagaggtttctgagtttgcactggataaagggggcagagggtcatacgtggagggaaaagagccttagagactcccctttgacacagggaatgaaagaacacgttctcccccaccccattactatcaactttgcttttctccctggacttcccttctgtccttctttttccctccccccatcacagaggcctgt

SEQ ID NO: 1259 - DNA, 761 bp, Homo sapiens; identical to SEQ ID NO: 929
  source 1..761: mol_type = genomic DNA

SEQ ID NO: 1260 - DNA, 2881 bp, Homo sapiens; identical to SEQ ID NO: 811
  source 1..2881: mol_type = genomic DNA

SEQ ID NO: 1261 - DNA, 3971 bp, Homo sapiens; identical to SEQ ID NO: 1079
  source 1..3971: mol_type = genomic DNA

SEQ ID NO: 1262 - DNA, 730 bp, Homo sapiens; identical to SEQ ID NO: 1166
  source 1..730: mol_type = genomic DNA

SEQ ID NO: 1263 - DNA, 485 bp, Homo sapiens
  source 1..485: mol_type = genomic DNA
ggaagggagggagccgaggcgagggggaggcggcgcctgggcccgagccgccccagccctggctcctctccccggaacaggcccccgacagctgctctcgggagccgcctcccgacacccgagccccgccggcgcctcccgctcccggctcccggctcctggctccctccgcctcccccgcccctcgccccgccgccgaagaggccccgctcccgggtcggacgcctgggtctgccgggaagagcgatgagagagatgctgcccccacccccttaggcccgagggatcaggagctatgggaccagaggccctgtcatctttactgctgctgctcttggtggcaagtggagatgctgacatgaagggacattttgatcctgccaagtgccgctatgccctgggcatgcaggaccggaccatcccagacagtgacatctctgcttccagctcctggtcagattccactgccgcccgccacagcaggt

SEQ ID NO: 1264 - DNA, 1803 bp, Homo sapiens
  source 1..1803: mol_type = genomic DNA
ctctcactctctctcttttcccacccttaagccaagtacagggatagttgtctcatcattggtggcttaaaatgatgtttttgaacaagaagacgccccatgggtacttttggtgactagcactatctctgtttttttccttttaaattcctgagctattgtttagcagtacacccttttatctccattgctactgaagctgaatgttacttgggtggaaagcataactgctttcttttctatgtccttaaaccctttgataatgttactgtttgagagtccctgaagccaggatactagaagagtctggcttgtctgaacagctgaactacgaaataatggagtagggcaggctgggctttccagcctctaggtgctgtgctgtcctgaggcctgggccatggtgcccaaggaaagcccctgaagctcaccaggaggaagaagcatgcagggcacccctggaggcgggacgcgccctgggccatcccccgtggacaggcggacactcctggtcttcagctttatcctggcagcagctttgggccaaatgaatttcacaggggaccaggttcttcgagtcctggccaaagatgagaagcagctttcacttctcggggatctggagggcctgaaaccccagaaggtggacttctggcgtggcccagccaggcccagcctccctgtggatatgagagttcctttctctgaactgaaagacatcaaagcttatctggagtctcatggacttgcttacagcatcatgataaaggacatccaggtgctgctggatgaggaaagacaggccatggcgaaatcccgccggctggagcgcagcaccaacagcttcagttactcatcataccacaccctggaggagatatatagctggattgacaactttgtaatggagcattccgatattgtctcaaaaattcagattggcaacagctttgaaaaccagtccattcttgtcctgaagttcagcactggaggttctcggcacccagccatctggattgacactggaattcactcccgggagtggatcacccatgccaccggcatctggactgccaataagattgtcagtgattatggcaaagaccgtgtcctgacagacatactgaatgccatggacatcttcatagagctcgtcacaaaccctgatgggtttgcttttacccacagcatgaaccgcttatggcggaagaacaagtccatcagacctggaatcttctgcatcggcgtggatctcaacaggaactggaagtcgggttttggaggaaatggttctaacagcaacccctgctcagaaacttatcacgggccctcccctcagtcggagccggaggtggctgccatagtgaacttcatcacagcccatggcaacttcaaggctctgatctccatccacagctactctcagatgcttatgtacccttacggccgattgctggagcccgtttcaaatcagagggagttgatgtggccagtgggatcaccgtcgactgggcctatgacagtggcatcaagtacgccttcagctttgagctccgggacactgggcagtatggcttcctgctgccggccacacagatcatccccacggcccaggagacgtggatggcgcttcggaccatcatggagcacaccctgaatcacccctactagcagcacgactgagggcaggaggctccatccttctccccaaggtctgtggctcctcccgaaacccaagttatgcatccccatccccatgccctcatcccgacctcttagaaaataaatacaagtttgaacagg

SEQ ID NO: 1265 - DNA, 2331 bp, Homo sapiens
  source 1..2331: mol_type = genomic DNA
gctgatcaggtgtgtctcctcctctgtcccctcccttcttctcaggtcaccagcaccctcggaacccagaggcccgcgctctgaaggtgacccccctggggaggaaggcgatggcccctgcgaggacgatggcccgcgcccgcctcgccccggccggcatccctgccgtcgccttgtggcttctgtgcacgctcggcctccagggcacccaggccgggccaccgcccgcgccccctgggctgcccgcgggagccgactgcctgaacagctttaccgccggggtgcctggcttcgtgctggacaccaacgcctcggtcagcaacggagctaccttcctggagtcccccaccgtgcgccggggctgggactgcgtgcgcgcctgctgcaccacccagaactgcaacttggcgctagtggagctgcagcccgaccgcggggaggacgccatcgccgcctgcttcctcatcaactgcctctacgagcagaacttcgtgtgcaagttcgcgcccagggagggcttcatcaactacctcacgagggaagtgtaccgctcctaccgccagctgcggacccagggctttggagggtctgggatccccaaggcctgggcaggcatagacttgaaggtacaaccccaggaacccctggtgctgaaggatgtggaaaacacagattggcgcctactgcggggtgacacggatgtcagggtagagaggaaagacccaaaccaggtggaactgtggggactcaaggaaggcacctacctgttccagctgacagtgactagctcagaccacccagaggacacggccaacgtcacagtcactgtgctgtccaccaagcagacagaagactactgcctcgcatccaacaaggtgggtcgctgccggggctctttcccacgctggtactatgaccccacggagcagatctgcaagagtttcgtttatggaggctgcttgggcaacaagaacaactaccttcgggaagaagagtgcattctagcctgtcggggtgtgcaaggcccctccatggaaaggcgccatccagtgtgctctggcacctgtcagcccacccagttccgctgcagcaatggctgctgcatcgacagtttcctggagtgtgacgacacccccaactgccccgacgcctccgacgaggctgcctgtgaaaaatacacgagtggctttgacgagctccagcgcatccatttccccagtgacaaagggcactgcgtggacctgccagacacaggactctgcaaggagagcatcccgcgctggtactacaaccccttcagcgaacactgcgcccgctttacctatggtggttgttacggcaacaagaacaactttgaggaagagcagcagtgcctcgagtcttgtcgcggcatctccaagaaggatgtgtttggcctgaggcgggaaatccccattcccagcacaggctctgtggagatggctgtcgcagtgttcctggtcatctgcattgtggtggtggtagccatcttgggttactgcttcttcaagaaccagagaaaggacttccacggacaccaccaccacccaccacccacccctgccagctccactgtctccactaccgaggacacggagcacctggtctataaccacaccacgcggcccctctgagcctgggtctcaccggctctcacctggccctgcttcctgcttgccaaggcagaggcctgggctgggaaaaactttggaaccagactcttgcctgtttcccaggcccactgtgcctcagagaccagggctccagcccctcttggagaagtctcagctaagctcacgtcctgagaaagctcaaaggtttggaaggagcagaaaacccttgggccagaagtaccagactagatggacctgcctgcataggagtttggaggaagttggagttttgtttcctctgttcaaagctgcctgtccctaccccatggtgctaggaagaggagtggggtggtgtcagaccctggaggccccaaccctgtcctcccgagctcctcttccatgctgtgcgcccagggctgggaggaaggacttccctgtgtagtttgtgctgtaaagagttgctttttgtttatttaatgctgtggcatgggtgaagaggaggggaagaggcctgtttggcctctctatcctctcttcctcttcccccaagattgagctctctgcccttgatcagccccaccctggcctagaccagcagacagagccaggagaagctcagctgcattccgcagcccccacccccaaggttctccaacatcacagcccagcccgcccactgggtaataaaagtggtttgtgg

SEQ ID NO: 1266 - DNA, 922 bp, Homo sapiens
  source 1..922: mol_type = genomic DNA
tctctgctgatctgagtctgcctgtggcatggacctgcatcttccctgaagcatctccagggctgaaaaatcactgaccatggcaccatggtctcatccatctgcacagctgcagccagtgggaggagacgccgtgagccctgccctcatggttctgctctgcctcgggctgagtctgggccccaggacccacgtgcaggcagggaacctctccaaagccaccctctgggctgagccaggctctgtgatcagccgggggaactctgtgaccatccggtgtcaggggaccctggaggcccaggaataccgtctggttaaagagggaagcccagaaccctgggacacacagaacccactggagcccaagaacaaggccagattctccatcccatccatgacagagcaccatgcagggagataccgctgttactactacagccctgcaggctggtcagagcccagcgaccccctggagctggtggtgacaggattctacaacaaacccaccctctcagccctgcccagtcctgtggtgacctcaggagagaacgtgaccctccagtgtggctcacggctgagattcgacaggttcattctgactgaggaaggagaccacaagctctcctggaccttggactcacagctgacccccagtgggcagttccaggccctgttccctgtgggccctgtgacccccagccacaggtggatgctcagatgctatggctctcgcaggcatatcctgcaggtatggtcagaacccagtgacctcctggagattccggtctcaggtgaggaagccacagtcttctctagtacaattcagggaagccagacaggttgtggagagctttacaggcagggcagcccctgctaagaaagacaaaaaggggaaggagaacacagaaatcctagggacaca

SEQ ID NO: 1267 - DNA, 1439 bp, Homo sapiens
  source 1..1439: mol_type = genomic DNA
atgtgtacaaagacaatcccagtcctctggggatgtttcctcctgtggaatctctatgtctcatcctctcagaccatttaccctggaatcaaggcaaggattactcagagggcacttgactatggtgttcaagctggaatgaagatgattgagcaaatgctaaaagaaaagaaactcccagatttaagcggttctgagtctcttgaatttctaaaagttgattatgtaaactacaatttttcaaatataaaaatcagtgccttttcatttccaaatacctcattggcttttgtgcctggagtgggaatcaaagcgctaaccaaccatggcactgccaacatcagcacagactgggggttcgagtctccacttttaggttgaagaatggtagtcagcttaagcctgagcccaactggaaggcctttgcaccctcgtgtagaaggaggaaatcagattcaagccaagacacaggaggggctgatctgtttctctccggagtctactttaccggtatcattatcctaacccgaaatgactttggtcatcctaccctgaagctccaagattgctacgcccaactgagccatgcccacgtctcattttccggagaactcagtgttctgtataactcctttgctgagcccatggagaaacccattttaaagaacttaaatgaaatgctctgtcccattattgcaagtgaagtcaaagcgctaaatgccaacctcagcacactggaggttttaaccaagattgacaactacactctgctggattactccctaatcagttctccagaaattactgagaactaccttgacctgaacttgaagggtgtattctacccactggaaaacctcaccgacccccccttctcaccagttccttttgtgctcccagaacgcagcaactccatgctctacattggaatcgccgagtatttctttaaatctgcgtcctttgctcatttcacagctggggttttcaatgtcactctctccaccgaagagatttccaaccattttgttcaaaactctcaaggccttggcaacgtgctctcccgggttgctagtaccagtgttggcctggttattttgggacaaagactggtctgctccttgtctctgaacagattccgccttgctttgccagagtccaatcgcagcaacattgaggtcttgaggtttgaaaatattctatcgtccattcttcactttggagtcctcccactggccaatgcaaaattgcagcaaggatttcctctgtccaatccacacaaattcttattcgtcaattcagatattgaagttcttgagggtttccttttgatttccaccgacctgaagtatgaaacatcctcaaagcagcagccaagtttccacgtatgggaaggtctgaacctgataagcagacagtggagggggaagtcagccccttga

SEQ ID NO: 1268 - DNA, 1005 bp, Homo sapiens
  source 1..1005: mol_type = genomic DNA
agctagtggaaaaacaagagaagggaagtcaaaaggctacttgctgtcagctaaagccagacaacctctcctgtttcatctcctggcaacagaatgcatcctccttttgggaaactgcctctttccccactcctcagagtaaatcttgctgctgctcactctttgggtctgcactgcccataagagctgtagcactcaccgcgaaggtctgcagcttcactcttgaaaccagagagaccacgaacctaccgggagaaatgaacaaattccggacgcaccatctttaagaactgtaacactcactgcgaggatctgcggcttcattctttaagtctgtgagaccaagaacccaccaattccggcacactaatatgctgttggaaactggctatatggaaaggctatgtggaagaaaacaaacaccccagccaacataatggagctcccagctgacagctgacatctagctgattgccaaccactttggaaactgatcttcaaaacccacttgagctatgtcaagagaagccacctgtgacacagaagcagaaggatccaagtcaaaggagtttatttgggaggaaatagcacgagagaatgtgatacttgggaaaattatgtagagagagagattaaagatgcaagctataaaaggaattgataatataaaagctcctgagaagattggaagaatacatataagagaccctgatccttgataggatggaccttttctagaactaccatcaccctggaagctgaagaaaatcattcgtaactgaggcacacttgccttttgcaactaagctctactgaattccaaagctatagaaatatccatcttgacctggaaagtctgtttctttgctagtccagaaggttttttttaacatgaacaagatcctctcaagcactgtttgctttggactcctaactttgttatccgtgttgagttttttacaatctgtgcatggacgaccatatcttacccaaggaaatgaaata

SEQ ID NO: 1269 - DNA, 761 bp, Homo sapiens; identical to SEQ ID NO: 929
  source 1..761: mol_type = genomic DNA

SEQ ID NO: 1270 - DNA, 946 bp, Homo sapiens
  source 1..946: mol_type = genomic DNA
ctagagactcatacagtgacctagagcaggcatgggtgggtcacaggctttggagagcactctctgtcctgatcttttcagttgagagacttcagctgttcattgctcatttggacttagttcaaggtcatgtcaaagaagaaggtgcacttacgctagttgttagctctgtcttttgtaaccatcaagttccatgcgattgatcagatttaggagggggcgttgggggataatcgtaagtgaaggacagtttgcaaccttaattttgggtgtcaccaggtaaacagagccctcagcatctgaatagaaactgaacaggaacagaagagattacactacatctgagatggagacctttcctctgctgctgctcagcctgggcctggttcttgcagaagcatcagaaagcacaatgaagataattaaagaagaatttacagacgaagagatgcaatatgacatggcaaaaagtggccaagaaaaacagaccattgagatattaatgaacccgatcctgttagttaaaaataccagcctcagcatgtccaaggatgatatgtcttccacattactgacattcagaagtttacattataatgaccccaagggaaacagttcgggtaatgacaaagagtgttgcaatgacatgacagtctggagaaaagtttcagaagcaaacggatcgtgcaagtggagcaataacttcatccgcagctccacagaagtgatgcgcagggtccacagggcccccagctgcaagtttgtacagaatcctggcataagctgctgtgagagcctagaactggaaaatacagtgtgccagttcactacaggcaaacaattccccaggtgccaataccatagtgttacctcattagagaagatattgacagtgctgacaggtcattctctgatgagctggttagtttgtggctctaagttgtaa

SEQ ID NO: 1271 - DNA, 609 bp, Homo sapiens
  source 1..609: mol_type = genomic DNA
atctcagcaaccgctgggcatccggaggatgtggggacgcggagctgagaggctccgggctagctaggtgtaggggtggacgggtcccaggaccctggtgagggttctctacttggccttcggtgggggtcaagacgcaggcacctacgccaaaggggagcaaagccgggctcggcccgaggcccccaggacctccatctcccaatgttggagtagagacagggttttgccctgttggccaagctggtcttgaactcctgacctcaagtgatccacccgcctcggcctcccaaagtgttgggattacaggcgtgagccatcgtgcccagccagattctccatttctaacaagttcccaggtgatgtcgatgaagctggttcgtgaactgcactttaacatgatgtagaaattttacaaactagtagagtaagggggtggctgcaggctggagaggaagtccaggctaaacgcctggcaacttgaggtggtttccgcccccttgctcgctgaggttccctcccaggaatccgacacgtgacggtctgtccgccgtctcagactagaggagcgctgtaaacgccatggctcccaagaagctgtcctgcctt

SEQ ID NO: 1272 - DNA, 1312 bp, Homo sapiens
  source 1..1312: mol_type = genomic DNA
aacgtcaagcggtggcttcacgaaatcaaccagaactgtgatgatgtgtgccgaatattagatgttcaactgcatcacggagctggtcctccgagcaaagaaagacaacctggcaaaacagcagcagcaacaacagaacgatgtggtgaagctcacgaagaacagtaaacgaaagaaacgctgctgctaatggcacccagtccactgcagagactgcactgcggtccctcccccagcccgaggcccacggaggttcctcgggggacagtctcagtttcgtgccgttatttaaagaattctctccatgtttttgtatcgggaggtgccatcggcacttcctcccccgccctcctcgagtgccaagaaggtgttggaccagcccgcccttccctactggtgccccctcctccccggccaaggcgcctggacctggcgaggacgctgcccgccgagcggactgattcgcagagtctgtacatagtgtatattgctctacccggccgcacaccacgtcctgctctggcttttgccttcttgatgccagcctgctgcaacagaccctccccgcgcccctccccagcccatcttactgcaagcagcgtcctgaggagacagcggcacgttctagctgcgtctgcggccagcccgtgccagtggagtgggctccgcgttgctcattctctccgacaggttgtcagcctctgtccccgctgcacagggtcttgccccttctccggggcctgtgccagctcccttccctccccgttgtcctgtccccacagccattctgggagctggggaacctggtctcaaggcaggccctgcagttccacagaggtggcaggtcttgccctttggccaacagatttcttgtcctgccttctagatgcctctgagctccaaacccagggcagccatggcttctcatttacaccaacaggtttcagttccaacagaaaggtcggggtaggttcgtgcagagatggggctggcaggggggctatgggaggattattttaacagatcaagaaaatgaagccaaatcaagtgaattaaattcctcacaattattttctttccctgaggtttgattggcacagcagcaaaagttgaggccaccccacttgtgtccactgtttttagaaaaaaatgaatggcttcctgccattgtggggctggactcttgggctttcttggtgggagcggagaaggggcctcccacccttgtccgagttgcctcccactggaggtcaggagtctacactgcagcctcgggcactgtggggagtgcatgcctggggcctctgggtgg

SEQ ID NO: 1273 - DNA, 950 bp, Homo sapiens; identical to SEQ ID NO: 1126
  source 1..950: mol_type = genomic DNA

SEQ ID NO: 1274 - DNA, 1815 bp, Homo sapiens
  source 1..1815: mol_type = genomic DNA
atggtccccgccgccggcgcgctgctgtgggtcctgctgctgaatctgggtccccgggcggcgggggcccaaggcctgacccagactccgaccgaaatgcagcgggtcagtttacgctttgggggccccatgacccgcagctaccggagcaccgcccggactggtcttccccggaagacaaggataatcctagaggacgagaatgatgccatggccgacgccgaccgcctggctggaccagcggctgccgagctcttggccgccacggtgtccaccggctttagccggtcgtccgccattaacgaggaggatgggtcttcagaagagggggttgtgattaatgccggaaaggatagcaccagcagagagcttcccagtgcgactcccaatacagcggggagttccagcacgaggtttatagccaatagtcaggagcctgaaatcaggctgacttcaagcctgccgcgctcccccgggaggtctactgaggacctgccaccatgccatctcctgaggatctgcggctggtgctgatgccctttccgggcgccttcgagttggggcgctgagccagctccgcacggagcacaagccttgcacctatcaacaatgtccctgcaaccgacttcgggaagagtgccccctggacacaagtctctgtactgacaccaactgtgcctctcagagcaccaccagtaccaggaccaccactacccccttccccaccatccacctcagaagcagtcccagcctgccacccgccagcccctgcccagccctggctttttggaaacgggtcaggattggcctggaggatatttggaatagcctctcttcagtgttcacagagatgcaaccaatagacagaaaccagaggtaatggccacttcatccacatgaggagatgtcagtatctcaacctctcttgccctttcaatcctagcacccactagatatttttagtacagaaaaacaaaactggaaaacacattgtttggtcttgtgtttctttacagaggtacctgagggaggagagacataaatcccttcatccctaagactgaactatgtaactagcagcctctggcttgttttctactccctgtccctcaggataaaatgttgatattgctcattttcctcatttccaacattgttttaaaacaagtacttcttttacaggcttgaaaaatctcaaataaacgctaagaaaagggagtaggaagaacaaggagttgagcccttgaaagatgacagtggtcttcttgccttcatgcttggccctctctcctcaaaagggcaatgttggtacaaaattccatctcagccactttcgaggagttatcttcattagctatatccatcctttaatccaacacacacctgcaatgattactgtgcaactattttgcttaattttttatttgaaaaaatgtatttaaaagtccaacaactttttaatataaattacgactctcaaacccattcccatcactttattagtgatggtagcatacatattagagaaggtagctaaaggcaagagagcaccaaaggaaaaagactgtccaaagaacaggtattagaatgaggccgaagatcacggtgaccagagatttctaggagtctctaacctttccaccctatcctgttaaccctttagatctctagtataacactcaggctactgaggtattttagagcaacaagctgggttactttcagagcaaccagcttgactggaactgagagtaaattgggaatgtatgaccaatcttagaccctgaaaaatggcagaaaatacatggaaatttg

SEQ ID NO: 1275 - DNA, 1967 bp, Homo sapiens
  source 1..1967: mol_type = genomic DNA
tctgcctgctgtcgggggcgggctggccaggccgaggccggagcaggcaggcatcccccggagttgtctcttttcatgccagcgccaacaggaggctgtctggacacactgattactcactcaccagcctccctcttttgtccaccagcccagcctgactcctggagattgtgaatagctccatccagcctgagaaacaagccgggtggctgagccaggctgtgcacggagtgcctgacgggcccaacagacccatgctgcatccagagacctcccctggccgggggcatctcctggctgtgctcctggccctccttggcaccgcctgggcagaggtgtggccaccccagctgcaggagcaggctccgatggccggagccctgaacaggaaggagagtttcttgctcctctccctgcacaaccgcctgcgcagctgggtccagccccctgcggctgacatgcggaggctggactggagtgacagcctggcccaactggctcaagccagggcagccctctgtggaatcccaaccccgagcctggcgtccggcctgtggcgcaccctgcaagtgggctggaacatgcagctgctgcccgcgggcttggcgtcctttgttgaagtggtcagcctatggtttgcagaggggcagcggtacagccacgcggcaggagagtgtgctcgcaacgccacctgcacccactacacgcagctcgtgtgggccacctcaagccagctgggctgtgggcggcacctgtgctctgcaggccaggcagcgatagaagcctttgtctgtgcctactcccccagaggcaactgggaggtcaacgggaagacaatcgtcccctataagaagggtgcctggtgttcgctctgcacagccagtgtctcaggctgcttcaaagcctgggaccatgcaggggggctctgtgaggtccccaggaatccttgtcgcatgagctgccagaaccatggacgtctcaacatcagcacctgccactgccactgtccccctggctacacgggcagatactgccaagtgaggtgcagcctgcagtgtgtgcacggccggttccgggaggaggagtgctcgtgcgtctgtgacatcggctacggggagcccagtgtgccaccaaggtgcattttcccttccacacctgtgacctgaggatcgacggagactgcttcatggtgtcttcagaggcagacacctattacagagccaggatgaaatgtcagaggaaaggcggggtgctggcccagatcaagagccagaaagtgcaggacatcctcgccttctatctgggccgcctggagaccaccaacgaggtgattgacagtgacttcgagaccaggaacttctggatcgggctcacctacaagaccgccaaggactccttccgctgggccacaggggagcaccaggccttcaccagttttgcctttgggcagcctgacaaccacgggtttggcaactgcgtggagctgcaggcttcagctgccttcaactggaacaaccagcgctgcaaaacccgaaaccgttacatctgccagtttgcccaggagcacatctcccggtggggcccagggtcctgaggcctgaccacatggctccctcgcctgccctgggagcaccggctctgcttacctgtccgcccacctgtctggaacaagggccaggttaagaccacatgcctcatgtccaaagaggtctcagaccttgcacaatgccagaagttgggcagagagaggcagggaggccagtgagggccagggagtgagtgttagaagaagctggggcccttcgcctgcttttgattgggaagatgggcttcaattagatggcaaaggagaggacaccgccagtggtccaaaaaggctgctctcttccacctggcccagaccctgtggggcagcggagcttccctgtggcatgaaccccacagggtattaaattatgaatcagctg

SEQ ID NO: 1276 - DNA, 1479 bp, Homo sapiens
  source 1..1479: mol_type = genomic DNA
tctgaggccgtgtacctcaacgactccacctatgacggacataccgtgggcggactgcagtatgggggtctgggccagctggcagatggtgtggtggggctggatgactttaggaagagtcaggagctgcgggtctggccaggctatgactatgtgggatggagcaaccacagcttctccagtggctatgtggagatggagtttgagtttgaccggctgagggccttccaggctatgcaggtccactgtaacaacatgcacacgctgggagcccgtctgcctggcggggtggaatgtcgcttccggcgtggccctgccatggcctgggagggggagcccatgcgccacaacctagggggcaacctgggggaccccagagcccgggctgtctcagtgccccttggcggccgtgtggctcgctttctgcagtgccgcttcctctttgcggggccctggttactcttcagcgaaatctccttcatctctgatgtggtgaacaattcctctccggcactgggaggcaccttcccgccagccccctggtggccgcctggcccacctcccaccaacttcagcagcttggagctggagcccagaggccagcagcccgtggccaaggccgaggggagcccgaccgccatcctcatcggctgcctggtggccatcatcctgctcctgctgctcatcattgccctcatgctctggcggctgcactggcgcaggctcctcagcaaggtcctagagagccacccccgtaccaggagccccggcctcgtgggaatccgccccactccgctccctgtgtccccaatggctctgcgttgctgctctccaatccagcctaccgcctccttctggccacttacgcccgtccccctcgaggcccgggcccccccacacccgcctgggccaaacccaccaacacccaggggcgtcaccgggggcaacacctatgctgtgcctgcactgcccccaggggcagtcggggatgggccccccagagtggatttccctcgatctcgactccgcttcaaggagaagcttggcgagggccagtttggggaggtgcacctgtgtgaggtcgacagccctcaagatctggtcagtcttgatttcccccttaatgtgcgtaagggacaccctttgctggtagctgtcaagatcttacggccagatgccaccaagaatgccaggaatgatttcctgaaagaggtgaagatcatgtcgaggctcaaggaccccaacatcattcggctgctgggcgtgtgtgtgcaggacgaccccctctgcatgattactgactacatggagaacggcgacctcaaccagttcctcagtgcccaccagctggaggacaaggcagccgagggggcccctggggacgggcaggctgcgcaggggcccaccatcagctacccaatgctgctgcatgtggcagcccagatcgcctccggcatgcgctatctggccacactcaac

SEQ ID NO: 1277 - DNA, 2205 bp, Homo sapiens
  source 1..2205: mol_type = genomic DNA
aaaacaggaaataggtgtttcatatatacggctctaaccttctctctctgcaccttccttctgtcaatagatgaaacaaatacttcatcctgctctggaaaccactgatccctgttccaccggttttgttttcccagcaatgacattattcccagtgctgttgttcctggttgctgggctgcttccatcttttccagcaaatgaagataaggatcccgcttttactgctttgttaaccacccaaacacaagtgcaaagggagattgtgaataagcacaatgaactgaggagagcagtatctccccctgccagaaacatgctgaagatggaatggaacaaagaggctgcagcaaatgcccaaaagtgggcaaaccagtgcaattacagacacagtaacccaaaggatcgaatgacaagtctaaaatgtggtgagaatctctacatgtcaagtgcctccagctcatggtcacaagcaatccaaagctggtttgatgagtacaatgattttgactttggtgtagggccaaagactcccaacgcagtggttggacattatacacaggttgtttggtactcttcatacctcgttggatgtggaaatgcctactgtcccaatcaaaaagttctaaaatactactatgtttgccaatattgtcctgctggtaattgggctaatagactatatgtcccttatgaacaaggagcaccttgtgccagttgcccagataactgtgacgatggactatgcaccaatggttgcaagtacgaagatctctatagtaactgtaaaagtttgaagctcacattaacctgtaaacatcagttggtcagggacagttgcaaggcctcctgcaattgttcaaacagcatttattaaatacgcattacacaccgagtagggctatgtagagaggagtcagattatctacttagatttggcatctacttagatttaacatatactagctgagaaattgtaggcatgtttgatacacatttgatttcaaatgtttttcttctggatctgctttttattttacaaaaatatttttcatacaaatggttaaaaagaaacaaaatctataacaacaactttggatttttatatataaactttgtgatttaaatttactgaatttaattagggtgaaaattttgaaagttgtattctcatatgactaagttcactaaaaccctggattgaaagtgaaaattatgttcctagaacaaaatgtacaaaaagaacaatataattttcacatgaacccttggctgtagttgcctttcctagctccactctaaggctaagcatcttcaaagacgttttcccatatgctgtcttaattcttttcactcattcacccttcttcccaatcatctggctggcatcctcacaattgagttgaagctgttcctcctaaaacaatcctgacttttattttgccaaaatcaatacaatcctttgaattttttatctgcataaattttacagtagaatatgatcaaaccttcatttttaaacctctcttctctttgacaaaacttccttaaaaaagaatacaagataatataggtaaataccctccactcaaggaggtagaactcagtcctctcccttgtgagtcttcactaaaatcagtgactcacttccaaagagtggagtatggaaagggaaacatagtaactttacaggggagaaaaatgacaaatgacgtcttcaccaagtgatcaaaattaacgtcaccagtgataagtcattcagatttgttctagataatctttctaaaaattcataatcccaatctaattatgagctaaaacatccagcaaactcaagttgaaggacattctacaaaatatccctggggtattttagagtattcctcaaaactgtaaaaatcatggaaaataagggaatcctgagaaacaatcacagaccacatgagactaaggagacatgtgagccaaatgcaatgtgcttcttggatcagatcctggaacagaaaaagatcagtaatgaaaaaactgatgaagtctgaatagaatctggagtatttttaacagtagtgttgatttcttaatcttgataaatatagcagggtaatgtaagatgataacgttagagaaactgaaactgggtgagggctatctaggaattctctgtactatcttaccaaattttcggtaagtctaagaaagcaatgc

SEQ ID NO: 1278 - DNA, 573 bp, Homo sapiens
  source 1..573: mol_type = genomic DNA
ctccggggagcggcggcggacgcgcggctcccacccctcccctctcacgggctctcccctccccagtgtggccgcgaccctaccctctgcaaggcgatggcccgcgccccgagcgcaggctagcgtgcctgggtgcccggccatgggctgtatcggctctcggagcccggcgggtcagggtgaatgttggagacacagtcgcgatgctgcccaagtcccggcgagccctaactatccaggagatcgctgcgctggccaggtcctccctgcatggtatttcccaggtggtgaaggaccacgtgaccaagcctaccgccatggcccagggccgagtggctcacctcattgagtggaagggctggagcaagccgagtgactcacctgctgccctggaatcagccttttcctcctattcagacctcagcgagggcgaacaagaggctcgctttgcagcaggagtggctgagcagtttgccatcgcggaagccaagctccgagcatggtcttcggtggatggcgaggactccactgatgactcctatgatgaggactttgctgggggaatggacacag

SEQ ID NO: 1279 - DNA, 726 bp, Homo sapiens
  source 1..726: mol_type = genomic DNA
atgggggccgtcatgggcaccttctcatctctgcaaaccaaacaaaggcgaccctcgaaagataagattgaagatgagctggagatgaccatggtttgccatcggcccgagggactggagcagctcgaggcccagaccaacttcaccaagagggagctgcaggtcctttatcgaggcttcaaaaatgagtgccccagtggtgtggtcaacgaagacacattcaagcagatctatgctcagtttttccctcatggagccctgccttgtttggaaggttctccctgtgtggaattcctgcccccatcacctgccctccttttctgccttgtagatgccagcacgtatgcccattacctcttcaatgccttcgacaccactcagacaggctccgtgaagttcgaggactttgtaaccgctctgtcgattttattgagaggaactgtccacgagaaactaaggtggacatttaatttgtatgacatcaacaaggacggatacataaacaaagaggagatgatggacattgtcaaagccatctatgacatgatggggaaatacacatatcctgtgctcaaagaggacactccaaggcagcatgtggacgtcttcttccagaaaatggacaaaaataaagatggcatcgtaactttagatgaatttcttgaatcatgtcaggaggacgacaacatcatgaggtctctccagctgtttcaaaatgtcatgtaa

SEQ ID NO: 1280 - DNA, 799 bp, Homo sapiens; identical to SEQ ID NO: 1175
  source 1..799: mol_type = genomic DNA

SEQ ID NO: 1281 - DNA, 777 bp, Homo sapiens
  source 1..777: mol_type = genomic DNA
gtgggatagtagcgtgtccacattgtcctttgagaatgagaagtcatcctggagcacagctcttcccacgctccgggcccacacacccagcctcactccatcaaaggagccccgctgcctgcccacccaccctgggtgctttctggcttgcagtgctcttggcagacatgaggcaacgattgctcccgtccgtcaccagccttctccttgtggccctgctgtttccaggatcgtctcaagccagacatgtgaaccactcagccactgaggctctcggagaactcagggaaagagcccctgggcaaggcacaaacgggtttcagctgctacgccacgcagtgaaacgggacctcttaccaccgcgcaccccaccttaccaagtgcacatctctcaccaggaggctcgaggaccctcatttaagatctgcgtgggctttttagggcctagatgggccaggggatgttccactgggaattagaaataccatctgccgtatgcagcaagggatctgcagactttttttctgccattctggtgagaaaaagcgtgacattagctctgatccctggaataggtgttgcgtatcaaatacagatgaagaaggaaaagagaaaccagagatggatggcagatctgggatctaaaatataagctcccggaaggcagggatgttgaagtatcccaagggcttaaaggaatgtgtggcttatagtaggtgttcaataaatatttgttgaatgaatttagcaccaaaggtgaagagctgataaaagaca

SEQ ID NO: 1282 - DNA, 950 bp, Homo sapiens
  source 1..950: mol_type = genomic DNA
ggctctgagaacaagagcttgaggggaagactgttaaccccatccacgccaccagaattagctctttcccttttggtttgcaagcactgcctgtaaagccctcgcatgagaggccagcctgctagggaaatccaggaatctgcaacaaaaacgatgacagtctgaaatactctctggtgccaacctccaaattctcgtctgtcacttcagacccccactagttgacagagcagcagaatttcaactccagtagacttgaatatgcctctgggcaaagaagcagagctaacgaggaaagggatttaaagagtttttcttgggtgtttgtcaaacttttattccctgtctgtgtgcagaggggattcaacttcaatttttctgcagtggctctgggtccagccccttacttaaaggccataagatgttttattgaaagaaactttcaatatcaagtaatccaaccaaccttctaagataagccttttccttcaacacaaagaagtgcattttgccaaatctggaaagcatgaagactgggctttttttcctatgtctcttgggaactgcagctgcaatcccgacaaatgcaagattattatctgatcattccaaaccaactgctgaaacggtagcacctgacaacactgcaatccccagtttaagggctgaagctgaagaaaatgaaaaagaaacagcagtatccacagaagacgattcccaccataaggctgaaaaatcatcagtactaaagtcaaaagaggaaagccatgaacagtcagcagaacagggcaagagttctagccaagagctgggattgaaggatcaagaggacagtgatggtcacttaagtgtgaatttggagtatgcaccaactgaaggtacattggacataaaagaagatatgagtgagcctcaggagaaaaaactctcagagaacactgattttttgg

SEQ ID NO: 1283 - DNA, 2904 bp, Homo sapiens
  source 1..2904: mol_type = genomic DNA
cttagccgccattgccgggcctgcctggccaccctgcgcagcggccttgcgtcctctccgggggcggagcgggtcggcgggcctgacagggaacctccctgaccgagcccacgtctccccacggccagagaaatctccggcccggcccgcatcgccagcccccaggcccggaggaacggcccgagcccaggagaaccacatcttcgtcccagccccggaggctcctgtgggcaagatcgtgagccaacgggttcctgaggcccctcctggccaggcagggtttccccgcgcgtttccgaggagccctgcctggccgggcggctggacaaacaggtcgtagcaccgatcgcgcccgcccccagcaggggtcccgcacaggcttgcccctgacccccacccaaacctgtccttccgctttgcccccaaacagtgcacttgccggcggtcccaacccagcaggagaagtggacatgaggttggcaggccctctccgcattgtggtcctagtcgtcagtgtgggtgtcacatggatcgtggtcagcatcctcctgggtgggcctggcagtggctttcctcgcatccagcaactcttcaccagtccagagagctcggtgactgcagcgccacgggccaggaagtacaagtgtggcctgccccagccgtgtcctgaggagcacctggccttccgcgtggtcagcggggccgccaacgtcattgggcccaagatctgcctcgaggacaagatgctgatgagcagcgtcaaggacaacgtgggccgcgggctgaacatcgccctggtgaacgatgtcaacgacctgttgaagtttattcggccactgcacgaaggcaccctggtgttcgtggcatcctacgacgacccagccaccaagatgaatgaagagaccagaaagctcttcagtgagctgggcagcaggaacgccaaggagctggccttccgggacagctgggtgtttgtcggggccaagggtgtgcagaacaagagcccctttgagcagcacgtgaagaacagtaagcacagcaacaagtacgaaggctggcccgaggcgctggagatggaaggctgtatcccgcggagaagcacggccagctagcacggccagtgccaggaccgggccgagggaggccagaccaagggaggcacgcgcgctgccgggcggacagaggctgaggctcacaccccacacccgggcaggagcgctccctggccccaacacatcggggctccgaggcagtgaccagaacgtggtctcaaggtggtgggggctatgggggctgcagggggtagccctgccgcactttgtcacgggagcccagggtacccgcctccttttcgtaacactgttccccccggtcagcccatctagccctgtcctccattcctcacgccatctccatccccatcttgagtcctggaacggccctgggtgcctgcccctcactgtgcaactctgggagcagcccggcaggttggggcgtcttccagaacctctcccttctggagccactctgcactgcgggctaaacatgtttccagtgtgattccttccagtgagccaaacccggtggctgcttcatgagcctgactgcctctcgcctgctctcagcaggaagggacccctggagcaggctggcccggggtggtgaagtagctggagcccgatcacagtcccgcggtttgtcagggggcccaccttctagatgaccccttaataaagtgatggccccacagaagaaatgccttcagatgctgttgtcagtgcggagtcagaggtggcggtgtcctctggggtgcgggaggacagattccagagtcttaaccaacctgctcccacagcccgagcagacagccttttgtctccagggctcctgccaccaacaggccccgctgcgactgagatgtgactcaagcagtcaacagagcagtgggactcttttcgtctggcagagaagattgcacactcgggctgcaggaagctgactcaacaactccctctgacccagtgcaggcctgtacggacagggacagggattgggattaacaccagcccaggcccccaccacaccccatcatcatccaggagcacatgtcgcccacagacttcggctgcctttgaagtcagggttgtgaggggtcgagtcacttgggctttttgcgtctctcccaggttacggttaatacctccctttgctaagcgagagccagcaaattagaagcaattttgctggaatatcaactccagaggcccagaagcagtctgagttcagcgaaaggagagaaggcagttcctagatgggaggcactgtggtgtccttcatggggcgacgttaggggcgatggacttaggagccaatcccaggaagagtacagagcgcagacagagcctcagaagacaaaagtgcttctggagcaggcacatgtggggttggaggcacaggggtgccctggaggagcggctcaccagggaggaaacgatggtgatgccagtcctgcctctgcaccaggaactttctacgtgtattccattccttttttgtttttgtaaactttccttcttagagccattttaggttcacagcaaaactgagtgaaaaggtcagagttcctgtgtgccccctgccagcccccagcttcccatctgttgctgtcaatgaaccagtatcggtgctcacatgaggcttcagtttgctgttggacgttcagtgggtttggacaaaaatgtgtaatgatggatccactgcaggatcatacacacttcactctttagacttgctatggaaaattgcaaacatctccaggagacagactagcatacaatcggcccttcatatccatgggggttccatgtccacagattcaaccaaccacagattggaaatacttgg

SEQ ID NO: 1284 - DNA, 4299 bp, Homo sapiens; identical to SEQ ID NO: 841
  source 1..4299: mol_type = genomic DNA

SEQ ID NO: 1285 - DNA, 485 bp, Homo sapiens; identical to SEQ ID NO: 1263
  source 1..485: mol_type = genomic DNA

SEQ ID NO: 1286 - DNA, 507 bp, Homo sapiens
  source 1..507: mol_type = genomic DNA
gatgaagacagatatacgacgtgctggcccaagacatggttagcaaaagactgtcctgctctccgaattatatctgtggagtatgacaccagcctcagcgactggagagcaaggtgccctatggaaagaaagtccattgcattcagaagcaacgaacttcttaggaagctcagagctgctggtgttggggataggccagtggtttggatatcacatagcatgggaggtcttcttgtcaaaaagatgctgttggaagcctctacgaagccagaaatgagtactgttatcaacaataccagaggaataattttttatagtgtccctcatcatggatcacgtttggctgaatactctgttaatattcgctatcttctcttcccctcgttggaagtcaaagaactcagcaagggtaatactttttgtcataaaggaaattggggttatattaacatcagttacacagagaagaagaaaaagtttcttccttgaatgtattatctcatttta

SEQ ID NO: 1287 - DNA, 1771 bp, Homo sapiens
  source 1..1771: mol_type = genomic DNA
ataagccaggcccaccattccaactctttctcctttttggcttgtaggccgcacctactctgcatatgccccgcccctcactccaggtgtcgcccacttaactgaagatccaggatcccctccttaaggtgcccctggccggcagcgccgccgtggtcccggagcgcggcgacatgccggagctggtggtgaccgcgctgctggcgccgtcgcgcctgtcgctgaagctgctgcgcgccttcatgtggagcctggtgttctcggtggcgctggtggccgcggcggtctacggctgcatagcgctcacgcacgtgctgtgccggccccggcgcggctgctgcgggcgccgtcggagcgcgtcccccgcctgcctgagcgacccctcgctgggtgagcacggtttcctgaacctcaagagctcgggcctgcgtctgcactatgtctcggctggacgaggtaacggacccctcatgctgtttctgcacggcttccctgagaactggttctcctggcgttaccagctccgggagttccagagccgcttccatgttgtggctgtggacttgcgaggctatggcccctcggatgcacctcgggatgtggactgctacacaatcgacctgctgctggtggacatcaaagatgtcatcctaggcctgggttactcgaagtgcatccttgtggcccatgactggggtgccctccttgcctggcatttctccatctactacccatccctggtcgagcggatggttgtggtcagtggtgcccccatgtcggtgtaccaagactattccctgcaccacatcagccagttcttccgttcccactacatgttcctgttccagctgccctggctgcccgagaagctgctgtctatgtctgactttcagattctgaagaccaccctcacccaccgcaagacaggcatcccatgcttgacccccagcgagctcgaggccttcctttataacttctcacagcctggtggcctcactgggcccctcaactactaccgaaacctcttcaggaacttccccctggaaccccaggagctgaccacacccacattgctgctgtggggggagaaggacacttacttggagctggggctggtggaagccatcggcagccgctttgtgccgggccgcttggaggcccacatcctgccaggcatagggcattggatcccacagagcaacccccaggagatgcaccagtacatgtgggccttcttgcaagacctgctggactagtggtccttgctggcctgcccaggaggcatggatactcaggaaggaacacacacccattatctgtgtgtgcctgggagtccatacaatgtccatacatgggtgaactcttgaatcgctcataggcatgggactcctggatcccacacaagcgcacctatgggtgcctcgggacacaccaacccctatactcacacacaggcatggatgcatgtgtgtgtaacaaacactttgaccctgggaactgggtatacctctcttccagtggagccagatgccgagaccgagtgtcccacctcctcccttcctggggcctcactctgcgctttgccaaagtcgcttctctgccatagctgcacagaccttaaaccctgaccttcctgtccctgccttcgacctcctgcctgggtcttcagctcagtgctactctgaatacaatactgctgaccacatttggctacttcagcttaaatgtatgttaattgaaatgaaatacaatgaaaatgcagtgctcagtc

SEQ ID NO: 1288 - DNA, 950 bp, Homo sapiens; identical to SEQ ID NO: 1126
  source 1..950: mol_type = genomic DNA

SEQ ID NO: 1289 - DNA, 785 bp, Homo sapiens
  source 1..785: mol_type = genomic DNA
aaggggcggaggctgggcggcgttgctctgcgctctgcggctgacggcgcttttgtctccgggtccagaggcctttcagaaggagaaggcagctctgtttctctgcagaggagtagggtcctttcagccatgaagcatgtgttgaacctctacctgttaggtgtggtactgaccctactctccatcttcgttagagtgatggagtccctagagggcttactagagagcccatcgcctgggacctcctggaccaccagaagccaactagccaacacagagcccaccaagggccttccagaccatccatccagaagcatgtgataagacctccttccatactggccatattttggaacactgacctagacatgtccagatgggagtcccattcctagcagacaagctgagcaccgttgtaaccagagaactattactaggccttgaagaacctgtctaactggatgctcattgcctgggcaaggcctgtttaggccggttgcggtggctcatgcctgtaatcctagcactttgggaggctgaggtgggtggatcacctgaggtcaggagttcgagaccagcctcgccaacatggcgaaaccccatctctactaaaaatacaaaagttagctgggtgtggtggcagaggcctgtaatcccagctccttgggaggctgaggcgggagaattgcttgaacccggggacggaggttgcagtgagccgagatcgcactgctgtacccagcctgggccacagtgcaagactccatctcaaaaaaaaaagaaaa

SEQ ID NO: 1290 - DNA, 5460 bp, Homo sapiens
  source 1..5460: mol_type = genomic DNA
agagtcaactctgccccgaggcctagcttggccagaaggtagcagacagacagacggatctaacctctcttggatcctccagccatgaggctgctctgggggctgatctgggcatccagcttcttcaccttatctctgcagaagcccaggttgctcttgttctctccttctgtggttcatctgggggtccccctatcggtgggggtgcagctccaggatgtgccccgaggacaggtagtgaaaggatcagtgttcctgagaaacccatctcgtaataatgtcccctgctccccaaaggtggacttcacccttagctcagaaagagacttcgcactcctcagtctccaggtgcccttgaaagatgcgaagagctgtggcctccatcaactcctcagaggccctgaggtccagctggtggcccattcgccatggctaaaggactctctgtccagaacgacaaacatccagggtatcaacctgctcttctcctctcgccgggggcacctctttttgcagacggaccagcccatttacaaccctggccagcgggttcggtaccgggtctttgctctggatcagaagatgcgcccgagcactgacaccatcacagtcatggtggagaactctcacggcctccgcgtgcggaagaaggaggtgtacatgccctcgtccatcttccaggatgactttgtgatcccagacatctcagagccagggacctggaagatctcagcccgattctcagatggcctggaatccaacagcagcacccagtttgaggtgaagaaatatgtccttcccaactttgaggtgaagatcacccctggaaagccctacatcctgacggtgccaggccatcttgatgaaatgcagttagacatccaggccaggtacatctatgggaagccagtgcagggggtggcatatgtgcgctttgggctcctagatgaggatggtaagaagactttctttcgggggctggagagtcagaccaagctggtgaatggacagagccacatttccctctcaaaggcagagttccaggacgccctggagaagctgaatatgggcattactgacctccaggggctgcgcctctacgttgctgcagccatcattgagtatccaggtggggagatggaggaggcagagctcacatcctggtattttgtgtcatctcccttctccttggatcttagcaagaccaagcgacaccttgtgcctggggcccccttcctgctgcaggccttggtccgtgagatgtcaggctccccagcttctggcattcctgtcaaagtttctgccacggtgtcttctcctgggtctgttcctgaagtccaggacattcagcaaaacacagacgggagcggccaagtcagcattccaataattatccctcagaccatctcagagctgcagctctcagtatctgcaggctccccacatccagcgatagccaggctcactgtggcagccccaccttcaggaggccccgggtttctgtctattgagcggccggattctcgacctcctcgtgttggggacactctgaacctgaacttgcgagccgtgggcagtggggccaccttttctcattactactacatgatcctatcccgagggcagatcgtgttcatgaatcgagagcccaagaggaccctgacctcggtctcggtgtttgtggaccatcacctggcaccctccttctactttgtggccttctactaccatggagaccacccagtggccaactccctgcgagtggatgtccaggctggggcctgcgagggcaagctggagctcagcgtggacggtgccaagcagtaccggaacggggagtccgtgaagctccacttagaaaccgactccctagccctggtggcgctgggagccttggacacagctctgtatgctgcaggcagcaagtcccacaagcccctcaacatgggcaaggtctttgaagctatgaacagctatgacctcggctgtggtcctgggggtggggacagtgcccttcaggtgttccaggcagcgggcctggccttttctgatggagaccagtggaccttatccagaaagagactaagctgtcccaaggagaagacaacccggaaaaagagaaacgtgaacttccaaaaggcgattaatgagaaattgggtcagtatgcttccccgacagccaagcgctgctgccaggatggggtgacacgtctgcccatgatgcgttcctgcgagcagcgggcagcccgcgtgcagcagccggactgccgggagcccttcctgtcctgctgccaatttgctgagagtctgcgcaagaagagcagggacaagggccaggcgggcctccaacgagccctggagatcctgcaggaggaggacctgattgatgaggatgacattcccgtgcgcagcttcttcccagagaactggctctggagagtggaaacagtggaccgctttcaaatattgacactgtggctccccgactctctgaccacgtgggagatccatggcctgagcctgtccaaaaccaaaggcctatgtgtggccaccccagtccagctccgggtgttccgcgagttccacctgcacctccgcctgcccatgtctgtccgccgctttgagcagctggagctgcggcctgtcctctataactacctggataaaaacctgactgtgagcgtccacgtgtccccagtggaggggctgtgcctggctgggggcggagggctggcccagcaggtgctggtgcctgcgggctctgcccggcctgttgccttctctgtggtgcccacggcagccgccgctgtgtctctgaaggtggtggctcgagggtccttcgaattccctgtgggagatgcggtgtccaaggttctgcagattgagaaggaaggggccatccatagagaggagctggtctatgaactcaaccccttggaccaccgaggccggaccttggaaatacctggcaactctgatcccaatatgatccctgatggggactttaacagctacgtcagggttacagcctcagatccattggacactttaggctctgagggggccttgtcaccaggaggcgtggcctccctcttgaggcttcctcgaggctgtggggagcaaaccatgatctacttggctccgacactggctgcttcccgctacctggacaagacagagcagtggagcacactgcctcccgagaccaaggaccacgccgtggatctgatccagaaaggctacatgcggatccagcagtttcggaaggcggatggttcctatgcggcttggttgtcacggggcagcagcacctggctcacagcctttgtgttgaaggtcctgagtttggcccaggagcaggtaggaggctcgcctgagaaactgcaggagacatctaactggcttctgtcccagcagcaggctgacggctcgttccaggacctctctccagtgatacataggagcatgcaggggggtttggtgggcaatgatgagactgtggcactcacagcctttgtgaccatcgcccttcatcatgggctggccgtcttccaggatgagggtgcagagccattgaagcagagagtggaagcctccatctcaaaggcaagctcatttttgggggagaaagcaagtgctgggctcctgggtgcccacgcagctgccatcacggcctatgccctgacactgaccaaggcccctgcggacctgcggggtgttgcccacaacaacctcatggcaatggcccaggagactggagataacctgtactggggctcagtcactggttctcagagcaatgccgtgtcgcccaccccagctcctcgcaacccatccgaccccatgccccaggccccagccctgtggattgaaaccacagcctacgccctgctgcacctcctgcttcacgagggcaaagcagagatggcagaccaggctgcggcctggctcacccgtcagggcagcttccaagggggattccgcagtacccaagacacggtgattgccctggatgccctgtctgcctactggattgcctcccacaccactgaggagaggggtctcaatgtgactctcagctccacaggccggaatgggttcaagtcccacgcgctgcagctgaacaaccgccagattcgcggcctggaggaggagctgcagttttccttgggcagcaagatcaatgtgaaggtgggaggaaacagcaaaggaaccctgaaggtccttcgtacctacaatgtcctggacatgaagaacacgacctgccaggacctacagatagaagtgacagtcaaaggccacgtcgagtacacgatggaagcaaacgaggactatgaggactatgagtacgatgagcttccagccaaggatgacccagatgcccctctgcagcccgtgacacccctgcagctgtttgagggtcggaggaaccgccgcaggagggaggcgcccaaggtggtggaggagcaggagtccagggtgcactacaccgtgtgcatctggcggaacggcaaggtggggctgtctggcatggccatcgcggacgtcaccctcctgagtggattccacgccctgcgtgctgacctggagaagctgacctccctctctgaccgttacgtgagtcactttgagaccgaggggccccacgtcctgctgtattttgactcggtccccacctcccgggagtgcgtgggctttgaggctgtgcaggaagtgccggtggggctggtgcagccggccagcgcaaccctgtacgactactacaaccccgagcgcagatgttctgtgttttacggggcaccaagtaagagcagactcttggccaccttgtgttctgctgaagtctgccagtgtgctgaggggaagtgccctcgccagcgtcgcgccctggagcggggtctgcaggacgaggatggctacaggatgaagtttgcctgctactacccccgtgtggagtacggcttccaggttaaggttctccgagaagacagcagagctgctttccgcctctttgagaccaagatcacccaagtcctgcacttcaccaaggatgtcaaggccgctgctaatcagatgcgcaacttcctggttcgagcctcctgccgccttcgcttggaacctgggaaagaatatttgatcatgggtctagatggggccacctatgacctcgagggacacccccagtacctgctggactcgaatagctggatcgaggagatgccctctgaacgcctgtgccggagcacccgccagcgggcagcctgtgcccagctcaacgacttcctccaggagtatggcactcaggggtgccaggtgtgagggctgccctcccacctccgctgggaggaacctgaacctgggaaccatgaagctggaagcactgctgtgtccgctttcatgaacacagcctgggaccagggcatattaaaggcttttggcagcaaagtgtcagtgttggca

SEQ ID NO: 1291 - DNA, 817 bp, Homo sapiens
  source 1..817: mol_type = genomic DNA
ggctgatcgcagtccggaggtggtccattatggctgacatgcaaaatctggtagaaagattggagagggcagtgggccgcctggaggcagtatctcatacctctgacatgcaccgtgggtatgcagacagtccttcaaaaggagcagctccatatgtgcaggcatttgactcgctgcttgctggtcctgtggcagagtacttgaagatcagtaaagagattgggggagacgtgcagaaacatgcggagatggtccacacaggtttgaagttggagcgagctctgttggttacagcttctcagtgtcaacagccagcagaaaataagctttccgatttgttggcacccatctcagagcagatcaaagaagtgataacctttcgggagaagaaccgaggcagcaagttgtttaatcacctgtcagctgtcagcgaaagtatccaggccctgggctgggtggctatggctcccaagcctggcccttatgtgaaagaaatgaatgatgccgccatgttttatacaaaccgagtcctcaaagagtacaaagatgtggataagaagcatgtagactgggtcaaagcttatttaagtatatggacagagctgcaggcttacattaaggagttccataccaccggactggcctggagcaaaacggggcctgtggcaaaagaactgagcggactgccatctggaccctctgccggatcatgtcctcctccccctccaccatgcccccctcctcccccagtctctaccatttcatgctcatatgagtctgcttcccgctcatcactgttcgcgcagattaatcaggg

SEQ ID NO: 1292 - DNA, 580 bp, Homo sapiens
  source 1..580: mol_type = genomic DNA
cctgggcctagattccccagctgctgttctctggagggagatgctgcccccacccccttaggcccgagggatcaggagctatgggaccagaggccctgtcatctttactgctgctgctcttggtggcaagtggagatgctgacatgaagggacattttgatcctgccaagtgccgctatgccctgggcatgcaggaccggaccatcccagacagtgacatctctgcttccagctcctggtcagattccactgccgcccgccacagcaggttggagagcagtgacggggatggggcctggtgccccgcagggtcggtgtttcccaaggaggaggagtacttgcaggtggatctacaacgactgcacctggtggctctggtgggcacccagggacggcatgccgggggcctgggcaaggagttctcccggagctaccggctgcgttactcccgggatggtcgccgctggatgggctggaaggaccgctggggtcaggaggtgatctcaggcaatgaggaccctgagggagtggtgctgaaggaccttgggccccccatggttgcccgactggttcgcttcta

SEQ ID NO: 1293 - DNA, 3829 bp, Homo sapiens
  source 1..3829: mol_type = genomic DNA
agcattttgagggtggaggccgtggatgccgactgctcccctcagttcagccagatttgcagctacgaaatcatcactccagacgtgccctttactgttgacaaagatggttatataaaaaacacagagaaattaaactacgggaaagaacatcaatataagctgaccgtcactgcctatgactgtgggaagaaaagagccacagaagatgttttggtgaagatcagcattaagcccacctgcacccctgggtggcaaggatggaacaacaggattgagtatgagccgggcaccggcgcgttggccgtctttccaaatatccacctggagacatgtgacgagccagtcgcctcagtacaggccacagtggagctagaaaccagccacatagggaaaggctgcgaccgagacacctactcagagaagtccctccaccggctctgtggtgcggccgcgggcactgccgagctgctgccatccccgagtggatccctcaactggaccatgggcctgcccaccgacaatggccacgacagcgaccaggtgtttgagttcaacggcacccaggcagtgaggatcccggatggcgtcgtgtcggtcagccccaaagagccgttcaccatctcggtgtggatgagacatgggccattcggcaggaagaaggagacaattctttgcagttctgataaaacagatatgaatcggcaccactactccctctatgtccacgggtgccggctgatcttcctcttccgtcaggatccttctgaggagaagaaatacagacctgcagagttccactggaagttgaatcaggtctgtgatgaggaatggcaccactacgtcctcaatgtagaattcccgagtgtgactctctatgtggatggcacgtcccacgagcccttctctgtgactgaggattacccgctccatccatccaagatagaaactcagctcgtggtgggggcttgctggcaaggtggcgacctgcacatgacccagtttttccgaggcaatctggctggcttaactctccgttccgggaaactcgcggataagaaggtgatcgactgtctgtatacctgcaaggaggggctggacctgcaggtcctcgaagacagtggcagaggcgtgcagatccaagcacaccccagccagttggtattgaccttggagggagaagacctcggggaattggataaggccatgcagcacatctcgtacctgaactcccggcagttccccacgcccggaattcgcagactcaaaatcaccagcacaatcaagtgttttaacgaggccacctgcatttcggtccccccggtagatggctacgtgatggttttacagcccgaggagcccaagatcagcctgagtggcgtccaccattttgcccgagcagcttctgaatttgaaagctcagaaggggtgttccttttccctgagcttcgcatcatcagcaccatcacgagagaagtggagcctgaaggggacggggctgaggaccccacagttcaagaatcactggtgtccgaggagatcgtgcacgacctggatacctgtgaggtcacggtggagggagaggagctgaaccacgagcaggagagcctggaggtggacatggcccgcctgcagcagaagggcattgaagtgagcagctctgaactgggcatgaccttcacaggcgtggacaccatggccagctacgaggaggttttgcacctgctgcgctatcggaactggcatgccaggtccttgcttgaccggaagtttaagctcatctgctcagagctgaatggccgctacatcagcaacgaatttaaggtggaggtgaatgtaatccacacggccaaccccatggaacacgccaaccacatggctgcccagccacagttcgtgcacccggaacaccgctcctttgttgacctgtcaggccacaacctggccaacccccacccgttcgcagtcgtccccagcactgcgacagttgtgatcgtggtgtgcgtcagcttcctggtgttcatgattatcctgggggtatttcggatccgggccgcacatcggcggaccatgcgggatcaggacaccgggaaggagaacgagatggactgggacgactctgccctgaccatcaccgtcaaccccatggagacctatgaggaccagcacagcagtgaggaggaggaggaagaggaagaggaagaggaaagcgaggacggcgaagaagaggatgacatcaccagcgccgagtcggagagcagcgaggaggaggagggggagcagggcgacccccagaacgcaacccggcagcagcagctggagtgggatgactccaccctcagctactgacccgtgcccccggccacctcggtttctgctttcgaagactctgctgccatccgttctcccagtcccaagggtccacgatgtacaaagtcatttcggccagtaggtgtgcagacccctccccgccacgatcgtcgctgtgcttggtgtgtaggaccctaggctccccgcccaccctctgcctggtcgcgctcttcagtcccacgaggagctgacacgtcctctctggccgccatccggctcgcacaggggcctcccagcgcctcaggccccgcgtttgtgtctggagtctccccccggggagaggacactggcccctcgcactccagaaaagccatgccagctgggctcgttgacaaagggtaaaacatgctcactcccacccggtaatcatttttttctttttttaaaaaaagtttttattttttccaaactagtgcatgtataaataatggcaggatggggggtactgtgtagatgattaactgactttttaatattttgtaaataaatcggattccttgtgtcctttgtgctagtgtaacccgggactggaatgtaaagtgaagttcggagctctgagcacgggctcttcccgccgggtcctccctccccagaccccagagggagaggcccaccccgcccagccccgccccagcccctgctcaggtctgagtatggctgggagtcgggggccacaggcctctagctgtgctgctcaagagactggatcagggtagctacaagtggccgggccttgcctttgggattctacctgttcctaatttggtgtggggtgcggggtccctggccccttttccacactcctcctccgacagcagctccctgggcagtggcctggtctcaccgtgtgcagccttgtggtttatgcttaaatgtacattttcctgctggtaaaaggagaaactgagaggtgtcctgcagaccggctgaccactccttttggagacggcaggaggcctgagcgatccgtactcagaacgtccaggagagacgcatggcccgaagtcaaagtgctggaattttccaaaacagcctgttctctcctctctcctccccagagcaccccctgccatcaggggggttgaaatccctctcccccaggagccctgctgctttgcttggtggtagggcaggagagcaaacaaacagtcatggtctaaaacccacatagcactttgctcttagttacatgtaaaattttagatttctaaaacaggtgggcaatcattttgaatactgttctgtgaccctgactgctagttctgaggacactggtggctgtgctatgtgtggccatcctccatgtcccgtccctgtagctgctctgtttagacagcggacagacgctcacgcccaggggatgtcctcacgctgtcgccgcgcggtttcccttcgcagatgtgtatactcatgataggtcagaaagtgtatccgctacaataaagttctggttctaact

SEQ ID NO: 1294 - DNA, 560 bp, Homo sapiens
  source 1..560: mol_type = genomic DNA
gactgctcagtagaagccatggctcgcagacactgcttctcctactggttactggtatgctggttggtggtaactgtggcagaagcactgtccactttctatctccagcagcatattaatttgcacatggacaagaagaggtatttacgcctcctggagattcacaaaataatgcggacgctaccgactgccagatctttacactcacccctccacctgccccgaggagtccggtcacaagggcccagcccatcacaaagacacccaggtgtcccttccatttttttccacgaaggcccagaatccattttaggtttccaaacagacctttcgtcccttcaaggtgtaaccaccgttttccattccagccattttattggccacaccgttaccttacttataggtatttccccagaagaagactccagagaggaagctcatctgaggaaagctgagagggaagagaaacccaaacatactgaagcaaaaaaaagcctatccttcagaaaaaagcaacaaaaagatttctgttttatctttcgaaactaaaactattggat

SEQ ID NO: 1295 - DNA, 1477 bp, Homo sapiens
  source 1..1477: mol_type = genomic DNA
gcgctggagcgttttccggccgtgcgtttgtggccgtccggcctccctgacatgcagatttccacccagaagacagagaaggagccagtggtcatggaatgggctggggtcaaagactgggtgcctgggagctgaggcagccaccgtttcagcctggccagccctctggaccccgaggttggaccctactgtgacacacctaccatgcggacactcttcaacctcctctggcttgccctggcctgcagccctgttcacactaccctgtcaaagtcagatgccaaaaaagccgcctcaaagacgctgctggagaagagtcagttttcagataagccggtgcaagaccggggtttggtcgtgacggacctcaaagctgagagtgtggttcttgagcatcgcagctactgctcggcaaaggcccgggacagacactttgctggggatgtactgggctatgtcactccatggaacagccatggctacgatgtcaccaaggtctttgggagcaagttcacacagatctcacccgtctggctgcagctgaagagacgtggccgtgagatgtttgaggtcacgggcctccacgacgtggaccaagggtggatgcgagctgtcaggaagcatgccaagggcctgcacatagtgcctcggctcctgtttgaggactggacttacgatgatttccggaacgtcttagacagtgaggatgagatagaggagctgagcaagaccgtggtccaggtggcaaagaaccagcatttcgatggcttcgtggtggaggtctggaaccagctgctaagccagaagcgcgtgggcctcatccacatgctcacccacttggccgaggctctgcaccaggcccggctgctggccctcctggtcatcccgcctgccatcacccccgggaccgaccagctgggcatgttcacgcacaaggagtttgagcagctggcccccgtgctggatggtttcagcctcatgacctacgactactctacagcgcatcagcctggccctaatgcacccctgtcctgggttcgagcctgcgtccaggtcctggacccgaagtccaagtggcgaagcaaaatcctcctggggctcaacttctatggtatggactacgcgacctccaaggatgcccgtgagcctgttgtcggggccaggtacatccagacactgaaggaccacaggccccggatggtgtgggacagccaggcctcagagcacttcttcgagtacaagaagagccgcagtgggaggcacgtcgtcttctacccaaccctgaagtccctgcaggtgcggctggagctggcccgggagctgggcgttggggtctctatctgggagctgggccagggcctggactacttctacgacctgctctaggtgggcattgcggcctccgcggtggacgtgttcttttctaagccatggagtgagtgagcaggtgtgaaatacaggcctccactccgtttgc

SEQ ID NO: 1296 - DNA, 657 bp, Homo sapiens
  source 1..657: mol_type = genomic DNA
atgctgccttgcctcgccctgcttctcctgatggagctgtccgtgtgcactgtggcaggtgatggtggagaggaacagacactcagcactgaagcagagacctgggaaggcgctggccccagcattcagctccagctgcaggaggtgaagacgggcaaggcaagccagttctttgggctgatggggaagcgagtgggaggaagacctctgatccagccaaggagaaaaaaagcatatcagctggaacacacgttccagggcctcctgggcaagagaagcctgttcacagaaggcagagaggatgaggcccaaggttcagagtaaaagcccccaccacagacttcccagaggacacggtgccgcttcttcctacctggatgtcacagctgacaagccggcaggccaactctcttctctgtgtctcctgtcctcatcgctggcacttcacacaaggcccacactgaacccactgggcttcttcctggactctcagtgtcaagcagcagtcctgcataaatgcacagcttcgccgtagcaagctgcactgactctgccctccctcacactcagagttggcatctcactgcacagcagtgaggagactcgcacactctgtatcctgtgcctagcacacagtaggcactcaataaatgagtg

SEQ ID NO: 1297 - DNA, 3252 bp, Homo sapiens
  source 1..3252: mol_type = genomic DNA
ttttccattaaaagcactgcaaattttagcctctaatgagattggagtcagttgacttggctttaaatattgcctcttccattttccagcttctgttactagccattgtgagcttcagtttcttcatctgcaaaatgggcataatacaatctattcttgccacatcaagggattgttattcctttaaaaaaaaaccaataccaaagaagcctacaatgttggccttagccaaaattctgttgatttcaacgttgttttattcacttctatcggggagccatggaaaagaaaatcaagacataaacacaacacagaacattgcagaagtttttaaaacaatggaaaataaacctatttctttggaaagtgaagcaaacttaaactcagataaagaaaatataaccacctcaaatctcaaggcgagtcattcccctcctttgaatctacccaacaacagccacggaataacagatttctccagtaactcatcagcagagcattctttgggcagtctaaaacccacatctaccatttccacaagccctcccttgatccatagctttgtttctaaagtgccttggaatgcacctatagcagatgaagatcttttgcccatctcagcacatcccaatgctacacctgctctgtcttcagaaaacttcacttggtctttggtcaatgacaccgtgaaaactcctgataacagttccattacagttagcatcctctcttcagaaccaacttctccatctgtgacccccttgatagtggaaccaagtggatggcttaccacaaacagtgatagcttcactgggtttaccccttatcaagaaaaaacaactctacagcctaccttaaaattcaccaataattcaaaactctttccaaatacgtcagatccccaaaaagaaaatagaaatacaggaatagtattcggggccattttaggtgctattctgggtgtctcattgcttactcttgtgggctacttgttgtgtggaaaaaggaaaacggattcattttcccatcggcgactttatgacgacagaaatgaaccagttctgcgattagacaatgcaccggaaccttatgatgtgagttttgggaattctagctactacaatccaactttgaatgattcagccatgccagaaagtgaagaaaatgcacgtgatggcattcctatggatgacatacctccacttcgtacttctgtatagaactaacagcaaaaaggcgttaaacagcaagtgtcatctacatcctagccttttgacaaattcatctttcaaaaggttacacaaaattactgtcacgtggattttgtcaaggagaatcataaaagcaggagaccagtagcagaaatgtagacaggatgtatcatccaaaggttttctttcttacaatttttggccatcctgaggcatttactaagtagccttaatttgtattttagtagtattttcttagtagaaaatatttgtggaatcagataaaactaaaagatttcaccattacagccctgcctcataactaaataataaaaattattccaccaaaaaattctaaaacaatgaagatgactctttactgctctgcctgaagccctagtaccataattcaagattgcattttcttaaatgaaaattgaaagggtgctttttaaagaaaatttgacttaaagctaaaaagaggacatagcccagagtttctgttattgggaaattgaggcaatagaaatgacagacctgtattctagtacgttataattttctagatcagcacacacatgatcagcccactgagttatgaagctgacaatgactgcattcaacggggccatggcaggaaagctgaccctacccaggaaagtaatagcttctttaaaagtcttcaaaggttttgggaattttaacttgtcttaatatatcttaggcttcaattatttgggtgccttaaaaactcaatgagaatcatggtaaaaaaaaaaagttaaccaaagaatatacctgtacataatttgtacagttttaagttgttagataggaactggatttcttatgtattagacattattgctcaatcataatggaatagattctgcatccctaaatgtatgaaccataaggttaaaaaagatgaatggaaatatcaaacaactttttactgagcatcagtttcataatcaataatataagaagattaatttggattctagtatgtttcagtttgtttttaattaccaccttcctttggtagaaaaaatatgttccttgatgtaggaaagtctaggttttagagattagaggatgagatcaagagttaaattcctaaagaagcactgaatatatgaagagagcaaacaaatcaagtaccaacctagaggctttatttttgaattgattcatggtgtgtgtgtgtgtgtgtgtgtgtgtgtgtgtgtgtgtgtaacacagaaacagcttcagaaaataagggatagaaagtaatgaagaaagtacttaccccatattgccataaaaatagcaaagaagactgtccctccattatcgaacaaatatgtcacctgagtagaaaacaaacagaaatattagtcatgcaaattgattataataagccagtgaatactgtttgcactcaggtactatgattttttctcaaatagaatcatattattttatagtacagaaatattatatatgaattcctttcatgggtcttgcaacaatttcacatgatttttctcatggggagaggtgaagaaacaacattagccctcttctctcctctcttgattccctttataccccaccatcatttctgattataaataattctaccattctatggaagtatttgtgggtcacagattgtcaaactacttaatgaaagttgtatgaaattagtttttcaggtgaggcattcctagttgcaattcctgttagcaaaacttctaggagtggggaagttggaaaatgcaggattcttccagtgagccagcatttcccatagctaaccctattctcttagtctttcaaaatgtagaatgggtccaataatggctataagatgtaataaatcccatcttaatttgttttaaaagtttcataaatcactgaacacttatgaaacaaagtgttttttaatcagatatcaactgaaacttcataaaggatgcatagttttataatgttattgaatcaaattttaaggcttgtattgtttgattttaataaagtataaattcaattt

SEQ ID NO: 1298 - DNA, 861 bp, Homo sapiens
  source 1..861: mol_type = genomic DNA
atgcgcggacccgggcaccccctcctcctggggctgctgctggtgctggggccttcgccggagcagcgagtggaaattgttcctcgagatctgaggatgaaggacaagtttctaaaacaccttacaggccctctttattttagtccaaagtgcagcaaacacttccatagactttatcacaacaccagagactgcaccattcctgcatactataaaagatgcgccaggcttcttacccggctggctgtcagtccagtgtgcatggaggataagcagtgagcagaccgtacaggagcagcacaccaggagccatgagaagtgccttggaaaccaacagggaaacagaactatctttatacacatcccctcatggacaagagatttatttttgcagacagactcttccataagtcctttgagttttgtatgttgttgacagtttgcagatatatattcgataaatcagtgtacttgacagtgttatctgtcacttatttaaaaaaaaaacacaaaaggaatgctccacatttgacgtgtagtgctataaaacacagaatatttcattgtcttcattaggtgaaatcgcaaaaaatatttctttagaaacataagcagaatcttaaagtatattttcatataacataatttgatattctgtattactttcactgttaaattctcagagtattatttggaacggcatgaaaaattaaaatttcggtcatgttttagagacagtggagtgtaaatctgtggctaattctgttggtcgtttgtattataaatgtaaaatagtattccagctattgtgcaatatgtaaatagtgtaaataaacacaagtaataaatgaagtgtttgtt

SEQ ID NO: 1299 - DNA, 1524 bp, Homo sapiens
  source 1..1524: mol_type = genomic DNA
cgcgtgtgcgacggggtcccctccccgccgaccggcctcgtgcgctcgggcccgcacgccgttgttcgcgtcacccccacccagctcccttccgcgtgtgctcggagggcgcggcgcaccgcctacgcaggccggagcggcttccccttccctcacgtgctctccgtccgcggcctgcgcacacacccatcctggggcccgcgccccgggcctgccctggagcgccccgcgcttcagactcacccacgtgtgcggcggcggcggcgactgcgtggccccgcacccgggcggtggagagaaagggctgtcaggtggccgcggcggccggcgtgcgagggaccggatgcccaagccgggcggatttggaaaaggatagctggaatgacaccaaggaagatgtatttgtacaccagactgccataaagaagaataaccccaggaagtaccttcgcagtgtaggagatggagagactgtggagtttgatgttgttgaaggagaaaagggtgcggaggcagcaaatgttacaggtcctggtggtgttccagttcaaggcagtaaatatgcagcagaccgtaaccattatagacgctatccacgtcgtaggggtcctccacgcaattaccagcaaaattaccagaatagtgagagtggggaaaagaacgagggatcggagagtgctcccgaaggccaggcccaacaacgccggccctaccgcaggcgaaggttcccaccttactacatgcggagaccctatgggcgtcgaccacagtattccaaccctcctgtgcagggagaagtgatggagggtgctgacaaccagggtgcaggagaacaaggtagaccagtgaggcagaatatgtatcggggatatagaccacgattccgcaggggccctcctcgccaaagacagcctagagaggacggcaatgaagaagataaagaaaatcaaggagatgagacccaaggtcagcagccacctcaacgtcggtaccgccgcaacttcaattaccgacgcagacgcccagaaaaccctaaaccacaagatggcaaagagacaaaagcagccgatccaccagctgagaattcgtccgctcccgaggctgagcagggcggggctgagtaaatgccggcttaccatctctaccatcatccggtttagtcatccaacaagaagaaatatgaaattccagcaataagaaatgaacaaaagattggagctgaagacctaaagtgcttgctttttgcccgttgaccagataaatagaactatctgcattatctatgcagcatggggtttttattatttttacctaaagacgtctctttttggtaataacaaacgtgttttttaaaaaagcctggtttttctcaatacgcctttaaaggtttttaaattgtttcatatctggtcaagttgagatttttaagaacttcatttttaatttgtaataaaagtttacaacttgattttttcaaaaaagtcaacaaactgcaagcacctgttaataaaggtcttaaataat

SEQ ID NO: 1300 - DNA, 670 bp, Homo sapiens
  source 1..670: mol_type = genomic DNA
gggagatagtgtgagacaggagcccaggggagaaagacagaaactaagactcaaggagcaacgcaaagcaaagtcaaggagtcaagaccagagtagctgagcagaggccaagaagggtctgagagggctgtgcagcagcaatggccctaaggatgctctgggctggacaggccaaggggatcctaggaggctgggggatcatctgcttggtgatgtctctactcctccagcacccaggagtctacagcaagtgctacttccaagctcaagccccctgtcactatgaggggaaatattttaccctgggtgagtcttggctccgcaaggactgtttccattgcacctgtctgcatcctgttggcgtgggctgctgtgacacgtcccagcatcccatcgacttcccggctgggtgtgaggtacgtcaggaggcaggaacctgccagttctccttggtgcaaaaatctgaccctcggctgccctgcaaagggggagggcctgacccagaatggggctcagccaacacccctgttcctggggctcctgctccccactccagctaaactcaactgatcatccatctgctgactgctcactgctgctgccacttccagggaaaccactagcagctgccaatgtattctgaacaaataaattaatgctatagctgaaa

SEQ ID NO: 1301 - DNA, 700 bp, Homo sapiens
  source 1..700: mol_type = genomic DNA
cattactgcaaggagggctactaccgcgacatgggcaagcccatcacccaccggaaggcctgcaaagcctgtgattgccaccctgtgggtgctgctggcaaaacctgcaaccaaaccaccggccagtgtccctgcaaggacggcgtgacgggtatcacctgcaaccgctgcgccaaaggctaccagcagagccgctctcccatcgccccctgcataaagatccctgtagcgccgccgacgactgcagccagcagcgtggaggagcctgaagctgcccgccagcccaacaccttccaggctgaggggttgtcactccttcctggggctgcagagaaggaaggagccagatgctggggatacagaaggaggcttgggcacagggtcgcacaagcagaatgcagggggcccaggagctgggcgtgggggagaatcacatcttcattttcattcgcctctaactaaaaatttagcatttcctccatggcaaagagaggccgcagaccgcagcatgcggccaagcctgcaccgtggtcactggcggaagtcacagcggtttacacatcacattctagctggtgcagatatcataaatatcgttcatgctggttattgcttctcaaaacgacagaagttactagacctgctgctagatcctgatttataatcattaataaagaagcactcgcgtaacgtaaccata

SEQ ID NO: 1302 - DNA, 738 bp, Homo sapiens
  source 1..738: mol_type = genomic DNA
ccttccacaggaagctgcacctgacagaagctccaggatgcttgttctctttctcctgggcacagtctttctgctctgcccatattggggtgaacttcatgaccctataaaagggcagagcatgtatcattattcaaaactgtcgtgtatgaccagctgtgaggacatcaacttcctggggttcacgaagagggtagagctcatctgttgtgatcatagtaactactgcaacctccctgagggagtttagttctacgtctctcctggattttgggttctttttcaaccactacgctctttttctcttccctgaacctgaattttgctctcctcttctatgcattggtagagagtgagaaagccagctcatagtgaaaagacaagcaggcataaggagacgcagtgtggacagcggagcctattgatgatggagcactagactcactctttgcacatccctgtcgctaacaggtgggaggggttttgctctccttacgtgatactgccatgaataagctcagacttggtcatttattatctcctgtatgaaaatgtgaacacttgggccataataatctccaatttgtactgagaattctgtgactatcctctatcctcatctacacacacactcctctccgttggaattctctttggattagccctgacactttctggcactgtccttttctgcccgtgggttctggagagggctaaccccagcttcccagtgtgttg

SEQ ID NO: 1303 - DNA, 761 bp, Homo sapiens; identical to SEQ ID NO: 929
  source 1..761: mol_type = genomic DNA

SEQ ID NO: 1304 - DNA, 2550 bp, Homo sapiens
  source 1..2550: mol_type = genomic DNA
cacacacacacacacacacacacgcacacatacaatgcacaagttcagcaggattgtataatgagcatgaattgtaaatttttttccagattgtttgaacttctctggccgcacaatacaggaaggaagactaaagcagcaaagggacctacagcgtctgcagcatgggctggttaactaggattgtctgtcttttctggggagtattacttacagcaagagcaaactatcagaatgggaagaacaatgtgccaaggctgaaattatcctacaaagaaatgttggaatccaacaatgtgatcactttcaatggcttggccaacagctccagttatcataccttccttttggatgaggaacggagtaggctgtatgttggagcaaaggatcacatattttcattcgacctggttaatatcaaggattttcaaaagattgtgtggccagtatcttacaccagaagagatgaatgcaagtgggctggaaaagacatcctgaaagaatgtgctaatttcatcaaggtacttaaggcatataatcagactcacttgtacgcctgtggaacgggggcttttcatccaatttgcacctacattgaaattggacatcatcctgaggacaatatttttaagctggagaactcacattttgaaaacggccgtgggaagagtccatatgaccctaagctgctgacagcatcccttttaatagatggagaattatactctggaactgcagctgattttatggggcgagactttgctatcttccgaactcttgggcaccaccacccaatcaggacagagcagcatgattccaggtggctcaatgatccaaagttcattagtgcccacctcatctcagagagtgacaatcctgaagatgacaaagtatactttttcttccgtgaaaatgcaatagatggagaacactctggaaaagctactcacgctagaataggtcagatatgcaagaatgactttggagggcacagaagtctggtgaataaatggacaacattcctcaaagctcgtctgatttgctcagtgccaggtccaaatggcattgacactcattttgatgaactgcaggatgtattcctaatgaactttaaagatcctaaaaatccagttgtatatggagtgtttacgacttccagtaacattttcaagggatcagccgtgtgtatgtatagcatgagtgatgtgagaagggtgttccttggtccatatgcccacagggatggacccaactatcaatgggtgccttatcaaggaagagtcccctatccacggccaggaacttgtcccagcaaaacatttggtggttttgactctacaaaggaccttcctgatgatgttataacctttgcaagaagtcatccagccatgtacaatccagtgtttcctatgaacaatcgcccaatagtgatcaaaacggatgtaaattatcaatttacacaaattgtcgtagaccgagtggatgcagaagatggacagtatgatgttatgtttatcggaacagatgttgggaccgttcttaaagtagtttcaattcctaaggagacttggtatgatttagaagaggttctgctggaagaaatgacagtttttcgggaaccgactgctatttcagcaatggagctttccactaagcagcaacaactatatattggttcaacggctggggttgcccagctccctttacaccggtgtgatatttacgggaaagcgtgtgctgagtgttgcctcgcccgagacccttactgtgcttgggatggttctgcatgttctcgctattttcccactgcaaagagacgcacaagacgacaagatataagaaatggagacccactgactcactgttcagacttacaccatgataatcaccatggccacagccctgaagagagaatcatctatggtgtagagaatagtagcacatttttggaatgcagtccgaagtcgcagagagcgctggtctattggcaattccagaggcgaaatgaagagcgaaaagaagagatcagagtggatgatcatatcatcaggacagatcaaggccttctgctacgtagtctacaacagaaggattcaggcaattacctctgccatgcggtggaacatgggttcatacaaactcttcttaaggtaaccctggaagtcattgacacagagcatttggaagaacttcttcataaagatgatgatggagatggctctaagaccaaagaaatgtccaatagcatgacacctagccagaaggtctggtacagagacttcatgcagctcatcaaccaccccaatctcaacacaatggatgagttctgtgaacaagtttggaaaagggaccgaaaacaacgtcggcaaaggccaggacataccccagggaacagtaacaaatggaagcacttacaagaaaataagaaaggtagaaacaggaggacccacgaatttgagagggcacccaggagtgtctgagctgcattacctctagaaacctcaaacaagtagaaacttgcctagacaataactggaaaaacaaatgcaa

SEQ ID NO: 1305 - DNA, 1520 bp, Homo sapiens
  source 1..1520: mol_type = genomic DNA
atggcccgtcctatgattaaagaagcccgaatggcttctttattgttagaaaacccttattatggctgcaggaaacccaaggaccaagtaaggtccagcttaaaaaatgtgtccgacctttttgtgatgggaggagctcttgttttagaatctgcagctctcttgcactggctagagagggaaggttacggccctttaggaatgactggaatatccatgggaggacacatggcttccttagcggtatccaactggcctaagcccatgccattgattccatgcctgtcttggtccacagcatctggggtcttcactacgggtgtgttgagtaaatcaattaattggagggagctggaaaagcaatattatacccagacagtttatgaagaagaaattattcacatgcttgaatactgtggaacagattctttcaaaatgggacaagagtttgtgaaacacttcactagcagtgcagacaagctaactaaccttaatctggtttccagaactttaaatttagatatatcaaaccaagttgtatcccaaaaacctgctgactgccataattctagcaaaacatctgtcagtgcgacatcagaaggactcttattgcaagatacctctaagatgaagcgcttcaatcaaacactttcaaccaacaaaagtggttatacaagtcgcaaccctcagtcataccacctacttagtaaagaacaaagcagaaacagtcttcggaaagagtctttaatatttatgaaaggagtcatggatgaatgtactcatgtagcaaatttctcagtcccagttgatccaagcctcattatagtggttcaagccaaagaagatgcctatattccacgaacaggagttcgaagtttacaagaaatttggcctggttgtgaaatccgatacttagaagggggtcatattagtgcttatctttttaaacaaggactcttcagacaagccatctatgatgcatttgaccgcttcctccataaatacgctaactagttggattattatatgtaaccagtgtggccatgatgtttcttacaaaagggagcttcatcctgtgatcatgtgaaggacaagcagacagcactaatatatctaatcgctatcaatttggtctggaattcattgttacacatcagttaactataaacttcgaatacatttgaataatttcaagataatatttgaagtaaataatgttaaagtgtttttactattgtttattggaatcccatatattcagtgtttagtctgttgttactgtttatgaaaaactaaatttttaatcatgaataatttattaaattaaataaatttattcatagaaacttttctgggttttagtaaaattgctaaatcaaaccaagattttaatatatcagcatttactttgtacccttataacatttcactcttgacttgatttgagaaacatgtttattttttgaatgttcttgtgttcaactaattttctgctgtggaaataaatacttatgatatat

SEQ ID NO: 1306 - DNA, 587 bp, Homo sapiens
  source 1..587: mol_type = genomic DNA
agattccccagctgctgttctctggaggggtgtctgaaggtggctattcactgagcgatggggttggacttgaaggaatgccaagagatgctgcccccacccccttaggcccgagggatcaggagctatgggaccagaggccctgtcatctttactgctgctgctcttggtggcaagtggagatgctgacatgaagggacattttgatcctgccaagtgccgctatgccctgggcatgcaggaccggaccatcccagacagtgacatctctgcttccagctcctggtcagattccactgccgcccgccacagcaggttggagagcagtgacggggatggggcctggtgccccgcagggtcggtgtttcccaaggaggaggagtacttgcaggtggatctacaacgactgcacctggtggctctggtgggcacccagggacggcatgccgggggcctgggcaaggagttctcccggagctaccggctgcgttactcccgggatggtcgccgctggatgggctggaaggaccgctggggtcaggaggtgatctcaggcaatgaggaccctgagggagtggtgctgaagg

SEQ ID NO: 1307 - DNA, 457 bp, Homo sapiens
  source 1..457: mol_type = genomic DNA
tttccaaaatggacaagtccctcttgctggaactccccatcctgctctgctgctttagggcattatctggatcactttcaatgagaaatgatgcagtgatagaaattgttcagtgtaggatgtgccacctccagttcccaggagaaaagtgctccagaggaagaggaatatgcacagcaacaacagaagaggcctgcatggttggaaggatgttcaaaagggatggtaatccctggttaaccttcatgggctgcctaaagaactgtgctgatgtgaaaggcataaggtggagtgtctatttggtgaacttcaggtgctgcaggagccatgacctgtgcaatgaagacctttagaagttaatggttcttctgtgactccaatttctgggtgaggttgttgcctcagcctcttcacaatgactttctaaaaaaaatcacacacacacacacacacacta

SEQ ID NO: 1308 - DNA, 799 bp, Homo sapiens; identical to SEQ ID NO: 1175
  source 1..799: mol_type = genomic DNA

SEQ ID NO: 1309 - DNA, 1903 bp, Homo sapiens
  source 1..1903: mol_type = genomic DNA
gactttggttactgtcctcgtgtgtactgtgagaaccagccaatgcttcccattggtgtgctggtcatggtgggcttcacagtaggaaaggttcctgttcccgacatccggacgtgccacttctgcctcgtagaagacccttctgtaggatgcatttcaggctcagagaagtgtaccatcagcagctcatccctgtgcatggtgatcaccatctattatgatgtcaaggttcgcttcatcgttcgaggctgtggacagtacatttcctaccgctgccaagaaaaacgcaacacctactttgcagagtactggtatcaggcccagtgctgtcagtacgattattgcaactcctggtcaagcccccaactccagagctctctgccggagccccatgacaggcccctggccctgcctctgtctgactcccagattcagtggttctaccaggccctgaacctctccctgcccctccccaatttccatgctgggacggagcctgatggcctggaccccatggtcacactgtccctgaacctgggcttgtcttttgctgagctgcgccgcatgtacttgttcctcaatagttcaggacttttggttcttccccaggctggactcttgacacctcacccttcctgaattccacagtgcaaatatctttctgtaacaccctcagcatcctgcactgccctctctgaaaacacccacattctttggtcactgtgatttcttaggcctccgtctgttgtaccactagcatctatatgacttttgtgtaattttctctcttgaactctggtgctgtttttttgtttgtttgagacaaagtctcgctctgtcacccagggtggagtgcagtggcatgatctctgctcactacaacctccacctcccgggttccagcgattctcctgcctcagcctcccgagtagctgggactacaggcgtgcaccaccacgcctggctaattttttgtatttttagtagagacggggtttcaccatgttggtcaggctggtctcgaactcctgacctcgtaatctgccctcctcgacctcccaaagtgccgggattacaggtgtgagccactgtgcctgtctgagctctggtgctgttcttccccctagaaaagaatctctagtgtggattctgcccagacaggctgacctgagaaaggcacagtggttcctccattccttccccatcatctgagtgttccagtatcccccatccctctcaatccagtcacctgcctattgacatctagctctgtttcccctgtcttgtccatgtctctaagacccagtaccagactgaactagcagcaagaaggacgaggaggccgggcatggtggctcacgccggtaatcccagcactttgggaggccgaggtgggcggatcacttgagattgggagtttgagaccagcctggccaacatggtaaaacccgctctctattaaaaatagaaaaatcagctgggtgtggtggcacacctctgtaatcccagctactcaggaggctgagacaggagaatcacttgaacccgggaggcagaggttgcagtgagccgagatcgcgccactgcactccagcctgggtgacacagtgagactccgtctccaaaaaaaaggatgaggaatagaattctgtgcagatgtcctgacttggcaattttgtgtccctgcctcactgtctccaccaacccccgcctgtcctggtgttgttctgcctcctgtcctctcttgctctcttgtcagtctctggcttcctcggccccatttcacttcactgagtcctgacacccatctccctaggggcctgtgagaggagagggaagggtctgttctgctcagctccatgtcccccattttcctccacaataaactgggactgggctaaaa

SEQ ID NO: 1310 - DNA, 240 bp, Homo sapiens; identical to SEQ ID NO: 1066
  source 1..240: mol_type = genomic DNA

SEQ ID NO: 1311 - DNA, 2463 bp, Homo sapiens
  source 1..2463: mol_type = genomic DNA
actgcctgtaaagccctcgcatgagaggccagcctgctagggaaatccaggaatctgcaacaaaaacgatgacagtctgaaatactctctggtgccaacctccaaattctcgtctgtcacttcagacccccactagttgacagagcagcagaatttcaactccagtagacttgaatatgcctctgggcaaagaagcagagctaacgaggaaagggatttaaagagtttttcttgggtgtttgtcaaacttttattccctgtctgtgtgcagaggggattcaacttcaatttttctgcagtggctctgggtccagccccttacttaaagaagaggaaagccatgaacagtcagcagaacagggcaagagttctagccaagagctgggattgaaggatcaagaggacagtgatggtcacttaagtgtgaatttggagtatgcaccaactgaaggtacattggacataaaagaagatatgagtgagcctcaggagaaaaaactctcagagaacactgattttttggctcctggtgttagttccttcacagattctaaccaacaagaaagtatcacaaagagagaggaaaaccaagaacaacctagaaattattcacatcatcagttgaacaggagcagtaaacatagccaaggcctaagggatcaaggaaaccaagagcaggatccaaatatttccaatggagaagaggaagaagaaaaagagccaggtgaagttggtacccacaatgataaccaagaaagaaagacagaattgcccagggagcatgctaacagcaagcaggaggaagacaatacccaatctgatgatattttggaagagtctgatcaaccaactcaagtaagcaagatgcaggaggatgaatttgatcagggtaaccaagaacaagaagataactccaatgcagaaatggaagaggaaaatgcatcgaacgtcaataagcacattcaagaaactgaatggcagagtcaagagggtaaaactggcctagaagctatcagcaaccacaaagagacagaagaaaagactgtttctgaggctctgctcatggaacctactgatgatggtaataccacgcccagaaatcatggagttgatgatgatggcgatgatgatggcgatgatggcggcactgatggccccaggcacagtgcaagtgatgactacttcatcccaagccaggcctttctggaggccgagagagctcaatccattgcctatcacctcaaaattgaggagcaaagagaaaaagtacatgaaaatgaaaatataggtaccactgagcctggagagcaccaagaggccaagaaagcagagaactcatcaaatgaggaggaaacgtcaagtgaaggcaacatgagggtgcatgctgtggattcttgcatgagcttccagtgtaaaagaggccacatctgtaaggcagaccaacagggaaaacctcactgtgtctgccaggatccagtgacttgtcctccaacaaaaccccttgatcaagtttgtggcactgacaatcagacctatgctagttcctgtcatctattcgctactaaatgcagactggaggggaccaaaaaggggcatcaactccagctggattattttggagcctgcaaatctattcctacttgtacggactttgaagtgattcagtttcctctacggatgagagactggctcaagaatatcctcatgcagctttatgaagccaactctgaacacgctggttatctaaatgagaagcagagaaataaagtcaagaaaatttacctggatgaaaagaggcttttggctggggaccatcccattgatcttctcttaagggactttaagaaaaactaccacatgtatgtgtatcctgtgcactggcagtttagtgaacttgaccaacaccctatggatagagtcttgacacattctgaacttgctcctctgcgagcatctctggtgcccatggaacactgcataacccgtttctttgaggagtgtgaccccaacaaggataagcacatcaccctgaaggagtggggccactgctttggaattaaagaagaggacatagatgaaaatctcttgttttgaacgaagattttaaagaactcaactttccagcatcctcctctgttctaaccacttcagaaatatatgcagctgtgatacttgtagatttatatttagcaaaatgttagcatgtatgacaagacaatgagagtaattgcttgacaacaacctatgcaccaggtatttaacattaactttggaaacaaaaatgtacaattaagtaaagtcaacatatgcaaaatactgtacattgtgaacagaagtttaattcatagtaatttcactctctgcattgacttatgagataattaatgattaaactattaatgataaaaataatgcatttgtattgttcataatatcatgtgcacttcaagaaaatggaatgct

SEQ ID NO: 1312 - DNA, 3523 bp, Homo sapiens
  source 1..3523: mol_type = genomic DNA
ctcctcctcctcccctccgtcggtcagtcagtccgcgaggagagtccgcggtggcggcgacggtggcgagagccgcgggggccgtaggaagccaaccttccctgcttctccggggccctcgccccctcctccccacaaaatcagggatggaggcgcctccccggcaccctcttagcagccctccccaggaaaagtgtcccccctgagctcctaacgctccccaacagctacccctgccccccacgccatggggcccggggccccttttgcccgggtggggtggccactgccgcttctggttgtgatggcggcaggggtggctccggtgtgggcctcccactccccccatctcccgcggcctcactcgcgggtccccccgcacccctcctcagaacggcgcgcagtgtacatcggggcactgtttcccatgagcgggggctggccagggggccaggcctgccagcccgcggtggagatggcgctggaggacgtgaatagccgcagggacatcctgccggactatgagctcaagctcatccaccacgacagcaagtgtgatccaggccaagccaccaagtacctatatgagctgctctacaacgaccctatcaagatcatccttatgcctggctgcagctctgtctccacgctggtggctgaggctgctaggatgtggaacctcattgtgctttcctatggctccagctcaccagccctgtcaaaccggcagcgtttccccactttcttccgaacgcacccatcagccacactccacaaccctacccgcgtgaaactctttgaaaagtggggctggaagaagattgctaccatccagcagaccactgaggtcttcacttcgactctggacgacctggaggaacgagtgaaggaggctggaattgagattactttccgccagagtttcttctcagatccagctgtgcccgtcaaaaacctgaagcgccaggatgcccgaatcatcgtgggacttttctatgagactgaagcccggaaagttttttgtgaggtgtacaaggagcgtctctttgggaagaagtacgtctggttcctcattgggtggtatgctgacaattggttcaagatctacgacccttctatcaactgcacagtggatgagatgactgaggcggtggagggccacatcacaactgagattgtcatgctgaatcctgccaatacccgcagcatttccaacatgacatcccaggaatttgtggagaaactaaccaagcgactgaaaagacaccctgaggagacaggaggcttccaggaggcaccgctggcctatgatgccatctgggccttggcactggccctgaacaagacatctggaggaggcggccgttctggtgtgcgcctggaggacttcaactacaacaaccagaccattaccgaccaaatctaccgggcaatgaactcttcgtcctttgagggtgtctctggccatgtggtgtttgatgccagcggctctcggatggcatggacgcttatcgagcagcttcagggtggcagctacaagaagattggctactatgacagcaccaaggatgatctttcctggtccaaaacagataaatggattggagggtcccccccagctgaccagaccctggtcatcaagacattccgcttcctgtcacagaaactctttatctccgtctcagttctctccagcctgggcattgtcctagctgttgtctgtctgtcctttaacatctacaactcacatgtccgttatatccagaactcacagcccaacctgaacaacctgactgctgtgggctgctcactggctttagctgctgtcttccccctggggctcgatggttaccacattgggaggaaccagtttcctttcgtctgccaggcccgcctctggctcctgggcctgggctttagtctgggctacggttccatgttcaccaagatttggtgggtccacacggtcttcacaaagaaggaagaaaagaaggagtggaggaagactctggaaccctggaagctgtatgccacagtgggcctgctggtgggcatggatgtcctcactctcgccatctggcagatcgtggaccctctgcaccggaccattgagacatttgccaaggaggaacctaaggaagatattgacgtctctattctgccccagctggagcattgcagctccaggaagatgaatacatggcttggcattttctatggttacaaggggctgctgctgctgctgggaatcttccttgcttatgagaccaagagtgtgtccactgagaagatcaatgatcaccgggctgtgggcatggctatctacaatgtggcagtcctgtgcctcatcactgctcctgtcaccatgattctgtccagccagcaggatgcagcctttgcctttgcctctcttgccatagttttctcctcctatatcactcttgttgtgctctttgtgcccaagatgcgcaggctgatcacccgaggggaatggcagtcggaggcgcaggacaccatgaagacagggtcatcgaccaacaacaacgaggaggagaagtcccggctgttggagaaggagaaccgtgaactggaaaagatcattgctgagaaagaggagcgtgtctctgaactgcgccatcaactccagtctcggcagcagctccgctcccggcgccacccaccgacacccccagaaccctctgggggcctgcccaggggaccccctgagccccccgaccggcttagctgtgatgggagtcgagtgcatttgctttataagtgagggtgcatgtccgttccgaggaatgggatttaatgacctttgatgccaacccatatgacagcgtgaaaaaaatcaaagaacatgtccggtctaagaccaaggttcctgtgcaggaccaggttcttttgctgggctccaagatcttaaagccacggagaagcctctcatcttacggcattgacaaagagaagaccatccaccttaccctgaaagtggtgaagcccagtgatgaggagctgcccttgtttcttgtggagtcaggtgatgaggcaaagaggcacctcctccaggtgcgaaggtccagctcagtggcacaagtgaaagcaatgatcgagactaagacgggtataatccctgagacccagattgtgacttgcaatggaaagagactggaagatgggaagatgatggcagattacggcatcagaaagggcaacttactcttcctggcatcttattgtattggagggtgaccaccctgggcatggggtgttggcaggggtcaaaaagcttatttcttttaatctcttactcaacgaacacatcttctgatgatttcccaaaattaatgagaatgagatgagtagagtaagatttgggtgggatgggtaggatgaagtatattgcccaactctatgtttctttgattctaacacaattaattaagtgacatgatttttactaatgtattactgagactagtaaataaatttttaaggcaaaatagagcattcaaagcca

SEQ ID NO: 1313 - DNA, 2039 bp, Homo sapiens
  source 1..2039: mol_type = genomic DNA
gacacagtaagtaccgatgccgcaaagggaggtccccagggcttgagggcatgtgaggcgaggagaggatggactctagagttttggggtttggggtctgcaaagctctgaaggagtctcatctctgcagtttcaggtatccaaggcagcagagaacaaagaacagccaccatgcagctcttcctcctcttgtgcctggtgcttctcagccctcagggggcctcccttcaccgccaccacccccgggagatgaagaagagagtcgaggacctccatgtaggtgccacggtggcccccagcagcagaagggactttacctttgacctcctcggcaatgcccttttcaccgacctggtggtagacctgcaggacaccttcgtaagtgccatgaagacgctgtacctggcagacactttccctaccaactttagggactctgcaggggccatgaagcagatcaatgattatgtggcaaagcaaacgaagggcaagattgtggacttgcttaagaacctcgatagcaatgcggtcgtgatcatggtgaattacatcttctttaaagctaagtgggagacaagcttcaaccacaaaggcacccaagagcaagacttctacgtgacctcggagactgtggtgcgggtacccatgatgagccgcgaggatcagtatcactacctcctggaccggaacctctcctgcagggtggtgggggtcccctaccaaggcaatgccacggctttgttcattctccccagtgagggaaagatgcagcaggtggagaatggactgagtgagaaaacgctgaggaagtggcttaagatgttcaaaaagaggcagctcgagctttaccttcccaaattctccattgagggctcctatcagctggagaaagtcctccccagtctggggatcagtaacgtcttcacctcccatgctgatctgtccggcatcagcaaccactcaaatatccaggtgtctgagatggtgcacaaagctgtggtggaggtggacgagtcgggaaccagagcagcggcagccacggggacaatattcactttcaggtcggcccgcctgaactctcagaggctagtgttcaacaggccctttctgatgttcattgtggataacaacatcctcttccttggcaaagtgaaccgcccctgaggtggggcttctcctgaaatctacaggcctcagggtgggagatgaagggggctaagctatggcccatctgtatgctggtagctagtgatttacacaggtttagttgactaatgaggcattacaaataatattactctatgatgattgcttccacccacacgactgcaacatacaggtgccttggggaaatgtggagaacattcaatcttgccgtcactattcatcaatgaagattaacactgagatccagagaggctggatgacttgctcaagttcaccagcatggtagtggcaaagagaggtccagagtcctggcccttgatgcccagctcagtgccacaaagctcaataggagggatgttccagtggatgagggccaccaggaagcacaggtccaaggctggtcccacacttatcagcagcaacaactgtcagttcatcctgcatgggaaaaatgttggaatgggagtctgaaatggggctactgtttcagtcctaatgtgctgtgtgacattgggacaacactttccctctctggacctcagtttccctctgtatacaaggatcagattcttgctgtgacccaagaactcctgaaatcatatagaaaggctggggtgggccctgtcattcgtggttgatttcaatacactcaagtgccattcatcctttaagaaaaacatctggatatcaaggtggaaatggcccatttaatgattgattatatcattttgtggatatagttataatctgatgggcctggctgggagtggaagaagggaagccttttgcaaatagtagagtatcagttgcaggtgccaatgactaactttttgaattctatgttggcattaacaataaagcattttgcaaac

SEQ ID NO: 1314 - DNA, 2881 bp, Homo sapiens; identical to SEQ ID NO: 811
  source 1..2881: mol_type = genomic DNA

SEQ ID NO: 1315 - DNA, 826 bp, Homo sapiens
  source 1..826: mol_type = genomic DNA
gcaaacctcaggacacttactccctgagctaagggggaagagctggatcaccatgaaatatgtcttctatttgggtgtcctcgctgggacatttttctttgctgactcatctgttcagaaagaagaccctgctccctatttggtgtacctcaagtctcacttcaacccctgtgtgggcgtcctcatcaaacccagctgggtgctggccccagctcactgctatttaccaaatctgaaagtgatgctgggaaatttcaagagcagagtcagagacggtactgaacagacaattaaccccattcagatcgtccgctactggaactacagtcatagcgccccacaggatgacctcatgctcatcaagctggctaagcctgccatgctcaatcccaaagtccagccccttaccctcgccaccaccaatgtcaggccaggcactgtctgtctactctcaggtttggactggagccaagaaaacagtggccgacaccctgacttgcggcagaacctggaggcccccgtgatgtctgatcgagaatgccaaaaaacagaacaaggaaaaagccacaggaattccttatgtgtgaaatttgtgaaagtattcagccgaatttttggggaggtggccgttgctactgtcatctgcaaagacaagctccagggaatcgaggtggggcacttcatgggaggggacgtcggcatctacaccaatgtttacaaatatgtatcctggattgagaacactgctaaggacaagtgagaccctacttctccctctgcattccactggctctgccatggactatacaagcagataattttccct

SEQ ID NO: 1316 - DNA, 1725 bp, Homo sapiens
  source 1..1725: mol_type = genomic DNA
aagccctctagtgccttagattccagcgagctacgcaagcaatcctggcccagccgagcttgcttccccaaatcccgtaatccttgaccttattcccccaaagaagcggcctcccgggaaggagcgccctggcggagaagactcgaacggctcccacagccgggcgttgggggaaaggccactcttcacctccaccatgagcctggacatccagagcctggacatccagtgtgaggagctgagcgacgctagatgggccgagctcctccctctgctccagcagtgccaagtggtcaggctggacgactgtggcctcacggaagcacggtgcaaggacatcagctctgcacttcgagtcaaccctgcactggcagagctcaacctgcgcagcaacgagctgggcgatgtcggcgtgcattgcgtgctccagggcctgcagaccccctcctgcaagatccagaagctgagcctccagaactgctgcctgacgggggccggctgcggggtcctgtccagcacactacgcaccctgcccaccctgcaggagctgcacctcagcgacaacctcttgggggatgcgggcctgcagctgctctgcgaaggactcctggacccccagtgccgcctggaaaagctgcagctggagtattgcagcctctcggctgccagctgcgagcccctggcctccgtgctcagggccaagccggacttcaaggagctcacggttagcaacaacgacatcaatgaggctggcgtccgtgtgctgtgccagggcctgaaggactccccctgccagctggaggcgctcaagctggagagctgcggtgtgacatcagacaactgccgggacctgtgcggcattgtggcctccaaggcctcgctgcgggagctggccctgggcagcaacaagctgggtgatgtgggcatggcggagctgtgcccagggctgctccaccccagctccaggctcaggaccctgtggatctgggagtgtggcatcactgccaagggctgcggggatctgtgccgtgtcctcagggccaaggagagcctgaaggagctcagcctggccggcaacgagctgggggatgagggtgcccgactgctgtgtgagaccctgctggaacctggctgccagctggagtcgctgtgggtgaagtcctgcagcttcacagccgcctgctgctcccacttcagctcagtgctggcccagaacaggtttctcctggagctacagataagcaacaacaggctggaggatgcgggcgtgcgggagctgtgccagggcctgggccagcctggctctgtgctgcgggtgctctggttggccgactgcgatgtgagtgacagcagctgcagcagcctcgccgcaaccctgttggccaaccacagcctgcgtgagctggacctcagcaacaactgcctgggggacgccggcatcctgcagctggtggagagcgtccggcagccgggctgcctcctggagcagctggtcctgtacgacatttactggtctgaggagatggaggaccggctgcaggccctggagaaggacaagccatccctgagggtcatctcctgaggctcttcctgctgctgctctccctggacgaccggcctcgaggcaaccctggggcccaccagcccctgccatgctctcaccctgcatatcctaggtttgaagagaaacgctcagatccgcttatttctgccagtatattttgg

SEQ ID NO: 1317 - DNA, 2881 bp, Homo sapiens; identical to SEQ ID NO: 811
  source 1..2881: mol_type = genomic DNA

SEQ ID NO: 1318 - DNA, 580 bp, Homo sapiens; identical to SEQ ID NO: 1292
  source 1..580: mol_type = genomic DNA

SEQ ID NO: 1319 - DNA, 568 bp, Homo sapiens
  source 1..568: mol_type = genomic DNA
acttcaccgaacgtgttgaggtacctagcacctaatcgcggctgctgagagcgctccttgctctgtaaagtggatgtcaggtggatctatgtttctgaaggaacaaagactcaaagaaggcaccgccaaggaagtttgagacgcgggagaatgcaggctgcgtgctggtacgtgcttttcctcctgcagcccaccgtctacttggtcacatgtgccaatttaacgaacggtggaaagtcagaacttctgaaatcaggaagcagcaaatccacactaaagcacatatggacagaaagcagcaaagacttgtctatcagccgactcctgtcacagacttttcgtggcaaagagaatgatacagatttggacctgagatatgacaccccagaaccttattctgagcaagacctctgggactggctgaggaactccacagaccttcaagagcctcggcccagggccaagagaaggcccattgttaaaacgggcaagtttaagaaaatgtttggatggggcgattttcattccaacatcaaaacagtgaagctgaacctgttgataactggga

SEQ ID NO: 1320 - DNA, 7394 bp, Homo sapiens
  source 1..7394: mol_type = genomic DNA
gcgcatgcgctgagctggcgggcccgagtgttgtcggctgggaaatggcggccgcgggcttggtcgctgtggcagcggctgccgagtactctggcacggtagcgtcgggaggtaacctccctggtgttcactgcggcccaagctccggggcaggccctggttttggcccgggctcgtggagccgctctctcgatcgagccctggaggaggcggcggtcactggggtgctgagcctgagcggccggaaactgagggagtttccccggggagcggccaaccacgacctgacggacaccacccgggcggacctgtcgcgaaatcgcctttcagaaattcctatagaagcatgtcactttgtttctctggaaaatctcaacttgtaccaaaattgtattcgttatattccagaggcaattttaaacctacaagctctaacattcttaaatattagtcggaaccaactgtcaacattgccggtacacttgtgtaatttgccattgaaagtcttaattgctagtaataacaaattggtgtcacttccagaagaaattggacaccttagacatttgatggaacttgatgtgagctgcaatgaaattcaaactataccttcccaaattggtaacctggaggccttgagagaccttaatgtaagaagaaatcacctagtacatttgcctgaagagctggcggagttgcctttgatacggttagacttctcatgcaataaaattaccacaatccctgtttgttatcggaacctcaggcacctacagacgatcaccctagataacaatccactacaatcacctcctgcacagatatgtataaaaggcaaagtccacatatttaaatacctgaacatacaagcttgtaagattgctccagatctgccggattatgataggagaccgttgggttttggctcctgccatgaagaactgtactcaagtcgcccttatggagcccttgattcaggcttcaatagtgtggacagtggtgataagagatggtcagggaatgaacctacagatgaattttcagatctgcctcttcgagtagcagagattactaaagaacaaagactacgaagagaaagccagtaccaagagaaccgcggcagtttggtagtaacaaacggcggagtggaacatgatctggatcagattgactacatagacagctgcaccgcagaggaagaggaggccgaggtgagacagcccaagggaccagacccagacagccttagttcacagtttatggcgtatattgaacagcggcgaatctctcatgagggttcaccagtaaagccagtagccattagggagtttcaaaaaacagaagatatgagaagatatttacatcaaaacagggttccagctgagccatcttccctcctgtcactatcagcaagtcacaatcagctgtcacacacagacctggaacttcatcagagaagggagcagttagtagagcgcactcggagagaggctcagcttgctgccctgcagtatgaggaggagaaaataaggaccaagcagatccagagagatgctgtcctggactttgtcaaacaaaaagcatcacaaagtccacaaaaacagcacccgctcctagatggcgtagatggtgagtgccccttcccatccagaaggtctcagcacactgatgatagtgccttgtgcatgtcgctgtcagggttgaatcaagtgggctgtgctgctaccctgcctcattcttctgccttcacgcctcttaagagtgatgacagacctaatgctctattaagttcacctgcaacagaaacagttcatcattcccctgcatattcttttcctgctgctatccagagaaatcagcctcagcgccctgaaagcttccttttccgagcaggtgtcagggcagaaaccaacaaaggtcatgcttcaccccttcctccatctgctgcacctaccactgattctacagattccataacaggacagaattcaagacagagagaagaagagctggaattaatagaccaactgcgtaaacatattgagtaccggttgaaagtgtctctaccttgtgatctcggagcagctctaactgacggtgttgttctttgccatttggccaatcatgtgcgacctcgatctgtcccaagcattcatgttccctcaccagctgtacctaaattaacaatggcgaaatgcaggcgaaatgtggaaaatttcctagaagcttgcagaaaaattggtgtacctcaggacaatctttgttccccttccgacatccttcagctaaacctcagcgttaaaagaactgttgaaacgctcctttctcttggggcacactcagaagaatccagttttgtctgtctctctctgcagcttctgggttttgtggcattttactgtactgtgatgttaactctctgtgtgctttattactggctcttccccgctcgctgaaagattgcactccggtgactttctgcctcattcctgtgcttggagcaattatgtttgcctctccacattttagaagagaaaggtttgagccaggttgcagtgacggtccaggctctcctggaacttgccccacccaagcaacagcagcaccagttatctgctgtttgaggatccccaggacggtgggcactggcctggccaaaacaaggaacaggacaccgtgattgctgctgccagctgtctgcttaaacaaagctcttgtgtgttctcagaagggaccgttcccatgattcctaacaggaatattttgcttcatttctccattttaggggaggttatttccatttccattgaatttttttacgaagacaccattggttttctcagatgaaacttctcttactgaaaacccagcacctaacttggctgtgttttcctggagagcaggcgtgtttcacgtgccagaaagcacatcttctgtgttaggcacaagcatgctgtgccattgtttttacctggtctcaagacaactggtctgctggtttctaaacttggttgttcattagactctcctggagtatttgttaaaatacagattcacattcagtagagctggggtaaggcctaggaatctgcattttcaacaaccattgcacatgtttttgtttttgttggagaaggagttctgctcagtcgcccaggctagagtgcagtggcataatctcagctcactgcaacctccgcctcccgggctcaagcgattctcctgcctcagcctcccgagtagctgggacaacaggtgcccgccaccatgcctggctaattttcttgtatttttagtagagatgggattttgtcatgttggccaggctggtctcaaactcctgacttcaagtgatccacctgcctcggcctcccaaaatgctgggattacaggcgtgagccactgtgcccggcctcccagagtgctgggatgacaggcgtgagcccccgcgcccggcctccgagagtgctgggattacaggcgtgagccactgtgcccggcctctgagggtgctgggattacaggcgtgagccactgcgcccggcgcccggcccattgcacgtgtttttcatgtagtggaaccactgttcaaagctagatatttgtatgtttgcgggggagggtaatggccccctgcatttttcacccacatttaaaatcaaaagctatattatgaggagttggactgttctgtcaaaggcaaaacaaaaataatatagaaggcctaggttttgcatagtcttcttttttttaagagttggggtcttgccgtattgcccaggctggtctgaaactcctgggctcaactgatcctcccgcctcagcctcccaaagtgctgggattactggagtgagccatcgggcctggcccagattttgcatagtaaaacagtgaaacagatagagttgtatttaaggtcagtattctaggcctcccttcaactgcagtcataccatcatagaagatagttctatgtcatcctgttatctggacattataataaacaacaagccctctatacacaggttccaaaccccgttatctagacattatcaacaacaagccctctctctatacagagtttccaaattctgaagctgatagcgcacttggtctcactgagcctccctccccgccctcctgctgctcctcagacatctgggcctgcagacacattgcagttacagcacatacacttctagctcggaaaagcctagtttcttgtatttctttcaggtaactgccagtttctgtggctgaatttaagcacttacagcatcttcctagctgggtgtggtggctcacacctgtaatctcagcactttgggaggctgaggcgggcagatcacctgaagttgggagtttgagaccagcctgaccaacatggagaaaccccgtctctactaaaaatacaaaattagctgggcgtggtggtgcatgcctgtaatcccagctactcgggaggctgaggcaggagaattgcttgaacccaggaggcggaggttgtggtgagccaagatcgtgccattgcaccccagcctgggcaacaaaagcgaaattccatctcaaaaaaagaaaacgcgccccatctcgctccaccacaagcgcctttatatactcaatgatgggtggaggaaaagggcccaagggctcacaccgcacaggagcctttactcaagtttcagctagttttccttcccctgcattttgaactccttttagttgttggtgatatcctttggtgttcactgcctttgtaaaacaagtaaataaagtaagcggaagatatctcttttgtttctgtagttgttaactgttctggattttctttacaatgcatccatttgggcataatgttatccctctttttatcaggtaaatgtagcatctaaaagtagctttggatcaaatcatgttgaatacctggtcaaagtaatgttttcttccttgttcttgcagagaaacaaattcatcagaacattaccacttgaccaggtttaaaattgtataacaggctgggcatggtggctcatgcctataatcccagcactttgggaggccgaggcaagaggatcacttgagcccaggagtttgagagcagcctgggcaacatagcaagaccctgtctcccaaaaattaaaaaaaaaaaaaaaaaaccaggtgtggtggcacctgcctgtactcccagctactcaggaggctggggtgggaggatcacttgagcctgggaggttgaggctacagtgagccatggctgcaccactgcactccagcctgggcaacagagtgagaccccatctctaaaaataaattgtacaacatctaacttcaatgcccaatcttatagaacaaaagtaaaatgtctttatgtaagaccccattatatttacagttcccaacagacccaccaactcttatatacccttatataacttgtttagaatttagccatgtgcatttttaaactgtgtttgtcaacattaagcctcagtacagtctccaaattatatgccaccagaaatgaaattcagcaaaggacaggattgtttttaacatacgcaagccagcctggccaacatggtgaaaccttgtctctactaaaaatacaaaaattagctgggcgtggtggtgggcacctgtaatcccagctacttgggtggctgaggcacaagaatcgcttcaacctggaagccgaaggttgcagtgggctgagattgtgccactgcactccagcctgggcaacagagcgagactctgtctcaaaaaaaaaaaaaaaaaaaaacccaccaaaccaaaaatatactatgcaaggaataattctagaagacattacataatgcaatacttgcaacatttgcaactaattttcccatagggataaatggaaatttcaacttatttcaaattttgcacatattatgaaaccttattaatgtatttttatcaaactaaatcagatttgtatttgaattgttaggaaaaaccatgtgcagttttggctgataattgaaggaaaaatatcaaatgctttgaattttttttctcttttttcaaaccctctgcagaggtaggaaggtatgaatttcttttttatgtcaagatgcaaaaacaaatcatgatgcttttgttgggagaatttttgtattcagtattttgtatgtacctttttttttttaaattggaaagcacaattcggtttaacatttagctttgcttgactccagtgtaagatgaagatgaccttgtcacagctcccctgacctgaagcagagcccttcccatcactgacagtgttgggggttgagagccccccagcagagcccttcccatcactgacagtgtgtcggcagctgagagctcccccagcagagcccttcccatcactgaacagtgttggcggctgagagccccccagcagagcccttcccatcactgacagtgttgggggctgagagccccccagcagagcccttcccatcactgaacagtgttggcggctgagagccccccagcagagcccttcccatcactgacagtgttgggggctgagagcccccctagcagagcccttcccatcactgacagtgtctggggctgagagccccccctagcagagcccttcccatcactgacagtgttgggggctgagagccccccagcagagcccttcccatcactgacagtgtctggggctgagagccccccagcagagcccttcccatcactgacagtgtctggggctgagagccccccctagcagagcccttcccatcactgacagtgtcgggttgagagccacccccagcagagcccttgccacgtacagagattttctgtcagcagtttcccagtatttcagactcataatctgtgtttagcactccagtgttctcttgtaatagccaggtctggaaacgacccatggaaagaggggcctttgtattctgctagaacacagagcatagtagtagatcacttttctgaagagctttttaaaatacagctaatcaaggagtttgcgatttctcttactttctacagctcagcagtgactaatgatgtgtgactatgcgaatgagtttgatgaattcgtaaaaactaagcgcttaaatggttatagaaatgaaaacatggatatttagaagcctttctatatacacagtgcagttgagatggtttacagcaaatttcgttttatttctgaaaatgttgtaaacatgtaattagtgaaagattttgtaaaacattgtcctgtatttttgtctgtaaatatattgcataagttctaagtataaatatgtcagtatcatgtatgttattttaaattgcctgtacgccactttacacattgacattcaaataaaagccaacacttcagtggcgtgtaataaaa

SEQ ID NO: 1321 - DNA, 908 bp, Homo sapiens
  source 1..908: mol_type = genomic DNA
cggcgaggctccggcctcgggtccggatgtataaagcgcggccccctgcggggagtggtggccccggagctgagccgccagccatggccgctccccgcgggagggccgcgccctggacgacggccctgctgctgctcctagcctcgcaggtcctgtctccgggaagctgcgcggacgaggaggaggtccccgaggagtgggtgctcctgcacgtcgtccagggccagataggcgccgggaactacagctacctgcggctgaaccacgagggcaagatagtcctcaggatgcgcagcctcaagggagatgcggatctgtacgtctccgccagcagcctgcaccccagcttcgacgactacgagctgcaatcggccacctgcggcccggacgccgtgtccatccccgcgcacttccggcgcccagtgggcatcggcgtctatggacacccctcccacctggagagcgagttcgagatgaaggtgtactacgacggcacggtcgagcagcacccgttcggcgaggccgcctaccccgccgacggcgcagatgccggccagaagcacgctggtgccccggaagacgcctcgcaagaggaggaatctgttctctggacgatattaattagcattttgaaactggtacttgaaattctcttttgagtcgttgaccacactctgggatataaaaccctccatctgtgaagctgattgcagtttgctgtgaaccttgctacttgtacttggttgaagttctaggtacctttagtcaagggatggaaaaataaagccatacgcagttttgttacctcagttaccccaaaaataggaaaagcagcaagcacagtattttaaagatcataattcctataaaaggactgtgcacaaagtgtttagactccattttcatta

SEQ ID NO: 1322 - DNA, 554 bp, Homo sapiens
  source 1..554: mol_type = genomic DNA
gtgtccaactgaaattatcgcttttggcgacagacttgaagaattcagatctataaatactgaagtggtagcatgctctgttgattcacagtttacccatttggcctggattaatacccctcgaagacaaggaggacttgggccaataaggattccacttctttcagatttgacccatcagatctcaaaggactatggtgtatacctagaggactcaggccacactcttagaggtctcttcattattgatgacaaaggaatcctaagacaaattactctgaatgatcttcctgtgggtagatcagtggatgagacactacgtttggttcaagcattccagtacactgacaaacacggagaagtctgccctgctggctggaaacctggtagtgaaacaatcaaacctgaagataccatgaaagcctggtggccaagagagagctataatcccagatccagctggaaagctgaagtatttcgataaactgaattgagaaatacttcttcaagttatgatgcttgaaagttctcaataaagttcacggtttcattac

SEQ ID NO: 1323 - DNA, 4509 bp, Homo sapiens
  source 1..4509: mol_type = genomic DNA
cccttgcaccctccttcttccctccgcccgggagctctccctggtccccggcgccgcctccttccctcccggctccccgctccccgctcccgtggctgccgccgccccggggaagaagagacaggggtggggtttgggggaagcgagagaggaggggagagaccctggccaggctggagcctggattcgaggggaggagggacgggaggaggagaaaggtggaggagaagggaggggggagcggggaggagcggccggcctggggccttgaggcccggggagagccggggagccgggcccgcgcgccgagatgttgctgctgctgctactggcgccactcttcctccgccccccgggcgcgggcggggcgcagacccccaacgccacctcagaaggttgccagatcatacacccgccctgggaagggggcatcaggtaccggggcctgactcgggaccaggtgaaggctatcaacttcctgccagtggactatgagattgagtatgtgtgccggggggagcgcgaggtggtggggcccaaggtccgcaagtgcctggccaacggctcctggacagatatggacacacccagccgctgtgtccgaatctgctccaagtcttatttgaccctggaaaatgggaaggttttcctgacgggtggggacctcccagctctggacggagcccgggtggatttccggtgtgaccccgacttccatctggtgggcagctcccggagcatctgtagtcagggccagtggagcacccccaagccccactgccaggtgaatcgaacgccacactcagaacggcgcgcagtgtacatcggggcactgtttcccatgagcgggggctggccagggggccaggcctgccagcccgcggtggagatggcgctggaggacgtgaatagccgcagggacatcctgccggactatgagctcaagctcatccaccacgacagcaagtgtgatccaggccaagccaccaagtacctatatgagctgctctacaacgaccctatcaagatcatccttatgcctggctgcagctctgtctccacgctggtggctgaggctgctaggatgtggaacctcattgtgctttcctatggctccagctcaccagccctgtcaaaccggcagcgtttccccactttcttccgaacgcacccatcagccacactccacaaccctacccgcgtgaaactctttgaaaagtggggctggaagaagattgctaccatccagcagaccactgaggtcttcacttcgactctggacgacctggaggaacgagtgaaggaggctggaattgagattactttccgccagagtttcttctcagatccagctgtgcccgtcaaaaacctgaagcgccaggatgcccgaatcatcgtgggacttttctatgagactgaagcccggaaagttttttgtgaggtgtacaaggagcgtctctttgggaagaagtacgtctggttcctcattgggtggtatgctgacaattggttcaagatctacgacccttctatcaactgcacagtggatgagatgactgaggcggtggagggccacatcacaactgagattgtcatgctgaatcctgccaatacccgcagcatttccaacatgacatcccaggaatttgtggagaaactaaccaagcgactgaaaagacaccctgaggagacaggaggcttccaggaggcaccgctggcctatgatgccatctgggccttggcactggccctgaacaagacatctggaggaggcggccgttctggtgtgcgcctggaggacttcaactacaacaaccagaccattaccgaccaaatctaccgggcaatgaactcttcgtcctttgagggtgtctctggccatgtggtgtttgatgccagcggctctcggatggcatggacgcttatcgagcagcttcagggtggcagctacaagaagattggctactatgacagcaccaaggatgatctttcctggtccaaaacagataaatggattggagggtcccccccagctgaccagaccctggtcatcaagacattccgcttcctgtcacagaaactctttatctccgtctcagttctctccagcctgggcattgtcctagctgttgtctgtctgtcctttaacatctacaactcacatgtccgttatatccagaactcacagcccaacctgaacaacctgactgctgtgggctgctcactggctttagctgctgtcttccccctggggctcgatggttaccacattgggaggaaccagttccctttcgtctgccaggcccgcctctggctcctgggcctgggctttagtctgggctacggttccatgttcaccaagatttggtgggtccacacggtcttcacaaagaaggaagaaaagaaggagtggaggaagactctggaaccctggaagctgtatgccacagtgggcctgctggtgggcatggatgtcctcactctcgccatctggcagatcgtggaccctctgcaccggaccattgagacatttgccaaggaggaacctaaggaagatattgacgtctctattctgccccagctggagcattgcagctccaggaagatgaatacatggcttggcattttctatggttacaaggggctgctgctgctgctgggaatcttccttgcttatgagaccaagagtgtgtccactgagaagatcaatgatcaccgggctgtgggcatggctatctacaatgtggcagtcctgtgcctcatcactgctcctgtcaccatgattctgtccagccagcaggatgcagcctttgcctttgcctctcttgccatagttttctcctcctatatcactcttgttgtgctctttgtgcccaagatgcgcaggctgatcacccgaggggaatggcagtcggaggcgcaggacaccatgaagacagggtcatcgaccaacaacaacgaggaggagaagtcccggctgttggagaaggagaaccgtgaactggaaaagatcattgctgagaaagaggagcgtgtctctgaactgcgccatcaactccagtctcggcagcagctccgctcccggcgccacccaccgacacccccagaaccctctgggggcctgcccaggggaccccctgagccccccgaccggcttagctgtgatgggagtcgagtgcatttgctttataagtgagggtagggtgagggaggacaggccagtagggggagggaaagggagaggggaagggcaggggactcaggaagcagggggtccccatccccagctgggaagaacatgctatccaatctcatctcttgtaaatacatgtccccctgtgagttctgggctgatttgggtctctcatacctctgggaaacagacctttttctctcttactgcttcatgtaattttgtatcacctcttcacaatttagttcgtacctggcttgaagctgctcactgctcacacgctgcctcctcagcagcctcactgcatctttctcttcccatgcaacaccctcttctagttaccacggcaacccctgcagctcctctgcctttgtgctctgttcctgtccagcaggggtctcccaacaagtgctctttccaccccaaaggggcctctccttttctccactgtcataatctctttccatcttacttgcccttccatactttctcacatgtggctccccctgaattttgcttcctttgggagctcattcttttcgccaaggctcacatgctccttgcctctgctctgtgcactcacgctcagcacacatgcatcctcccctctcctgcgtgtgcccactgaacatgctcatgtgtacacacgcttttcccgtatgctttcttcatgttcagtcacatgtgctctcgggtgccctgcattcacagctacgtgtgcccctctcatggtcatgggtctgcccttgagcgtgtttgggtaggcatgtgcaatttgtctagcatgctgagtcatgtctttcctatttgcacacgtccatgtttatccatgtactttccctgtgtaccctccatgtaccttgtgtactttcttcccttaaatcatggtattcttctgacagagccatatgtaccctaccctgcacattgttatgcacttttccccaattcatgtttggtggggccatccacaccctctccttgtcacagaatctccatttctgctcagattccccccatctccattgcattcatgtactaccctcagtctacactcacaatcatcttctcccaagactgctcccttttgttttgtgtttttttgaggggaattaaggaaaaataagtgggggcaggtttggagagctgcttccagtggatagttgatgagaatcctgaccaaaggaaggcacccttgactgttgggatagacagatggacctatggggtgggaggtggtgtccctttcacactgtggtgtctcttggggaaggatctccccgaatctcaataaaccagtgaacagtgtgactcgg

SEQ ID NO: 1324 - DNA, 3557 bp, Homo sapiens
  source 1..3557: mol_type = genomic DNA
gagaattttctccttccaaagtacagtgtaagaacagactggaagagaagttaccccgatgacttggtttggaaggggttaaggcaccagtcatcctcttctaaagtgatttatgatgatgtgtggagtttaaaaactttaccccaccccaaagaacagccttctcactcctcactgagtccactctgaacgtgctaaaatgggaaggaggcggtgttttgctgatctgttaaattcttagtgaagtttccttgatttccagtggctgctgttgtttgagtttggtttggagcaaaactgaggtagtcctaacatttctgggactgaatccaggcaagagaaagaagaaaaagaagaagaaaaagaggaggaaaaagtggattacacaatgacatggagaatgggaccccgtttcactatgctgttggccatgtggctagtgtgtggatcagaaccccacccccatgccactattagaggcagccacggaggacggaaagtgcctttggtttctccggacagcagtaggccagctcggtttctgaggcacactgggaggtctcgcggaattgagagatccactctggaggaaccaaaccttcagcctctccagagaaggaggagtgtgcccgtgttgagactagctcgcccaacagagccgccagcccgctcggacatcaatggggccgccgtgagacctgagcaaagaccagcagccaggggctctccgcgtgagatgatcagagatgaggggtcctcagctcggtcaagaatgttgcgtttcccttcggggtccagctctcccaacatccttgccagctttgcagggaagaacagagtatgggtcatctcagcccctcatgcctcggaaggctactaccgcctcatgatgagcctgctgaaggacgatgtgtactgtgagctggcggagaggcacatccaacagattgtgctcttccaccaggcaggtgaggaaggaggcaaggtgagaaggatcaccagcgagggccagatcctggagcagcccctggaccctagcctcatccctaagctgatgagcttcctgaagctggagaagggcaagtttggcatggtgctgctgaagaagacgctgcaggtggaggagcgctatccatatcccgttaggctggaagccatgtacgaggtcatcgaccaaggccccatccgtaggatcgagaagatcaggcagaagggctttgtccagaaatgtaaggcctctggtgtagagggccaggtggtggcggaggggaatgacggtggagggggagcaggaaggccaagcctgggcagcgagaagaagaaagaggacccaaggagagcacaagtcccaccaaccagagagagtcgggtgaaggtcctgagaaaactggccgccactgcaccagctttgccccaacctccctcaacccccagagccaccacccttcctcctgccccagccacaacagtgactcggtccacgtcccgggcggtaacagttgctgcaagacctatgaccaccactgcctttcccaccacgcagaggccctggaccccctcaccctcccacaggccccctacaaccactgaggtgatcactgccaggagaccctcagtttcagagaatctttaccctccatcccggaaggatcagcacagggagaggccacagacaaccaggaggcccagcaaggccaccagcttggagagcttcacaaatgcccctcccaccaccatctcagaacccagcacaagggctgctggcccaggccgtttccgggacaaccgcatggacaggcgggaacatggccaccgagacccaaatgtggtgccaggtcctcccaagccagcaaaggagaaacctcccaaaaagaaggcccaggacaaaattcttagtaatgagtatgaggagaagtatgacctcagccggcctactgcctctcagctggaggacgagctgcaggtggggaatgttccccttaaaaaagcaaaggagtctaaaaagcatgaaaagcttgagaaaccagagaaggagaagaaaaaaaagatgaagaatgagaacgcagacaagttacttaagagtgaaaagcaaatgaagaagtctgagaaaaagagcaagcaagagaaagagaagagcaagaagaaaaaaggaggtaaaacagaacaggatggctatcagaaacccaccaacaaacacttcacgcagagtcccaagaagtcagtggccgacctgctggggtcctttgaaggcaaacgaagactccttctgatcactgctcccaaggctgagaacaatatgtatgtgcaacaacgtgatgaatatctggaaagtttctgcaagatggctaccaggaaaatctctgtgatcaccatcttcggccctgtcaacaacagcaccatgaaaatcgaccactttcagctagataatgagaagcccatgcgagtggtggatgatgaagacttggtagaccagcgtctcatcagcgagctgaggaaagagtacggaatgacctacaatgacttcttcatggtgctaacagatgtggatctgagagtcaagcaatactatgaggtaccaataacaatgaagtctgtgtttgatctgatcgatactttccagtcccgaatcaaagatatggagaagcagaagaaggagggcattgtttgcaaagaggacaaaaagcagtccctggagaacttcctatccaggttccggtggaggaggaggttgctggtgatctctgctcctaacgatgaagactgggcctattcacagcagctctctgccctcagtggtcaggcgtgcaattttggtctgcgccacataaccattctgaagcttttaggcgttggagaggaagttgggggagtgttagaactgttcccaattaatgggagctctgttgttgagcgagaagacgtaccagcccatttggtgaaagacattcgtaactattttcaagtgagcccggagtacttctccatgcttctagtcggaaaagacggaaatgtcaaatcctggtatccttccccaatgtggtccatggtgattgtgtacgatttaattgattcgatgcaacttcggagacaggaaatggcgattcagcagtcactggggatgcgctgcccagaagatgagtatgcaggctatggttaccatagttaccaccaaggataccaggatggttaccaggatgactaccgtcatcatgagagttatcaccatggatacccttactgagcagaaatatgtaaccttagactcagccagtttcctctgcagctgctaaaactacatgtggccagctccattcttccacactgcgtactacatttcctgcctttttctttcagtgtttttctaagactaaataaatagcaaactttcacctattcatgagttattattgaaacctcaaatcataaagacatttaaaagaattgtttttctaactggaggggctctagtgctaaataatagtactgaaaattgatattattttccttttcttatatgaaggaccttatttggcatataaaattttataaaatatgta

SEQ ID NO: 1325 - DNA, 709 bp, Homo sapiens; identical to SEQ ID NO: 820
  source 1..709: mol_type = genomic DNA

SEQ ID NO: 1326 - DNA, 1548 bp, Homo sapiens
  source 1..1548: mol_type = genomic DNA
gtggactctgagaagcccaggcagttgaggacaggagagagaaggctgcagacccagagggagggaggacagggagtcggaaggaggaggacagaggagggcacagagacgcagagcaagggcggcaaggaggagaccctggtgggaggaagacactctggagagagagggggctgggcagagatgaagttccaggggcccctggcctgcctcctgctggccctctgcctgggcagtggggaggctggccccctgcagagcggagaggaaagcactgggacaaatattggggaggcccttggacatggcctgggagacgccctgagcgaaggggtgggaaaggccattggcaaagaggccggaggggcagctggctctaaagtcagtgaggcccttggccaagggaccagagaagcagttggcactggagtcaggcaggttccaggctttggcgtagcagatgctttgggcaacagggtcggggaagcagcccatgctctgggaaacactgggcacgagattggcagacaggcagaagatgtcattcgacacggagcagatgctgtccgcggctcctggcagggggtgcctggccacaatggtgcttgggaaacttctggaggccatggcatctttggctctcaaggtggccttggaggccagggccagggcaatcctggaggtctggggactccgtgggtccacggataccccggaaactcagcaggcagctttggaatgaatcctcagggagctccctggggtcaaggaggcaatggagggccaccaaactttgggaccaacactcagggagctgtggcccagcctggctatggttcagtgagagccagcaaccagaatgaagggtgcacgaatcccccaccatctggctcaggtggaggctccagcaactctgggggaggcagcggctcacagtcgggcagcagtggcagtggcagcaatggtgacaacaacaatggcagcagcagtggtggcagcagcagtggcagcagcagtggcggcagcagtggcggcagcagtggtggcagcagtggcaacagtggtggcagcagaggtgacagcggcagtgagtcctcctggggatccagcaccggctcctcctccggcaaccacggtgggagcggcggaggaaatggacataaacccgggtgtgaaaagccagggaatgaagcccgcgggagcggggaatctgggattcagggcttcagaggacagggagtttccagcaacatgagggaaataagcaaagagggcaatcgcctccttggaggctctggagacaattataggaactctgagacgtctcctgggatgtttaactttgacactttctggaagaattttaaatccaagctgggtttcatcaactgggatgccataaacaaggaccagagaagctctcgcatcccgtgacctccagacaaggagccaccagattggatgggagcccccacactccctccttaaaacaccaccctctcatcactaatctcagcccttgcccttgaaataaaccttagctgcccc

SEQ ID NO: 1327 - DNA, 1966 bp, Homo sapiens
  source 1..1966: mol_type = genomic DNA
aggtgacaatagatatagaagtacgttgatgtgcgaagatgtattttgttttagccagcgaggaaaaaagaatcagtttgattacacatttaccaaacattaagaatttaatatggtaacttttatttcagtattaaaatagcaattttatttattacttttttatatacagaattcgacaccaaattttggaacttaaaaagaagattcttaaaacttacaatccagattacgatgaggacctggtgcaggaagcttcatctgaagatgtcctgggcgttcatatggtggacaaagacacagagagagacattgagatgaaacggcaactacggcgactacgggagctccacctatacagcacatggaagaagtaccaagaggcgatgaagacatccttgggagttccacaatgtgagcgtgacgaaggctccttgggcaagccattgtgtccacccgagatactctcggagacgttgccaggctctgtgaagaaaagggtatgctttccatcagaagatcatctagaggagtttatagcagaacatctccctgaagcatccaatcagagtctcctcactgttgcccatgcagacgcaggcacccaaaccaacggtgacctggaagacctggaggagcatgggccagggcagacagtctctgaggaagccacagaagttcacacgatggagggggacccagacacactggccgaatttctgatcagggatgtacttcaggagctgtccagttacaacggtgaggaggaggacccagaggaggtgaagacatccttgggagttccacaacgtggtgacctggaagacctggaggagcatgtgccagggcagacagtctctgaggaagccacaggggttcacatgatgcaggtggacccagccacgctggcaaagagtgacctggaagacctggaggagcatgtgccagagcagacagtctctgaggaagccacaggggttcacatgatgcaggtggacccagccacactggcaaagcaattggaagactccaccattacaggcagccaccagcagatgtcagcaagtccttcctctgcacctgcagaagaagcaacagaaaagaccaaagtggaagaggaagtgaaaaccagaaagcccaagaagaaaaccaggaagcccagcaagaaaagccggtggaatgtcctgaaatgttgggacatttttaatatattttagagacctctgaaggcaagtgaaggatgccctgagaacatgctccaggaaacagacacccactccatagcagcccctgagcctgctgggctgagccctccacaggctgcttagtgagggagacactgaggtgctggtcgcacccccatgtgcaggactccaagggctttgcactgtgttgtctgcagtaactcttcagctcaccaacatctcatttggggggacctagctctgtcttcccagccccttgaggacaacagggagcatcactagttcatcctgaggagacactagggttgacatgaatccccctggttcaggcctcctgggaaaggtgtgagagggatggaggcacccccaggctccttgtcacacaagcgagcagcccacccgacccagtattgcaggccagcaggccctcagtaggtcctggtgtcaagcaggggacacggcaggatccaagaagcactgaaatgtgtccagtcccaggagtccttcagcctctggggggtctgggggcctccagttccaggggtccttcagcctctgtgggggcctggggtggcctcatggccccctttttcaagatgaggttggaggcttctgtatgtagagggcactggcttgggccaaatgccaacaaaacaaacccttgaagacatttcagggccatgctcacttgggagggtttgaggacatgatttagcgagcctctgttttttaaatatattttccaatcttgaaataaggta

SEQ ID NO: 1328 - DNA, 889 bp, Homo sapiens
  source 1..889: mol_type = genomic DNA
gaggagccagagagagctgcggagagctgccagctgcagcgggcgtgttccgcagctgtaggcacctgtcgtcctgccttcgatggctcctccctccgtccccctggtcctcctcctcgtcctcttgctgagcctggcagagactccagcatccgcacctgcccaccggtcctccaccttccccaaatgggtgaccaagacggaaagagggagacagcccttgagatcctagacctgtggaaggccatcgacgggctcccctactcccaccctccacagccctccaagaggaatgtgatggagacgtttgccaaaccagagattggagatctgggcatgctcagcatgaaaattcccaaggaggaagatgtcctgaagtcatagatgtcttcaaatccctgttcctatccttcttctccagctcctcctgctccctctgaaaccttttctaggtaccctatgctgagactaagatcctgaagttaaatacccaggtctcatgaagacattgtaaagcatttgaattattctaaaaaatttctggagtttcttaggttttattgattcatccttgaaatcagtataatgtgctattaatggaaccaatagtaattcgaggactagttgggagattctggggtaatcagggaatattcctgcaacacatttaaaggaattgtgttcttttggaatcatcccaattataacacgagctattgcataatacaaataaccctcttaagtctgagagtctgtgtctttatttgaaaagattcttcaaattgcgtacttactcctccatattctttcaacccacatgagtctcctcgagaagtgaggagaggcagtttggagcagaatggagagaataaaatgtttcttgtcaaac

SEQ ID NO: 1329 - DNA, 1140 bp, Homo sapiens; identical to SEQ ID NO: 240
  source 1..1140: mol_type = genomic DNA

SEQ ID NO: 1330 - DNA, 922 bp, Homo sapiens; identical to SEQ ID NO: 819
  source 1..922: mol_type = genomic DNA

SEQ ID NO: 1331 - DNA, 1510 bp, Homo sapiens
  source 1..1510: mol_type = genomic DNA
cactcggctgtgcggcggggcaggcatgggagccgcgcgctctctcccggcgcccacacctgtctgagcggcgcagcgagccgcggcccgggcgggctgctcggcgcggaacagtgctcggcatggcagggattccagggctcctcttccttctcttctttctgctctgtgctgttgggcaagtgagcccttacagtgccccctggaaacccacttggcctgcataccgcctccctgtcgtcttgccccagtctaccctcaatttagccaagcaatatctgtcttatgaaacgctctatgccaatggcagccgcacagagacgcaggtgggcatctacatcctcagcagtagtggagatggggcccaacaccgagactcagggtcttcaggaaagtctcgaaggaagcggcagatttatggctatgacagcaggttcagcatttttgggaaggacttcctgctcaactaccctttctcaacatcagtgaagttatccacgggctgcaccggcaccctggtggcagagaagcatgtcctcacagctgcccactgcatacacgatggaaaaacctatgtgaaaggaacccagaagcttcgagtgggcttcctaaagcccaagtttaaagatggtggtcgaggggccaacgactccacttcagccatgcccgagcagatgaaatttcagtggatccgggtgaaacgcacccatgtgcccaagggttggatcaagggcaatgccaatgacatcggcatggattatgattatgccctcctggaactcaaaaagccccacaagagaaaatttatgaagattggggtgagccctcctgctaagcagctgccagggggcagaattcacttctctggttatgacaatgaccgaccaggcaatttggtgtatcgcttctgtgacgtcaaagacgagacctatgacttgctctaccagcaatgcgatgcccagccaggggccagcgggtctggggtctatgtgaggatgtggaagagacagcagcagaagtgggagcgaaaaattattggcattttttcagggcaccagtgggtggacatgaatggttccccacaggatttcaacgtggctgtcagaatcactcctctcaaatatgcccagatttgctattggattaaaggaaactacctggattgtagggaggggtgacacagtgttccctcctggcagcaattaagggtcttcatgttcttattttaggagaggccaaattgttttttgtcattggcgtgcacacgtgtgtgtgtgtgtgtgtgtgtgtgtaaggtgtcttataatcttttacctatttcttacaattgcaagatgactggctttactatttgaaaactggtttgtgtatcatatcatatatcatttaagcagtttgaaggcatacttttgcatagaaataaaaaaaatactgatttggggcaatgaggaatatttgacaattaagttaatcttcacgtttttgcaaactttgatttttatttcatctg

SEQ ID NO: 1332 - DNA, 803 bp, Homo sapiens
  source 1..803: mol_type = genomic DNA
aggcccttccgcaatcggagccctcacagaggccaaactgatataaatctgcttaggaggcctgattcacagacgctacaggatggagcggggcgcaggagccaagctgctgccgctgctgctgcttctgcgggcgactggtttcacatgtgcacagacagatggccggaacggctacacggcggtcatcgaagtgaccagcgggggtccctggggcgactgggcctggcctgagatgtgtcccgatggattcttcgccagcgggttctcgctcaaggtggagcctccccaaggcattcctggcgacgacactgcactgaatgggatcaggctgcactgcgcgcgcgggaacgtcctaggcaatacgcacgtggtagagtcccagtctggaaggtggggcgcaggggtcgaggatcccttggggtgatgctggggcgaatggagtgagccgctgtggtgtcgcggcggcgcctacctagtggctttctcgcttcgcgtggaggcacccacgaccctcggtgacaacacagcagcgaacaacgtgcgcttccgctgttcagacggcgaggaactgcaggggcctgggctgagctggggagactttggagactggagtgaccattgccccaagggcgcgtgcggcctgcagaccaagatccagggacctagaggcctcggcgatgacactgcgctgaacgacgcgcgcttattctgctgccgcagttgaacggcgccgccgccgccgctctctcccgggccaggaggctagtcccacctcttgctattaaagcttctctgagttg

SEQ ID NO: 1333 - DNA, 1143 bp, Homo sapiens
  source 1..1143: mol_type = genomic DNA
gactttgagcgtccggcggtcgcagagccaggaggcggaggcgcgcgggccagcctgggccccagcccacaccttcaccagggcccaggagccaccatgtggcgatgtccactggggctactgctgttgctgccgctggctggccacttggctctgggtgcccagcagggtcgtgggcgccgggagctagcaccgggtctgcacctgcggggcatccgggacgcgggaggccggtactgccaggagcaggacctgtgctgccgcggccgtgccgacgactgtgccctgccctacctgggcgccatctgttactgtgacctcttctgcaaccgcacggtctccgactgctgccctgacttctgggacttctgcctcggcgtgccacccccttttcccccgatccaaggatgtatgcatggaggtcgtatctatccagtcttgggaacgtactgggacaactgtaaccgttggccccctctggaatgctgggacctgctaccaccggccctgcctggacctgtgtgggcagccctgggggcaaaggaggagatggcaggaaaggacagaacagtctactgccctctcctcatgaaggctctgggggcgagggtgggggagtgtccagggtgtcagagccctcaaaggatgcttccagagtctagtcgggtgctgctgcctaggtgtgcagagggggaacagcctggtgtgcagagagggaaaggaaggatgaggaaagccttcccggccctgcagactcctctggccctccccagcagtgcccccgcctctcctggggctggaaagcccagccatactgggtcttggctccccttgaggctccttaaaaggcaacattggaggtgggagccttggacagcttgcaaggaggcagttcagcatcttgtaataacagagttatgagcttgtaaaagcattatagaattcatagaatgcagcccttcagtcggcacctattattaaagacctactgcgtgacaggcactatgctgagctcaggagatggagcgggaatgcaacagacacagtccttgtcccatttctagtgtaaggtgaagggcatgggaagacaacaaatgagtatattctgacaagctgcccagtgttatagggaaaagagaggat

SEQ ID NO: 1334 - DNA, 600 bp, Homo sapiens
  source 1..600: mol_type = genomic DNA
ggctcccagcaacgcctgcattttgcacattggtttgcatgactgtctccgccgcagtctcagctgcagctgcaggactgagccgtgcacccggaggagacccccggaggaggcgacaaacttcgcagtgccgcgacccaaccccagccctgggtagcctgcagcatggcccagctgttcctgcccctgctggcagccctggtcctggcccaggctcctgcagctttagcagatgttctggaaggagacagctcagaggaccgcgcttttcgcgtgcgcatcgcgggcgacgcgccactgcagggcgtgctcggcggcgccctcaccatcccttgccacgtccactacctgcggccaccgccgagccgccgggctgtgctgggctctccgcgggtcaagtggactttcctgtcccggggccgggaggcagaggtgctggtggcgcggggagtgcgcgtcaaggtgaacgaggcctaccggttccgcgtggcactgcctgcgtacccagcgtcgctcaccgacgtctccctggcgctgagcgagctgcgccccaacgactcaggtatctatcgctgtgaggtccagcacggcatcgatgac

SEQ ID NO: 1335 - DNA, 761 bp, Homo sapiens; identical to SEQ ID NO: 929
  source 1..761: mol_type = genomic DNA

SEQ ID NO: 1336 - DNA, 560 bp, Homo sapiens
  source 1..560: mol_type = genomic DNA
acatgggccctgctggctgtgccttcacgctgctccttctgctggggatctcagatagagattaccattctgcccttcaggaagcagaagtacccattattgaccgccaggcttgtgaacagctctacaatcccatcggtatcttcttgccagcactggagccagtcatcaaggaagacaagatttgtgctggtgatactcaaaacatgaaggatagttgcaagggtgattctggagggcctctgtcgtgtcacattgatggtgtatggatccagacaggagtagtaagctggggattagaatgtggtaaatctcttcctggagtctacaccaatgtaatctactaccaaaaatggattaatgccactatttcaagagccaacaatctagacttctctgacttcttgttccctattgtcctactctctctggctctcctgcgtccctcctgtgcctttggacctaacactatacacagagtaggcactgtagctgaagctgttgcttgcatacagggctgggaagagaatgcatggagatttagtcccaggggcagataa

SEQ ID NO: 1337 - DNA, 2241 bp, Homo sapiens
  source 1..2241: mol_type = genomic DNA
cctgctcctgcctctaggaagctgctgcctcgtcgtcacctgtctgagaagagccatcacatttccatcccctccccagacatctcccacaagggacttcgctctaaaaggacccaaccttcggatccagagacatgggaaagtcttcccagattggactcacaaaggcatggaggacccgagttctcctttgatttgctgcctgaggcccgggctattcgggtgaccatatcttcaggccctgaggtcagcgtgcgtctttgtcaccagtgggcactggagtgtgaagagctgagcagtccctatgatgtccagaaaattgtgtctgggggccacactgtagagctgccttatgaattccttctgccctgtctgtgcatagaggcatcctacctgcaagaggacactgtgaggcgcaaaaaatgtcccttccagagctggccagaagcctatggctcggacttctggaagtcagtgcacttcactgactacagccagcacactcagatggtcatggccctgacactccgctgcccactgaagctggaagctgccctctgccagaggcacgactggcataccctttgcaaagacctcccgaatgccacagctcgagagtcagatgggtggtatgttttggagaaggtggacctgcacccccagctctgcttcaagttctcttttggaaacagcagccatgttgaatgcccccaccagactgggtctctcacatcctggaatgtaagcatggatacccaagcccagcagctgattcttcacttctcctcaagaatgcatgccaccttcagtgctgcctggagcctcccaggcttggggcaggacactttggtgccccccgtgtacactgtcagccaggcccggggctcaagcccagtgtcactagacctcatcattcccttcctgaggccagggtgctgtgtcctggtgtggcggtcagatgtccagtttgcctggaagcacctcttgtgtccggatgtctcttacagacacctggggctcttgatcctggcactgctggccctcctcaccctactgggtgttgttctggccctcacctgccggcgcccacagtcaggcccgggcccagcgcggccagtgctcctcctgcacgcggcggactcggaggcgcagcggcgcctggtgggagcgctggctgaactgctacgggcagcgctgggcggcgggcgcgacgtgatcgtggacctgtgggaggggaggcacgtggcgcgcgtgggcccgctgccgtggctctgggcggcgcggacgcgcgtagcgcgggagcagggcactgtgctgctgctgtggagcggcgccgaccttcgcccggtcagcggccccgacccccgcgccgcgcccctgctcgccctgctccacgctgccccgcgcccgctgctgctgctcgcttacttcagtcgcctctgcgccaagggcgacatccccccgccgctgcgcgccctgccgcgctaccgcctgctgcgcgacctgccgcgtctgctgcgggcgctggacgcgcggcctttcgcagaggccaccagctggggccgccttggggcgcggcagcgcaggcagagccgcctagagctgtgcagccggctcgaacgagaggccgcccgacttgcagacctaggttgagcagagctccaccgcagtcccgggtgtctgcggccgcaacgcaacggacactggctggaaccccggaatgagccttcgaccctgaaatccttggggtgcctcgaggacgactggccgaaaagccgcattccctgcctcacaggccggaagtcccagcccagtccccgcgcgcgtccctcttcctcctcatactttcccttgactgagagctcctctaacccctgttctgatgggggagggcggtcttcccacttcctctccagaactccagaaagagcagtgtgcttatgcttcagtccaggctggagaggttggggccggggtagggaggcaggagccatgtcagttctgaaggagggtgaggcggtgggggattgcagggggcggctgagagaaaacctccttgggggccagggattccctttcccactctgaggctctggccagagggagagaggactctggacctaggaaaagaggcttttggctccaggtggtcaggacagtgggggttgggggtggggtgggtgggtgctggcggtggggaccaagatccggaaagatgaataaagacaaacatgacaaact

SEQ ID NO: 1338 - DNA, 1538 bp, Homo sapiens
  source 1..1538: mol_type = genomic DNA
ggttgctaaggagtgggtgcctcagaatcaggctgcaatgggcattgtctgtgcacaatgttcctttattctgctgctgtccataataagggctcgtccacctcccttcctcttctgcccattgagcagtcaaagaactgaaagtccttataagcctgtgcacctgggcctgggccctacagataaggtagctgctattgctatggcccgcatcattgacctggtgccctgggacgatggctccacacatgtgtatgcctccccggccatcctgcttcccatggagcggcagcgcaaccagctggcgggcgtgaagcagcagctctaccacccagccctgcccaccctgcgccacatggacagggacaccgtcaaggcctgccttcctgatgagcactgccagtccaccacctactgccgcaaagatgaatttgacaacgcccattttacactccttggggtccccaacaaacccctgcagtgtttggacatcaccgccacaggccagaagcttcgcaacaggtaccacgagggaaagctggcgcccatcgcgccaggcatcaaccgagtggactggccctgcttcacgcgcgccatcgaggactggtcccacttcgtgtcctcggccggggagttcaagctgccttgcctgaggaagcgagcggagggtctcagcggctacgcggtgcggtacttgaagcccgacgtgacccagacctggcggtactgcctcagccagaaccccagcctggaccgctacggacagaagcccctgcctttcgactccctgaacactttccgaagcttcggctccagctacagtcgtgtcaactacctgaccccctggcattaatctctggaaaggaggctgactcccaggctgccggacggtgccacctcaggtcccctggccagacagaggacttatggtggcaccagccatctccccaggagttcagcctaactagaaataaacctaatgctcccttagagacacacgcaattgtctctgtctgtgtgtgttgcacagcctgggagagggtcagggccacaggatgacagtatcttacccttgcccgtccccggccaactcctggaggactggtggggggttggagaaaaatgtctggtgacctggtttgagagtcagggtgtaagccgcaaggtccagccagaattgagatccaagagcaagagatgtgctccagccccttgcctgcagccccacacccaagccccctccatttcagatcctgaatttgagccctaagaagaaagggagagggctagaaagctatttttaggtgcctttttgaagctcttgtcatactggtgtgctctggggggcttccctgtgcctggggtccccctgaaggtgtgggagcaggctggggcaaggggagctggccaggcctatggccttgattcctgtgacgcaacagaatgtagagtctaaacttgcatgagatgcatgaagccactcagagaagaaagttccccgctctccaaagcaccaccaataaacatgtcatttaagc

SEQ ID NO: 1339 - DNA, 2531 bp, Homo sapiens
  source 1..2531: mol_type = genomic DNA
aagctggcgctgggggcggcggcggggtgggaaagcggcgccgccgtggggcctcctggacgcgtcggcggaggtggcttcgtcccgcggagtccaggcttcagctcctggcttctcttctttcctcctagagatcagatgtcggaactccagctgagggcatgtcttactgggcacgcaggtgtcctctcttgagaagaactgtccataccatggtggtggtaaggctttcaccagttctcaggatgcccatagggatgggtgaagcctgcctggcctgtggtgcttcccagtggccgtcatctcattagggccccacagtggcattaggatgcacctctcggcggtgttcaacgccctcctggtgtcggtgctggcagcggtcctgtggaagcatgtgcggctgcgtgagcatgcagccacactggaggaggagctggccctcagccgacaggccacagagccagccccagcactgaggatcgactacccgaaggcactgcagatcctgatggagggcggcacacacatggtgtgcacgggccgcacgcacacagaccgcatctgccgcttcaagtggctctgctactccaacgaggctgaggagttcatcttcttccatggcaacacctctgtcatgctgcccaacctgggctcccggcgcttccagccagccctgctcgacctatccaccgtggaggaccacaacactcagtacttcaacttcgtggagctgcctgctgctgccctgcgcttcatgcccaagccggtgttcgtgccagacgtggccctcatcgccaaccgcttcaaccccgacaacctcatgcacgtctttcatgacgacctgctgccactcttctacaccctgcggcagtttcccggcctggcccacgaggcacggctcttcttcatggagggctggggcgagggtgcacacttcgacctctacaagctgctcagccccaagcagcctctcctgcgggcacagctgaagaccctgggccggctgctgtgcttctcccatgcttttgtgggcctctccaagatcactacctggtaccagtatggctttgtgcagccccagggcccgaaggccaacatcctcgtctcaggcaatgagatccggcagtttgcacggttcatgacagaaaagctgaacgtgagccacacaggagtccccctaggcgaggagtacattctggtctttagccgaacccagaacagactcattctgaatgaggcagagctgctgctggcactggcccaggagttccagatgaagacagtgacagtgtccctggaggaccacacctttgctgatgtcgtgcggctggtcagcaatgcctccatgctggtcagcatgcatggggcccagctggtcaccaccctcttcctgccccgtggggcaactgtggtagagctcttcccatatgctgtcaatcccgaccactacactccctataagacgctggccatgctgcctggcatggacctccagtatgtagcctggcggaacatgatgccagagaacacagtcacacaccctgagcggccctgggatcaggggggcatcacccatctggaccgggctgagcaagcccgtatcctgcaaagccgtgaggtcccacggcatctctgttgccggaaccccgagtggctcttccgaatctaccaggacaccaaggtggacatcccgtccctcattcaaaccatacggcgcgtggtgaagggccggccaggaccacggaagcagaagtggacagtcggcctatatccaggcaaggtgcgggaggcacggtgccaggcgtcagtgcatggcgcctccgaggcccgcctcactgtctcctggcagatcccatggaaccttaaatacctgaaggtgagggaggtgaagtacgaggtgtggctgcaggagcagggggagaacacctacgtgccttacatcctggctctgcagaaccacaccttcactgagaacatcaagcccttcaccacctacctggtgtgggtccgctgcatcttcaacaagatcctcctgggaccctttgcagatgtgctggtgtgcaacacgtagcgagcaggccacagcctggcctcgggaaggtggctcctgcagttcagcgtccctgggcccattaatcccactgtggagacttctgggaactatttattgagcaggcctgtgcctccacatcatcttgttgtctctggggtgtggtgtcacagcactcctctttgccctagagataagggacctgacttccccttctcccatcctgaacatttgtacccctggagaagttccttagcagggaggaggaagaggagaggaggaagcaaagaatcacaaggaacctctggctaggtgatcctgatgtttcctactgagtttttctggtatccagatttctggaaaccgagtaatcatgtactgtttgattgggtggttcatctgcttccatcccagtgaaatttacctgtagcccagtgaagggtgtgtttggaacattcattaaatgattctaagcatc

SEQ ID NO: 1340 - DNA, 1300 bp, Homo sapiens
  source 1..1300: mol_type = genomic DNA
gcagacccagcgccgagcccgagccatggcgtccgagcggctccctaacaggcccgcctgtctgctcgtggccagcggcgccgccgaaggggaaagccatggaatttgtggatgtgactgagagcaatgcacgctgggtgcaagacttccgcctcaaggcttacgccagccccgccaagctcgagtccatcgatggtgcccggtaccatgccctcctgatccccagctgtcctggggccctgaccgacctggccagcagtggctccctggcccgtatcctgcagcacttccactctgagagcaaacccatctgcgccgtcggccacggtgtcgccgccctgtgctgtgccaccaacgaggacagatcctgggtgttcgacagctacagcctgacagggccctctgtgtgtgagctcgtcagggcccccggcttcgcccgcctgccgctcgtggtggaggacttcgtgaaggattcgggcgcctgcttcagtgcaagcgagcctgacgctgtccacgtcgtgctggaccgccacctggtcacaggccagaatgccagctccactgtcccggccgtgcagaacctgctcttcctctgtggcagccggaaatgaacctgctgggtagatgcaccccctgagacagcccaggtgtctccagaggcagccccgtctcaggcttcagggaccccgcctcttccctcctgacaagggccctggatggcagcctggtctggccctgatgggattgttggaggcctcctggaatcagctctgagggggtgtcggctctcctggagggtccaaacccccatcctcctgcatgttctctggtaggaggcagagaaaagaccccacgtgcctggagagctgtgctagctgctaggtggtcctcgggaattccaggctgggttttctagggaggactggttgtcacgtgtggtcactgttgactagacagagtcggctcgggggtcctctgtgtgggtttgccctgctgtggcctgtctgccacccaccacctctttcactgttggtgggggccttgaggggagggcccagccggcgggagctggctcagaactttggccaaaggtgaacggaattttttaggagcagcagcctcctgccccaaggccgaccggcactggcagcactttcctgttgaagaaatcttcctggcgtgtggtttcaaagtgtaagcacctcagtgatgcaccctgtcctaagcattgagaggcacgtttacttgtgaatatgagaccatgagattctcaatgataggaaagtgctgtcccccacgg

SEQ ID NO: 1341 - DNA, 2995 bp, Homo sapiens
  source 1..2995: mol_type = genomic DNA
cggctcccccgccgtccgcgtctgcgccggccccggggcctggtcggcggcggcggggccggtcgatggcccgggcggcggcggcggcatgcggctcctgttcctggcggtgctgcggccacacaccggcaacgcggtcacggcccagcgcgttcgggcccatctagaggctgcagggcacgtgtgcgttttgaaggatgcctttgactttgaaagccgatctgagattgcaaacctcatcttggctgagaactgcgaggctgccctggctcttcatctctataggggaggcaggcttttgcaaggccaccgaatcccttttggagtcatctttggtggaactgatgtaaatgaagatgccaaccaggcggaaaaaaacacagtcatgggcagagttcttgaggaagccagatttgctgtcgctttcacagagtcaatgaaggaaatggcacaagcgcagtggccgcatgctaagggtaaggtctatgtccagagtcaaggaattgcaacaacaccaaacgccgcttttaactggaatacctttcttcaacgctctgagattaaccaaagtgctgataatttgcacatatttcttctgatatgtggacttcgacaagttaaggatcctctctatctggtggacgcattttcagcctggcatcaggaggagcccaatgtgcacctggtgattgtgggtcctgaagtcgatccagtgtttacaagggaagtgaaagccaaagtgaaaagagccgctggggtacgattgattggagagatgcctcaagaagatctgcacgcggtggtgaagaattgcttcgcggtggtgaatagctctgtctctgaaggcatgtcagctgcaattttggaggcaatggatttagaagtaccggtattggccaggaacatccccgggaatgctgccgtggtgaagcatgaagtcacagggctactgttttccaatcctcaggagtttgttcatctggcaaagagactggttagtgatcctgcattagaaaaggaaatcgtagtgaacggaagggaatacgtgagaatgtatcattcatggcaggtggaaagagacacctaccaacagctcatcaggaagctggaaggaagcactgaagattgagggccccgcctcatcagacacctgctctctgacacacagctctgggtgcacactcagagacagagttctggatcacgtgggcccagtgcagttcaaataaaaccagcctcagcggaatcctagaaaatgttagtcgtgagtccccagagccactgcattcatcccatatccttctgtgcgttcagatgctgtcccaggcgtgttcaccagccagtcctgatggaggtgcatgagtgactgggttgactgggacagggaaaggggaactggttttcagggaatttgggagagaatttgattacctgccttagggctttggtgtggacaatagaggcttattttcaagcagtcatggttcagactcctcccgcctgccttctgaccaacctctccccatcgttgccagtttgaaaggcaaaagcaaaacagacgtgtcagctgagccgagtcctcgcaggatttttgttgtgatctcaggactctgacaggcacgtgggtgacccgaggcttctctgaacactagaaagcgctgtgagtgagctcacgcccggcacagctcacttttcaatggtggaattgaaagttgtgctttttagaaaagtggccaggctgcccgcaggccccgcccacctcttggctgaatttgagtggaaaaccaggaaggaacaagcgccacgtcacgcatagcctgcaaatcgcccgcgtgaccctgagatggaggcctgaggctttgggtccagggtgggctcttccccttcccacatcagggacccggggatggatgtcggaagggtcaccagcctccagcctttggcaggatggagcttgggtctgcagggctttgcagccacacagcgaggtcagtccggggccagccgcgccatcatggtaatggtggcctcgccccatccatgtcatccatgtcacatgaggacgtgcagtcttccttgtcctctcctagtggaatttgcctgggagaacctccactgaatactgaaattgttgcatgcctgtggattccttacgacaatggggaacgcggtgtttcccacctcttgtgggtagaaagcagtctgctttgaggaggcgagaaggcaaagccagggcagggcgttgctgtgggaagcgttcggtgaaagcgggtttcgacgcttaggagggccgagggagaagattccaccagcattgtccttgcttcaagttttaggatgtctgaactttcagctttcatgttttcaaccatcatttttttaatggcacaacctacatcttgtttttaaaagaagtagcctcaaattaaactccttaaactctgatgccctggggatgagaacaactagcttggatctcgtgccgtgtaattcaatgtttcattccgctgcctccatcatgtaatagaatcgctttccagaaaggcagttaactggaagcagcagaggctcccagccgtgagaggactgctcaacaatgccccccatcgccgcccccccacccctcgcaccccttgtgttttccctctgaggggcccaagggttatggctttcatgtctaggtgtggggacagaggagggagaggcagatcctgggccgggagaggatggcctggtctgaatctggagtaattaatgccacccaaagaaaaggccctgccaggtccaatgttgtcttagatctgatgatgctgctatttacaaaacactgatcgtccgaaagcttgaatctgttcctcctcgaatgaccctgtagatgcctgacctccaccgtacctccacatcactattcatgtccttctaggaaaatgtgcacatgcctcacgcactatgtgggaagggcgtgtttttaaattaataaagtgtgtcaccatta

SEQ ID NO: 1342 - DNA, 1479 bp, Homo sapiens; identical to SEQ ID NO: 1142
  source 1..1479: mol_type = genomic DNA

SEQ ID NO: 1343 - DNA, 372 bp, Homo sapiens
  source 1..372: mol_type = genomic DNA
tctggaacattagacaggatgctgatcttctggacaatcacacttttcctgctgggagcagccaaaggaaaagaagtttgctatgaggacctcgggtgcttttctgacactgagccctggggcgggacagcaatcaggcccctgaaaattctcccctggagccctgagaagatcggcacccgcttcctgctgtacaccaatgaaaacccaaacaactttcaaattctcctcctctctgatccatcaacaattgaggcatcaaattttcaaatggacagaaagacccggttcatcatccatggcttcatagacaaaggagatgagagctgggtgacagacatgtgcaagcctggggcatcgccaagagcctga

SEQ ID NO: 1344 - DNA, 1971 bp, Homo sapiens
  source 1..1971: mol_type = genomic DNA
aggaaaggtggttggcttacggcacagtagagagcttccagggctggctggcgtgggatacccgtaccacagaaatgcagggaccattgcttcttccaggcctctgctttctgctgagcctctttggagctgtgactcagaaaaccaaaacttcctgtgctaagtgccccccaaatgcttcctgtgtcaataacactcactgcacctgcaaccatggatatacttctggatctgggcagaaactattcacattccccttggagacatgtaacgctattgaaactcaagcgattacagacaattgctctgaagaaagaaagacattcaacttgaacgtccaaatgaactcaatggacatccgttgcagtgacatcatccagggagacacacaaggtcccagtgccattgcctttatctcatattcttctcttggaaacatcataaatgcaactttttttgaagagatggataagaaagatcaagtgtatctgaactctcaggttgtgagtgctgctattggacccaaaaggaacgtgtctctctccaagtctgtgacgctgactttccagcacgtgaagatgacccccagtaccaaaaaggtcttctgtgtctactggaagagcacagggcagggcagccagtggtccagggatggctgcttcctgatacacgtgaacaagagtcacaccatgtgtaattgcagtcacctgtccagcttcgctgtcctgatggccctgaccagccaggaggaggatcccgtgctgactgtcatcacctacgtggggctgagcgtctctctgctgtgcctcctcctggcggccctcacttttctcctgtgtaaagccatccggaacaccagcacctcactgcatctgcagctctcgctctgcctcttcctggcccacctcctcttcctcgtggggattgatcgaactgaacccaaggtgctgtgctccatcatcgccggtgctttgcactatctctacctggccgccttcacctggatgctgctggagggtgtgcacctcttcctcactgcacggaacctgacagtggtcaactactcaagcatcaatagactcatgaagtggatcatgttcccagtcggctatggcgttcccgctgtgactgtggccatttctgcagcctcctggcctcacctttatggaactgctgatcgatgctggctccacctggaccagggattcatgtggagtttccttggcccagtctgtgccattttctctgcgaatttagtattgtttatcttggtcttttggattttgaaaagaaaactttcctccctcaatagtgaagtgtcaaccatccagaacacaaggatgctggctttcaaagcaacagctcagctcttcatcctgggctgcacatggtgtctgggcttgctacaggtgggtccagctgcccaggtcatggcctacctcttcaccatcatcaacagcctccaaggcttcttcatcttcttggtctactgcctcctcagccagcaggtccagaaacaatatcaaaagtggtttagagagatcgtaaaatcaaaatctgagtctgagacatacacactttccagcaagatgggtcctgactcaaaacccagtgagggggatgtttttccaggacaagtgaagagaaaatattaaaactagaatattcaactccatatggaaaatcatatccatggatctctttggcattatgaagaatgaagctaaggaaaagggaattcattaaacatatcatccttggagaggaagtaatcaacctttacttcccaagctgtttgttctccacaataggctctcaacaaatgtgtggtaaattgcatttctcttcactatggtgtattcagtcaatgcttgtccctggaaacccaaagcatgaccactgcaaatatttccttgactttttgtaaatgaagaggtccttttcctcaagttcttagtcccactcatccta

SEQ ID NO: 1345 - DNA, 5992 bp, Homo sapiens
  source 1..5992: mol_type = genomic DNA
gccccagcttggccgggcgcggagcggggcgcatggcgccgggcgcactgcgcgggggctgcgaacaaagggcccccggcggcggcgcgaggacggccgcgctcggaccctggccctggcccagccctggcccggccccctccccaggcgcggcgccccccaggagccgaaaaatgagcggcgccctgctctggccgttgctcccgctcctgctcctgctgctgtcggcgcgggacggcgtgcgcgccgcgcagcctcaggccccgggttacttgattgcagctccctctgtttttcgcgcgggcgtggaggaagtcatcagcgtgaccatctttaactctccaagggaagtcacggtccaggctcagctggtggcccagggtgagccggtggtgcagagccagggagccatcctggataaagggacaatcaaactcaaggtgcccacgggcctccggggccaagcgcttctgaaagtgtggggccgcggctggcaggcggaggaggggcccctctttcacaaccagacctcggtgaccgtggacggccggggcgcttctgtattcatccagacggacaagcctgtgtacagaccccagcaccgagtgctcataagcatcttcaccgtctctccaaatctgaggcctgtcaacgagaagctggaagcctacatcctggacccccgaggctctcggatgatagagtggagacacttaaagccgttctgctgcggcatcaccaacatgagcttccccttgtccgaccagcctgtgttgggagaatggttcatttttgttgaaatgcaaggccacgcgtacaacaagtcttttgaagttcagaagtatgtgttgcccaagtttgagcttctgattgacccgccccggtatatccaagacctggacgcctgtgagacaggcactgtgcgggccaggtatacctttgggaaacctgtggctggtgccttaatgatcaacatgactgttaatggtgtagggtactacagccacgaggtgggacgccctgtcctcagaacaaccaagatcctcggctcccgggacttcgacatctgcgtgagggacatgatcccagcggacgtccctgagcacttccggggcagggtcagcatctgggccatggtgaccagtgtggacgggagccagcaggtcgcgttcgatgactccacccccgtgcagaggcagctggtggacatccggtactccaaggacacgaggaagcagttcaagccgggcctggcctacgtggggaaggtggagctatcctaccccgatggcagcccagctgagggggtgacggtccagattaaggcagagctgacaccaaaggataacatctacaccagtgaagttgtgtcccagcgtggactagtggggtttgaaatcccctccatccccacgtcagcccagcacgtgtggctggagaccaaggtgatggcactgaacgggaagcctgtgggggctcagtacctgcccagctacctctccctcggcagctggtactcccccagccagtgctacctgcagctgcagccaccctcccacccactgcaggttggggaagaagcctatttttctgtgaagtccacatgtccctgcaactttaccctgtactacgaggtggctgcacggggcaatattgtgctatcgggccagcagcctgcccacaccacccagcagcgaagcaagcgggcggcccctgccctggagaaaccgattcgtttaacacacctttctgagacagagcccccaccagccccagaagctgaggtcgacgtgtgtgtgacctctcttcatctggccgtgacccccagcatggtcccccttggtcgcctgctggtcttctacgtcagggagaatggagaaggggtcgccgacagccttcagtttgcagtcgagaccttcttcgaaaaccaggtttcagtgacgtattcagcaaatgagacccaacctggggaggttgtcgacctgcggatcagggctgcaaggggcagctgtgtgtgcgtcgccgcagttgataagagtgtctacctgctcaggtctgggttccggctgactcctgcccaggttttccaggaactggaagattatgatgtttctgattcctttggcgtgtccagggaggatggtcctttttggtgggctgggctgacggcacaacgacgccggcgctcctctgtcttcccgtggccttggggcatcaccaaggactctgggtttgccttcaccgaaacgggactggtggtgatgaccgaccgagtgagcctgaaccaccggcaggacggtggcctctacaccgatgaggctgtccccgctttccagccccacacagggagcctggtggcagtggctccttccaggcacccccccagaacagagaagagaaaaaggactttcttccccgaaacatggatttggcattgtctcaacatcagtgacccatctggtgaggggacactcagtgtgaaggtcccggactccatcaccagctgggtgggtgaggccgtggccctgtccacctctcagggcttaggcatcgccgagccctccctgctgaagaccttcaagcccttcttcgtggacttcatgctccccgctctcatcatccgtggggagcaggtcaagatcccgctcagtgtctacaactacatgggcacctgcgctgaggtgtacatgaagctctcggttcccaagggcatccagtttgttgggcatcctggcaaacgccatgtgaccaagaagatgtgtgtggcccccggggaggctgagcccatctgggtcgttctgtccttcagcgacctgggactcaacaacatcacggccaaagcccttgcttacggagacacaaattgctgccgggatgggaggtccagcaaacaccctgaggagaatcacgccgacaggagggtccccatcggggtggatcacgtcaggcgcagtgtgatggttgaggcggaaggagtcccccgggcgtacacctacagcgcattcttctgtcccagtgagagagtccacatctccacccccaacaagtatgagttccagtatgtgcagcggccactgcgcctcacccgctttgatgtggctgtgcgagctcacaatgatgcccgtgtggccttgtcttctgggccccaggacacagcaggcatgatcgagatcgtcctgggggggcatcagaacaccaggtcatggatctccaccagcaagatgggagagcccgtggccagtgcacacacggccaagatcctctcctgggatgaattcagaacattctggatcagctggcgtggtggccttatccaggttggccatggtccagagccatccaatgagtctgtcattgtggcctggaccctcccgaggccaccagaggtccagttcattggcttttccaccggctggggctccatgggtgaattccgaatctggaggaagatggaggtggacgagagctacagcgaggccttcaccctgggggtcccacacggcgccatccctgggtctgagcgagccaccgcctccatcatcggggacgtcatggggccaaccctgaaccacctcaacaacctcctgcggctgccgtttggctgtggagagcagaacatgatccactttgcacccaacgtctttgtcttgaagtatcttcagaaaacccagcagctcagccctgaggtggagagagagaccaccgactacctagtacaaggctaccagcgccagctgacctacaagcgccaggatggctcctacagcgcgtttggggagcgggacgcatcggggagcatgtggctcacagcctttgtcctgaagtccttcgcacaggctcgcagctttatcttcgtggacccccgggagctggctgccgccaagagctggatcatccagcagcagcaggccgatggctccttcctggccgtgggcagggtcctgaacaaggacatccagggtgggatccacggcactgtcccgctgacagcctacgtggtggttgctctcctggaaacaggcacagcctcagaggaggagagaggctccactgacaaagcgaggcacttcctggagtctgctgcgcccctggccatggacccttatagctgtgccctgactacctacgcgctgaccctgctccgcagcccggcagcccctgaggcactgcgcaagctccgtagcctggccatcatgcgagatggggtcacccactggagcctgtcaaattcctgggacgtggacaagggcacattcttgagcttcagtgacagggtctctcagtcagtggtctcggccgaggtggaaatgacagcctacgcccttctgacctacactctgctgggtgacgtggctgccgccctgcctgtggtgaagtggctgtcccagcagcgaaatgcacttgggggcttctcctccactcaggacacctgcgtggctctgcaggccttggctgaatatgccatcttgtcctatgctggaggcatcaacctcactgtctccctggcctccaccaacctggactaccaggaaaccttcgagctgcacaggaccaaccagaaggttctgcagacagcagcgatccccagcctccccacggggctgtttgtgagtgccaagggggacggctgctgcctgatgcagattgatgtcacctacaatgtgcctgacccggtggccaagccagctttccagctgctcgtaagcctccaggagcctgaggcccagggacgcccgccccccatgcctgcctccgcagctgagggttcccgaggagactggcccccagctgacgatgatgacccagcggccgatcagcatcaccaggaatacaaggtgatgctggaggtgtgcaccaggtggctgcatgcagggtcttccaatatggctgtcctggaggtgcccctgctgtcaggcttccgggcagacatcgagagcctggagcagctgctccttgacaagcacatggggatgaagaggtatgaagtggctggacgccgagtgctcttctactttgatgagatccccagccggtgcctgacgtgcgtgcggttccgtgctctccgggagtgcgtggtgggcaggacgtcggcgctgccagtctccgtgtacgactactacgaacccgccttcgaggccactcgcttctacaacgtcagcacccacagcccactcgcccgggaactgtgcgccggacccgcgtgcaacgaagtggagcgcgcccctgcccggggcccgggctggttccccggcgagtcgggccctgccgtggcccctgaggagggggcggcgatcgcgcgatgcggctgcgaccacgactgcggcgcccaggggaacccggtgtgcggctccgacggggtggtctacgccagcgcctgccgcctgcgggaggccgcctgccgccaggccgcgcccctggagcccgcgcctcccagctgctgcgccctcgagcagcggctgccggcctcgtcgtcctccacctacggggatgacctggcttctgtggccccggggcctttacagcaggacgtgaagctgaatggagccggccttgaggtggaggactcagaccctgagcctgaaggggaggcggaggacagggtcacagccgggcctcggcctcctgtgagcagcgggaacctggaaagcagcacccagagcgccagcccgttccacagatggggccagactccggcccctcagagacatagtggccgggtggtgggggcccacaggccagggcttctgagccctgtcttcgtctacagcccagcctttcagagtggtggggaggagggtttatggatgtcaaacacctgcaccttgagataatcctacaaccacatgcagttgtgggaccgcagtttggtcctggggaccattcatacccacacacccagcttgtgcctgtggttaacatctcagaaaactctggtaaatgatcactccaggatattgacaagaatacacgttactgatcttactcacatgtt

SEQ ID NO: 1346 - DNA, 603 bp, Homo sapiens
  source 1..603: mol_type = genomic DNA
gtacctgtagctgcggcgctgaggtcggaacgtctgcgtgtgtgcgggctggttttgtggcggctgctgctagagctggagcatttgccgggttggtggctcctgcacatttttacagttctccagtccttctctttcgaatttgaatatggaggctacaggaacagatgaagttgacaagctaaaaaccaaatttatatctgcttggaacaacatgaaatatagttgggtgttgaaaacaaagacgtattttagtagaaattctcctgtattattgcttggaaaatgttaccattttaaatatgaagatgaagataaaacgttacctgcagagtcgggatgtacaatagaggatcacgtaattgcaggaaatgtagaagaatttcgtaaagatttcatttctagaatatggctgacctacagggaagaattccctcaaatagaaggctcagctttgacaacagactgtgggtggggctgcacattgagaactggccagatgctcttggctcaaggactcatactacactttcttggtagagcttggacctggcctgatgctttgaatattgaaaattcagactctgaatcatggacttccca

SEQ ID NO: 1347 - DNA, 4628 bp, Homo sapiens
  source 1..4628: mol_type = genomic DNA
cttaggcctgtcccctcagttcccaggtgccatgaggaagcctcgtcggaagtcccggcagaatgccgagggccggcgttccccgtccccctacagtctcaagtgctcacccacccgggagaccctgacatatgcccaggcccagcggattgtcgaggtagacattgatggacgcctgcatcgtatcagcatctatgacccactcaaaatcattactgaagatgagctaactgcccaggatatcaccgaatgcaatagtaacaaggaaaacagtgaacagcctcagttccctggcaagtccaagaaaccctcatccaagggcaaaaagaaggaatcctgctccaagcatgcatctggtacttccttccacctcccacagcccagcttccgtatggtggactcaggcatccagccagaagcacccccgctgcctgctgcctactaccgctacattgagaagccacctgaagacctggatgcagaggtagagtatgacatggatgaggaggaccttgcctggctggacatggtgaatgaaaaacggcgagtagatgggcacagtttggtgtctgcagatacctttgagctgctggtagaccggcttgagaaagagtcatacttggagagtcgcagcagtggggcccaacagtcactcatcgatgaagacgctttctgctgtgtgtgcctggatgatgaatgtcacaatagcaatgttattctcttctgtgacatctgcaacctggctgtacaccaggagtgctatggcgtcccatacatccctgagggccagtggctatgccgctgctgcctgcagtctccctcccggcctgtggattgcatcctttgccccaataagggtggcgccttcaaacagaccagtgatgggcactgggcccatgtggtgtgtgccatctggatccctgaagtctgctttgctaacaccgtgttcttggaacctattgagggcattgacaatatcccgcctgcccgctggaaactaacctgctatatctgcaagcagaaagggctaggtgcagccatccagtgccataaggtgaactgctacacagcattccatgtgacatgtgcacagcgggctgggctcttcatgaagattgagcccatgcgcgaaaccagcctcaatggcaccatctttacagtgcgcaagactgcctactgtgaggcccactcgccaccaggtgcggccactgctaggaggaagggcgactcccctagaagcatcagtgagactggcgatgaggaagggctgaaggagggtgatggagaggaggaagaagaggaagaggtggaggaagaagagcaggaagctcaaggcggggtgagtggctccctcaagggagtgcccaagaaaagcaagatgagtttgaagcagaagatcaagaaggagccagaggaagcaggccaagacacaccctccactctccccatgcttgctgtcccacagataccctcttacaggttgaacaagatctgtagtggtctctcctttcagaggaaaaaccagtttatgcagcggcttcacaattattggctgttgaagcggcaggcacggaatggtgtccctcttatccggcgcttgcactcccatctgcagtcccaaagaaacgctgagcagcgagagcaggatgagaagacaagtgcagtgaaggaggagctgaagtattggcagaagctccggcatgacttggagcgggcgcggctgctgattgagctgattcggaagagagagaagctcaaacgagagcaggtcaaagtccagcaggctgccatggagctggagctgatgccattcaatgttctgttgaggacaacactggacctgctgcaggagaaggatcctgcacacatcttcgcagaaccagtcaacttgagtgaggttccagattacctggaattcatatccaagccaatggatttttctactatgaggcggaagctggagtcccacctgtaccgcaccttggaggagtttgaggaggactttaaccttatagttaccaactgcatgaagtataatgctaaagacacaattttccaccgagcagctgtccgcctgcgggacctgggaggggccatcctacggcacgcccggcggcaggcagagaacatcggctatgaccccgagaggggcactcacctgcccgagtcacccaaattggaagacttttaccgcttctcctgggaagacggcagaagcctcctgctgccctttgaagaccgcggagacctggagcccttggagctggtgtgggccaagtgccgaggctacccctcctaccctgccttgatcatcgatcccaagatgccccgggagggcctcctgcacaatggcgttcccatccctgtccccccgctggacgtgctgaagctgggagagcagaaacaggcagaggctggagagaagctcttccttgtcctcttctttgacaacaagcgcacctggcagtggcttccaagggacaaagtcctgcccttgggtgtggaagacaccgtggacaagctcaagatgctggaaggccgcaagaccagcatccgcaagtcagtgcaggtggcctatgaccgtgcgatgatccacctgagcagagtccgggggccccactccttcgtcacttccagctacctgtaagggcagggctgggcctgcatccgcttgccctgcctccatcccgcagggcacagagaagcctcttctgcccctgccagatgtatggccggcagcttccccctctcatggtaggccagggactgggctttctccccactaagggcaaggccccagttttgaccaatcgcatggttctcctggcaggcctgctgtgtgccaaaaactcccacccaaggtccctcaggggatatttcactgaagaaccagttagaagtagaaacagctgtggggcttgggcccagcttaggagattgcccagatggcaagaggtcctgggctccttcttgaggggctgcctggcccgctccatcctactcccactaactacacctcagggcgggtgaggttccgacactgatcccagagatgccgtggatacgccagggtcccagggggaatctccccaagctcacactctctcccgcttatcgcctattctcacacctcttctcggtcccatcttctgcacccattgcccagtcttgctttctctttcccatattccttttctttttctcttgtgccaaactgacagaaaccgtcaccacactggtctttttctttaatgtctcattccccttgaggccagctgctatgccaggtggtgtctctgccaggctcctcaggcccagacagaggccagcccacaacctatgaccccctcccccaggacaccacctcccacccacagaccttccctttagctgttgacacaacttcccagctctgcaagtgtgccccctggatcaaggcgggtcccctcttgtttttttctttgctgccacgaggtggtccaagccttcagggtgggctcctatcaggctgggtgtgcgagtgtccatctgtccacatggatgtcgagggtggtttgtgtggagctgtgctcgtcagctgggtctgccctcttcccccttttctccttcttctctcctcatggactttttctgcaattgcagtcttaagcttcactctccaccacctggatggcatggcgcctgccaccaaacatcttcctggcctgcgctctgccctgccctgcctagcctctgctactcccacttcccaactccagggaatgcattacttttatttcaaaccctctgcctccttccttctttctcttcaaccccctccccaccttcaccttctcaaaaatggaaggaaaaaaaaactgtgaatggggaatgctgactgacaaaccaacacaactttcagaggcttcagtgtctgttctctggacatttcttttcacctcctgagcaccaaagtcgcagggccagttgcaggccgctgattgccatgttgatttttaacctgatattctttttaattgttttaaatttttcataggggagttttggacaaaacagtcactggggagatcactgccatttttacacacttgactttttaaaaatacaaccaaccaaccaccacaacttcttatacatttgggacatgagccagagtttaaaagggaaccaacaaaacactataacttaaaaggatggggttttggattttgtataataataaaaacaatacagcatatggctagggaaggacatggtgtatataattgtaaaatactgttctaaattattcaggcctatagtttccattactggagtcctccattgtgtggccacacagtgtcgttgatttaaaggagccagtgcttcccctctccccaggtagttggtcagctgtggactctgtgacctttgtctaaacctgtgttgtaagatcttgggacttcctctctttctatgtctatctcttccccccaacactttctcttcttagtctctctctttatttttcaatctctgaatattttagtctctctctgagtctcattttttaaaatgctcttttagaacgggaaacggctcagatcctgctgtggcacggggcctatgtgtctctgtcgcgtctgctg

SEQ ID NO: 1348 - DNA, 4299 bp, Homo sapiens; identical to SEQ ID NO: 841
  source 1..4299: mol_type = genomic DNA

SEQ ID NO: 1349 - DNA, 850 bp, Homo sapiens
  source 1..850: mol_type = genomic DNA
actcatacagtgacctagagcaggcatgggtgggtcacaggctttggagagcactctctgtcctgatcttttcagttgagagacttcagctgttcattgctcatttggacttagttcaaggtcatgtcaaagaagaaggtgcacttacgctagttgttagctctgtcttttgtaaccatcaagttccatgcgattgatcagatttaggagggggcgttgggggataatcaattttgggtgtcaccaggtaaacagagccctcagcatctgaatagaaactgaacaggaacagaagagattacactacatctgagatggagacctttcctctgctgctgctcagcctgggcctggttcttgcagaagcatcagaaagcacaatgaagataattaaagaagaatttacagacgaagagatgcaatatgacatggcaaaaagtggccaagaaaaacagaccattgagatattaatgaacccgatcctgttagttaaaaataccagcctcagcatgtccaaggatgatatgtcttccacattactgacattcagaagtttacattataatgaccccaagggaaacagttcgggtaatgacaaagagtgttgcaatgacatgacagtctggagaaaagtttcagaagcaaacggatcgtgcaagtggagcaataacttcatccgcagctccacagaagtgatgcgcagggtccacagggcccccagctgcaagtttgtacagaatcctggcataagctgctgtgagagcctagaactggaaaatacagtgtgccagttcactacaggcaaacaattccccaggtgccaataccatagtgttacctcattagagaa

SEQ ID NO: 1350 - DNA, 3511 bp, Homo sapiens
  source 1..3511: mol_type = genomic DNA
acttcctctctttgttgtcctcgtattttcttttcctcctgagatttaacttgaagacaacgtcactagcagtttctggagctacttgccaaggctgagtgtgagctgagcctgccccaccaccaagatgatcctgagcttgctgttcagccttgggggccccctgggctgggggctgctgggggcatgggcccaggcttccagtactagcctctctgatctgcagagctccaggacacctggggtctggaaggcagaggctgaggacaccggcaaggaccccgtaggacgtaactggtgcccctacccaatgtccaagctggtcaccttactagctctttgcaaaacagagaaattcctcatccactcgcagcagccgtgtccgcagggagctccagactgccagaaagtcaaagtcatgtaccgcatggcccacaagccagtgtaccaggtcaagcagaaggtgctgacctctttggcctggaggtgctgccctggctacacgggccccaactgcgagcaccacggaccaatggcagtctggtgttggcctgagccggacagcctgcaggccaggctgggccagctgcagaggaacctctcagagctgcacatgaccacggcccgcagggaggaggagttgcagtacaccctggaggacatgagggccaccctgacccggcacgtggatgagatcaaggaactgtactccgaatcggacgagactttcgatcagattagcaaggtggagcggcaggtggaggagctgcaggtgaaccacacggcgctccgtgagctgcgcgtgatcctgatggagaagtctctgatcatggaggagaacaaggaggaggtggagcggcagctcctggagctcaacctcacgctgcagcacctgcagggtggccatgccgacctcatcaagtacgtgaaggactgcaattgccagaagctctatttagacctggacgtcatccgggagggccagagggacgccacgcgtgccctggaggagacccaggtgagcctggacgagcggcggcagctggacggctcctccctgcaggccctgcagaacgccgtggacgccgtgtcgctggccgtggacgcgcacaaagcggagggcgagcgggcgcgggcggccacgtcgcggctccggagccaagtgcaggcgctggatgacgaggtgggcgcgctgaaggcggccgcggccgaggcccgccacgaggtgcgccagctgcacagcgccttcgccgccctgctggaggacgcgctgcggcacgaggcggtgctggccgcgctcttcggggaggaggtgctggaggagatgtctgagcagacgccgggaccgctgcccctgagctacgagcagatccgcgtggccctgcaggacgccgctagcgggctgcaggagcaggcgctcggctgggacgagctggccgcccgagtgacggccctggagcaggcctcggagcccccgcggccggcagagcacctggagcccagccacgacgcgggccgcgaggaggccgccaccaccgccctggccgggctggcgcgggagctccagagcctgagcaacgacgtcaagaatgtcgggcggtgctgcgaggccgaggccggggccggggccgcctccctcaacgcctcccttcacggcctccacaacgcactcttcgccactcagcgcagcttggagcagcaccagcggctcttccacagcctctttgggaacttccaagggctcatggaagccaacgtcagcctggacctggggaagctgcagaccatgctgagcaggaaagggaagaagcagcagaaagacctggaagctccccggaagagggacaagaaggaagcggagcctttggtggacatacgggtcacagggcctgtgccaggtgccttgggcgcggcgctctgggaggcaggatcccctgtggccttctatgccagcttttcagaagggacggctgccctgcagacagtgaagttcaacaccacatacatcaacattggcagcagctacttccctgaacatggctacttccgagcccctgagcgtggtgtctacctgtttgcagtgagcgttgaatttggcccagggccaggcaccgggcagctggtgtttggaggtcaccatcggactccagtctgtaccactgggcaggggagtggaagcacagcaacggtctttgccatggctgagctgcagaagggtgagcgagtatggtttgagttaacccagggatcaataacaaagagaagcctgtcgggcactgcatttgggggcttcctgatgtttaagacctgaaccccagccccaatctgatcagacatcatggactcgcccagctctcctcggcctggggctctggccaaggatgggctggaggtcattcagttggtctgtctcttccctggaaaccttctgcaaagatggtgtggtgtacgtggcttccctgtaaccacatggggcttggccatttctccatgatgagaaggactggaatgcttctccgggcaggacatggtcctaggaagcctgaaccttggcttggcatgccttctcagacagcacggcctgggctccaactcttcaccacaccctgtattctacaacttctttggtgttttgctcctcctgtggttggaaacttctgtacaacactttaaacttttctcttgcttcctcttctcttctcccttatcgtatgatagaaagacattcttccccaggaggaatgtttaaaatggaggcaacattttggccaacattggaaagcactagagggcaatgggattaaaccaacctgcttggtctctattagtcagtaatgaagacgacagcctggccaaccaagggaaaggaaattagtatctttagtttcagtcattccttgtaggatatggtttagctgtgcccccacctaaaatatcatcttgaattgtaatccctataatccccacatcaagggagagatcaggtggaggtaattggatcttgggggcggttcccccatgctgttcttgtgatagttctcacgagatctgatgattttataagtttgatagttcctcctgtgttcattctccttcctgccaccttgtgaagatgccttggttcctcttcactgtctgccatgattgtaagtttcctgaggcctccccagccatgtggaacagtgagtcaattaaacctctttcctttataaattatccagtcttgggcaattcttgatagcagtgtgaaaatggactaatacacttgtgtttatctgtaatttaaatttcatgtctttttctccttgccttacatagggtaaagaccaagaaatgccaaacgtgaactaaaatatgtagggccttcaacttttttacttcctccagtatcttaggaccatcgtaattcttgttagcatctctaaccaggaggcagctgagggaggagggaaagaagactgtaaaaatccccctcactaatgatcaactttggaataaagtgatgcccttc

SEQ ID NO: 1351 - DNA, 1050 bp, Homo sapiens
  source 1..1050: mol_type = genomic DNA
gacatgggctccgctccctgggccccggtcctgctgctggcgctcgggctgcgcggcctccaggcggggggtgagtggcggcgccccccggcccattccccggtcccggccccgcctctgaggttcgcgtccccccacagcccgcagggccccggaccccggcttccaggagcgcttcttccagcagcgtctggaccacttcaacttcgagcgcttcggcaacaagaccttccctcagcgcttcctggtgtcggacaggttctgggtccggggcgaggggcccatcttcttctacactgggaacgagggcgacgtgtgggccttcgccaacaactcggccttcgtcgcggagctggcggccgagcggggggctctactggtcttcgcggagcaccgctactacgggaagtcgctgccgttcggtgcgcagtccacgcagcgcgggcacacggagctgctgacggtggagcaggccctggccgacttcgcagagctgctccgcgcgctacgacgcgacctcggggcccaggatgcccccgccatcgccttcggtggaagttatggggggatgctcagtgcctacctgaggatgaagtatccccacctggtggcgggggcgctggcggccagcgcgcccgttctagctgtggcaggcctcggcgactccaaccagttcttccgggacgtcacggcggcagcctacgacacggtccgctgggagttcggcacctgccagccgctgtcagacgagaaggacctgacccagctcttcatgttcgcccggaatgccttcaccgtgctggccatgatggactacccctaccccactgacttcctgggtcccctccctgccaaccccgtcaaggtgggctgtgatcggctgctgagtgaggcccagaggatcacggggctgcgagcactggcagggctggtctacaacgcctcgggctccgagcactgctacgacatctaccggctctaccacagctgtgctgaccccactggctgcggcaccggccccgacgccagggcctgggactaccaggtgtg

SEQ ID NO: 1352 - DNA, 709 bp, Homo sapiens; identical to SEQ ID NO: 820
  source 1..709: mol_type = genomic DNA

SEQ ID NO: 1353 - DNA, 1534 bp, Homo sapiens
  source 1..1534: mol_type = genomic DNA
tgggcttgagggtcgatttttcaccttttgaaggacaagatgcattggaagatgttgctgcttctgctgttgtattacaatgctgaggcttctatgtgccacaggtggagcagggctgtgctcttccctgccgcccaccggccaaagaggtcctcatcactgccattgaacccagtcctgcagacctccctggaggaggtggagctgctctacgagttcctgctggccgaacttgagatcagccctgacctgcagatctccatcaaggacgaggagctggcctccttgcggaaggcctcagacttccgcaccgtctgcaacaacgtcatccccaagagcatcccagacatccgccggctcagcgccagcctctccagccaccctggcatcctcaagaaagaagactttgaaaggacagtgctgaccctggcctacacagcctaccgcacagccctgtcccacggccatcagaaggacatctgggcgcagtccctcgttagcctcttccaggccctgaggcacgacttgatgcgctcctcacagccgggagtacctccctgagagactggcccacaccaggacctcagagcagggaccagcacagtaatccagaaagtcttcattctctactccatttacagagaccagcaacaaaactcttaccgctgacacagagcagcagagatcaaacagtaaccccgatgctcttttctccttgtagtttcctggaagacacatctgattcatgccatcatgtgacctgggctggaagaaagggctggaatggtcattcaagacgcctccatgggcagaatggtttgcctatggcaggcagaattctgatatgcttcaacccagagcgtgagccaccgtgcctggcccaggatctaaaaactttctaagtttcctccatcgttggcatcctcacagctatctccaatgtcactcaagagacatcaacagacatttaactgctgcagacttcattgctctgtcacctcaccttgaatctaacaaatcaaagtatttctgcaggtccaatggtctaaaatcaaatgcttgttaaatgactttttacaacaccccttactttcctaatccatttcaatcttattttttttattgtggtaaaaaacacatcaggtaaaatgtaccatcttaaccatttttaagcatatggtacagcagtgttaactccatgcatgttgtgaaacagacccccggaactttctcatcttgtaattctgaagttctatacccaccgaacaactcctcttttccccttccccctgcctgccccagctcttggcaccattattctgctttctgtttttgagagtctgactacttaagatacctcatacaagcgggatctggcttacatttcttgagcattgtattctggaaaagtgtttccttcctctgaaaaatgggtagagttctgaaggagaactactggtcttattgtacacttgctgtacctatttttatttaacaaatattcatctatggtataataaagatgtcatgattg

SEQ ID NO: 1354 - DNA, 1479 bp, Homo sapiens
  source 1..1479: mol_type = genomic DNA
tctgaggccgtgtacctcaacgactccacctatgacggacataccgtgggcggactgcagtatgggggtctgggccagctggcagatggtgtggtggggctggatgactttaggaagagtcaggagctgcgggtctggccaggctatgactatgtgggatggagcaaccacagcttctccagtggctatgtggagatggagtttgagtttgaccggctgagggccttccaggctatgcaggtccactgtaacaacatgcacacgctgggagcccgtctgcctggcggggtggaatgtcgcttccggcgtggccctgccatggcctgggagggggagcccatgcgccacaacctagggggcaacctgggggaccccagagcccgggctgtctcagtgccccttggcggccgtgtggctcgctttctgcagtgccgcttcctctttgcggggccctggttactcttcagcgaaatctccttcatctctgatgtggtgaacaattcctctccggcactgggaggcaccttcccgccagccccctggtggccgcctggcccacctcccaccaacttcagcagcttggagctggagcccagaggccagcagcccgtggccaaggccgaggggagcccgaccgccatcctcatcggctgcctggtggccatcatcctgctcctgctgctcatcattgccctcatgctctggcggctgcactggcgcaggctcctcagcaaggtcctagagagccacccccgtaccaggagccccggcctcgtgggaatccgccccactctgctccctgtgtccccaatggctctgcgttgctgctctccaatccagcctaccgcctccttctggccacttacgcccgtccccctcgaggcccgggcccccccacacccgcctgggccaaacccaccaacacccaggggcgtcaccgggggcaacacctatgctgtgcctgcactgcccccaggggcagtcggggatgggccccccagagtggatttccctcgatctcgactccgcttcaaggagaagcttggcgagggccagtttggggaggtgcacctgtgtgaggtcgacagccctcaagatctggtcagtcttgatttcccccttaatgtgcgtaagggacaccctttgctggtagctgtcaagatcttacggccagatgccaccaagaatgccaggaatgatttcctgaaagaggtgaagatcatgtcgaggctcaaggacccaaacatcattcggctgctgggcgtgtgtgtgcaggacgaccccctctgcatgattactgactacatggagaacggcgacctcaaccagttcctcagtgcccaccagctggaggacaaggcagccgagggggcccctggggacgggcaggctgcgcaggggcccaccatcagctacccaatgctgctgcatgtggcagcccagatcgcctccggcatgcgctatctggccacactcaac

SEQ ID NO: 1355 - DNA, 943 bp, Homo sapiens
  source 1..943: mol_type = genomic DNA
gagagcccagagagctgaacctgcatcccggacctgcggcgaccgtcgtacaccatgggcctccacctccgcccctaccgtgtggggctgctcccggatggcctcctgttcctcttgctgctgctaatgctgctcgcggacccagcgctcccggccggacgtcaccccccagtggtgctgggagacaacaaccggatcccagtcatcgggcccctgaagatccgggagcagcagcggtcagctgtctccaccagctggctgctgccctacaactacacatggtcacctgagaaggtgttcgtgcagacacccacaatcaactacacactgcgggactaccgcaagttcttccaggacatcggctttgaagatggctggctcatgcggcaggacacagaagggctggtggaagccacgatgccacctggcgtgcagctgcactgcctctatggtactggcgtccccacaccagactccttctactatgagagcttccctgaccgtgaccctaaaatctgctttggtgacggcgatggtactgtgaacttgaagagtgccctgcagtgccaggcctggcagagccgccaggagcaccaagtgttgctgcaggagctgccaggcagcgagcacatcgagatgctggccaacgccaccaccctggcctatctgaaacgtgtgctccttgggccctgactcctgtgccacaggactcctgtggctcggccgtggacctgctgttggcctctggggctgtcatggcccacgcgttttgcaaagtttgtgactcaccattcaaggccccgagtcttggactgtgaagcatctgccatggggaagtgctgtttgttatcctttctctgtggcagtgaagaaggaagaaatgagagtctagactcaagggacactggatggcaagaatgctgctgatggtggaactgctgtg

SEQ ID NO: 1356 - DNA, 873 bp, Homo sapiens
  source 1..873: mol_type = genomic DNA
tcgctggcaccggccgcacgcgtccatcccgggcctctgagcggagggggagccgaggctagagggagggcgcagtctgcccaaggtcagcggcagcggcagtttctgggcgccaagtgtgattggagtactccaggaagaggggcgtgaccagagctctagcgaagagacctgacattgtaaagctagctgccttgaggtgcagtgttggggatccagagccatgtcggacctgctactactgggcctgattgggggcctgactctcttactgctgctgacgctgctggcctttgccgggtactcagggctactggctggggtggaagtgagtgctgggtcaccccccatccgcaacgtcactgtggcctacaagttccacatggggctctatggtgagactgggcggcttttcactgagagctgcagcatctctcccaagctccgctccatcgctgtctactatgacaacccccacatggtgccccctgataagtgccgatgtgccgtgggcagcatcctgagtgaaggtgaggaatcgccctcccctgagctcatcgacctctaccagaaatttggcttcaaggtgttctccttcccggcacccagccatgtggtgacagccaccttcccctacaccaccattctgtccatctggctggctacccgccgtgtccatcctgccttggacacctacatcaaggagcggaagctgtgtgcctatcctcggctggagatctaccaggaagaccagatccatttcatgtgcccactggcacggcagggagacttctatgtgcctgagatgaaggagacagagtggaaatggcgggggcttgtggaggccattgacacccaggtggatggcacagg

SEQ ID NO: 1357 - DNA, 534 bp, Homo sapiens
  source 1..534: mol_type = genomic DNA
gagtttaccatctgaaaggaggcaaatcctgactttcgtttcttctctctactagctggcaatatagcaactatgaagagaaaagctactaataaaattaacccaacgcatagaagacttttttttctcttctaaaaacaactaagtaaagacttaaatttaaacacatcattttacaacctcatttcaaaatgaagacttttacctggaccctaggtgtgctattcttcctactagtggacactggacattgcagaggtggacaattcaaaattaaaaaaataaaccagagaagataccctcgtgccacagatggtaaagaggaagcaaagaaatgtgcatacacattcctggtacctgaacaaagaataacagggccaatctgtgtcaacaccaaggggcaagatgcaagtaccattaaagacatgatcaccaggatggaccttgaaaacctgaaggatgtgctctccaggcagaagcgggagatagatgttctgcaactggtggtggatgtagatggaaacattgtgaatg

SEQ ID NO: 1358 - DNA, 1533 bp, Homo sapiens
  source 1..1533: mol_type = genomic DNA
gaggccacaacacacagagatggagaagctctaaacttaccactgaaggaaagcaggcacttaaagtttatcccaaacaaaactgtaattttaactggtccccgagttgagcctcactcgatgaatgacttccagggcctttggctctttgggactaaacgagaaaattatttttagcacaactatttggaaatctttgagaatttggatctgttattctgtctggtaccaaagcaagtttttcactgagctctcatgaaagatcctcagtctcttgtggatttagaatcctgcagcagcccaccatctaagagcaagagccaaagatgtttgtcttgctctatgttacaagttttgccatttgtgccagtggacaaccccggggtaatcagttgaaaggagagaactactcccccaggtatatctgcagcattcctggcttgcctggacctccagggccccctggagcaaatggttcccctgggccccatggtcgcatcggccttccaggaagagatggtagagacggcaggaaaggagagaaaggtgaaaagggaactgcaggtttgagaggtaagactggaccgctaggtcttgccggtgagaaaggggaccaaggagagactgggaagaaaggacccataggaccagagggagagaaaggagaagtaggtccaattggtcctcctggaccaaagggagacagaggagaacaaggggacccggggctgcctggagtttgcagatgtggaagcatcgtgctcaaatccgccttttctgttggcatcacaaccagctacccagaagaaagactacctattatatttaacaaggtcctcttcaacgagggagagcactacaaccctgccacagggaagttcatctgtgctttcccagggatctattacttttcttatgatatcacattggctaataagcatctggcaatcggactggtacacaatgggcaataccggataaagaccttcgacgccaacacaggaaaccatgatgtggcttcggggtccacagtcatctatctgcagccagaagatgaagtctggctggagattttcttcacagaccagaatggcctcttctcagacccaggttgggcagacagcttattctccgggtttctcttatacgttgacacagattacctagattccatatcagaagatgatgaattgtgatcaggaccaagatccctgtggtaaacactctgattgaatctggggttccagaaggtggaacaagcaggaatgggatccaaagagactcccactcagattctaaagcatttaaagacaattctagcagaatttatcaaaacaagatgaaacacagaaaagttgaaaccacaacaaaatgaattctattaaagaatagccccagatataaattctcttgaaagcaatgttcataaatatttaagcaaattaaagacaatgttaacaaattttctattaaatgccctgagtgataaaaccagttggcaataatattgccttattaaatcttcaaaaaata

SEQ ID NO: 1359 - DNA, 1812 bp, Homo sapiens
  source 1..1812: mol_type = genomic DNA
ctgcaggcggactcgcccgctcccaggccggacccgcgcccgggacagggacccggccgagtcgagccgtcgcgccagcgctgcgccgccggtcggtgcgcctagcggatcggagctgcgcgcggaaccgtgctgccccgccccgctccacccgtgagggtggcccgaggcagccgggatgacagctctccccaggaatcctgctgcctgctgagaaacatggtcagcaagtcccgctggaagctcctggccatgttggctctggtcctggtcgtcatggtgtggtattccatctcccgggaagacaggtacatcgagcttttttattttcccatcccagagaagaaggagccgtgcctccagggtgaggcagagagcaaggcctctaagctctttggcaactactcccgggatcagcccatcttcctgcggcttgaggattatttctgggtcaagacgccatctgcttacgagctgccctatgggaccaaggggagtgaggatctgctcctccgggtgctagccatcaccagctcctccatccccaagaacatccagagcctcaggtgccgccgctgtgtggtcgtggggaacgggcaccggctgcggaacagctcactgggagatgccatcaacaagtacgatgtggtcatcagattgaacaatgccccagtggctggctatgagggtgacgtgggctccaagaccaccatgcgtctcttctaccctgaatctgcccacttcgaccccaaagtagaaaacaacccagacacactcctcgtcctggtagctttcaaggcaatggacttccactggattgagaccatcctgagtgataagaagcgggtgcgaaagggtttctggaaacagcctcccctcatctgggatgtcaatcctaaacagattcggattctcaaccccttcttcatggagattgcagctgacaaactgctgagcctgccaatgcaacagccacggaagattaagcagaagcccaccacgggcctgttggccatcacgctggccctccacctctgtgacttggtgcacattgccggctttggctacccagacgcctacaacaagaagcagaccattcactactatgagcagatcacgctcaagtccatggcggggtcaggccataatgtctcccaagaggccctggccattaagcggatgctggagatgggagctatcaagaacctcacgtccttctgacctgggcaagagctgtagcctgtcggttgcctactctgctgtctgggtgacccccatgcgtggctgtgggggtggctggtgccagtatgacccacttggactcaccccctcttggggagggagttctgggcctggccaggtctgagatgaggccatgcccctggctgctcttatggagccgagatccagtcagggtgggggcgctggagccgtgggagcccggccagggcagggggctcgttgctgtggcaccccctctctgccagcaccaagagattatttaatgggctatttaattaaggggtaggaaggtgctgtgggctggtcccacacatccaggaaagaggccagtagagaattctgcccactttttataaaaacttacagcgatggccccaccaaggcctagacacggcactggcctcccaggagggcaggggcattgggaatgggtgggtgccctccagagaggggctgctacctcccagcaggcatgggaagagcactggtgtgggggttccaccgagaaggggacctcatctagaaaagaggttacaaacctaccattaaactatttttcctaaaacggaa

SEQ ID NO: 1360 - DNA, 954 bp, Homo sapiens
  source 1..954: mol_type = genomic DNA
tcaacacaacttgcttctctccagacttgggcttaaggctctgataaccatgaggcttctcattctcacctgtcttgtggctgttgctcttgccaggcctaaacttcctcttagatacccagaacgccttcagaatccatcagagagcagtgagcctataccattagaatcaagagaggaatacatgaatggtatgaacaggagaaacattctgagagaaaaacagactgatgaaatcaaggatactaggaatgagtctactcagaactgtgttgtggcagagcctgagaagatggaatccagcatcagttcatcgagtgaggaacagttttgtagactgaacgaatacaaccaacttcagctgcaagctgcccatgcccaggagcaaattcgcagaatgaatgaaaacagccatgtccaagtgcctttccagcagctcaaccaacttgctgcctacccctatgctgtttggtactatccacaaatcatgcagtatgttcctttcccaccgttttccgacatctccaatcccactgctcatgaaaattatgaaaaaaataacgtcatgctacagtggtgatatgattgaaaatttcattctctgaatttctcctctcaaggaaaaccatcttatctgaagactggactgttgttttagaatagtaaaatcccatattgaaggaaattgttctttttgagttatctacttaatagcatatcattctttttcttaagctaaattttcctagagagtttattgtctaaatttcagttgtgtcttgccatatggagggcacctaatcagagggtattaaagtgtttactaagttttctagtggacattttgtttaaaaagtctttgaattgccagttctgtaagtgccatcaattaaaatagttttgtgcagtgacagagattttcttttttcttttcaataaattacactttaaggc

SEQ ID NO: 1361 - DNA, 590 bp, Homo sapiens
  source 1..590: mol_type = genomic DNA
ccctggggaagagaagctgagaggaactcctcactcagctagcttcaggagccatgacatcatctctaccatggaaattccactcactctcctgtgcccccacatttgtcctaggcctcagagtccctataaagagagattcccaactcagtatcagcacaggacacagctaggttctgaagcttctgagttctgcagcctcacctctgagaaaacctctttgccaccaataccatgaagctctgcgtgactgtcctgtctctcctcgtgctagtagctgccttctgctctctagcactctcagcaccaatgggctcagaccctcccaccgcctgctgcttttcttacaccgcgaggaagcttcctcgcaactttgtggtagattactatgagaccagcagcctctgctcccagccagctgtggtattccaaaccaaaagaggcaagcaagtctgcgctgaccccagtgagtcctgggtccaggagtacgtgtatgacctggaactgaactgagctgctcagagacaggaagtcttcagggaaggtcacctgagcctggatgcttctccatgagccgcatctcctccata

SEQ ID NO: 1362 - DNA, 2038 bp, Homo sapiens
  source 1..2038: mol_type = genomic DNA
agccttctcactcctcactgagtccactctgaacgtgctaaaatgggaaggaggcggtgttttgctgatctgttaaattcttagtgaagtttccttgatttccagtggctgctgttgtttgagtttggtttggagcaaaactgaggtagtcctaacatttctgggactgaatccaggcaagagaaagaagaaaaagaagaagaaaaagaggaggaaaaagtggattacacaatgacatggagaatgggaccccgtttcactatgctgttggccatgtggctagtgtgtggatcagaaccccacccccatgccactattagaggcagccacggaggacggaaagtgcctttggtttctccggacagcagtaggccagctcggtttctgaggcacactgggaggtctcgcggaattgagagatccactctggaggaaccaaaccttcagcctctccagagaaggaggagtgtgcccgtgttgagactagctcgcccaagccgtttccgggacaaccgcatggacaggcgggaacatggccaccgagacccaaatgtggtgccaggtcctcccaagccagcaaaggagaaacctcccaaaaagaaggcccaggacaaaattcttagtaatgagtatgaggagaagtatgacctcagccggcctactgcctctcagctggaggacgagctgcaggtggggaatgttccccttaaaaaagcaaaggagtctaaaaagcatgaaaagcttgagaaaccagagaaggagaagaaaaaaaagatgaagaatgagaacgcagacaagttacttaagagtgaaaagcaaatgaagaagtctgagaaaaagagcaagcaagagaaagagaagagcaagaagaaaaaaggaggtaaaacagaacaggatggctatcagaaacccaccaacaaacacttcacgcagagtcccaagaagtcagtggccgacctgctggggtcctttgaaggcaaacgaagactccttctgatcactgctcccaaggctgagaacaatatgtatgtgcaacaacgtgatgaatatctggaaagtttctgcaagatggctaccaggaaaatctctgtgatcaccatcttcggccctgtcaacaacagcaccatgaaaatcgaccactttcagctagataatgagaagcccatgcgagtggtggatgatgaagacttggtagaccagcgtctcatcagcgagctgaggaaagagtacggaatgacctacaatgacttcttcatggtgctaacagatgtggatctgagagtcaagcaatactatgaggtaccaataacaatgaagtctgtgtttgatctgatcgatactttccagtcccgaatcaaagatatggagaagcagaagaaggagggcattgtttgcaaagaggacaaaaagcagtccctggagaacttcctatccaggttccggtggaggaggaggttgctggtgatctctgctcctaacgatgaagactgggcctattcacagcagctctctgccctcagtggtcaggcgtgcaattttgggagctctgttgttgagcgagaagacgtaccagcccatttggtgaaagacattcgtaactattttcaagtgagcccggagtacttctccatgcttctagtcggaaaagacggaaatgtcaaatcctggtatccttccccaatgtggtccatggtgattgtgtacgatttaattgattcgatgcaacttcggagacaggaaatggcgattcagcagtcactggggatgcgctgcccagaagatgagtatgcaggctatggttaccatagttaccaccaaggataccaggatggttaccaggatgactaccgtcatcatgagagttatcaccatggatacccttactgagcagaaatatgtaaccttagactcagccagtttcctctgcagctgctaaaactacatgtggccagctccattcttccacactgcgtactacatttcctgcctttttctttcagtgtttttctaagactaaataaatagcaaactttcacct

SEQ ID NO: 1363 - DNA, 2129 bp, Homo sapiens
  source 1..2129: mol_type = genomic DNA
gagagcccaggagagctcggggcgtgtccaaactgccgcgccgccctgctccgggtttgtcttcctccctccgtttctccttccgctgtatctagcatttcggttcctggaaaggttaccggagctgcgattggggctgggaccaaagttgagtcctggaaagggagcctggagagcggcggtgctgggaggcccggccagctcgatcgcaggcttccacctggcggccaatgcttgtttgctactgatgggtgtgagcaagttagatattctataccggagacttctcctaacaaaactttttatcagaggatggggaaggccagaagatctcaaaagactctttgaattcagaaagatgattggaaatcgggaaagatgccagaatctggtttcaagcgattatccagtacacattgataagattgaagagcaatcagattgtaagatcttagatggacactttgtttcccccatggctcactatgtgcctgatatcatgccaattgaatctgttattgcaaggttccaatttattgtgcctaaagaatggaacagcaaatatagacctgtatgcattcatcttgctggaacaggagatcatcattactggaggcgacgaacactaatggcccgtcctatgattaaagaagcccgaatggcttctttattgttagaaaacccttattatggctgcaggaaacccaaggaccaagtaaggtccagcttaaaaaatgtgtccgacctttttgtgatgggaggagctcttgttttagaatctgcagctctcttgcactggctagagagggaaggttacggccctttaggaatgactggaatatccatgggaggacacatggcttccttagcggtatccaactggcctaagcccatgccattgattccatgcctgtcttggtccacagcatctggggtcttcactacgacagattctttcaaaatgggacaagagtttgtgaaacacttcactagcagtgcagacaagctaactaaccttaatctggtttccagaactttaaatttagatatatcaaaccaagttgtatcccaaaaacctgctgactgccataattctagcaaaacatctgtcagtgcgacatcagaaggactcttattgcaagatacctctaagatgaagcgcttcaatcaaacactttcaaccaacaaaagtggttatacaagtcgcaaccctcagtcataccacctacttagtaaagaacaaagcagaaacagtcttcggaaagagtctttaatatttatgaaaggagtcatggatgaatgtactcatgtagcaaatttctcagtcccagttgatccaagcctcattatagtggttcaagccaaagaagatgcctatattccacgaacaggagttcgaagtttacaagaaatttggcctggttgtgaaatccgatacttagaagggggtcatattagtgcttatctttttaaacaaggactcttcaggtaagacggctggtctaaacatgtattcgttcatttgttgtttgttttctggattttttgcttcaacaaatgtaaaagatcacatatttttatagtctgtttcaatctttgaattccctcctcacctcccacaaatctcacagagttacttttccctctttcctagaatttgatcttcttattttcttctagagaactaagcatgatgcatattataggcatgctttatcgtgtggctttcccctcttcaaatattaatggccaggtattttaggatgtgagaaggaagatcatggcttgttaaagttgctttggtgcatcaagagttttttcactctattctgatgttttttcagaatggcctgaacatctgtggaataatttagcaatgtttttcagttagcaagtgaatattgaaccttaaataagaagtgcttttaatgtgaacaaccttatatgactccactattttagttagaacttataaaaacttttatgctggctgggcgcggtggcttacgcctgtaatcccagcactttgggaggcggaggcgggtgtatcacgaggtcaggagatcaaggccatcctggctaacacggtgaaaccccgtctctagtaaaaatacaaaaaaaaaaaaaaa

SEQ ID NO: 1364 - DNA, 4494 bp, Homo sapiens
  source 1..4494: mol_type = genomic DNA
tggagcgaaacctcaactatgccaggcgtcggcccgtaggaaggcagggaacacagagggcgctgccctcggcggcagcggcagattgttccccattttggagatgaagaaactgagactcaaagcagctgagtgaccttcccaaggacacacactgaactgggcggtgatcaggatctgaatgcacagggcgggtgttcagcgattgtttactacgttgaacgtgacctccaggaaagcagttctggccgagatcccctgacaacgcaaagcaagaagtaacgtggaaggaggctccccaagctggctggccattttgctgctgtgtgtggaggtgctgccagtggcatgcccaaacccaaagctggaagaggaataaattacaagtggtcaaggttgcatccttttgagcccaggacctgcttgtaagccgagagggttctctggccctaatctagccaagcaccatggagagaatcagtgccttcttcagctctatctgggacaccatcttgaccaaacaccaagaaggcatctacaacaccatctgcctgggagtcctcctgggcctgccactcttggtgatcatcacactcctcttcatctgttgccattgctgctggagcccaccaggcaagaggggccagcagccagagaagaacaagaagaagaagaagaagaagaagaagaaggatgaagaagacctctggatctctgctcaacccaagcttctccagatggagaagagaccatcactgcctgtttagttaggcaggaagcagaggtgtttcctttctggggctaagcctccttctgaccacacacagacatttcaggaacccctgaaataatgcactatgtccatgtccacagagtaactactcaaccaaggaacaaacctcagactaagtgtcccagtggagggcagtcccagggaccacgtggacaattcttggatactgtcttggcagctatgtgtccaatagcaatgctccttactgcagacccaggcatgcctcccacctgtctctggcataccccacatgcaaagcacaaagaacatttatccatacatctcaatatggttcccaagtgtgtgcacatgcacgtaacacacacacacacaaattcaggtagcaggtacgtgggcaagtatattctgctcatcaaatggtcattggctatgtactttgtgcagggaagtacattatctacagtcacaaaaatgtctcatgggaaagccttgccagattcagacacatatatacaatttcctaaccagcaaggcccccatacaccatctattccataaaccactcaggttacagatgcatgctttcctatttctaactctacacataaacttttactggaagtactcataattggacattccagcaacctgctacagtccccacccttgtgtgtcttgatacagacacaccaagtttctgtgcctctgacccctcacctgtgccaagatgtttaaagtgtgatggttcaaaattcattgaaagctcttttcttgtaactcatgacaaagtccgtcctcattgccactgagaggtgtttaatgtgatccaagacctctctgtgaaacattacccccgcaaaccactcagcaaagtgcctttctccaagcaagaacaaagagctcttggtggtgactgctagaaaattatggaagcccactcatttatgtcagtggactgcaactgtgtacctgtgcaatgtttacagatggaaagggtgaggagatgctacacctgagctaggtatctcctatataaccaaagtttccagcagggaaggaactagacaatcatcagtgcagtctcacagaaggcaacactggaagtgatgtcataaggttgtgatgtgtgcacggtatggcacaggtgggatgcagaggtaacagagtttaaatgaaagtaggatgaagctataaagaggtttatttatatttatattgaagctcaggcaagtgccttgcacacagtaggtacttataactaactgtggttactgttggatatgtgatgttgttaagggtaagcttgtaatacctcaccagttctccccgagtgatcttctcttctaagtgagcccactaattgctgcaatggatgaaattgggtgtttaatgctggagagcacatgtaggtgacacatgtgccttgaggtatgtgaggacatgtaaattagatccacagtgagctgaggagggctttccccgccagagtgaggttgggaagcagagttaatccacttataggatgaactgcttggtatttttattgtattgtgactgtattacaaagatggacaattcactccttgggagcaagttatgctctagaagtttatttacaaatatgctgggcagctctcttgaaatattttcccaaggaagctattctacacagtggcaaaattgctatctaattaataatgtagctaaactatgatatttatagtagcaaaaaactaaattctataagattgcattaaaggaaagatatattctatttgctcacttgggctgcttggtactcacctgccctccaggtgtactttaggcctgtggagggtgggcatttagtggtgacccttgcaccagggttttctaacagatgaccctgtgaatcataatttaaacctgcatatattttatagccagtcacatttgccctctcaccctatatggccataaactgcctaagcactcaggcctcccactcatcaacccctttgaccagagaaagaagcactctggttctctatccccttgtcacatagagagtttgtcatggggcctctggctgtgcccttcacataacagaatgacttgccatctgcctgcaccaaacccagggatgtggaagacatctccccacaactgccactgctcaccaggacaagctgcccttcctgtctccacctctcagtccccctagaatggatggctggggagaggtggaggctgacagctgagacgtagtgtcagatatgatctaggagggcggatcaccgggatccgggaccatacaagtaacatggtttccatggcaactgcttgctcctttgaattaagacagcagtcagttgtcattgccatgacaaggcctctatctccaggcacaatgtccctgctgtctcctaatccaatggacttgctctcaccccagggatgaaacacccagaaactcacttctcagtcacttccacagccgatgactcagaagagccaaacccagaatggggcctctcttttccccatcacagactcccctgacaacctttcctggcgtaactagaggagtcccagtgcaggataggccctaaacgttttgttaaataaacaggtgcatgaaaggagcctaaggccattgttgatatccactctcttctttccacttccttctcatctttttctccatgttttatgcttctctgattccctcttctgcctgcaccagaccagccccagccctttattcctctccattttcactccttccagcctctgtccctgaactgccactggcaacccatgggacctcaggaccagagactgcttgactcatctggggagggtaagttcacgggggacaaaaaaatgattcctaaagaagaggcttcctagaccagcacaggctcgagaaagacatcccctaggcctggacttctgagcagctttagccaggctccggacggcagccagaggaggcctttccccattgctcctttccccattgctcaatggattccatgtttctttttcttggggggagcagggagggagaaaggtagaaaaatggcagccacctttccaagaaaaatataaagggtccaagctgtatagtatttgtcagtatttttttctgtaaaattcaaacacacacaaaagaaaaatttatttaaataaaatactttgaaaatgaaaagtcttgatgtagtcagatggttactctcttaacattaggtattacccccactcagacatcactcagaaatgatcaatgcagggactctttctgtgacacaaatgtcccagccctccctggtcaccgccttcgccatggtagagtcataggtctgaggatgaggaatgtggctgtctcacccttgcttgcaaaacagatggccttggagaccagactccctcaaaggtgccagctacaggaaaaatatactgatgttccttggcaacacttacagaactttccatcaatgaggtccatcaatggcttcttaaaggaaaaggggggaaatagcaaaaacctaaggaagaatggacctttgagttaaatccagtgtttgttgggaaaggagggatcaaaaacctctatagtagccactagggcaaaaactgtgtgtatgtgtgtgtgtaagtgtgtgtacactgttcaatatggttcaatatggtaccaatagccacatgtgactatttaaattcattgcaatgaaataaaattaaaggtatactagctc

SEQ ID NO: 1365 - DNA, 2154 bp, Homo sapiens
  source 1..2154: mol_type = genomic DNA
gagctccgcccctcgcccggctcagctctcccggtatctggggctttgagcgtcccgggttgggcagggaactggcagcatagctcctaggatgcgagggccatttgtctccggccgggggtcagatcctcgggaagccgagccatcccatccagccgcttgccccaaaccgggcgcaggccgtggtcacttctctaggaagctccgaagatcccgccactccgtccctcaaaggtgcggaaagccggcttcccccagccctcggagaagattcctgactctccgctcggtcggggcatctgagggcaggagctgcgccaggcgtaccggatagaccagtggacaacacccacgccggaccgcctgtcccctacccggacccagactcggcgccgcacattgccccgggggggcccggcgcagtcacgcgcgcgcagagctcacgctctccgccccgcacacctgcgctccgccccctggtcctgggcccgcgacgggtgaaggcatttgggaagccagggcggctgcggaggcgatctccctgacccagggccggagttgcccggagcctgccaccgctctcagccagcccgcatccttctctgttcttccctccccccgcctgccacggcgcgggtatccgcagccacagcccggggccggtgaggcggcgaagggggaggggaggaatcaagggatgagcgccggaagggcgtcgggggccctgagccgcactaggacgcccctggagccggaaccccagcagaagccggaaccagaaccaaatcaccgctgcagccccctaaacccaggaggcgccctggcccgcgctcgccccccagggcctcatgtcggaaccacagcctgacctggaaccgccccaacatgggctatatatgctcttcctgcttgtgctggtcttcttcctcatgggcctggtaggcttcatgatctgccacgtgctcaagaagaagggctaccgctgccgcacgtcgaggggctctgagcctgacgatgcccagcttcagccccctgaggacgatgacatgaatgaggacacagtagagaggattgttcgctgcatcatccagaatgaagccaatgctgaggccttgaaggagatgctgggggacagtgaaggagaagggacagtgcagctgtccagtgtggatgccacctccagcctgcaggacggagccccctcccatcatcacacagtgcacctgggctctgcagccccttgcctccattgcagccgcagcaagaggcctccacttgtccgtcagggacgctccaaggaaggaaaaagccgcccccggacaggggagaccactgtgttctctgtgggcaggttccgggtgacacacattgagaagcgctatggactgcacgaacaccgtgatggctcccccacagacaggagctggggctctggtgggggacaggacccagggggtggtcaggggtctgggggagggcagcccaaggcagggatgcctgccatggagaggctgccccctgagaggccacagccccaggtcctagccagccccccagtacagaatggaggactcagggacagcagcctaacccctcgtgcacttgaagggaaccccagagcttctgcagagccaacactgagggccggagggaggggcccaagcccagggctgcccactcaagaggcaaatgggcagccaagcaaaccagacacttctgatcaccaggtgtctctaccacagggagcagggagtatgtgagtctccttcattgtgctgatggactaccagctggcagggccagggggtgggtgggcgtgaaagccctcccctccactggacagcactgccccccagctgagggaccagctctacttccacctggagttgcacagtctcaggctgggggcctcaggagaggtcacagcccctcagtctcttctccttcccctgcctgcaacaggctgcctgccccgccttccccaacacctcgctccatatgatagagcgtggcagctgggagcaggcccctgcccgtggtgggcccctaaagcaatagcaccgtaggccccctgccctcttagcacaagaggcccaggccctggcctggccttcgtgccctttattcattgtcaataaatccgctcagaccatt

SEQ ID NO: 1366 - DNA, 560 bp, Homo sapiens
  source 1..560: mol_type = genomic DNA
cgttggaacgtccttgggcttctgaactagtgcccatgtgtgcctcggcctttcccaagggccagcttcttcctgagatgctgcccccacccccttaggcccgagggatcaggagctatgggaccagaggccctgtcatctttactgctgctgctcttggtggcaagtggagatgctgacatgaagggacattttgatcctgccaagtgccgctatgccctgggcatgcaggaccggaccatcccagacagtgacatctctgcttccagctcctggtcagattccactgccgcccgccacagcaggttggagagcagtgacggggatggggcctggtgccccgcagggtcggtgtttcccaaggaggaggagtacttgcaggtggatctacaacgactccacctggtggctctggtgggcacccagggacggcatgccgggggcctgggcaaggagttctcccggagctaccggctgcgttactcccgggatggtcgccgctggatgggctggaaggaccgctggggtcaggaggtgatctcaggcaatgaggaccctga

SEQ ID NO: 1367 - DNA, 2169 bp, Homo sapiens
  source 1..2169: mol_type = genomic DNA
cctctggctgaaagtagccggaaaggcctggctacttatgggctaagggttttgaatctgggctgcagattgtgcagagagttaatttacaaccttagaacagtggacaatgcttgatagtgtcagactgtgggcactggaaaccggctggtctcaggatagggatcctatacctccaacacttggattgctgacctttcacttctcaacttggtcaacggaagtcaaaaaccccagcaaggccacctgctgaattctagaacttccaggacttcccgacctagagcacatggccaaacactttctgcagccaggatgtcactgccctcccctgattaagataaatagacttggcctaataattatccaaatagattaattcttccaacaaaagaaagagttctggaagtcaatacccaatagccttctttcctgatggtgcagtagagagcaaaatccatctctaagcccagagttcgtgatattttggaaatagctacaatggtgaatttcaccccctggagagttctgtcactggcacttgttccagggttccagcagagtccctcttctcaaataggaagcactggctcagaagactgtccccagcataagatggagtctcgctctgtcacccaggctggaccatgagtgcttttttaaacctcattttaaatctgaaagaagaatgaatacattggacaggctgtcgaaacctcagtggataaaagacctagagaatgtgtatcccagaagaagctggccaaggatatgggagcaaccaccatggaccagaagtctctctgggcaggtgtagtggtcttgctgcttctccagggaggatctgcctacaaactggtttgctactttaccaactggtcccaggaccggcaggaaccaggaaaattcacccctgagaatattgaccccttcctatgctctcatctcatctattcattcgccagcatcgaaaacaacaaggttatcatcaaggacaagagtgaagtgatgctctaccagaccatcaacagtctcaaaaccaagaatcccaaactgaaaattctcttgtccattggagggtacctgtttggttccaaagggttccaccctatggtggattcttctacatcacgcttggaattcattaactccataatcctgtttctgaggaaccataactttgatggactggatgtaagctggatctacccagatcagaaagaaaacactcatttcactgtgctgattcatgagttagcagaagcctttcagaaggacttcacaaaatccaccaaggaaaggcttctcttgactgcgggcgtatctgcagggaggcaaatgattgataacagctatcaagttgagaaactggcaaaagatctggatttcatcaacctcctgtcctttgacttccatgggtcttgggaaaagccccttatcactggccacaacagccctctgagcaaggggtggcaggacagagggccaagctcctactacaatgtggaatatgctgtggggtactggatacataagggaatgccatcagagaaggtggtcatgggcatccccacatatgggcactccttcacactggcctctgcagaaaccaccgtgggggcccctgcctctggccctggagctgctggacccatcacagagtcttcaggcttcctggcctattatgagatctgccagttcctgaaaggagccaagatcacgcggctccaggatcaacaggttccctacgcagtcaaggggaaccagtgggtgggctatgatgatgtgaagagtatggagaccaaggttcagttcttaaagaatttaaacctgggaggagccatgatctggtctattgacatggatgacttcactggcaaatcctgcaaccagggcccttaccctcttgtccaagcagtcaagagaagccttggctccctgtgaaggattaacttacagagaagcaggcaagatgaccttgctgcctggggcctgctctctcccaggaattctcatgtgggattccccttgccaggctggcctttggatctctcttccaagcctttcctgacttcctcttagatcatagattggacctggttttgttttcctgcagctgttgacttgttgccctgaagtacaataaaaaaaattcattttgctccagta

SEQ ID NO: 1368 - DNA, 1336 bp, Homo sapiens
  source 1..1336: mol_type = genomic DNA
ccctagcttctttttcctgcacaagggatttccgggtcaggatgaacaaacacttcttgttcctcttcctcctttactgcctcattgtggcagtgacatcacttcagtgcataacatgccaccttcgcacacggacagaccgctgtagaagaggctttggtgtctgtactgctcagaagggcgaggcatgcatgctcttaaggatttaccagcgcaatactctccagatatcatacatggtgtgtcagaaattctgcagagacatgacatttgatctcaggaatcggacttatgttcatacatgctgcaactacaattactgtaactttaaactctaagatatttgccctcctgaggtctcgctttggaatgtccccaatgttgctcatccttcacactctgctggcccttgcttcccttccgtgtctgtcctgacaatacccctgccctcgcattaacctaagaagactaaactagtgtgatcctttctggtgtcttcagcttggcttctccctcagtcagagaatagtggttctgaacaatggatttcttctattattgggattattggcatggccatattccaagaaacctgccccaagagttcctgtacagtaaaatttaaagcaggaacattctagaatcttaatttgcttaactagttcaggtacactagaaagccttcagctaaaaattcacaatatttttatctaaaattcccatgtatccggagaatgactaagcagaaatagcaattaaatggatgatggatactgaagatttttctctacggacaccaagttatttctaccagcaggcagtgcccacttcaaactcaaccattgtgattttcttggcatttacaaactacatccttacactgttattaggagatagcaaacaaggatcttcccggcctctgtgacattcaccgagctctcacacagccactgctactcctatcgagatgtacattcaaggtacatcagaactctcatttcttccccttcctttcctaaaccttctctcttcctttccccctttgccattcacctttactatcacctcccacctccattatcacctccccattgccacacaacctctccctgtagagaggcaggaggtccttcgaagctttgccccatgcgtcagatggcacctgaggcatataacctagggtgggctgcctttcaggatccgtcatcaaagggagtcaaacatagtcaagataccatctaccctgtacagctttcttgagacttgggggcctgggtcaaagagatttgtctgtcccttgctgcccatctttaagtaataaaccgacttcacataa

SEQ ID NO: 1369 - DNA, 2064 bp, Homo sapiens
  source 1..2064: mol_type = genomic DNA
gacactgggaacctggggcagaatcagacccagcgtctgactcctcctgagagggctcccttttttctcctctcctccgctgtcagaaacagatctgggctggaatggcctggggtggggtccacacctgctgcttccacctgtgctgctgctgctcctggcctcagggtgctgtgcctgaagaacttcacaaacacccaggacagaccctcctcctgcaatgccagtactcacccaagagagggccctatcagcccaaatcctggtgtcagcagacatctccaagtcggtgtaccttacttgtcaccagctccaagccctggacagcagttcagaagtctcattacacaatctgggacaagcccaatgctggcttcttcaacatcaccatgattcagctgacacagaatgactcgggattctactggtgtggaatctacaacgcttccgaaaacatcatcactgttcttagaaatatcagcctggtggtgtctccagccccaaccacgtctcctatgtggactcttccctggctcccaacaagcacagcttgggagcctcagattcaggaaatcaagttcagggctcccacagattctacattatggaaatcaagagcccctgcctgccttggctcaggtggccccagattcctggtcttggtgctatgtggactcctcctggccaagggcctgatgttgtgagtcctgttagtgctcctgatctgcaggtgccacaggacagcagtgacgaggtttctgattgtcccagcacagccttgtcccaggacccttgggtgcatgagccacaacatggatcctggatgaatcccagttcttcccctgcccagctattgggagctggcctaagtattgctccccacctccttgtgaggaaaggctagcgctaagcctattggagagaactttcagcccctgaactccccggtggtgacccctcacccctgcactgagcccccttagatctactgcccctgccctgactttcgccattgggaagacctggggtgggggtttctgcatccgggtcaatgcccagctcagcatcttcagctgtgcccaggctcctctccagcactctgtcgttctctgagccccacctcagcaggtctccaggatccctcacatttcccctgtttgttgcctgtggtctgccctagagtcctatgaatttcctcttgtgcttaattaaattcaacctctgaactgaaatgtgtcaggggcagctgagcaagacagcagttgtatcccctcaccttcctcccgtcccaccccagatatcctaaatgagagagaaatgacttaaaaataaatgataaaattgaaactaagaaaggctgtaatcagcagactggaagctgaggaagatctagaagtaaaagaaaaaattagatgcgttaaaatgacatgagcaggcgactcagtggcccaaaacaggacccagaacattcatccgtaaatggaatctgataatctggggcccaaattctgtttacttaacatgtgagaagattcacagcctaaaagagaaaatcaagttgaactaacaataaatgatggtgggtgaaagataaatgttttagggaacagaagaggagcacatatttatgaagcaagaataggtacagtcattttccaactaacatctagtgagactgggattcaccactcagaatgggggtccaccatgagcaacagatttgaggtaccagtgcatagcagctgaatgccagccctgtaaaagaccaccataaagagagctccatgttcttttgctcttttggggatgggacatcaaacaaaagtctcttcgtgtatatctcagctcctgccacatgatcatcacctatctgtgagaggcatcgcttttgctttgtttatttatttttttaatcctcattccctatgtccacttgccttcctctccgaggcaactactctaatgcatttggtatgtaactttaaatttgaatgtattcttgtaaaacatccagtatttttttttctgtgactatgttttcacttacataaaagaaattgtgat

SEQ ID NO: 1370 - DNA, 2842 bp, Homo sapiens
  source 1..2842: mol_type = genomic DNA
ggcctttctcgtcttttaagggtttttacttccatggggaactatgtgttggatgagaaaagtatccggggaaggggacagaggttcagaaagctctgcgagtcctggacgctggtctgccttcttggctcaccctggaaggtggacgctggccccacacatcccctcttaaagacgcaggccgatagccagcagatcctggggcttgctggccccaagtgagttgtcagggtttcagaggacaccagtcatggcaaccccagctccatggctgccacacaggcctgggcttcccaggactgcctccttcttgttcgcttatgtagatgaaaaatgaggtaacggcactcccctgccccaccctcctcccagaagtgcccagggtgtaaacgcaatagcttgtgtgaagtccactggaacccaggctcaccaagtcagtcttaaccaacacaggccccagcacccgcagagcagacactgcgatgacaacggacgacacagaagtgcccgctatgactctagcaccgggccacgccgctctggaaactcaaacgctgagcgctgagacctcttctagggcctcaaccccagccggccccattccagaagcagagaccaggggagccaagagaatttcccctgcaagagagaccaggagtttcacaaaaacatctcccaacttcatggtgctgatcgccacctccgtggagacatcagccgccagtggcagccccgagggagctggaatgaccacagttcagaccatcacaggcagtgatcccagggaagccatctttgacaccctttgcaccgatgacagctctgaagaggcaaagacactcacaatggacatattgacattggctcacacctccacagaagctaagggcctgtcctcagagagcagcgcctcttccgacagcccccatccagtcatcaccccgtcacgggcctcagagagcagcgcctcttccgacggcccccatccagtcatcaccccgtcacgggcctcagagagcagcgcctcttccgacggcccccatccagtcatcaccccgtcacgggcctcagagagcagcgcctcttccgacggcccccatccagtcatcaccccgtcacgggcctcagagagcagcgcctcttccgacggcccccatccagtcatcaccccgtcacgggcctcagagagcagcgcctcttccgacggcccccatccagtcatcaccccgtcacgggcctcagagagcagcgcctcttccgacggcccccatccagtcatcaccccgtcacgggcctcagagagcagcgcctcttccgacggcccccatccagtcatcaccccgtcacgggcctcagagagcagcgcctcttccgacggcccccatccagtcatcaccccgtcacgggcctcagagagcagcgcctcttccgacggcctccatccagtcatcaccccgtcacgggcctcagagagcagcgcctcttccgacggcccccatccagtcatcaccccgtcacgggcctcagagagcagcgcctcttccgacggcccccatccagtcatcaccccctcatggtccccgggatctgacgtcactctcctcgctgaagccctggtgactgtcacaaacatcgaggttattaattgcagcatcacagaaatagaaacaacgacttccagcatccctggggcctcagacacagatctcatccccacggaaggggtgaaggcctcgtccacctccgatccaccagctctgcctgactccactgaagcaaaaccacacatcactgaggtcacagcctctgccgagaccctgtccacagccggcaccacagagtcagctgcacctgatgccacggttgggaccccactccccactaacagcgccacagaaagagaagtgacagcacccggggccacgaccctcagtggagctctggtcacagttagcaggaatccccttgaagaaacctcagccctctctgttgagacaccaagttacgtcaaagtctcaggagcagctccggtctccatagaggctgggtcagcagtgggcaaaacaacttcctttgctgggagctctgcttcctcctacagcccctcggaagccgccctcaagaacttcaccccttcagagacaccgaccatggacatcgcaaccaaggggcccttccccaccagcagggaccctcttccttctgtccctccgactacaaccaacagcagccgagggacgaacagcaccttagccaagatcacaacctcagcgaagaccacgatgaagcccccaacagccacgcccacgactgcccggacgaggccgaccacagacgtgagtgcaggtgaaaatggaggtttcctcctcctgcggctgagtgtggcttccccggaagacctcactgaccccagagtggcagaaaggctgatgcagcagctccaccgggaactccacgcccacgcgcctcacttccaggtctccttactgcgtgtcaggagaggctaacggacatcagctgcagccaggcatgtcccgtatgccaaaagagggtgctgcccctagcctgggcccccaccgacagactgcagctgcgttactgtgctgagaggtacccagaaggttcccatgaagggcagcatgtccaagcccctgaccccagatgtggcaacaggaccctcgctcacatccaccggagtgtatgtgtggggaggggcttcacctgttcccagaggtgtccttggactcaccttggcacatgttctgtgtttcagtaaagagagacctgatcacccatctgtgtgcttccatcctgcattaaaattcactcagtgtggcccaga

SEQ ID NO: 1371 - DNA, 1128 bp, Homo sapiens
  source 1..1128: mol_type = genomic DNA
gagagaagctgggagaatcgggaacctgggggctagtgacctgcacacagggcaggggcactcggcagttcccagaggccacccctcccaccccagacatccagacatctggaactttgggtgccaagagtccagcttaatgcaggcagcctggcttttgggggctttggtggtcccccagctcttgggctttggccatggggctcggggagcagagagggagtgggagggaggctggggaggtgcccaggaggaggagcgggagagggaggccctgatgctgaagcatctgcaggaagccctaggactgcctgctgggaggggggatgagaatcctgccggaactgttgagggaaaagaggactgggagatggaggaggaccagggggaggaagaggaggaggaagcaacgccaaccccatcctccggccccagcccctctcccacccctgaggacatcgtcacttacatcctgggccgcctggccggcctggacgcaggcctgcaccagctgcacgtccgtctgcacgcgttggacacccgcgtggtcgagctgacccaggggctgcggcagctgcggaacgcggcaggcgacacccgcgatgccgtgcaagccctgcaggaggcgcagggtcgcgccgagcgcgagcacggccgcttggagggctgcctgaaggggctgcgcctgggccacaagtgcttcctgctctcgcgcgacttcgaagcccagcccagcgcctcgccgcatccgctcagcccggaccagcccaacggtggcacgctcgagaactgcgtggcgcaggcctctgacgacggctcctggtgggaccacgactgccagcggcgtctctactacgtctgcgagttccccttctagcggggccggtaccccgcctccctgcccatcccaccacccggcctttccctgcgccgtgcccaccctcctccggaatctcccttcccttcctggccacgaatggcagcgtcctccccgacccccagtctgggcgcttctgggagggctcttgcggtgccggcactcctccttgttagtgtctttccttgaaggggcgggcaccaggctaggtccggtgccaataaatccttgtggaatctgacttgaggggc

SEQ ID NO: 1372 - DNA, 720 bp, Homo sapiens
  source 1..720: mol_type = genomic DNA
ctgatggctgttctcctagtccccaagagttgaaccggagaggcttttactttgcaccaggtcgagaacgtgatcagccctttagagaaggaacctccttgtaacaggaattctgctgggaaacgccgtgtaggcactacctccgaagataagatgcatgtttggagctgtgtaaaatgcccactggctgtttgaaagaaggaaaaggtgactagggttgcaaattaaccttagtatcacttaaaaatattctatctagtcaaatgtacgtaagcaaagaagagagcaccaggatataaaactgccacagcagcttggaagacagatgattcagattttggggactttcttttgcgtgttacatagatttgtttgtcatcatgcagttaagcaggtgttgagggaaagctgagagaatgaaggctctaaatccccagtggaagcatgatatggcgaagcagagctggtgctgaattgttctctctgatggctctatgggagtggatagcactgagtcttcattgctgggttttagcggttgctgctgtttcggatcagcatgccacaagccccttcgactggctcctctctgataagggacccttccatcgctcacaggaatacacagattttgtggacagaagccggcagggatttagcacaagatacaagatatacagaaatatgggacacatttcttgctatctgctactctgggag

SEQ ID NO: 1373 - DNA, 273 bp, Homo sapiens
  source 1..273: mol_type = genomic DNA
ctacgcgcgtgtcatgaaccctgccgagagggccggggctgaggccctcaggccgacccggactcttgggcgcggtctcttgagcaggtggtccattatggctgacatgcaaaatctggtagaaagattggagagggcagtgggccgcctggaggcagtatctcatacctctgacatgcaccgtgggtatgcagacagtccttcaaaagcaggagcagctccatatgtgcaggcatttgactcgctgcttgctggtcctgtggcagagtactt

SEQ ID NO: 1374 - DNA, 3720 bp, Homo sapiens
  source 1..3720: mol_type = genomic DNA
gtcttcccctcgtgggccctgagcgggactgcagccagccccctggggcgccagctttggaggcccccgacagctgctctcgggagccgcctcccgacacccgagccccgccggcgcctcccgctcccggctcccggctcctggctccctccgcctcccccgcccctcgccccgccgccgaagaggccccgctcccgggtcggacgcctgggtctgccgggaagagcgatgagaggtgtctgaaggtggctattcactgagcgatggggttggacttgaaggaatgccaagagatgctgcccccacccccttaggcccgagggatcaggagctatgggaccagaggccctgtcatctttactgctgctgctcttggtggcaagtggagatgctgacatgaagggacattttgatcctgccaagtgccgctatgccctgggcatgcaggaccggaccatcccagacagtgacatctctgcttccagctcctggtcagattccactgccgcccgccacagcaggttggagagcagtgacggggatggggcctggtgccccgcagggtcggtgtttcccaaggaggaggagtacttgcaggtggatctacaacgactgcacctggtggctctggtgggcacccagggacggcatgccgggggcctgggcaaggagttctcccggagctaccggctgcgttactcccgggatggtcgccgctggatgggctggaaggaccgctggggtcaggaggtgatctcaggcaatgaggaccctgagggagtggtgctgaaggaccttgggccccccatggttgcccgactggttcgcttctacccccgggctgaccgggtcatgagcgtctgtctgcgggtagagctctatggctgcctctggagggactgcagtatgggggtctgggccagctggcagatggtgtggtggggctggatgactttaggaagagtcaggagctgcgggtctggccaggctatgactatgtgggatggagcaaccacagcttctccagtggctatgtggagatggagtttgagtttgaccggctgagggccttccaggctatgcaggtccactgtaacaacatgcacacgctgggagcccgtctgcctggcggggtggaatgtcgcttccggcgtggccctgccatggcctgggagggggagcccatgcgccacaacctagggggcaacctgggggaccccagagcccgggctgtctcagtgccccttggcggccgtgtggctcgctttctgcagtgccgcttcctctttgcggggccctggttactcttcagcgaaatctccttcatctctgatgtggtgaacaattcctctccggcactgggaggcaccttcccgccagccccctggtggccgcctggcccacctcccaccaacttcagcagcttggagctggagcccagaggccagcagcccgtggccaaggccgaggggagcccgaccgccatcctcatcggctgcctggtggccatcatcctgctcctgctgctcatcattgccctcatgctctggcggctgcactggcgcaggctcctcagcaaggctgaacggagggtgttggaagaggagctgacggttcacctctctgtccctggggacactatcctcatcaacaaccgcccaggtcctagagagccacccccgtaccaggagccccggcctcgtgggaatccgccccactccgctccctgtgtccccaatggctctgcctacagtggggactatatggagcctgagaagccaggcgccccgcttctgcccccacctccccagaacagcgtcccccattatgccgaggctgacattgttaccctgcagggcgtcaccgggggcaacacctatgctgtgcctgcactgcccccaggggcagtcggggatgggccccccagagtggatttccctcgatctcgactccgcttcaaggagaagcttggcgagggccagtttggggaggtgcacctgtgtgaggtcgacagccctcaagatctggttagtcttgatttcccccttaatgtgcgtaagggacaccctttgctggtagctgtcaagatcttacggccagatgccaccaagaatgccaggaatgatttcctgaaagaggtgaagatcatgtcgaggctcaaggacccaaacatcattcggctgctgggcgtgtgtgtgcaggacgaccccctctgcatgattactgactacatggagaacggcgacctcaaccagttcctcagtgcccaccagctggaggacaaggcagccgagggggcccctggggacgggcaggctgcgcaggggcccaccatcagctacccaatgctgctgcatgtggcagcccagatcgcctccggcatgcgctatctggccacactcaactttgtacatcgggacctggccacgcggaactgcctagttggggaaaatttcaccatcaaaatcgcagactttggcatgagccggaacctctatgctggggactattaccgtgtgcagggccgggcagtgctgcccatccgctggatggcctgggagtgcatcctcatggggaagttcacgactgcgagtgacgtgtgggcctttggtgtgaccctgtgggaggtgctgatgctctgtagggcccagccctttgggcagctcaccgacgagcaggtcatcgagaacgcgggggagttcttccgggaccagggccggcaggtgtacctgtcccggccgcctgcctgcccgcagggcctatatgagctgatgcttcggtgctggagccgggagtctgagcagcgaccacccttttcccagctgcatcggttcctggcagaggatgcactcaacacggtgtgaatcacacatccagctgcccctccctcagggagcgatccaggggaagccagtgacactaaaacaagaggacacaatggcacctctgcccttcccctcccgacagcccatcacctctaatagaggcagtgagactgcaggtgggctgggcccacccagggagctgatgccccttctccccttcctggacacactctcatgtccccttcctgttcttccttcctagaagcccctgtcgcccacccagctggtcctgtggatgggatcctctccaccctcctctagccatcccttggggaagggtggggagaaatataggatagacactggacatggcccattggagcacctgggccccactggacaacactgattcctggagaggtggctgcgcccccagcttctctctccctgtcacacactggaccccactggctgagaatctgggggtgaggaggacaagaaggagaggaaaatgtttccttgtgcctgctcctgtacttgtcctcagcttgggcttcttcctcctccatcacctgaaacactggacctgggggtagccccgccccagccctcagtcacccccacttcccacttgcagtcttgtagctagaacttctctaagcctatacgtttctgtggagtaaatattgggattggggggaaagagggagcaacggcccatagccttggggttggacatctctagtgtagctgccacattgatttttctataatcacttggggtttgtacatttttggggggagagacacagatttttacactaatatatggacctagcttgaggcaattttaatcccctgcactaggcaggtaataataaaggttgagttttcc

SEQ ID NO: 1375 - DNA, 4070 bp, Homo sapiens; identical to SEQ ID NO: 930
  source 1..4070: mol_type = genomic DNA

SEQ ID NO: 1376 - DNA, 1134 bp, Homo sapiens
  source 1..1134: mol_type = genomic DNA
cgccgcacatgcgccgggccgggccgggccgggggcgcgcgctctgcgagctggatgtccaggctgcgggcgctgctgggcctcgggctgctggttgcgggctcgcgcgtgccgcggatcaaaagccagaccatcgcctgtcgctcgggacccacctggtggggaccgcagcggctgaactcgggtggccgctgggactcagaggtcatggcgagcacggtggtgaagtacctgagccaggaggaggcccaggccgtggaccaggagctatttaacgaataccagttcagcgtggaccaacttatggaactggccgggctgagctgtgctacagccatcgccaaggcatatccccccacgtccatgtccaggagcccccctactgtcctggtcatctgtggcccggggaataatggaggagatggtctggtctgtgctcgacacctcaaactctttggctacgagccaaccatctattaccccaaaaggcctaacaagcccctcttcactgcattggtgacccagtgtcagaaaatggacatccctttccttggggaaatgcccgcagagcccatgacgattgatgaactgtatgagctggtggtggatgccatctttggcttcagcttcaagggcgatgttcgggaaccgttccacagcatcctgagtgtcctgaagggactcactgtgcccattgccagcatcgacattccctcaggatgggacgtggagaagggaaatgctggagggatccagccagacttgctcatatccctcacagcccccaaaaaatctgcaacccagtttaccggtcgctaccattacctggggggtcgttttgtgccacctgctctggagaagaagtaccagctgaacctgccaccctaccctgacaccgagtgtgtctatcgtctgcagtgagggaaggtgggtgggtattcttcccaataaagacttagagcccctctcttccagaactgtggattcctgggagctcctctggcaataaaagtcagtgaatggtggaagtcagagaccaaccctggggattgggtgccatctctctaggggtaacacaaagggcaagaggttgctatggtatttggaaacaatgaaaatggactgttagatgcc

SEQ ID NO: 1377 - DNA, 1996 bp, Homo sapiens
  source 1..1996: mol_type = genomic DNA
cctacagtggggactatatggagcctgagaagccaggcgccccgcttctgcccccacctccccagaacagcgtcccccattatgccgaggctgacattgttaccctgcagggcgtcaccgggggcaacacctatgctgtgcctgcactgcccccaggggcagtcggggatgggccccccagagtggatttccctcgatctcgactccgcttcaaggagaagcttggcgagggccagtttggggaggtgcacctgtgtgaggtcgacagccctcaagatctggttagtcttgatttcccccttaatgtgcgtaagggacaccctttgctggtagctgtcaagatcttacggccagatgccaccaagaatgccagcttctccttgttctccaggaatgatttcctgaaagaggtgaagatcatgtcgaggctcaaggacccaaacatcattcggctgctgggcgtgtgtgtgcaggacgaccccctctgcatgattactgactacatggagaacggcgacctcaaccagttcctcagtgcccaccagctggaggacaaggcagccgagggggcccctggggacgggcaggctgcgcaggggcccaccatcagctacccaatgctgctgcatgtggcagcccagatcgcctccggcatgcgctatctggccacactcaactttgtacatcgggacctggccacgcggaactgcctagttggggaaaatttcaccatcaaaatcgcagactttggcatgagccggaacctctatgctggggactattaccgtgtgcagggccgggcagtgctgcccatccgctggatggcctgggagtgcatcctcatggggaagttcacgactgcgagtgacgtgtgggcctttggtgtgaccctgtgggaggtgctgatgctctgtagggcccagccctttgggcagctcaccgacgagcaggtcatcgagaacgcgggggagttcttccgggaccagggccggcaggtgtacctgtcccggccgcctgcctgcccgcagggcctatatgagctgatgcttcggtgctggagccgggagtctgagcagcgaccacccttttcccagctgcatcggttcctggcagaggatgcactcaacacggtgtgaatcacacatccagctgcccctccctcagggagcgatccaggggaagccagtgacactaaaacaagaggacacaatggcacctctgcccttcccctcccgacagcccatcacctctaatagaggcagtgagactgcaggtgggctgggcccacccagggagctgatgccccttctccccttcctggacacactctcatgtccccttcctgttcttccttcctagaagcccctgtcgcccacccagctggtcctgtggatgggatcctctccaccctcctctagccatcccttggggaagggtggggagaaatataggatagacactggacatggcccattggagcacctgggccccactggacaacactgattcctggagaggtggctgcgcccccagcttctctctccctgtcacacactggaccccactggctgagaatctgggggtgaggaggacaagaaggagaggaaaatgtttccttgtgcctgctcctgtacttgtcctcagcttgggcttcttcctcctccatcacctgaaacactggacctgggggtagccccgccccagccctcagtcacccccacttcccacttgcagtcttgtagctagaacttctctaagcctatacgtttctgtggagtaaatattgggattggggggaaagagggagcaacggcccatagccttggggttggacatctctagtgtagctgccacattgatttttctataatcacttggggtttgtacatttttggggggagagacacagatttttacactaatatatggacctagcttgaggcaattttaatcccctgcactaggcaggtaataataaaggttgagttttccacaa

SEQ ID NO: 1378 - DNA, 1004 bp, Homo sapiens
  source 1..1004: mol_type = genomic DNA
tctctgctgatctgagtctgcctgtggcatggacctgcatcttccctgaagcatctccagggctgaaaaatcactgaccatggcaccatggtctcatccatctgcacagctgcagccagtgggaggagacgccgtgagccctgccctcatggttctgctctgcctcgggaacctctccaaagccaccctctgggctgagccaggctctgtgatcagccgggggaactctgtgaccatccggtgtcaggggaccctggaggcccaggaataccgtctggttaaagagggaagcccagaaccctgggacacacagaacccactggagcccaagaacaaggccagattctccatcccatccatgacagagcaccatgcagggagataccgctgttactactacagccctgcaggctggtcagagcccagcgaccccctggagctggtggtgacaggattctacaacaaacccaccctctcagccctgcccagtcctgtggtgacctcaggagagaacgtgaccctccagtgtggctcacggctgagattcgacaggttcattctgactgaggaaggagaccacaagctctcctggaccttggactcacagctgacccccagtgggcagttccaggccctgttccctgtgggccctgtgacccccagccacaggtggatgctcagatgctatggctctcgcaggcatatcctgcaggtatggtcagaacccagtgacctcctggagattccggtctcaggtgaggaagccacagtcttctctagtacaattcagggaagccagacaggttgtggagagctttacaggcagggcagcccctgctaagaaagacaaaaaggggaaggagaacacagaaatcctagggacacaaattcagggtgaggaaaacaaagcaagggctgggcacagtggctcacacgtgtaatctcagcactttgggaggccgaggcaggtggatcacctgatgtcaggagttcaagaccagcct

SEQ ID NO: 1379 - DNA, 414 bp, Homo sapiens
  source 1..414: mol_type = genomic DNA
ggactccacgtcaggctgtctctggtgcgctcgcccctcccctctgaggagatgttatttccctcctttcttctccgaggggtcaagattcttctggaagaggcctgtcccctcagttcccaggtgccatgaggaagcctcgtcggaagtcccggcagaatgccgagggccggcgttccccgtccccctacagtctcaagtgctcacccacccgggagaccctgacatatgcccaggcccagcggattgtcgaggtagacattgatggacgcctgcatcgtatcagcatctatgacccactcaaaatcattactgaagatgagctaactgcccaggatatcaccgaatgcaatagtaacaaggaaaacagtgaacagcctcagttccctggcaagtccaagaaaccctcatcca

SEQ ID NO: 1380 - DNA, 1611 bp, Homo sapiens
  source 1..1611: mol_type = genomic DNA
gtggactctgagaagcccaggcagttgaggacaggagagagaaggctgcagacccagagggagggaggacagggagtcggaaggaggaggacagaggagggcacagagacgcagagcaagggcggcaaggaggagaccctggtgggaggaagacactctggagagagagggggctgggcagagatgaagttccaggggcccctggcctgcctcctgctggccctctgcctgggcagtggggaggctggccccctgcagagcggagaggaaagcactgggacaaatattggggaggcccttggacatggcctgggagacgccctgagcgaaggggtgggaaaggccattggcaaagaggccggaggggcagctggctctaaagtcagtgaggcccttggccaagggaccagagaagcagttggcactggagtcaggcaggttccaggctttggcgtagcagatgctttgggcaacagggtcggggaagcagcccatgctctgggaaacactgggcacgagattggcagacaggcagaagatgtcattcgacacggagcagatgctgtccgcggctcctggcagggggtgcctggccacaatggtgcttgggaaacttctggaggccatggcatctttggctctcaaggtggccttggaggccagggccagggcaatcctggaggtctggggactccgtgggtccacggataccccggaaactcagcaggcagctttggaatgaatcctcagggagctccctggggtcaaggaggcaatggagggccaccaaactttgggaccaacactcagggagctgtggcccagcctggctatggttcagtgagagccagcaaccagaatgaagggtgcacgaatcccccaccatctggctcaggtggaggctccagcaactctgggggaggcagcggctcacagtcgggcagcagtggcagtggcagcaatggtgacaacaacaatggcagcagcagtggtggcagcagcagtggcagcagcagtggcggcagcagtggcggcagcagtggtggcagcagtggcaacagtggtggcagcagaggtgacagcggcagtgagtcctcctggggatccagcaccggctcctcctccggcaaccacggtgggagcggcggaggaaatggacataaacccgggtgtgaaaagccagggaatgaagcccgcgggagcggggaatctgggattcagggcttcagaggacagggagtttccagcaacatgagggaaataagcaaagagggcaatcgcctccttggaggctctggagacaattatagggggcaagggtcgagctggggcagtggaggaggtgacgctgttggtggagtcaatactgtgaactctgagacgtctcctgggatgtttaactttgacactttctggaagaattttaaatccaagctgggtttcatcaactgggatgccataaacaaggaccagagaagctctcgcatcccgtgacctccagacaaggagccaccagattggatgggagcccccacactccctccttaaaacaccaccctctcatcactaatctcagcccttgcccttgaaataaaccttagctgccccaca

SEQ ID NO: 1381 - DNA, 692 bp, Homo sapiens
  source 1..692: mol_type = genomic DNA
cctgcaccccgcccgggcatagcaccatgcctgcttgtcgcctaggcccgctagccgccgccctcctcctcagcctgctgctgttcggcttcaccctagtctcaggcacaggagcagagaagactggcgtgtgccccgagctccaggctgaccagaactgcacgcaagagtgcgtctcggacagcgaatgcgccgacaacctcaagtgctgcagcgcgggctgtgccaccttctgctctctgcccaatggccaactggctgagtgattcgaagaaagtgaggaatcctccctggacactgtatcgcccttcgtcgtctttcagtcaatctcttccactctaaggattgagtgagcgcgagctggggactctctcaaagataaggagggttcctgcccccaggtgaacattaactttccccagctcggcctctgtcgggaccagtgccaggtggacagccagtgtcctggccagatgaaatgctgccgcaatggctgtgggaaggtgtcctgtgtcactcccaatttctgagctccagccaccaccaggctgagcagtgaggagagaaagtttctgcctggccctgcatctggttccagcccacctgccctcccctttttcgggactctgtattccctcttgggctgaccacagcttctccctttcccaaccaataaagtaaccactttcagc

SEQ ID NO: 1382 - DNA, 2589 bp, Homo sapiens
  source 1..2589: mol_type = genomic DNA
acatttgtgatcacctggtcacacacctgggcaggaggctgcccctcctccctggtttgaggaagcaggaaaaggtacccgcgagagacagccagcagttctgtggagcagcggtggccggctaggatgggctgtctctggggtctggctctgccccttttcttcttctgctgggaggttggggtctctgggagctctgcaggccccagcacccgcagagcagacactgcgatgacaacggacgacacagaagtgcccgctatgactctagcaccgggccacgccgctctggaaactcaaacgctgagcgctgagacctcttctagggcctcaaccccagccggccccattccagaagcagagaccaggggagccaagagaatttcccctgcaagagagaccaggagtttcacaaaaacatctcccaacttcatggtgctgatcgccacctccgtggagacatcagccgccagtggcagccccgagggagctggaatgaccacagttcagaccatcacaggcagtgatcccagggaagccatctttgacaccctttgcaccgatgacagctctgaagaggcaaagacactcacaatggacatattgacattggctcacacctccacagaagctaagggcctgtcctcagagagcagcgcctcttccgacagcccccatccagtcatcaccccgtcacgggcctcagagagcagcgcctcttccgacggcccccatccagtcatcaccccgtcacgggcctcagagagcagcgcctcttccgacggcccccatccagtcatcaccccgtcacgggcctcagagagcagcgcctcttccgacggcccccatccagtcatcaccccgtcacgggcctcagagagcagcgcctcttccgacggcccccatccagtcatcaccccgtcacgggcctcagagagcagcgcctcttccgacggcccccatccagtcatcaccccgtcacgggcctcagagagcagcgcctcttccgacggcccccatccagtcatcaccccgtcacgggcctcagagagcagcgcctcttccgacggcccccatccagtcatcaccccgtcacgggcctcagagagcagcgcctcttccgacggcccccatccagtcatcaccccgtcacgggcctcagagagcagcgcctcttccgacggcctccatccagtcatcaccccgtcacgggcctcagagagcagcgcctcttccgacggcccccatccagtcatcaccccgtcacgggcctcagagagcagcgcctcttccgacggcccccatccagtcatcaccccctcatggtccccgggatctgacgtcactctcctcgctgaagccctggtgactgtcacaaacatcgaggttattaattgcagcatcacagaaatagaaacaacgacttccagcatccctggggcctcagacacagatctcatccccacggaaggggtgaaggcctcgtccacctccgatccaccagctctgcctgactccactgaagcaaaaccacacatcactgaggtcacagcctctgccgagaccctgtccacagccggcaccacagagtcagctgcacctgatgccacggttgggaccccactccccactaacagcgccacagaaagagaagtgacagcacccggggccacgaccctcagtggagctctggtcacagttagcaggaatccccttgaagaaacctcagccctctctgttgagacaccaagttacgtcaaagtctcaggagcagctccggtctccatagaggctgggtcagcagtgggcaaaacaacttcctttgctgggagctctgcttcctcctacagcccctcggaagccgccctcaagaacttcaccccttcagagacaccgaccatggacatcgcaaccaaggggcccttccccaccagcagggaccctcttccttctgtccctccgactacaaccaacagcagccgagggacgaacagcaccttagccaagatcacaacctcagcgaagaccacgatgaagcccccaacagccacgcccacgactgcccggacgaggccgaccacagacgtgagtgcaggtgaaaatggaggtttcctcctcctgcggctgagtgtggcttccccggaagacctcactgaccccagagtggcagaaaggctgatgcagcagctccaccgggaactccacgcccacgcgcctcacttccaggtctccttactgcgtgtcaggagaggctaacggacatcagctgcagccaggcatgtcccgtatgccaaaagagggtgctgcccctagcctgggcccccaccgacagactgcagctgcgttactgtgctgagaggtacccagaaggttcccatgaagggcagcatgtccaagcccctgaccccagatgtggcaacaggaccctcgctcacatccaccggagtgtatgtgtggggaggggcttcacctgttcccagaggtgtccttggactcaccttggcacatgttctgtgtttcagtaaagagagacctgatcacccatctgtgtgcttccatcctgcattaaaattcactcagtgtggccca

SEQ ID NO: 1383 - DNA, 2305 bp, Homo sapiens
  source 1..2305: mol_type = genomic DNA
ctcactcacctccgcactgcagccaagggaggcccgccctggcgtgggctgctgcctgtggctttgggcaggcaggagcgaaagggccaggggttgcctgtcctcccccaccctgttgaggccttcctccccctctgctgagcctcggttaattataactctgacctaagtgccctgtgacgtcaagcccgggccagccctgcccaggagacccagcaaccaggtccatgtctcagccatgctccccacggaggtcccccaatcccacccgggcccctcagcgttgcttctgctgcagctgttgctgccccccacatctgccttcttccccaacatctggagcctgctggctgcccctggctccatcacccaccaagacctaactgaggaggcagcgctcaacgtcaccctgcagctcttcctggagcagccacccccaggccgcccccctcttcgtcttgaggacttcctgggtcgaacactccttgctgatgacctctttgccgcctactttggacctggttcttctcggcggttccgagcagccttaggtgaggtgtctcgtgccaatgcagcccaggacttcctgccaacttccaggaatgaccccgacctgcactttgatgctgagcgactgggtcagggacgcgcgcgcctggtaggggctctgcgggagaccgtggtggcagccagggcccttgaccacaccctggctcgccagcgcctcggggctgcacttcatgccctgcaggatttctacagtcatagcaactgggtggagctgggcgagcagcagccacaccctcacctcctctggccaaggcaggagctccagaacctggcacaagtggccgatcctacctgctccgattgcgaggagttgagctgccccaggaattggctgggcttcacactcctcacctctggctactttggaactcatcccccgaaacctccagggaaatgtagccacgggggccattttgaccggagcagctcccagccaccgaggggaggcatcaacaaggacagcacatccccaggcttctcccctcaccacatgctgcacctccaggctgcaaaactggcccttctagcctccatccaggccttcagccttctgcgaagccgcctgggagacagggatttctccaggctgctggacatcaccccagcctccagcctgagctttgtcctggacaccacgggcagcatgggtgaggagatcaacgctgccaaaatccaggctcgccaccttgtggagcagcggagaggcagccccatggagcctgtccactatgtcctggtgccttttcatgacccagggttcggccctgtctttacaaccagtgaccctgacagcttctggcaacagcttaatgagatccatgccttggggggtggagacgagcctgagatgtgcctgtcagccctgcagctggccctgctgcacacacctccactctcagatatctttgtcttcacggatgcctcccccaaggatgcctttctcaccaaccaggtggaatccctgactcaggagcggcgctgccgggtaacattcctggtgactgaagatacatcaagggttcagggtcgagctcggcgtgagatcttgtcccctctgcgttttgagccatacaaagcagtggccctggcctcaggaggagaggtgatcttcaccaaagaccagcacattcgagacgtggcagccattgttggggagagcatggctgccctggtgactcttcccctggaccctcctgttgtggtgcctgggcagccacttgtgttcagcgtggatgggctgctccagaagatcacagtccggatccacggagacatcagcagcttctggatcaagaaccctgcaggggtctcccagggccaggaggaaggcgggggtcctctaggtcacactcgccgctttgggcagttctggatggtgaccatggatgaccctccacagacaggaacctgggagatccaggtcacagctgaggacacccctggggtgagagtgcaagcccagacctccctggacttcctcttccactttgggatccccatggaggatggaccccaccctggcctctaccccctgactcagccagttgcaggtcttcagacccagctgctggtagaaagccaatcctggggatcctcagccgcatttctcccacgtcatccttcgaggggtcccagagggtgccgaactaggccaggtgcccttggagcccgtgggacctccggagcgaggtctcctcgcagcctcgctgtcgcccacgctgctgtccacccctag

SEQ ID NO: 1384 - DNA, 2449 bp, Homo sapiens
  source 1..2449: mol_type = genomic DNA
aataacctcaacgtgggaagtgacaccacatcagaaaccagcttttctctctccaaagaagcaccaagggagcatctggaccaccaggctgcacaccaacccttccccagaccgcgattccgacaagagacggggcacccttcattgcaaagagatttccccagatcctttctccttgatctaccaaactttccagatctttccaaagctgatatcaatgggcagaatccaaatatccaggtcaccatagaggtggtcgacggtcctgactctgaagcagataaagatcagcatccggagaataagcccagctggtcagtcccatcccccgactggcgggcctggtggcagaggtccctgtccttggccagggcaaacagcggggaccaggactacaagtacgacagtacctcagacgacagcaacttcctcaacccccccagggggtgggaccatacagccccaggccaccggacttttgaaaccaaagatcagccagaatatgattccacagatggcgagggtgactggagtctctggtctgtctgcagcgtcacctgcgggaacggcaaccagaaacggacccggtcttgtggctacgcgtgcactgcaacagaatcgaggacctgtgaccgtccaaactgcccaggaattgaagacacttttaggacagctgccaccgaagtgagtctgcttgcgggaagcgaggagtttaatgccaccaaactgtttgaagttgacacagacagctgtgagcgctggatgagctgcaaaagcgagttcttaaagaagtacatgcacaaggtgatgaatgacctgcccagctgcccctgctcctaccccactgaggtggcctacagcacggccgacatcttcgaccgcatcaagcgcaaggacttccgctggaaggacgccagcgggcccaaggagaagctggagatctacaagcccactgcccggtactgcatccgctccatgctgtccctggagagcaccacgctggcggcacagcactgctgctacggcgacaacatgcagctcatcaccaggggcaagggggcgggcacgcccaacctcatcagcaccgagttctccgcggagctccactacaaggtggacgtcctgccctggattatctgcaagggtgactggagcaggtataacgaggcccggcctcccaacaacggacagaagtgcacagagagcccctcggacgaggactacatcaagcagttccaagaggccagggaatattaaagagactgggatgaggtggaggacgctgcctctggttctggagcacacacgtgctgcactgacgtgccgactggcgccgagaccttcatagctgcggtcgtgtatatttgtatataccacatgagtatttctcatacattacgctaggggcgtgtgccacgcccaggggactgccttgtgaagccgccctcgccatctgcagagctccttgaaagtgcccctggggagcgatgtgggcagaaggatggggacaacttggaagccagaagaagaacctggaagccacagtgggtgcgactcaattcacacccggatccagagtttcaaagagaggcaaagggggaaagagactgaggttgtaaacgttataagcagtttttatatataacttatttaatacaaatgtgacttaattaagcgtaaccttttctctggagttgtggtgaaactaatcacgtctgtgagagatcagaaagaaagagacttagggaagtggaagagaaagggaattttggaatttatttctttaaaaataatgcaatggaaatatatcaaaacatgtaaacgcccaccttaaaccaaatgttatttggtcatgaggcaccttgctggagtctcagattccaaaagtctcttcttcagactgggtagggaatatgatattttagggacaaagctgaggactggttttaaataggctttaaaataaaagatcaatattatcataatgctatcattctgctaaacggccccaaaacagtagaatttctgctcatgtcctagcaggttcagaagactgcagccaagttcagatgtaaaaacaagaagtagcacttttccaaaggaaaacaacaaaacaaatgggaaaaagataatggaccgcatttcacctattttaatactattttaacaattttttcatctaccaatatatccccaataaataaatataaaagggggggagggtcaatctggggaatcttagttttttatgttttaagaaaacaaaaaaaactgcattatttttgtaaagtatttattgagtcacggattattgtgcatcaagcaattgttaatatgacctggtcctatggggtagaacttaggaaaaataaagttggttcttattcaatattttactttgcaaaattctagtaaaagagagtatataataaaatcataataaaaggtg

SEQ ID NO: 1385 - DNA, 1800 bp, Homo sapiens
  source 1..1800: mol_type = genomic DNA
agccgccattgccgggcctgcctggccaccctgcgcagcggccttgcgtcctctccgggggcggagcgggtcggcgggcctgacagggaacctccctgaccgagcccacgtctccccacggccagagaaatctccggcccggcccgcatcgccagcccccaggcccggaggaacggcccgagcccaggagaaccacatcttcgtcccagccccggaggctcctgtgggcaagatcgtgagccaacgggttcctgaggcccctcctggccaggcagggtttccccgcgcgtttccgaggagccctgcctggccgggcggctggacaaacaggtcgtagcaccgatcgcgcccgcccccagcaggggtcccgcacaggcttgcccctgacccccacccaaacctgtccttccgctttgcccccaaacagtgcacttgccggcggtcccaacccagcaggagaagtggacatgaggttggcaggccctctccgcattgtggtcctagtcgtcagtgtgggtgtcacatggatcgtggtcagcatcctcctgggtgggcctggcagtggctttcctcgcatccagcaactcttcaccagtccagagagctcggtgactgcagcgccacgggccaggaagtacaagtgtggcctgccccagccgtgtcctgaggagcacctggccttccgcgtggtcagcggggccgccaacgtcattgggcccaagatctgcctcgaggacaagatgctgatgagcagcgtcaaggacaacgtgggccgcgggctgaacatcgccctggtgaacggggtcagcggcgagctcatcgaggcccgggcctttgacatgtgggccggagatgtcaacgacctgttgaagtttattcggccactgcacgaaggcaccctggtgttcgtggcatcctacgacgacccagccaccaagatgaatgaagagaccagaaagctcttcagtgagctgggcagcaggaacgccaaggagctggccttccgggacagctgggtgtttgtcggggccaagggtgtgcagaacaagagcccctttgagcagcacgtgaagaacagtaagcacagcaacaagtacgaaggctggcccgaggcgctggagatggaaggctgtatcccgcggagaagcacggccagctagcacggccagtgccaggaccgggccgagggaggccagaccaagggaggcacgcgcgctgccgggcggacagaggctgaggctcacaccccacacccgggcaggagcgctccctggccccaacacatcggggctccgaggcagtgaccagaacgtggtctcaaggtggtgggggctatgggggctgcagggggtagccctgccgcactttgtcacgggagcccagggtacccgcctccttttcgtaacactgttccccccggtcagcccatctagccctgtcctccattcctcacgccatctccatccccatcttgagtcctggaacggccctgggtgcctgcccctcactgtgcaactctgggagcagcccggcaggttggggcgtcttccagaacctctcccttctggagccactctgcactgcgggctaaacatgtttccagtgtgattccttccagtgagccaaacccggtggctgcttcatgagcctgactgcctctcgcctgctctcagcaggaagggacccctggagcaggctggcccggggtggtgaagtagctggagcccgatcacagtcccgcggtttgtcagggggcccaccttctagatgaccccttaataaagtgatggccccacagaa

SEQ ID NO: 1386 - DNA, 485 bp, Homo sapiens; identical to SEQ ID NO: 1263
  source 1..485: mol_type = genomic DNA

SEQ ID NO: 1387 - DNA, 1520 bp, Homo sapiens
  source 1..1520: mol_type = genomic DNA
taagcaagtgtcagggctcaccaaccatgcaaggacagggcaggagaagaggaacctgcaaaggctggttttggagaccccgagtcagaacatcttcttctcccctgtgagtgtctccacttccctggccatgctctcccttggggcccactcagtcaccaagacccagattctccagggcctgggcttcaacctcacacacacaccagagtctgccatccaccagggcttccagcacctggttcactcactgactgttcccagcaaagacctgaccttgaagatgggaagtgccctcttcgtcaagaaggagctgcagctgcaggcaaatttcttgggcaatgtcaagaggctgtatgaagcagaagtcttttctacagatttctccaacccctccattgcccaggcgaggatcaacagccatgtgaaaaagaagacccaagggaaggttgtagacataatccaaggccttgaccttctgacggccatggttctggtgaaccacattttctttaaagccaagtgggagaagccctttcaccctgaatatacaagaaagaacttcccattcctggtgggcgagcaggtcactgtgcatgtccccatgatgcaccagaaagagcagttcgcttttggggtggatacagagctgaactgctttgtgctgcagatggattacaagggagatgccgtggccttctttgtcctccctagcaagggcaagatgaggcaactggaacaggccttgtcagccagaacactgagaaagtggagccactcactccagaaaaggtggatagaggtgttcatccccagattttccatttctgcctcctacaatctggaaaccatcctcccgaagatgggcatccaaaatgtctttgacaaaaatgctgatttttctggaattgcaaagagagactccctgcaggtttctaaagcaacccacaaggctgtgctggatgtcagtgaagagggcactgaggccacagcagctaccaccaccaagttcatagtccgatcgaaggatggcccctcttacttcactgtctccttcaataggaccttcctgatgatgattacaaataaagccacagacggtattctctttctagggaaagtggaaaatcccactaaatcctaggtgggaaatggcctgttaactgatggcacattgctaatgcacaagaaataacaaaccacatccctctttctgttctgagggtgcatttgaccccagtggagctggattcgctggcagggatgccacttccaaggctcaatcaccaaaccatcaacagggaccccagtcacaagccaacacccattaaccccagtcagtgcccttttccacaaattctcccaggtaactagcttcatgggatgttgctgggttaccatatttccattccttggggctcccaggaatggaaatacgccaacccaggttaggcacctctattgcagaattacaataacacattcaataaaactaaaatatgaattcatctgtcaacaga

SEQ ID NO: 1388 - DNA, 847 bp, Homo sapiens
  source 1..847: mol_type = genomic DNA
gcagctgacgcccgcttattagctctcgctgcgtcgccccggctcagaagctccgtggcggcggcgaccgtgacgagaagcccacggccagctcagttctcttctactttgggagagagagaaagtcagatgccccttttaaactccctcttcaaaactcatctcctgggtgactgactacttggaagatgaactgttctcatcagcaacatgctattatgtcatcttttaggactaggtaatgctccagtgacttaataccaatgacattttcatgttgtccacaaattctgagtagaaaccttttcaagcctgtagcctctctgagagctgactgttattaactgaatgagaggatgtcagcaaacagagttaatagagtggatacaaccttgctgaagatgaagaatatacaatattgaggatatttttttcttttttttttcaagtcttgatttgtggcttacctcaagttaccatttttcagtcaagtctgtttgtttgcttcttcagaaatgttttttacaatctcaagaaaaaatatgtcccagaaattgagtttactgttgcttgtatttggactcatttggggattgatgttactgcactatacttttcaacaaccaagacatcaaagcagtgtcaagttacgtgagcaaatactagacttaagcaaaagatatgttaaagctctagcagaggaaaataagaacacagtggatgtcgagaacggtgcttctatggcaggatatgcggatctgaaaagaacaattgctgtccttctggatgacattttgcaacgattggtgaagctggagaacaaagttgactatattgttgtgaatgg

SEQ ID NO: 1389 - DNA, 886 bp, Homo sapiens
  source 1..886: mol_type = genomic DNA
gcttcagtccagcacctttctcgggtcacggcctcctcctggctcccaggaccccaccataggcagaggcaggccttcctacaccctactccctgtgcctccaggctcgactagtccctagcactcgacgactgagtctctgaggtcacttcaccgtggtctccgcctcacccttggcgctggaccagtgagaggagagggctggggcgctccgctgagccactcctgcgcccccctggccttgtctacctcttgccccccgaagggttagtgtcgagctcactccagcatcctacaacctcctggtggccttgccgcccccacaaccccgaggtttaaagccaggtacacgaggcaggggacacaccaaggatggagatgttccaggggctgctgctgttgctgctgctgagcatgggcgggacatgggcatccaaggagccgcttcggccacggtgccgccccatcaatgccaccctggctgtggagaaggagggctgccccgtgtgcatcaccgtcaacaccaccatctgtgccggctactgccccaccatgacccgcgtgctgcagggggtcctgccggccctgcctcaggtggtgtgcaactaccgcgatgtgcgcttcgagtccatccggctccctggctgcccgcgcggcgtgaaccccgtggtctcctacgccgtggctctcagctgtcaatgtgcactctgccgccgcagcaccactgactgcgggggtcccaaggaccaccccttgacctgtgatgacccccgcttccaggactcctcttcctcaaaggcccctccccccagccttccaagtccatcccgactcccggggccctcggacaccccgatcctcccacaataaaggcttctcaatccgc

SEQ ID NO: 1390 - DNA, 1484 bp, Homo sapiens
  source 1..1484: mol_type = genomic DNA
atggtgctgctgctggtgatcctcatcccggtgctggtgagctcggccggcacgtcggcgcactacgagatgctgggcacctgccgcatggtctgcgacccctacgggggcaccaaggcgcccagcaccgctgccacgcccgaccgcggcctcatgcagtccctgcccaccttcatccagggcccccccatggggcccccgggcgagaagggcgagccgggccgccaaggcctgccgggcccgcccggggcgcccggcctgaacgcggccggggccatcagcgccgccacctacagcacggtgcccaagatcgccttctacgccggcctcaagcggcagcatgaaggctacgaggtgctcaagttcgacgacgtggtcaccaacctcggaaaccactacgaccccaccaccggcaagttcacctgctccatcccgggcatctacttcttcacctaccacgtcctgatgcgcggaggggacggcaccagcatgtgggctgatctctgcaaaaacaaccaggtgcgtgctagtgcaattgcccaagatgctgatcagaattacgactatgccagtaacagtgtggttcttcatttggagccgggagatgaagtctatatcaaattagatggcgggaaagcccatggaggaaacaacaacaaatacagcacgttttctggatttattatttatgctgactgataatgcagaaactaagcttattattctgagtttgaacactggattcgtatggctaacgtcagtgaatcaaggatcccaggggatgccaatggcagggcacctcagttgtgtatatgtggggaaatcaaatgctacctgactcacatctgtatcactcagaaacattatgtaaaaaatatcaaagcaagataagcagatgtgtgatccactaccgccaaagcaaatactccttatcgttagtgtccatgtgaatgaagtcctatatagatcacaaatttttatagacaaatctaagacattgaattatttcttctatatatatgatactttggtgtactgtgatcttgctgcttttatccatatgtcagctttggttcttgtgagtttacctgcttattatgatacttggagtccattcatagtgtggggaagaatgatttttgccctgcaggagaaggtctaattgaaataatgctgcttgtccccaaagaaattgtttgccttgtactcttgttaaccttagagctagacctgggaatgattcaacttcaagccttaacctggaattttctggatttgagggaattcccaagcctatgatctttttcacattttctttttcttatatgaattttcttttctctcttttctggtgatagtctttaaaaatagagattgacagtgtatcataggattaccctctaagtgtgaaaatgtgtaattatgtacggtatttagaaaaagcccttatgtgtccattttgtcaactgaatacatttagattc

SEQ ID NO: 1391 - DNA, 580 bp, Homo sapiens; identical to SEQ ID NO: 1292
  source 1..580: mol_type = genomic DNA

SEQ ID NO: 1392 - DNA, 1472 bp, Homo sapiens
  source 1..1472: mol_type = genomic DNA
cttagatattaaactgataggataagatataaaataatttaagattgctgatatatgttttaaaattaattatttgctcaagcatttgtgacaatttacagttctaattgaggttttaaatttagtagtttgtaggtattttaagttttgcccctgaattctttataggtgctgataagcctttggtaagttttactccatgaaagactattactgaaaaaaacgtaatctcaataaaagaactttaataagcttgactaaatatttagaaagcacattgtgttcagtgaaactttgtatataatgaatagaataataaaagattatgttggatgactagtctgtaattgcctcaaggaaagcatacaatgaataagttattttggtacttcctcaaaatagccaacacaatagggaaatggagaaaatgtactctgaacaccatgaaaagggaacctgaaaatctaatgtgtaaacttggagaaatgacattagaaaacgaaagcaacaaaagagaacactctccaaaataatctgagatgcatgaaaggcaaacattcactagagctggaatttccctaagtctatgcagggataagtagcatatttgaccttcaccatgattatcaagcacttctttggaactgtgttggtgctgctggcctctaccactatcttctctctagatttgaaactgattatcttccagcaaagacaagtgaatcaagaaagtttaaaactcttgaataagttgcaaaccttgtcaattcagcagtgtctaccacacaggaaaaactttctgcttcctcagaagtctttgagtcctcagcagtaccaaaaaggacacactctggccattctccatgagatgcttcagcagatcttcagcctcttcagggcaaatatttctctggatggttgggaggaaaaccacacggagaaattcctcattcaacttcatcaacagctagaatacctagaagcactcatgggactggaagcagagaagctaagtggtactttgggtagtgataaccttagattacaagttaaaatgtacttccgaaggatccatgattacctggaaaaccaggactacagcacctgtgcctgggccattgtccaagtagaaatcagccgatgtctgttctttgtgttcagtctcacagaaaaactgagcaaacaaggaagacccttgaacgacatgaagcaagagcttactacagagtttagaagcccgaggtaggtggagggactagaggacttctccagacatgattcttcatagagtggtaatacaatttatagtacaatcacattgctttgattttgtgtatatatatatttatctgtgttttaagattgtgcatattgaccacaattgtttttattttgtaatgtggctttatatattctatccattttaaattgtttgtatgtcaaaataaattcattaatatggttgattcttc

SEQ ID NO: 1393 - DNA, 2407 bp, Homo sapiens
  source 1..2407: mol_type = genomic DNA
acatggtttagttgatggcgcaagcccaggtccaaagcccatgctcttctcaaacagccagaggtgactcccacacgggtcatgctgttgtctcctgatccagccggccctgccaggaccccaccatgccattccggcacaagcctgggagtgtgttctccgtggagggggagaacctggaccttgcaatgtccaaggaggaggtggtggctatgataggggatggcccctgtgtggtgaagacgctgacgcggcaccacctgtactgcgagccccccgtggagcagcccctgccacggcaccatgccctccgagaggcacctgactctttgcctgagttcacggtgcagatggggaacttgcgcttctccctgggtcacgtgcagtatgacggcgagagccctggggcttttcctgtggcagcccaggtgggcttgggggtgggcacctctcttctggctctgggtgtcatcatcattgtcctcatgtacaggaggaagagcaagcaggccctgagggactataagaaggttcagatccagctggagaatctggagagcagtgtgcgggaccgctgcaagaaggaattcacagacctcatgactgagatgaccgatctcaccagtgacctcctgggcagcggcatccccttcctcgactacaaggtgtatgcggagaggatcttcttccctgggcaccgcgagtcgcccttgcaccgggacctgggtgtgcctgagagcagacggcccactgtggagcaagggctggggcagctctctaacctgctcaacagcaagctcttcctcaccaagttcatccacacgctggagagccagcgcaccttttcagctcgggaccgtgcctacgtggcatctctgctcaccgtggcactgcatgggaagcttgagtatttcactgacatcctccgcactctgctcagtgacctggttgcccagtatgtggccaagaaccccaagctgatgctgcgcaggacagagactgtggtggagaagctgctcaccaactggatgtccatctgtctgtataccttcgtgagggactccgtaggggagcctctgtacatgctctttcgagggattaagcaccaagtggataaggggccagtggacagtgtgacaggcaaggccaaatacaccttgaacgacaaccgcctgctcagagaggatgtggagtaccgtcccctgaccttgaatgcactattggctgtggggcctggggcaggagaggcccagggcgtgcccgtgaaggtcctagactgtgacaccatctcccaggcaaaggagaagatgctggaccagctttataaaggagtgcctctcacccagcggccagaccctcgcacccttgatgttgagtggcggtctggggtggccgggcacctcattctttctgacgaggatgtcacttctgaggtccagggtctgtggaggcgcctgaacacactgcagcattacaaggtcccagatggagcaactgtggccctcgtcccctgcctcaccaagcatgtgctccgggaaaaccaggattatgtccctggagagcggaccccaatgctggaggatgtagatgaggggggcatccggccctggcacctggtgaagccaagtgatgagccggagccgcccaggcctcggaggggcagccttcggggcggggagcgtgagcgcgccaaggccatccctgagatctacctgacccgcctgctgtccatgaagggcaccctgcagaagttcgtggatgacctgttccaggtgattctcagcaccagccgccccgtgccgctcgctgtgaagtacttctttgacctgctggatgagcaggcccagcagcatggcatctccgaccaggacaccatccacatctggaagaccaacagcttgcctctgaggttctggatcaatataataaaaaacccgcagtttgtgttcgacgtgcaaacatctgataacatggatgcggtgctccttgtcattgcacagaccttcatggacgcctgcaccctggccgaccacaagctgggccgggactccccgatcaacaaacttctgtatgcacgggacattccccggtacaagcggatggtggaaaggtactatgcagacatcagacagactgtcccagccagcgaccaagagatgaactctgtcctggctgaactgtcctggaactactccggagacctcggggcgcgagtggccctgcatgaactctacaagtacatcaacaagtactatgaccagatcatcactgccctggaggaggatggcacggcccagaagatgcagctgggctatcggctccagcagattgcagctgctgtggaaaacaaggtcacagatctataggaacccaggagccacggcctgctgttgcttcagcctggcct

SEQ ID NO: 1394 - DNA, 768 bp, Homo sapiens
  source 1..768: mol_type = genomic DNA
gggcagaatcagacccagcgtctgactcctcctgagagggctcccttttttctcctctcctccgctgtcagaaacagatctgggctggaatggcctggggtggggtccacacctgctgcttccacctgtgctgctgctgctcctggcctcagggtgctgtgcctgaagaacttcacaaacacccaggacagaccctcctcctgcaatgccagtactcacccaagagagggccctatcagcccaaatcctggtgtcagcagacatctccaagtcggtgtaccttacttgtcaccagctccaagccctggacagcagttcagaagtctcattacacaatctgggacaagcccaatgctggcttcttcaacatcaccatgattcagctgacacagaatgactcgggattctactggtgtggaatctacaacgcttccgaaaacatcatcactgttcttagaaatatcagcctggtggtgtctccagccccaaccacgtctcctatgtggactcttccctggctcccaacaagcacagttctgatcacttctccagaggggacctctggccatccctccatcaatggctctgagaccaggaaatcaagagcccctgcctgccttggctcaggtggccccagattcctggtcttggtgctatgtggactcctcctggccaagggcctgatgttgtgagtcctgttagtgctcctgatctgcaggtgccacagcagtgacgaggtttctgattgtcccagcacagccttgtccc

SEQ ID NO: 1395 - DNA, 534 bp, Homo sapiens
  source 1..534: mol_type = genomic DNA
atttatccctaatctggagggcaacctggagctaggtaagaacagaacagccctttgacttcaacgcatggacaaaggacaacaaaggcacactcattctgtctcctgctaccctgtgaaaaggtgccttctgccattattgtaagcttcctgaggcctcctcagccatgtggaactaatatttaaaaaaaccatccatgggacagtctaacataacaaagggaattattcatcaagaagaggccctttagcagggtatttaaagtgcccaggtacttacaataacaagttggactgaacacattgtatctcaggaattaagaatttttcctaaaagaagtttccagattgtttgaacttctctggccgcacaatacaggaaggaagactaaagcagcaaagggacctacagcgtctgcagcatgggctggttaactaggattgtctgtcttttctggggagtattacttacagcaagagcaaactatcagaatgggaagaacaatgtgccaaggctgaaattatcctacaaag

SEQ ID NO: 1396 - DNA, 560 bp, Homo sapiens
  source 1..560: mol_type = genomic DNA
gccgctgaagggattctcagtcccatctgactccccatgaggctcctggctttcctgagtctgctggccttggtgctgcaggagacagggacagcttctctcccaaggaaggagaggaagaggagagaggagcagatgcccagggaaggcgattcctttgaagttctgcctctgcggaatgatgtcctgaacccagacaactatggtgaagtcattgacctgagcaactatgaggagctcacagattatggggaccaactccccgaggttaaggtgactagcctcgctcctgcaaccagcatcagtcccgccaagagcactacggctccagggacaccctcgtcaaaccccacgatgaccagacctactacagcagggctgctactgagttcccagcccaaccatgaggacattcctcctcttcctcggaggactgcctacctgtatgcacgcttcaaccgcatcagccgtatcagggccgaagacttcaaagggctgacaaagttgaagaggattgacctctccaacaacctcatttcctccatcgataatgatgcctt

SEQ ID NO: 1397 - DNA, 4481 bp, Homo sapiens
  source 1..4481: mol_type = genomic DNA
gcgagtagcggagcgggacccgctgatgctcaccccatttagagaaagaaatccacctccccaaccccaatcaagaacctgctattgtatatcatcatagagccagattacctagggaatcatcatccagggacgtgccagaaaccacaagaaaacatggggagggttttcctcacgggagaaaaagccaattccatattaaaacgctacccaagagctaatgggttttttgaagaaataagacagggcaacattgagcgtgagtgcaaagaagaattctgtacatttgaagaagcaagagaagcttttgaaaataatgaaaaaactaaggagttttggagcacctacacaaaagcgcaacaaggggagagtaaccgaggaagtgactggtttcagttttaccttacctttccgttaatctttggcctcttcattatcctccttgtcattttcctaatctggagatgcttcctaagaaacaaaactcgtagacagacagtgactgaaggccacattcctttccctcagcaccttaatattatcaccccaccccccccaccagatgaagtgtttgacagcagtggattgtctccaggctttctgggatatgtagttgggcgctcagattccgtctctactcgcctgtccaattgtgatcccccgccaacctatgaggaagccactggccaagtgaacctgcagaggagtgaaacagaacctcatttagacccacccccagagtatgaggacatagtcaactccaactcagccagtgccattcctatggtgcctgtggtcaccaccatcaaatgaagctgcaaacttctttttactctaatcatttttaaaatactaatggaagaactttctagcactttaccactacataaatgttcattgacttattttattggactcttaccgcataccacttcacacttgttttattttctttagttttgtttcttgttatagaatcattatccatgctcatttttgctaggggaaatatatgaagagggaaaacatactaatgggggtctttctgtgatgtgatgagacatacatgtaagtgtatatatgtgtgtataggcatatatacgtgtgtatgcatcaacacagtatatgtaaaactgtcttaaaaatccattaacttctacctaaatcacctggaaggagagcattactcaccaaaattgcaaaacaagggtatcaagaatttgtgtaatagccagtgacatgctgtagatttttgcaaactggatgtacttagcatgttttctaattctgactggcttttgttaacttgataattcttcatctaccttaaaaagaaaaaaattacacatagtcattcttgatgttataaatagagaaaaagtgtgtgtgagcaataatgcataagctactgataacttgcttacagcagatagcaataaggtatttggtggcattcggcttgttttgtaatagggattttttttttggttgaccactcccccacacttccaaaattaaacagtgttttcttagcatcttgaatatctcctgcggtgtatattaacatcttgatgagacagatttccaggcaacaaaataatttctaaaatggatatatgtgtggattaatgacaggcagtaaatacccattactcctttactcatagctggtaaaattattcccactgttttattgccttttactgtacgttctacactctgtcctactcccacagaattttcaagcccttaagagtttagttaaaataaaatttttgaaattattgtcttaatatttttatataggctgatgtctttgcctcaagattgttaggaggtaattttccattgaattatcaactgtgatttttatattgccctccaagtggtagaagaagattgcaaagtccatgttatgctaggtgcacaataaatctagtaatagccccacacagatctcatcattgttgctacttccttttgtattttcatcaggtatttttttaactgtagggtttttacttttttcttggagcagagagaacaggctgtaaatgggttgccaacataagctggctgagaaataaaagaaaacaagacagttgttcataaagtttcattttgtatgcactgatggcaaattcattaggtcagttaagggaaatatttgtaccacttccaaacttttcagcgttggataaaatgattgatgaggcaggcagaaggaatgtaggtttcaggtgtgtcatttcctgctgcttccagctccatccctacagactcctccccgagtcctgccctggaaccaaaggaaggaggaacactgaggggaatcctgaagtaggagtcagatgacctgaactcagatctccctctatcacatgcttgccaccactgtaccttgagcaagaatcatatctgaccctcaacctcctcaactctaaaatggggataacatcatttgtcctgcacttctctaagggctttacaaggatcaaataagatggtgtgtatgtaagaaatttgtaaaatgtgaagagctatctacactaagttcgtaatgttattattattgtgcttcatggagaattttcccctctgttttcctaaattgtatgagagctttcacacagtgagaaatagagcaggctgccccataaatgggtaacatattcctaatctgagtgtgtgggctgttagagaacccctgccatgctctggtctgttctgaaactgtgccaactgaaagatgatagtccacacagcacaaacaggtttaagcaaatgatagaaagggaagtaaggcgtgtgtgctagttaataggtttagtagcttttatggactaaaaatgattgattgtatcttgaccctggtctcagaaatgacatttttacttttgccatgagtacacatcagatatctttggcttctatttaaagctaaaggtagaagtgtttgatccagtgaactgtgtatgtatgtgtggggtttttttctttatttttaaatgaaaattaagacaccttttgtgtggacatgtttttgtctttaatgtcaggctttagattagaccagcagttttcaaagtatggccaatggacccctgggttccttgagagcctttcaggggggactatgagatcaaaatatttttattataatgtgaagacattgtcttttcactctatctcaaaaaaagtgttgcaaatgtaaaacattgccatcttctcacaaatctctttttttgtttttgaaaatatggccatttttcataaaatgttatttgtgttagcatgtaatgggtttactatgtttaaataagttaatactttaaaaattttcaggtttttttagtatggtgaatattgatagatataaacctcatgaacaaaagtactttggcatccagattctcaataaatgttaagagcgtaagtgtaagggggtccagagaccaaaagttttagagctacaggattagacataggagcaggatattctgttagtgtgatttcttgcaactttattttacattttaaactgctgatattggatataatgctgctttttagagacacctaaattgcagtatcagaatgaatgttgatgtttgaagccaaaaagccaaatgcttaaactgatcaatgactgtagctttttagactgttggtcaaagaacattctacttcacagtaatagctctatcagccacagatctcatggtggctgttgcatgataatgataggataaacaaaataccactgtcttcaagaaacattatcttaggtttgtttgtttggtttgagtttgatttggcttttatattttttaaaatcccttttgctaccccatctggttttataaactgagtttcttagcattcgttaaaattaaggggtttgtttggaataatatatattttttatgcttttgtctttcttacctgattgatattacattcacctttgattgttttttaaaagtttatttttacagaatatatttagtacctttcttaaggagtaactgaattgaatcaaccagtttgcatttaaataaaagaacaggctcagtggtcttcctgtagaatggtttacatgcctgcatgtgcagtagttgtgtctggaatcctagaattggcactttctgcctccttgctctaaatgtcacaaaaaattatacttccttaaagtaaatgtaatgatttcttcttttcctattgaccagtacagatagatatgttgtgtttgcttcatttttaatgatgacttcaagattgatgatgtgatccaataactgtggaggtagctttaacttggttctgtgtaaatagtatgtattttattataatatttctcattttaagatgcttggtttacattaaattatggtatttaactatttttatgtttatactaggtagggtctttcttatgtttctgtgtttttggtatgctaaataaagctatttttaaaccc

SEQ ID NO: 1398 - DNA, 3523 bp, Homo sapiens
  source 1..3523: mol_type = genomic DNA
ctcctcctcctcccctccgtcggtcagtcagtccgcgaggagagtccgcggtggcggcgacggtggcgagagccgcgggggccgtaggaagccaaccttccctgcttctccggggccctcgccccctcctccccacaaaatcagggatggaggcgcctccccggcaccctcttagcagccctccccaggaaaagtgtcccccctgagctcctaacgctccccaacagctacccctgccccccacgccatggggcccggggccccttttgcccgggtggggtggccactgccgcttctggttgtgatggcggcaggggtggctccggtgtgggcctcccactccccccatctcccgcggcctcactcgcgggtccccccgcacccctcctcagaacggcgcgcagtgtacatcggggcactgtttcccatgagcgggggctggccagggggccaggcctgccagcccgcggtggagatggcgctggaggacgtgaatagccgcagggacatcctgccggactatgagctcaagctcatccaccacgacagcaagtgtgatccaggccaagccaccaagtacctatatgagctgctctacaacgaccctatcaagatcatccttatgcctggctgcagctctgtctccacgctggtggctgaggctgctaggatgtggaacctcattgtgctttcctatggctccagctcaccagccctgtcaaaccggcagcgtttccccactttcttccgaacgcacccatcagccacactccacaaccctacccgcgtgaaactctttgaaaagtggggctggaagaagattgctaccatccagcagaccactgaggtcttcacttcgactctggacgacctggaggaacgagtgaaggaggctggaattgagattactttccgccagagtttcttctcagatccagctgtgcccgtcaaaaacctgaagcgccaggatgcccgaatcatcgtgggacttttctatgagactgaagcccggaaagttttttgtgaggtgtacaaggagcgtctctttgggaagaagtacgtctggttcctcattgggtggtatgctgacaattggttcaagatctacgacccttctatcaactgcacagtggatgagatgactgaggcggtggagggccacatcacaactgagattgtcatgctgaatcctgccaatacccgcagcatttccaacatgacatcccaggaatttgtggagaaactaaccaagcgactgaaaagacaccctgaggagacaggaggcttccaggaggcaccgctggcctatgatgccatctgggccttggcactggccctgaacaagacatctggaggaggcggccgttctggtgtgcgcctggaggacttcaactacaacaaccagaccattaccgaccaaatctaccgggcaatgaactcttcgtcctttgagggtgtctctggccatgtggtgtttgatgccagcggctctcggatggcatggacgcttatcgagcagcttcagggtggcagctacaagaagattggctactatgacagcaccaaggatgatctttcctggtccaaaacagataaatggattggagggtcccccccagctgaccagaccctggtcatcaagacattccgcttcctgtcacagaaactctttatctccgtctcagttctctccagcctgggcattgtcctagctgttgtctgtctgtcctttaacatctacaactcacatgtccgttatatccagaactcacagcccaacctgaacaacctgactgctgtgggctgctcactggctttagctgctgtcttccccctggggctcgatggttaccacattgggaggaaccagttccctttcgtctgccaggcccgcctctggctcctgggcctgggctttagtctgggctacggttccatgttcaccaagatttggtgggtccacacggtcttcacaaagaaggaagaaaagaaggagtggaggaagactctggaaccctggaagctgtatgccacagtgggcctgctggtgggcatggatgtcctcactctcgccatctggcagatcgtggaccctctgcaccggaccattgagacatttgccaaggaggaacctaaggaagatattgacgtctctattctgccccagctggagcattgcagctccaggaagatgaatacatggcttggcattttctatggttacaaggggctgctgctgctgctgggaatcttccttgcttatgagaccaagagtgtgtccactgagaagatcaatgatcaccgggctgtgggcatggctatctacaatgtggcagtcctgtgcctcatcactgctcctgtcaccatgattctgtccagccagcaggatgcagcctttgcctttgcctctcttgccatagttttctcctcctatatcactcttgttgtgctctttgtgcccaagatgcgcaggctgatcacccgaggggaatggcagtcggaggcgcaggacaccatgaagacagggtcatcgaccaacaacaacgaggaggagaagtcccggctgttggagaaggagaaccgtgaactggaaaagatcattgctgagaaagaggagcgtgtctctgaactgcgccatcaactccagtctcggcagcagctccgctcccggcgccacccaccgacacccccagaaccctctgggggcctgcccaggggaccccctgagccccccgaccggcttagctgtgatgggagtcgagtgcatttgctttataagtgagggtgcatgtccgttccgaggaatgggatttaatgacctttgatgccaacccatatgacagcgtgaaaaaaatcaaagaacatgtccggtctaagaccaaggttcctgtgcaggaccaggttcttttgctgggctccaagatcttaaagccacggagaagcctctcatcttatggcactgacaaagagaagaccatccaccttaccctgaaagtggtgaagcccagtgatgaggagctgcccttgtttcttgtggagtcaggtgatgaggcaaagaggcacctcctccaggtgcgaaggtccagctcagtggcacaagtgaaagcaatgatcgagactaagacgggtataatccctgagacccagattgtgacttgcaatggaaagagactggaagatgggaagatgatggcagattacggcatcagaaagggcaacttactcttcctggcatcttattgtattggagggtgaccaccctggggatggggtgttggcaggggtcaaaaagcttatttcttttaatctcttactcaacgaacacatcttctgatgatttcccaaaattaatgagaatgagatgagtagagtaagatttgggtgggatgggtaggatgaagtatattgcccaactctatgtttctttgattctaacacaattaattaagtgacatgatttttactaatgtattactgagactagtaaataaatttttaaggcaaaatagagcattcaaagcca

SEQ ID NO: 1399 - DNA, 2127 bp, Homo sapiens
  source 1..2127: mol_type = genomic DNA
ggaagaacacaatggatctggtgctaaaaagatgccttcttcatttggctgtgataggtgctttgctggctgtgggggctacaaaagtacccagaaaccaggactggcttggtgtctcaaggcaactcagaaccaaagcctggaacaggcagctgtatccagagtggacagaagcccagagacttgactgctggagaggtggtcaagtgtccctcaaggtcagtaatgatgggcctacactgattggtgcaaatgcctccttctctattgccttgaacttccctggaagccaaaaggtattgccagatgggcaggttatctgggtcaacaataccatcatcaatgggagccaggtgtggggaggacagccagtgtatccccaggaaactgacgatgcctgcatcttccctgatggtggaccttgcccatctggctcttggtctcagaagagaagctttgtttatgtctggaagacctggggccaatactggcaagttctagggggcccagtgtctgggctgagcattgggacaggcagggcaatgctgggcacacacaccatggaagtgactgtctaccatcgccggggatcccggagctatgtgcctcttgctcattccagctcagccttcaccattactgaccaggtgcctttctccgtgagcgtgtcccagttgcgggccttggatggagggaacaagcacttcctgagaaatcagcctctgacctttgccctccagctccatgaccccagtggctatctggctgaagctgacctctcctacacctgggactttggagacagtagtggaaccctgatctctcgggcacttgtggtcactcatacttacctggagcctggcccagtcactgcccaggtggtcctgcaggctgccattcctctcacctcctgtggctcctccccagttccaggcaccacagatgggcacaggccaactgcagaggcccctaacaccacagctggccaagtgcctactacagaagttgtgggtactacacctggtcaggcgccaactgcagagccctctggaaccacatctgtgcaggtgccaaccactgaagtcataagcactgcacctgtgcagatgccaactgcagagagcacaggtatgacacctgagaaggtgccagtttcagaggtcatgggtaccacactggcagagatgtcaactccagaggctacaggtatgacacctgcagaggtatcaattgtggtgctttctggaaccacagctgcacaggtaacaactacagagtgggtggagaccacagctagagagctacctatccctgagcctgaaggtccagatgccagctcaatcatgtctacggaaagtattacaggttccctgggccccctgctggatggtacagccaccttaaggctggtgaagagacaagtccccctggattgtgttctgtatcgatatggttccttttccgtcaccctggacattgtccagggtattgaaagtgccgagatcctgcaggctgtgccgtccggtgagggggatgcatttgagctgactgtgtcctgccaaggcgggctgcccaaggaagcctgcatggagatctcatcgccagggtgccagccccctgcccagcggctgtgccagcctgtgctacccagcccagcctgccagctggttctgcaccagatactgaagggtggctcggggacatactgcctcaatgtgtctctggctgataccaacagcctggcagtggtcagcacccagcttatcatgcctgtgcctgggattcttctcacaggtcaagaagcaggccttgggcaggttccgctgatcgtgggcatcttgctggtgttgatggctgtggtccttgcatctctgatatataggcgcagacttatgaagcaagacttctccgtaccccagttgccacatagcagcagtcactggctgcgtctaccccgcatcttctgctcttgtcccattggtgagaacagccccctcctcagtgggcagcaggtctgagtactctcatatgatgctgtgattttcctggagttgacagaaacacctatatttcccccagtcttccctgggagactactattaactgaaataaatactcagagcctga

SEQ ID NO: 1400 - DNA, 681 bp, Homo sapiens
  source 1..681: mol_type = genomic DNA
tttacggactgcagcttaaaggaaccggcctctgccattgagaccaaactgacagaggaactggtcactcttctgttctttccagagaggagcttagccagggacttctgcccttcctgggcccgggcctcgggggcgattccggcaggtggtccattatggctgacatgcaaaatctggtagaaagattggagagggcagtgggccgcctggaggcagtatctcatacctctgacatgcaccgtgggtatgcagacagtccttcaaaagcaggagcagctccatatgtgcaggcatttgactcgctgcttgctggtcctgtggcagagtacttgaagatcagtaaagagattgggggagacgtgcagaaacatgcggagatggtccacacaggtttgaagttggagcgagctctgttggttacagcttctcagtgtcaacagccagcagaaaataagctttccgatttgttggcacccatctcagagcagatcaaagaagtgataacctttcgggagaagaaccgaggcagcaagttgtttaatcacctgtcagctgtcagcgaaagtatccaggccctgggctgggtggctatggctcccaagcctggcccttatgtgaaagaaatgaatgatgccgccatgttttatacaaaccgagtcctcaaagagtacaaagatg

SEQ ID NO: 1401 - DNA, 1875 bp, Homo sapiens
  source 1..1875: mol_type = genomic DNA
tcaccagcctccctcttttgtccaccagcccagcctgactcctggagattgtgaatagctccatccagcctgagaaacaagccgggtggctgagccaggctgtgcacggagcgcctgacgggcccaacagacccatgctgcatccagagacctcccctggccgggggcatctcctggctgtgctcctggccctccttggcaccgcctgggcagaggtgtggccaccccagctgcaggagcaggctccgatggccggagccctgaacaggaaggagagtttcttgctcctctccctgcacaaccgcctgcgcagctgggtccagccccctgcggctgacatgcggaggctggactggagtgacagcctggcccagctggctcaagccagggcagccctctgtggaaccccaaccccgagcctggcgtccggcctgtggcgcaccctgcaagtgggctggaacatgcagctgctacccgcgggcttggtgtcctttgtcgaagtggtcagcctatggtttgcagaggggcagcggtacagccacgcggcaggagagtgtgctcgcaacgccacctgcacccactacacgcagctcgtgtgggccacctcaagccagctgggctgtgggcggcacctgtgctctgcaggccaggcagcgatagaagcctttgtctgtgcctactcccccagaggcaactgggaggtcaacgggaagacaatcgtcccctataagaagggtgcctggtgttcgctctgcacagccagtgtctcaggctgcttcaaagcctgggaccatgcaggggggctctgtgaggtccccaggaatccttgtcgcatgagctgccagaaccatggacgtctcaacatcagcacctgccactgccactgtccccctggctacacgggcagatactgccaagtgaggtgcagcctgcagtgtgtgcacggccggttccgggaggaggagtgctcgtgcgtctgtgacatcggctacgggggagcccagtgtgccaccaaggtgcattttcccttccacacctgtgacctgaggatcgacggagactgcttcatggtgtcttcagaggcagacacctattacagagccaggatgaaatgtcagaggaaaggcggggtgctggcccagatcaagagccagaaagtgcaggacatcctcgccttctatctgggccgcctggagaccaccaacgaggtgattgacagtgacttcgagaccaggaacttctggatcgggctcacctacaagaccgccaaggactccttccgctgggccacaggggagcaccaggccttcaccagttttgcctttgggcagcctgacaaccacgggctggtgtggctgagtgctgccatggggtttggcaactgcgtggagctgcaggcttcagctgccttcaactggaacgaccagcgctgcaaaacccgaaaccgttacatctgccagtttgcccaggagcacatctcccggtggggcccagggtcctgaggcctgaccacatggctccctcgcctgccctgggagcaccggctctgcttacctgtctgcccacctgtctggaacaagggccaggttaagatcacatgcctcatgtccaaagaggtctcagaccttgcacaatgccagaagttgggcagagagaggcagggaggccagtgagggccagggagtgagtgttagaagaagctggggcccttcgcctgcttttgattgggaagatgggcttcaattagatggcgaaggagaggacaccgccagtggtccaaaaaggctgctctcttccacctggcccagaccctgtggggcagcggagcttccctgtggcatgaaccccacagggtattaaattatgaatcagctg

SEQ ID NO: 1402 - DNA, 369 bp, Homo sapiens
  source 1..369: mol_type = genomic DNA
agcatagggacgacaggagccaggacccgtgtaggagatggttctcgccatgctgggggctctgcacccccgggctgggctcagcctcttcctccacctcatcctggcagtggcactgcttcgctcccagcctctgaggtctcagcggtctgttcctgaggcattttccgcccccctggaactctcgcagccactttccggcctggtggatgactatggcatcctccccaagcacccaaggccgcgagggcctcgacccctcctgtctagggcccagcagcgcaagcgggacgggcccgaccttgccgagtattactatgatgcacacctatgacccaaggccctcataaagataccatgtgtgacaaa

SEQ ID NO: 1403 - DNA, 3968 bp, Homo sapiens
  source 1..3968: mol_type = genomic DNA
gaggaactgagaggagaaggagaagagagtgggcccgccttcagggtctggggccttccaggttgggtcgtaggggcgggagcgcacaggctgcgagagaggagcaaaggttggtggagggagaagagcagtctggggcctggctggacaggcccccgacagctgctctcgggagccgcctcccgacacccgagccccgccggcgcctcccgctcccggctcccggctcctggctccctccgcctcccccgcccctcgccccgccgccgaagaggccccgctcccgggtcggacgcctgggtctgccgggaagagcgatgagagagatgctgcccccacccccttaggcccgagggatcaggagctatgggaccagaggccctgtcatctttactgctgctgctcttggtggcaagtggagatgctgacatgaagggacattttgatcctgccaagtgccgctatgccctgggcatgcaggaccggaccatcccagacagtgacatctctgcttccagctcctggtcagattccactgccgcccgccacagcaggttggagagcagtgacggggatggggcctggtgccccgcagggtcggtgtttcccaaggaggaggagtacttgcaggtggatctacaacgactccacctggtggctctggtgggcacccagggacggcatgccgggggcctgggcaaggagttctcccggagctaccggctgcgttactcccgggatggtcgccgctggatgggctggaaggaccgctggggtcaggaggtgatctcaggcaatgaggaccctgagggagtggtgctgaaggaccttgggccccccatggttgcccgactggttcgcttctacccccgggctgaccgggtcatgagtgtctgtctgcgggtagagctctatggctgcctctggagggatggactcctgtcttacaccgcccctgtggggcagacaatgtatttatctgaggccgtgtacctcaacgactccacctatgacggacataccgtgggcggactgcagtatgggggtctgggccagctggcagatggtgtggtggggctggatgactttaggaagagtcaggagctgcgggtctggccaggctatgactatgtgggatggagcaaccacagcttctccagtggctatgtggagatggagtttgagtttgaccggctgagggccttccaggctatgcaggtccactgtaacaacatgcacacgctgggagcccgtctgcctggcggggtggaatgtcgcttccggcgtggccctgccatggcctgggagggggagcccatgcgccacaacctagggggcaacctgggggaccccagagcccgggctgtctcagtgccccttggcggccgtgtggctcgctttctgcagtgccgcttcctctttgcggggccctggttactcttcagcgaaatctccttcatctctgatgtggtgaacaattcctctccggcactgggaggcaccttcccgccagccccctggtggccgcctggcccacctcccaccaacttcagcagcttggagctggagcccagaggccagcagcccgtggccaaggccgaggggagcccgaccgccatcctcatcggctgcctggtggccatcatcctgctcctgctgctcatcattgccctcatgctctggcggctgcactggcgcaggctcctcagcaaggctgaacggagggtgttggaagaggagctgacggttcacctctctgtccctggggacactatcctcatcaacaaccgcccaggtcctagagagccacccccgtaccaggagccccggcctcgtgggaatccgccccactccgctccctgtgtccccaatggctctgcgttgctgctctccaatccagcctaccgcctccttctggccacttacgcccgtccccctcgaggcccgggcccccccacacccgcctgggccaaacccaccaacacccaggcctacagtggggactatatggagcctgagaagccaggcgccccgcttctgcccccacctccccagaacagcgtcccccattatgccgaggctgacattgttaccctgcagggcgtcaccgggggcaacacctatgctgtgcctgcactgcccccaggggcagtcggggatgggccccccagagtggatttccctcgatctcgactccgcttcaaggagaagcttggcgagggccagtttggggaggtgcacctgtgtgaggtcgacagccctcaagatctggtcagtcttgatttcccccttaatgtgcgtaagggacaccctttgctggtagctgtcaagatcttacggccagatgccaccaagaatgccaggaatgatttcctgaaagaggtgaagatcatgtcgaggctcaaggaccccaacatcattcggctgctgggcgtgtgtgtgcaggacgaccccctctgcatgattactgactacatggagaacggcgacctcaaccagttcctcagtgcccaccagctggaggacaaggcagccgagggggcccctggggacgggcaggctgcgcaggggcccaccatcagctacccaatgctgctgcatgtggcagcccagatcgcctccggcatgcgctatctggccacactcaactttgtacatcgggacctggccacgcggaactgcctagttggggaaaatttcaccatcaaaatcgcagactttggcatgagccggaacctctatgctggggactattaccgtgtgcagggccgggcagtgctgcccatccgctggatggcctgggagtgcatcctcatggggaagttcacgactgcgagtgacgtgtgggcctttggtgtgaccctgtgggaggtgctgatgctctgtagggcccagccctttgggcagctcaccgacgagcaggtcatcgagaacgcgggggagttcttccgggaccagggccggcaggtgtacctgtcccggccgcctgcctgcccgcagggcctatatgagctgatgcttcggtgctggagccgggagtctgagcagcgaccacccttttcccagctgcatcggttcctggcagaggatgcactcaacacggtgtgaatcacacatccagctgcccctccctcagggagtgatccaggggaagccagtgacactaaaacaagaggacacaatggcacctctgcccttcccctcccgacagcccatcacctctaatagaggcagtgagactgcaggtgggctgggcccacccagggagctgatgccccttctccccttcctggacacactctcatgtccccttcctgttcttccttcctagaagcccctgtcgcccacccagctggtcctgtggatgggatcctctccaccctcctctagccatcccttggggaagggtggggagaaatataggatagacactggacatggcccattggagcacctgggccccactggacaacactgattcctggagaggtggctgcgcccccagcttctctctccctgtcacacactggaccccactggctgagaatctgggggtgaggaggacaagaaggagaggaaaatgtttccttgtgcctgctcctgtacttgtcctcagcttgggcttcttcctcctccatcacctgaaacactggacctgggggtagccccgccccagccctcagtcacccccacttcccacctgcagtcttgtagctagaacttctctaagcctatacgtttctgtggagtaaatattgggattggggggaaagagggagcaacggcccatagccttggggttggacatctctagtgtagctgccacattgatttttctataatcacttggggtttgtacatttttggggggagagacacagatttttacactaatatatggacctagcttgaggcaattttaatcccctgcactaggcaggtaataataaaggttgagttttccacaa

SEQ ID NO: 1404 - DNA, 950 bp, Homo sapiens
  source 1..950: mol_type = genomic DNA
atgcagaccttcccagttgctggggcgctggaccctgctatactggacacaaggtaggagcactcagaagggacaccgtcatctgctgctgtcgccatggcgattattcaacgccctgcctcttcaccccaggaaaaccttcgcggaacccgtcaccatggaaacgaactctctggactcttagcgcgccctgggctggccctgctgggtggacaggagaggagcaaaacgcaacaaagacgggattaattactcggaggccgcgccccctccgaagaaggccccaccctgccccggcctcacccctccccgaaataattcgaggaaatattccgcgaatgctgggtaagtttgttcctgtcaattgggaaccccctcaaccacttccattccccaaatacctgcgctgctaccgatgcctcttggagaccaaggagttagggtgccttctgggatctgacatctgcctcaccccagctggcagcagctgcatcactctccacaaaaagaacagcagcggttctgacgtcatggtgagtgactgccgaagtaaggagcagatgagtgattgttcaaatacccgaacttctccggtgtctggcttctggatattctctcaatactgcttcctggatttctgcaatgaccctcaaaacagagggctctatactccttagtgtgactgcagcaaactttggtgtaaaattccaccagtttccagccaccttcctgacttctatctgggcttggccaggacttctagtccctcacaccagccctccttgcctccctccagccactggaccccagccttggctcttcctcttggttgacgcccttcagcacacttactgctactctgtacccccagccctactgcccaccaggtttcctctcttgtcccctagtccctggatgtttctcccaaataaatttgtgtgtaaactgtt

SEQ ID NO: 1405 - DNA, 630 bp, Homo sapiens
  source 1..630: mol_type = genomic DNA
gcagaccaggacccacagagacccttgactgggccacaggcatgaactaagagtgctgaagacctaggagaaccactggtcagctgggctgacgctaacaggaggcagtgtgtggctcgaagattcttgaacccacagcagcagctgcggccaccccatcctgcccacagctccagccctgagacgacgaggaggagagtcgactttgcctcttgcccaagggaccatgcccaggtgccggtggctctccctgatcctcctcaccattcccctggccctggtggccaggaaagacccaaaaaagaatgagacaggggtgctgaggaaattaaaacccgtcaatgcctcaaatgccaacgtgaagcagtgtctgtggtttgccatgcaagaatacaacaaagagagcgaggacaagtatgtcttcctggtggtcaagacactgcaagcccagcttcaggtcacaaatcttctggaataccttattgatgtagaaattgcccgcagcgattgcagaaagcctttaagcactaatgaaatctgcgccattcaagaaaactccaagctgaaaaggaaattaagctgcagctttttggtaggagcacttccctggaatggtgaattcactgtgat

SEQ ID NO: 1406 - DNA, 3537 bp, Homo sapiens
  source 1..3537: mol_type = genomic DNA
ctggtgtgtgtccctctcttcctgggcttccggcctctgaactagaatgtttcaaggcctaggagtgacaggacgtggtcagcaatagtggcccaggtcctgcccttgggtgacccaggccaaggtctcctagttagaacaggacagagtcacgaggctgccactgttgggaagggccctgcctgtgctgactctgcaaatgaggagtcgcccagagccgccgcgaccccacccaggagcactggccagcctggggaagacacaaacccagccccaaaggccccacagccaccaggcacctccaacaaccaggtccctctggaccccgaggttggaccctactgtgacacacctaccatgcggacactcttcaacctcctctggcttgccctggcctgcagccctgttcacactaccctgtcaaagtcagatgccaaaaaagccgcctcaaagacgctgctggagaagagtcagttttcagataagccggtgcaagaccggggtttggtcgtgacggacctcaaagctgagagtgtggttcttgagcatcgcagctactgctcggcaaaggcccgggacagacactttgctggggatgtactgggctatgtcactccatggaacagccatggctacgatgtcaccaaggtctttgggagcaagttcacacagatctcacccgtctggctgcagctgaagagacgtggccgtgagatgtttgaggtcacgggcctccacgacgtggaccaagggtggatgcgagctgtcaggaagcatgccaagggcctgcacatagtgcctcggctcctgtttgaggactggacttacgatgatttccggaacgtcttagacagtgaggatgagatagaggagctgagcaagaccgtggtccaggtggcaaagaaccagcatttcgatggcttcgtggtggaggtctggaaccagctgctaagccagaagcgcgtgggcctcatccacatgctcacccacttggccgaggctctgcaccaggcccggctgctggccctcctggtcatcccgcctgccatcacccccgggaccgaccagctgggcatgttcacgcacaaggagtttgagcagctggcccccgtgctggatggtttcagcctcatgacctacgactactctacagcgcatcagcctggccctaatgcacccctgtcctgggttcgagcctgcgtccaggtcctggacccgaagtccaagtggcgaagcaaaatcctcctggggctcaacttctatggtatggactacgcgacctccaaggatgcccgtgagcctgttgtcggggccaggtacatccagacactgaaggaccacaggccccggatggtgtgggacagccaggcctcagagcacttcttcgagtacaagaagagccgcagtgggaggcacgtcgtcttctacccaaccctgaagtccctgcaggtgcggctggagctggcccgggagctgggcgttggggtctctatctgggagctgggccagggcctggactacttctacgacctgctctaggtgggcattgcggcctccgcggtggacgtgttcttttctaagccatggagtgagtgagcaggtgtgaaatacaggcctccactccgtttgctgtgacgggtctgctgcagtcctcagtcgggggtcctgggcaccatgtgactccccatcctcccatgaggggtccctgccctggatgagtcctagctgggggacaccctgagagctcgagcccctcccacccgggcatccgctggctgcctcctgtcagctgggcaggcggggcccacagtacctgccccaccaggacagcctggctcaggcctttctgggctgcttctcacatcctgggctggatgtgggtttggaagctctggaaccatcccggactcgcccactcctggattcgagggccctcgcagggacagctctgcccagcatcaccccagggcctggcagtgatagagctgagagctccacccccacatacctgccacccacctggccagccacagcacgtgtgtcacctgcagagagccacccagacgtccccaccgagtccagcacggcaagggtgcaggggctgccctagaaatgggctcagaggagcctggcccaccctcttgaaactggtcctggaccttggctcagctctgccgcctcaggtagcacgacccccaggccagcctggacacatcagggagcatggtgaggggcaacggcaggacccgtgggccatatcgggacaggcatttccagcgaggggtggggcagaggacatgtggctggcaggctacacccaccctgccatgcagcggtgtccaggctctggggaggccctggggaatttggaggcatcatgagccaaggcctggtggccctcgttcccctgcccctcgtcaccatcctgtccttggctggccgtgaggactcccctcctcaccactgggtcccacagggctgaggtgggcagtagagggcataggtgggtacatgtcccgggcaaggtctctcggggggacagaagtgagtccagggagtgggtgggcctgggcgtccctcactcagaatgccgtggggtgaggacggtgaggacagggtgggcactgggttctggtttagagtcagtaatgttagggcgcagtgggcagggggtcaggacatctccagccggtggtgaggaagcatggtggggtctcctccacaggacgggagctggggagggggtcctgggtcggacccaaggcacccacacttgagaaagcctccgcctggacgtcagggaggcctgcgagctgccacagtgcaggtgcagccgttcccaccgccctgctgctgcttgacacgggcataggagatacaagtggtgtgtgcggcggttcatgcctgtaatcccagtactttggaaagccgtggcgggaggaacgctgggcaacatggtgaaaccccgtctctaccccctaaaaatagaaaaattagcaagacatggtggcatgtgcctgtactcctggctactcaggaggctgagatgggaggatcgcttgatgaggttgaggctgcagtgagctgtgaccgactgcactccaaaaaccttgtctaaaaaaacacaagctgccactggctttggggcactgaccttgtctccccagaggtgctgacgctaacattcaagttgttctcgggggtcctgtggcttctgttggagtgagggtgggggacacgcaggtctgggagggtggtgtgggcctggagctaggcattgccagatcagcattgggtggaggcaggggtggggatgccacacaggatgggatgtctagagcgggctgtgtctcccggggggatgggcagagggtggggcaggaattagctggaaatgagattgtggggtgcagtttggggatcagatgccccaacctgaactgaccgtcatccctgtggccagggtccccacacaaccctcacccctggctgtgagaatcctgaggcaccttgatgcattttttttcatgccctgtg

SEQ ID NO: 1407 - DNA, 950 bp, Homo sapiens; identical to SEQ ID NO: 1126
  source 1..950: mol_type = genomic DNA

SEQ ID NO: 1408 - DNA, 2072 bp, Homo sapiens
  source 1..2072: mol_type = genomic DNA
agccacagagggccaataaatggccccttctgaatgaggtgcccctgcacctctgcagagcctgctgccagcctccaggatctaactgggctctgattcaccgctcccaaccccacatccagctctatccatagatgaaacacgggcgcatctgttgttgaaagaaaagatgatgcggctgggggggcggctggtgctgaacaccaaggaggagctggccaatgagaggctcatgacgctcaaaatcgctgagatgaaggaggccatgaggaccctgatattcccacccagcatgcactttttccaggccaagcatctcattgagagaagtcaagtgtttaatattctaaggatgatgccaaaaggggctgccttgcacctccatgacattggcatcgtgactatggactggctggtgaggaatgtcacctacaggcctcactgccacatctgtttcaccccaagggggatcatgcagttcagatttgctcacccaactccccgtccatcagaaaaatgttccaagtggattctgctggaggattatcggaagcgggtgcagaacgtcactgagtttgatgacagcttgctgaggaatttcactctggtgacccagcacccggaggtgatttacacaaaccaaaatgttgtctggtcgaaatttgaaaccatcttcttcaccatctctggtctcatccattacgcaccagtgttcagagactatgtcttccggagcatgcaggagttctacgaggacaacgtgctctacatggagatcagagccaggctgctgccggtgtatgagctcagtggagagcaccatgacgaagagtggtcagtgaagacttaccaggaagtagctcagaagtttgtggaaactcaccctgagtttattggaatcaaaatcatttattcggatcacagatccaaagatgtggctgtcatcgcagaatccatccgaatggccatggggctccgaatcaagttccccacggtggtggcagggtttgacctggtggggcatgaggacactggccactccttgcatgactacaaggaagctctgatgatccccgccaaggatggcgttaagctgccttacttcttccacgccggagaaacagactggcagggtacttccatagacaggaacattctggatgctctgatgctgaacactaccagaatcggccatggatttgctttgagcaaacaccccgcagtcaggacttactcctggaaaaaggacatccccatagaagtctgtcccatctctaaccaggtgctgaaactggtgtctgacttgaggaaccaccctgtagccactctgatggccactgggcaccccatggtgatcagctctgatgacccagctatgtttggtgccaaaggcttgtcctatgatttctatgaggtcttcatgggcattggggggatgaaggctgacctgaggaccctcaaacagctggccatgaactctatcaagtacagtaccctgttggagagtgagaaaaatactttcatggaaatctggaagaagagatgggataagttcatagcagatgtggctacaaagtgaggagaagctagccagccctctacaagctgtcttcttgcacacgctgtcacttcctctcactcgttcttgaatcagctccatgtgcccatgaaatcaatggcctctgtatggagcgaccctgtgagaagcacttggctggctgagcaaattcatcctctggaaatattctctctcagccacagtgacattgaccctcttggttttctcctgtctctggccatttcttccagtttccctatttcagagtcttctcctctctctgatctctgtgctgtttcctcaggactcagtcctgggctctcttctattctggtctctttatttttttatttttgtattttttcgagatggagttttgctcttgttgcccaggctggagtacaatggtgcgatctcagctcagtgcaacctccgccacccgggttcaggcaattctcttgcatcagcctcgcgagtagttggaattataggcatgtgccaccacacccagctg

SEQ ID NO: 1409 - DNA, 1996 bp, Homo sapiens; identical to SEQ ID NO: 1377
  source 1..1996: mol_type = genomic DNA

SEQ ID NO: 1410 - DNA, 950 bp, Homo sapiens; identical to SEQ ID NO: 1404
  source 1..950: mol_type = genomic DNA

SEQ ID NO: 1411 - DNA, 1335 bp, Homo sapiens
  source 1..1335: mol_type = genomic DNA
gtcaccggcccggttccctctccggggagcggcggcggacgcgcggctcccacccctcccctctcacgggctctcccctccccagtgtggccgcgaccctaccctctgcaaggcgatggcccgcgccccgagcgcaggctagcgtgcctgggtgcccggccatgggctgtatcggctctcggagcccggcgggtcaggcatttctggggaccaacagctggccgaggctcagggatagagacggctgctccagctaaagtgtcctcggaccccgcttgggctgtggagtggatcgaacttcctcggggtctctctctatcctctttgggatctgctcgaaccctccgaggctggagcaggtcctcccgcccttcctcggtggacagtcaggacttgccagaggtgaatgttggagacacagtcgcgatgctgcccaagtcccggcgagccctaactatccaggagatcgctgcgctggccaggtcctccctgcatggtatttcccaggtggtgaaggaccacgtgaccaagcctaccgccatggcccagggccgagtggctcacctcattgagtggaagggctggagcaagccgagtgactcacctgctgccctggaatcagccttttcctcctattcagacctcagcgagggcgaacaagaggctcgctttgcagcaggagtggctgagcagtttgccatcgcggaagccaagctccgagcatggtcttcggtggatggcgaggactccactgatgactcctatgatgaggactttgctgggggaatggacacagacatggctgggcagctgcccctggggccgcacctccaggacctgttcaccggccaccggttctcccggcctgtgcgccagggctccgtggagcctgagagcgactgctcacagaccgtgtccccagacaccctgtgctctagtctgtgcagcctggaggatgggttgttgggctccccggcccggctggcctcccagctgctgggcgatgagctgcttctcgccaaactgccccccagccgggaaagtgccttccgcagcctgggcccactggaggcccaggactcactctacaactcgcccctcacagagtcctgcctttcccccgcggaggaggagccagccccctgcaaggactgccagccactctgcccaccactaacgggcagctgggaacggcagcggcaagcctctgacctggcctcttctggggtggtgtccttagatgaggatgaggcagagccagaggaacagtgacccacatcatgcctggcagtggcatgcatcccccggctgctgccaggggcagagcctctgtgc

SEQ ID NO: 1412 - DNA, 1111 bp, Homo sapiens
  source 1..1111: mol_type = genomic DNA
atgaagttccaggggcccctggcctgcctcctgctggccctctgcctgggcagtggggaggctggccccctgcagagcggagaggaaagcactgggacaaatattggggaggcccttggacatggcctgggagacgccctgagcgaaggggtgggaaaggccattggcaaagaggccggaggggcagctggctctaaagtcagtgaggcccttggccaagggaccagagaagcagttggcactggagtcaggcaggttccaggctttggcgtagcagatgctttgggcaacagggtcggggaagcagcccatgctctgggaaacactgggcacgagattggcagacaggcagaagatgtcattcgacacggagcagatgctgtccgcggctcctggcagggggtgcctggccacaatggtgcttgggaaacttctggaggccatggcatctttggctctcaaggtggccttggaggccagggccagggcaatcctggaggtctggggactccgtgggtccacggataccccggaaactcagcaggcagctttggaatgaatcctcagggagctccctggggtcaaggaggcaatggagggccaccaaactttgggaccaacactcagggagctgtggcccagcctggctatggttcagtgagagccagcaaccagaatgaagggtgcacgaatcccccaccatctggctcaggtggaggctccagcaactctgggggaggcagcggctcacagtcgggcagcagtggcagtggcagcaatggtgacaacaacaatggcagcagcagtggtggcagcagcagtggcagcagcagtggcggcagcagtggcggcagcagtggtggcagcagtggcaacagtggtggcagcagaggtgacagcggcagtgagtcctcctggggatccagcaccggctcctcctccggcaaccacggtgggagcggcggaggaaatggacataaacccgggaactctgagacgtctcctgggatgtttaactttgacactttctggaagaattttaaatccaagctgggtttcatcaactgggatgccataaacaaggaccagagaagctctcgcatcccgtgac

SEQ ID NO: 1413 - DNA, 873 bp, Homo sapiens; identical to SEQ ID NO: 1159
  source 1..873: mol_type = genomic DNA

SEQ ID NO: 1414 - DNA, 1347 bp, Homo sapiens
  source 1..1347: mol_type = genomic DNA
tctgaggccgtgtacctcaacgactccacctatgacggacataccgtgggcggactgcagtatgggggtctgggccagctggcagatggtgtggtggggctggatgactttaggaagagtcaggagctgcgggtctggccaggctatgactatgtgggatggagcaaccacagcttctccagtggctatgtggagatggagtttgagtttgaccggctgagggccttccaggctatgcaggtccactgtaacaacatgcacacgctgggagcccgtctgcctggcggggtggaatgtcgcttccggcgtggccctgccatggcctgggagggggagcccatgcgccacaacctagggggcaacctgggggaccccagagcccgggctgtctcagtgccccttggcggccgtgtggctcgctttctgcagtgccgcttcctctttgcggggccctggttactcttcagcgaaatctccttcatctctgatgtggtgaacaattcctctccggcactgggaggcaccttcccgccagccccctggtggccgcctggcccacctcccaccaacttcagcagcttggagctggagcccagaggccagcagcccgtggccaaggccgaggggagcccgaccgccatcctcatcggctgcctggtggccatcatcctgctcctgctgctcatcattgccctcatgctctggcggctgcactggcgcaggctcctcagcaaggtcctagagagccacccccgtaccaggagccccggcctcgtgggaatccgccccactccgctccctgtgtccccaatggctctggtgcacctgtgtgaggtcgacagccctcaagatctggttagtcttgatttcccccttaatgtgcgtaagggacaccctttgctggtagctgtcaagatcttacggccagatgccaccaagaatgccaggaatgatttcctgaaagaggtgaagatcatgtcgaggctcaaggacccaaacatcattcggctgctgggcgtgtgtgtgcaggacgaccccctctgcatgattactgactacatggagaacggcgacctcaaccagttcctcagtgcccaccagctggaggacaaggcagccgagggggcccctggggacgggcaggctgcgcaggggcccaccatcagctacccaatgctgctgcatgtggcagcccagatcgcctccggcatgcgctatctggccacactcaactttgtacatttttggggggagagacacagatttttacactaatatatggacctagcttgaggcaattttaatcccctgcactaggcaggtaataataaaggttgagttttccac

SEQ ID NO: 1415 - DNA, 485 bp, Homo sapiens; identical to SEQ ID NO: 1263
  source 1..485: mol_type = genomic DNA

SEQ ID NO: 1416 - DNA, 1996 bp, Homo sapiens
  source 1..1996: mol_type = genomic DNA
cctacagtggggactatatggagcctgagaagccaggcgccccgcttctgcccccacctccccagaacagcgtcccccattatgccgaggctgacattgttaccctgcagggcgtcaccgggggcaacacctatgctgtgcctgcactgcccccaggggcagtcggggatgggccccccagagtggatttccctcgatctcgactccgcttcaaggagaagcttggcgagggccagtttggggaggtgcacctgtgtgaggtcgacagccctcaagatctggtcagtcttgatttcccccttaatgtgcgtaagggacaccctttgctggtagctgtcaagatcttacggccagatgccaccaagaatgccagcttctccttgttctccaggaatgatttcctgaaagaggtgaagatcatgtcgaggctcaaggaccccaacatcattcggctgctgggcgtgtgtgtgcaggacgaccccctctgcatgattactgactacatggagaacggcgacctcaaccagttcctcagtgcccaccagctggaggacaaggcagccgagggggcccctggggacgggcaggctgcgcaggggcccaccatcagctacccaatgctgctgcatgtggcagcccagatcgcctccggcatgcgctatctggccacactcaactttgtacatcgggacctggccacgcggaactgcctagttggggaaaatttcaccatcaaaatcgcagactttggcatgagccggaacctctatgctggggactattaccgtgtgcagggccgggcagtgctgcccatccgctggatggcctgggagtgcatcctcatggggaagttcacgactgcgagtgacgtgtgggcctttggtgtgaccctgtgggaggtgctgatgctctgtagggcccagccctttgggcagctcaccgacgagcaggtcatcgagaacgcgggggagttcttccgggaccagggccggcaggtgtacctgtcccggccgcctgcctgcccgcagggcctatatgagctgatgcttcggtgctggagccgggagtctgagcagcgaccacccttttcccagctgcatcggttcctggcagaggatgcactcaacacggtgtgaatcacacatccagctgcccctccctcagggagtgatccaggggaagccagtgacactaaaacaagaggacacaatggcacctctgcccttcccctcccgacagcccatcacctctaatagaggcagtgagactgcaggtgggctgggcccacccagggagctgatgccccttctccccttcctggacacactctcatgtccccttcctgttcttccttcctagaagcccctgtcgcccacccagctggtcctgtggatgggatcctctccaccctcctctagccatcccttggggaagggtggggagaaatataggatagacactggacatggcccattggagcacctgggccccactggacaacactgattcctggagaggtggctgcgcccccagcttctctctccctgtcacacactggaccccactggctgagaatctgggggtgaggaggacaagaaggagaggaaaatgtttccttgtgcctgctcctgtacttgtcctcagcttgggcttcttcctcctccatcacctgaaacactggacctgggggtagccccgccccagccctcagtcacccccacttcccacctgcagtcttgtagctagaacttctctaagcctatacgtttctgtggagtaaatattgggattggggggaaagagggagcaacggcccatagccttggggttggacatctctagtgtagctgccacattgatttttctataatcacttggggtttgtacatttttggggggagagacacagatttttacactaatatatggacctagcttgaggcaattttaatcccctgcactaggcaggtaataataaaggttgagttttccacaa

SEQ ID NO: 1417 - DNA, 4070 bp, Homo sapiens
  source 1..4070: mol_type = genomic DNA
agtcagtccgcgaggagagtccgcggtggcggcgacggtggcgagagccgcgggggccgtaggaagccaaccttccctgcttctccggggccctcgccccctcctccccacaaaatcagggatggaggcgcctccccggcaccctcttagcagccctccccaggaaaagtgtcccccctgagctcctaacgctccccaacagctacccctgccccccacgccatggggcccggggccccttttgcccgggtggggtggccactgccgcttctggttgtgatggcggcaggggtggctccggtgtgggcctcccactccccccatctcccgcggcctcactcgcgggtccccccgcacccctcctcagaacggcgcgcagtgtacatcggggcactgtttcccatgagcgggggctggccagggggccaggcctgccagcccgcggtggagatggcgctggaggacgtgaatagccgcagggacatcctgccggactatgagctcaagctcatccaccacgacagcaagtgtgatccaggccaagccaccaagtacctatatgagctgctctacaacgaccctatcaagatcatccttatgcctggctgcagctctgtctccacgctggtggctgaggctgctaggatgtggaacctcattgtgctttcctatggctccagctcaccagccctgtcaaaccggcagcgtttccccactttcttccgaacgcacccatcagccacactccacaaccctacccgcgtgaaactctttgaaaagtggggctggaagaagattgctaccatccagcagaccactgaggtcttcacttcgactctggacgacctggaggaacgagtgaaggaggctggaattgagattactttccgccagagtttcttctcagatccagctgtgcccgtcaaaaacctgaagcgccaggatgcccgaatcatcgtgggacttttctatgagactgaagcccggaaagttttttgtgaggtgtacaaggagcgtctctttgggaagaagtacgtctggttcctcattgggtggtatgctgacaattggttcaagatctacgacccttctatcaactgcacagtggatgagatgactgaggcggtggagggccacatcacaactgagattgtcatgctgaatcctgccaatacccgcagcatttccaacatgacatcccaggaatttgtggagaaactaaccaagcgactgaaaagacaccctgaggagacaggaggcttccaggaggcaccgctggcctatgatgccatctgggccttggcactggccctgaacaagacatctggaggaggcggccgttctggtgtgcgcctggaggacttcaactacaacaaccagaccattaccgaccaaatctaccgggcaatgaactcttcgtcctttgagggtgtctctggccatgtggtgtttgatgccagcggctctcggatggcatggacgcttatcgagcagcttcagggtggcagctacaagaagattggctactatgacagcaccaaggatgatctttcctggtccaaaacagataaatggattggagggtcccccccagctgaccagaccctggtcatcaagacattccgcttcctgtcacagaaactctttatctccgtctcagttctctccagcctgggcattgtcctagctgttgtctgtctgtcctttaacatctacaactcacatgtccgttatatccagaactcacagcccaacctgaacaacctgactgctgtgggctgctcactggctttagctgctgtcttccccctggggctcgatggttaccacattgggaggaaccagttccctttcgtctgccaggcccgcctctggctcctgggcctgggctttagtctgggctacggttccatgttcaccaagatttggtgggtccacacggtcttcacaaagaaggaagaaaagaaggagtggaggaagactctggaaccctggaagctgtatgccacagtgggcctgctggtgggcatggatgtcctcactctcgccatctggcagatcgtggaccctctgcaccggaccattgagacatttgccaaggaggaacctaaggaagatattgacgtctctattctgccccagctggagcattgcagctccaggaagatgaatacatggcttggcattttctatggttacaaggggctgctgctgctgctgggaatcttccttgcttatgagaccaagagtgtgtccactgagaagatcaatgatcaccgggctgtgggcatggctatctacaatgtggcagtcctgtgcctcatcactgctcctgtcaccatgattctgtccagccagcaggatgcagcctttgcctttgcctctcttgccatagttttctcctcctatatcactcttgttgtgctctttgtgcccaagatgcgcaggctgatcacccgaggggaatggcagtcggaggcgcaggacaccatgaagacagggtcatcgaccaacaacaacgaggaggagaagtcccggctgttggagaaggagaaccgtgaactggaaaagatcattgctgagaaagaggagcgtgtctctgaactgcgccatcaactccagtctcggcagcagctccgctcccggcgccacccaccgacacccccagaaccctctgggggcctgcccaggggaccccctgagccccccgaccggcttagctgtgatgggagtcgagtgcatttgctttataagtgagggtagggtgagggaggacaggccagtagggggagggaaagggagaggggaagggcaggggactcaggaagcagggggtccccatccccagctgggaagaacatgctatccaatctcatctcttgtaaatacatgtccccctgtgagttctgggctgatttgggtctctcatacctctgggaaacagacctttttctctcttactgcttcatgtaattttgtatcacctcttcacaatttagttcgtacctggcttgaagctgctcactgctcacacgctgcctcctcagcagcctcactgcatctttctcttcccatgcaacaccctcttctagttaccacggcaacccctgcagctcctctgcctttgtgctctgttcctgtccagcaggggtctcccaacaagtgctctttccaccccaaaggggcctctccttttctccactgtcataatctctttccatcttacttgcccttccatactttctcacatgtggctccccctgaattttgcttcctttgggagctcattcttttcgccaaggctcacatgctccttgcctctgctctgtgcactcacgctcagcacacatgcatcctcccctctcctgcgtgtgcccactgaacatgctcatgtgtacacacgcttttcccgtatgctttcttcatgttcagtcacatgtgctctcgggtgccctgcattcacagctacgtgtgcccctctcatggtcatgggtctgcccttgagcgtgtttgggtaggcatgtgcaatttgtctagcatgctgagtcatgtctttcctatttgcacacgtccatgtttatccatgtactttccctgtgtaccctccatgtaccttgtgtactttcttcccttaaatcatggtattcttctgacagagccatatgtaccctaccctgcacattgttatgcacttttccccaattcatgtttggtggggccatccacaccctctccttgtcacagaatctccatttctgctcagattccccccatctccattgcattcatgtactaccctcagtctacactcacaatcatcttctcccaagactgctcccttttgttttgtgtttttttgaggggaattaaggaaaaataagtgggggcaggtttggagagctgcttccagtggatagttgatgagaatcctgaccaaaggaaggcacccttgactgttgggatagacagatggacctatggggtgggaggtggtgtccctttcacactgtggtgtctcttggggaaggatctccccgaatctcaataaaccagtgaacagtgtgactcgg

SEQ ID NO: 1418 - DNA, 1408 bp, Homo sapiens
  source 1..1408: mol_type = genomic DNA
ggcaatctgttcaggtcgttttccatagtgtggaagctttgttctttcgctctttgcaataaatcttgctgctgctcactctttgggttcacactgcctttatgagctgtaacactcaccacgaaggtctacagctttactcctgaagccagcgagatcacgaacccactgggagaaacgaacaactccagacgcactaccttaagagctgtaacactcactgcgaaggtccgcagctgcattcctgagccagcgagaccacaaacccaccagaaggaagaaacttcgaacgcatccgaacatcagaaggaacaaactccagacacgccgcctttaggaactgtaacactcaaccgcgagggtccgcggcttcattcttgaagtcagtgagaccaagaacccaccaattccggacacactgggattacaggccagactctgaagtgcagcatcagctcctgcccaaccccttccagccaggccaggagcagctcggacttctgcagagctacctaaagggactaggaaggacagaagtgcaactggagcatctgagccgggagcaggttctcctctacctctttgccctccatgactatgaccagagtggacagctggatggcctggagctgctgtccatgttgacagctgctctggcccctggagctgccaactctcctaccaccaacccggtgatcttgatagtggacaaagtgctcgagacccaggacctgaatggggatgggctcatgacccctgctgagctcatcaacttcccgggagtagccctcaggccttacccaccctatattggagttggccccaattccaatatgtgttccagatcggacctccctgaggacagcaacactctgtatcctgggtcacatttgtggctgaggcacgcccttaattccaagggcaacctggacgccaggctggatggaggggagaaggcgatgcagccgcaatggtagtctccatggtgtgtgaggagccggcacctgctctcacacgatgccatcaaagccctgcaggccacacttcttgccggccacctggcacccgaatctcagtgcttcctgcacgctcctccctggaggaggggcaagtagctaggtcagccaggtgtttggggcagggacaggtcccagtccttttcccctcctgctgccatactcaccctgggagaggctgaagatgacggaggcattgaaggtgtctccagctcccagtgtatccaccacgcggggtggcgggaaagcatccgagtggagcaatttgccatcagggcccagggcgtcggcgccctcctcagcccaggcacagacaagcacagccctgcaagacggctccactcagctgggtgttagcccaccccgtccccccagccatcctcccagctcca

SEQ ID NO: 1419 - DNA, 2881 bp, Homo sapiens; identical to SEQ ID NO: 811
  source 1..2881: mol_type = genomic DNA

SEQ ID NO: 1420 - DNA, 3857 bp, Homo sapiens
  source 1..3857: mol_type = genomic DNA
tgctctcgggagccgcctcccgacacccgagccccgccggcgcctcccgctcccggctcccggctcctggctccctccgcctcccccgcccctcgccccgccgccgaagaggccccgctcccgggtcggacgcctgggtctgccgggaagagcgatgagaggtgtctgaaggtggctattcactgagcgatggggttggacttgaaggaatgccaagagatgctgcccccacccccttaggcccgagggatcaggagctatgggaccagaggccctgtcatctttactgctgctgctcttggtggcaagtggagatgctgacatgaagggacattttgatcctgccaagtgccgctatgccctgggcatgcaggaccggaccatcccagacagtgacatctctgcttccagctcctggtcagattccactgccgcccgccacagcaggttggagagcagtgacggggatggggcctggtgccccgcagggtcggtgtttcccaaggaggaggagtacttgcaggtggatctacaacgactgcacctggtggctctggtgggcacccagggacggcatgccgggggcctgggcaaggagttctcccggagctaccggctgcgttactcccgggatggtcgccgctggatgggctggaaggaccgctggggtcaggaggtgatctcaggcaatgaggaccctgagggagtggtgctgaaggaccttgggccccccatggttgcccgactggttcgcttctacccccgggctgaccgggtcatgagcgtctgtctgcgggtagagctctatggctgcctctggagggatggactcctgtcttacaccgcccctgtggggcagacaatgtatttatctgaggccgtgtacctcaacgactccacctatgacggacataccgtgggcggactgcagtatgggggtctgggccagctggcagatggtgtggtggggctggatgactttaggaagagtcaggagctgcgggtctggccaggctatgactatgtgggatggagcaaccacagcttctccagtggctatgtggagatggagtttgagtttgaccggctgagggccttccaggctatgcaggtccactgtaacaacatgcacacgctgggagcccgtctgcctggcggggtggaatgtcgcttccggcgtggccctgccatggcctgggagggggagcccatgcgccacaacctagggggcaacctgggggaccccagagcccgggctgtctcagtgccccttggcggccgtgtggctcgctttctgcagtgccgcttcctctttgcggggccctggttactcttcagcgaaatctccttcatctctgatgtggtgaacaattcctctccggcactgggaggcaccttcccgccagccccctggtggccgcctggcccacctcccaccaacttcagcagcttggagctggagcccagaggccagcagcccgtggccaaggccgaggggagcccgaccgccatcctcatcggctgcctggtggccatcatcctgctcctgctgctcatcattgccctcatgctctggcggctgcactggcgcaggctcctcagcaaggctgaacggagggtgttggaagaggagctgacggttcacctctctgtccctggggacactatcctcatcaacaaccgcccaggtcctagagagccacccccgtaccaggagccccggcctcgtgggaatccgccccactccgctccctgtgtccccaatggctctgcgttgctgctctccaatccagcctaccgcctccttctggccacttacgcccgtccccctcgaggcccgggcccccccacacccgcctgggccaaacccaccaacacccaggcctacagtggggactatatggagcctgagaagccaggcgccccgcttctgcccccacctccccagaacagcgtcccccattatgccgaggctgacattgttaccctgcagggcgtcaccgggggcaacacctatgctgtgcctgcactgcccccaggggcagtcggggatgggccccccagagtggatttccctcgatctcgactccgcttcaaggagaagcttggcgagggccagtttggggaggtgcacctgtgtgaggtcgacagccctcaagatctggttagtcttgatttcccccttaatgtgcgtaagggacaccctttgctggtagctgtcaagatcttacggccagatgccaccaagaatgccaggaatgatttcctgaaagaggtgaagatcatgtcgaggctcaaggacccaaacatcattcggctgctgggcgtgtgtgtgcaggacgaccccctctgcatgattactgactacatggagaacggcgacctcaaccagttcctcagtgcccaccagctggaggacaaggcagccgagggggcccctggggacgggcaggctgcgcaggggcccaccatcagctacccaatgctgctgcatgtggcagcccagatcgcctccggcatgcgctatctggccacactcaactttgtacatcgggacctggccacgcggaactgcctagttggggaaaatttcaccatcaaaatcgcagactttggcatgagccggaacctctatgctggggactattaccgtgtgcagggccgggcagtgctgcccatccgctggatggcctgggagtgcatcctcatggggaagttcacgactgcgagtgacgtgtgggcctttggtgtgaccctgtgggaggtgctgatgctctgtagggcccagccctttgggcagctcaccgacgagcaggtcatcgagaacgcgggggagttcttccgggaccagggccggcaggtgtacctgtcccggccgcctgcctgcccgcagggcctatatgagctgatgcttcggtgctggagccgggagtctgagcagcgaccacccttttcccagctgcatcggttcctggcagaggatgcactcaacacggtgtgaatcacacatccagctgcccctccctcagggagcgatccaggggaagccagtgacactaaaacaagaggacacaatggcacctctgcccttcccctcccgacagcccatcacctctaatagaggcagtgagactgcaggtgggctgggcccacccagggagctgatgccccttctccccttcctggacacactctcatgtccccttcctgttcttccttcctagaagcccctgtcgcccacccagctggtcctgtggatgggatcctctccaccctcctctagccatcccttggggaagggtggggagaaatataggatagacactggacatggcccattggagcacctgggccccactggacaacactgattcctggagaggtggctgcgcccccagcttctctctccctgtcacacactggaccccactggctgagaatctgggggtgaggaggacaagaaggagaggaaaatgtttccttgtgcctgctcctgtacttgtcctcagcttgggcttcttcctcctccatcacctgaaacactggacctgggggtagccccgccccagccctcagtcacccccacttcccacttgcagtcttgtagctagaacttctctaagcctatacgtttctgtggagtaaatattgggattggggggaaagagggagcaacggcccatagccttggggttggacatctctagtgtagctgccacattgatttttctataatcacttggggtttgtacatttttggggggagagacacagatttttacactaatatatggacctagcttgaggcaattttaatcccctgcactaggcaggtaataataaaggttgagttttcc

SEQ ID NO: 1421 - DNA, 922 bp, Homo sapiens; identical to SEQ ID NO: 819
  source 1..922: mol_type = genomic DNA

SEQ ID NO: 1422 - DNA, 1038 bp, Homo sapiens
  source 1..1038: mol_type = genomic DNA
ccgcagctgcgcggagcgccgggcacggatggcggcggctgaggggagcgaagcgagggagggagagcaagctaagaaacacccagcaggtgctcccccgcctaggcctggctggaggctactggcgccaccctgggggccctgtcagccaggtgaatgttggagacacagtcgcgatgctgcccaagtcccggcgagccctaactatccaggagatcgctgcgctggccaggtcctccctgcatggtatttcccaggtggtgaaggaccacgtgaccaagcctaccgccatggcccagggccgagtggctcacctcattgagtggaagggctggagcaagccgagtgactcacctgctgccctggaatcagccttttcctcctattcagacctcagcgagggcgaacaagaggctcgctttgcagcaggagtggctgagcagtttgccatcgcggaagccaagctccgagcatggtcttcggtggatggcgaggactccactgatgactcctatgatgaggactttgctgggggaatggacacagacatggctgggcagctgcccctggggccgcacctccaggacctgttcaccggccaccggttctcccggcctgtgcgccagggctccgtggagcctgagagcgactgctcacagaccgtgtccccagacaccctgtgctctagtctgtgcagcctggaggatgggttgttgggctccccggcccggctggcctcccagctgctgggcgatgagctgcttctcgccaaactgccccccagccgggaaagtgccttccgcagcctgggcccactggaggcccaggactcactctacaactcgcccctcacagagtcctgcctttcccccgcggaggaggagccagccccctgcaaggactgccagccactctgcccaccactaacgggcagctgggaacggcagcggcaagcctctgacctggcctcttctggggtggtgtccttagatgaggatgaggcagagccagaggaacagtgacccacatcatgcctgg

SEQ ID NO: 1423 - DNA, 560 bp, Homo sapiens; identical to SEQ ID NO: 1070
  source 1..560: mol_type = genomic DNA

SEQ ID NO: 1424 - DNA, 3832 bp, Homo sapiens
  source 1..3832: mol_type = genomic DNA
ggctttaggaagttatttaactgatctctgccctagtttcttcatgtgttaaatatggatagtaatagtatctaccttatgaagtgactgtgaagataaaattatggattctgtttaagggtttaggccagtgtctggcacaggggaagcattctaaaaatatagctgatgctgttaaacaatgactgttgttgttgttttactgttattatccccaaagcggcccattctgtctgttgctgtcagctatgactcagtcccctgattaacttacgcaccacccattttatcccctgcagagatgctgcccccacccccttaggcccgagggatcaggagctatgggaccagaggccctgtcatctttactgctgctgctcttggtggcaagtggagatgctgacatgaagggacattttgatcctgccaagtgccgctatgccctgggcatgcaggaccggaccatcccagacagtgacatctctgcttccagctcctggtcagattccactgccgcccgccacagcaggttggagagcagtgacggggatggggcctggtgccccgcagggtcggtgtttcccaaggaggaggagtacttgcaggtggatctacaacgactccacctggtggctctggtgggcacccagggacggcatgccgggggcctgggcaaggagttctcccggagctaccggctgcgttactcccgggatggtcgccgctggatgggctggaaggaccgctggggtcaggaggtgatctcaggcaatgaggaccctgagggagtggtgctgaaggaccttgggccccccatggttgcccgactggttcgcttctacccccgggctgaccgggtcatgagtgtctgtctgcgggtagagctctatggctgcctctggagggatggactcctgtcttacaccgcccctgtggggcagacaatgtatttatctgaggccgtgtacctcaacgactccacctatgacggacataccgtgggcggactgcagtatgggggtctgggccagctggcagatggtgtggtggggctggatgactttaggaagagtcaggagctgcgggtctggccaggctatgactatgtgggatggagcaaccacagcttctccagtggctatgtggagatggagtttgagtttgaccggctgagggccttccaggctatgcaggtccactgtaacaacatgcacacgctgggagcccgtctgcctggcggggtggaatgtcgcttccggcgtggccctgccatggcctgggagggggagcccatgcgccacaacctagggggcaacctgggggaccccagagcccgggctgtctcagtgccccttggcggccgtgtggctcgctttctgcagtgccgcttcctctttgcggggccctggttactcttcagcgaaatctccttcatctctgatgtggtgaacaattcctctccggcactgggaggcaccttcccgccagccccctggtggccgcctggcccacctcccaccaacttcagcagcttggagctggagcccagaggccagcagcccgtggccaaggccgaggggagcccgaccgccatcctcatcggctgcctggtggccatcatcctgctcctgctgctcatcattgccctcatgctctggcggctgcactggcgcaggctcctcagcaaggctgaacggagggtgttggaagaggagctgacggttcacctctctgtccctggggacactatcctcatcaacaaccgcccaggtcctagagagccacccccgtaccaggagccccggcctcgtgggaatccgccccactccgctccctgtgtccccaatggctctgcctacagtggggactatatggagcctgagaagccaggcgccccgcttctgcccccacctccccagaacagcgtcccccattatgccgaggctgacattgttaccctgcagggcgtcaccgggggcaacacctatgctgtgcctgcactgcccccaggggcagtcggggatgggccccccagagtggatttccctcgatctcgactccgcttcaaggagaagcttggcgagggccagtttggggaggtgcacctgtgtgaggtcgacagccctcaagatctggtcagtcttgatttcccccttaatgtgcgtaagggacaccctttgctggtagctgtcaagatcttacggccagatgccaccaagaatgccaggaatgatttcctgaaagaggtgaagatcatgtcgaggctcaaggaccccaacatcattcggctgctgggcgtgtgtgtgcaggacgaccccctctgcatgattactgactacatggagaacggcgacctcaaccagttcctcagtgcccaccagctggaggacaaggcagccgagggggcccctggggacgggcaggctgcgcaggggcccaccatcagctacccaatgctgctgcatgtggcagcccagatcgcctccggcatgcgctatctggccacactcaactttgtacatcgggacctggccacgcggaactgcctagttggggaaaatttcaccatcaaaatcgcagactttggcatgagccggaacctctatgctggggactattaccgtgtgcagggccgggcagtgctgcccatccgctggatggcctgggagtgcatcctcatggggaagttcacgactgcgagtgacgtgtgggcctttggtgtgaccctgtgggaggtgctgatgctctgtagggcccagccctttgggcagctcaccgacgagcaggtcatcgagaacgcgggggagttcttccgggaccagggccggcaggtgtacctgtcccggccgcctgcctgcccgcagggcctatatgagctgatgcttcggtgctggagccgggagtctgagcagcgaccacccttttcccagctgcatcggttcctggcagaggatgcactcaacacggtgtgaatcacacatccagctgcccctccctcagggagtgatccaggggaagccagtgacactaaaacaagaggacacaatggcacctctgcccttcccctcccgacagcccatcacctctaatagaggcagtgagactgcaggtgggctgggcccacccagggagctgatgccccttctccccttcctggacacactctcatgtccccttcctgttcttccttcctagaagcccctgtcgcccacccagctggtcctgtggatgggatcctctccaccctcctctagccatcccttggggaagggtggggagaaatataggatagacactggacatggcccattggagcacctgggccccactggacaacactgattcctggagaggtggctgcgcccccagcttctctctccctgtcacacactggaccccactggctgagaatctgggggtgaggaggacaagaaggagaggaaaatgtttccttgtgcctgctcctgtacttgtcctcagcttgggcttcttcctcctccatcacctgaaacactggacctgggggtagccccgccccagccctcagtcacccccacttcccacctgcagtcttgtagctagaacttctctaagcctatacgtttctgtggagtaaatattgggattggggggaaagagggagcaacggcccatagccttggggttggacatctctagtgtagctgccacattgatttttctataatcacttggggtttgtacatttttggggggagagacacagatttttacactaatatatggacctagcttgaggcaattttaatcccctgcactaggcaggtaataataaaggttgagttttccacaa

SEQ ID NO: 1425 - DNA, 2419 bp, Homo sapiens
  source 1..2419: mol_type = genomic DNA
tagaagggagcgggagggggctccgggcgccgcgcagcagacctgctccggccgcgcgcctcgccgctgtcctccgggagcggcagcagtagcccgggcggcgagggctgggggttcctcgagactctcagaggggcgcctcccatcggcgcccaccaccccaacctgttcctcgcgcgccactgcgctgcgccccaggacccgctgcccaacatggattttctcctggcgctggtgctggtatcctcgctctacctgcaggcggccgccgagttcgacgggaggtggcccaggcaaatagtgtcatcgattggcctatgtcgttatggtgggaggattgactgctgctggggctgggctcgccagtcttggggacagtgtcagcctttctacgtcttaaggcagagaatagccaggataaggtgccagctcaaagctgtgtgccaaccacgatgcaaacatggtgaatgtatcgggccaaacaagtgcaagtgtcatcctggttatgctggaaaaacctgtaatcaagatctaaatgagtgtggcctgaagccccggccctgtaagcacaggtgcatgaacacttacggcagctacaagtgctactgtctcaacggatatatgctcatgccggatggttcctgctcaagtgccctgacctgctccatggcaaactgtcagtatggctgtgatgttgttaaaggacaaatacggtgccagtgcccatcccctggcctgcagctggctcctgatgggaggacctgtgtagatgttgatgaatgtgctacaggaagagcctcctgccctagatttaggcaatgtgtcaacacttttgggagctacatctgcaagtgtcataaaggcttcgatctcatgtatattggaggcaaatatcaatgtcatgacatagacgaatgctcacttggtcagtatcagtgcagcagctttgctcgatgttataacatacgtgggtcctacaagtgcaaatgtaaagaaggataccagggtgatggactgacttgtgtgtatatcccaaaagttatgattgaaccttcaggtccaattcatgtaccaaagggaaatggtaccattttaaagggtgacacaggaaataataattggattcctgatgttggaagtacttggtggcctccgaagacaccatatattcctcctatcattaccaacaggcctacttctaagccaacaacaagacctacaccaaagccaacaccaattcctactccaccaccaccaccacccctgccaacagagctcagaacacctctaccacctacaaccccagaaaggccaaccaccggactgacaactatagcaccagctgccagtacacctccaggagggattacagttgacaacagggtacagacagaccctcagaaacccagaggagatgtgttcattccacggcaaccttcaaatgacttgtttgaaatatttgaaatagaaagaggagtcagtgcagacgatgaagcaaaggatgatccaggtgttctggtacacagttgtaattttgaccatggactttgtggatggatcagggagaaagacaatgacttgcactgggaaccaatcagggacccagcaggtggacaatatctgacagtgtcggcagccaaagccccagggggaaaagctgcacgcttggtgctacctctcggccgcctcatgcattcaggggacctgtgcctgtcattcaggcacaaggtgacggggctgcactctggcacactccaggtgtttgtgagaaaacacggtgcccacggagcagccctgtggggaagaaatggtggccatggctggaggcaaacacagatcaccttgcgaggggctgacatcaagagcgtcgtcttcaaaggtgaaaaaaggcgtggtcacactggggagattggattagatgatgtgagcttgaaaaaaggccactgctctgaagaacgctaacaactccagaactaacaatgaactcctatgttgctctatcctctttttccaattctcatcttctctcctcttctcccttttatcaggcctaggagaagagtgggtcagtgggtcagaaggaagtctatttggtgacccaggtttttctggcctgcttttgtgcaatcccaatgaacagtgataccctccttgaaatacaggggcatcgcagacacatcaaagccatctgtgggtgttgccttccatcctgtgtctctttcaggaaggcattcagcatgcgtgagccataccatcctccatcctgattacaaggtgctccttgtagcaaattatgagagtgagttacgggagcagtttttaaaagaaatctttgcagatggctatgatgttatgtgttcggtgttgtaccatgagtagtattgacttcccttgagatatgatgtacaatgtgcttgtg

SEQ ID NO: 1426 - DNA, 2757 bp, Homo sapiens
  source 1..2757: mol_type = genomic DNA
gtgttcgctgctgcacagcaaggccctgccacccaccttcaggccatgcagccatgttccgggagccctaattgcacagaagcccatggggagctccagactggcagccctgctcctgcctctcctcctcatagtcatcgacctctctgactctgctgggattggctttcgccacctgccccactggaacacccgctgtcctctggcctcccacacggatgacagtttcactggaagttctgcctatatcccttgccgcacctggtgggccctcttctccacaaagccttggtgtgtgcgagtctggcactgttcccgctgtttgtgccagcatctgctgtcaggtggctcaggtcttcaacggggcctcttccacctcctggtgcagaaatccaaaaagtcttccacattcaagttctataggagacacaagatgccagcacctgctcagaggaagctgctgcctcgtcgtcacctgtctgagaagagccatcacatttccatcccctccccagacatctcccacaagggacttcgctctaaaaggacccaaccttcggatccagagacatgggaaagtcttcccagattggactcacaaaggcatggaggacccgagttctcctttgatttgctgcctgaggcccgggctattcgggtgaccatatcttcaggccctgaggtcagcgtgcgtctttgtcaccagtgggcactggagtgtgaagagctgagcagtccctatgatgtccagaaaattgtgtctgggggccacactgtagagctgccttatgaattccttctgccctgtctgtgcatagaggcatcctacctgcaagaggacactgtgaggcgcaaaaaatgtcccttccagagctggccagaagcctatggctcggacttctggaagtcagtgcacttcactgactacagccagcacactcagatggtcatggccctgacactccgctgcccactgaagctggaagctgccctctgccagaggcacgactggcataccctttgcaaagacctcccgaatgccacagctcgagagtcagatgggtggtatgttttggagaaggtggacctgcacccccagctctgcttcaagttctcttttggaaacagcagccatgttgaatgcccccaccagactgggtctctcacatcctggaatgtaagcatggatacccaagcccagcagctgattcttcacttctcctcaagaatgcatgccaccttcagtgctgcctggagcctcccaggcttggggcaggacactttggtgccccccgtgtacactgtcagccaggcccggggctcaagcccagtgtcactagacctcatcattcccttcctgaggccagggtgctgtgtcctgctccatgcttcactcagctccccgggaggagaagatgcctggctcataggggtggggggctctgtgccctcaggtgtggcggtcagatgtccagtttgcctggaagcacctcttgtgtccggatgtctcttacagacacctggggctcttgatcctggcactgctggccctcctcaccctactgggtgttgttctggccctcacctgccggcgcccacagtcaggcccgggcccagcgcggccagtgctcctcctgcacgcggcggactcggaggcgcagcggcgcctggtgggagcgctggctgaactgctacgggcagcgctgggcggcgggcgcgacgtgatcgtggacctgtgggaggggaggcacgtggcgcgcgtgggcccgctgccgtggctctgggcggcgcggacgcgcgtagcgcgggagcagggcactgtgctgctgctgtggagcggcgccgaccttcgcccggtcagcggccccgacccccgcgccgcgcccctgctcgccctgctccacgctgccccgcgcccgctgctgctgctcgcttacttcagtcgcctctgcgccaagggcgacatccccccgccgctgcgcgccctgccgcgctaccgcctgctgcgcgacctgccgcgtctgctgcgggcgctggacgcgcggcctttcgcagaggccaccagctggggccgccttggggcgcggcagcgcaggcagagccgcctagagctgtgcagccggctcgaacgagaggccgcccgacttgcagacctaggttgagcagagctccaccgcagtcccgggtgtctgcggccgcaacgcaacggacactggctggaaccccggaatgagccttcgaccctgaaatccttggggtgcctcgaggacgactggccgaaaagccgcattccctgcctcacaggccggaagtcccagcccagtccccgcgcgcgtccctcttcctcctcatactttcccttgactgagagctcctctaacccctgttctgatgggggagggcggtcttcccacttcctctccagaactccagaaagagcagtgtgcttatgcttcagtccaggctggagaggttggggccggggtagggaggcaggagccatgtcagttctgaaggagggtgaggcggtgggggattgcagggggcggctgagagaaaacctccttgggggccagggattccctttcccactctgaggctctggccagagggagagaggactctggacctaggaaaagaggcttttggctccaggtggtcaggacagtgggggttgggggtggggtgggtgggtgctggcggtggggaccaagatccggaaagatgaataaagacaaacatgacaaactaagaaaa

SEQ ID NO: 1427 - DNA, 2143 bp, Homo sapiens
  source 1..2143: mol_type = genomic DNA
aggcggggtcacgcggaaggccgggcagcgcagggcgaaaggaggctgtgtcctcagcctcctccctcggcacgcgcctcccatcctgacggggactgagagcccaggagagctcggggcgtgtccaaactgccgcgccgccctgctccgggtttgtcttcctccctccgtttctccttccgctgtatctagcatttcggttcctggaaaggttaccggagctgcgattggggctgggaccaaagttgagtcctggaaagggagcctggagagcggcggtgctgggaggcccggccagctcgatcgcaggcttccacctggcggccaatgcttgtttgctactgatgggtgtgagcaagttagatattctataccggagacttctcctaacaaaactttttatcagaggatggggaaggccagaagatctcaaaagactctttgaattcagaaagatgattggaaatcgggaaagatgccagaatctggtttcaagcgattatccagtacacattgataagattgaagagcaatcagattgtaagatcttagatggacactttgtttcccccatggctcactatgtgcctgatatcatgccaattgaatctgttattgcaaggttccaatttattgtgcctaaagaatggaacagcaaatatagacctgtatgcattcatcttgctggaacaggagatcatcattactggaggcgacgaacactaatggcccgtcctatgattaaagaagcccgaatggcttctttattgttagaaaacccttattatggctgcaggaaacccaaggaccaagtaaggtccagcttaaaaaatgtgtccgacctttttgtgatgggaggagctcttgttttagaatctgcagctctcttgcactggctagagagggaaggttacggccctttaggaatgactggaatatccatgggaggacacatggcttccttagcggtatccaactggcctaagcccatgccattgattccatgcctgtcttggtccacagcatctggggtcttcactacgacagattctttcaaaatgggacaagagtttgtgaaacacttcactagcagtgcagacaagctaactaaccttaatctggtttccagaactttaaatttagatatatcaaaccaagttgtatcccaaaaacctgctgactgccataattctagcaaaacatctgtcagtgcgacatcagaaggactcttattgcaagatacctctaagatgaagcgcttcaatcaaacactttcaaccaacaaaagtggttatacaagtcgcaaccctcagtcataccacctacttagtaaagaacaaagcagaaacagtcttcggaaagagtctttaatatttatgaaaggagtcatggatgaatgtactcatgtagcaaatttctcagtcccagttgatccaagcctcattatagtggttcaagccaaagaagatgcctatattccacgaacaggagttcgaagtttacaagaaatttggcctggttgtgaaatccgatacttagaagggggtcatattagtgcttatctttttaaacaaggactcttcagacaagccatctatgatgcatttgaccgcttcctccataaatacgctaactagttggattattatatgtaaccagtgtggccatgatgtttcttacaaaagggagcttcatcctgtgatcatgtgaaggacaagcagacagcactaatatatctaatcgctatcaatttggtctggaattcattgttacacatcagttaactataaacttcgaatacatttgaataatttcaagataatatttgaagtaaataatgttaaagtgtttttactattgtttattggaatcccatatattcagtgtttagtctgttgttactgtttatgaaaaactaaatttttaatcatgaataatttattaaattaaataaatttattcatagaaacttttctgggttttagtaaaattgctaaatcaaaccaagattttaatatatcagcatttactttgtacccttataacatttcactcttgacttgatttgagaaacatgtttattttttgaatgttcttgtgttcaactaattttctgctgtggaaataaatacttatgatatat

SEQ ID NO: 1428 - DNA, 3942 bp, Homo sapiens
  source 1..3942: mol_type = genomic DNA
agattccccagctgctgttctctggaggggttcctggggcggagatgtgcagtggagcgagaacttcctgtgaccgtgacattgtctaggtggaaccgatcccagaagtaggaggggcgtcttcccctcgtgggccctgagcgggactgcagccagccccctggggcgccagctttggaggcccccgacagctgctctcgggagccgcctcccgacacccgagccccgccggcgcctcccgctcccggctcccggctcctggctccctccgcctcccccgcccctcgccccgccgccgaagaggccccgctcccgggtcggacgcctgggtctgccgggaagagcgatgagaggtgtctgaaggtggctattcactgagcgatggggttggacttgaaggaatgccaagagatgctgcccccacccccttaggcccgagggatcaggagctatgggaccagaggccctgtcatctttactgctgctgctcttggtggcaagtggagatgctgacatgaagggacattttgatcctgccaagtgccgctatgccctgggcatgcaggaccggaccatcccagacagtgacatctctgcttccagctcctggtcagattccactgccgcccgccacagcaggttggagagcagtgacggggatggggcctggtgccccgcagggtcggtgtttcccaaggaggaggagtacttgcaggtggatctacaacgactgcacctggtggctctggtgggcacccagggacggcatgccgggggcctgggcaaggagttctcccggagctaccggctgcgttactcccgggatggtcgccgctggatgggctggaaggaccgctggggtcaggaggtgatctcaggcaatgaggaccctgagggagtggtgctgaaggaccttgggccccccatggttgcccgactggttcgcttctacccccgggctgaccgggtcatgagcgtctgtctgcgggtagagctctatggctgcctctggagggatggactcctgtcttacaccgcccctgtggggcagacaatgtatttatctgaggccgtgtacctcaacgactccacctatgacggacataccgtgggcggactgcagtatgggggtctgggccagctggcagatggtgtggtggggctggatgactttaggaagagtcaggagctgcgggtctggccaggctatgactatgtgggatggagcaaccacagcttctccagtggctatgtggagatggagtttgagtttgaccggctgagggccttccaggctatgcaggtccactgtaacaacatgcacacgctgggagcccgtctgcctggcggggtggaatgtcgcttccggcgtggccctgccatggcctgggagggggagcccatgcgccacaacctagggggcaacctgggggaccccagagcccgggctgtctcagtgccccttggcggccgtgtggctcgctttctgcagtgccgcttcctctttgcggggccctggttactcttcagcgaaatctccttcatctctgatgtggtgaacaattcctctccggcactgggaggcaccttcccgccagccccctggtggccgcctggcccacctcccaccaacttcagcagcttggagctggagcccagaggccagcagcccgtggccaaggccgaggggagcccgaccgccatcctcatcggctgcctggtggccatcatcctgctcctgctgctcatcattgccctcatgctctggcggctgcactggcgcaggctcctcagcaaggctgaacggagggtgttggaagaggagctgacggttcacctctctgtccctggggacactatcctcatcaacaaccgcccaggtcctagagagccacccccgtaccaggagccccggcctcgtgggaatccgccccactccgctccctgtgtccccaatggctctgcctacagtggggactatatggagcctgagaagccaggcgccccgcttctgcccccacctccccagaacagcgtcccccattatgccgaggctgacattgttaccctgcagggcgtcaccgggggcaacacctatgctgtgcctgcactgcccccaggggcagtcggggatgggccccccagagtggatttccctcgatctcgactccgcttcaaggagaagcttggcgagggccagtttggggaggtgcacctgtgtgaggtcgacagccctcaagatctggttagtcttgatttcccccttaatgtgcgtaagggacaccctttgctggtagctgtcaagatcttacggccagatgccaccaagaatgccaggaatgatttcctgaaagaggtgaagatcatgtcgaggctcaaggacccaaacatcattcggctgctgggcgtgtgtgtgcaggacgaccccctctgcatgattactgactacatggagaacggcgacctcaaccagttcctcagtgcccaccagctggaggacaaggcagccgagggggcccctggggacgggcaggctgcgcaggggcccaccatcagctacccaatgctgctgcatgtggcagcccagatcgcctccggcatgcgctatctggccacactcaactttgtacatcgggacctggccacgcggaactgcctagttggggaaaatttcaccatcaaaatcgcagactttggcatgagccggaacctctatgctggggactattaccgtgtgcagggccgggcagtgctgcccatccgctggatggcctgggagtgcatcctcatggggaagttcacgactgcgagtgacgtgtgggcctttggtgtgaccctgtgggaggtgctgatgctctgtagggcccagccctttgggcagctcaccgacgagcaggtcatcgagaacgcgggggagttcttccgggaccagggccggcaggtgtacctgtcccggccgcctgcctgcccgcagggcctatatgagctgatgcttcggtgctggagccgggagtctgagcagcgaccacccttttcccagctgcatcggttcctggcagaggatgcactcaacacggtgtgaatcacacatccagctgcccctccctcagggagcgatccaggggaagccagtgacactaaaacaagaggacacaatggcacctctgcccttcccctcccgacagcccatcacctctaatagaggcagtgagactgcaggtgggctgggcccacccagggagctgatgccccttctccccttcctggacacactctcatgtccccttcctgttcttccttcctagaagcccctgtcgcccacccagctggtcctgtggatgggatcctctccaccctcctctagccatcccttggggaagggtggggagaaatataggatagacactggacatggcccattggagcacctgggccccactggacaacactgattcctggagaggtggctgcgcccccagcttctctctccctgtcacacactggaccccactggctgagaatctgggggtgaggaggacaagaaggagaggaaaatgtttccttgtgcctgctcctgtacttgtcctcagcttgggcttcttcctcctccatcacctgaaacactggacctgggggtagccccgccccagccctcagtcacccccacttcccacttgcagtcttgtagctagaacttctctaagcctatacgtttctgtggagtaaatattgggattggggggaaagagggagcaacggcccatagccttggggttggacatctctagtgtagctgccacattgatttttctataatcacttggggtttgtacatttttggggggagagacacagatttttacactaatatatggacctagcttgaggcaattttaatcccctgcactaggcaggtaataataaaggttgagttttccacaa

SEQ ID NO: 1429 - DNA, 451 bp, Homo sapiens; identical to SEQ ID NO: 931
  source 1..451: mol_type = genomic DNA

SEQ ID NO: 1430 - DNA, 3678 bp, Homo sapiens; identical to SEQ ID NO: 1076
  source 1..3678: mol_type = genomic DNA

SEQ ID NO: 1431 - DNA, 3362 bp, Homo sapiens
  source 1..3362: mol_type = genomic DNA
gaggggttgcccatgtgctgcatttctctgccggttgtttgaatgtgctctgctttccctgcagccctctggaccccgaggttggaccctactgtgacacacctaccatgcggacactcttcaacctcctctggcttgccctggcctgcagccctgttcacactaccctgtcaaagtcagatgccaaaaaagccgcctcaaagacgctgctggagaaggtgaagttttgctcttgttgcccaggctggagcgcaatggcgcgatcttggctcaccgcaacctctgccacccagagtcagttttcagataagccggtgcaagaccggggtttggtcgtgacggacctcaaagctgagagtgtggttcttgagcatcgcagctactgctcggcaaaggcccgggacagacactttgctggggatgtactgggctatgtcactccatggaacagccatggctacgatgtcaccaaggtctttgggagcaagttcacacagatctcacccgtctggctgcagctgaagagacgtggccgtgagatgtttgaggtcacgggcctccacgacgtggaccaagggtggatgcgagctgtcaggaagcatgccaagggcctgcacatagtgcctcggctcctgtttgaggactggacttacgatgatttccggaacgtcttagacagtgaggatgagatagaggagctgagcaagaccgtggtccaggtggcaaagaaccagcatttcgatggcttcgtggtggaggtctggaaccagctgctaagccagaagcgcgtgggcctcatccacatgctcacccacttggccgaggctctgcaccaggcccggctgctggccctcctggtcatcccgcctgccatcacccccgggaccgaccagctgggcatgttcacgcacaaggagtttgagcagctggcccccgtgctggatggtttcagcctcatgacctacgactactctacagcgcatcagcctggccctaatgcacccctgtcctgggttcgagcctgcgtccaggtcctggacccgaagtccaagtggcgaagcaaaatcctcctggggctcaacttctatggtatggactacgcgacctccaaggatgcccgtgagcctgttgtcggggccaggtacatccagacactgaaggaccacaggccccggatggtgtgggacagccaggcctcagagcacttcttcgagtacaagaagagccgcagtgggaggcacgtcgtcttctacccaaccctgaagtccctgcaggtgcggctggagctggcccgggagctgggcgttggggtctctatctgggagctgggccagggcctggactacttctacgacctgctctaggtgggcattgcggcctccgcggtggacgtgttcttttctaagccatggagtgagtgagcaggtgtgaaatacaggcctccactccgtttgctgtgacgggtctgctgcagtcctcagtcgggggtcctgggcaccatgtgactccccatcctcccatgaggggtccctgccctggatgagtcctagctgggggacaccctgagagctcgagcccctcccacccgggcatccgctggctgcctcctgtcagctgggcaggcggggcccacagtacctgccccaccaggacagcctggctcaggcctttctgggctgcttctcacatcctgggctggatgtgggtttggaagctctggaaccatcccggactcgcccactcctggattcgagggccctcgcagggacagctctgcccagcatcaccccagggcctggcagtgatagagctgagagctccacccccacatacctgccacccacctggccagccacagcacgtgtgtcacctgcagagagccacccagacgtccccaccgagtccagcacggcaagggtgcaggggctgccctagaaatgggctcagaggagcctggcccaccctcttgaaactggtcctggaccttggctcagctctgccgcctcaggtagcacgacccccaggccagcctggacacatcagggagcatggtgaggggcaacggcaggacccgtgggccatatcgggacaggcatttccagcgaggggtggggcagaggacatgtggctggcaggctacacccaccctgccatgcagcggtgtccaggctctggggaggccctggggaatttggaggcatcatgagccaaggcctggtggccctcgttcccctgcccctcgtcaccatcctgtccttggctggccgtgaggactcccctcctcaccactgggtcccacagggctgaggtgggcagtagagggcataggtgggtacatgtcccgggcaaggtctctcggggggacagaagtgagtccagggagtgggtgggcctgggcgtccctcactcagaatgccgtggggtgaggacggtgaggacagggtgggcactgggttctggtttagagtcagtaatgttagggcgcagtgggcagggggtcaggacatctccagccggtggtgaggaagcatggtggggtctcctccacaggacgggagctggggagggggtcctgggtcggacccaaggcacccacacttgagaaagcctccgcctggacgtcagggaggcctgcgagctgccacagtgcaggtgcagccgttcccaccgccctgctgctgcttgacacgggcataggagatacaagtggtgtgtgcggcggttcatgcctgtaatcccagtactttggaaagccgtggcgggaggaacgctgggcaacatggtgaaaccccgtctctaccccctaaaaatagaaaaattagcaagacatggtggcatgtgcctgtactcctggctactcaggaggctgagatgggaggatcgcttgatgaggttgaggctgcagtgagctgtgaccgactgcactccaaaaaccttgtctaaaaaaacacaagctgccactggctttggggcactgaccttgtctccccagaggtgctgacgctaacattcaagttgttctcgggggtcctgtggcttctgttggagtgagggtgggggacacgcaggtctgggagggtggtgtgggcctggagctaggcattgccagatcagcattgggtggaggcaggggtggggatgccacacaggatgggatgtctagagcgggctgtgtctcccggggggatgggcagagggtggggcaggaattagctggaaatgagattgtggggtgcagtttggggatcagatgccccaacctgaactgaccgtcatccctgtggccagggtccccacacaaccctcacccctggctgtgagaatcctgaggcaccttgatgcattttttttcatgccctgtg

SEQ ID NO: 1432 - DNA, 582 bp, Homo sapiens
  source 1..582: mol_type = genomic DNA
atttccctcctttcttctccgaggggtcaagattcttctggaagaggtgcccccttaaaggagcaggagccttggctggggtcctccttgtctcctgagtatcttgtgtgaggtgcaggggatacagtctaattgcagaagctcctcattcttcggggacctggatggggcctgtcccctcagttcccaggtgccatgaggaagcctcgtcggaagtcccggcagaatgccgagggccggcgttccccgtccccctacagtctcaagtgctcacccacccgggagaccctgacatatgcccaggcccagcggattgtcgaggtagacattgatggacgcctgcatcgtatcagcatctatgacccactcaaaatcattactgaagatgagctaactgcccaggatatcaccgaatgcaatagtaacaaggaaaacagtgaacagcctcagttccctggcaagtccaagaaaccctcatccaagggcaaaaagaaggaatcctgctccaagcatgcatctggtacttccttccacctcccacagcccagcttccgtatggtggactcaggcatccagccagaa

SEQ ID NO: 1433 - DNA, 801 bp, Homo sapiens
  source 1..801: mol_type = genomic DNA
tctggagcccacacccaacatggttggtgactgggagacagaaaaggatagaaaaaaaaaaggctcaggaagacaacaattcaagtcctacccttgtgtgtgcatctcaaggctgtgttcttttaaagaaggagaattctttgaatttcttaaatccgatgtgatggtgaactgcaggcttcggttttcatcatgctgagtcctaacatttgtgactacttcccccggggtggccatgtgaagcatcttatgcgcatgagcctattttatcctcccaacaatattaggaggtatcctcggtccgttttacagatgctgaagatgacccaggttgatacagttaagcagcctagggactccacgtaccccagctgggtctcattgttccagaactgcattagttaagattacccagacttggatttcaaaggaatactttcattgttccgtctgtaacacgaagtaattggggccagctggatgtcaggatgcgtgtggttaccattgtaatcttgctctgcttttgcaaagcggctgagctgcgcaaagcaagcccaggcagtgtgagaagccgagtgaatcatggccgggcgggtggaggccggagaggctccaacccggtcaaacgctacgcaccaggcctcccgtgtgacgtgtacacatatctccatgagaaatacttagattgtcaagaaagaaaattagtttatgtgctgcctggttggcctcaggatttgctgcacatgctgctagcaagaaacaagatccgcacattgaagaacaacatgttttccaagttta

SEQ ID NO: 1434 - DNA, 1903 bp, Homo sapiens
  source 1..1903: mol_type = genomic DNA
gactttggttactgtcctcgtgtgtactgtgagaaccagccaatgcttcccattggtgtgctggtcatggtgggcttcacagtaggaaaggttcctgttcccgacatccggacgtgccacttctgcctcgtagaagacccttctgtaggatgcatttcaggctcagagaagtgtaccatcagcagctcatccctgtgcatggtgatcaccatctattatgatgtcaaggttcgcttcatcgttcgaggctgtggacagtacatttcctaccgctgccaagaaaaacgcaacacctactttgcagagtactggtatcaggcccagtgctgtcagtacgattattgcaactcctggtcaagcccccaactccagagctctctgccggagccccatgacaggcccctggccctgcctctgtctgactcccagattcagtggttctaccaggccctgaacctctccctgcccctccccaatttccatgctgggacggagcctgatggcctggaccccatggtcacactgtccctgaacctgggcttgtcttttgctgagctgcgccgcatgtacttgttcctcaatagttcaggacttttggttcttccccaggctggactcttgacacctcacccttcctgaattccacagtgcaaatatctttctgtaacaccctcagcatcctgcactgccctctctgaaaacacccacattctttggtcactgtgatttcttaggcctccgtctgttgtaccactagcatctatatgacttttgtgtaattttctctcttgaactctggtgctgtttttttgtttgtttgagacaaagtctcgctctgtcacccagggtggagtgcagtggcatgatctctgctcactacaacctccacctcccgggttccagcgattctcctgcctcagcctcccgagtagctgggactacaggcgtgcaccaccacgcctggctaattttttgtatttttagtagagacggggtttcaccatgttggtcaggctggtctcgaactcctgacctcgtaatctgccctcctcgacctcccaaagtgccgggattacaggtgtgagccactgtgcctggctgagctctggtgctgttcttccccctagaaaagaatctctagtgtggattctgcccagacaggctgacctgagaaaggcacagtggttcctccattccttccccatcatctgagtgttccagtatcccccatccctctcaatccagtcacctgcctattgacatctagctctgtttcccctgtcttgtccatgtctctaagacccagtaccagactgaactagcagcaagaaggacgaggaggccgggcatggtggctcacgccggtaatcccagcactttgggaggccgaggtgggcggatcacttgagattgggagtttgagaccagcctggccaacatggtaaaacccgctctctattaaaaatagaaaaatcagctgggtgtggtggcacacctctgtaatcccagctactcaggaggctgagacaggagaatcacttgaacccgggaggcagaggttgcagtgagccgagatcgcgccactgcactccagcctgggtgacacagtgagactccgtctccaaaaaaaaggatgaggaatagaattctgtgcagatgtcctgacttggcaattttgtgtccctgcctcactgtctccaccaacccccgcctgtcctagtgttgttctgcctcctgtcctctcttgctctcttgtcagtctctggcttcctcggccccatttcacttcactgagtcctgacacccatctccctaggggcctgtgagaggagagggaagggtctgttctgctcagctccatgtcccccattttcctccacaataaactgggactgggctaaaa

SEQ ID NO: 1435 - DNA, 3156 bp, Homo sapiens
  source 1..3156: mol_type = genomic DNA
tctaatgcacgacagattcctttcagacaggacaactgtgatatttcagttcctgattgtaaatacctcctaagcctgaagattcctttaaaaaaaaaccaataccaaagaagcctacaatgttggccttagccaaaattctgttgatttcaacgttgttttattcacttctatcggggagccatggaaaagaaaatcaagacataaacacaacacagaacattgcagaagtttttaaaacaatggaaaataaacctatttctttggaaagtgaagcaaacttaaactcagataaagaaaatataaccacctcaaatctcaaggcgagtcattcccctcctttgaatctacccaacaacagccacggaataacagatttctccagtaactcatcagcagagcattctttgggcagtctaaaacccacatctaccatttccacaagccctcccttgatccatagctttgtttctaaagtgccttggaatgcacctatagcagatgaagatcttttgcccatctcagcacatcccaatgctacacctgctctgtcttcagaaaacttcacttggtctttggtcaatgacaccgtgaaaactcctgataacagttccattacagttagcatcctctcttcagaaccaacttctccatctgtgacccccttgatagtggaaccaagtggatggcttaccacaaacagtgatagcttcactgggtttaccccttatcaagaaaaaacaactctacagcctaccttaaaattcaccaataattcaaaactctttccaaatacgtcagatccccaaaaagaaaatagaaatacaggaatagtattcggggccattttaggtgctattctgggtgtctcattgcttactcttgtgggctacttgttgtgtggaaaaaggaaaacggattcattttcccatcggcgactttatgacgacagaaatgaaccagttctgcgattagacaatgcaccggaaccttatgatgtgagttttgggaattctagctactacaatccaactttgaatgattcagccatgccagaaagtgaagaaaatgcacgtgatggcattcctatggatgacatacctccacttcgtacttctgtatagaactaacagcaaaaaggcgttaaacagcaagtgtcatctacatcctagccttttgacaaattcatctttcaaaaggttacacaaaattactgtcacgtggattttgtcaaggagaatcataaaagcaggagaccagtagcagaaatgtagacaggatgtatcatccaaaggttttctttcttacaatttttggccatcctgaggcatttactaagtagccttaatttgtattttagtagtattttcttagtagaaaatatttgtggaatcagataaaactaaaagatttcaccattacagccctgcctcataactaaataataaaaattattccaccaaaaaattctaaaacaatgaagatgactctttactgctctgcctgaagccctagtaccataattcaagattgcattttcttaaatgaaaattgaaagggtgctttttaaagaaaatttgacttaaagctaaaaagaggacatagcccagagtttctgttattgggaaattgaggcaatagaaatgacagacctgtattctagtacgttataattttctagatcagcacacacatgatcagcccactgagttatgaagctgacaatgactgcattcaacggggccatggcaggaaagctgaccctacccaggaaagtaatagcttctttaaaagtcttcaaaggttttgggaattttaacttgtcttaatatatcttaggcttcaattatttgggtgccttaaaaactcaatgagaatcatggtaaaaaaaaaaagttaaccaaagaatatacctgtacataatttgtacagttttaagttgttagataggaactggatttcttatgtattagacattattgctcaatcataatggaatagattctgcatccctaaatgtatgaaccataaggttaaaaaagatgaatggaaatatcaaacaactttttactgagcatcagtttcataatcaataatataagaagattaatttggattctagtatgtttcagtttgtttttaattaccaccttcctttggtagaaaaaatatgttccttgatgtaggaaagtctaggttttagagattagaggatgagatcaagagttaaattcctaaagaagcactgaatatatgaagagagcaaacaaatcaagtaccaacctagaggctttatttttgaattgattcatggtgtgtgtgtgtgtgtgtgtgtgtgtgtgtgtgtgtgtgtaacacagaaacagcttcagaaaataagggatagaaagtaatgaagaaagtacttaccccatattgccataaaaatagcaaagaagactgtccctccattatcgaacaaatatgtcacctgagtagaaaacaaacagaaatattagtcatgcaaattgattataataagccagtgaatactgtttgcactcaggtactatgattttttctcaaatagaatcatattattttatagtacagaaatattatatatgaattcctttcatgggtcttgcaacaatttcacatgatttttctcatggggagaggtgaagaaacaacattagccctcttctctcctctcttgattccctttataccccaccatcatttctgattataaataattctaccattctatggaagtatttgtgggtcacagattgtcaaactacttaatgaaagttgtatgaaattagtttttcaggtgaggcattcctagttgcaattcctgttagcaaaacttctaggagtggggaagttggaaaatgcaggattcttccagtgagccagcatttcccatagctaaccctattctcttagtctttcaaaatgtagaatgggtccaataatggctataagatgtaataaatcccatcttaatttgttttaaaagtttcataaatcactgaacacttatgaaacaaagtgttttttaatcagatatcaactgaaacttcataaaggatgcatagttttataatgttattgaatcaaattttaaggcttgtattgtttgattttaataaagtataaattcaattt

SEQ ID NO: 1436 - DNA, 989 bp, Homo sapiens
  source 1..989: mol_type = genomic DNA
acatgggccctgctggctgtgccttcacgctgctccttctgctggggatctcagtgtgtgggcaacctgtatactccagccgcgttgtaggtggccaggatgctgctgcagggcgctggccttggcaggtcagcctacactttgaccacaactttatctgtggaggttccctcgtcagtgagaggttgatactgacagcagcacactgcatacaaccgacctggactactttttcatatactgtgtggctaggatcgattacagtaggtgactcaaggaaacgtgtgaagtactacgtgtccaaaatcgtcatccatcccaagtaccaagatacaacggcagacgtcgccttgttgaaactgtcctctcaagtcaccttcacttctgccatcctgcctatttgcttgcccagtgtcacaaagcagttggcaattccacccttttgttgggtgaccggatggggaaaagttaaggaaagttcagatagagattaccattctgcccttcaggaagcagaagtacccattattgaccgccaggcttgtgaacagctctacaatcccatcggtatcttcttgccagcactggagccagtcatcaaggaagacaagatttgtgctggtgatactcaaaacatgaaggatagttgcaagggtgattctggagggcctctgtcgtgtcacattgatggtgtatggatccagacaggagtagtaagctggggattagaatgtggtaaatctcttcctggagtctacaccaatgtaatctactaccaaaaatggattaatgccactatttcaagagccaacaatctagacttctctgacttcttgttccctattgtcctactctctctggctctcctgcgtccctcctgtgcctttggacctaacactatacacagagtaggcactgtagctgaagctgttgcttgcatacagggctgggaagagaatgcatggagatttagtcccaggggcagataa

SEQ ID NO: 1437 - DNA, 730 bp, Homo sapiens; identical to SEQ ID NO: 1166
  source 1..730: mol_type = genomic DNA

SEQ ID NO: 1438 - DNA, 460 bp, Homo sapiens
  source 1..460: mol_type = genomic DNA
ttgccggggtgaggggcagccggaggagtccgagaggaagcggaggcgcgagctggaggcggcggctcccgtcggcctccggcaggactgagcgctgggaggccggaaggcgggcgcgcgcggcggagaggcgggcgggaggccgctcgggaccacggatgatgattagtggccctagatctgaatatgagcatattaatgaaaagtgccataaactgaaaaaccaaacatgagggtagcaggtgctgcaaagttggtggtagctgtggcagtgtttttactgacattttatgttatttctcaagtatttgaaataaaaatggatgcaagtttaggaaatctatttgcaagatcagcattggacacagctgcacgttctacaaagcctcccagatataagtgtgggatctcaaaagcttgccctgagaagcattttgcttttaaaatggcaagtggagca

SEQ ID NO: 1439 - DNA, 1220 bp, Homo sapiens
  source 1..1220: mol_type = genomic DNA
cacctggaggcggccccggacggggatggtcagcggctgctgccgtctggctcgcgagcgggacgctgtgagggcaccatggcgctgactcccgggtgggggtcctcggcggggccggtccggccggagctctggctgctgctgtgggcagccgcgtggcgcctgggtgcctcggcgtgccccgccctctgcacctgcaccggaaccacggtggactgccacggcacggggctgcaggccattcccaagaatatacctcggaacaccgagcgcctggaactcaatggcaacaacatcactcggatccataagaatgactttgcggggctcaagcagctgcgggtgctgcagctgatggagaaccagattggagcagtggaacgtggtgcttttgatgacatgaaggagctggagcggctggacttgagtgagaacgccatccaggccatccccaggaaagcttttcggggagctacggaccttaaaaatttacagctggacaagaaccagatcagctgcattgaggaaggggccttccgtgctctgcgggggctggaggtgctgaccctgaacaacaacaatatcaccaccatccccgtgtccagcttcaaccatatgcccaagctacggaccttccgcctgcactccaaccacctgttttgcgactgccacctggcctggctctcgcagtggctgaggcagcggccaaccatcgggctcttcacccagtgctcgggcccagccagcctgcgtggcctcaatgtggcagaggtccagaagagtgagttcagctgctcaggccagggagaagcggggcgcgtgcccacctgcaccctgtcctccggctcctgcccggccatgtgcacctgcagcaatggcatcgtggactgtcgtggaaaaggcctcactgccatcccggccaacctgcccgagaccatgacggagatacgcctggagctgaacggcatcaagtccatccctcctggagccttctcaccctacagaaagctacggaggatagacctgagcaacaatcagatcgctgagattgcacccgacgccttccagggcctccgctccctgaactcgctggtcctctatggaaacaagatcacagacctcccccgtggtgtgtttggaggcctatacaccctacagctcctgctcctgaatgccaacaagatcaactgcatccggcccgatgccttccaggacctgca

SEQ ID NO: 1440 - DNA, 882 bp, Homo sapiens
  source 1..882: mol_type = genomic DNA
gggggttgtacagaagaggtccggtttcttgaagcagctggaagtcctggatagttcccacctgaaagtctgtttgcaaaggcaatgcgcactcaggcaccagagggcagaggacagaagcttttcctcaaaggtgcaaaaggagcaactgtgttgaacaggggctcaagttccagggttttaaggtgcttggaactcccaggagcctggcaaaccttcatccagaacctcttcctcaagcaagacaaaaagctgctaagcactgctccctccgtctctgtgaagagaccagcttctaacagacggtgccgggctgaccccccatcatgccaggctggctcaccctccccacactctgccgcttccttctttgggccttcaccatcttccacaaagcccaaggagacccagcatcccacccgggcccccactacctcctgccccccatccacgaggtcattcactctcatcgtggggccacggccacgctgccctgcgtcctgggcaccacgcctcccagctacaaggtgcgctggagcaaggtggagcctggggagctccgggaaacgctgatcctcatcaccaacggactgcacgcccgggggtatgggcccctgggagggcgcgccaggatgcggagggggcatcgactagacgcctccctggtcatcgcgggcgtgcgcctggaggacgagggccggtaccgctgcgagctcatcaacggcatcgaggacgagagcgtggcgctgaccttgagcttggagggtgtggtgtttccgtaccaacccagccggggccggtaccagttcaattactacgaggcgaagcaggcgtgcgaggagcaggacggacgcctggccacctactcccagctctaccagg

SEQ ID NO: 1441 - DNA, 736 bp, Homo sapiens
  source 1..736: mol_type = genomic DNA
ggtgagcggcagtagccggttatgacgactccctcctctggaacagccgccgtctcctccgcctcctcctcggtagttcacggctgccccggctccaggcctgtggaaatcgaatcaagggtttctggagtggagtgattccagctgctttgagctgaaggaaaagtagcctggccagtaaagcgtccgtgtgctggaggagtgcagccacccatcccggcgggccttgcaggacgaccgacaccaggaaggctttgtgccaggcccagcagccacccccagccgccttatgcaagttttagagacctgaaacatcacagaagcttctgagtggttctgaagattcaagaggtttgcaggttgctatgttaatgttgtttgtctttggagtcttacttcatgaagtctcactgagtggtcagaatgaagctcctcctaatactcacagcattccaggcgaacctctgtataactatgccagcatccgcttgccagaggagcacattcccttctttttgcacaacaataggcatattgccactgtctgtaggaaagactctctttgtccatataagaaacacctagagaagctaaagtactgctggggttatgagaaatcctgcaaaccagagttcaggtttggttacccagtttgcagctatgtcgacatgggatggacggacactcttgagtcagctgaggacatattttggaaacaagctgactttggatatgc

SEQ ID NO: 1442 - DNA, 5859 bp, Homo sapiens
  source 1..5859: mol_type = genomic DNA
atgcctgctctgggcccagctcttctccaggctctctgggccgggtgggtcctcaccctccagccccttccaccaactgcattcactcccaatggcacgtatctgcagcacctggcaagggaccccacctcaggcaccctctacctgggggctaccaacttcctgttccagctgagccctgggctgcagctggaggccacagtgtccaccggccctgtgctagacagcagggactgcctgccacctgtgatgcctgatgagtgcccccaggcccagcctaccaacaacccgaatcagctgctcctggtgagcccaggggccctggtggtatgcgggagcgtgcaccagggggtctgtgaacagcggcgcctggggcagctcgagcagctgctgctgcggccagagcggcctggggacacacaatatgtggctgccaatgatcctgcggtcagcacggtggggctggtagcccagggcttggcaggggagcccctcctgtttgtggggcgaggatacaccagcaggggtgtggggggtggcattccacccatcacaacccgggccctgtggccgcccgacccccaagctgccttctcctatgaggagacagccaagctggcagtgggccgcctctccgagtacagccaccacttcgtgagtgcctttgcacgtggggccagcgcctacttcctgttcctgcggcgggacctgcaggctcagtctagagcttttcgtgcctatgtatctcgagtgtgtctccgggaccagcactactactcctatgtggagttgcctctggcctgcgaaggtggccgctacgggctgatccaggctgcagctgtggccacgtccagggaggtggcgcatggggaggtgctctttgcagctttctcctcggctgcaccccccactgtgggccggcccccatcggcggctgctggggcatctggagcctctgccctctgtgccttccccctggatgaggtggaccggcttgctaatcgcacgcgagatgcctgctacacccgggagggtcgtgctgaggatgggaccgaggtggcctacatcgagtatgatgtcaattctgactgtgcacagctgccagtggacaccctggatgcttatccctgtggctcagaccacacgcccagccccatggccagccgggtcccgctggaagccacaccaattctggagtggccagggattcagctaacagctgtggcagtcaccatggaagatggacacaccatcgctttcctgggtgatagtcaagggcagctgcacagggtctacttgggcccagggagcgatggccacccatactccacacagagcatccagcaggggtctgcagtgagcagagacctcacctttgatgggacctttgagcacctgtatgtcatgacccagagcacacttctgaaggttcctgtggcttcctgtgctcagcacctggactgtgcatcttgccttgctcacagggacccatactgtgggtggtgcgtgctccttggcaggtgcagtcgccgttctgagtgctcgaggggccagggcccagagcagtggctatggagcttccagcctgagctgggctgtctgcaagtggcagccatgagtcctgccaacatcagccgagaggagacgagggaggttttcctatcagtgccagacctgccacccctgtggccaggggagtcatattcctgccactttggggaacatcagagtcctgccctgctgactggttctggtgtgatgtgcccctccccagaccctagtgaggccccagtgctgccgagaggagccgactacgtatccgtgagcgtggagctcagatttggcgctgttgtgatcgccaaaacttccctctctttctatgactgtgtggcggtcactgaactccgcccatctgcgcagtgccaggcctgtgtgagcagccgctgggggtgtaactggtgtgtctggcagcacctgtgcacccacaaggcctcgtgtgatgctgggcccatggttgcaagccatcagagcccgcttgtctccccagaccctcctgcaagaggtgatggagactcagcagagcttgagggccctcccgcccccctcatcctcccgtccagcctcgactaccagtatgacacccccgggctctgggagctggaagaggcgaccttgggggcaagctcctgcccctgtgtggagagcgttcagggctccacgttgatgccggtccatgtggagcgggaaatccggctgctaggcaggaacctgcaccttttccaggatggcccaggagacaatgagtgtgtgatggagctggagggcctcgaggtggtggttgaggcccgggtcgagtgtgagccacctccagatacccagtgccatgtcacctgccagcagcaccagctcagctatgaggctctgcagccggagctccgtgtggggctgtttctgcgtcgggccggccgtctgcgtgtggacagtgctgaggggctgcatgtggtactgtatgactgttccgtgggacatggagactgcagccgctgccaaactgccatgccccagtatggctgtgtgtggtgtgagggggagcgtccacgttgtgtgacccgggaggcctgtggtgaggctgaggctgtggccacccagtgcccagcgcccctcatccactcggtggagccactgactgggcctgtagacggaggcacccgtgtcaccatcaggggctccaacctgggccagcatgtgcaggatgtgctgggcatggtcacggtggctggagtgccctgtgctgtggatgcccaggagtacgaggtctccagcagcctcgtgtgcatcaccggggccagtggggaggaggtggccggcgccacagcggtggaggtgccgggaagaggacgtggtgtctcagaacacgactttgcctaccaggatccgaaggtccattccatcttcccggcccgcggccccagagctgggggcacccgtctcaccctgaatggctccaagctcctgactgggcggctggaggacatccgagtggtggttggagaccagccttgtcacttgctgccggagcagcagtcagaacaactgcggtgtgagaccagcccacgccccacgcctgccacgctccctgtggctgtgtggtttggggccacggagcggaggcttcaacgcggacagttcaagtataccttggaccccaacatcacctctgctggccccaccaagagcttcctcagtggaggacgtgagatatgcgtccgtggccagaatctggacgtggtacagacgccaagaatccgggtgaccgtggtctcgagaatgctgcagcccagccaggggcttggacggaggcgtcgcgtggtcccggagacggcatgttcccttggaccctcctgcagtagccagcaatttgaggagccgtgccatgtcaactcctcccagctcatcacgtgccgcacacctgccctcccaggcctgcctgaggacccctgggtccgggtggaatttatccttgacaacctggtctttgactttgcaacactgaaccccacacctttctcctatgaggccgaccccaccctgcagccactcaaccctgaggaccccaccatgccattccggcacaagcctgggagtgtgttctccgtggagggggagaacctggaccttgcaatgtccaaggaggaggtggtggctatgataggggatggcccctgtgtggtgaagacgctgacgcggcaccacctgtactgcgagccccccgtggagcagcccctgccacggcaccatgccctccgagaggcacctgactctttgcctgagttcacggtgcagatggggaacttgcgcttctccctgggtcacgtgcagtatgacggcgagagccctggggcttttcctgtggcagcccaggtgggcttgggggtgggcacctctcttctggctctgggtgtcatcatcattgtcctcatgtacaggaggaagagcaagcaggccctgagggactataagaaggttcagatccagctggagaatctggagagcagtgtgcgggaccgctgcaagaaggaattcacagacctcatgactgagatgaccgatctcaccagtgacctcctgggcagcggcatccccttcctcgactacaaggtgtatgcggagaggatcttcttccctgggcaccgcgagtcgcccttgcaccgggacctgggtgtgcctgagagcagacggcccactgtggagcaagggctggggcagctctctaacctgctcaacagcaagctcttcctcaccaagttcatccacacgctggagagccagcgcaccttttcagctcgggaccgtgcctacgtggcatctctgctcaccgtggcactgcatgggaagcttgagtatttcactgacatcctccgcactctgctcagtgacctggttgcccagtatgtggccaagaaccccaagctgatgctgcgcaggacagagactgtggtggagaagctgctcaccaactggatgtccatctgtctgtataccttcgtgagggactccgtaggggagcctctgtacatgctctttcgagggattaagcaccaagtggataaggggccagtggacagtgtgacaggcaaggccaaatacaccttgaacgacaaccgcctgctcagagaggatgtggagtaccgtcccctgaccttgaatgcactattggctgtggggcctggggcaggagaggcccagggcgtgcccgtgaaggtcctagactgtgacaccatctcccaggcaaaggagaagatgctggaccagctttataaaggagtgcctctcacccagcggccagaccctcgcacccttgatgttgagtggcggtctggggtggccgggcacctcattctttctgacgaggatgtcacttctgaggtccagggtctgtggaggcgcctgaacacactgcagcattacaaggtcccagatggagcaactgtggccctcgtcccctgcctcaccaagcatgtgctccgggaaaaccaggattatgtccctggagagcggaccccaatgctggaggatgtagatgaggggggcatccggccctggcacctggtgaagccaagtgatgagccggagccgcccaggcctcggaggggcagccttcggggcggggagcgtgagcgcgccaaggccatccctgagatctacctgacccgcctgctgtccatgaagggcaccctgcagaagttcgtggatgacctgttccaggtgattctcagcaccagccgccccgtgccgctcgctgtgaagtacttctttgacctgctggatgagcaggcccagcagcatggcatctccgaccaggacaccatccacatctggaagaccaacagcttgcctctgaggttctggatcaatataataaaaaacccgcagtttgtgttcgacgtgcaaacatctgataacatggatgcggtgctccttgtcattgcacagaccttcatggacgcctgcaccctggccgaccacaagctgggccgggactccccgatcaacaaacttctgtatgcacgggacattccccggtacaagcggatggtggaaaggtactatgcagacatcagacagactgtcccagccagcgaccaagagatgaactctgtcctggctgaactgtcctggaactactccggagacctcggggcgcgagtggccctgcatgaactctacaagtacatcaacaagtactatgaccagatcatcactgccctggaggaggatggcacggcccagaagatgcagctgggctatcggctccagcagattgcagctgctgtggaaaacaaggtcacagatctatag

SEQ ID NO: 1443 - DNA, 1344 bp, Homo sapiens
  source 1..1344: mol_type = genomic DNA
gtaaaatgtgtttttcaaagtactgagaggttgatgggactgttcgattagctcctctgagaagaagagaaaaggttcttggacctctccctgtttcttccttagaataatttggatgggatttgtgatgcaggaaagcctaagggaaaaagaatattcattctgtgtggtgaaaattttttgaaaaaaaaattgccttcttcaaacaagggtgtcattctgatatttatgaggactgttgttctcactatgaaggcatctgttattgaaatgttccttgttttgctggtgactggagtacattcaaacaaagaaacggcaaagaagattaaaaggcccaagttcactgtgcctcagatcaactgcgatgtcaaagccggaaagatcatcgatcctgagttcattgtgaaatgtccagcaggatgccaagaccccaaataccatgtttatggcactgacgtgtatgcatcctactccagtgtgtgtggcgctgccgtacacagtggtgtgcttgataattcaggagggaaaatacttgttcggaaggttgctggacagtctggttacaaagggagttattccaacggtgtccaatcgttatccctaccacgatggagagaatcctttatcgtcttagaaagtaaacccaaaaagggtgtaacctacccatcagctcttacatactcatcatcgaaaagtccagctgcccaagcaggcaagtgctcacgtgtgattgaatctaaaccttctgagtccatgaacacgcgacgtgttttgggagatagcggagaaattaacatcttaaccggtcaagctccactggctctggcaatattttaacagatgccaggaacatgggcacagaaatcaatgagatcagatggctggggctgaagaatgaaagctttattttttgtttttgcaattccgagattgtgtctctatatttgtgtcattttcattcagattgactgttgccttgagttttaatgtattgttgctttagaaaatgacatgacattctgtccggaaatgtttcctggcagctaaaaggaaaaagctgtatctacttagatatgaaatgaagagaagcaaagagaacgaggtggtttatgtgataacagcaagctgctcatccaaataacccaggccaaaaatacactgtctacaaggttgtgccaactcagctttcatgtgaaccacaaaagggagtatcggtagacctcaggccaagaaaatacctttttccaggtttctgtgttaaatcaagaactgtactatgcattattgtatctccagaggtgttttgatttcccacacaaagagaaactgtgagtcgcttta

SEQ ID NO: 1444 - DNA, 2727 bp, Homo sapiens
  source 1..2727: mol_type = genomic DNA
cagctgcctgcctgccaggggtagtgagccggctgagaggcatggagacgcaggaacttcggggggccctggctcttctcctcctttgctttttcacatctgccagtcaggatctgcaggtaattgacctgctgactgtgggcgagtctcggcagatggtagctgtggcagagaagatccggacagccttgctcactgctggggacatctacctcttatccaccttccgcctgccccccaagcagggtggtgtcctctttggcctctattctcgccaagacaacactcgatggctggaggcctctgttgtaggcaagatcaacaaagtgaccaatgcactgcactccattctaggggagcagaccaaggcgctggtcacccaactcaccctcttcaaccagatcctggtggagctgcgggatgatatacgagaccaggtgaaggaaatgtccctgatccgaaacaccattatggagtgtcaggtgtgcggcttccatgagcagcgttcccactgcagccccaatccctgcttccgaggtgtggactgcatggaagtgtacgagtacccaggctaccgctgtgggccctgcccccctggcctgcagggcaacggcacccactgcagtgacatcaatgagtgtgctcacgctgacccctgtttcccgggctccagctgcatcaacaccatgcccggcttccactgtgaggcctgtcctcgagggtacaagggcacacaggtgtctggtgtgggcattgactatgcccgggccagcaaacaggtctgcaatgacatcgatgaatgcaacgatggcaacaatggtggctgtgacccaaactccatctgcaccaacactgtgggctctttcaagtgtggtccctgccgcctgggtttcctgggcaaccagagccagggctgcctcccagcccggacctgccacagcccagcccacagcccctgccacatccatgctcactgtctctttgaacgcaatggtgcagtgtcctgccagtgtaacgtgggctgggctgggaatgggaacgtgtgtgggactgacacagacatcgatggctacccagaccaagcactgccctgcatggacaacaacaaacactgcaaacaggacaactgccttttgacacccaactctgggcaggaagatgctgataatgatggtgtgggggaccagtgtgatgatgatgctgatggggatgggatcaagaatgttgaggacaactgccggctgttccccaacaaagaccagcagaactcagatacagattcatttggtgatgcctgtgacaattgccccaacgttcccaacaatgaccagaaggacacagatggcaatggggaaggagatgcctgtgacaacgacgtggatggggatggcatccccaatggattggacaattgccctaaagtccccaacccactacagacagacagggatgaggacggggtgggagatgcttgcgacagctgccctgaaatgagcaatcctacccagacagatgcagacagcgacctggtgggggatgtctgtgatactaatgaagacagcgatggggatgggcatcaggacaccaaggacaactgcccacagctgccaaatagctcccagctggactctgataacgatggacttggagatgagtgtgatggggatgatgacaatgatggcatcccagattatgtgcctcctggtcccgataactgccgcctggtacccaatcccaatcagaaggactcagatggcaatggcgttggtgatgtgtgtgaggatgactttgacaatgatgctgtggtcgaccccctggatgtgtgtcctgaaagtgcagaggtaacgcttacggattttcgggcctatcagaccgtcgtcctggatcctgagggtgatgctcagattgacccaaactgggttgtgctcaaccagggcatggaaatcgttcagaccatgaacagtgaccctggcttggcagttggatacacggccttcaatggtgtggactttgaaggcaccttccatgtgaacacagtgactgatgatgactacgcaggctttctcttcagttatcaagacagtggccgcttctacgtagtcatgtggaagcagaccgagcagacctactggcaggctacacccttccgggcggttgcccagcccgggctgcagctcaaggcagtgacatcagtgtctggcccaggtgagcacctccgaaatgccctgtggcatactggccacacccctgatcaggtacgactgctgtggacagacccacgaaatgtgggctggcgggacaagacctcctatcgctggcagcttctgcaccggcctcaagttggctacattcgggtgaagctctatgagggaccccagcttgtggcggattctggggtgatcattgacacatccatgcgaggggggcgtcttggtgtattctgcttctcccaagaaaacataatttggtccaatctccagtatcgatgcaatgacacagtgcctgaggactttgagccattccggaggcagctgctccagggaagggtgtgaggaggaggccaccagattcagaattcagaattttagaccctttggccttggggtccatcctggagaccctgaggtctaagctacagcccctcagccaaccacagacccttctctggctcccaaaaggagttcagtcccagaggggtggtcaccccacccttcaggggatgagaag

SEQ ID NO: 1445 - DNA, 2115 bp, Homo sapiens
  source 1..2115: mol_type = genomic DNA
gactttgagcgtccggcggtcgcagagccaggaggcggaggcgcgcgggccagcctgggccccagcccacaccttcaccagggcccaggagccaccatgtggcgatgtccactggggctactgctgttgctgccgctggctggccacttggctctgggtgcccagcagggtcgtgggcgccgggagctagcaccgggtctgcacctgcggggcatccgggacgcgggaggccggtactgccaggagcaggacctgtgctgccgcggccgtgccgacgactgtgccctgccctacctgggcgccatctgttactgtgacctcttctgcaaccgcacggtctccgactgctgccctgacttctgggacttctgcctcggcgtgccacccccttttcccccgatccaaggatgtatgcatggaggtcgtatctatccagtcttgggaacgtactgggacaactgtaaccgttgctggcaggctgggaaccacagcgccttctggggcatgaccctggatgagggcattcgctaccgcctgggcaccatccgcccatcttcctcggtcatgaacatgcatgaaatttatacagtgctgaacccaggggaggtgcttcccacagccttcgaggcctctgagaagtggcccaacctgattcatgagcctcttgaccaaggcaactgtgcaggctcctgggccttctccacagcagctgtggcatccgatcgtgtctcaatccattctctgggacacatgacgcctgtcctgtcgccccagaacctgctgtcttgtgacacccaccagcagcagggctgccgcggtgggcgtctcgatggtgcctggtggttcctgcgtcgccgaggggtggtgtctgaccactgctaccccttctcgggccgtgaacgagacgaggctggccctgcgcccccctgtatgatgcacagccgagccatgggtcggggcaagcgccaggccactgcccactgccccaacagctatgttaataacaatgacatctaccaggtcactcctgtctaccgcctcggctccaacgacaaggagatcatgaaggagctgatggagaatggccctgtccaagccctcatggaggtgcatgaggacttcttcctatacaagggaggcatctacagccacacgccagtgagccttgggaggccagagagataccgccggcatgggacccactcagtcaagatcacaggatggggagaggagacgctgccagatggaaggacgctcaaatactggactgcggccaactcctggggcccagcctggggcgagaggggccacttccgcatcgtgcgcggcgtcaatgagtgcgacatcgagagcttcgtgctgggcgtctggggccgcgtgggcatggaggacatgggtcatcactgaggctgcgggcaccacgcggggtccggcctgggatccaggctaagggccggcggaagaggccccaatggggcggtgaccccagcctcgcccgacagagcccggggcgcaggcgggcgccagggcgctaatcccggcgcgggttccgctgacgcagcgccccgcctgggagccgcgggcaggcgagactggcggagcccccagacctcccagtggggacggggcagggcctggcctgggaagagcacagctgcagatcccaggcctctggcgcccccactcaagactaccaaagccaggacacctcaagtctccagccccactaccccaccccactcctgtattcttttttttttttttttagacagggtcttgctccgttgcccaggttggagtgcagtggcccatcagggctcactgtaacctccgactcctgggttcaagtgaccctcccacctcagcctctcaagtagctgggactacaggtgcaccaccacacctggctaatttttgtattttttgtaaagaggggggtctcactgtgttgcccaggctggtctcgaactcctgggctcaagcggtccacctgcctccgcctcccaaagtgctgggattgcaggcatgagccactgcacccagccctgtattcttattcttcagatatttatttttcttttcactgttttaaaataaaaccaaagtattgataac

SEQ ID NO: 1446 - DNA, 1417 bp, Homo sapiens
  source 1..1417: mol_type = genomic DNA
gtgcgcggcgggcgcgcgcaggctccgtaaccgaaccctgagccgcctgcgcggatcggcgtccgcagcgggcggctgctgaggggaaattcacgttacctctccacgtgccgaccaaggctctgagacccccagctgccttgaggtgcagtgttggggatccagagccatgtcggacctgctactactgggcctgattgggggcctgactctcttactgctgctgacgctgctggcctttgccgggtactcagggctactggctggggtggaagtgagtgctgggtcaccccccatccgcaacgtcactgtggcctacaagttccacatggggctctatggtgagactgggcggcttttcactgagagctgcagcatctctcccaagctccgctccatcgctgtctactatgacaacccccacatggtgccccctgataagtgccgatgtgccgtgggcagcatcctgagtgaaggtgaggaatcgccctcccctgagctcatcgacctctaccagaaatttggcttcaaggtgttctccttcccggcacccagccatgtggtgacagccaccttcccctacaccaccattctgtccatctggctggctacccgccgtgtccatcctgccttggacacctacatcaaggagcggaagctgtgtgcctatcctcggctggagatctaccaggaagaccagatccatttcatgtgcccactggcacggcagggagacttctatgtgcctgagatgaaggagacagagtggaaatggcgggggcttgtggaggccattgacacccaggtggatggcacaggagctgacacaatgagtgacacgagttctgtaagcttggaagtgagccctggcagccgggagacttcagctgccacactgtcacctggggcgagcagccgtggctgggatgacggtgacacccgcagcgagcacagctacagcgagtcaggtgccagcggctcctcttttgaggagctggacttggagggcgaggggcccttaggggagtcacggctggaccctgggactgagcccctggggactaccaagtggctctgggagcccactgcccctgagaagggcaaggagtaacccatggcctgcaccctcctgcagtgcagttgctgaggaactgagcagactctccagcagactctccagccctcttcctccttcctctgggggaggaggggttcctgagggacctgacttcccctgctccaggcctcttgctaagccttctcctcactgccctttaggctcccagggccagaggagccagggactattttctgcaccagcccccagggctgccacccctgttgtgtctttttttcagactcacagtggagcttccaggacccagaataaagccaatgatttacttgtttcacctgg

SEQ ID NO: 1447 - DNA, 387 bp, Homo sapiens
  source 1..387: mol_type = genomic DNA
actaggcagaggccgcccgcggtcaggccaggccgggtccaattaggggactcacagcctgccccgctgtgcaccccgaggaggcccggcccctgtgtccaatccggaagtcgcagggaagtggggaggtcaggatggtggcgcccgcggctcgggtcttcctccgggcagtgcgcgcggctctcacttccacggtcccggacctgctctgcctcctggcccgaggctccccgcgtggcctcgcgtctggtcgcctacccctcgcggtccactccgcccagcatggacctggatccggggcgccttggttgcgaattgccaggagggccctgagccaaagaatttagaacgagtctacgtggacacgcaagtttcagcgagcgggga

SEQ ID NO: 1448 - DNA, 969 bp, Homo sapiens
  source 1..969: mol_type = genomic DNA
gctctcgccgctgctgccggagccgaagcagagaaggcagcgggtcccgtgaccgtcccgagagccccgcgctcccgaccagggggcgggggcggccccggggagggcggggcaggggcggggggaagaaagggggttttgtgctgcgccgggagggccggcgccctcttccgaatgtcctgcggccccagcctctcctcacgctcgcgcagtctccgccgcagtctcagctgcagctgcaggactgagccgtgcacccggaggagacccccggaggaggcgacaaacttcgcagtgccgcgacccaaccccagccctggcctgcagcatggcccagctgttcctgcccctgctggcagccctggtcctggcccaggctcctgcagctttagcagatgttctggaaggagacagctcagaggaccgcgcttttcgcgtgcgcatcgcgggcgacgcgccactgcagggcgtgctcggcggcgccctcaccatcccttgccacgtccactacctgcggccaccgccgagccgccgggctgtgctgggctctccgcgggtcaagtggactttcctgtcccggggccgggaggcagaggtgctggtggcgcggggagtgcgcgtcaaggtgaacgaggcctaccggttccgcgtggcactgcctgcgtacccagcgtcgctcaccgacgtctccctggcgctgagcgagctgcgccccaacgactcaggtatctatcgctgtgaggtccagcacggcatcgatgacagcagcgacgctgtggaggtcaaggtcaaaggggtcgtctttctctaccgagagggctctgcccgctatgctttctccttttctggggcccaggaggcctgtgcccgcattggagcccacatcgccaccccggagcagctctatgccgcctaccttgggggctatgagcaatgtgatgctggctggctgtcggatcagaccgtgag

SEQ ID NO: 1449 - DNA, 451 bp, Homo sapiens
  source 1..451: mol_type = genomic DNA
ggggtgtagaaacaggcctgttaaggagaggccaccgggacttcagtgtctcctccatcccaggagcgcagtggccactatggggtctgggctgccccttgtcctcctcttgaccctccttggcagctcacatggaacaggaccgggtatgactttgcaactgaagctgaaggagtcttttctgacaaattcctcctatgagtccagcttcctggaattgcttgaaaagctctgcctcctcctccatctcccttcagggaccagcgtcaccctccaccatgcaagatctcaacaccatgttgtctgcaacacatgacagccattgaagcctgtgtccttcttggcccaggcttttgggccggggatgcaggaggcaggccccgaccctgtctttcagcaggcccccaccctcctgagtggcaataaataaaattcggtatgctgaattcaa

SEQ ID NO: 1450 - DNA, 1155 bp, Homo sapiens
  source 1..1155: mol_type = genomic DNA
ccggccctccgccgccgcgcacgtgagcggcaccaggaagctggctgggcgcagccttccctgaggctcgctggcaccggccgcacgcgtccatcccgggcctctgagcggagggggagccgaggctagagggagggcgcagtctgcccaaggtcagcggcagcggcagtttctgggcgccaagtgtgattggagtactccaggaagaggggcgtgaccagagctctagcgaagagacctgacattgtaaagctaggtttggcttctgatttccacagggggtttgagaatgggacgagggtgctttagagggaccggtaggctttccctgaggacggtaatcagggcatgatggttggctcagtggttatttcctgggcaggggtgactgttctttcagctcccagcactggagcgctcggcccctgccgcactggatgccagcagttactaaaagtgagcctggcatttcagctgccttgaggtgcagtgttggggatccagagccatgtcggacctgctactactgggcctgattgggggcctgactctcttactgctgctgacgctgctggcctttgccgggtactcagggctactggctggggtggaagtgagtgctgggtcaccccccatccgcaacgtcactgtggcctacaagttccacatggggctctatggtgagactgggcggcttttcactgagagctgcagcatctctcccaagctccgctccatcgctgtctactatgacaacccccacatggtgccccctgataagtgccgatgtgccgtgggcagcatcctgagtgaaggtgaggaatcgccctcccctgagctcatcgacctctaccagaaatttggcttcaaggtgttctccttcccggcacccagccatgtggtgacagccaccttcccctacaccaccattctgtccatctggctggctacccgccgtgtccatcctgccttggacacctacatcaaggagcggaagctgtgtgcctatcctcggctggagatctaccaggaagaccagatccatttcatgtgcccactggcacggcagggagacttctatgtgcctgagatgaaggagacagagtggaaatggcgggggcttgtggaggccattgacacccaggtggatggcac

SEQ ID NO: 1451 - DNA, 730 bp, Homo sapiens; identical to SEQ ID NO: 1166
  source 1..730: mol_type = genomic DNA

SEQ ID NO: 1452 - DNA, 568 bp, Homo sapiens
  source 1..568: mol_type = genomic DNA
actgcctgtaaagccctcgcatgagaggccagcctgctagggaaatccaggaatctgcaacaaaaacgatgacagtctgaaatactctctggtgccaacctccaaattctcgtctgtcacttcagacccccactagttgacagagcagcagaatttcaactccagtagacttgaatatgcctctgggcaaagaagcagagctaacgaggaaagggatttaaagagtttttcttgggtgtttgtcaaacttttattccctgtctgtgtgcagaggggattcaacttcaatttttctgcagtggctctgggtccagccccttacttaaagttattcaatctcctgagcctaacagcaatgtagaaacggaactttttgcttttccaaaagatctggaaagcatgaagactgggctttttttcctatgtctcttgggaactgcagctgcaatcccgacaaatgcaagattattatctgatcattccaaaccaactgctgaaacggtagcacctgacaacactgcaatccccagtttaagggctgaagctgaagaaaatgaaaaagaaacag

SEQ ID NO: 1453 - DNA, 2734 bp, Homo sapiens
  source 1..2734: mol_type = genomic DNA
accaattgggacatcacatccctggctctgggttagaaagctgacagtccttgatcctgtggccactgccccatcattcctgctcctgaggactcagtctcatggctgtggcagaggtgtccaggacctgcctgctcacggttcgtgtcctgcaggcccatcgcctaccctctaaggacctagtgaccccctctgactgctacgtgactctctggctgcccacggcctgcagccacaggctccagacacgcacggtcaagaacagcagtagccctgtctggaaccagagctttcacttcaggatccacaggcagctcaagaatgtcatggaactgaaagtctttgaccaggacctggtgaccggagatgaccctgtgttgtcagtactgtttgatgcggggactctgcgggctggggagttccggcgcgagagcttctcactgagccctcagggtgaggggcgcctggaagttgaatttcgcctgcagagtctggctgaccgtggcgagtggctcgtcagcaatggcgttctggtggcccgggagctctcctgcttgcacgttcaactggaggagacaggagaccagaagtcctcagagcacagagttcagcttgtggttcctgggtcctgtgagggtccgcaggaggcctctgtgggcactggcaccttccgcttccactgcccagcctgctgggagcaggagctgagtattcgcctgcaggatgcccccgaggagcaactaaaggcgccactgagtgccctgccctctggtcaagtggtgaggcttgtcttccccacgtcccaggagcccctgatgagagtggagctgaaaaaagaagcaggactgagggagctggccgtgcgactgggcttcgggccctgtgcagaggagcaggccttcctgagcaggaggaagcaggtggtggccgcggccttgaggcaggccctgcagctggacggagacctgcaggaggatgagatcccagtggtagctattatggccactggtggtgggatccgggcaatgacttccctgtatgggcagctggctggcctgaaggagctgggcctcttggattgcgtctcctacatcaccggggcctcgggctccacctgggccttggccaacctttatgaggacccagagtggtctcagaaggacctggcagggcccactgagttgctgaagacccaggtgaccaagaacaagctgggtgtgctggcccccagccagctgcagcggtaccggcaggagctggccgagcgtgcccgcttgggctacccaagctgcttcaccaacctgtgggccctcatcaacgaggcgctgctgcatgatgagccccatgatcacaagctctcagatcaacgggaggccctgagtcatggccagaaccctctgcccatctactgtgccctcaacaccaaagggcagagcctgaccacttttgaatttggggagtggtgcgagttctctccctacgaggtcggcttccccaagtacggggccttcatcccctctgagctctttggctccgagttctttatggggcagctgatgaagaggcttcctgagtcccgcatctgcttcttagaaggtatctggagcaacctgtatgcagccaacctccaggacagcttatactgggcctcagagcccagccagttctgggaccgctgggtcaggaaccaggccaacctggacaaggagcaggtcccccttctgaagatagaagaaccaccctcaacagccggcaggatagctgagtttttcaccgatcttctgacgtggcgtccactggcccaggccacacataatttcctgcgtggcctccatttccacaaagactactttcagcatcctcacttctccacatggaaagctaccactctggatgggctccccaaccagctgacaccctcggagccccacctgtgcctgctggatgttggctacctcatcaataccagctgcctgcccctcctgcagcccactcgggacgtggacctcatcctgtcattggactacaacctccacggagccttccagcagttgcagctcctgggccggttctgccaggagcaggggatcccgttcccacccatctcgcccagccccgaagagcagctccagcctcgggagtgccacaccttctccgaccccacctgccccggagcccctgcggtgctgcactttcctctggtcagcgactccttccgggagtactcggcccctggggtccggcggacacccgaggaggcggcagctggggaggtgaacctgtcttcatcggactctccctaccactacacgaaggtgacctacagccaggaggacgtggacaagctgctgcacctgacacattacaatgtctgcaacaaccaggagcagctgctggaggctctgcgccaggcagtgcagcggaggcggcagcgcaggccccactgatggccggggcccctgccacccctaactctcattcattccctggctgctgagttgcaggtgggaactgtcatcacgcagtgcttcagagcctcgggctcaggtggcacggtcccagggtccaggctgagggctgggagctcccttgcgcctcagcagtttgcagtggggtaaggaggccaagcccatttgtgtaatcacccaaaaccccccggcctgtgcctgttttcccttctgcgctaccttgagtagttggagcacttgatacatcacagactcatacaaatgtg

SEQ ID NO: 1454 - DNA, 2240 bp, Homo sapiens
  source 1..2240: mol_type = genomic DNA
gcagttcccgggcgaggcagttgactgccccacaacgagctcgggcctcacccggatggcggctgcgacgcgcggctgccggccctggggctcgctcctcgggctgctcgggctggtctcggccgcggccgccgcctgggacctggcttccctgcgctgcaccttgggcgccttttgcgaatgcgacttccggcccgacttgccggaaggatctgaagagctgggtccaagggaacctcactgcctgtggccgctccctcttcctcttcgatgagatggacaagatgcccccaggcctgatggaagtcctgcggcctttcctgggctcctcctgggtggtatacgggaccaattaccgcaaagccatcttcatcttcatcaggtggggcccggctttgcagtgggcacagtgggggggccacttctcagaggttcagctctacagccttagcctgtgctcccagcagaatccagttccccatgggcttagctgggctttcccagtgccctccgccactctcagagatgacattgtcattccgcctggttgatttccctttggacattctcagcaaattctgggctcagtctttttgatcgccacttctttgtggaagccctgccaggtcaagaagttttccctcttttgtggtgaggaggacacaggcctgggaaaaataggaacagagttcttgtcctttagtcccagctctcagaatcctcgctgtgtttcctcaggcagcatggctccgcctctctgagcctctgtctctgcttctgaacagcggggccaataatgatgccccgatgccttcctggaagttcagtgagggaaagtcagttgagggacacaaaagtgttttgtaaactataaagtacgtggcatgtgtaggtgaattacaggggccatggatgtggacaccatggagggggaagtggagcgttttcagtggagttggctcctccccgcactgagccatgttcctatgtcaggtggcagcggggaagcgagggtccaatcctgccctgcgctagtcctcatctgagtctcagcctgggtcccccatggttttagcaacacgggtggcaagcagatcaaccaggtggcattggaggcgtggcgcagccggcgggaccgcgaggagatcctcctgcaggagctggagccggtcatctcccgcgcggtgctggacaacccgcaccgtgagtctggctcagcagccccctcccgggcagcttcaccccacacccaggggccaggctctcccggggtctcatgctttgcccactgacccggcagttctgagcctggctttggcactcccagctttgtgactttgggtgagccttacagcccctgagtcctacacccagaaggcggctgagggaactgaggccagcatttttcctcctgcccctgggggtttggggccggcttctcccctcttgtgaagcacaaagtcccctccccacctacccttcctgcagatggcttctcaaactcgggcatcatggaagagcgcctcctagacgcagtggtgcccttcctcccgctccagcggcaccacgtccggcactgcgtgctcaacgagctggcccagctgggcctggagccaagggatgaggttgtccaggctgtgctggacagcaccaccttcttccctgaagacgagcagctcttctcctccaacggctgcaagaccgtggcctcccgaatcgccttcttcctctgactctctgagtggtgtcctcggcccccctgatggccaggccatgcaggaaaggccaggggcctctgtcacaggaacccagagcaccaagtgagatgaacggagtgtcggctaggccacgggacagatggccaggaagggccctggcctctaaactggctcgagagcatcttggccccggccaccttccccagggaaacccctggtcaccccagaacctcactgagccttgacctccccctgcagcctgagccttcttactgtgaattataactcagggactgtggctcgtggcggtgctccctcctcagtctgccacccttgccccttgcctccttggtcgggcaccatacctcctcccctccaccccacaccctgtgtccatatcaagccaggtggagccttctcagtttccagaaatggagggactcaagctgccacttgggcctggttttagatgtttttaattttgtaaaagaaaacaagtataataaactcagctgtgggacc

SEQ ID NO: 1455 - DNA, 444 bp, Homo sapiens
  source 1..444: mol_type = genomic DNA
catatttgtgctccttcacgggagggcagggaggttcaacggaccttaaaacatgaaggtcttttttctgtttgctgttctcttttgtttggtccaaacaaactcaggggatgttccaccgggaattagaaataccatctgccatatgcagcaagggatctgcagactttttttctgccattctggtgagaaaaagcgtgacatttgctctgatccctggaataggtgttgcgtatcaaatacagatgaagaaggaaaagagaaaccagagatggatggcagatctgggatctaaaatataagctcccggaaggcagggatgttgaagtatcccaagggcttaaaggaatgtgtggcttatagtaggtgttcaataaatatttgttgaatgaatttagcaccaaaggtgaagagctgataaaagacatttttttaacttcctta

SEQ ID NO: 1456 - DNA, 1248 bp, Homo sapiens
  source 1..1248: mol_type = genomic DNA
aatgccgctttctgtttcctctgcctcccttcatctccttttgtctggggtttctttgtctggggtctccctttggttctgtttcacagttctcagcctcccctccctttctccacagccaggctgctcagtccctctctgcgggggcctagaggctcggtgaggggagcgggacttggttgccatggtcacattgaagccagccgcagctggcccgggcagctgctcctcctgggcccggggccccggacgctcggacaaagccaggcagcgttggcagccccagacccgaccccaaaggcctgagactggggtgactgggacctaagagaatcctgagctggagagatgctgcccccacccccttaggcccgagggatcaggagctatgggaccagaggccctgtcatctttactgctgctgctcttggtggcaagtggagatgctgacatgaagggacattttgatcctgccaagtgccgctatgccctgggcatgcaggaccggaccatcccagacagtgacatctctgcttccagctcctggtcagattccactgccgcccgccacagcaggttggagagcagtgacggggatggggcctggtgccccgcagggtcggtgtttcccaaggaggaggagtacttgcaggtggatctacaacgactgcacctggtggctctggtgggcacccagggacggcatgccgggggcctgggcaaggagttctcccggagctaccggctgcgttactcccgggatggtcgccgctggatgggctggaaggaccgctggggtcaggaggtgatctcaggcaatgaggaccctgagggagtggtgctgaaggaccttgggccccccatggttgcccgactggttcgcttctacccccgggctgaccgggtcatgagcgtctgtctgcgggtagagctctatggctgcctctggagggatggactcctgtcttacaccgcccctgtggggcagacaatgtatttatctgaggccgtgtacctcaacgactccacctatgacggacataccgtgggcggactgcagtatgggggtctgggccagctggcagatggtgtggtggggctggatgactttaggaagagtcaggagctgcgggtctggccaggctatgactatgtgggatggagcaaccacagcttctccagtggctatgtggagatggagtttgagtttgaccggctgagggccttccaggctatgcaggtccactg

SEQ ID NO: 1457 - DNA, 858 bp, Homo sapiens
  source 1..858: mol_type = genomic DNA
atgcggggccagggccgcaaggagagtttgtccgattcccgagacctggacggctcctacgaccagctcacgggccaccctccagggcccactaaaaaagcgctgaagcagcgattcctcaagctgctgccgtgctgcgggccccaagccctgccctcagtcagtgaaattggccgggtcttccgctttctcggtgacagttcgctcccttcagcattagccgccccagcctccctccgcccccacagaccccgcctgctggacccagacagcgtggacgatgaatttgaattgtccaccgtgtgtcaccggcctgagggtctggagcagctgcaggagcaaaccaaattcacgcgcaaggagttgcaggtcctgtaccggggcttcaagaacgaatgtcccagcggaattgtcaatgaggagaacttcaagcagatttactcccagttctttcctcaaggagactccagcacctatgccacttttctcttcaatgcctttgacaccaaccatgatggctcggtcagttttgaggactttgtggctggtttgtccgtgattcttcggggaactgtagatgacaggcttaattgggccttcaacctgtatgaccttaacaaggacggctgcatcaccaaggaggaaatgcttgacatcatgaagtccatctatgacatgatgggcaagtacacgtaccctgcactccgggaggaggccccaagggaacacgtggagagcttcttccagaagatggacagaaacaaggatggtgtggtgaccattgaggaattcattgagtcttgtcaaaaggatgagaacatcatgaggtccatgcagctctttgacaatgtcatctag

SEQ ID NO: 1458 - DNA, 1794 bp, Homo sapiens
  source 1..1794: mol_type = genomic DNA
aactgcttctctctctctcttttactcttattctttctctctcactctctctcttttcccacccttaagccaagtacagggatagttgtctcatcattggtggcttaaaatgatgtttttgaacaagaagacgccccatgggtacttttggtgactagcactatctctgtttttttccttttaaattcctgagctattgtttagcagtacacccttttatctccattgctactgaagctgaatgttacttgggtggaaagcataactgctttcttttctatgtccttaaaccctttgataatgttactgtttgagagtccctgaagccaggatactagaagagtctggcttgtctgaacagctgaactacgaaataatggagtagggcaggctgggctttccagcctctaggtgctgtgctgtcctgaggcctgggccatggtgcccaaggaaagcccctgaagctcaccaggaggaagaagcatgcagggcacccctggaggcgggacgcgccctgggccatcccccgtggacaggcggacactcctggtcttcagctttatcctggcagcagctttgggccaaatgaatttcacaggggaccaggttcttcgagtcctggccaaagatgagaagcagctttcacttctcggggatctggagggcctgaaaccccagaaggtggacttctggcgtggcccagccaggcccagcctccctgtggatatgagagttcctttctctgaactgaaagacatcaaagcttatctggagtctcatggacttgcttacagcatcatgataaaggacatccaggtgctgctggatgaggaaagacaggccatggcgaaatcccgccggctggagcgcagcaccaacagcttcagttactcatcataccacaccctggaggagatatatagctggattgacaactttgtaatggagcattccgatattgtctcaaaaattcagattggcaacagctttgaaaaccagtccattcttgtcctgaagttcagcactggaggttctcggcacccagccatctggattgacactggaattcactcccgggagtggatcacccatgccaccggcatctggactgccaataagattgtcagtgattatggcaaagaccgtgtcctgacagacatactgaatgccatggacatcttcatagagctcgtcacaaaccctgatgggtttgcttttacccacagcatgaaccgcttatggcggaagaacaagtccatcagacctggaatcttctgcatcggcgtggatctcaacaggaactggaagtcgggttttggaggaaatggttctaacagcaacccctgctcagaaacttatcacgggccctcccctcagtcggagccggaggtggctgccatagtgaacttcatcacagcccatggcaacttcaaggctctgatctccatccacagctactctcagatgcttatgtacccttacggccgattgctggagcccgtttcaaatcagagggagttgtacgatcttgccaaggatgcggtggaggccttgtataaggtccatgggatcgagtacatttttggcagcatcagcaccaccctctatgtggccagtgggatcaccgtcgactgggcctatgacagtggcatcaagtacgccttcagctttgagctccgggacactgggcagtatggcttcctgctgccggccacacagatcatccccacggcccaggagacgtggatggcgcttcggaccatcatggagcacaccctgaatcacccctactag

SEQ ID NO: 1459 - DNA, 1514 bp, Homo sapiens
  source 1..1514: mol_type = genomic DNA
aagatccagttcttataggactattcatcaggttgtttagttcagcattactttgtgctttctgataagatatgatccaaaacctgatgagagaagtcaaaatggacacaatcttcttgtggagtcttctattgctgttttttggaagtcaagcctcaagatgctcagctcaaaaaaataccgaatttgcagtggatctttatcaagaggtttccttatctcataaggacaacattatattttcaccccttggaataactttggttcttgagatggtacaactgggagccaaaggaaaagcacagcagcagataagacaaactttaaaacaacaggaaacctcagctggggaagaattttttgtactgaagtcatttttctctgccatctcagagaaaaaacaagaatttacatttaatcttgccaatgccctctaccttcaagaaggattcactgtgaaagaacagtatctccatggcaacaaggaattttttcagagtgctataaaactggtggattttcaagatgcaaaggcttgtgcagagatgataagtacctgggtagaaagaaaaacagatggaaaaattaaagacatgttttcaggggaagaatttggccctctgactcggcttgtcctggtgaatgctatttatttcaaaggagattggaaacagaaattcagaaaagaggacacacagctgataaattttactaagaaaaatggttcaactgtcaaaattccaatgatgaaggctcttctgagaacaaaatatggttatttttctgaatcttccctgaactaccaagttttagaattgtcttacaaaggtgatgaatttagcttaattatcatacttcctgcagaaggtatggatatagaagaagtggaaaaactaattactgctcaacaaatcctaaaatggctctctgagatgcaagaagaggaagtagaaataagcctccctagatttaaagtagaacaaaaagtagacttcaaagacgttttgtattctttgaacataaccgagatatttagtggtggctgcgacctttctggaataacagattcatctgaagtgtatgtttcccaagtgacgcaaaaagttttctttgagataaatgaagatggtagtgaagctgcaacatcaactggcatacacatccctgtgatcatgagtctggctcaaagccaatttatagcaaatcatccatttctgtttattatgaagcataatccaacagaatcaattctgtttatgggaagagtgacaaatcctgacacccaggagataaaaggaagagatttagattcactgtgaatgaaaagcacagcctcagaataaaagatgatttctcaaaaatagctgattggcaaaatatcgtcatcttgacaatatttgctctatatcttatgtcttttctgttttaaactgtgcctgtagtaatagatatctgtcttgatgaataagtaaaattaggtatgcatttgtttccattccttctgtatgttttag

SEQ ID NO: 1460 - DNA, 584 bp, Homo sapiens
  source 1..584: mol_type = genomic DNA
gatatcacaatgatatggtttggctgtgtcccctctgagaagagggctaccatcttccagttaaattggactttaactagaagtccaattaaacctctttttgttcctagtttcaggtgttgagagagataccctctcagactttacacagctaccaaggcaacaatgccaggaaaactattaatcaagatatgatagttcctgtttgcaatcaggagaagaaagcaaagaacactcaggattataaaagcagatgagacctacccactagacctggtcagacacaatgttggcactcttggttctggtgactgtggccctggcatctgctcatcatggtggtgagcactttgaaggcgagaaggtgttccgtgttaacgttgaagatgaaaatcacattaacataatccgcgagttggccagcacgacccagattgacttctggaagccagattctgtcacacaaatcaaacctcacagtacagttgacttccgtgttaaagcagaagatactgtcactgtggagaatgttctaaagcagaatgaactacaatacaaggtactgataagcaacctgagaaatg

SEQ ID NO: 1461 - DNA, 609 bp, Homo sapiens
  source 1..609: mol_type = genomic DNA
acacacacacccctccacttcaaggtatagccaagagcttctggagccgtcaaaaaggtctgtacctgctgtctttagagcttccagtttgcccttggtcaagaaatactgtttgctaggctctgctggagtacatcagatgttgctgctgctgctactggcgccactcttcctccgccccccgggcgcgggcggggcgcagacccccaacgccacctcagaaggttgccagatcatacacccgccctgggaagggggcatcaggtaccggggcctgactcgggaccaggtgaaggctatcaacttcctgccagtggactatgagattgagtatgtgtgccggggggagcgcgaggtggtggggcccaaggtccgcaagtgcctggccaacggctcctggacagatatggacacacccagccgctgtgtccgaatctgctccaagtcttatttgaccctggaaaatgggaaggttttcctgacgggtggggacctcccagctctggacggagcccgggtggatttccggtgtgaccccgacttccatctggtgggcagctcccggagcatctgtagtcagggccagtggagcacccccaagccccactg

SEQ ID NO: 1462 - DNA, 1663 bp, Homo sapiens
  source 1..1663: mol_type = genomic DNA
gcggagcgggacccgctggaatcatcatccagggacgtgccagaaaccacaagaaaacatggggagggttttcctcacgggagaaaaagccaattccatattaaaacgctacccaagagctaatgggttttttgaagaaataagacagggcaacattgagcgtgagtgcaaagaagaattctgtacatttgaagaagcaagagaagcttttgaaaataatgaaaaaactggtcttgttctgttgccaaggctggagtgcagctgtgaacatggctcattgcagcctcaacttcctgtgcccaagtgatcctcccatctcagcctcccaagtaggtgggaaccacaggtgcatgccaccatgcctggctaatttaaaaaacaaaattatgtgcagacaaggtcccaccatgttgcctaggctggtctcaaactcctggactcaagtgatcctcctaccttggcctcccaaagtgctgggatttataggtgtgagacaccatgcccggccatctattttaaaatatttaaactcaaggcaaactctagacaaaacagaactaaatctggaaggagctattataccagaaacaagaaaatgttaccaaaaatatcaaattgatattctcagaatttaagaaaacaataggtttgtaaaatgagaagaagctattacagaggggaccaattaggggataagagaaagtccttggacattagaaatgttactgcaaaactaaaaactggacacaggtcagacagtgcagagttcactgggttgcacatggaacatagtactcattctcctccctgcccacttccactgaaaaggaatgcatccctccccagataatggacccaaatacccacttccggccctttccgccattagccatccgccttcagccagctactactaccacagctcccgcctgcctgctcaccacatcccaaggtgcctgccatggccaccaccccagtgttgcaggtgcgtcagaactaccaccccaactgcgaggccgctgtcaacaaccacgtcaacctggagttgcatgcttcctacgtgtacctgtccatggccttctacttcgaccgggacaatgcggccctggagcactttagccgctacttcctgcgccagttgcacaagaagagggagcacgtccaggagctgatgaggctgcagaaccagcacagtggctgcatctgctttcacgacatcaggaagccagagcgtcaagactgggagagcaggctcgaggccatggagtgcgccttccacctggagaagagtgtcaaccagagcctcctggagctacaccagctggccatggagaaaggtgacccccagctatgcgacttcctggagagccacttcctgaaccagcaggtcaaggccatcaaaaagctgggtgactacctgagcaacctgtgcaagacgtgagccccagaagcaggcctggcagagtacctgtttgacaagctcaccctgggcggcagcgaggaagacacctgagccaagatgggccccacagccacggtgtgccttccctgggtcaggccaccaggcgggggcgtgcatgttgccctttcagaacgttctcttcaatttttttcctttcagtgttaccattattggcaataaagttatctgttctcaaagcaa

SEQ ID NO: 1463 - DNA, 592 bp, Homo sapiens
  source 1..592: mol_type = genomic DNA
aactgcttctctctctctcttttactcttattctttctctctcactctctctcttttcccacccttaagccaagtacagggatagttgtctcatcattggtggcttaaaatgatgtttttgaacaagaagacgccccatgggtacttttggtgctgtgctgtcctgaggcctgggccatggtgcccaaggaaagcccctgaagctcaccaggaggaagaagcatgcagggcacccctggaggcgggacgcgccctgggccatcccccgtggacaggcggacactcctggtcttcagctttatcctggcagcagctttgggccaaatgaatttcacaggggaccaggttcttcgagtcctggccaaagatgagaagcagctttcacttctcggggatctggagggcctgaaaccccagaaggtggacttctggcgtggcccagccaggcccagcctccctgtggatatgagagttcctttctctgaactgaaagacatcaaagcttatctggagtctcatggacttgcttacagcatcatgataaaggacatccaggtgctgctggatgaggaaagacaggccatggcgaaat

SEQ ID NO: 1464 - DNA, 954 bp, Homo sapiens
  source 1..954: mol_type = genomic DNA
agaaataggagcgcgcaggcgcgacgtgcggctcgcagaacggcgagtagcggagcgggacccgctggaatcatcatccagggacgtgccagaaaccacaagaaaacatggggagggttttcctcacgggagaaaaagccaattccatattaaaacgctacccaagagctaatgggttttttgaagaaataagacagggcaacattgagcgtgagtgcaaagaagaattctgtacatttgaagaagcaagagaagcttttgaaaataatgaaaaaactatcactggggtgatcctgctggctgttggagtctggggcaaacttactctgggcacctatatctcccttattgccgagaactccacaaatgctccctatgtgctcatcggaactggcaccactattgttgtctttggcctgtttggatgctttgctacatgtcgtggtagcccatggatgctgaaactgtatgccatgtttctgtccctggtgttcctggctgagctcgtagctggcatttcagggtttgtgtttcgtcatgagatcaaggacaccttcctgaggacttacacggacgctatgcagacttacaatggcaatgatgagaggagccgggcagtggaccatgtgcagcgcagcctgagctgctgtggtgtgcagaactacaccaactggagcaccagcccctacttcctggagcatggcatcccccccagctgctgcatgaacgaaactgattgtaatccccaggatctacacaatctgactgtggccgccaccaaagttaaccagaagggttgttatgatctggtaactagtttcatggagactaacatgggaatcatcgctggagtggcgtttggaatcgcattctcccagttaattggcatgctgctggcctgctgtctgtcccggttcatcacggccaatcagtatgagatggtgtaaggagaag

SEQ ID NO: 1465 - DNA, 690 bp, Homo sapiens
  source 1..690: mol_type = genomic DNA
gttgcgtcatttgtcctggcaactactggcagattctttccaacctcgaattctgctcagctcgctttggcagcttggtgggcggtgggcgcgggtggcggaggcgattgaagctgctggcccagcatgtggtgcgcgagcccagttgctgtggtggccttttgcgccgggcttttggtctctcacccggtgctgacgcagggccaggaggccggggggcggccaggggccgactgtgaagtatgtaaagaattcttgaaccgattctacaagtcactgatagacagaggagttaacttttcgctggacactatagagaaagaattgatcagtttttgcttggacaccaaaggaaaagaaaaccgcctgtgctattatctaggagccacaaaagacgcagccacaaagatcctaagtgaagtcactcgcccaatgagtgtgcatatgcctgcaatgaagatttgtgagaagctgaagaagttggatagccagatctgtgagctgaaatatgaaaaaacactggacttggcatcagttgacctgcggaagatgagagtggcagagctgaagcagatcctgcatagctggggggaggagtgcagggcctgtgcagaaaaaactgactatgtgaatctcattcaagagctggcccccaagtatgcagcgacacaccccaaaacagagctctga

SEQ ID NO: 1466 - DNA, 2099 bp, Homo sapiens
  source 1..2099: mol_type = genomic DNA
ctctctctcttttactcttattctttctctctcactctctctcttttcccacccttaagccaagtacagggatagttgtctcatcattggtggcttaaaatgatgtttttgaacaagaagacgccccatgggtacttttggtgactagcactatctctgtttttttccttttaaattcctgagctattgtttagcagtacacccttttatctccattgctactgaagctgaatgttacttgggtggaaagcataactgctttcttttctatgtccttaaaccctttgataatgttactgtttgagagtccctgaagccaggatactagaagagtctggcttgtctgaacagctgaactacgaaataatggagtagggcaggtgggtgggggagcagggcgttctgtcgataaacgagctcccttctttgcacacatagccagttaatcggccattctgagatagtttggatggggagggggagcttctgagaatcgccagtgacagctttaccaagccaattcactcaagttgtctcatctataccccttcaaaccctgtgaggtagggaggggagcctctaggtgctgtgctgtcctgaggcctgggccatggtgcccaaggaaagcccctgaagctcaccaggaggaagaagcatgcagggcacccctggaggcgggacgcgccctgggccatcccccgtggacaggcggacactcctggtcttcagctttatcctggcagcagctttgggccaaatgaatttcacaggggaccaggttcttcgagtcctggccaaagatgagaagcagctttcacttctcggggatctggagggcctgaaaccccagaaggtggacttctggcgtggcccagccaggcccagcctccctgtggatatgagagttcctttctctgaactgaaagacatcaaagcttatctggagtctcatggacttgcttacagcatcatgataaaggacatccaggtgctgctggatgaggaaagacaggccatggcgaaatcccgccggctggagcgcagcaccaacagcttcagttactcatcataccacaccctggaggagatatatagctggattgacaactttgtaatggagcattccgatattgtctcaaaaattcagattggcaacagctttgaaaaccagtccattcttgtcctgaagttcagcactggaggttctcggcacccagccatctggattgacactggaattcactcccgggagtggatcacccatgccaccggcatctggactgccaataagattgtcagtgattatggcaaagaccgtgtcctgacagacatactgaatgccatggacatcttcatagagctcgtcacaaaccctgatgggtttgcttttacccacagcatgaaccgcttatggcggaagaacaagtccatcagacctggaatcttctgcatcggcgtggatctcaacaggaactggaagtcgggttttggaggaaatggttctaacagcaacccctgctcagaaacttatcacgggccctcccctcagtcggagccggaggtggctgccatagtgaacttcatcacagcccatggcaacttcaaggctctgatctccatccacagctactctcagatgcttatgtacccttacggccgattgctggagcccgtttcaaatcagagggagttgtacgatcttgccaaggatgcggtggaggccttgtataaggtccatgggatcgagtacatttttggcagcatcagcaccaccctctatgtggccagtgggatcaccgtcgactgggcctatgacagtggcatcaagtacgccttcagctttgagctccgggacactgggcagtatggcttcctgctgccggccacacagatcatccccacggcccaggagacgtggatggcgcttcggaccatcatggagcacaccctgaatcacccctactagcagcacgactgagggcaggaggctccatccttctccccaaggtctgtggctcctcccgaaacccaagttatgcatccccatccccatgccctcatcccgacctcttagaaaataaatacaagtttgaacaggc

SEQ ID NO: 1467 - DNA, 628 bp, Homo sapiens
  source 1..628: mol_type = genomic DNA; mol_type = genomic DNA
agaaataggagcgcgcaggcgcgacgtgcggctcgcagaacggcgagtagcggagcgggacccgctgtgagtgtggcggccgcgctgggttcctagctggggaaacgtgatccaggcgaagcgccccaggaaggattgggggaatcatcatccagggacgtgccagaaaccacaagaaaacatggggagggttttcctcacgggagaaaaagccaattccatattaaaacgctacccaagagctaatgggttttttgaagaaataagacagggcaacattgagcgtgagtgcaaagaagaattctgtacatttgaagaagcaagagaagcttttgaaaataatgaaaaaactaaggagttttggagcacctacacaaaagcgcaacaaggggagagtaaccgaggaagtgactggtttcagttttaccttacctttccgttaatctttggcctcttcattatcctccttgtcattttcctaatctggagatgcttcctaagaaacaaaactcgtagacagacagtgactgaaggccacattcctttccctcagcaccttaatattatcaccccaccccccccaccagatgaagtgtttgacagcagtggattgtctccaggctttctg

SEQ ID NO: 1468 - DNA, 1518 bp, Homo sapiens
  source 1..1518: mol_type = genomic DNA
aaaaaaaaaaaaaagaaaccacagcagctgtggctggggagcccagatgaagtgtggctctatcttgtatgtgagcacacccacattttcactgccattatctgggacagcagaaccaggtttggctcaacagatttctctttccacccatctattgcaggtgtagtggtcttgctgcttctccagggaggatctgcctacaaactggtttgctactttaccaactggtcccaggaccggcaggaaccaggaaaattcacccctgagaatattgaccccttcctatgctctcatctcatctattcattcgccagcatcgaaaacaacaaggttatcatcaaggacaagagtgaagtgatgctctaccagaccatcaacagtctcaaaaccaagaatcccaaactgaaaattctcttgtccattggagggtacctgtttggttccaaagggttccaccctatggtggattcttctacatcacgcttggaattcattaactccataatcctgtttctgaggaaccataactttgatggactggatgtaagctggatctacccagatcagaaagaaaacactcatttcactgtgctgattcatgagttagcagaagcctttcagaaggacttcacaaaatccaccaaggaaaggcttctcttgactgcgggcgtatctgcagggaggcaaatgattgataacagctatcaagttgagaaactggcaaaagatctggatttcatcaacctcctgtcctttgacttccatgggtcttgggaaaagccccttatcactggccacaacagccctctgagcaaggggtggcaggacagagggccaagctcctactacaatgtggaatatgctgtggggtactggatacataagggaatgccatcagagaaggtggtcatgggcatccccacatatgggcactccttcacactggcctctgcagaaaccaccgtgggggcccctgcctctggccctggagctgctggacccatcacagagtcttcaggcttcctggcctattatgagatctgccagttcctgaaaggagccaagatcacgcggctccaggatcaacaggttccctacgcagtcaaggggaaccagtgggtgggctatgatgatgtgaagagtatggagaccaaggttcagttcttaaagaatttaaacctgggaggagccatgatctggtctattgacatggatgacttcactggcaaatcctgcaaccagggcccttaccctcttgtccaagcagtcaagagaagccttggctccctgtgaaggattaacttacagagaagcaggcaagatgaccttgctgcctggggcctgctctctcccaggaattctcatgtgggattccccttgccaggctggcctttggatctctcttccaagcctttcctgacttcctcttagatcatagattggacctggttttgttttcctgcagctgttgacttgttgccctgaagtacaataaaaaaaattcattttgctccagta

SEQ ID NO: 1469 - DNA, 743 bp, Homo sapiens
  source 1..743: mol_type = genomic DNA
tgaataatcagaagtcagtttgggaagatccagttcttataggactattcatcaggttgtttagttcagcattactttgtgctttctgataagatatgatccaaaacctgatgagagaagtcaaaatggacacaatcttcttgtggagtcttctattgctgttttttggaagtcaagcctcaagatgctcagctcaaaaaaataccgaatttgcagtggatctttatcaagaggtttccttatctcataaggacaacattatattttcaccccttggaataactttggttcttgagatggtacaactgggagccaaaggaaaagcacagcagcagataagacaaactttaaaacaacaggaaacctcagctggggaagaattttttgtactgaagtcatttttctctgccatctcagagaaaaaacaagaatttacatttaatcttgccaatgccctctaccttcaagaaggattcactgtgaaagaacagtatctccatggcaacaaggaattttttcagagtgctataaaactggtggattttcaagatgcaaaggcttgtgcagagatgataagtacctgggtagaaagaaaaacagatggaaaaattaaagacatgttttcaggggaagaatttggccctctgactcggcttgtcctggtgaatgctatttatttcaaaggagattggaaacagaaattcagaaaagaggacacacagctgataaattttactaagaaa

SEQ ID NO: 1470 - DNA, 1331 bp, Homo sapiens
  source 1..1331: mol_type = genomic DNA
gagctctctgtggaaaactctattttgaaaatgaatatattttgatttaaacaatacagagaagtcaaaatggacacaatcttcttgtggagtcttctattgctgttttttggaagtcaagcctcaagatgctcagctcaaaaaaataccgaatttgcagtggatctttatcaagaggtttccttatctcataaggacaacattatattttcaccccttggaataactttggttcttgagatggtacaactgggagccaaaggaaaagcacagcagcagataagacaaactttaaaacaacaggaaacctcagctggggaagaattttttgtactgaagtcatttttctctgccatctcagagaaaaaacaagaatttacatttaatcttgccaatgccctctaccttcaagaaggattcactgtgaaagaacagtatctccatggcaacaaggaattttttcagagtgctataaaactggtggattttcaagatgcaaaggcttgtgcagagatgataagtacctgggtagaaagaaaaacagatggaaaaattaaagacatgttttcaggggaagaatttggccctctgactcggcttgtcctggtgaatgctatttatttcaaaggagattggaaacagaaattcagaaaagaggacacacagctgataaattttactaagaaaaatggttcaactgtcaaaattccaatgatgaaggctcttctgagaacaaaatatggttatttttctgaatcttccctgaactaccaagttttagaattgtcttacaaaggtgatgaatttagcttaattatcatacttcctgcagaaggtatggatatagaagaagtggaaaaactaattactgctcaacaaatcctaaaatggctctctgagatgcaagaagaggaagtagaaataagcctccctagatttaaagtagaacaaaaagtagacttcaaagacgttttgtattctttgaacataaccgagatatttagtggtggctgcgacctttctggaataacagattcatctgaagtgtatgtttcccaagtgacgcaaaaagttttctttgagataaatgaagatggtagtgaagctgcaacatcaactggcatacacatccctgtgatcatgagtctggctcaaagccaatttatagcaaatcatccatttctgtttattatgaagcataatccaacagaatcaattctgtttatgggaagagtgacaaatcctgacacccaggagataaaaggaagagatttagattcactgtgaatgaaaagcacagcctcagaataaaagatgatttctcaaaaata

SEQ ID NO: 1471 - DNA, 445 bp, Homo sapiens
  source 1..445: mol_type = genomic DNA
ctgctctggcaatgcccggtgagactgaattatgtttaaatttattgtagatgctgatcttctggacaatcacacttttcctgctgggagcagccaaaggaaaagaagtttgctatgaggacctcgggtgcttttctgacactgagccctggggcgggacagcaatcaggcccctgaaaattctcccctggagccctgagaagatcggcacccgcttcctgctgtacaccaatgaaaacccaaacaactttcaaattctcctcctctctgatccatcaacaattgaggcatcaaattttcaaatggacagaaagacccggttcatcatccatggcttcatagacaaaggagatgagagctgggtgacagacatgtgcaagaaactgttcgaggtggaggaggtgaactgcatctgcgtggactggaagaagggctcccaagccac

SEQ ID NO: 1472 - DNA, 1870 bp, Homo sapiens
  source 1..1870: mol_type = genomic DNA
atgaaggtccatatgcttgtaggtgtgctggtcatggtgggcttcacagtaggaaaggttcctgttcccgacatccggacgtgccacttctgcctcgtagaagacccttctgtaggatgcatttcaggctcagagaagtgtaccatcagcagctcatccctgtgcatggtgatcaccatctattatgatgtcaaggttcgcttcatcgttcgaggctgtggacagtacatttcctaccgctgccaagaaaaacgcaacacctactttgcagagtactggtatcaggcccagtgctgtcagtacgattattgcaactcctggtcaagcccccaactccagagctctctgccggagccccatgacaggcccctggccctgcctctgtctgactcccagattcagtggttctaccaggccctgaacctctccctgcccctccccaatttccatgctgggacggagcctgatggcctggaccccatggtcacactgtccctgaacctgggcttgtcttttgctgagctgcgccgcatgtacttgttcctcaatagttcaggacttttggttcttccccaggctggactcttgacacctcacccttcctgaattccacagtgcaaatatctttctgtaacaccctcagcatcctgcactgccctctctgaaaacacccacattctttggtcactgtgatttcttaggcctccgtctgttgtaccactagcatctatatgacttttgtgtaattttctctcttgaactctggtgctgtttttttgtttgtttgagacaaagtctcgctctgtcacccagggtggagtgcagtggcatgatctctgctcactacaacctccacctcccgggttccagcgattctcctgcctcagcctcccgagtagctgggactacaggcgtgcaccaccacgcctggctaattttttgtatttttagtagagacggggtttcaccatgttggtcaggctggtctcgaactcctgacctcgtaatctgccctcctcgacctcccaaagtgccgggattacaggtgtgagccactgtgcctgtctgagctctggtgctgttcttccccctagaaaagaatctctagtgtggattctgcccagacaggctgacctgagaaaggcacagtggttcctccattccttccccatcatctgagtgttccagtatcccccatccctctcaatccagtcacctgcctattgacatctagctctgtttcccctgtcttgtccatgtctctaagacccagtaccagactgaactagcagcaagaaggacgaggaggccgggcatggtggctcacgccggtaatcccagcactttgggaggccgaggtgggcggatcacttgagattgggagtttgagaccagcctggccaacatggtaaaacccgctctctattaaaaatagaaaaatcagctgggtgtggtggcacacctctgtaatcccagctactcaggaggctgagacaggagaatcacttgaacccgggaggcagaggttgcagtgagccgagatcgcgccactgcactccagcctgggtgacacagtgagactccgtctccaaaaaaaaggatgaggaatagaattctgtgcagatgtcctgacttggcaattttgtgtccctgcctcactgtctccaccaacccccgcctgtcctggtgttgttctgcctcctgtcctctcttgctctcttgtcagtctctggcttcctcggccccatttcacttcactgagtcctgacacccatctccctaggggcctgtgagaggagagggaagggtctgttctgctcagctccatgtcccccattttcctccacaataaactgggactgggctaaaa

SEQ ID NO: 1473 - DNA, 1444 bp, Homo sapiens
  source 1..1444: mol_type = genomic DNA
gccgggccacttgtcttcatgtctgccagggggaggtgggaaggaggtgggaggagggcgtgcagaggcagtctgggcttggccagagctcagggtgctgagcgtgtgaccagcagtgagcagaggccggccatggccagcctggggctgctgctcctgctcttactgacagcactgccaccgctgtggtcctcctcactgcctgggctggacactgctgaaagtaaagccaccattgcagacctgatcctgtctgcgctggagagagccaccgtcttcctagaacagaggctgcctgaaatcaacctggatggcatggtgggggtccgagtgctggaagagcagctaaaaagtgtccgggagaagtgggcccaggagcccctgctgcagccgctgagcctgcgcgtggggatgctgggggagaagctggaggctgccatccagagatccctccactacctcaagctgagtgatcccaagtacctaagagagttccagctgaccctccagcccgggttttggaagctcccacatgcctggatccacactgatgcctccttggtgtaccccacgttcgggccccaggactcattctcagaggagagaagtgacgtgtgcctggtgcagctgctgggaaccgggacggacagcagcgagccctgcggcctctcagacctctgcaggagcctcatgaccaagcccggctgctcaggctactgcctgtcccaccaactgctcttcttcctctgggccagaatgagggggtgcacacagggaccactccaacagagccaggactatatcaacctcttctgcgccaacatgatggacttgaaccgcagagctgaggccatcggatacgcctaccctacccgggacatcttcatggaaaacatcatgttctgtggaatgggcggcttctccgacttctacaagctccggtggctggaggccattctcagctggcagaaacagcaggaaggatgcttcggggagcctgatgctgaagatgaagaattatctaaagctattcaatatcagcagcatttttcgaggagagtgaagaggcgagaaaaacaatttccagatggctgctcctcccacaacacagccacagcagtggcagccctgggtggcttcctatacatcctggcagaataccccccagcaaacagagagccacacccatccacaccgccaccaccaagcagccgctgagacggacggttccatgccagctgcctggaggaggaacagacccctttagtcctcatcccttagatcctggagggcacggatcacatcctgggaagaaggcatctggaggataagcaaagccaccccgacacccaatcttggaagccctgagtaggcaaggccagggtaggtgggggccgggagggacccaggtgtgaacggatgaataaagttcaactgcaactga

SEQ ID NO: 1474 - DNA, 936 bp, Homo sapiens
  source 1..936: mol_type = genomic DNA
gcggcctggcgctgcggcgaccgaccggggcgtcaggatccctggcccccggagagcgaagggcgggcgggtcccggaggcaccttcactaacccggtgcggagcacttggcgacgcctccctgcccatctcatatctctcggctcatcgctgctctgggcaccagctgcctcttggctggcgctgctgtcacacggtggactgttctggccttactgagctgccgtttggggacatcagattcaggtcgtatggggagaaacgagtgtaactttacaagcaagaagaattgtatagaaatgtaaaaaacatttatgtgtgcttcacatgtggcatgaaaaaaatgaggacctctggtcaaaattgcctgagttcagaatttcatgctggaaggaaagttagacgtaacttctaatttctagttccagtaagcatctcttcttggaaaatttccaaaaaagagtcctgctctgttgcccaggctggagtacattggtgtgatgatcatggttcactgcagcctcgacctcccaggctcaagcaattctcctacctcagcctcctgagtaactgggactataggatttctttgaagaaaaatgtgcttcttgaatcaactgcagtctctcctctgcataagagctcttaagggtactagcaggatagaagcaaatgaaactgaaagctcatctgcagctcagaaaagcaaagacatggaattttaaagagtgaaggtagcatggtgtcggccatgggtgaacaagacacagccagacaatgtggaccaatttcttcaaactacggcttttctgctgtctgcttgcagtgttgatggtggtggtgctggtcatcaatgttactcaggtagagtacttggaccatgagactgtttcagccactttcatcgacagcagtggacagtttgtttcctcccag

SEQ ID NO: 1475 - DNA, 1829 bp, Homo sapiens
  source 1..1829: mol_type = genomic DNA; mol_type = genomic DNA
agtctgggcttggccagagctcagggtgctgagcgtgtgaccagcagtgagcagaggccggccatggccagcctggggctgctgctcctgctcttactgacagcactgccaccgctgtggtcctcctcactgcctgggctggacactgctgaaagtaaagccaccattgcagacctgatcctgtctgcgctggagagagccaccgtcttcctagaacagaggctgcctgaaatcaacctggatggcatggtgggggtccgagtgctggaagagcagctaaaaagtgtccgggagaagtgggcccaggagcccctgctgcagccgctgagcctgcgcgtggggatgctgggggagaagctggaggctgccatccagagatccctccactacctcaagctgagtgatcccaagtacctaagagagttccagctgaccctccagcccgggttttggaagctcccacatgcctggatccacactgatgcctccttggtgtaccccacgttcgggccccaggactcattctcagaggagagaagtgacgtgtgcctggtgcagctgctgggaaccgggacggacagcagcgagccctgcggcctctcagacctctgcaggagcctcatgaccaagcccggctgctcaggctactgcctgtcccaccaactgctcttcttcctctgggccagaatgagggggtgcacacagggaccactccaacagagccaggactatatcaacctcttctgcgccaacatgatggacttgaaccgcagagctgaggccatcggatacgcctaccctacccgggacatcttcatggaaaacagtgtaactgggcatcctgtattttacctgccactgtgtgacagtttcctgcccccaaaggctgccccagtgacggagctctacacagatggaccagtcatgttctgtggaatgggcggcttctccgacttctacaagctccggtggctggaggccattctcagctggcagaaacagcaggaaggatgcttcggggagcctgatgctgaagatgaagaattatctaaagctattcaatatcagcagcatttttcgaggagagtgaagaggcgagaaaaacaatttccagattctcgctctgttgctcaggctggagtacagtggcgcaatctcggctcactgcaacctttgcctcctgggttcaagcaattctcttgcctcatcctcccgagtagctgggactacaggagcgtgccaccatacctggctaatttttatatttttttagtagagacagggtttcatcatgttgctcatgctggtctcgaactcctgatctcaagagatccgcccacctcaggctcccaaagtgtgggattataggtgtgagccaccgcgtctggctgaaaagcactttcaatgagactgtgttgaataaagggccaaggttcttgccacccagcactcatgggggctctctcccctagatggctgctcctcccacaacacagccacagcagtggcagccctgggtggcttcctatacatcctggcagaataccccccagcaaacagagagccacacccatccacaccgccaccaccaagcagccgctgagacggacggttccatgccagctgcctggaggaggaacagacccctttagtcctcatcccttagatcctggagggcacggatcacatcctgggaagaaggcatctggaggataagcaaagccaccccgacacccaatcttggaagccctgagtaggcaaggccagggtaggtgggggccgggagggacccaggtgtgaacggatgaataaagttcaactgcaactga

SEQ ID NO: 1476 - DNA, 1940 bp, Homo sapiens
  source 1..1940: mol_type = genomic DNA; mol_type = genomic DNA
tctctctcttttcccacccttaagccaagtacagggatagttgtctcatcattggtggcttaaaatgatgtttttgaacaagaagacgccccatgggtacttttggtgactagcactatctctgtttttttccttttaaattcctgagctattgtttagcagtacacccttttatctccattgctactgaagctgaatgttacttgggtggaaagcataactgctttcttttctatgtccttaaaccctttgataatgttactgtttgagagtccctgaagccaggatactagaagagtctggcttgtctgaacagctgaactacgaaataatggagtagggcaggctttaccaagccaattcactcaagttgtctcatctataccccttcaaaccctgtgaggctgggctttccagcctctaggtgctgtgctgtcctgaggcctgggccatggtgcccaaggaaagcccctgaagctcaccaggaggaagaagcatgcagggcacccctggaggcgggacgcgccctgggccatcccccgtggacaggcggacactcctggtcttcagctttatcctggcagcagctttgggccaaatgaatttcacaggggaccaggttcttcgagtcctggccaaagatgagaagcagctttcacttctcggggatctggagggcctgaaaccccagaaggtggacttctggcgtggcccagccaggcccagcctccctgtggatatgagagttcctttctctgaactgaaagacatcaaagcttatctggagtctcatggacttgcttacagcatcatgataaaggacatccaggtgctgctggatgaggaaagacaggccatggcgaaatcccgccggctggagcgcagcaccaacagcttcagttactcatcataccacaccctggaggagatatatagctggattgacaactttgtaatggagcattccgatattgtctcaaaaattcagattggcaacagctttgaaaaccagtccattcttgtcctgaagttcagcactggaggttctcggcacccagccatctggattgacactggaattcactcccgggagtggatcacccatgccaccggcatctggactgccaataagattgtcagtgattatggcaaagaccgtgtcctgacagacatactgaatgccatggacatcttcatagagctcgtcacaaaccctgatgggtttgcttttacccacagcatgaaccgcttatggcggaagaacaagtccatcagacctggaatcttctgcatcggcgtggatctcaacaggaactggaagtcgggttttggaggaaatggttctaacagcaacccctgctcagaaacttatcacgggccctcccctcagtcggagccggaggtggctgccatagtgaacttcatcacagcccatggcaacttcaaggctctgatctccatccacagctactctcagatgcttatgtacccttacggccgattgctggagcccgtttcaaatcagagggagttgtacgatcttgccaaggatgcggtggaggccttgtataaggtccatgggatcgagtacatttttggcagcatcagcaccaccctctatgtggccagtgggatcaccgtcgactgggcctatgacagtggcatcaagtacgccttcagctttgagctccgggacactgggcagtatggcttcctgctgccggccacacagatcatccccacggcccaggagacgtggatggcgcttcggaccatcatggagcacaccctgaatcacccctactagcagcacgactgagggcaggaggctccatccttctccccaaggtctgtggctcctcccgaaacccaagttatgcatccccatccccatgccctcatcccgacctcttagaaaataaatacaagtttgaacaggc

SEQ ID NO: 1477 - DNA, 1837 bp, Homo sapiens
  source 1..1837: mol_type = genomic DNA; mol_type = genomic DNA
ttttgtagctttgaaagctgtatttgatgagaaaaacctgtttcccaaggaaattctgcatcatgaacgaaaagccaagcaattatgccaagaaaaaagttgtgaagtgaagaaaaataagaagtaattacaacagaaaaaccttcactgttacataagaggaattaatcaagcaatggtcaagataaatggagttggccttgatcgctcaggtgtttatgtacaagagttttccagcaagcgtattttagttgtaacattccagtgaataatcagaagtcagtttgggagaagtcaaaatggacacaatcttcttgtggagtcttctattgctgttttttggaagtcaagcctcaagatgctcagctcaaaaaaataccgaatttgcagtggatctttatcaagaggtttccttatctcataaggacaacattatattttcaccccttggaataactttggttcttgagatggtacaactgggagccaaaggaaaagcacagcagcagataagacaaactttaaaacaacaggaaacctcagctggggaagaattttttgtactgaagtcatttttctctgccatctcagagaaaaaacaagaatttacatttaatcttgccaatgccctctaccttcaagaaggattcactgtgaaagaacagtatctccatggcaacaaggaattttttcagagtgctataaaactggtggattttcaagatgcaaaggcttgtgcagagatgataagtacctgggtagaaagaaaaacagatggaaaaattaaagacatgttttcaggggaagaatttggccctctgactcggcttgtcctggtgaatgctatttatttcaaaggagattggaaacagaaattcagaaaagaggacacacagctgataaattttactaagaaaaatggttcaactgtcaaaattccaatgatgaaggctcttctgagaacaaaatatggttatttttctgaatcttccctgaactaccaagttttagaattgtcttacaaaggtgatgaatttagcttaattatcatacttcctgcagaaggtatggatatagaagaagtggaaaaactaattactgctcaacaaatcctaaaatggctctctgagatgcaagaagaggaagtagaaataagcctccctagatttaaagtagaacaaaaagtagacttcaaagacgttttgtattctttgaacataaccgagatatttagtggtggctgcgacctttctggaataacagattcatctgaagtgtatgtttcccaagtgacgcaaaaagttttctttgagataaatgaagatggtagtgaagctgcaacatcaactggcatacacatccctgtgatcatgagtctggctcaaagccaatttatagcaaatcatccatttctgtttattatgaagcataatccaacagaatcaattctgtttatgggaagagtgacaaatcctgacacccaggagataaaaggaagagatttagattcactgtgaatgaaaagcacagcctcagaataaaagatgatttctcaaaaatagctgattggcaaaatatcgtcatcttgacaatatttgctctatatcttatgtcttttctgttttaaactgtgcctgtagtaatagatatctgtcttgatgaataagtaaaattaggtatgcatttgtttccattccttctgtatgttttagaaaatctatatgcatctaaaaccttgagcgtacgtaaaatattaccattcatatgttagaacaatcctgtctataatatcttaaataccaaattcttgtcttagatagcaaatttattattccct

SEQ ID NO: 1478 - DNA, 757 bp, Homo sapiens
  source 1..757: mol_type = genomic DNA; mol_type = genomic DNA
gaaaccacagcagctgtggctggggagcccagatgaagtgtggctctatcttgtgtagtggtcttgctgcttctccagggaggatctgcctacaaactggtttgctactttaccaactggtcccaggaccggcaggaaccaggaaaattcacccctgagaatattgaccccttcctatgctctcatctcatctattcattcgccagcatcgaaaacaacaaggttatcatcaaggacaagagtgaagtgatgctctaccagaccatcaacagtctcaaaaccaagaatcccaaactgaaaattctcttgtccattggagggtacctgtttggttccaaagggttccaccctatggtggattcttctacatcacgcttggaattcattaactccataatcctgtttctgaggaaccataactttgatggactggatgtaagctggatctacccagatcagaaagaaaacactcatttcactgtgctgattcatgagttagcagaagcctttcagaaggacttcacaaaatccaccaaggaaaggcttctcttgactgcgggcgtatctgcagggaggcaaatgattgataacagctatcaagttgagaaactggcaaaagatctggatttcatcaacctcctgtcctttgacttccatgggtcttgggaaaagccccttatcactggccacaacagccctctgagcaaggggtggcaggacagagggccaagctcctactacaatgtggaatatgctg

SEQ ID NO: 1479 - DNA, 1872 bp, Homo sapiens
  source 1..1872: mol_type = genomic DNA; mol_type = genomic DNA
ccgtcatccccctgcagccacccttcccagagtcctttgcccaggccaccccaggcttcttggcagccctgccgggccacttgtcttcatgtctgccagggggaggtgggaaggaggtgggaggagggcgtgcagaggcagtctgggcttggccagagctcagggtgctgagcgtgtgaccagcagtgagcagaggccggccatggccagcctggggctgctgctcctgctcttactgacagcactgccaccgctgtggtcctcctcactgcctgggctggacactgctgaaagtaaagccaccattgcagacctgatcctgtctgcgctggagagagccaccgtcttcctagaacagaggctgcctgaaatcaacctggatggcatggtgggggtccgagtgctggaagagcagctaaaaagtgtccgggagaagtgggcccaggagcccctgctgcagccgctgagcctgcgcgtggggatgctgggggagaagctggaggctgccatccagagatccctccactacctcaagctgagtgatcccaagtacctaagagagttccagctgaccctccagcccgggttttggaagctcccacatgcctggatccacactgatgcctccttggtgtaccccacgttcgggccccaggactcattctcagaggagagaagtgacgtgtgcctggtgcagctgctgggaaccgggacggacagcagcgagccctgcggcctctcagacctctgcaggagcctcatgaccaagcccggctgctcaggctactgcctgtcccaccaactgctcttcttcctctgggccagaatgagggggtgcacacagggaccactccaacagagccaggactatatcaacctcttctgcgccaacatgatggacttgaaccgcagagctgaggccatcggatacgcctaccctacccgggacatcttcatggaaaacatcatgttctgtggaatgggcggcttctccgacttctacaagctccggtggctggaggccattctcagctggcagaaacagcaggaaggatgcttcggggagcctgatgctgaagatgaagaattatctaaagctattcaatatcagcagcatttttcgaggagagtgaagaggcgagaaaaacaatttccagattctcgctctgttgctcaggctggagtacagtggcgcaatctcggctcactgcaacctttgcctcctgggttcaagcaattctcttgcctcatcctcccgagtagctgggactacaggagcgtgccaccatacctggctaatttttatatttttttagtagagacagggtttcatcatgttgctcatgctggtctcgaactcctgatctcaagagatccgcccacctcaggctcccaaagtgtgggattataggtgtgagccaccgcgtctggctgaaaagcactttcaatgagactgtgttgaataaagggccaaggttcttgccacccagcactcatgggggctctctcccctagatggctgctcctcccacaacacagccacagcagtggcagccctgggtggcttcctatacatcctggcagaataccccccagcaaacagagagccacacccatccacaccgccaccaccaagcagccgctgagacggacggttccatgccagctgcctggaggaggaacagacccctttagtcctcatcccttagatcctggagggcacggatcacatcctgggaagaaggcatctggaggataagcaaagccaccccgacacccaatcttggaagccctgagtaggcaaggccagggtaggtgggggccgggagggacccaggtgtgaacggatgaataaagttcaactgcaactga

SEQ ID NO: 1480 - DNA, 3450 bp, Homo sapiens
  source 1..3450: mol_type = genomic DNA; mol_type = genomic DNA
gaataataacttttagatctgtacagataccccttttttctgtaggggaaaacaagatcattggatcattgaactaaataattataatagtttttaagaaaaataacatttggagcttttatctttggtttatattttttcacttatatcgctgtttataaagttttgaccttcagccaaggtctgagagtgatttaccatgttgaagttcatgtatttaaatagactatttaaattactgttttttattagtaaggaaaaggaaacgttcctatgcccactcctcccactatatcatgtataactctcttgcctgtaaaattgtactcttaatttctaatgtttttctttacttcattttcagtatctttaacctttatatcatatgcatatttttgtttcagcaagaagaattgtatagaaatgtaaaaaacatttatgtgtgcttcacatgtggcatgaaaaaaatgaggacctctggtcaaaattgcctgagttcagaatttcatgctggaaggaaagttagacgtaacttctaatttctagttccagtaagcatctcttcttggaaaatttccaaaaaagagtcctgctctgttgcccaggctggagtacattggtgtgatgatcatggttcactgcagcctcgacctcccaggctcaagcaattctcctacctcagcctcctgagtaactgggactataggatttctttgaagaaaaatgtgcttcttgaatcaactgcagtctctcctctgcataagagctcttaagggtactagcaggatagaagcaaatgaaactgaaagctcatctgcagctcagaaaagcaaagacatggaattttaaagagtgaaggtagcatggtgtcggccatgggtgaacaagacacagccagacaatgtggaccaatttcttcaaactacggcttttctgctgtctgcttgcagtgttgatggtggtggtgctggtcatcaatgttactcaggtagagtacttggaccatgagactgtttcagccactttcatcgacagcagtggacagtttgtttcctcccaggtgacaggaattagccgaaatccctactgtggctatgatcagcagaccctgtccagccaggagcgcatggaggaggactccttgctggctgccttgcaccggcaggttcctgatgtgggcccagtcccctttgtgaagagcactgacccttcttccagctactttgtcatcttgaactctgctgccttctttaaggtgggaagccagcttgaggtgctggttcatgtgcaggattttcaaagaaagcccaagaagtatggtggagactacctgcaggccagaattcactccctcaagctgcaggctggggctgtgggcagggtggtggattaccagaatgggttttacaaggttttctttactttgctatggccaggcaaagttaaagtatccgtatctctggtccaccccagtgaagggatcagagttcttcagcgcttacaggaagataaaccagacagggtctatttcaagagtctcttccgttcaggaagaatttctgaaactactgagtgcaacgtgtgtcttcctgggaatctgcccctgtgtaactttacagacctctacactggggagccctggttctgcttcaaaccaaagaagctcccttgcagcagcagaattacccatttcaaaggtggatacctgaaaggtctcctaaccgctgcagagagtgctttcttccagagtggtgtcaatatcaaaatgccagtcaactccagtggacctgattgggtaactgtgattcccaggagaataaaagaaactaacagtctagaactatctcaaggctcaggaacttttccttctgggtattattataaagaccagtggaggcccagaaagtttaagatgcgtcagtttaatgaccctgacaacattacagagtgcttacaaagaaaagtggtgcatttatttggtgactcaacaatcaggcaatggtttgaataccttactacatttgttccagatttagtggagtttaacttgggtagtcccaagaatgtgggtcccttccttgcagtggaccagaagcacaacatcctgctcaaataccgctgccatggtccacccatccgcttcacgactgtctttagcaatgagctccattatgtggcgaatgagctgaatggcattgtgggagggaagaacacagtggttgccatagctgtatggtctcacttcagcaccttccctttggaagtgtacatccggcggctcaggaacatccgtcgagcagtggttcggctcctcgatcgaagcccaaagaccgtggtggtcatccggacggccaacgcccaagagctgggacctgaggtgagccttttcaacagcgactggtacaactttcagctggacaccatccttcggaggatgttctcaggggttggagtatatctcgtcgatgcctgggagatgaccctggcccattatctaccgcacaagctgcatccagatgaagttattgtgaagaaccagctggacatgttcttgtcctttgtgtgccccttggaaacctagcctgtcttggaagggactggaggaatcatattcaatgaccttctcaattgacctgagttacagaaagtggccccagtgagagatgactgcccttaataagtataaaatttcaaaaagatctggacttaatatgatgacttataaggagcttagaaaatgcaggttacatttatatctacctataggattttatccaatgttgacttagccatggtagaactcttaactgcatctacacactatattgctcttgtaaccaaagatgctaatgagtgtatttgaattagcttctcctaggaggggtgactactttgctaaagagtatgaaaaatgttttgatggaagggacaagtttggttggtagtagagtgtttgtagcttatctggtaaaggaaattgagtgcatctgcatgcatagcacaagtaatccatcttctggcggttaactagagaaagcttatagtcagaggctcttgtgaatgcactgaagactgctgtgtctcaggagtttctcttgatgatctaccttttctgaattacttgaaaaggccaatgtgcttggttcgagttttttagtgaatatttacaatttcctgcttttatctagaaaagaagcaaaagggaaatatgaaagcagtatatataaaatctgtgctttggaattgatatttgcatttggtgattgttttttatttgattcagctaaattttatgtgttgaatacttactctagaataactacttttggaactggaagggggaaatctgtaaatggaaatttatttttatgttctgaaatttgagggtttaggaattgacttttgtgtaaagaatgctacgatattataaagctgtggaagttttttcca

SEQ ID NO: 1481 - DNA, 2014 bp, Homo sapiens
  source 1..2014: mol_type = genomic DNA; mol_type = genomic DNA
gatactttagagcggagggatgtattgaaacagactactgctacttacagcaccgtatagcagccctgctcctacattttgctgccttactctgccccgaatgcactggagtggggatggtccatcggcaactataaactgattctcatcaggaaactgcacattatctccccatcacttcaaaggtctcgtcaggcagaggtgacgccaggagatgatttaaaggtgaaaatgacaaggtttccacccctcaaaccttggctccttttctgacaatacagtctgaatgaacccgatgtctttttttttactgtggaaataggatcggaagagagtaacatttttttttttttaatcctgataaagaagattgttgggaagctctttgaaaaaaaattttaaattgtggcacagatggattttaaaaagtgttagatctttccaatgaacactaatagagtactctgctcttggctggatttttcagagaatggcaatggtctctgcgatgtcctgggtcctgtatttgtggataagtgcttgtgcaatgctactctgccatggatcccttcagcacactttccagcagcatcacctgcacagaccagaaggagggacgtgtgaagtgatagcagcacaccgatgttgtaacaagaatcgcattgaggagcggtcacaaacagtaaagtgttcctgtctacctggaaaagtggctggaacaacaagaaaccggccttcttgcgtcgatgcctccatagtgattgggaaatggtggtgtgagatggagccttgcctagaaggagaagaatgtaagacactccctgacaattctggatggatgtgcgcaacaggcaacaaaattaagaccacgagaattcacccaagaacctaacagaagcatttgtggtagtaaaggaaaaccaaccctctggaaaatacattttgagaatctcaaacatctcacatatatacaagccaaatggatttcttacttgcactttgactggctaccagataatcacagtgcgtttactgtgtgtaacgaaatatcctacagtgagaagacacagcgttttggcaacaccatggaaagtgggcttaaaaaagggttttctcagtgaaatttttgggcatcatgaagaacgatcaactatcttctaatttgaatctatagttactttgtaccatttgaaatatatgtatatatatatatataatattttgaaatattatctattctcttcaagaaatgaacagtaccacagtttgagacggctggtgtacccctttgagttttggatgttttgtctgttttgctttgttttgttagtcatttctttttctaacggcaaggaagatatgtgcccttttgagaattcaagatggcactgacacgggaaggccagctacaggtggactcctggaatttgaggcatcataatgatactgaatcaagaacttccttctgcttctaccagatggcccaaggaagcacatcgtcctgttttattgctttctaccctgtgcaatattagcatgcaagcttggcttacatagtcatactttatattcaattgatatataataaccgttctaacctcttccaggaaaatatttttagaactactagcttttccacttagaagaaaatgaggattcttaagggagccactccaccatgctattaagactctggcagagttatgggtaggatatggatccctacatgaataagtcctgtaaatacaatgtcttaaggctttgtatagctgtcctagactgcagaaatgtcctctgattaaatccaaagtctggcatcgttaactacatagtgctgtagcaacaagtcttatcatggcatctctttctatgtttggtttgctttttccaagagtattcaggtctcctcttgtgagataggaaggccatgaaaacaattagatttcaagatgatctatgtgaccaaatgttggacagccctattaaagtggtaaacaacttctttctaaaccta

SEQ ID NO: 1482 - DNA, 1870 bp, Homo sapiens
  source 1..1870: mol_type = genomic DNA; mol_type = genomic DNA
atgaaggtccatatgcttgtaggtgtgctggtcatggtgggcttcacagtaggaaaggttcctgttcccgacatccggacgtgccacttctgcctcgtagaagacccttctgtaggatgcatttcaggctcagagaagtgtaccatcagcagctcatccctgtgcatggtgatcaccatctattatgatgtcaaggttcgcttcatcgttcgaggctgtggacagtacatttcctaccgctgccaagaaaaacgcaacacctactttgcagagtactggtatcaggcccagtgctgtcagtacgattattgcaactcctggtcaagcccccaactccagagctctctgccggagccccatgacaggcccctggccctgcctctgtctgactcccagattcagtggttctaccaggccctgaacctctccctgcccctccccaatttccatgctgggacggagcctgatggcctggaccccatggtcacactgtccctgaacctgggcttgtcttttgctgagctgcgccgcatgtacttgttcctcaatagttcaggacttttggttcttccccaggctggactcttgacacctcacccttcctgaattccacagtgcaaatatctttctgtaacaccctcagcatcctgcactgccctctctgaaaacacccacattctttggtcactgtgatttcttaggcctccgtctgttgtaccactagcatctatatgacttttgtgtaattttctctcttgaactctggtgctgtttttttgtttgtttgagacaaagtctcgctctgtcacccagggtggagtgcagtggcatgatctctgctcactacaacctccacctcccgggttccagcgattctcctgcctcagcctcccgagtagctgggactacaggcgtgcaccaccacgcctggctaattttttgtatttttagtagagacggggtttcaccatgttggtcaggctggtctcgaactcctgacctcgtaatctgccctcctcgacctcccaaagtgccgggattacaggtgtgagccactgtgcctgtctgagctctggtgctgttcttccccctagaaaagaatctctagtgtggattctgcccagacaggctgacctgagaaaggcacagtggttcctccattccttccccatcatctgagtgttccagtatcccccatccctctcaatccagtcacctgcctattgacatctagctctgtttcccctgtcttgtccatgtctctaagacccagtaccagactgaactagcagcaagaaggacgaggaggccgggcatggtggctcacgccggtaatcccagcactttgggaggccgaggtgggcggatcacttgagattgggagtttgagaccagcctggccaacatggtaaaacccgctctctattaaaaatagaaaaatcagctgggtgtggtggcacacctctgtaatcccagctactcaggaggctgagacaggagaatcacttgaacccgggaggcagaggttgcagtgagccgagatcgcgccactgcactccagcctgggtgacacagtgagactccgtctccaaaaaaaaggatgaggaatagaattctgtgcagatgtcctgacttggcaattttgtgtccctgcctcactgtctccaccaacccccgcctgtcctagtgttgttctgcctcctgtcctctcttgctctcttgtcagtctctggcttcctcggccccatttcacttcactgagtcctgacacccatctccctaggggcctgtgagaggagagggaagggtctgttctgctcagctccatgtcccccattttcctccacaataaactgggactgggctaaaa

SEQ ID NO: 1483 - DNA, 1870 bp, Homo sapiens
  source 1..1870: mol_type = genomic DNA; mol_type = genomic DNA
atgaaggtccatatgcttgtaggtgtgctggtcatggtgggcttcacagtaggaaaggttcctgttcccgacatccggacgtgccacttctgcctcgtagaagacccttctgtaggatgcatttcaggctcagagaagtgtaccatcagcagctcatccctgtgcatggtgatcaccatctattatgatgtcaaggttcgcttcatcgttcgaggctgtggacagtacatttcctaccgctgccaagaaaaacgcaacacctactttgcagagtactggtatcaggcccagtgctgtcagtacgattattgcaactcctggtcaagcccccaactccagagctctctgccggagccccatgacaggcccctggccctgcctctgtctgactcccagattcagtggttctaccaggccctgaacctctccctgcccctccccaatttccatgctgggacggagcctgatggcctggaccccatggtcacactgtccctgaacctgggcttgtcttttgctgagctgcgccgcatgtacttgttcctcaatagttcaggacttttggttcttccccaggctggactcttgacacctcacccttcctgaattccacagtgcaaatatctttctgtaacaccctcagcatcctgcactgccctctctgaaaacacccacattctttggtcactgtgatttcttaggcctccgtctgttgtaccactagcatctatatgacttttgtgtaattttctctcttgaactctggtgctgtttttttgtttgtttgagacaaagtctcgctctgtcacccagggtggagtgcagtggcatgatctctgctcactacaacctccacctcccgggttccagcgattctcctgcctcagcctcccgagtagctgggactacaggcgtgcaccaccacgcctggctaattttttgtatttttagtagagacggggtttcaccatgttggtcaggctggtctcgaactcctgacctcgtaatctgccctcctcgacctcccaaagtgccgggattacaggtgtgagccactgtgcctggctgagctctggtgctgttcttccccctagaaaagaatctctagtgtggattctgcccagacaggctgacctgagaaaggcacagtggttcctccattccttccccatcatctgagtgttccagtatcccccatccctctcaatccagtcacctgcctattgacatctagctctgtttcccctgtcttgtccatgtctctaagacccagtaccagactgaactagcagcaagaaggacgaggaggccgggcatggtggctcacgccggtaatcccagcactttgggaggccgaggtgggcggatcacttgagattgggagtttgagaccagcctggccaacatggtaaaacccgctctctattaaaaatagaaaaatcagctgggtgtggtggcacacctctgtaatcccagctactcaggaggctgagacaggagaatcacttgaacccgggaggcagaggttgcagtgagccgagatcgcgccactgcactccagcctgggtgacacagtgagactccgtctccaaaaaaaaggatgaggaatagaattctgtgcagatgtcctgacttggcaattttgtgtccctgcctcactgtctccaccaacccccgcctgtcctagtgttgttctgcctcctgtcctctcttgctctcttgtcagtctctggcttcctcggccccatttcacttcactgagtcctgacacccatctccctaggggcctgtgagaggagagggaagggtctgttctgctcagctccatgtcccccattttcctccacaataaactgggactgggctaaaa

SEQ ID NO: 1484 - DNA, 2673 bp, Homo sapiens
  source 1..2673: mol_type = genomic DNA; mol_type = genomic DNA
cgggagccgcctcccgacacccgagccccgccggcgcctcccgctcccggctcccggctcctggctccctccgcctcccccgcccctcgccccgccgccgaagaggccccgctcccgggtcggacgcctgggtctgccgggaagagcgatgagagagatgctgcccccacccccttaggcccgagggatcaggagctatgggaccagaggccctgtcatctttactgctgctgctcttggtggcaagtggagatgctgacatgaagggacattttgatcctgccaagtgccgctatgccctgggcatgcaggaccggaccatcccagacagtgacatctctgcttccagctcctggtcagattccactgccgcccgccacagcaggttggagagcagtgacggggatggggcctggtgccccgcagggtcggtgtttcccaaggaggaggagtacttgcaggtggatctacaacgactgcacctggtggctctggtgggcacccagggacggcatgccgggggcctgggcaaggagttctcccggagctaccggctgcgttactcccgggatggtcgccgctggatgggctggaaggaccgctggggtcaggaggtgatctcaggcaatgaggaccctgagggagtggtgctgaaggaccttgggccccccatggttgcccgactggttcgcttctacccccgggctgaccgggtcatgagcgtctgtctgcgggtagagctctatggctgcctctggagggactgcagtatgggggtctgggccagctggcagatggtgtggtggggctggatgactttaggaagagtcaggagctgcgggtctggccaggctatgactatgtgggatggagcaaccacagcttctccagtggctatgtggagatggagtttgagtttgaccggctgagggccttccaggctatgcaggtccactgtaacaacatgcacacgctgggagcccgtctgcctggcggggtggaatgtcgcttccggcgtggccctgccatggcctgggagggggagcccatgcgccacaacctagggggcaacctgggggaccccagagcccgggctgtctcagtgccccttggcggccgtgtggctcgctttctgcagtgccgcttcctctttgcggggccctggttactcttcagcgaaatctccttcatctctgatgtggtgaacaattcctctccggcactgggaggcaccttcccgccagccccctggtggccgcctggcccacctcccaccaacttcagcagcttggagctggagcccagaggccagcagcccgtggccaaggccgaggggagcccgaccgccatcctcatcggctgcctggtggccatcatcctgctcctgctgctcatcattgccctcatgctctggcggctgcactggcgcaggctcctcagcaaggctgaacggagggtgttggaagaggagctgacggttcacctctctgtccctggggacactatcctcatcaacaaccgcccaggtcctagagagccacccccgtaccaggagccccggcctcgtgggaatccgccccactccgctccctgtgtccccaatggctctgcctacagtggggactatatggagcctgagaagccaggcgccccgcttctgcccccacctccccagaacagcgtcccccattatgccgaggctgacattgttaccctgcagggcgtcaccgggggcaacacctatgctgtgcctgcactgcccccaggggcagtcggggatgggccccccagagtggatttccctcgatctcgactccgcttcaaggagaagcttggcgagggccagtttggggaggtgcacctgtgtgaggtcgacagccctcaagatctggttagtcttgatttcccccttaatgtgcgtaagggacaccctttgctggtagctgtcaagatcttacggccagatgccaccaagaatgccaggaatgatttcctgaaagaggtgaagatcatgtcgaggctcaaggacccaaacatcattcggctgctgggcgtgtgtgtgcaggacgaccccctctgcatgattactgactacatggagaacggcgacctcaaccagttcctcagtgcccaccagctggaggacaaggcagccgagggggcccctggggacgggcaggctgcgcaggggcccaccatcagctacccaatgctgctgcatgtggcagcccagatcgcctccggcatgcgctatctggccacactcaactttgtacatcgggacctggccacgcggaactgcctagttggggaaaatttcaccatcaaaatcgcagactttggcatgagccggaacctctatgctggggactattaccgtgtgcagggccgggcagtgctgcccatccgctggatggcctgggagtgcatcctcatggggaagttcacgactgcgagtgacgtgtgggcctttggtgtgaccctgtgggaggtgctgatgctctgtagggcccagccctttgggcagctcaccgacgagcaggtcatcgagaacgcgggggagttcttccgggaccagggccggcaggtgtacctgtcccggccgcctgcctgcccgcagggcctatatgagctgatgcttcggtgctggagccgggagtctgagcagcgacc

SEQ ID NO: 1485 - DNA, 451 bp, Homo sapiens
  source 1..451: mol_type = genomic DNA; mol_type = genomic DNA
gggaccccatttctgtgctcatctgcctccttggcaatataaagagcaagcactgaggccccgcctcagagcaccccaaacttgacgccatgaagatcccggtccttcctgccgtggtgctcctctccctcctggtgctccactctgcccagggagccaccctgggtggtcctgaggaagaaagcaccattgagaattatgcgtcacgacccgaggcgtttaaggctgatgagttcctgaactggcacgccctctttgagtctatcaaaaggaaacttcctttcctcaactgggatgcctttcctaagctgaaaggactgaggagcgcaactcctgatgcccagtgaccatgacctccactggaagagggggctagcgtgagcgctgattctcaacctaccataactctttcctgcctcaggaactccaataaaacattttccatccaaca

SEQ ID NO: 1486 - DNA, 582 bp, Homo sapiens
  source 1..582: mol_type = genomic DNA; mol_type = genomic DNA
gcagaacggcgagtagcggagcgggacccgctgtgagtgtggcggccgcgctgggttcctagctggggaaacgtgatccaggcgaagcgccccaggaaggattggggatgctcaccccatttagagaaagaaatccacctccccaaccccaatcaagaacctgctattgtatatcatcatagagccagattacctagggaatcatcatccagggacgtgccagaaaccacaagaaaacatggggagggttttcctcacgggagaaaaagccaattccatattaaaacgctacccaagagctaatgggttttttgaagaaataagacagggcaacattgagcgtgagtgcaaagaagaattctgtacatttgaagaagcaagagaagcttttgaaaataatgaaaaaactaaggagttttggagcacctacacaaaagcgcaacaaggggagagtaaccgaggaagtgactggtttcagttttaccttacctttccgttaatctttggcctcttcattatcctccttgtcattttcctaatctggagatgcttcctaagaaacaaaactcgtagacagacagt

SEQ ID NO: 1487 - DNA, 1870 bp, Homo sapiens; identical to SEQ ID NO: 1482
  source 1..1870: mol_type = genomic DNA; mol_type = genomic DNA

SEQ ID NO: 1488 - DNA, 2573 bp, Homo sapiens
  source 1..2573: mol_type = genomic DNA; mol_type = genomic DNA
tctttctctctcactctctctcttttcccacccttaagccaagtacagggatagttgtctcatcattggtggcttaaaatgatgtttttgaacaagaagacgccccatgggtacttttggtgactagcactatctctgtttttttccttttaaattcctgagctattgtttagcagtacacccttttatctccattgctactgaagctgaatgttacttgggtggaaagcataactgctttcttttctatgtccttaaaccctttgataatgttactgtttgagagtccctgaagccaggatactagaagagtctggcttgtctgaacagctgaactacgaaataatggagtagggcaggtgggtgggggagcagggcgttctgtcgataaacgagctcccttctttgcacacatagccagttaatcggccattctgagatagtttggatggggagggggagcttctgagaatcgccagtgacagttaagtggcctattgttgacgtcctctgctgaacgacttggttggattcagcttctgccttacccccaccccctgtggattttctgttagattcatcatttgccattcaggcatcatctttcactttctccttccaacatgactgctttgtgtgctggcccctgctttactcctgctattcccaaactataaagggaactgtgtggggcttcagcaggactgagaaattgactctgctgtctgttgagaactctaataatgactgcggtgaccttcatgtctagcagaaaacccactgtctgtgctagcacaatgatgaccacctgaagacagagaaaagggaatcttgattgaattccttctcatacaatatatagttatttcctttgttctcctctccattctcttctcttccccttctccccatcgccactggaggactgatctcaaatgcagctgtgactaaaagttaatgccttttgaataataatacattgcattttgcaggctttaccaagccaattcactcaagttgtctcatctataccccttcaaaccctgtgagcctctaggtgctgtgctgtcctgaggcctgggccatggtgcccaaggaaagcccctgaagctcaccaggaggaagaagcatgcagggcacccctggaggcgggacgcgccctgggccatcccccgtggacaggcggacactcctggtcttcagctttatcctggcagcagctttgggccaaatgaatttcacaggggaccaggttcttcgagtcctggccaaagatgagaagcagctttcacttctcggggatctggagggcctgaaaccccagaaggtggacttctggcgtggcccagccaggcccagcctccctgtggatatgagagttcctttctctgaactgaaagacatcaaagcttatctggagtctcatggacttgcttacagcatcatgataaaggacatccaggtgctgctggatgaggaaagacaggccatggcgaaatcccgccggctggagcgcagcaccaacagcttcagttactcatcataccacaccctggaggagatatatagctggattgacaactttgtaatggagcattccgatattgtctcaaaaattcagattggcaacagctttgaaaaccagtccattcttgtcctgaagttcagcactggaggttctcggcacccagccatctggattgacactggaattcactcccgggagtggatcacccatgccaccggcatctggactgccaataagattgtcagtgattatggcaaagaccgtgtcctgacagacatactgaatgccatggacatcttcatagagctcgtcacaaaccctgatgggtttgcttttacccacagcatgaaccgcttatggcggaagaacaagtccatcagacctggaatcttctgcatcggcgtggatctcaacaggaactggaagtcgggttttggaggaaatggttctaacagcaacccctgctcagaaacttatcacgggccctcccctcagtcggagccggaggtggctgccatagtgaacttcatcacagcccatggcaacttcaaggctctgatctccatccacagctactctcagatgcttatgtacccttacggccgattgctggagcccgtttcaaatcagagggagttgtacgatcttgccaaggatgcggtggaggccttgtataaggtccatgggatcgagtacatttttggcagcatcagcaccaccctctatgtggccagtgggatcaccgtcgactgggcctatgacagtggcatcaagtacgccttcagctttgagctccgggacactgggcagtatggcttcctgctgccggccacacagatcatccccacggcccaggagacgtggatggcgcttcggaccatcatggagcacaccctgaatcacccctactagcagcacgactgagggcaggaggctccatccttctccccaaggtctgtggctcctcccgaaacccaagttatgcatccccatccccatgccctcatcccgacctcttagaaaataaatacaagtttgaacaggc

SEQ ID NO: 1489 - DNA, 914 bp, Homo sapiens
  source 1..914: mol_type = genomic DNA; mol_type = genomic DNA
tctcagcactttgggaggccaaggcaggaggggcgcttgagcccaggaattcaagaccagcctgggaccgggtcccttttaggtgagactagatgaaaagggctcttcagcagctgacttcacagcaactaatttctgacaggtcagagttggcattgctcaaatctgggcttcatttccaagaagtttcacaagtctgccaggggaagtccctggacttcttgcttctttcgtgtaggacaggctgtcgaaacctcagtggataaaagacctagagaatgtgtatcccagaagaagctggccaaggatatgggagcaaccaccatggaccagaagtctctctgggcaggtgtagtggtcttgctgcttctccagggaggatctgcctacaaactggtttgctactttaccaactggtcccaggaccggcaggaaccaggaaaattcacccctgagaatattgaccccttcctatgctctcatctcatctattcattcgccagcatcgaaaacaacaaggttatcatcaaggacaagagtgaagtgatgctctaccagaccatcaacagtctcaaaaccaagaatcccaaactgaaaattctcttgtccattggagggtacctgtttggttccaaagggttccaccctatggtggattcttctacatcacgcttggaattcattaactccataatcctgtttctgaggaaccataactttgatggactggatgtaagctggatctacccagatcagaaagaaaacactcatttcactgtgctgattcatgagttagcagaagcctttcagaaggacttcacaaaatccaccaaggaaaggcttctcttgactgcgggcgtatctgcagggaggcaaatgattgataacagctatcaagttgagaaactggcaaa

SEQ ID NO: 1490 - DNA, 186 bp, Homo sapiens
  source 1..186: mol_type = genomic DNA; mol_type = genomic DNA
ccctactggtccttctgccttagccacaggttctgaaaccaaagcaaaaccaccagagagtgattcattcccgtggagtctccatctgagccctttcctagtccaggcatcccgatgttggtggatggcccatctgagcggccagccctgtgcttcttgctgttggctgtggcaatgtctttcttc

SEQ ID NO: 1491 - DNA, 1874 bp, Homo sapiens
  source 1..1874: mol_type = genomic DNA; mol_type = genomic DNA
cgtgatgccccgcgcctggctgtcgcggttgccgggcaacgcgctgtccatgtcgcgggcctcgctgggactccctgggagatgaggccgcgaggtctcccgccgctcctggtggtgctcctgggctgctgggcctccgtgagcgcccagaccgatgccaccccggcggtgacgacagagggcctcaactccaccgaggcagccctggccaccttcggaactttcccgtcgaccaggccccccgggactcccagggctccagggccctcctccggccccaggcctaccccagtcacggacgggtctcactctgtcactcaggctggagtatagtggcatgatcacagctcactgcagcctcgacctcctaggctcagttgctgttctctgtgtctgtgacttatccccagcacagtgtgacatcaactgctgctgtgatcccgactgcagctccgtggatttcagtgtcttttctgcctgctcagttccagttgtcacgggcgacagccagttttgtagtcaaaaagcagtcatctattcattgaattttacagcaaacccacctcaaagagtatttgaacttgttgaccagattaatccatctattttctgcattcatattacaaactataaacctgcattatcctttattaatccagaagtacctgatgaaaacaattttgatacattgatgaaaacatctgatggttttacattgaatgctgaatcatatgtttccttcacaaccaaactggatattcctactgctgctaaatatgagtatggggttcctctgcagacttcagattcgtttctgagatttccttcgtccctgacatcatctctgtgcactgataataaccctgcagcgtttctggtgaaccaggctgttaagtgcaccagaaaaataaatttagaacagtgtgaagaaattgaagccctcagcatggctttttacagcagcccggaaattctgagggtacctgattcaagaaaaaaggtccctatcactgttcagtccatcgtcattcagtctctaaataaaacgctcacccgacgggaggacactgatgtgctgcagccgactctcgtcaacgctggacactttagcctttgcgtgaatgttgttcttgaggtaaagtacagcctcacatacacagatgcaggtgaagtcaccaaagctgatctctcattcgttctggggacagttagcagcgtagtggtcccactgcagcaaaagtttgaaattcattttcttcaggaaaatacccagccagtccctctcagtggaaaccctggttatgtcgtggggctcccattagctgctggattccagcctcataagggtggagctctcccgtgtcagctcgtagcacagaaggtgaagagcctgctgtggggccagggcttcccagattacgtggccccttttggaaattcccaggcccaggacatgctggactgggtgcccatccacttcatcacccagtcattcaacaggaagcattttgttttgcaggattcctgccagctcccaggggctttggttatagaagtgaagtggactaaatacggatccctgctgaatccacaggccaaaatagtcaatgtaactgcaaatctaatttcatcctcctttcctgaggccaactcaggaaatgaaaggacgattcttatttccactgcggttacttttgtggatgtgtctgcacctgcagaggcaggcttcagagctccaccagccatcaatgccaggctgccctttaacttcttcttcccgtttgtttgacaatgctcagatgcatcagttccttaatatacacgtgaaatttgaaaactgtacattcggtgagattaaattttatatacaacta

SEQ ID NO: 1492 - DNA, 1773 bp, Homo sapiens
  source 1..1773: mol_type = genomic DNA; mol_type = genomic DNA
aaagtctccagaatgaggaaatgttggaagcaaataatatattcagctgagcattcttcctggcagtgggagcaggagcctgatttggaccttaaaagcttagtggcaacaacaaataagcattggcctggaaaatccacatcccaacaggctaaacaaggcaggtgttgagagagataccctctcagactttacacagctaccaaggcaacaatgccaggaaaactattaatcaagatatgatagttcctgtttgcaatcaggagaagaaagcaaagaacactcaggattataaaagcagatgagacctacccactagacctggtcagacacaatgttggcactcttggttctggtgactgtggccctggcatctgctcatcatggtggtgagcactttgaaggcgagaaggtgttccgtgttaacgttgaagatgaaaatcacattaacataatccgcgagttggccagcacgacccagattgacttctggaagccagattctgtcacacaaatcaaacctcacagtacagttgacttccgtgttaaagcagaagatactgtcactgtggagaatgttctaaagcagaatgaactacaatacaaggtactgataagcaacctgagaaatgtggtggaggctcagtttgatagccgggttcgtgcaacaggacacagttatgagaagtacaacaagtgggaaacgatagaggcttggactcaacaagtcgccactgagaatccagccctcatctctcgcagtgttatcggaaccacatttgagggacgcgctatttacctcctgaaggttggcaaagctggacaaaataagcctgccattttcatggactgtggtttccatgccagagagtggatttctcctgcattctgccagtggtttgtaagagaggctgttcgtacctatggacgtgagatccaagtgacagagcttctcgacaagttagacttttatgtcctgcctgtgctcaatattgatggctacatctacacctggaccaagagccgattttggagaaagactcgctccacccatactggatctagctgcattggcacagaccccaacagaaattttgatgctggttggtgtgaaattggagcctctcgaaacccctgtgatgaaacttactgtggacctgccgcagagtctgaaaaggagaccaaggccctggctgatttcatccgcaacaaactctcttccatcaaggcatatctgacaatccactcgtactcccaaatgatgatctacccttactcatatgcttacaaactcggtgagaacaatgctgagttgaatgccctggctaaagctactgtgaaagaacttgcctcactgcacggcaccaagtacacatatggcccgggagctacaacaatctatcctgctgctgggggctctgacgactgggcttatgaccaaggaatcagatattccttcacctttgaacttcgagatacaggcagatatggctttctccttccagaatcccagatccgggctacctgcgaggagaccttcctggcaatcaagtatgttgccagctacgtcctggaacacctgtactagttgagaaagctgatggccttgtttcaaaattctcatttttcatttcttttctttcttgaattcttattttggtttgcctggatgttttgcagatcccaatctttcttttaagcttctgggtctattaaactaggtagatcttttcgtattgatcataataaaagtgaatcattactattggaaaa

SEQ ID NO: 1493 - DNA, 4609 bp, Homo sapiens
  source 1..4609: mol_type = genomic DNA; mol_type = genomic DNA
atctgctcccgagtccccagccccgtgctgataggtgcagcccctggagtcgtggctgtgggcataggtgccagggaggggaggcccgggtcgaaggcataggcagaattggagccctgggttgccaaagcgtcgcagctaagaagccggagcccaggctagtaccggcggggcggggcggggcggggccgggagcgagcatctccatcctcagtttcctccacttgcggcaacgccacagctcggtacagttcggacctccacgccgcagcgaaagacttctgtcctccaggcaccttcactaacccggtgcggagcacttggcgacgcctccctgcccatctcatatctctcggctcatcgctgctctgggcaccagctgcctcttggctggcgctgctgtcacacggtggactgttctggccttactgagctgccgtttggggacatcagattcagcaagaagaattgtatagaaatgtaaaaaacatttatgtgtgcttcacatgtggcatgaaaaaaatgaggacctctggtcaaaattgcctgagttcagaatttcatgctggaaggaaagttagacgtaacttctaatttctagttccagtaagcatctcttcttggaaaatttccaaaaaagagtcctgctctgttgcccaggctggagtacattggtgtgatgatcatggttcactgcagcctcgacctcccaggctcaagcaattctcctacctcagcctcctgagtaactgggactataggatttctttgaagaaaaatgtgcttcttgaatcaactgcagtctctcctctgcataagagctcttaagggtactagcaggatagaagcaaatgaaactgaaagctcatctgcagctcagaaaagcaaagacatggaattttaaagagtgaaggtagcatggtgtcggccatgggtgaacaagacacagccagacaatgtggaccaatttcttcaaactacggcttttctgctgtctgcttgcagtgttgatggtggtggtgctggtcatcaatgttactcaggtagagtacttggaccatgagactgtttcagccactttcatcgacagcagtggacagtttgtttcctcccaggtgacaggaattagccgaaatccctactgtggctatgatcagcagaccctgtccagccaggagcgcatggaggaggactccttgctggctgccttgcaccggcaggttcctgatgtgggcccagtcccctttgtgaagagcactgacccttcttccagctactttgtcatcttgaactctgctgccttctttaaggtgggaagccagcttgaggtgctggttcatgtgcaggattttcaaagaaagcccaagaagtatggtggagactacctgcaggccagaattcactccctcaagctgcaggctggggctgtgggcagggtggtggattaccagaatgggttttacaaggttttctttactttgctatggccaggcaaagttaaagtatccgtatctctggtccaccccagtgaagggatcagagttcttcagcgcttacaggaagataaaccagacagggtctatttcaagagtctcttccgttcaggaagaatttctgaaactactgagtgcaacgtgtgtcttcctgggaatctgcccctgtgtaactttacagacctctacactggggagccctggttctgcttcaaaccaaagaagctcccttgcagcagcagaattacccatttcaaaggtggatacctgaaaggtctcctaaccgctgcagagagtgctttcttccagagtggtgtcaatatcaaaatgccagtcaactccagtggacctgattgggtaactgtgattcccaggagaataaaagaaactaacagtctagaactatctcaaggctcaggaacttttccttctgggtattattataaagaccagtggaggcccagaaagtttaagatgcgtcagtttaatgaccctgacaacattacagagtgcttacaaagaaaagtggtgcatttatttggtgactcaacaatcaggcaatggtttgaataccttactacatttgttccagatttagtggagtttaacttgggtagtcccaagaatgtgggtcccttccttgcagtggaccagaagcacaacatcctgctcaaataccgctgccatggtccacccatccgcttcacgactgtctttagcaatgagctccattatgtggcgaatgagctgaatggcattgtgggagggaagaacacagtggttgccatagctgtatggtctcacttcagcaccttccctttggaagtgtacatccggcggctcaggaacatccgtcgagcagtggttcggctcctcgatcgaagcccaaagaccgtggtggtcatccggacggccaacgcccaagagctgggacctgaggtgagccttttcaacagcgactggtacaactttcagctggacaccatccttcggaggatgttctcaggggttggagtatatctcgtcgatgcctgggagatgaccctggcccattatctaccgcacaagctgcatccagatgaagttattgtgaagaaccagctggacatgttcttgtcctttgtgtgccccttggaaacctagcctgtcttggaagggactggaggaatcatattcaatgaccttctcaattgacctgagttacagaaagtggccccagtgagagatgactgcccttaataagtataaaatttcaaaaagatctggacttaatatgatgacttataaggagcttagaaaatgcaggttacatttatatctacctataggattttatccaatgttgacttagccatggtagaactcttaactgcatctacacactatattgctcttgtaaccaaagatgctaatgagtgtatttgaattagcttctcctaggaggggtgactactttgctaaagagtatgaaaaatgttttgatggaagggacaagtttggttggtagtagagtgtttgtagcttatctggtaaaggaaattgagtgcatctgcatgcatagcacaagtaatccatcttctggcggttaactagagaaagcttatagtcagaggctcttgtgaatgcactgaagactgctgtgtctcaggagtttctcttgatgatctaccttttctgaattacttgaaaaggccaatgtgcttggttcgagttttttagtgaatatttacaatttcctgcttttatctagaaaagaagcaaaagggaaatatgaaagcagtatatataaaatctgtgctttggaattgatatttgcatttggtgattgttttttatttgattcagctaaattttatgtgttgaatacttactctagaataactacttttggaactggaagggggaaatctgtaaatggaaatttatttttatgttctgaaatttgagggtttaggaattgacttttgtgtaaagaatgctacgatattataaagctgtggaagttttttccactagtttcaggtgtttttttttttgttgttgttgttgttattttgaactacttaccaaaattagaagttaaaatctaattagaaattaataagatactaaaattcatgacagttttttgtttgtttgtttgtttgttttttggtatttcttgatttgggcataaaaggcacacccattctctcatgcttggaagaagctgctattcctactggctatctaagaagaatggaattattaattttatttgacttattaattttaaacgagtttaatttgggatcatttagtaagtactcttttctttttgagctgtgatagattatagtctagtttaagttgctcctaagtagacagatgaagaaactagggaggctttagagaggaagacagatgcttgaagtatgaacaatatatacccttagaagaatgggtcaaataatttgggtttttaatttaaaataggagggccccagatcttactttcctgtccttgaggaacaccttcaagtttttaaagtattttagggggaaagaagatttttaattgtttctgagcctaatgaggtaataaaatatattaaaatagtttaattttaatggtccttacgctttacagtacctaaggatcacttgtagtatctgacaaaaatgcagaattaaagagtcatggcagggtgtggtagctcaagcctgtaatcccagcactttgggaggccaggcaggaggattgcttgaggccaggagtttgagaccagcctgggcaacatagtaagacctcatctctacaaaaaataaaaaattatccaggtgtgggccgacagtcccagctactagggaggctaaggcagggtgattgattgagcccagtagtttgaggctgcagtgagttatgattgcgccactacactcccacttgggcaacagacaagagatcttatctctaaaaaatttttgttaaataataaaagaattaaggccagggatgttggctcacatctgtaatcccagcagggattatagtctcgggaggctgaggtgggcggattgcttgagcccggaaggtcaagaccagcctgggtgccatggtgaaaccccatctctac

SEQ ID NO: 1494 - DNA, 562 bp, Homo sapiens
  source 1..562: mol_type = genomic DNA; mol_type = genomic DNA
tgcttctctctctctcttttactcttattctttctctctcactctctctcttttcccacccttaagccaagtacagggatagttgtctcatcattggtggcttaaaatgatgtttttgaacaagaagacgccccatgggtacttttggtgactagcactatctctgtttttttccttttaaattcctgagctattgtttagcagtacacccttttatctccattgctactgaagctgaatgttacttgggtggaaagcataactgctttcttttctatgtccttaaaccctttgataatgttactgtttgagagtccctgaagccaggatactagaagagtctggcttgtctgaacagctgaactacgaaataatggagtagggcagcctctaggtgctgtgctgtcctgaggcctgggccatggtgcccaaggaaagcccctgaagctcaccaggaggaagaagcatgcagggcacccctggaggcgggacgcgccctgggccatcccccgtggacaggcggacactcctggtcttcagctttatcctggcagcagctttg

SEQ ID NO: 1495 - DNA, 585 bp, Homo sapiens
  source 1..585: mol_type = genomic DNA; mol_type = genomic DNA
gcactccagcctgggcgacagagcgagactcctactcaaaaaaaaaaagacttcaaagcaaatacagaaagttacatagttgcaggaaacaacaacaacaacaacaactttgctcttttaatacaaaggactcagttgtcttaagtaatcaaagacctaataatagaaaacataaagcacagaaaattattttgataagacacaaaatctttgttttctagtcagagccctctaaaggtgttgagagagataccctctcagactttacacagctaccaaggcaacaatgccaggaaaactattaatcaagatatgatagttcctgtttgcaatcaggagaagaaagcaaagaacactcaggattataaaagcagatgagacctacccactagacctggtcagacacaatgttggcactcttggttctggtgactgtggccctggcatctgctcatcatggtggtgagcactttgaaggcgagaaggtgttccgtgttaacgttgaagatgaaaatcacattaacataatccgcgagttggccagcacgacccagattgacttctggaagccagattctgtcacac

SEQ ID NO: 1496 - DNA, 1988 bp, Homo sapiens
  source 1..1988: mol_type = genomic DNA; mol_type = genomic DNA
tgccccgcgcctggctgtcgcggttgccgggcaacgcgctgtccatgtcgcgggcctcgctgggactccctgggagatgaggccgcgaggtctcccgccgctcctggtggtgctcctgggctgctgggcctccgtgagcgcccagaccgatgccaccccggcggtgacgacagagggcctcaactccaccgaggcagccctggccaccttcggaactttcccgtcgaccaggccccccgggactcccagggctccagggccctcctccggccccaggcctaccccagtcacggacggtgggtaccatgtgccagctcctggagtccacagtgatccaacctcaaggggacagccccgttgctgttctctgtgtctgtgacttatccccagcacagtgtgacatcaactgctgctgtgatcccgactgcagctccgtggatttcagtgtcttttctgcctgctcagttccagttgtcacgggcgacagccagttttgtagtcaaaaagcagtcatctattcattgaattttacagcaaacccacctcaaagagtatttgaacttgttgaccagattaatccatctattttctgcattcatattacaaactataaacctgcattatcctttattaatccagaagtacctgatgaaaacaattttgatacattgatgaaaacatctgatggttttacattgaatgctgaatcatatgtttccttcacaaccaaactggatattcctactgctgctaaatatgagtatggggttcctctgcagacttcagattcgtttctgagatttccttcgtccctgacatcatctctgtgcactgataataaccctgcagcgtttctggtgaaccaggctgttaagtgcaccagaaaaataaatttagaacagtgtgaagaaattgaagccctcagcatggctttttacagcagcccggaaattctgagggtacctgattcaagaaaaaaggtccctatcactgttcagtccatcgtcattcagtctctaaataaaacgctcacccgacgggaggacactgatgtgctgcagccgactctcgtcaacgctggacactttagcctttgcgtgaatgttgttcttgaggtaaagtacagcctcacatacacagatgcaggtgaagtcaccaaagctgatctctcattcgttctggggacagttagcagcgtagtggtcccactgcagcaaaagtttgaaattcattttcttcaggaaaatacccagccagtccctctcagtggaaaccctggttatgtcgtggggctcccattagctgctggattccagcctcataaggggtctgggattattcagaccacaaatagatatggacagcttactattcttcatagcacaactgagcaagactgcttagcactggagggggtccggaccccagtattatttggttacactatgcaatctggctgtaaactaagactgactggagctctcccgtgtcagctcgtagcacagaaggtgaagagcctgctgtggggccagggcttcccagattacgtggccccttttggaaattcccaggcccaggacatgctggactgggtgcccatccacttcatcacccagtcattcaacaggaaggattcctgccagctcccaggggctttggttatagaagtgaagtggactaaatacggatccctgctgaatccacaggccaaaatagtcaatgtaactgcaaatctaatttcatcctcctttcctgaggccaactcaggaaatgaaaggacgattcttatttccactgcggttacttttgtggatgtgtctgcacctgcagaggcaggcttcagagctccaccagccatcaatgccaggctgccctttaacttcttcttcccgtttgtttgacaatgctcagatgcatcagttccttaatatacacgtgaaatttgaaaactgtacattcggtgagattaaattttatatacaactagc

SEQ ID NO: 1497 - DNA, 602 bp, Homo sapiens
  source 1..602: mol_type = genomic DNA; mol_type = genomic DNA
gcgctagctgggctcggctccgcactgctagctgcgcgccgccctggacggggcgcaccgactgcgcgcgcggctgcgggcaaacatcgggagtcctgcctcagctgccgcttctccagcagcagcttcaggcttctcccgcaggagcttcgggcttctcctggtagagacgtgggaacttttcttctcctggcgaggctgcagaggtgatgggccgctcccggggctcccgcggggaggcggcacggtcttctgagctacgataattttttggaacggcagaaatgattggttctagcaacagatgggaatttggagtcactctgaaatatatcctggaataagtgtgtttgactagaaccacatcttatgaggtccccaaggatgagagtctgtgctaagtcagtgttgctgtcgcactggctctttctagcctacgtgttaatggtgtgctgtaagctgatgtccgcctcaagccagcacctccggggacatgcaggtcaccaccaaatcaagcaagggacctgtgaggtggtcgccgtgcacaggtgctgcaataagaaccgcatagaagagcggtcacaaacggtcaagtgctcttg

SEQ ID NO: 1498 - DNA, 797 bp, Homo sapiens
  source 1..797: mol_type = genomic DNA; mol_type = genomic DNA
gtcggaggtgaggagacgtcgccgggtgaggaagcggggggctagcggcctggcgctgcggcgaccgaccggggcgtcaggatccctggcccccggagagcgaagggcgggcgggtcccggaggcaccttcactaacccggtgcggagcacttggcgacgcctccctgcccatctcatatctctcggctcatcgctgctctgggcaccagctgcctcttggctggcgctgctgtcacacggtggactgttctggccttactgagctgccgtttggggacatcagattcagcaagaagaattgtatagaaatgtaaaaaacatttatgtgtgcttcacatgtggcatgaaaaaaatgaggacctctggtcaaaattgcctgagttcagaatttcatgctggaaggaaagttagacgtaacttctaatttctagttccagtaagcatctcttcttggaaaatttccaaaaaagagtcctgctctgttgcccaggctggagtacattggtgtgatgatcatggttcactgcagcctcgacctcccaggctcaagcaattctcctacctcagcctcctgagtaactgggactataggatttctttgaagaaaaatgtgcttcttgaatcaactgcagtctctcctctgcataagagctcttaagggtactagcaggatagaagcaaatgaaactgaaagctcatctgcagctcagaaaagcaaagacatggaattttaaagagtgaaggtagcatggtgtcggccatgggtgaacaagacacagccagacaatgtggacca

SEQ ID NO: 1499 - DNA, 1917 bp, Homo sapiens
  source 1..1917: mol_type = genomic DNA; mol_type = genomic DNA
agacttgcaatgaagttagaatgaacaggaggagtctgcagcttttcagtgcctgggataactatagtttaaagatcattgtgtaaaataggatttttagtcagcatgcattgttttaaaccgactaactgatagcctaaaactttatttttgcattttgccaatccttggagttttgttttgcagaattaagaaaaaaatgaatgtatgatcatctgaaaagggctttctctcaatcccacttcatggcatgacctctgctggatcattagttctagccagagaagtagcaaaggaacatgacgtctgagacctcccttccctcatcagtggggctgactgagctgggggcttgaagccggaggtaacctttcctgtcgaatgttctctttagagaatggcaatggtctctgcgatgtcctgggtcctgtatttgtggataagtgcttgtgcaatgctactctgccatggatcccttcagcacactttccagcagcatcacctgcacagaccagaaggagggacgtgtgaagtgatagcagcacaccgatgttgtaacaagaatcgcattgaggagcggtcacaaacagtaaagtgttcctgtctacctggaaaagtggctggaacaacaagaaaccggccttcttgcgtcgatgcctccatagtgattgggaaatggtggtgtgagatggagccttgcctagaaggagaagaatgtaagacactccctgacaattctggatggatgtgcgcaacaggcaacaaaattaagaccacgagaattcacccaagaacctaacagaagcatttgtggtagtaaaggaaaaccaaccctctggaaaatacattttgagaatctcaaacatctcacatatatacaagccaaatggatttcttacttgcactttgactggctaccagataatcacagtgcgtttactgtgtgtaacgaaatatcctacagtgagaagacacagcgttttggcaacaccatggaaagtgggcttaaaaaagggttttctcagtgaaatttttgggcatcatgaagaacgatcaactatcttctaatttgaatctatagttactttgtaccatttgaaatatatgtatatatatatatataatattttgaaatattatctattctcttcaagaaatgaacagtaccacagtttgagacggctggtgtacccctttgagttttggatgttttgtctgttttgctttgttttgttagtcatttctttttctaacggcaaggaagatatgtgcccttttgagaattcaagatggcactgacacgggaaggccagctacaggtggactcctggaatttgaggcatcataatgatactgaatcaagaacttccttctgcttctaccagatggcccaaggaagcacatcgtcctgttttattgctttctaccctgtgcaatattagcatgcaagcttggcttacatagtcatactttatattcaattgatatataataaccgttctaacctcttccaggaaaatatttttagaactactagcttttccacttagaagaaaatgaggattcttaagggagccactccaccatgctattaagactctggcagagttatgggtaggatatggatccctacatgaataagtcctgtaaatacaatgtcttaaggctttgtatagctgtcctagactgcagaaatgtcctctgattaaatccaaagtctggcatcgttaactacatagtgctgtagcaacaagtcttatcatggcatctctttctatgtttggtttgctttttccaagagtattcaggtctcctcttgtgagataggaaggccatgaaaacaattagatttcaagatgatctatgtgaccaaatgttggacagccctattaaagtggtaaacaacttctttctaaa

SEQ ID NO: 1500 - DNA, 4080 bp, Homo sapiens
  source 1..4080: mol_type = genomic DNA; mol_type = genomic DNA
ctccatggataactgcatgaccctgagagaaaacctccttagatttagcatcctaggttcctcacacgcctcaccctgaatcctggccctcccgcagccccagcgccatttgtcccatcagtgacaagattcatattctgatgtagactctgttgccagagccagtgttgagccagtccgcctcttccccgggaagtgcctgcccttccctcctgttagggttggctctcgagcttgtgtgccagttcctgggttggccgtgagagttctacagacaaggaggaagtgctctcggtgtatttcctgtggtgggttcacacgcagctagacacagctaacttgagtcttggagctcctagagggaagcttctggaaaggaaggctcttcaggacctcttaggagccaggtaggagtctgggactactagtgaacctagacctgtggctctggccagaggggctaggatgagagacagagggtgtgatggtgggtgctgggagatgtagccgaccttggggctggtggctgggggagtgggtagcctgggaaaggccaggatgtggacggactggtatggcattgagcctgaagtggtccaacttggggttccccagtgcctaggaaagttgtccccttgaatgtcagtgtgaaggtgaaggaggaagcagatgcctgttcatatggaaacaaagacctggctgtgaagaggggaggcggacaccaaagtcctgacacttgggcgggacagaattgatctgtgagagactcatctagttcataccctaggtgaccctgggggtggcatgggggtagattagagatcccagtctggtatcctctggagagtaggagtcccaggagctgaaggtttctggccactgaactttggctaaagcagaggtgtcacagctgctcaagattccctggttaaaaagtgaaagtgaaatagagggtcggggcagtgctttcccagaaggattgctcggcatcctgcccttcccagaagcagctctggtgctgaagagagcactgcctccctgtgtgactgggtgagtccatattctctctttgggtctcaattttgccttccctaatgaaggggtaagattggactaggtaagcatcttacaaccatttgtggtcatgagagctggggtggggaaggattgtcacttgacccccccagctctgtttctaagtgctgaaagagctccaggctatgctacgggaggagaagccagctactgaggaaaagccagctactgagaaaaagcgggagtggtttaccattctcctcccccacctttcaccagagaagaggacgttgtcacagataaagagccaggctcaccagctcctgacgcatgcatcatgaccatgagacacaactggacaccagacctcagccctttgtgggtcctgctcctgtgtgcccacgtcgtcactctcctggtcagagccacacctgtctcgcagaccaccacagctgccactgcctcagttagaagcacaaaggacccctgcccctcccagcccccagtgttcccagcagctaagcagtgtccagcattggaagtgacctggccagaggtggaagtgccactgaatggaacgctgagcttatcctgtgtggcctgcagccgcttccccaacttcagcatcctctactggctgggcaatggttccttcattgagcacctcccaggccgactgtgggaggggagcaccagccgggaacgtgggagcacaggtacgcagctgtgcaaggccttggtgctggagcagctgacccctgccctgcacagcaccaacttctcctgtgtgctcgtggaccctgaacaggttgtccagcgtcacgtcgtcctggcccagctctgggtgaggagcccaaggagaggcctccaggaacaggaggagctctgcttccatatgtggggaggaaagggtgggctctgccagagcagcctgtgaactaatgcccagcattcctcaaggtcagccagacaaaaaggaacttaggtcttgggcagaggaggtgtagcctggggcaaagtgatgagatgtccctcctttccttggcctgatccttgtctgccttcacttccctaggctgggctgagggcaaccttgccccccacccaagaagccctgccctccagccacagcagtccacagcagcagggttaagactcagcacagggccagcagcagcacaaccttgaccagagcttgggtcctacctgtctacctggagtgaacagtccctgactgcctgtaggctgcgtggatgcgcaacacaccccctccttctctgctttgggtcccttctctcaccaaattcaaactccattcccacctacctagaaaatcacagcctccttataatgcctcctcctcctgccattctctctccacctatccattagccttcctaacgtcctactcctcacactgctctactgctcagaaaccaccaagactgttgatgccttagccttgcactccagggccctacctgcatttcccacatgactttctggaagcctcccaactattcttgcttttcccagacagctcccactcccatgtctctgctcatttagtcccgtcttcctcaccgccccagcaggggaacgctcaagcctggttgaaatgctgcctcttcagtgaagtcatcctctttcagctctggccgcattctgcagacttcctatcttcgtgctgtatgttttttttttcccccttcactctaatggactgttccagggaagggatgggggcagcagctgcttcggatccacactgtatctgtgtcatccccacatgggtcctcataaaggattattcaatggaggcatcctgacatctgttcatttaggcttcagttccactcccaggaactttgcctgtcccacgagggagtatgggagagagggactgccacacagaagctgaagacaacacctgcttcaggggaacacaggcgcttgaaaaagaaaagagagaacagcccataatgctccccgggagcagaggccactaatggagagtgggaagagcctggaaagatgtggcctcaggaaaagggatgagagaaaggaggtggtatggaagactcagcaggaacaaggtaggcttcaaagagcctatattcctctttttcccacaccgatcaagtcaactcagtactcacgggagaaaaatagactttatttacaagtaataacatttagaaaagatccatccccggcccttaaaaaccttcccatcactccaaatcccaccccagtgcaagtctggggaaggtagggtgtgagctgctgctgaaggctgtcccccaaccccactcctgagacatagggcccatccgtcctgggaaagagcatcctctggcaggtgctcccaccaggtcagacccagtcctggacttcaagagtgagggcccctgctgggcccagccaccaggacagcaggaaccagggcctactcctcttatggtcccttctagatccagaggctaagaggaagactggccaggcccaaggacccagccatcaaaaccagcctcaaatctggttgtgatggagaagtgactttgctttaagaaaaaaggaggcaaggtagggagagcgcccacactgtccatgctccaggccccctgggccagctccgagaaggcgccagtgaaggaccagggaccaggccagggtgcgggcaggcatcactgtctctaggggtttggctactgttggcctgggagctgagagaaggcactgagagggacagtaggcggaggaccaggtgaggtcagcatcggggacacaggtggggccactcactggtactggccctttagtgctttgcctgaaagagacacagtcacatggccagatgagaacttgcgatactagcctgcacccactggctgggaagatctcttcctgctcccacgcccctgtctggatcccctcccttgtgagccccagggttatcagttgctggctgtgcctgagcagctctgggtgctctccatgagaatggggccatctgtcttctctccttggagaggagctaccagg

SEQ ID NO: 1501 - DNA, 2650 bp, Homo sapiens
  source 1..2650: mol_type = genomic DNA; mol_type = genomic DNA
gttcgattagctcctctgagaagaagagaaaaggttcttggacctctccctgtttcttccttagaataatttggatgggatttgtgatgcaggaaagcctaagggaaaaagaatattcattctgtgtggtgaaaattttttgaaaaaaaaattgccttcttcaaacaagggtgtcattctgatatttatgaggactgttgttctcactatgaaggcatctgttattgaaatgttccttgttttgctggtgactggagtacattcaaacaaagaaacggcaaagaagattaaaaggcccaagttcactgtgcctcagatcaactgcgatgtcaaagccggaaagatcatcgatcctgagttcattgtgaaatgtccagcaggatgccaagaccccaaataccatgtttatggcactgacgtgtatgcatcctactccagtgtgtgtggcgctgccgtacacagtggtgtgcttgataattcaggagggaaaatacttgttcggaaggttgctggacagtctggttacaaagggagttattccaacggtgtccaatcgttatccctaccacgatggagagaatcctttatcgtcttagaaagtaaacccaaaaagggtgtaacctacccatcagctcttacatactcatcatcgaaaagtccagctgcccaagcaggtgagaccacaaaagcctatcagaggccacctattccagggacaactgcacagccggtcactctgatgcagcttctggctgtcactgtagctgtggccacccccaccaccttgccaaggccatccccttctgctgcttctaccaccagcatccccagaccacaatcagtgggccacaggagccaggagatggatctctggtccactgccacctacacaagcagccaaaacaggcccagagctgatccaggtatccaaaggcaagatccttcaggagctgccttccagaaacctgttggagcggatgtcagcctgggacttgttccaaaagaagaattgagcacacagtctttggagccagtatccctgggagatccaaactgcaaaattgacttgtcgtttttaattgatgggagcaccagcattggcaaacggcgattccgaatccagaagcagctcctggctgatgttgcccaagctcttgacattggccctgccggtccactgatgggtgttgtccagtatggagacaaccctgctactcactttaacctcaagacacacacgaattctcgagatctgaagacagccatagagaaaattactcagagaggaggactttctaatgtaggtcgggccatctcctttgtgaccaagaacttcttttccaaagccaatggaaacagaagcggggctcccaatgtggtggtggtgatggtggatggctggcccacggacaaagtggaggaggcttcaagacttgcgagagagtcaggaatcaacattttcttcatcaccattgaaggtgctgctgaaaatgagaagcagtatgtggtggagcccaactttgcaaacaaggccgtgtgcagaacaaacggcttctactcgctccacgtgcagagctggtttggcctccacaagaccctgcagcctctggtgaagcgggtctgcgacactgaccgcctggcctgcagcaagacctgcttgaactcggctgacattggcttcgtcatcgacggctccagcagtgtggggacgggcaacttccgcaccgtcctccagtttgtgaccaacctcaccaaagagtttgagatttccgacacggacacgcgcatcggggccgtgcagtacacctacgaacagcggctggagtttgggttcgacaagtacagcagcaagcctgacatcctcaacgccatcaagagggtgggctactggagtggtggcaccagcacgggggctgccatcaacttcgccctggagcagctcttcaagaagtccaagcccaacaagaggaagttaatgatcctcatcaccgacgggaggtcctacgacgacgtccggatcccagccatggctgcccatctgaagggagtgatcacctatgcgataggcgttgcctgggctgcccaagaggagctagaagtcattgccactcaccccgccagagaccactccttctttgtggacgagtttgacaacctccatcagtatgtccccaggatcatccagaacatttgtacagagttcaactcacagcctcggaactgaattcagagcaggcagagcaccagcaagtgctgctttactaactgacgtgttggaccaccccaccgcttaatggggcacgcacggtgcatcaagtcttgggcagggcatggagaaacaaatgtcttgttattattctttgccatcatgctttttcatattccaaaacttggagttacaaagatgatcacaaacgtatagaatgagccaaaaggctacatcatgttgagggtgctggagattttacattttgacaattgttttcaaaataaatgttcggaatacagtgcagcccttacgacaggcttacgtagagcttttgtgagatttttaagttgttatttctgattagaactctgtaaccctcagcaagtttcatttttgtcatgacaatgtaggaattgctgaattaaatgtttagaaggatga

SEQ ID NO: 1502 - DNA, 552 bp, Homo sapiens
  source 1..552: mol_type = genomic DNA; mol_type = genomic DNA
aactgcttctctctctctcttttactcttattctttctctctcactctctctcttttcccacccttaagccaagtacagggatagttgtctcatcattggtggcttaaaatgatgtttttgaacaagaagacgccccatgggtacttttggtgactagcactatctctgtttttttccttttaaattcctgagctattgtttagcagtacacccttttatctccattgctactgaagctgaatgttacttgggtggaaagcataactgctttcttttctatgtccttaaaccctttgataatgttactgtttgagagtccctgaagccaggatactagaagagtctggcttgtctgaacagctgaactacgaaataatggagtagggcaggctttaccaagccaattcactcaagttgtctcatctataccccttcaaaccctgtgagcctctaggtgctgtgctgtcctgaggcctgggccatggtgcccaaggaaagcccctgaagctcaccaggaggaagaagcatgcagggcacccctggaggcggga

SEQ ID NO: 1503 - DNA, 589 bp, Homo sapiens
  source 1..589: mol_type = genomic DNA; mol_type = genomic DNA
tgtatgtgagcacacccacattttcactgccattatctgggacagcagaaccaggatctgcctacaaactggtttgctactttaccaactggtcccaggaccggcaggaaccaggaaaattcacccctgagaatattgaccccttcctatgctctcatctcatctattcattcgccagcatcgaaaacaacaaggttatcatcaaggacaagagtgaagtgatgctctaccagaccatcaacagtctcaaaaccaagaatcccaaactgaaaattctcttgtccattggagggtacctgtttggttccaaagggttccaccctatggtggattcttctacatcacgcttggaattcattaactccataatcctgtttctgaggaaccataactttgatggactggatgtaagctggatctacccagatcagaaagaaaacactcatttcactgtgctgattcatgagttagcagaagcctttcagaaggacttcacaaaatccaccaaggaaaggcttctcttgactgcgggcgtatctgcagggaggcaaatgattgataacagctatcaagttgagaaactggcaaa

SEQ ID NO: 1504 - DNA, 449 bp, Homo sapiens
  source 1..449: mol_type = genomic DNA; mol_type = genomic DNA
ccagagcactcacgggctgccagggtgagcaggctagaaactcacgacaccagatttcctgctcagcatggacaggacagcaagaggctaaccctctgcccaggtggaagctgaccccaagccacccttcacctggacaggatgagagtgtcaggtgtgcttcgcctcctggccctcatctttgccatagtcacgacatggatgtttattcgaagctacatgagcttcagcatgaaaaccatccgtctgccacgctggctggcagcctcgcccaccaaggagatccaggttaaaaagtacaagtgtggcctcatcaagccctgcccagccaactactttgcgtttaaaatctgcagtggggccgccaacgtcgtgggccctactatgtgctttgaagaccgcatgatcatgagtcctgtgaaaaacaatgtgggcagaggcctaaacat

SEQ ID NO: 1505 - DNA, 3007 bp, Homo sapiens
  source 1..3007: mol_type = genomic DNA; mol_type = genomic DNA
gaggcacattgtccacgtcaagaccaagagctgcatccactagtttgcaccctggaaacaagggtcaatcaaaatgaagcttctcctttgggcctgcattgtatgtgttgcttttgcaaggaagagacggttccccttcattggtgaggatgacaatgacgatggtcacccacttcatccatctctgaatattccttatggcatacggaatttaccacctcctctttattatcgcccagtgaatacagtccccagttaccctgggaatacttacactgacacagggttaccttcgtatccctggattctaacttctcctggattcccctatgtctatcacatccgtggttttcccttagctactcagttgaatgttcctcctctccctcctaggggtttcccgtttgtccctccttcaaggtttttttcagcagctgcagcacccgctgccccacctattgcagctgagcctgctgcagctgcacctcttacagccacacctgtagcagctgagcctgctgcaggggcccctgttgcagctgagcctgctgcagaggcacctgttggagctgagcctgctgcagaggcacctgttgcagctgagcctgctgcagaggcacctgttggagtggagccagctgcagaggaaccttcaccagctgagcctgctacagccaagcctgctgccccagaacctcacccttctccctctcttgaacaggcaaatcagtgaaattctctagaagagtaccatgggttcatttctatactgatgcagaaataagtgaaatctacaaaagttttctttcttttccaaagactatttcattctgttgtattcagagtattcatctcactacattgatttgtttgtggtagtttttccttggacttaatttatattgaaaaaacattgataattaaataaataaaatagataatttagaccaatggtgataaggtctggatgaaaactacgctatggaggactgaaatggcaatcattcagcctagcctggagtctgattatacagctactataggatgatgttagtattggttttgagtgcaataggttttttcctaaacaaacatattttgtagtcaatgaactttttgtcacaaaacagtaaaacatctgtgtttaacctatggtaaacaacatgttaatgaactatgctatccatgacttaatggacagttcaaatgtgacatctacagtttttcatttctcttttatgccagcacacaatcaattcatcaccaattgtcatttgatttacttcaaaaaatatacccccaaatcctaatacttctaaccttctccactgcatctagccaactctagctattgtcatccctaacagaaatggaggaatagcctctttttttttttttttttttgagacgaagtctcacactgttgcacggctgtagtgcaatggtgccaactcagctcactgcaacttccacctcccgggttcaagtgattctcctgcctcagcctcctgagtagccgggattacaggtgtgtgccaccacgcctggctaattttttgtaatttagtacagacaggggttccctatgttggccaggatggtcttgatctcctgacctcatgatctgtccgcctcggcctcccaaagtgctgggaatacaggcgtgagccaccgtgccctgccagaatagcctattaaccagtctacctgcttccacttttcctccaccctgatcacatacacacatgcattatccactgagcagtcacaatcagatgttaaaccaaacattattcagataagatctctgaaaagcctctgatactttctcttttaaaatggaatatattctaaacacctctccaaggacacaagacttaccttgtctaactaatgacttttctaacttcattccctatcattctccatcttgccccatgctcctcatgcagcagcttttttttttttttcctttttcaaatatgttggttttgatcttatccaagaacctttgccctgatgtatgaatgactaactgcttttctacttcgggggtctcatatagaaatcctgcttcagaatactcttccctgagcactctatctaaataaatccctcttctgcaacccagtgctttttgttctattactgacttcttttccttgtagaagttactattactgctttttacctttttatttatttgtgtattgtctttgttgttgccctcatcttatctccacaaaaatatatgctccataaaaacaggcatttctgtgtcttattcagcactttatcagggcctataacaatgcctgggacatattcagtgaccagtgaatatttttggaaggaaagaaaagaagaaagaatgaagtaacaaacaaagaatgaaggaagaaaaaatttttacaaacattcaacatatttttattttgaaataattttgtatttttccctatatcctacattggatcagaatattactgttatgtatagccatgaggacatggtctcaaaaaatgagaaactttcttagacagtaaaattgttaacttgagatgtttgcttccatcttctagagccaagtaggatctaactttaatttgacttagccaataatctgaaactattatagtatctgtctttcacagatacatgcaatattcacttctaaatatttaatgataaatttgtaatcatacatgatagtcaattttaatgattatgttgtcaaaattcaggctttttgtgtgaattgaagacttaaagaagaatttgtaaatatgactgtataagaaacaacagaaagatgaagatgaaccgaaatagaaatatcaagaggctacaaagtcttagcaaattataattgctaatggtacattatgtggtgtttagtatcacatttagaatgtagtcatttgttaagtttttcatggggtaaaagaaagaatttattccaagaaaattttggaattttaaaaataaacatgacatcttatcatga

SEQ ID NO: 1506 - DNA, 1943 bp, Homo sapiens
  source 1..1943: mol_type = genomic DNA; mol_type = genomic DNA
agccctgctgatggggaagtccgaaggcccagtggggatggtggagagcgccggccgtgcagggcagaagcgcccggggttcctggagggggggctgctgctgctgctgctgctggtgaccgctgccctggtggccttgggtgtcctctacgccgaccgcagagggaagcagctgccacgccttgctagccggctgtgcttcttacaggaggagaggacctttgtaaaacgaaaaccccgagggatcccagaggcccaagaggtgagcgaggtctgcaccacccctggctgcgtgatagcagctgccaggatcctccagaacatggacccgaccacggaaccgtgtgacgacttctaccagtttgcatgcggaggctggctgcggcgccacgtgatccctgagaccaactcaagatacagcatctttgacgtcctccgcgacgagctggaggtcatcctcaaagcggtgctggagaattcgactgccaaggccacggtaccccaggaggagagacacgacgtcatcgccttgtaccaccggatgggactggaggagctgcaaagccagtttggcctgaagggatttaactggactctgttcatacaaactgtgctatcctctgtcaaaatcaagctgctgccagatgaggaagtggtggtctatggcatcccctacctgcagaaccttgaaaacatcatcgacacctactcagccaggaccatacagaactacctggtctggcgcctggtgctggaccgcattggtagcctaagccagagattcaaggacacacgagtgaactaccgcaaggcgctgtttggcacaatggtggaggaggtgcgctggcgtgaatgtgtgggctacgtcaacagcaacatggagaacgccgtgggctccctctacgtcagggaggcgttccctggagacagcaagagcatggtcagagaactcattgacaaggtgcggacagtgtttgtggagacgctggacgagctgggctggatggacgaggagtccaagaagaaggcgcaggagaaggccatgagcatccgggagcagatcgggcaccctgactacatcctggaggagatgaacaggcgcctggacgaggagtactccaatctgaacttctcagaggacctgtactttgagaacagtctgcagaacctcaaggtgggcgcccagcggagcctcaggaagcttcgggaaaaggtggacccaaatctctggatcatcggggcggcggtggtcaatgcgttctactccccaaaccgaaaccagattgtattccctgccgggatcctccagccccccttcttcagcaaggagcagccacaggccttgaactttggaggcattgggatggtgatcgggcacgagatcacgcacggctttgacgacaatggccggaacttcgacaagaatggcaacatgatggattggtggagtaacttctccacccagcacttccgggagcagtcagagtgcatgatctaccagtacggcaactactcctgggacctggcagacgaacagaacgtgaacggattcaacacccttggggaaaacattgctgacaacggaggggtgcggcaagcctataaggcctacctcaagtggatggcagagggtggcaaggaccagcagctgcccggcctggatctcacccatgagcagctcttcttcatcaactatgcccaggtgtggtgcgggtcctaccggcccgagttcgccatccaatccatcaagacagacgtccacagtcccctgaagtacagggtactggggtcgctgcagaacctggccgccttcgcagacacgttccactgtgcccggggcacccccatgcaccccaaggagcgatgccgcgtgtggtagccaaggccctgccgcgctgtgcggcccacgcccacccgctgctcggaggcatctgtgcgaaggt

SEQ ID NO: 1507 - DNA, 574 bp, Homo sapiens
  source 1..574: mol_type = genomic DNA; mol_type = genomic DNA
acttttcaaatgctactaaggaaagttagacatggaacttaatagttttcacaggtattcacgagtcctcaggagtccagagacctcagtttgagaacactatcctagcactgaccttgacttccagggtgaccttgagccaggctgctcagtccctctctgcgggggcctagaggctcggtgaggggagcgggacttggttgccatggtcacattgaagccagccgcagctggcccgggcagctgctcctcctgggcccggggccccggacgctcggacaaagccaggcagcgttggcagccccagacccgaccccaaaggcctgagactggggtgactgggacctaagagaatcctgagctggagagatgctgcccccacccccttaggcccgagggatcaggagctatgggaccagaggccctgtcatctttactgctgctgctcttggtggcaagtggagatgctgacatgaagggacattttgatcctgccaagtgccgctatgccctgggcatgcaggaccggaccatcccagacagtgacatctctgcttccagctcctggtcagat

SEQ ID NO: 1508 - DNA, 527 bp, Homo sapiens
  source 1..527: mol_type = genomic DNA; mol_type = genomic DNA
ggacaaagccaggcagcgttggcagccccagacccgaccccaaaggcctgagactggggtgactgggacctaagagaatcctgagctggagagctacgtcatctcaatctcctccttcgctccctggcctcagtttccagtttattcagtggcatcaggcccccgacagctgctctcgggagccgcctcccgacacccgagccccgccggcgcctcccgctcccggctcccggctcctggctccctccgcctcccccgcccctcgccccgccgccgaagaggccccgctcccgggtcggacgcctgggtctgccgggaagagcgatgagagagatgctgcccccacccccttaggcccgagggatcaggagctatgggaccagaggccctgtcatctttactgctgctgctcttggtggcaagtggagatgctgacatgaagggacattttgatcctgccaagtgccgctatgccctgggcatgcaggaccggaccatcccagacagtgacatctctgcttccagct

SEQ ID NO: 1509 - DNA, 2520 bp, Homo sapiens
  source 1..2520: mol_type = genomic DNA; mol_type = genomic DNA
aacttcaatttttctgcagtggctctgggtccagccccttacttaaagatctggaaagcatgaagactgggctttttttcctatgtctcttgggaactgcagctgcaatcccggtgaaaaggagataagaagcaaaggagcaaaccaaacctaatatgaatcctgtactttggccagaagccgtggctcacatctgtaatcccagcactttgggaggccaagacaaatgcaagattattatctgatcattccaaaccaactgctgaaacggtagcacctgacaacactgcaatccccagtttaagggctgaagctgaagaaaatgaaaaagaaacagcagtatccacagaagacgattcccaccataaggctgaaaaatcatcagtactaaagtcaaaagaggaaagccatgaacagtcagcagaacagggcaagagttctagccaagagctgggattgaaggatcaagaggacagtgatggtcacttaagtgtgaatttggagtatgcaccaactgaaggtacattggacataaaagaagatatgagtgagcctcaggagaaaaaactctcagagaacactgattttttggctcctggtgttagttccttcacagattctaaccaacaagaaagtatcacaaagagagaggaaaaccaagaacaacctagaaattattcacatcatcagttgaacaggagcagtaaacatagccaaggcctaagggatcaaggaaaccaagagcaggatccaaatatttccaatggagaagaggaagaagaaaaagagccaggtgaagttggtacccacaatgataaccaagaaagaaagacagaattgcccagggagcatgctaacagcaagcaggaggaagacaatacccaatctgatgatattttggaagagtctgatcaaccaactcaagtaagcaagatgcaggaggatgaatttgatcagggtaaccaagaacaagaagataactccaatgcagaaatggaagaggaaaatgcatcgaacgtcaataagcacattcaagaaactgaatggcagagtcaagagggtaaaactggcctagaagctatcagcaaccacaaagagacagaagaaaagactgtttctgaggctctgctcatggaacctactgatgatggtaataccacgcccagaaatcatggagttgatgatgatggcgatgatgatggcgatgatggcggcactgatggccccaggcacagtgcaagtgatgactacttcatcccaagccaggcctttctggaggccgagagagctcaatccattgcctatcacctcaaaattgaggagcaaagagaaaaagtacatgaaaatgaaaatataggtaccactgagcctggagagcaccaagaggccaagaaagcagagaactcatcaaatgaggaggaaacgtcaagtgaaggcaacatgagggtgcatgctgtggattcttgcatgagcttccagtgtaaaagaggccacatctgtaaggcagaccaacagggaaaacctcactgtgtctgccaggatccagtgacttgtcctccaacaaaaccccttgatcaagtttgtggcactgacaatcagacctatgctagttcctgtcatctattcgctactaaatgcagactggaggggaccaaaaaggggcatcaactccagctggattattttggagcctgcaaatctattcctacttgtacggactttgaagtgattcagtttcctctacggatgagagactggctcaagaatatcctcatgcagctttatgaagccaactctgaacacgctggttatctaaatgagaagcagagaaataaagtcaagaaaatttacctggatgaaaagaggcttttggctggggaccatcccattgatcttctcttaagggactttaagaaaaactaccacatgtatgtgtatcctgtgcactggcagtttagtgaacttgaccaacaccctatggatagagtcttgacacattctgaacttgctcctctgcgagcatctctggtgcccatggaacactgcataacccgtttctttgaggagtgtgaccccaacaaggataagcacatcaccctgaaggagtggggccactgctttggaattaaagaagaggacatagatgaaaatctcttgttttgaacgaagattttaaagaactcaactttccagcatcctcctctgttctaaccacttcagaaatatatgcagctgtgatacttgtagatttatatttagcaaaatgttagcatgtatgacaagacaatgagagtaattgcttgacaacaacctatgcaccaggtatttaacattaactttggaaacaaaaatgtacaattaagtaaagtcaacatatgcaaaatactgtacattgtgaacagaagtttaattcatagtaatttcactctctgcattgacttatgagataattaatgattaaactattaatgataaaaataatgcatttgtattgttcataatatcatgtgcacttcaaga

SEQ ID NO: 1510 - DNA, 636 bp, Homo sapiens
  source 1..636: mol_type = genomic DNA; mol_type = genomic DNA
agaaactctgtgagggttgtcagggacactgagaggtgggtgtgtgcatgccacatttagcctcgctgtttacagccagttcaagatgctgcccccacccccttaggcccgagggatcaggagctatgggaccagaggccctgtcatctttactgctgctgctcttggtggcaagtggagatgctgacatgaagggacattttgatcctgccaagtgccgctatgccctgggcatgcaggaccggaccatcccagacagtgacatctctgcttccagctcctggtcagattccactgccgcccgccacagcaggttggagagcagtgacggggatggggcctggtgccccgcagggtcggtgtttcccaaggaggaggagtacttgcaggtggatctacaacgactgcacctggtggctctggtgggcacccagggacggcatgccgggggcctgggcaaggagttctcccggagctaccggctgcgttactcccgggatggtcgccgctggatgggctggaaggaccgctggggtcaggaggtgatctcaggcaatgaggaccctgagggagtggtgctgaaggaccttgggccccccatggttgcccgactggttcgcttctacccccgggctg

SEQ ID NO: 1511 - DNA, 455 bp, Homo sapiens
  source 1..455: mol_type = genomic DNA; mol_type = genomic DNA
atgctgccttgcctcgccctgcttctcctgatggagctgtccgtgtgcactgtggcaggtgatggtggagaggaacagacactcagcactgaagcagagacctgggtaattgtggccttggaggtacttttggggagaggctctgacgagggcaggggataatcggcagtgcagaggcagaagatcccctgcatggctgctgggagagcaggcagtctgcaaggcaagttgtctgactctctaccatgggtagattcaaggctatgagccctggcctggcagacctccgaagtgtgtgtgtgtgtgtgtgtgtgtgtgtgtgtgtctgtgtgtgtgtgtgtgtgtgtaagaaatacttatttaacacacggtatatctctggcactgtctgaaatgctttataaatattaactcaatcctcccatcaacctcatggggaagcgagtgggaggtga

SEQ ID NO: 1512 - DNA, 572 bp, Homo sapiens
  source 1..572: mol_type = genomic DNA; mol_type = genomic DNA
agaggcagccaccttctggaagtgggaactggggggactggatgtctgggtctcaggaaggcagagcagggataactgggcccaagatgccctgaacctgataagaggtggcagtcgagtccctcaggactccagggcctggagacttcagtacagggctctgagaccagtacaggttaggatagcttttcctgcagcaggggaggggagagtagttacttgggtttgtaaggagatgccatttagaatagttttatgtggggtaagcttcctgggcctgaggaacagagtagggattttcaaactttaatgggcacaggtcacctgggaattgtgttaaaaggcagattttgattgagcaggtcaagggtgagcctgagattctgatttcttccatgcttccagagatgctgcccccacccccttaggcccgagggatcaggagctatgggaccagaggccctgtcatctttactgctgctgctcttggtggcaagtggagatgctgacatgaagggacattttgatcctgccaagtgccgctatgccctgggcatgcaggaccggaccat

SEQ ID NO: 1513 - DNA, 571 bp, Homo sapiens
  source 1..571: mol_type = genomic DNA; mol_type = genomic DNA
ctcagccgttggaacgtccttgggcttctgaactagtgcccatgtgtgcctcggcctttcccaagggccagcttcttcctggcccccgacagctgctctcgggagccgcctcccgacacccgagccccgccggcgcctcccgctcccggctcccggctcctggctccctccgcctcccccgcccctcgccccgccgccgaagaggccccgctcccgggtcggacgcctgggtctgccgggaagagcgatgagaggtgtctgaaggtggctattcactgagcgatggggttggacttgaaggaatgccaagagatgctgcccccacccccttaggcccgagggatcaggagctatgggaccagaggccctgtcatctttactgctgctgctcttggtggcaagtggagatgctgacatgaagggacattttgatcctgccaagtgccgctatgccctgggcatgcaggaccggaccatcccagacagtgacatctctgcttccagctcctggtcagattccactgccgcccgccacagcaggttggagagcagtgacggggatggggcctgg

SEQ ID NO: 1514 - DNA, 460 bp, Homo sapiens
  source 1..460: mol_type = genomic DNA; mol_type = genomic DNA
gtgtttgctctgtctcagaaactctgtgagggttgtcagggacactgagagagatgctgcccccacccccttaggcccgagggatcaggagctatgggaccagaggccctgtcatctttactgctgctgctcttggtggcaagtggagatgctgacatgaagggacattttgatcctgccaagtgccgctatgccctgggcatgcaggaccggaccatcccagacagtgacatctctgcttccagctcctggtcagattccactgccgcccgccacagcaggttggagagcagtgacggggatggggcctggtgccccgcagggtcggtgtttcccaaggaggaggagtacttgcaggtggatctacaacgactgcacctggtggctctggtgggcacccagggacggcatgccgggggcctgggcaaggagttctcccggagctaccggctgcgttact

SEQ ID NO: 1515 - DNA, 542 bp, Homo sapiens
  source 1..542: mol_type = genomic DNA; mol_type = genomic DNA
gagcgggactgcagccagccccctggggcgccagctttggaggcccgagggatcaggagctatgggaccagaggccctgtcatctttactgctgctgctcttggtggcaagtggagatgctgacatgaagggacattttgatcctgccaagtgccgctatgccctgggcatgcaggaccggaccatcccagacagtgacatctctgcttccagctcctggtcagattccactgccgcccgccacagcaggttggagagcagtgacggggatggggcctggtgccccgcagggtcggtgtttcccaaggaggaggagtacttgcaggtggatctacaacgactgcacctggtggctctggtgggcacccagggacggcatgccgggggcctgggcaaggagttctcccggagctaccggctgcgttactcccgggatggtcgccgctggatgggctggaaggaccgctggggtcaggaggtgatctcaggcaatgaggaccctgagggagtggtgctgaaggaccttgggccccccatggttg

SEQ ID NO: 1516 - DNA, 1156 bp, Homo sapiens
  source 1..1156: mol_type = genomic DNA; mol_type = genomic DNA
tatatccaaggtgcagcagctgagcattccaaattcgggaaccaccagaaaggctggcctctcttcaacatgggatcttctggacttttgagcctcctggtgctattcgtcctcttagcgaatgtccagggacctggtctgactgattggttatttcccaggagatgtcccaaaatcagagaagaatgtgaattccaagaaagggatgtgtgtacaaaggacagacaatgccaggacaacaagaagtgttgtgtcttcagctgcggaaaaaaatgtttagatctcaaacaagatgtatgcgaaatgccaaaagaaactggcccctgcctggcttattttcttcattggtggtatgacaagaaagataatacttgctccatgtttgtctatggtggctgccagggaaacaataacaacttccaatccaaagccaactgcctgaacacctgcaagaataaacagccgtgtcccaaaatcaaagtggaatgcgaagtggaagaaatagaccagtgtaccaaacccagagattgcccagaaaacatgaagtgttgcccgttcagccgtggaaagaaatgtttagacttcagaaaggcctctctgtctacataaatccaggatgccttccctgaccaccttagaccgcctacactctttcttctctgcccatattattgagctctaaagaagatcatcaaggaccattcgttcattctattcattcaacaaatattgattggtgcccctgacacccatgatgggttccacttgctcattgtggccaggaaggtcagaaaagtttttctgggaaagagatccatgatttaagatctgaaagatgagtacttagaccaaaaatgggaagaaatagcctttcaggccagataataggatgtgcaaaggctctgtggcaggaggcaggatgttcaggtctagaaaggctagaaagcagagagtgagcaagagacaagaaacaggaaactggtagtgtatattcagggcaacttgaatctgtattcccaagtggccatcctcaagttttggggtcaaataaatgccctacttaatgatattttctgaatcttgttactttaggttgacatacctttcaagacaataactaggttttcagtgctttgataaaacctcaaatgtgtgg

SEQ ID NO: 1517 - DNA, 568 bp, Homo sapiens
  source 1..568: mol_type = genomic DNA; mol_type = genomic DNA
cagttgcttatagtctaggaagggatcacttgtgtaacatgggagcaaatgctgcctagcggaatattcgtgacttgggacatgttcccgatttgaggtgaaaccatgaagagaaaatagaatacttaataatgcttttccgcaaccgcttcttgctgctgctggccctggctgcgctgctggcctttgtgagcctcagcctgcagttcttccacctgatcccggtgtcgactcctaagaatggaatgagtagcaagagtcgaaagagaatcatgcccgaccctgtgacggagccccctgtgacagaccccgtttatgaagctcttttgtactgcaacatccccagcgtggccgagcgcagcatggaaggtcatgccccgcatcattttaagctggtctcagtgcatgtgttcattcgccacggagacaggtacccactgtatgtcattcccaaaacaaagcgaccagaaattgactgcactctggtggctaacaggaaaccgtatcacccaaaactggaagctttcattagtcacatgtcaaaaggatccggagcctctttcgaaag

SEQ ID NO: 1518 - DNA, 556 bp, Homo sapiens
  source 1..556: mol_type = genomic DNA; mol_type = genomic DNA
agttagacatggaacttaatagttttcacaggtattcacgagtcctcaggagtccagagacctcagtttgagaacactatcctagcactgaccttgacttccagggtgaccttgagagatgctgcccccacccccttaggcccgagggatcaggagctatgggaccagaggccctgtcatctttactgctgctgctcttggtggcaagtggagatgctgacatgaagggacattttgatcctgccaagtgccgctatgccctgggcatgcaggaccggaccatcccagacagtgacatctctgcttccagctcctggtcagattccactgccgcccgccacagcaggttggagagcagtgacggggatggggcctggtgccccgcagggtcggtgtttcccaaggaggaggagtacttgcaggtggatctacaacgactgcacctggtggctctggtgggcacccagggacggcatgccgggggcctgggcaaggagttctcccggagctaccggctgcgttactcccgggatggtcgccgctggatgggctggaa

SEQ ID NO: 1519 - DNA, 673 bp, Homo sapiens
  source 1..673: mol_type = genomic DNA; mol_type = genomic DNA
acattgaagccagccgcagctggcccgggcagctgctcctcctgggcccggggccccggacgctcggacaaagccaggcagcgttggcagccccagacccgaccccaaaggcctgagactggggtgactgggacctaagagaatcctgagctggaggcccccgacagctgctctcgggagccgcctcccgacacccgagccccgccggcgcctcccgctcccggctcccggctcctggctccctccgcctcccccgcccctcgccccgccgccgaagaggccccgctcccgggtcggacgcctgggtctgccgggaagagcgatgagagagatgctgcccccacccccttaggcccgagggatcaggagctatgggaccagaggccctgtcatctttactgctgctgctcttggtggcaagtggagatgctgacatgaagggacattttgatcctgccaagtgccgctatgccctgggcatgcaggaccggaccatcccagacagtgacatctctgcttccagctcctggtcagattccactgccgcccgccacagcaggttggagagcagtgacggggatggggcctggtgccccgcagggtcggtgtttcccaaggaggaggagtacttgcaggtggatctacaacgactgcacctggtggctctggtggg

SEQ ID NO: 1520 - DNA, 2970 bp, Homo sapiens
  source 1..2970: mol_type = genomic DNA; mol_type = genomic DNA
agaataattgggaggagtctggcaggaaggaagccaagtttcctgaggccctcaccagaagctcatcagaagcagatgctggcaccactcttcttatgctgtctgcgtaacttgttcagaaaactcattagcttccaacctcctcaattaggcagaacaaacatgcattactccaaattgccccgcactgcgatagagacagagttcaagcagaatgttggcccaccacccaaggatctgaccgctgaagtttacttcccttcaatcaaatcgagatcacatcttcctgcagttttctataatcagtatttcaagcatccaaaatgtgtaggagaatatggacccaagaacggagcagagagacaaatagaggaacggaaagttttgcctacaaccatgatgttctcaatgttagctgactgtgttctaaaatccactccaattcccattttgggagttgctatgtgatgaaggtctgcccctgtggtgttgggacaacttgctcatggagttgcagttcttgcctaacaggaacccaccatggtaagaaaaagactcaagctggtttatttgtttttaaggttgcaaggtaatcaagtccataaccacacttgctctcacatttaccaaaataggccaatctcagaactaaatgataaaaatgaaaattaatcagggactcccatgggcctcacatatatggcagttttgaatctgttctttttttcactatcataattgtttttttaaactcattttctctgcttgaatacacaactgtaaaaaaaagtgggggtagtggtggtgatagaaatgaataaacccatggaaacagtgagacatctacagagacaaaattaggaaggaaggaaacaaaagcaatttcagtatctctgtgcaaggcctgcatacctttccttgccaatacccgtggattgggcttgtctcaggaggtagcaggtgtttccttgactcacacagaaaacaagcccttgggcttcttgtgctgttagggcaagttacgttcagcacatgaacactggaccctgctttgcctgtccgtccttcccagaagagacacagatcacagatgatcaagtagttgagaaaacagttcaagaggaggctttgtatcttttctttcttttctttccttttttttttttttttgaaacggagtctcgctctgttgcccaggctggagtgcagtggcattatctcggctcactgcagcctttgcctcccgggttcaagtgattctcctgcctcagcctcctgagtagctgggtttacaggtgcctgccagcacgcccagctaatttttgtatttttagtagagacggggtttcactgtgttagccaggatggtctcgatctcctgacctcatgatccacccgcttcagcctcccaaagtgctgggattacaggcataagccacagcacccggccctgtgtcttttcttaatttgagcgaacttaaagtaaaaacgcttcttaacattataaagtaggactatgtcccctccattgaatttttgtaaaaaagtcgaatagggatagaaagcaagcaaccagatagaatatcatgccccagaacatcatttaccttggtagaacattaccactttaacacatagaaaccttttcacactagttaacaaatagcattaagcatgattcaagtcaagattttaaaaacttggctgatgcctctcattaagagttgaaaactatataagactcttgctccaggaaactgtgttctgacattttaatagtattgcgttagcaagagcagaaaatccatgaacttagattcacagaaagtaaatcaagaatccatccaaaatggagtgcctcttgctgagtgatgggatggttttcatgtgagatgtcagtgcagcttctatacttgacataaaagttcccattaaaaaaaacggaactgctgctcaatttttttttcatcaagcagagttacctaaagtgctttttagaagagactattaggaaaggaatggaaagtagtcattatgactaatctgctttaggagttggggtaaccagtattacaggagggactttcagagccatggggaccttttaggcaactcaaattccttcaattgtttgcagtggtcctctcgaggggatgtaatgagttgacatgcaccagaacagatagaatgcactgccagctggtagtttactcttgtacaggaaggctgcttttctaacacacaactctttgttgtgttaaagagaaataaatatataaaagcctaaaagtaagctttcaattctttatgtctggcaaaattgtcagtacaatgtgccttgaggatatatccatggtgctgtcttacaaggttattacgaaagaataagctcatactataataaccaccccatacactttacagtttatgaagaacttacatatacattttctcagttgaacctcacaacatcagtgggaggcaggggaggcagatattattatctcttgagagggagtgaccctgctgctgctgctgtatatgtgtggcttttggtttaggaagactaagttgattgtgttgtattttcaagtattttatatcgtacaaggatgtttattgcagcactgtttataacaaggaaaaattggaacctactcgaatgcttgctaataggggactcattaaactatggtacaagcttagatatgactctgtagtcattaagaattttgatgaggtattagaaagaaatgtattgatgttgaagtatatttattgatgaaggaaattgttcacaatatttcagccaataaacaatagtatatgcatttttttgtaataggaaaaaatgcacacagtaaaatagtggttatctttgtgtgcggtgaatatgtatgatacttgttttctttttcatgctcacctatcaattctaatcttagtgtcaataaatattaaaaatgtact

SEQ ID NO: 1521 - DNA, 453 bp, Homo sapiens
  source 1..453: mol_type = genomic DNA; mol_type = genomic DNA
ctcttcgctcatcgccctgcgcgccctgccccgcagatgccggcgatcgcggtgttggcggcggccgccgcggcgtggtgcttcctccaagtcgagagccggcacctggacgcgctcgccggaggcgcgggccccaaccacggcaatttcctagacaatgaccagtggctgagcaccgtctcccagtacgaccgggacaagtactggaaccgctttcgagacgatgattatttcagaaactggaatcccaacaagccctttgaccaagccctggacccatccaaggacccctgcctgaaggtaaaatgcagccctcacaaagtgtgtgtgacccaggactaccagaccgccctgtgtgtcagccgcaagcacctgctccccaggcaaaagaaggggaacgtggcccagaaacactgggttggaccttcgaatttggtcaagtgcaagccctgt

SEQ ID NO: 1522 - DNA, 871 bp, Homo sapiens
  source 1..871: mol_type = genomic DNA; mol_type = genomic DNA
atgaggcttctcattctcacctgtcttgtggctgttgctcttgccaggcctaaacttcctcttagatacccagaacgccttcagaatccatcagagagcagtgagcctataccattagaatcaagagaggaatacatgaatggtatgaacaggcagagaaacattctgagagaaaaacagactgatgaaatcaagaactgtgttgtggcagagcctgagaagatggaatccagcatcagttcatcgagtgaggaacagttttgtagactgaacgaatacaaccaacttcagctgcaagctgcccatgcccaggagcaaattcgcagaatgaatgaaaacagccatgtccaagtgcctttccagcagctcaaccaacttgctgcctacccctatgctgtttggtactatccacaaatcatgcagtatgttcctttcccaccgttttccgacatctccaatcccactgctcatgaaaattatgaaaaaaataacgtcatgctacagtggtgatatgattgaaaatttcattctctgaatttctcctctcaaggaaaaccatcttatctgaagactggactgttgttttagaatagtaaaatcccatattgaaggaaattgttctttttgagttatctacttaatagcatatcattctttttcttaagctaaattttcctagagagtttattgtctaaatttcagttgtgtcttgccatatggagggcacctaatcagagggtattaaagtgtttactaagttttctagtggacattttgtttaaaaagtctttgaattgccagttctgtaagtgccatcaattaaaatagttttgtgcagtgacagagattttcttttttcttttcaataaat

SEQ ID NO: 1523 - DNA, 1387 bp, Homo sapiens
  source 1..1387: mol_type = genomic DNA; mol_type = genomic DNA
gcaactcgaacttggtcggggcgcggatcccgagagggaaagtcataacaaccgcacgagggagttcgactggcgaactggaaggccacgcctcctcccgcctgccccctcagccctgtggctgggggcagagctcagatttattatctaggatagatttggatgaactaatgaaaaaagatgaaccgcctcttgattttcctgataccctggaaggatttgaatatgcttttaatgaaaagggacagttaagacacataaaaactggggaaccatttgtttttaactaccgggaagatttacacagatggaaccagaaaagatacgaggctctaggagagatcatcacgaagtatgtatatgagctcctggaaaaggattgtaatttgaaaaaagtatctattccagaaggatatggagtaatagtactaaatcccaatgaaaactatattgaagtagaaaagccgaagatacacgtacagtcatcatctgatagttcagatgaaccagcagaaaaacgggaaagaaaagataaagtttctaaagaaacaaagaagcgacgtgatttctatgagaagtatcgtaacccccaaagagaaaaagaaatgatgcaattgtatatcagagaaaatggttctcctgaagaacatgcaatctatgtttgggatcatttcatagctcaggctgctgctgagaatgtgtttttcgttgctcacagctatggaggacttgcttttgttgaactgatgattcaacgagaagccgatgtaaaaaataaggtaactgctgtggcattgacagactctgttcacaatgtgtggcatcaagaagctggcaaaacgattcgagaatggatgagagagaactgttgtaattgggtctctagctcagaaccattagacacatcagtggagtccatgctacctgattgcccccgggtctcagcaggcaccgaccgtcacgagctaacttcctggaagagctttccgtctattttcaaattctttaccgaagcctcagaggccaagaccagctccctgaagccggctgtgacgcgccgctcccaccgcatcaagcacgaagagctgtaagaggagcgagcgcgacgggggaggccgccctggcgcacccacccgcacgcctcctcactgcttgtgtcgagcggactcccagcccctcattagattgttttcttcccagagcccagggtcgtgatatatacatctaaatagcgttttgcattatttctagatgagtgcaactgtcaaagcaatatgggttcactggtcgtgcttcctgcgggctgagcgcgggctgagcgctgccagtcagcgctcacattaaggctgacagcgccctgcctggctcggccggcgaagctctaatt

SEQ ID NO: 1524 - DNA, 7719 bp, Homo sapiens
  source 1..7719: mol_type = genomic DNA; mol_type = genomic DNA
ggcagctgtgctggctgccgctgctggcaccgctcctgttgctgcgaccgccaggggtccagtccgccggccccatccgggccttcgtggtgccccacagccacatggacgtgggctgggtctacactgtgcaggaaagcatgcgggcgtacgccgccaatgtctacacctcagtggtggaagagctggcccgcggccagcagcgccggttcatcgctgtggagcaggagtttttccggctgtggtgggatggcgtcgcctcggaccagcagaaataccaggtccgccagctcctggaggaaggacgcctggaatttgtcatcggaggccaggtcatgcatgacgaggctgtgacgcaccttgatgaccagatcctgcagctcacagaaggacacgggtttctctatgaaacatttgggatccggccacagttctcctggcacgttgacccgtttggcgcctctgccacgacgcccaccctatttgcgctggcgggcttcaatgcccacctcggctcccggatcgactacgacctgaaggcagccatgcaggaggcccgggggctgcagttcgtgtggcgagggtccccatccctctcagagcggcaggaaatcttcacgcacatcatggaccagtacagctactgcaccccgtcccacatccctttctccaacaggtcaggattttactggaatggcgtggctgtcttccccaagcctccccaagatggggtgtaccccaacatgagtgagcctgtcaccccagccaacatcaacctctatgccgaggccctggtggccaacgtgaagcagagggccgcctggttccggacaccgcacgtcctctggccctggggatgtgacaagcagttcttcaatgcctcggtgcagtttgccaacatggacccgctgctggaccacatcaacagccatgctgccgagctcggtgtctcggtgcagtatgccacgctgggcgactacttccgtgccctgcacgctctcaatgtcacctggcgtgtccgcgaccaccacgacttcctgccctattccacagaaccattccaggcctggacgggcttctacacgtcccgcagctcactgaaggggctggcccggcgagccagcgccttgttgtatgccggggagtccatgttcacacgctacctgtggccggccccccgtgggcatctggaccccacctgggccctgcagcagctccagcagcttcgctgggccgtctccgaggtccagcaccatgatgccatcactgggactgagtcccccaaggtgagagacatgtacgcaacgcacctggcctcggggatgctgggcatgcgcaagctgatggcctccatcgtcctagatgagctccagccccaggcacccatggcggccagctccgatgcaggacctgcaggacattttgcctcggtctacaacccgctggcctggacggtcaccaccatcgtcaccctgactgttggtttccctggagtccgcgtcacagatgaggcgggccacccagtgccctcgcagatccagaactcaacagagaccccatctgcgtatgacctgcttattctgaccacaatcccaggcctcagttaccggcactacaacatcagacccactgcaggggcccaagagggcacccaggagccggctgccactgtggcgagcacccttcaatttggccgcaggctgaggagacgcaccagccatgcgggcaggtacttggtgcctgtggcaaacgactgctacattgtgctgctcgaccaggataccaacctgatgcacagcatctgggagagacagagtaaccgaacggtgcgcgtgacccaggaattcctggagtaccacgtcaacggggatgtgaaacagggccccatttccgataactacctgttcacaccgggcaaggccgcggtgcctgcgtgggaagctgtggaaatggagattgtggcgggacagcttgtgactgagatccggcagtacttctacaggaacatgacagcacagaattacacgtatgcaatccgctcccggctcacccatgtgccgcagggccatgacggggagctgctctgccaccggatagagcaggagtaccaagccggccccctggagctgaaccgtgaggctgtcctgaggaccagcaccaacctaaacagccagcaggtcatctactcagacaacaacggctaccagatgcagcggaggccctacgtttcctatgtgaacaacagcatcgcccggaattactaccccatggttcagtcggccttcatggaggatggcaaaagcaggcttgtgttgctgtcggagcgggcacatggcatctccagccaagggaatgggcaggtggaggtcatgctccaccggcggctgtggaacaacttcgactgggacctgggctacaacctcacgctgaacgacacctcagtcgtccacccagtgctctggcttctgctgggatcctggtccctcaccactgccctgcgccagaggagcgcactggcgctgcagcacaggcccgtggtgctgttcggagacctcgctgggactgcgccgaagctcccaggaccccagcagcaagaggccgtgacgctgcccccgaatcttcacctgcagatcctgagcatccctggctggcgctacagctccaaccacacggagcactctcagaatctccggaaaggccatcgaggggaagcccaggctgacctccgccgtgtcctgctgcggctctaccacctatatgaagtgggcgaggacccagtcctgtctcagccagtgacagtgaatctggaggtgaacttccccacccccatccagaccataagccagggaagcaaaccctagatgaagccccaagaaactgccttggcaaagagatccacgagggcttcctcccaaatggacgctggtatgggccccaccccgcccttcttcatggtcttctgggtttgtcaggtattacaactggcctggttttttagggttttttgtgtatatgtgagacaggatctcactctgttgcccagtctggggtgcagtggcacaatctcagctcactgcaacctctgcctccctggctcaagtgatcctcccacctcaacctcccaagtaactgggatcacaggggcgcgccaccacgatggctaagtttttttttttttttttgagaccgagtttcgctctcgtcccccaggctggagtgcaatggtgcgctctcagctggctgcaacctccatctcccaggttcaagtgattctcctgcctcagcctcccgagtagctgggattacaggcatgtgccaccacgcccggctaatttttttgtacttttagtagagacagggtttctccatgttggtcaggctggtcacgaacccctgacttcaggtgatccacctgcctcggcctcgcaaagtgctgggattacaggcgtgagccaccaagcctggcctagtttttttatttttagtagagacacggtcttgctgtgttgctcaggctggtctcgaacgtctggcctcaagcaatctgcctgtcttagcctcctgaagtgctgggattacaggcgtgagtggcctgtattttctttcttatttattctgtggtaaaacttttaaaacacagacaacatctgtgtaatccaaaaacaaaacagattccccatagagttgctttgaaaggtgacttagagtcagacaatccagggtccacacccaggcccctctacgggggcatctccggcaccccatgcctctgggcctcagtttccccccatgtaaaatggggagaggtgagagttctttgcccagaaggttgctgagaggccctggcactaaggggcctcgtgcagtgtcagggcccccaggcctcgtccccttccaggttcccctcttggctgatgttgccctctcagctctactatcaggcgaggcttccgccacctggcctgcccacgctccctccccagaaggcatgacctgagccgcctcatttctttcccagtttgcattctttctatttcatttcctgctcatggagaatttctgtgaatctctgtgtttctgccttgggcctccttcgacatctgagtcttcaggggaatccagagaagccccagtaccttttcgccatgatgtcttactgggccacccacctcctctttcatgatcctcgccacggaggatcctttcctcacggtccctggcctgcctgagagcaggtctaggccatggcgggtaccagtgcccagcacagggccagcctgccctgggaagcaaggaggccagcgtgggacctggaagttggtcatctgatgctcccccgtttcacagatggaagcaccaaggccctgagacaaggagacggttgggatggacaccatgactccctgcccaacgtggacggtggtggggtggaaagaccattgagttaggaacgcagtgagtttggctgcaagtcacaaaacacctaacagatgtgcttagaacagaggacagagtgttttctcaccgaacaggcatgtccgatggaccccaagcgctgtcaccgtgggcccgatcactgtcatcttcccgccatcgccggcagactggcttttgtcttttgccgtctgcttgtttgcggtcacaagatggcacaggcctccctcatgagcaaatttcaaggcagggtagggctcagcagtagtggccagaaaggccttgccctagcgtggctctctccctccgtcagcacacagaagcttctccaagagccacccccagccctcctgctccacagacttttccagacccctaagggcctcctgcctcccctaggtgtaagggaggctgggacaaggcctattgggaaagggggatggggtaactgtggctggcttcctccctggactgggcacggggccacctgagcaatgtggggagaggagaactccgcggtggggtgggcagctcaaaatgccacacctcccgggctgctcctccagctcggccacctggtaaagcatgcacctcccgcttcagtgtcctcatctgtaaagtacacggccagtcctgtcctcgcagatgtgctgtgagaagcagatgagggagctgtgtcaggcaccaggggaggacctgggctcctgaggacaccgagttcgtggtgtgtctgccctgctgctgtcttggttctctgctcagctctggaacttggtgcagctcactctccctctgctcctctccctgcaggctgtgctgcaggcgctggggtccgtggtggcagtggaggagcgctcgctcacagggacctgggatttgagcatgctgcaccgctggagctggaggacggggcctggccgccacagaggtttggggacccccgcttcagctccctacccaggactcccagccaggctcagcagctggtcagacccggtgcacatccaaccatctgcctgtcccggcctgtgcgaccttgcgaggctgctttcctactctgaacccgcagccctcccaaatctactacagtcggttaagaaaggctttgggttagtctctgcctgccagggctccacacaggcgtgtgtgtgcacttgtacgtgtgcacacgcagaccacacgccctgcctgtgccctgggtgacagctaggggcccaggggcttctgcccaccttggccctgctgacctcagcccatcagccggtccctgcctcatacgacatgtgccaccgtgagctcctgcactacaggcagcttccaggctccactccctgtccgcaccatgccctctgcctgggacgcacaggtcccattcactctggccagcacctgctcaagctccccaggatgcctccccagagtcaccaaccaggccaagtgcctcctccactctcctggccccaggggtttcttctgtcctgtgcagctcgttgtccactacacacagcatggtggcgggtgcatggtgcacgctcagttggtggtgggaggaaggaagggacggagggagggagggagggaagatgatgttggttggaaagaaggaaggaagatggatgagtgatagataagtggacggctccctcccaagatcgaagcccaaccccagggcatgccttcaggggagcctggtgaggcaagggcagactcaccagatggtctcagaaagctcttgggctttgagggcaacacccatgaggaattgaggccactagggccaggaccaacctatgaattgccctcagggtgggcagaaacgccaagaggcccacaggagtcctggcagaaggggatgccataggccgttgccacggtgggagccacagcagactgtagccaggtgcagtgtggtgagaaggaggctgggagccacagcagattgtagacaggtgcaggagggtgagagggaggctgggagccacagcagactgtagacaggtgcagggggtgagagggaggctgggaggaggcatcccaggccacactggacagatcacctctgttcccctaggtgacaccacctctccctcgaggccaccaggaggccccatcatcaccgtccacccaaaggaaatccggacgttctttattcactttcaacagcagtgagccctgggcagatgccccggccccagggcttcccccaggaactccatgtaacagaacagacccaggacagggaaaagcagtgcggagggatgggactggggagtcagctgctcatctgcaggctaatggcaggaaatggtcatatttggggtttttccctaatttttttaaacaaaaattacattacaagatccaggttcttcccccccacactcaatcaagccagccctctcctcttctgtcacgtaaaggatatttggcacactcatgcgtcattcattcacaaaacacaaacccaggactttctgcctaaggcagagcacaagactcacagcagcaccgaagcgcatctgccgtccgggccctgccaggcttgccaggctgccagtggtaactgtggacctactgcgtgccacgtgttttcatagactcatcccatgctggcaacagccctgcaaggggcttggctctgccacagggcaggagaggaagttgtagcgcctagcgagagttccagccccagacgcccacctgtgcctcagggcaccgcctgccgagcagagaaggcacagcagccgtcagagtccatgagaggtgaaaccacacagcagggatgtccaatatcagaactattaatatcaataaaagtataaccttcccaggtctatgcccaagagaattgaaaacatccatccacacaatacctgtgctcccgcgttcatagcagcattactcaaaagtcaaacggtagcaacaacccaaatgtccatccacagatgaattaagacatgaagtgtgttctgtccatacaatggaatattatttggccataaaaaggaaggaaattctgacgcatgccacagcctgagtgaatcctacaaatattacgctaagtgaaagaagccaatcacgagtttatgtgaaatgtccagaataggcaaatctgtgtatcagagacaaagcacattggtggttgccaggtactggaggaagagagaagaggcatgacagctaacagggacgggctttctttggaagatgatgaaattgtggaatgatggttgcacaactttgtgaatatactagaaaccaatgaattaaaaactttggaagatg

SEQ ID NO: 1525 - DNA, 889 bp, Homo sapiens
  source 1..889: mol_type = genomic DNA; mol_type = genomic DNA
agagaaacaaggctggcttcaagtgatctgcaaccagagtaattgggatttgacaaggactgtgaaaggctgactctccctgttctctttcatgctggcaccgggcagagtgtgggaactactgcctcaatacgatcatagaagccattgagatcccgcagtttatcggccgcagttacctgacgtatgacaacccagatatcttgaagaggtaataagcttcaacaggcaccttcctcagctttctggggggtgtcaggatcaagatcaaatgtgttcatgaggtttaaaacaactgccaaggatggccttttgctgtggaggggagacagccccatgagacccaacagcgacttcatttccttgggccttcgggatggagccctcgtgttcagctataacctgggcagtggtgtggcatccatcatggtgaatggctccttcaacgatggtcggtggcaccgagttaaggccgttagggatggccagtcaggaaagataaccgtggatgactatggagccagaacaggcaaatccccaggcatgatgcggcagcttaacatcaatggagctctgtatgtgggtggaatgaaggaaattgctctgcacactaacaggcaatatatgagagggctcgtgggctgtatctctcacttcaccctgtccaccgattaccacatttccctcgtggaagatgccgtggatgggaaaaacatcaacacttgtggagccaagtaacaccagctggccttgtccaagggacagagccttctattctgagaatcccaggggccctcagaccctgcctgatgctatatgcagaggcccagggaccaggtgtgtttcctctcaccaagaagaaagtacacactgatgagaaactgagaac

SEQ ID NO: 1526 - DNA, 2187 bp, Homo sapiens
  source 1..2187: mol_type = genomic DNA; mol_type = genomic DNA
gcgcgcctcgccgctgtcctccgggagcggcagcagtagcccgggcggcgagggctgggggttcctcgagactctcagaggggcgcctcccatcggcgcccaccaccccaacctgttcctcgcgcgccactgcgctgcgccccaggacccgctgcccaacatggattttctcctggcgctggtgctggtatcctcgctctacctgcaggcggccgccgagttcgacgggaggtggcccaggcaaatagtgtcatcgattggcctatgtcgttatggtgggaggattgactgctgctggggctgggctcgccagtcttggggacagtgtcagcctgtgtgccaaccacgatgcaaacatggtgaatgtatcgggccaaacaagtgcaagtgtcatcctggttatgctggaaaaacctgtaatcaagacgagcacatcccagctcctcttgaccaaggcagtgaacagcctcttttccaacccctggatcaccaagccacaagtttgccttcaagggatctaaatgagtgtggcctgaagccccggccctgtaagcacaggtgcatgaacacttacggcagctacaagtgctactgtctcaacggatatatgctcatgccggatggttcctgctcaagtgccctgacctgctccatggcaaactgtcagtatggctgtgatgttgttaaaggacaaatacggtgccagtgcccatcccctggcctgcagctggctcctgatgggaggacctgtgtagatgttgatgaatgtgctacaggaagagcctcctgccctagatttaggcaatgtgtcaacacttttgggagctacatctgcaagtgtcataaaggcttcgatctcatgtatattggaggcaaatatcaatgtcatgacatagacgaatgctcacttggtcagtatcagtgcagcagctttgctcgatgttataacatacgtgggtcctacaagtgcaaatgtaaagaaggataccagggtgatggactgacttgtgtgtatatcccaaaagttatgattgaaccttcaggtccaattcatgtaccaaagggaaatggtaccattttaaagggtgacacaggaaataataattggattcctgatgttggaagtacttggtggcctccgaagacaccatatattcctcctatcattaccaacaggcctacttctaagccaacaacaagacctacaccaaagccaacaccaattcctactccaccaccaccaccacccctgccaacagagctcagaacacctctaccacctacaaccccagaaaggccaaccaccggactgacaactatagcaccagctgccagtacacctccaggagggattacagttgacaacagggtacagacagaccctcagaaacccagaggagatgtgttcagtgttctggtacacagttgtaattttgaccatggactttgtggatggatcagggagaaagacaatgacttgcactgggaaccaatcagggacccagcaggtggacaatatctgacagtgtcggcagccaaagccccagggggaaaagctgcacgcttggtgctacctctcggccgcctcatgcattcaggggacctgtgcctgtcattcaggcacaaggtgacggggctgcactctggcacactccaggtgtttgtgagaaaacacggtgcccacggagcagccctgtggggaagaaatggtggccatggctggaggcaaacacagatcaccttgcgaggggctgacatcaagagcgtcgtcttcaaaggtgaaaaaaggcgtggtcacactggggagattggattagatgatgtgagcttgaaaaaaggccactgctctgaagaacgctaacaactccagaactaacaatgaactcctatgttgctctatcctctttttccaattctcatcttctctcctcttctcccttttatcaggcctaggagaagagtgggtcagtgggtcagaaggaagtctatttggtgacccaggtttttctggcctgcttttgtgcaatcccaatgaacagtgataccctccttgaaatacaggggcatcgcagacacatcaaagccatctgtgggtgttgccttccatcctgtgtctctttcaggaaggcattcagcatgcgtgagccataccatcctccatcctgattacaaggtgctccttgtagc

SEQ ID NO: 1527 - DNA, 573 bp, Homo sapiens
  source 1..573: mol_type = genomic DNA; mol_type = genomic DNA
agattccccagctgctgttctctggaggggttcctggggcggagatgtgcagtggagcgagaacttcctgtgaccgtgacattgtctaggtggcccccgacagctgctctcgggagccgcctcccgacacccgagccccgccggcgcctcccgctcccggctcccggctcctggctccctccgcctcccccgcccctcgccccgccgccgaagaggccccgctcccgggtcggacgcctgggtctgccgggaagagcgatgagaggtgtctgaaggtggctattcactgagcgatggggttggacttgaaggaatgccaagagatgctgcccccacccccttaggcccgagggatcaggagctatgggaccagaggccctgtcatctttactgctgctgctcttggtggcaagtggagatgctgacatgaagggacattttgatcctgccaagtgccgctatgccctgggcatgcaggaccggaccatcccagacagtgacatctctgcttccagctcctggtcagattccactgccgcccgccacagcaggttggagagcagtgacggggat

SEQ ID NO: 1528 - DNA, 562 bp, Homo sapiens
  source 1..562: mol_type = genomic DNA
agtccagcgtctcctgggcctagattccccagctgctgttctctggaggggttcctggggcggagatgtgcagtggagcgagaacttcctgtgaccgtgacattgtctaggtggcccccgacagctgctctcgggagccgcctcccgacacccgagccccgccggcgcctcccgctcccggctcccggctcctggctccctccgcctcccccgcccctcgccccgccgccgaagaggccccgctcccgggtcggacgcctgggtctgccgggaagagcgatgagagagatgctgcccccacccccttaggcccgagggatcaggagctatgggaccagaggccctgtcatctttactgctgctgctcttggtggcaagtggagatgctgacatgaagggacattttgatcctgccaagtgccgctatgccctgggcatgcaggaccggaccatcccagacagtgacatctctgcttccagctcctggtcagattccactgccgcccgccacagcaggttggagagcagtgacggggatggggcctggtgccccgcagggtcg

SEQ ID NO: 1529 - DNA, 552 bp, Homo sapiens
  source 1..552: mol_type = genomic DNA
atctgcaaccagagtaattgggatttgacaaggactgtgaaaggctgactctccctgttctctttcatgctggcaccgggcagagtgtgggaactactgcctcaatagtaagtacaaagccattgagatcccgcagtttatcggccgcagttacctgacgtatgacaacccagatatcttgaagagggtgtcaggatcaagatcaaatgtgttcatgaggtttaaaacaactgccaaggatggccttttgctgtggaggggagacagccccatgagacccaacagcgacttcatttccttgggccttcgggatggagccctcgtgttcagctataacctgggcagtggtgtggcatccatcatggtgaatggctccttcaacgatggtcggtggcaccgagttaaggccgttagggatggccagtcaggaaagataaccgtggatgactatggagccagaacaggcaaatccccaggcatgatgcggcagcttaacatcaatggagctctgtatgtgggtggaatgaaggaaattgctctgcacactaacag

SEQ ID NO: 1530 - DNA, 3073 bp, Homo sapiens
  source 1..3073: mol_type = genomic DNA
cccctctcactcagtgcggaggaactgagccccgggaggaggtgctcctgtgcagccccactgagtcagctcatctatcgcctgccctccacctggccagtccctgcgggcatctaactgctaagcctccgctcagccaacacccagttggtcagtctggtcacagtccagcaaaaagagggactgccactctaacccaccagtgacaccactcttcccggctggatggtcaattagctctggcatgagagaatgtcactgccgagatgctgcccccacccccttaggcccgagggatcaggagctatgggaccagaggccctgtcatctttactgctgctgctcttggtggcaagtggagatgctgacatgaagggacattttgatcctgccaagtgccgctatgccctgggcatgcaggaccggaccatcccagacagtgacatctctgcttccagctcctggtcagattccactgccgcccgccacagcaggttggagagcagtgacggggatggggcctggtgccccgcagggtcggtgtttcccaaggaggaggagtacttgcaggtggatctacaacgactgcacctggtggctctggtgggcacccagggacggcatgccgggggcctgggcaaggagttctcccggagctaccggctgcgttactcccgggatggtcgccgctggatgggctggaaggaccgctggggtcaggaggtgatctcaggcaatgaggaccctgagggagtggtgctgaaggaccttgggccccccatggttgcccgactggttcgcttctacccccgggctgaccgggtcatgagcgtctgtctgcgggtagagctctatggctgcctctggagggatggactcctgtcttacaccgcccctgtggggcagacaatgtatttatctgaggccgtgtacctcaacgactccacctatgacggacataccgtgggcggactgcagtatgggggtctgggccagctggcagatggtgtggtggggctggatgactttaggaagagtcaggagctgcgggtctggccaggctatgactatgtgggatggagcaaccacagcttctccagtggctatgtggagatggagtttgagtttgaccggctgagggccttccaggctatgcaggtccactgtaacaacatgcacacgctgggagcccgtctgcctggcggggtggaatgtcgcttccggcgtggccctgccatggcctgggagggggagcccatgcgccacaacctagggggcaacctgggggaccccagagcccgggctgtctcagtgccccttggcggccgtgtggctcgctttctgcagtgccgcttcctctttgcggggccctggttactcttcagcgaaatctccttcatctctgatgtggtgaacaattcctctccggcactgggaggcaccttcccgccagccccctggtggccgcctggcccacctcccaccaacttcagcagcttggagctggagcccagaggccagcagcccgtggccaaggccgaggggagcccgaccgccatcctcatcggctgcctggtggccatcatcctgctcctgctgctcatcattgccctcatgctctggcggctgcactggcgcaggctcctcagcaaggctgaacggagggtgttggaagaggagctgacggttcacctctctgtccctggggacactatcctcatcaacaaccgcccaggtcctagagagccacccccgtaccaggagccccggcctcgtgggaatccgccccactccgctccctgtgtccccaatggctctgcctacagtggggactatatggagcctgagaagccaggcgccccgcttctgcccccacctccccagaacagcgtcccccattatgccgaggctgacattgttaccctgcagggcgtcaccgggggcaacacctatgctgtgcctgcactgcccccaggggcagtcggggatgggccccccagagtggatttccctcgatctcgactccgcttcaaggagaagcttggcgagggccagtttggggaggtgcacctgtgtgaggtcgacagccctcaagatctggttagtcttgatttcccccttaatgtgcgtaagggacaccctttgctggtagctgtcaagatcttacggccagatgccaccaagaatgccaggaatgatttcctgaaagaggtgaagatcatgtcgaggctcaaggacccaaacatcattcggctgctgggcgtgtgtgtgcaggacgaccccctctgcatgattactgactacatggagaacggcgacctcaaccagttcctcagtgcccaccagctggaggacaaggcagccgagggggcccctggggacgggcaggctgcgcaggggcccaccatcagctacccaatgctgctgcatgtggcagcccagatcgcctccggcatgcgctatctggccacactcaactttgtacatcgggacctggccacgcggaactgcctagttggggaaaatttcaccatcaaaatcgcagactttggcatgagccggaacctctatgctggggactattaccgtgtgcagggccgggcagtgctgcccatccgctggatggcctgggagtgcatcctcatggggaagttcacgactgcgagtgacgtgtgggcctttggtgtgaccctgtgggaggtgctgatgctctgtagggcccagccctttgggcagctcaccgacgagcaggtcatcgagaacgcgggggagttcttccgggaccagggccggcaggtgtacctgtcccggccgcctgcctgcccgcagggcctatatgagctgatgcttcggtgctggagccgggagtctgagcagcgaccacccttttcccagctgcatcggttcctggcagaggatgcactcaacacggtgtgaatcacacatccagctgcccctccctcagggagcgatccaggggaagccagtgacactaaaacaagaggacacaatggcacctctgcccttcccctcccgacagcccatcacctctaatagaggcagtgagactgca

SEQ ID NO: 1531 - DNA, 538 bp, Homo sapiens
  source 1..538: mol_type = genomic DNA
acccgaccccaaaggcctgagactggggtgactgggacctaagagaatcctgagctggaggtgtctgaaggtggctattcactgagcgatggggttggacttgaaggaatgccaagagatgctgcccccacccccttaggcccgagggatcaggagctatgggaccagaggccctgtcatctttactgctgctgctcttggtggcaagtggagatgctgacatgaagggacattttgatcctgccaagtgccgctatgccctgggcatgcaggaccggaccatcccagacagtgacatctctgcttccagctcctggtcagattccactgccgcccgccacagcaggttggagagcagtgacggggatggggcctggtgccccgcagggtcggtgtttcccaaggaggaggagtacttgcaggtggatctacaacgactgcacctggtggctctggtgggcacccagggacggcatgccgggggcctgggcaaggagttctcccggagctaccggctgcgttactcccgggatggtcg

SEQ ID NO: 1532 - DNA, 1369 bp, Homo sapiens
  source 1..1369: mol_type = genomic DNA
gtatcaatctcctgaagaccccggaagtgcaactcgaacttggtcggggcgcggatcccgagagggaaagtcataacaaccgcacgagggagttcgactggcgaactggaaggccacgcctcctcccgcctgccccctcagccctgtggctgggggcagagctcagatttattatctaggatagatttggatgaactaatgaaaaaagatgaaccgcctcttgattttcctgataccctggaaggatttgaatatgcttttaatgaaaagggacagttaagacacataaaaactggggaaccatttgtttttaactaccgggaagatttacacagatggaaccagaaaagatacgaggctctaggagagatcatcacgaagtatgtatatgagctcctggaaaaggattgtaatttgaaaaaagtatctattccagtagatgccactgagagtgaaccaaagagttttatctttatgagtgaggatgctttgacaaatccacagaaactgatggttttaattcatggtagtggtgttgtcagggcagggcagtgggctagaagacttattataaatgaagatctggacagtggcacacagataccgtttattaaaagagctgtggctgaaggatatggagtaatagtactaaatcccaatgaaaactatattgaagtagaaaagccgaagatacacgtacagtcatcatctgatagttcagatgaaccagcagaaaaacgggaaagaaaagataaagtttctaaagaaacaaagaagcgacgtgatttctatgagaagtatcgtaacccccaaagagaaaaagaaatgatgcaattgtatatcagagaaaatggttctcctgaagaacatgcaatctatgtttgggatcatttcatagctcaggctgctgctgagaatgtgtttttcgttgctcacagctatggaggacttgcttttgttgaactgatgattcaacgagaagccgatgtaaaaaataaggtaactgctgtggcattgacagactctgttcacaatgtgtggcatcaagaagctggcaaaacgattcgagaatggatgagagagaactgttgtaattgggtctctagctcagaaccattagacacatcagtggagtccatgctacctgattgcccccgggtctcagcaggcaccgaccgtcacgagctaacttcctggaagagctttccgtctattttcaaattctttaccgaagcctcagaggccaagaccagctccctgaagccggctgtgacgcgccgctcccaccgcatcaagcacgaagagctgtaagaggagcgagcgcgacgggggaggccgccctggcgcacccacccgcacgcctcctcac

SEQ ID NO: 1533 - DNA, 583 bp, Homo sapiens
  source 1..583: mol_type = genomic DNA
attgtctgaggcaaaaagacatcaagtcctttcatgctgtcctgggaaaggcggtttggaacaagttatcctgattctagagacaggggattcaacttcaatttttctgcagtggctctgggtccagccccttacttaaagatctggaaagcatgaagactgggctttttttcctatgtctcttgggaactgcagctgcaatcccgacaaatgcaagattattatctgatcattccaaaccaactgctgaaacggtagcacctgacaacactgcaatccccagtttaagggctgaagctgaagaaaatgaaaaagaaacagcagtatccacagaagacgattcccaccataaggctgaaaaatcatcagtactaaagtcaaaagaggaaagccatgaacagtcagcagaacagggcaagagttctagccaagagctgggattgaaggatcaagaggacagtgatggtcacttaagtgtgaatttggagtatgcaccaactgaaggtacattggacataaaagaagatatgagtgagcctcaggagaaaaaactctcagagaacactgattttttggctcctgg

SEQ ID NO: 1534 - DNA, 1524 bp, Homo sapiens
  source 1..1524: mol_type = genomic DNA
cttacgcttcacagtttgacctgctatgaggacctggtgacttttcttcaacaaagcattcatcagtttgaagtgggcccctatggctgcatcctgctcaccctttctgccatcctgtccaggtctacagagctcatccgccaggactttgatgtccccaccagccacctgattggagcacatggctactgtacacaggaacttgtcaatctgctcctgactgggaaagctgtgtccaacgttttcaacgatgtggttgagctggattctggggatgggaacatcacacttctcagaggcattgctgcacgcagtgatattggcttcttatctctctttgagcattacaacatgtgccaggttggctgcttcctgaagaccccgaggttccccatctgggtggtttgcagtgagagccacttcagcatcctctttagcctgcagccggggctcctgcgtgactggaggactgagaggctctttgacttgtactactacgatggcctggccaaccagcaggagcagatccggctgaccattgacaccacccaaaccatctctgaggacacagacaacgaccttgtcccacccctcgagctctgcatcagaaccaacatcggttctgccctgggcttcaaatacccggtggggaacaaccagacggcggtccaggacaacgtgaaggtgtcgctggccttcgggctgagcatcgccacgctggcgcagagtgtgggccacatcagcggcgcccacctcaacccggctgtcacactggggctgctgctcagctgccagatcagcatcttccgtgccctcatgtacatcatcgcccagtgcgtgggggccatcgtcgccaccgccatcctctcaggcatcacctcctccctgactgggaactcgcttggccgcaatgacctggctgatggtgtgaactcgggccagggcctgggcatcgagatcatcgggaccctccagctggtgctatgcgtgctggctactaccgaccggaggcgccgtgaccttggtggctcagccccccttgccatcggcctctctgtagcccttggacacctcctggctattgactacactggctgtgggattaaccctgctcggtcctttggctccgcggtgatcacacacaacttcagcaaccactggattttctgggtggggccattcatcgggggagccctggctgtactcatctacgacttcatcctggccccacgcagcagtgacctcacagaccgcgtgaaggtgtggaccagcggccaggtggaggagtatgacctggatgccgacgacatcaactccagggtggagatgaagcccaaatagaaggggtctggcccgggcatccacgtagggggcaggggcaggggcgggcggagggaggggaggggtgaaatccatactgtagacactctgacaagctggccaaagtcacttccccaagatctgccagacctgcatggtcaagcctcttatgggggtgtttctatctctttctttctctttctg

SEQ ID NO: 1535 - DNA, 4784 bp, Homo sapiens
  source 1..4784: mol_type = genomic DNA
cttcctagacagactaaaaaagccatgtattctttcgtttctctctaaaagaagaaaaatataatttaaaaatacattgcgtattttctaaaacaataaatttatagtgttaatattcatagggtcaatcaaaatgaagcttctcctttgggcctgcattgtatgtgttgcttttgcaaggaagaatgctggattgggcttcctatggctgtgaagtgccattgctggagagacggttccccttcattggtgaggatgacaatgacgatggtcacccacttcatccatctctgaatattccttatggcatacggaatttaccacctcctctttattatcgcccagtgaatacagtccccagttaccctgggaatacttacactgacacagggttaccttcgtatccctggattctaacttctcctggattcccctatgtctatcacatccgtggttttcccttagctactcagttgaatgttcctcctctccctcctaggggtttcccgtttgtccctccttcaaggtttttttcagcagctgcagcacccgctgccccacctattgcagctgagcctgctgcagctgcacctcttacagccacacctgtagcagctgagcctgctgcaggggcccctgttgcagctgagcctgctgcagaggcacctgttggagctgagcctgctgcagaggcacctgttgcagctgagcctgctgcagaggcacctgttggagtggagccagctgcagaggaaccttcaccagctgagcctgctacagccaagcctgctgccccagaacctcacccttctccctctcttgaacaggcaaatcagtgaaattctctagaagagtaccatgggttcatttctatactgatgcagaaataagtgaaatctacaaaagttttctttcttttccaaagactatttcattctgttgtattcagagtattcatctcactacattgatttgtttgtggtagtttttccttggacttaatttatattgaaaaaacattgataattaaataaataaaatagataatttagaccaatggtgataaggtctggatgaaaactacgctatggaggactgaaatggcaatcattcagcctagcctggagtctgattatacagctactataggatgatgttagtattggttttgagtgcaataggttttttcctaaacaaacatattttgtagtcaatgaactttttgtcacaaaacagtaaaacatctgtgtttaacctatggtaaacaacatgttaatgaactatgctatccatgacttaatggacagttcaaatgtgacatctacagtttttcatttctcttttatgccagcacacaatcaattcatcaccaattgtcatttgatttacttcaaaaaatatacccccaaatcctaatacttctaaccttctccactgcatctagccaactctagctattgtcatccctaacagaaatggaggaatagcctctttttttttttttttttttgagacgaagtctcacactgttgcacggctgtagtgcaatggtgccaactcagctcactgcaacttccacctcccgggttcaagtgattctcctgcctcagcctcctgagtagccgggattacaggtgtgtgccaccacgcctggctaattttttgtaatttagtacagacaggggttccctatgttggccaggatggtcttgatctcctgacctcatgatctgtccgcctcggcctcccaaagtgctgggaatacaggcgtgagccaccgtgccctgccagaatagcctattaaccagtctacctgcttccacttttcctccaccctgatcacatacacacatgcattatccactgagcagtcacaatcagatgttaaaccaaacattattcagataagatctctgaaaagcctctgatactttctcttttaaaatggaatatattctaaacacctctccaaggacacaagacttaccttgtctaactaatgacttttctaacttcattccctatcattctccatcttgccccatgctcctcatgcagcagcttttttttttttttcctttttcaaatatgttggttttgatcttatccaagaacctttgccctgatgtatgaatgactaactgcttttctacttcgggggtctcatatagaaatcctgcttcagaatactcttccctgagcactctatctaaataaatccctcttctgcaacccagtgctttttgttctattactgacttcttttccttgtagaagttactattactgctttttacctttttatttatttgtgtattgtctttgttgttgccctcatcttatctccacaaaaatatatgctccataaaaacaggcatttctgtgtcttattcagcactttatcagggcctataacaatgcctgggacatattcagtgaccagtgaatatttttggaaggaaagaaaagaagaaagaatgaagtaacaaacaaagaatgaaggaagaaaaaatttttacaaacattcaacatatttttattttgaaataattttgtatttttccctatatcctacattggatcagaatattactgttatgtatagccatgaggacatggtctcaaaaaatgagaaactttcttagacagtaaaattgttaacttgagatgtttgcttccatcttctagagccaagtaggatctaactttaatttgacttagccaataatctgaaactattatagtatctgtctttcacagatacatgcaatattcacttctaaatatttaatgataaatttgtaatcatacatgatagtcaattttaatgattatgttgtcaaaattcaggctttttgtgtgaattgaagacttaaagaagaatttgtaaatatgactgtataagaaacaacagaaagatgaagatgaaccgaaatagaaatatcaagaggctacaaagtcttagcaaattataattgctaatggtacattatgtggtgtttagtatcacatttagaatgtagtcatttgttaagtttttcatggggtaaaagaaagaatttattccaagaaaattttggaattttaaaaataaacatgacatcttatcatgagaaacatttacagtttttgcttttactacaagatactgtgaaatgttctgctctgtcagttgtgaaagtatgaaatttaagtctatcactacaataatattttgtttttagtgttcatttttttcctcctgactacattgagatgagttagattgagtgaaaggtaaacactaacatttgaattgaggtaatttccactgtggaaaacaaactgttgttagtaaacaggcatcagctttgagacacagaaaagtcatccaaaccagaagattgggaacttcctcaattactttgtcttccatttattgcattcaattagtcaaaaatgttgttaattatacattttaaagactatttttggtaaggtctatgacacattcaaaatactacatacaagtttgtattatcataaataatccaaaagaaaacatacatgtaaccaccaccatctggaaatttcacactaaattataaaacatttccatcactgcatgtattgtttaatgtcgctttatgaatccaccttcttccttatctgtagagttaaaaactacttagtggattagggtaattcattctacttttaaaaatgatttttccacctctaatgtattctataaaataatattgttcacttttgcctatttttgagctttttatagaaaaatgctactgcgaaattattttgagtcatatcttttgatcgatattaagatacatttgcagagttttgtatgtgtgtttatatccatcttacataattctttactgtatagcgttccctttagccactggaaaatgatataatgtcattgcttacagaaggtgactgattcttattcagtgctactttctacagacaggtaactattcgcatttacgattaagaaatgttcacaccttcacactggtatcaactgcaacaaccactatacttctccagtgattgccagatggcccactatacatcctttcttctatttctttcttttgtggccagaaagtcaggacctcaaagaggtataagtttgtgtgtataattccctggcttttttctaaaattttagtatgcatttatgtggcacttaatatataaaagagttttatgagttttaaaaatgtatataaacaagacatataataaatggtatgtcatttcacaatttactatttttactcaacatttatatttctgagacttttcacatttttgaatgtattcatagtttcactttaattgatgtttgccatgaaagatcaaatatatcacattttatttgactaaaaagtaaactatatttcctacattatgctatagaacttatagactaatttaagttaattataggccttatctcagacctttgcaagtagcctgaataaaacttttcattatttatattatcacatgcatatatgtgtgtatgtatatatgtgtgcatgtgcatgcatagtaaaaatcttaacccaaaactgaaataaaaaattataagagaaaatactattttccaccaatatcacaatggataatcttttttaaatgactacatatgtcgataagttacaaaatccatatatgagtatgacaccaataagaacattttctctaaccattttgaatacgaataaccatggattctaatagcaaacattattaaaatattattgaaa

SEQ ID NO: 1536 - DNA, 615 bp, Homo sapiens
  source 1..615: mol_type = genomic DNA
acccccagtccagcgtctcctgggcctagattccccagctgctgttctctggaggggcccccgacagctgctctcgggagccgcctcccgacacccgagccccgccggcgcctcccgctcccggctcccggctcctggctccctccgcctcccccgcccctcgccccgccgccgaagaggccccgctcccgggtcggacgcctgggtctgccgggaagagcgatgagagagatgctgcccccacccccttaggcccgagggatcaggagctatgggaccagaggccctgtcatctttactgctgctgctcttggtggcaagtggagatgctgacatgaagggacattttgatcctgccaagtgccgctatgccctgggcatgcaggaccggaccatcccagacagtgacatctctgcttccagctcctggtcagattccactgccgcccgccacagcaggttggagagcagtgacggggatggggcctggtgccccgcagggtcggtgtttcccaaggaggaggagtacttgcaggtggatctacaacgactgcacctggtggctctggtgggcacccagggacggcatgccgggggcctgggcaaggagttctc

SEQ ID NO: 1537 - DNA, 661 bp, Homo sapiens
  source 1..661: mol_type = genomic DNA
gcaggcccatattcagccacctcatccaggccttatcaaagaagagtcttatatgagatcaaatggctgcctttccccacaagattatatttttcctggtatgctctactttgacacatgtggctttctcaggtggaacaatataatcacaaggattcttatcagagggaggcaggagggcccaagtcagagaagatgtgacaatggaagcagaagttagaatggtgcagtaaaagggccatgggccgaggaactcagacagcctgtagaagctggaaaagcaggaattttcaataaacgtgacttcactaggtggcctaagccccgatgtaaaatgtatatcccactggaccctgattacaatgcagactgccccaatgtgacagcacctgtttgtgcctcaaatggccacactttccagaatgagtgtttcttttgtgttgaacagagggaatttcattatcgtataaaatttgaaaaatatggaaaatgtgattaatgggtaccagagtaactacacttgcttattctttttctacttaattcagaatagtatttcttttagagtgtgagaatgtaaattaaataacatccctatgctgtacttaaatgtcgaacaaaatgagagacaaaaatgaaggaatcaaactgacaagaacca

SEQ ID NO: 1538 - DNA, 560 bp, Homo sapiens
  source 1..560: mol_type = genomic DNA
ctttttaaggtaagtggggagaggaaagcaatgccccagagacccgacgccttagcccgccaccctgagacctagcacaaggagcgttcacgcccgaagggtcatccgagatgggggctcgaggcacgcgcccccaaatcttcaaggcccaagaagcttctcaagggcgccctatccgtaggagctgagggcatgaggggcaggagcaggatggtgctgctccactggtgcctgctgtggctcctgtttccactcagctcaaggacccagaagttacccacccgggatgaggaactttttcagatgcagatccgggacaaggcattttttcatgattcgtcagtaattccagatggagctgaaattagcagttatctctttagagatacacctaagaggtatttctttgtggttgaagaagacaatactccattatcagtcacagtgacgccctgtgatgcgcctttggagtggaagctgagcctccaggagctgccagaggacaggagcggggaaggctcaggtgatctggaacctcttgagcagcagaagcagcagat

SEQ ID NO: 1539 - DNA, 547 bp, Homo sapiens
  source 1..547: mol_type = genomic DNA
agaagtaggaggggcgtcttcccctcgtgggccctgagcgggactgcagccagccccctggggcgccagctttggagagatgctgcccccacccccttaggcccgagggatcaggagctatgggaccagaggccctgtcatctttactgctgctgctcttggtggcaagtggagatgctgacatgaagggacattttgatcctgccaagtgccgctatgccctgggcatgcaggaccggaccatcccagacagtgacatctctgcttccagctcctggtcagattccactgccgcccgccacagcaggttggagagcagtgacggggatggggcctggtgccccgcagggtcggtgtttcccaaggaggaggagtacttgcaggtggatctacaacgactgcacctggtggctctggtgggcacccagggacggcatgccgggggcctgggcaaggagttctcccggagctaccggctgcgttactcccgggatggtcgccgctggatgggctggaaggaccgctggggtcaggaggtgatctcagg

SEQ ID NO: 1540 - DNA, 1377 bp, Homo sapiens
  source 1..1377: mol_type = genomic DNA
tttgctaataaggccctgccaggctgggagggaattgtccctgcctgcttctggagaaagaagatattgacaccatctacgggcaccatggaactgcttcaagtgaccattctttttcttctgcccagtatttgcagcagtaacagcacaggtgttttagaggcagctaataattcacttgttgttactacaacaaaaccatctataacaacaccaaacacagaatcattacagaaaaatgttgtcacaccaacaactggaacaactcctaaaggaacaatcaccaatgaattacttaaaatgtctctgatgtcaacagctacttttttaacaagtaaagatgaaggattgaaagccacaaccactgatgtcaggaagaatgactccatcatttcaaacgtaacagtaacaagtgttacacttccaaatgctgtttcaacattacaaagttccaaacccaagagtagtgttctacaaccagatgcatcaccttctaaaactggtacattaacctcaataccagttacaattccagaaaacacctcacagtctcaagtaataggcactgagggtggaaaaaatgcaagcacttcagcaaccagccggtcttattccagtattattttgccggtggttattgctttgattgtaataacactttcagtatttgttctggtgggtttgtaccgaatgtgctggaaggcagatccgggcacaccagaaaatggaaatgatcaacctcagtctgataaagagagcgtgaagcttcttaccgttaagacaatttctcatgagtctggtgagcactctgcacaaggaaaaaccaagaactgacagcttgaggaattctctccacacctaggcaataattacgcttaatcttcagcttctatgcaccaagcgtggaaaaggagaaagtcctgcagaatcaatcccgacttccatacctgctgctggactgtaccagacgtctgtcccagtaaagtgatgtccagctgacatgcaataatttgatggaatcaaaaagaaccccggggctctcctgttctctcacatttaaaaattccattactccatttacaggagcgttcctaggaaaaggaattttaggaggagaatttgtgagcagtgaatctgacagcccaggaggtgggctcgctgataggcatgactttccttaatgtttaaagttttccgggccaagaatttttatccatgaagactttcctacttttctcagtgttcttatattacctactgttagtatttattgtttaccactatgttaatgcagggaaaagttgcacgtgtattattaaatattaggtagaaatcataccatgctactttgtacatataagtattttattcctgctt

SEQ ID NO: 1541 - DNA, 587 bp, Homo sapiens
  source 1..587: mol_type = genomic DNA
aaaaagacatcaagtcctttcatgctgtcctgggaaaggcggtttggaacaagttatcctgattctagagacgatgcaaagcactgtgctaggcaccaggagaatgcagaaagggcacatccccttccttcaaggagtttacagctttctcagaagcagaggggattcaacttcaatttttctgcagtggctctgggtccagccccttacttaaagatctggaaagcatgaagactgggctttttttcctatgtctcttgggaactgcagctgcaatcccgacaaatgcaagattattatctgatcattccaaaccaactgctgaaacggtagcacctgacaacactgcaatccccagtttaagggctgaagctgaagaaaatgaaaaagaaacagcagtatccacagaagacgattcccaccataaggctgaaaaatcatcagtactaaagtcaaaagaggaaagccatgaacagtcagcagaacagggcaagagttctagccaagagctgggattgaaggatcaagaggacagtgatggtcacttaagtgtgaatttggagtatgcaccaactgaaggtacattg

SEQ ID NO: 1542 - DNA, 572 bp, Homo sapiens
  source 1..572: mol_type = genomic DNA; mol_type = genomic DNA
agtgcggaggaactgagccccgggaggaggtgctcctgtgcagccccactgagtcagctcatctatcgcctgccctccacctggccagtccctgcgggcatctaactgctaagcctccgctcagccaacacccagttggtgtctgaaggtggctattcactgagcgatggggttggacttgaaggaatgccaagagatgctgcccccacccccttaggcccgagggatcaggagctatgggaccagaggccctgtcatctttactgctgctgctcttggtggcaagtggagatgctgacatgaagggacattttgatcctgccaagtgccgctatgccctgggcatgcaggaccggaccatcccagacagtgacatctctgcttccagctcctggtcagattccactgccgcccgccacagcaggttggagagcagtgacggggatggggcctggtgccccgcagggtcggtgtttcccaaggaggaggagtacttgcaggtggatctacaacgactgcacctggtggctctggtgggcacccagggacggcatgccgggggcctgggcaag

SEQ ID NO: 1543 - DNA, 623 bp, Homo sapiens
  source 1..623: mol_type = genomic DNA
gcttttgtgtacttgtctggttgggacttcgtgtttctttcttgggattgttgtctgggactgcaagcaggagatgctgcccccacccccttaggcccgagggatcaggagctatgggaccagaggccctgtcatctttactgctgctgctcttggtggcaagtggagatgctgacatgaagggacattttgatcctgccaagtgccgctatgccctgggcatgcaggaccggaccatcccagacagtgacatctctgcttccagctcctggtcagattccactgccgcccgccacagcaggttggagagcagtgacggggatggggcctggtgccccgcagggtcggtgtttcccaaggaggaggagtacttgcaggtggatctacaacgactgcacctggtggctctggtgggcacccagggacggcatgccgggggcctgggcaaggagttctcccggagctaccggctgcgttactcccgggatggtcgccgctggatgggctggaaggaccgctggggtcaggaggtgatctcaggcaatgaggaccctgagggagtggtgctgaaggaccttgggccccccatggttgcccgactggttcgcttctacccccgggct

SEQ ID NO: 1544 - DNA, 539 bp, Homo sapiens
  source 1..539: mol_type = genomic DNA
ccagaggcaggcgcccaagctcgctggctgttgctgagggcctgtaggtgtgtccaggactgagtggtgtggtggagacagagatgctgcccccacccccttaggcccgagggatcaggagctatgggaccagaggccctgtcatctttactgctgctgctcttggtggcaagtggagatgctgacatgaagggacattttgatcctgccaagtgccgctatgccctgggcatgcaggaccggaccatcccagacagtgacatctctgcttccagctcctggtcagattccactgccgcccgccacagcaggttggagagcagtgacggggatggggcctggtgccccgcagggtcggtgtttcccaaggaggaggagtacttgcaggtggatctacaacgactgcacctggtggctctggtgggcacccagggacggcatgccgggggcctgggcaaggagttctcccggagctaccggctgcgttactcccgggatggtcgccgctggatgggctggaaggaccgctggggtcagga

SEQ ID NO: 1545 - DNA, 1022 bp, Homo sapiens
  source 1..1022: mol_type = genomic DNA
acaaaagagtgctaactactctaggagagattaaagcctgtgaaatagaacttttccagataatggcgagtttttaggcttgctcatgctgaagcttaatataagctaataagtagagaaattaggaggcttggatattgcaaactttattggttggggtgttacccaggctaatagaaaaaaaattatatcctagaaagacagaacaggtgcgacttctgagaagaaaggttagagaagactagaaaggctgggaccaccttgaatttggcacacacacacacacacccacacgcacacacaaaatcaccaaatgatctggaatgtgctatgcgatgagtcagcctccactgctgtacgtccttggctacagactcctggaacagcagctcttctcaaggctagttgtgacagactcctggaacagcagctcttctcaaggctagttgtgacatccaaagtgacaagagcaggcccatattcagccacctcatccaggccttatcaaagaagagtcttatatgagatcaaatggctgcctttccccacaagattatatttttcctggtatgctctactttgacacatgtggctttctcaggaattttcaataaacgtgacttcactaggtggcctaagccccgatgtaaaatgtatatcccactggaccctgattacaatgcagactgccccaatgtgacagcacctgtttgtgcctcaaatggccacactttccagaatgagtgtttcttttgtgttgaacagagggaatttcattatcgtataaaatttgaaaaatatggaaaatgtgattaatgggtaccagagtaactacacttgcttattctttttctacttaattcagaatagtatttcttttagagtgtgagaatgtaaattaaataacatccctatgctgtacttaaatgtcgaacaaaatgagagacaaaaatgaaggaatcaaactgacaagaaccaaatatcacatttgttacaaataaacaacaaaagagctgatattc

SEQ ID NO: 1546 - DNA, 604 bp, Homo sapiens
  source 1..604: mol_type = genomic DNA
cgttgggagcccaggggaatcagggcctgggcgtctggacccccgggtcccttagaacgcccttcagagagaggaactgagaggagaaggagaagagagtgggcccgccttcagggtctggggccttccaggttgggtcgtaggggcgggagcgcacaggctgcgagagaggagcaaaggcccccgacagctgctctcgggagccgcctcccgacacccgagccccgccggcgcctcccgctcccggctcccggctcctggctccctccgcctcccccgcccctcgccccgccgccgaagaggccccgctcccgggtcggacgcctgggtctgccgggaagagcgatgagaggtgtctgaaggtggctattcactgagcgatggggttggacttgaaggaatgccaagagatgctgcccccacccccttaggcccgagggatcaggagctatgggaccagaggccctgtcatctttactgctgctgctcttggtggcaagtggagatgctgacatgaagggacattttgatcctgccaagtgccgctatgccctgggcatgcaggaccggaccatcccagacagtgacatctctgcttccagct

SEQ ID NO: 1547 - DNA, 2882 bp, Homo sapiens
  source 1..2882: mol_type = genomic DNA
atgggaccagaggccctgtcatctttactgctgctgctcttggtggcaagtggagatgctgacatgaagggacattttgatcctgccaagtgccgctatgccctgggcatgcaggaccggaccatcccagacagtgacatctctgcttccagctcctggtcagattccactgccgcccgccacagcaggttggagagcagtgacggggatggggcctggtgccccgcagggtcggtgtttcccaaggaggaggagtacttgcaggtggatctacaacgactgcacctggtggctctggtgggcacccagggacggcatgccgggggcctgggcaaggagttctcccggagctaccggctgcgttactcccgggatggtcgccgctggatgggctggaaggaccgctggggtcaggaggtgatctcaggcaatgaggaccctgagggagtggtgctgaaggaccttgggccccccatggttgcccgactggttcgcttctacccccgggctgaccgggtcatgagcgtctgtctgcgggtagagctctatggctgcctctggagggatggactcctgtcttacaccgcccctgtggggcagacaatgtatttatctgaggccgtgtacctcaacgactccacctatgacggacataccgtgggcggactgcagtatgggggtctgggccagctggcagatggtgtggtggggctggatgactttaggaagagtcaggagctgcgggtctggccaggctatgactatgtgggatggagcaaccacagcttctccagtggctatgtggagatggagtttgagtttgaccggctgagggccttccaggctatgcaggtccactgtaacaacatgcacacgctgggagcccgtctgcctggcggggtggaatgtcgcttccggcgtggccctgccatggcctgggagggggagcccatgcgccacaacctagggggcaacctgggggaccccagagcccgggctgtctcagtgccccttggcggccgtgtggctcgctttctgcagtgccgcttcctctttgcggggccctggttactcttcagcgaaatctccttcatctctgatgtggtgaacaattcctctccggcactgggaggcaccttcccgccagccccctggtggccgcctggcccacctcccaccaacttcagcagcttggagctggagcccagaggccagcagcccgtggccaaggccgaggggagcccgaccgccatcctcatcggctgcctggtggccatcatcctgctcctgctgctcatcattgccctcatgctctggcggctgcactggcgcaggctcctcagcaaggctgaacggagggtgttggaagaggagctgacggttcacctctctgtccctggggacactatcctcatcaacaaccgcccaggtcctagagagccacccccgtaccaggagccccggcctcgtgggaatccgccccactccgctccctgtgtccccaatggctctgcgttgctgctctccaatccagcctaccgcctccttctggccacttacgcccgtccccctcgaggcccgggcccccccacacccgcctgggccaaacccaccaacacccaggcctacagtggggactatatggagcctgagaagccaggcgccccgcttctgcccccacctccccagaacagcgtcccccattatgccgaggctgacattgttaccctgcagggcgtcaccgggggcaacacctatgctgtgcctgcactgcccccaggggcagtcggggatgggccccccagagtggatttccctcgatctcgactccgcttcaaggagaagcttggcgagggccagtttggggaggtgcacctgtgtgaggtcgacagccctcaagatctggttagtcttgatttcccccttaatgtgcgtaagggacaccctttgctggtagctgtcaagatcttacggccagatgccaccaagaatgccagcttctccttgttctccaggaatgatttcctgaaagaggtgaagatcatgtcgaggctcaaggacccaaacatcattcggctgctgggcgtgtgtgtgcaggacgaccccctctgcatgattactgactacatggagaacggcgacctcaaccagttcctcagtgcccaccagctggaggacaaggcagccgagggggcccctggggacgggcaggctgcgcaggggcccaccatcagctacccaatgctgctgcatgtggcagcccagatcgcctccggcatgcgctatctggccacactcaactttgtacatcgggacctggccacgcggaactgcctagttggggaaaatttcaccatcaaaatcgcagactttggcatgagccggaacctctatgctggggactattaccgtgtgcagggccgggcagtgctgcccatccgctggatggcctgggagtgcatcctcatggggaagttcacgactgcgagtgacgtgtgggcctttggtgtgaccctgtgggaggtgctgatgctctgtagggcccagccctttgggcagctcaccgacgagcaggtcatcgagaacgcgggggagttcttccgggaccagggccggcaggtgtacctgtcccggccgcctgcctgcccgcagggcctatatgagctgatgcttcggtgctggagccgggagtctgagcagcgaccacccttttcccagctgcatcggttcctggcagaggatgcactcaacacggtgtgaatcacacatccagctgcccctccctcagggagcgatccaggggaagccagtgacactaaaacaagaggacacaatggcacctctgcccttcccctcccgacagcccatcacctctaatagag

SEQ ID NO: 1548 - DNA, 569 bp, Homo sapiens
  source 1..569: mol_type = genomic DNA
tttcggttcctggaaaggttaccggagctgcgattggggctgggaccaaagttgagtcctggaaagggagcctggagagcggcggtgctgggaggcccggccagctcgatcgcaggcttccacctggcggccagtccccggatgcgcaccccaacggcgcctgcgcctacgggggcctcagccttgcaaaatgtcactcagcagagcctgctgctgaaacgtgggagttgaaaaagatgcttgtttgctactgatgggtgtgagcaagttagatattctataccggagacttctcctaacaaaactttttatcagaggatggggaaggccagaagatctcaaaagactctttgaattcagaaagatgattggaaatcgggaaagatgccagaatctggtttcaagcgattatccagtacacattgataagattgaagagcaatcagattgtaagatcttagatggacactttgtttcccccatggctcactatgtgcctgatatcatgccaattgaatctgttattgcaaggttccaatttattgtgcctaaagaatggaacagcaaat

SEQ ID NO: 1549 - DNA, 300 bp, Homo sapiens
  source 1..300: mol_type = genomic DNA
gtagtgaaactttagaaagaagagccgggaggatgtattggttgttaggaaaatgtaggctaccagtagaaaatgacattctctattaataagatctgagggctttctgggaattgtcttgacagagaacctcagctggacaaagcagccttgatctgagtgagctaactgacacaatgaaactgtcaggcatgtttctgctcctctctctggctcttttctgctttttaacaggtgtcttcagtcagggaggacaggttgactgtggtgagttccaggaccccaaggtctactgcactc

SEQ ID NO: 1550 - DNA, 676 bp, Homo sapiens
  source 1..676: mol_type = genomic DNA
agagaaccacatactatgtaacctcctttttctgttctgtcccagcgatcatagaagccattgagatcccgcagtttatcggccgcagttacctgacgtatgacaacccagatatcttgaagagggtgtcaggatcaagatcaaatgtgttcatgaggtttaaaacaactgccaaggatggccttttgctgtggaggggagacagccccatgagacccaacagcgacttcatttccttgggccttcgggatggagccctcgtgttcagctataacctgggcagtggtgtggcatccatcatggtgaatggctccttcaacgatggtcggtggcaccgagttaaggccgttagggatggccagtcaggaaagataaccgtggatgactatggagccagaacaggcaaatccccaggcatgatgcggcagcttaacatcaatggagctctgtatgtgggtggaatgaaggaaattgctctgcacactaacaggcaatatatgagagggctcgtgggctgtatctctcacttcaccctgtccaccgattaccacatttccctcgtggaagatgccgtggatgggaaaaacatcaacacttgtggagccaagtaacaccagctggccttgtccaagggacagagccttctattctgagaatcccaggggccctcagaccc

SEQ ID NO: 1551 - DNA, 2362 bp, Homo sapiens
  source 1..2362: mol_type = genomic DNA
agaagggagcgggagggggctccgggcgccgcgcagcagacctgctccggccgcgcgcctcgccgctgtcctccgggagcggcagcagtagcccgggcggcgagggctgggggttcctcgagactctcagaggggcgcctcccatcggcgcccaccaccccaacctgttcctcgcgcgccactgcgctgcgccccaggacccgctgcccaacatggattttctcctggcgctggtgctggtatcctcgctctacctgcaggcggccgccgagttcgacgggaggtggcccaggcaaatagtgtcatcgattggcctatgtcgttatggtgggaggattgactgctgctggggctgggctcgccagtcttggggacagtgtcagcctgtgtgccaaccacgatgcaaacatggtgaatgtatcgggccaaacaagtgcaagtgtcatcctggttatgctggaaaaacctgtaatcaagatctaaatgagtgtggcctgaagccccggccctgtaagcacaggtgcatgaacacttacggcagctacaagtgctactgtctcaacggatatatgctcatgccggatggttcctgctcaagtgccctgacctgctccatggcaaactgtcagtatggctgtgatgttgttaaaggacaaatacggtgccagtgcccatcccctggcctgcagctggctcctgatgggaggacctgtgtagatgttgatgaatgtgctacaggaagagcctcctgccctagatttaggcaatgtgtcaacacttttgggagctacatctgcaagtgtcataaaggcttcgatctcatgtatattggaggcaaatatcaatgtcatgacatagacgaatgctcacttggtcagtatcagtgcagcagctttgctcgatgttataacatacgtgggtcctacaagtgcaaatgtaaagaaggataccagggtgatggactgacttgtgtgtatatcccaaaagttatgattgaaccttcaggtccaattcatgtaccaaagggaaatggtaccattttaaagggtgacacaggaaataataattggattcctgatgttggaagtacttggtggcctccgaagacaccatatattcctcctatcattaccaacaggcctacttctaagccaacaacaagacctacaccaaagccaacaccaattcctactccaccaccaccaccacccctgccaacagagctcagaacacctctaccacctacaaccccagaaaggccaaccaccggactgacaactatagcaccagctgccagtacacctccaggagggattacagttgacaacagggtacagacagaccctcagaaacccagaggagatgtgttcagtgttctggtacacagttgtaattttgaccatggactttgtggatggatcagggagaaagacaatgacttgcactgggaaccaatcagggacccagcaggtggacaatatctgacagtgtcggcagccaaagccccagggggaaaagctgcacgcttggtgctacctctcggccgcctcatgcattcaggggacctgtgcctgtcattcaggcacaaggtgacggggctgcactctggcacactccaggtgtttgtgagaaaacacggtgcccacggagcagccctgtggggaagaaatggtggccatggctggaggcaaacacagatcaccttgcgaggggctgacatcaagagcgtcgtcttcaaaggtgaaaaaaggcgtggtcacactggggagattggattagatgatgtgagcttgaaaaaaggccactgctctgaagaacgctaacaactccagaactaacaatgaactcctatgttgctctatcctctttttccaattctcatcttctctcctcttctcccttttatcaggcctaggagaagagtgggtcagtgggtcagaaggaagtctatttggtgacccaggtttttctggcctgcttttgtgcaatcccaatgaacagtgataccctccttgaaatacaggggcatcgcagacacatcaaagccatctgtgggtgttgccttccatcctgtgtctctttcaggaaggcattcagcatgcgtgagccataccatcctccatcctgattacaaggtgctccttgtagcaaattatgagagtgagttacgggagcagtttttaaaagaaatctttgcagatggctatgatgttatgtgttcggtgttgtaccatgagtagtattgacttcccttgagatatgatgtacaatgtgcttgtgaaattgacttaccctcttcacttaagttagttctggcctgacctgaactctgacttttactgccattcactttataaaataa

SEQ ID NO: 1552 - DNA, 478 bp, Homo sapiens
  source 1..478: mol_type = genomic DNA
agcgacggagctggggccggcctgggaccatgggcgtgagtgcaatctacggatcagtctctgatggtgggtcgttaacctcagtggggactccaagatttccatgaagaaaatcagttgtcttcattcaagaattggggacatgttcccgatttgaggtgaaaccatgaagagaaaatagaatacttaataatgcttttccgcaaccgcttcttgctgctgctggccctggctgcgctgctggcctttgtgagcctcagcctgcagttcttccacctgatcccggtgtcgactcctaagaatggaatgagtagcaagagtcgaaagagaatcatgcccgaccctgtgacggagccccctgtgacagaccccgtttatgaagctcttttgtactgcaacatccccagcgtggccgagcgcagcatggaaggtcatgccccgcatcattttaagctggtctcagtgcatgtgttcattc

SEQ ID NO: 1553 - DNA, 573 bp, Homo sapiens
  source 1..573: mol_type = genomic DNA
agagcacctgagaggatctcggcgaagcggaaggctttggtgccagctgggagagtctgcgccggatttcctcagctccttggcgcgtttcctcggagccgggggaggcaaagcacggaccccggagtcggcgcccatagcgggacgccctcgcgaggggcgggagtgcgggagagccgagctgctgcccttgactggtgctcaggggaccacagctgcaatgacagtttgggcctgcaaaaagaaggctggaacaacgggagatggaagctttctgcaaatgcaccactggtatccatgaatttaacctgcccatcattcttcctaaacaagagactattgaaaagtcagggtgttcaaaatggcttcagatcttatcaggacaatcttggctgttgcactaatttccaaacttggcacagctgtagatgcagaactgatgccatctggtgcgattctacagaataagagagaaaatttacccagagtgtgccatgcactggcttttctgggaatggcaaggtgccaggatttgtttttggttcgcttgcaggggtggaaacttggaactag

SEQ ID NO: 1554 - DNA, 580 bp, Homo sapiens
  source 1..580: mol_type = genomic DNA
gtgtttctttcttgggattgttgtctgggactgcaagcagggtatgtttttatctactgtgaggttcctggggcggagatgtgcagtggagcgagaacttcctgtgaccgtgacattgtctagagatgctgcccccacccccttaggcccgagggatcaggagctatgggaccagaggccctgtcatctttactgctgctgctcttggtggcaagtggagatgctgacatgaagggacattttgatcctgccaagtgccgctatgccctgggcatgcaggaccggaccatcccagacagtgacatctctgcttccagctcctggtcagattccactgccgcccgccacagcaggttggagagcagtgacggggatggggcctggtgccccgcagggtcggtgtttcccaaggaggaggagtacttgcaggtggatctacaacgactgcacctggtggctctggtgggcacccagggacggcatgccgggggcctgggcaaggagttctcccggagctaccggctgcgttactcccgggatggtcgccgctggatgggctggaaggaccgctggggtcagg

SEQ ID NO: 1555 - DNA, 573 bp, Homo sapiens
  source 1..573: mol_type = genomic DNA
gaacaatttatctgcacgaataccccgtgctaccagaatggctgtctcagtacttcgcctgacagttgtcctgggactgcttgtcttattcctgacctgctatgcagacgacaaaccagacaagccagacgacaagccagacgactcgggcaaagacccaaagccagacttccccaaattcctaagcctcctgggcacagagatcattgagaatgcagtcgagttcatcctccgctccatgtccaggagcacgtaagcactgagaaaaacgttgctttttgtccaattctctgttgataatgaccacacaatgacctcatggcattaaaatacatgagaaacaaaatttgtggcataagtaaatgtgttatttttcattgaaaaatgttgccctacttaaaatatattttgcatctgaatcaactgccctgagctttttgggggaaaggacattcccatcaagtggttccatacaggatttttttttttttttctttttaatctcaggagcaaatagggaggaggaagaacactagactaaggaacaaaaagccaagttctgatcctaactca

SEQ ID NO: 1556 - DNA, 564 bp, Homo sapiens
  source 1..564: mol_type = genomic DNA
agagtttccctctattgtgcaccccggtctgcttgacagtgtgatggtcccgcgtgcgcgtctcctgggttttgcagctttgtcgggggctcggtgggcctccttcattctccccgagtggcgctaaggatggtgctgctccactggtgcctgctgtggctcctgtttccactcagctcaaggacccagaagttacccacccgggatgaggaactttttcagatgcagatccgggacaaggcattttttcatgattcgtcagtaattccagatggagctgaaattagcagttatctctttagagatacacctaagaggtatttctttgtggttgaagaagacaatactccattatcagtcacagtgacgccctgtgatgcgcctttggagtggaagctgagcctccaggagctgccagaggacaggagcggggaaggctcaggtgatctggaacctcttgagcagcagaagcagcagatcattaatgaggaaggcactgagttattctcctacaaaggcaatgatgttgagtattttatatcgtctagttccccatccggttta

SEQ ID NO: 1557 - DNA, 956 bp, Homo sapiens
  source 1..956: mol_type = genomic DNA
cagttgctttgcctactcagtctcactgtttcatcttccctgggtctcttggtccccttccttttgactgtgtgtgattttcagtgtgcctccatccttctcctgctcctcttcttcctcctcccgaccactcaactttgtcctggcctcatttttggcctcttctggccagtgatcagaccctctggcccactacggccagagctggctgggcctgagggaggcttgccctgaggactcctgagtccccctcccactccactccgttgggagcccaggggaatcagggcctgggcgtctggacccccgggtcccttagaacgcccttcagagagaggaactgagaggagaaggagaagagagtgggcccgccttcagggtctggggccttccaggttgggtcgtaggggcgggagcgcacaggctgcgagagaggagcaaaggttggtggagggagaagagcagtctggggcctggctggacaggcccccgacagctgctctcgggagccgcctcccgacacccgagccccgccggcgcctcccgctcccggctcccggctcctggctccctccgcctcccccgcccctcgccccgccgccgaagaggccccgctcccgggtcggacgcctgggtctgccgggaagagcgatgagagagatgctgcccccacccccttaggcccgagggatcaggagctatgggaccagaggccctgtcatctttactgctgctgctcttggtggcaagtggagatgctgacatgaagggacattttgatcctgccaagtgccgctatgccctgggcatgcaggaccggaccatcccagacagtgacatctctgcttccagctcctggtcagattccactgccgcccgccacagcaggttggagagcagtgacggggatggggcctggtgccccgcagggtcggtgtttcccaaggaggaggagt

SEQ ID NO: 1558 - DNA, 2092 bp, Homo sapiens
  source 1..2092: mol_type = genomic DNA
aggaaactccaaactgttctccataatggctgtgctaatttacattttcatcaacagtgtacgagggttctccgttttctgcactcttgccagcatccgttttttcctgtctttttgataaaaaccactttaactgggggccttctgctgaagggccacagaggaacaccaggctgggatggattcagggcaagcaagtcactgtgctgggaagccctgtgcctgtgaacgtgttcctcggagtcccctttgctgctcccccgctgggatccctgcgatttacgaacccgcagcctgcatcgccctgggataacttgcgagaagccacctcctaccctaatttgtaagaccaggtgcctccagaactcagagtggctgctcttagatcaacatatgctcaaggtgcattacccgaaattcggagtgtcagaagactgcctctacctgaacatctatgcgcctgcccacgccgatacaggctccaagctccccgtcttggtgtggttcccaggaggtgccttcaagactggctcagcctccatctttgatgggtccgccctggctgcctatgaggacgtgctggttgtggtcgtccagtaccggctaggaatatttggtttcttcaccacatgggatcagcatgctccggggaactgggccttcaaggaccaggtggctgctctgtcctgggtccagaagaacatcgagttcttcggtggggaccccagctctgtgaccatctttggcgagtccgcgggagccataagtgtttctagtcttatactgtctcccatggccaaaggcttattccacaaagccatcatggagagtggggtggccatcatcccttacctggaggcccatgattatgagaagagtgaggacctgcaggtggttgcacatttctgtggtaacaatgcgtcagactctgaggccctgctgaggtgcctgaggacaaaaccctccaaggagctgctgaccctcagccagaaaacaaagtctttcactcgagtggttgatggtgctttctttcctaatgagcctctagatctattgtctcagaaagcatttaaagcaattccttccatcatcggagtcaataaccacgagtgtggcttcctgctgcctatgaaggaggctcctgagatcctcagtggctccaacaagtcccttgccctccatctgatacaaaacatcctgcacatcccgcctcagtatttgcaccttgtggctaatgaatacttccatgacaagcactccctgactgaaatccgagacagtcttctggacttgcttggagatgtgttctttgtggtccctgcactgatcacagctcgatatcacagagatgctggtgcacctgtctacttctatgagtttcggcaccggcctcagtgctttgaagacacgaagccagcttttgtcaaagccgaccacgctgatgaagtccgctttgtgttcggtggtgccttcctgaagggggacattgttatgttcgaaggagccacggaggaggagaagttactgagccggaagatgatgaaatactgggctacctttgctcgaaccgggaatcctaatgggaacgacctgtctctgtggccagcttataatctgactgagcagtacctccagctggacttgaacatgagcctcggacagagactcaaagaaccgcgggtggatttttggaccagcaccatccccctgatcctgtctgcctccgacatgctccacagtcctctttcttccttaactttcctctctctcctccagcctttctttttcttttgtgctccttgagaagttatctttctgtgattttggtttcccttctcctcccataatttctcccgcaatcattagcttctttctgagctcagctgctttctatggggatccttgcaaaacaagctgctttcgctgatattttatggacttaggaatgatccttacagaattcttttcaacatcaaaaagtgcaatttgtcttggaaggcaacaagatttcttcaataaatttggaagagggctggcctattagttgtcataataatggttttgtaactcatatgaaataaaatcagaatgt

SEQ ID NO: 1559 - DNA, 430 bp, Homo sapiens
  source 1..430: mol_type = genomic DNA
tttggagatattgaatcatgttaccatttctgtttttttccaccctgttttcttccatatttactgaagctcagaagcagtattgggtctgcaactcatccgatgcaagtatttcatacacctactgtgggagagatttaaagcaattatatttcaatctctatataactgtcaacaccatgaatcttccaaagcgcaaagaagttatttgccgaggatctgatgacgattactctttttgcagagctctgaagggagagactgtgaatacaacaatatcattctccttcaagggaataaaattttctaagggaaaatacaaatgtgttgttgaagctatttctgggagcccagaagaaatgctcttttgcttggagtttgtcatcctacaccaacctaattcaaattagaataaattgagtatttaaaa

SEQ ID NO: 1560 - DNA, 553 bp, Homo sapiens
  source 1..553: mol_type = genomic DNA
agaaacgctggggcgcccaccctggcagactaacgaagcagctcccttcccaccccaactgcaggtctaattttggacgctttgcctgccatttcttccaggttgagggagccgcagaggcggaggccggccgtccggtttggctcacctctcccaggaaacttcacactggagagccaaaaggagtggaagagcctgtcttggagattttcctggggaaatcctgaggtcattcattatgaagtgtaccgcgcgggagtggctcagagtaaccacagtgctgttcatggctagagcaattccagccatggtggttcccaatgccactttattggagaaacttttggaaaaatacatggatgaggatggtgagtggtggatagccaaacaacgagggaaaagggccatcacagacaatgacatgcagagtattttggaccttcataataaattacgaagtcaggtgtatccaacagcctctaatatggagtatatgacatgggatgtagagctggaaagatctgcagaatcctgggctgaaagttgcttgtgg

SEQ ID NO: 1561 - DNA, 1845 bp, Homo sapiens
  source 1..1845: mol_type = genomic DNA
ggctagccctgagtccctgcatgtgcggggctgaagaaggaagccagaagcctcctagcctcgcctccacgcttgctgaataccaagctgcaggcgagctgccgggcgcttttctctcctccaattcagagtagacaaaccacggggatttctttccagggtaggggaggggccgggcccggggtcccaactcgcactcaagtcttcgctgccatgggggccgtcatgggcaccttctcatctctgcaaaccaaacaaaggcgaccctcgaaagaactaccttaaattaatttgttgaaaggacagatggatggatggttgatggaagtagcaggcttccagcagcaggggatggagtgagtgtgtggataccgctggatcagcagaaggttataccattttagagtaactatctcggacttcggagagttcctggataagattgaagatgagctggagatgaccatggtttgccatcggcccgagggactggagcagctcgaggcccagaccaacttcaccaagagggagctgcaggtcctttatcgaggcttcaaaaatgagtgccccagtggtgtggtcaacgaagacacattcaagcagatctatgctcagtttttccctcatggagatgccagcacgtatgcccattacctcttcaatgccttcgacaccactcagacaggctccgtgaagttcgaggactttgtaaccgctctgtcgattttattgagaggaactgtccacgagaaactaaggtggacatttaatttgtatgacatcaacaaggacggatacataaacaaagaggagatgatggacattgtcaaagccatctatgacatgatggggaaatacacatatcctgtgctcaaagaggacactccaaggcagcatgtggacgtcttcttccagaaaatggacaaaaataaagatggcatcgtaactttagatgaatttcttgaatcatgtcaggaggacgacaacatcatgaggtctctccagctgtttcaaaatgtcatgtaactggtgacactcagccattcagctctcagagacattgtactaaacaaccaccttaacaccctgatctgcccttgttctgattttacacaccaactcttgggacagaaacaccttttacactttggaagaattctctgctgaagactttctatggaacccagcatcatgtggctcagtctctgattgccaactcttcctctttcttcttcttgagagagacaagatgaaatttgagtttgttttggaagcatgctcatctcctcacactgctgccctatggaaggtccctctgcttaagcttaaacagtagtgcacaaaatatgctgcttacgtgcccccagcccactgcctccaagtcaggcagaccttggtgaatctggaagcaagaggacctgagccagatgcacaccatctctgatggcctcccaaaccaatgtgcctgtttctcttcctttggtgggaagaatgagagttatccagaacaattaggatctgtcatgaccagattgggagagccagcacctaacatatgtgggataggactgaattattaagcatgatattgtctgatgacccaaactgcccatgtcatttgtttccagaaacgaggaccaataattctctcacactggcatttgtgctggtagtacaagtcctttaatatgtccaggaagggagccattgcccagtggtccatatctccaccacatcccctgcttgagcccagcgctgcatgtccctcccaagaagtccagaatgcctgcaaattgctgtaattttataccatgttctaaccaataaacagaactatttcttaca

SEQ ID NO: 1562 - DNA, 1439 bp, Homo sapiens
  source 1..1439: mol_type = genomic DNA
ccagcttccagcctaccctgcatctcttccctctgaattgcaggaaccctcccagcctccatgccgcctttcctgatcaccctcttcctctttcactcttgctgcctccgagcaaatggccacctccgtgaaggaatgacattgctgaagactgagtttgcacttcacctctaccagagtgtggccgcgtgtagaaatgagacgaactttgtcatctctcctgctggtgtgtccctccccctggagatcctgcagtttggagcagaagggagcactggtcagcagctggcagatgccctggggtacactgtccatgacaaaagggtgaaagatttcttgcatgctgtttatgccacactacccacctccagccaaggcaccgagatggagctggcctgcagcctttttgtgcaagtgggaacgccactgtccccctgctttgtggagcacgtctcctggtgggctaacagcagcctggaaccagccgacctcagtgagcccaatagcaccgccatccagactagcgaaggggcctccagagagactgcaggtgggggccccagtgagggccctggtggctggccgtgggagcaagtcagtgcagcatttgctcagcttgtgcttgtgagcaccatgtccttccaaggcacttggcgaaagagattctcctccacagacacacagatcctgcctttcacctgtgcctatggcctcgtccttcaggtccccatgatgcaccaaacgaccgaggtcaactacggtcagttccaggacactgcaggccatcaggtgggggtgctggagcttccttacctgggaagtgcagtgagtctgttcctggtgctgccccgtgacaaagacacccccctgagccacatcgagccacacctcacagccagcaccatccacctctggaccaccagcctgaggagagccaggatggatgtgttcctgcccaggtttaggatccaaaatcaattcaacttaaaaagcattttaaattcttggggagtcaccgatctttttgatccactcaaagctaacttgaaaggaatttcaggccaagatggcttttatgtttctgaagcaatccacaaggccaagattgaagttttggaggaaggcaccaaggcatctggagccacagctctgttgttattgaaaaggtctcggattcctatttttaaagcagatcggccattcatctatttcctgagagaacctaacacaggtattacagtattttttgacaggattcagataatttatcagtgtctctctagcaacaagggctcatttgtccactatcccctcaaaaataagcattctttctagctgtttttatggtgcttcagaagctacccagttgctatcttctatcctaagaaaggggactatttcgtaagtacaaaggaaacttatcctccatgttttttacc

SEQ ID NO: 1563 - DNA, 2258 bp, Homo sapiens
  source 1..2258: mol_type = genomic DNA
agctggcaacggtagaggaaagtggtgaactcatttgacttttctttatcagctgtaccatgtacatgatgtgcaagaggactggggctctgtgtcaaggccagctgggatgctgaggttttgtgttaggaccaagggcaagtctgatggctgttctggtttgccctgcttcatgccatggcctaaaggagtttaggataagaaggggaatgtggagattgtgcctggtttactatttttatccagcctcctcaactttgtatgtattgaggattgatgtcttaaactacacttccaaagatgaggggccttctgctgaagggccacagaggaacaccaggctgggatggattcagggcaagcaagtcactgtgctgggaagccctgtgcctgtgaacgtgttcctcggagtcccctttgctgctcccccgctgggatccctgcgatttacgaacccgcagcctgcatcgccctgggataacttgcgagaagccacctcctaccctaatttgtgcctccagaactcagagtggctgctcttagatcaacatatgctcaaggtgcattacccgaaattcggagtgtcagaagactgcctctacctgaacatctatgcgcctgcccacgccgatacaggctccaagctccccgtcttggtgtggttcccaggaggtgccttcaagactggctcagcctccatctttgatgggtccgccctggctgcctatgaggacgtgctggttgtggtcgtccagtaccggctaggaatatttggtttcttcaccacatgggatcagcatgctccggggaactgggccttcaaggaccaggtggctgctctgtcctgggtccagaagaacatcgagttcttcggtggggaccccagctctgtgaccatctttggcgagtccgcgggagccataagtgtttctagtcttatactgtctcccatggccaaaggcttattccacaaagccatcatggagagtggggtggccatcatcccttacctggaggcccatgattatgagaagagtgaggacctgcaggtggttgcacatttctgtggtaacaatgcgtcagactctgaggccctgctgaggtgcctgaggacaaaaccctccaaggagctgctgaccctcagccagaaaacaaagtctttcactcgagtggttgatggtgctttctttcctaatgagcctctagatctattgtctcagaaagcatttaaagcaattccttccatcatcggagtcaataaccacgagtgtggcttcctgctgcctatgaaggaggctcctgagatcctcagtggctccaacaagtcccttgccctccatctgatacaaaacatcctgcacatcccgcctcagtatttgcaccttgtggctaatgaatacttccatgacaagcactccctgactgaaatccgagacagtcttctggacttgcttggagatgtgttctttgtggtccctgcactgatcacagctcgatatcacagagatgctggtgcacctgtctacttctatgagtttcggcaccggcctcagtgctttgaagacacgaagccagcttttgtcaaagccgaccacgctgatgaagtccgctttgtgttcggtggtgccttcctgaagggggacattgttatgttcgaaggagccacggaggaggagaagttactgagccggaagatgatgaaatactgggctacctttgctcgaaccgggaatcctaatgggaacgacctgtctctgtggccagcttataatctgactgagcagtacctccagctggacttgaacatgagcctcggacagagactcaaagaaccgcgggtggatttttggaccagcaccatccccctgatcctgtctgcctccgacatgctccacagtcctctttcttccttaactttcctctctctcctccagcctttctttttcttttgtgctccttgagaagttatctttctgtgattttggtttcccttctcctcccataatttctcccgcaatcattagcttctttctgagctcagctgctttctatggggatccttgcaaaacaagctgctttcgctgatattttatggacttaggaatgatccttacagaattcttttcaacatcaaaaagtgcaatttgtcttggaaggcaacaagatttcttcaataaatttggaagagggctggcctattagttgtcataataatggttttgtaactcatatgaaataaaatcagaatgtaaaatagg

SEQ ID NO: 1564 - DNA, 2100 bp, Homo sapiens
  source 1..2100: mol_type = genomic DNA
agaacgctggacaatccagtaaaggtgctgctggtaataaaacatgaaactatatcttatgcttggtcaagacgtgtcaaatctgtatctgaaatagtgaatgaatgagatcagatgttgtccagagaaggaaaatcaaatgataaaagtgttgagagaggggcagctcttgaaggaagatggaataagaacatggaaactcctgtgtggaaagaaaaggccaagaggtctgctaaatcaagagtactgtgaataaacatgggatgtagagctggaaagatctgcagaatcctgggctgaaagttgcttgtgggaacatggacctgcaagcttgcttccatcaattggacagaatttgggagcacactggggaagatataggcccccgacgtttcatgtacaatcgtggtatgatgaagtgaaagactttagctacccatatgaacatgaatgcaacccatattgtccattcaggtgttctggccctgtatgtacacattatacacaggtcgtgtgggcaactagtaacagaatcggttgtgccattaatttgtgtcataacatgaacatctgggggcagatatggcccaaagctgtctacctggtgtgcaattactccccaaagggaaactggtggggccatgccccttacaaacatgggcggccctgttctgcttgcccacctagttttggagggggctgtagagaaaatctgtgctacaaagaagggtcagacaggtattatccccctcgagaagaggaaacaaatgaaatagaacgacagcagtcacaagtccatgacacccatgtccggacaagatcagatgatagtagcagaaatgaagtcataagcgcacagcaaatgtcccaaattgtttcttgtgaagtaagattaagagatcagtgcaaaggaacaacctgcaataggtacgaatgtcctgctggctgtttggatagtaaagctaaagttattggcagtgtacattatgaaatgcaatccagcatctgtagagctgcaattcattatggtataatagacaatgatggtggctgggtagatatcactagacaaggaagaaagcattatttcatcaagtccaatagaaatggtattcaaacaattggcaaatatcagtctgctaattccttcacagtctctaaagtaacagttcaggctgtgacttgtgaaacaactgtggaacagctctgtccatttcataagcctgcttcacattgcccaagagtatactgtcctcgtaactgtatgcaagcaaatccacattatgctcgtgtaattggaactcgagtttattctgatctgtccagtatctgcagagcagcagtacatgctggagtggttcgaaatcacggtggttatgttgatgtaatgcctgtggacaaaagaaagacctacattgcttcttttcagaatggaatcttctcagaaagtttacagaatcctccaggaggaaaggcattcagagtgtttgctgttgtgtgaaactgaatacttggaagaggaccataaagactattccaaatgcaatatttctgaattttgtataaaactgtaacattactgtacagagtacatcaactattttcagcccaaaaaggtgccaaatgcatataaatcttgataaacaaagtctataaaataaaacatgggacattagctttgggaaaagtaatgaaaatataatggttttagaaatcctgtgttaaatattgctatattttcttagcagttatttctacagttaattacatagtcatgattgttctacgtttcatatattatatggtgctttgtatatgccactaataaaatgaatctaaacattgaatgtgaatggccctcagaaaatcatctagtgcatttaaaaataatcgactctaaaactgaaagaaaccttatcacattttccccagttcaatgctatgccattaccaactccaaataatctcaaataattttccacttaataactgtaaagtttttttctgttaatttaggcatatagaatattaaattctgatattgcacttcttattttatataaaataatcctttaatatccaaatgaatctgttaaaatg

SEQ ID NO: 1565 - DNA, 1413 bp, Homo sapiens
  source 1..1413: mol_type = genomic DNA
tcacttggtgtgtctatatgtctggcagacattatcagcacattctctgttgttacctgtgattcattttttcttcactctccaggtgaatttcaattgctgaaaatttcccactgaaaatatgcagtaatatattttgtggttcagacatttggggcaaatggttcacattcattttagggttagtggtcatgctgtttatttttctctgctatacaaagttcctcttaggggtctgcctcatgacactaaaaaatgaatagagattctactgtaggttatctcctaggcttgagttcaacatttgtttggatttttgaagaaagtcaaatcaagcaatgctcccaaatgatgtctttgtaaattcataccctctggccctattttttttcatagaccctaactctacctttctgctttaaagcaaagtaaactcggtggcctcttcttctccacccctcaaaatgatagcaatctctgccgtcagcagtgcactcctgttctcccttctctgtgaagcaagtaccgtcgtcctactcaattccactgactcatccccgccaaccaataatttcactgatattgaagcagctctgaaagcacaattagattcagcggatatccccaaagccaggcggaagcgctacatttcgcagaatgacatgatcgccattcttgattatcataatcaagttcggggcaaagtgttcccaccggcagcaaatatggaatatatggtttgggatgaaaatcttgcaaaatcggcagaggcttgggcggctacttgcatttgggaccatggaccttcttacttactgagatttttgggccaaaatctatctgtacgcactggaagatatcgctctattctccagttggtcaagccatggtatgatgaagtgaaagattatgcttttccatatccccaggattgcaaccccagatgtcctatgagatgttttggtcccatgtgcacacattatacgcagatggtttgggccacttccaatcggataggatgcgcaattcatacttgccaaaacatgaatgtttggggatctgtgtggcgacgtgcagtttacttggtatgcaactatgccccaaagggcaattggattggagaagcaccatataaagtaggggtaccatgttcatcttgtcctccaagttatgggggatcttgtactgacaatctgtgttttccaggagttacgtcaaactacctgtactggtttaaataagtttaccttttcctccaggaaatataatgatttctgggaacatgggcatgtatatatatatatggagagagaattttgcacatattatacatattttgtgctaatcttgttttcctcttagtattcctttgtataaattagtgtttgtctagcatgtttgtttaatcctttg

SEQ ID NO: 1566 - DNA, 2293 bp, Homo sapiens
  source 1..2293: mol_type = genomic DNA
atcagatgcatgcatagcaccacacagctacatcttaaaaaacgtagtgtttactcaaaaacattagggaataacgaaatacataacataaaagcaggaggaggggggaagcattaggtacctggtacccagcaaaagcccaacaagcaaagttatcagtggaattcctcaatgtgacaaagggctggatgaggggttccttgctggtacaaccaggtcacaagcctaagaaggcttgacgggtgtggctggctctccccccacggccctgctctgttcccgatctgggctttgctgccctgggctgggctgcttctcctggctctctgcaggacctccaggctccaggaatttggaccgagtggtagagacatcgccggcagagacggcaatcgccagcttcctctctgtgctgtcttgtgattcaaagcagattctgctccacttttttaaaaggggagcacatgaatgctggagacccacaagaacagagtcgagcaaggaaacgtgcaacagtgatacaaaagtctggctttgctaaagtcacacatccagtaagtggccgaagcagatcttcagacccacagtttggctgccaaaggaccacagaaccctcccagcctccatgccgcctttcctgatcaccctcttcctctttcactcttgctgcctccgagcaaatggccacctccgtgaaggaatgacattgctgaagactgagtttgcacttcacctctaccagagtgtggccgcgtgtagaaatgagacgaactttgtcatctctcctgctggtgtgtccctccccctggagatcctgcagtttggagcagaagggagcactggtcagcagctggcagatgccctggggtacactgtccatgacaaaagggtgaaagatttcttgcatgctgtttatgccacactacccacctccagccaaggcaccgagatggagctggcctgcagcctttttgtgcaagtgggaacgccactgtccccctgctttgtggagcacgtctcctggtgggctaacagcagcctggaaccagccgacctcagtgagcccaatagcaccgccatccagactagcgaaggggcctccagagagactgcaggtgggggccccagtgagggccctggtggctggccgtgggagcaagtcagtgcagcatttgctcagcttgtgcttgtgagcaccatgtccttccaaggcacttggcgaaagagattctcctccacagacacacagatcctgcctttcacctgtgcctatggcctcgtccttcaggtccccatgatgcaccaaacgaccgaggtcaactacggtcagttccaggacactgcaggccatcaggtgggggtgctggagcttccttacctgggaagtgcagtgagtctgttcctggtgctgccccgtgacaaagacacccccctgagccacatcgagccacacctcacagccagcaccatccacctctggaccaccagcctgaggagagccaggatggatgtgttcctgcccaggtttaggatccaaaatcaattcaacttaaaaagcattttaaattcttggggagtcaccgatctttttgatccactcaaagctaacttgaaaggaatttcaggccaagatggcttttatgtttctgaagcaatccacaaggccaagattgaagttttggaggaaggcaccaaggcatctggagccacagctctgttgttattgaaaaggtctcggattcctatttttaaagcagatcggccattcatctatttcctgagagaacctaacacagggtttgtcttcagtattgggagagtttcaaatcccctagactaaatgcatgttctccactttcatcaatgcttttcttcataaagttataatttcattttgctatacccttgaaatttaaaaaaatgtctgataaagtgtaaaaagctaagggtatgtgattttcaatattataaacctaaaaatacttcagtttttaaatgttataagtttattttgcctactcttaatccaaatctattttgaccttcttttctactgcttaccccccaaaccactaaaaggcacagcagtgatcatgaatggtgagtgagtcaggccataagattgcttcctcagtacggatactctaggccatgttgaattgagggtggagaatgaatagcgtggttttccttatcctgtgaaactcaggggggatgcaaaatgagcaaagtcatcttaaaggtgtttcctttccatttagcttataaataaaacagagtttaagtgtgagaa

SEQ ID NO: 1567 - DNA, 1435 bp, Homo sapiens
  source 1..1435: mol_type = genomic DNA
aacagatttctctttccacccatctattgcaggtgtagtggtcttgctgcttctccagggaggatctgcctacaaactggtttgctactttaccaactggtcccaggaccggcaggaaccaggaaaattcacccctgagaatattgaccccttcctatgctctcatctcatctattcattcgccagcatcgaaaacaacaaggttatcatcaaggacaagagtgaagtgatgctctaccagaccatcaacagtctcaaaaccaagaatcccaaactgaaaattctcttgtccattggagggtacctgtttggttccaaagggttccaccctatggtggattcttctacatcacgcttggaattcattaactccataatcctgtttctgaggaaccataactttgatggactggatgtaagctggatctacccagatcagaaagaaaacactcatttcactgtgctgattcatgagttagcagaagcctttcagaaggacttcacaaaatccaccaaggaaaggcttctcttgactgcgggcgtatctgcagggaggcaaatgattgataacagctatcaagttgagaaactggcaaaagatctggatttcatcaacctcctgtcctttgacttccatgggtcttgggaaaagccccttatcactggccacaacagccctctgagcaaggggtggcaggacagagggccaagctcctactacaatgtggaatatgctgtggggtactggatacataagggaatgccatcagagaaggtggtcatgggcatccccacatatgggcactccttcacactggcctctgcagaaaccaccgtgggggcccctgcctctggccctggagctgctggacccatcacagagtcttcaggcttcctggcctattatgagatctgccagttcctgaaaggagccaagatcacgcggctccaggatcaacaggttccctacgcagtcaaggggaaccagtgggtgggctatgatgatgtgaagagtatggagaccaaggttcagttcttaaagaatttaaacctgggaggagccatgatctggtctattgacatggatgacttcactggcaaatcctgcaaccagggcccttaccctcttgtccaagcagtcaagagaagccttggctccctgtgaaggtaacagtccaggctggagctgggagtgggcagacagctgggcagaacagggcacaggagactgggggagatcatcttcacatatttggactaatcctttctcatgctcctttggctcttctgccatgttttcttagcaattaggctggttctgcccttttcataggcttcccatagacttttaaagtaataataataatattgataaattttggctaccatttattgagcatagtatgagctaaagactttcattacatatatatta

SEQ ID NO: 1568 - DNA, 995 bp, Homo sapiens
  source 1..995: mol_type = genomic DNA
ccgagcccgagccatggcgtccgagcggctccctaacaggcccgcctgtctgctcgtggccagcggcgccgccgaaggtgtgtcggcccagtccttcctccactgtttcacgatggccagcaccgccttcaacctgcaggtggccacccctggggggaaagccatggaatttgtggatgtgactgagagcaatgcacgctgggtgcaagacttccgcctcaaggcttacgccagccccgccaagctcgagtccatcgatgaacccatctgcgccgtcggccacggtgtcgccgccctgtgctgtgccaccaacgaggacagatcctgggtgttcgacagctacagcctgacagggccctctgtgtgtgagctcgtcagggcccccggcttcgcccgcctgccgctcgtggtggaggacttcgtgaaggattcgggcgcctgcttcagtgcaagcgagcctgacgctgtccacgtcgtgctggaccgccacctggtcacaggccagaatgccagctccactgtcccggccgtgcagaacctgctcttcctctgtggcagccggaaatgaacctgctgggtagatgcaccccctgagacagcccaggtgtctccagaggcagccccgtctcaggcttcagggaccccgcctcttccctcctgacaagggccctggatggcagcctggtctggccctgatgggattgttggaggcctcctggaatcagctctgagggggtgtcggctctcctggagggtccaaacccccatcctcctgcatgttctctggtaggaggcagagaaaagaccccacgtgcctggagagctgtgctagctgctaggtggtcctcgggaattccaggctgggttttctagggaggactggttgtcacgtgtggtcactgttgactagacagagtcggctcgggggtcctctgtgtgggtttgccctgctgtggcctgtctgccacccaccacctctttcactgttggtgggg

SEQ ID NO: 1569 - DNA, 3391 bp, Homo sapiens
  source 1..3391: mol_type = genomic DNA
aatctgggggtgcgcgagggagtaagaggggcgaggggaccctgcgaagcgttgggtgccgagccagagcctacaaattggagtcctcggcactttgggggccgctggagggtttggaatcgagagcccagggctagccagtgatggtgccagctgagggctagggcggagatcggagccgggttgggagtccgtgcactcggaggactgggaaaaagtgcagggacccctaaaaggtggtggtggcagatacgagactaggtgctgtgtaaagggggctgggggcagagagcagagcctctgcggaaagaaacagaggaggaaggagatgggtctggtgcctcttcccgcaagggtagggaggataggccggcctcgcagttccaggtcacttccgttctggggttgaggctcaggggcagcggtgattggtggcccagcctcctcacaggcttgctgagggaatttgagcttccggtggtgggaaaggaggtgaaatcgtctcgactcctggggtccgtgtgctctggtagaagtgggcgacagtggctcaatttctgatcagcagcttgcagcctagatgatggcagccaaaggaaagacttggccagcgaggctccctaccactccgaaaaaagagagtgggggtcagcagggtctgctctgctctggggattaaggggctgactagaaggatttgagtctttccttctgtccactgccacagggttcttggagtaactgcagggtttaaactgcagggtctaacttccagaggctggggttccctgccccccagcttagagacattcctgaggtggctgaagagcaggaaggagaatgaatgcacttccagactggcccagagtctcagcccctcctcttccttgtttcccgctggtccctctgggctgtacggcccggatggaggcctgaggaaaatgagggggctttggttctccggaattccggccggggccacaccctcctgtcttcagatggttcatgtacccatccccccttcccgtcctctcctttgtctcctctgtcaccgggactcccagcagagattttttttttgtactggctgtgtaacaggacaccgcatgcagccctcaggaggggctctgtgcttctgtgaggaaggacccctgtgctgggaaggcagacccctgtttatcccgagggacctggggtgaccccctgccctggccttgtttctcccattttacagtgaggtggtcgatctccaaggtccctgtagattggggactggttgtgccctctgcgccaggggcctcctcaccatctctcctttgccggctcccgccctcttcactcttctgttttctttcagaatgaaaaaggcaggcattgacctccctctgaggcagtttccaggcccaccgtggtgcacgcaaaccacttcctggccatgcgctccctcctgcttctcagcgccttctgcctcctggaggcggccctggccgccgaggtgaagaaacctgcagccgcagcagctcctggcactgcggagaagttgagccccaaggcggccacgcttgccgagcgcagcgccggcctggccttcagcttgtaccaggccatggccaaggaccaggcagtggagaacatcctggtgtcacccgtggtggtggcctcgtcgctagggctcgtgtcgctgggcggcaaggcgaccacggcgtcgcaggccaaggcagtgctgagcgccgagcagctgcgcgacgaggaggtgcacgccggcctgggcgagctgctgcgctcactcagcaactccacggcgcgcaacgtgacctggaagctgggcagccgactgtacggacccagctcagtgagcttcgctgatgacttcgtgcgcagcagcaagcagcactacaactgcgagcactccaagatcaacttccgcgacaagcgcagcgcgctgcagtccatcaacgagtgggccgcgcagaccaccgacggcaagctgcccgaggtcaccaaggacgtggagcgcacggacggcgccctgctagtcaacgccatgttcttcaagccacactgggatgagaaattccaccacaagatggtggacaaccgtggcttcatggtgactcggtcctataccgtgggtgtcatgatgatgcaccggacaggcctctacaactactacgacgacgagaaggaaaagctgcaaatcgtggagatgcccctggcccacaagctctccagcctcatcatcctcatgccccatcacgtggagcctctcgagcgccttgaaaagctgctaaccaaagagcagctgaagatctggatggggaagatgcagaagaaggctgttgccatctccttgcccaagggtgtggtggaggtgacccatgacctgcagaaacacctggctgggctgggcctgactgaggccattgacaagaacaaggccgacttgtcacgcatgtcaggcaagaaggacctgtacctggccagcgtgttccacgccaccgcctttgagttggacacagatggcaacccctttgaccaggacatctacgggcgcgaggagctgcgcagccccaagctgttctacgccgaccaccccttcatcttcctagtgcgggacacccaaagcggctccctgctattcattgggcgcctggtccggcctaagggtgacaagatgcgagacgagttatagggcctcagggtgcacacaggatggcaggaggcatccaaaggctcctgagacacatgggtgctattggggttgggggggaggtgaggtaccagccttggatactccatggggtgggggtggaaaaacagaccggggttcccgtgtgcctgagcggaccttcccagctagaattcactccacttggacatgggccccagataccatgatgctgagcccggaaactccacatcctgtgggacctgggccatagtcattctgcctgccctgaaagtcccagatcaagcctgcctcaatcagtattcatatttatagccaggtaccttctcacctgtgagaccaaattgagctaggggggtcagccagccctcttctgacactaaaacacctcagctgcctccccagctctatcccaacctctcccaactataaaactaggtgctgcagcccctgggaccaggcacccccagaatgacctggccgcagtgaggcggattgagaaggagctcccaggaggggcttctgggcagactctggtcaagaagcatcgtgtctggcgttgtggggatgaactttttgttttgtttcttccttttttagttcttcaaagatagggagggaagggggaacatgagcctttgttgctatcaatccaagaacttatttgtacattttttttttcaataaaacttttccaatgac

SEQ ID NO: 1570 - DNA, 1582 bp, Homo sapiens
  source 1..1582: mol_type = genomic DNA
ctcctccgcagcttccggcacggccttcaagcgcgggacgcgacaaagtcatggaccgcaacccctcgccgccgccgccgggtcgcgacaaggaggaggaggaggaggtggccggtggagactgcatagggagcacggtctacagcaaacactggctcttcggcgtcctcagcggactcatccagattgttagccctgaaaacaccaaatctagctcagatgatgaggagcagctgacggagcttgatgaagaaatggagaatgaaatttgcagagtatgggatatgtcaatggatgaggacgtggctttatttctccaagaatttaatgctcctgatatattcatgggagtactggccaagtccaagtgtcctcgattaagagaaatctgtgtgggaattttaggtaatatggcctgtttccaggagatatgtgtgtccatcagcagtgataaaaatcttgggcaggtgttattgcactgtttgtatgattcagacccacctactctgctggaaacaagcaggttgttgcttacttgcctttcccaggcagaagtggccagtgtttgggttgaaaggatccaggaacatccagctatttatgatagcatttgcttcattatgtcaagttcaacaaatgttgacttgctggtgaaggtgggggaggttgtggacaagctctttgatttggatgagaaactaatgttagaatgggtcagaaatggggctgctcagcctctggaccaaccccaggaagagtctgaagagcagccagtgtttcggcttgtgccctgtatacttgaagctgccaaacaagtacgttctgaaaatccagaatggcttgatgtttacatgcacattttacaactgcttactacagtggatgatggaattcaagcaattgtacattgtcctgacactggaaaagacatttggaatttactttttgacctggtctgccatgaattctgccagtctgatgatccacccatcattcttcaagaacagaaaacagtgctagcctctgttttttcagtgttgtctgccatctatgcctcacagactgagcaagagtatctaaagatagaaaaagtagatcttcctctaattgacagcctcattcgggtcttacaaaatatggaacagtgtcagaaaaaaccagagaactcggcagagtctaacacagaggaaactaaaaggactgatttaacccaagatgatttccacttgaaaatcttaaaggatattttatgtgaatttctttctaatatttttcaggcattaacaaaggagacggtggctcagggagtaaaggaaggccagttgagcaaacagaagtgttcctctgcatttcaaaaccttcttcctttctatagccctgtggtggaagattttattaaaatcctacgtgaagttgataaggcgcttgctgatgacttggaaaaaaacttcccaagtttgaaggttcagacttaaaacctgaattggaattacttctgtacaagaaataaactttatttttctcactgacagttgaaattgacttattggaaatattaactaaagcccatattagaccataa

SEQ ID NO: 1571 - DNA, 609 bp, Homo sapiens
  source 1..609: mol_type = genomic DNA
gtgcttcaaacgccttgaggataaggaaggagaatcagcaagtcccgagttcctacggtgtgtcagcatcgtgctcccactcccgggagagaggcattatcttcagtttacaaaaggggaaaacaggtctggggtttccagagtccgcggttttgctaagaagccgcagtgatgttgacgcggctggtcctcagtgcacacctgagtagcacgacctctccgccctggacgcacgctgccatcagctgggagctggacaacgtgctgatgcctagtcccagaatctggccccaggtgactccaacaggcaggtctgcctctgtcaggagtgagggtaacacctcctcactctggaatttctcagctgggcaggatgtgcatgccatagtaaccagaacctgtgagtctgtgctgagctctgccgtctacacccacggctgtggctgtgtgaggtctgccacaaacattacctgtcagtcctcaggacaacaaaggcaggcggcccggcaggaagaggagaactcaatctgcaaggcccatgatagtagagagggccgcctgggctaccccctcagtgcccatcagcctggttccggtggtcctaactag

SEQ ID NO: 1572 - DNA, 2781 bp, Homo sapiens
  source 1..2781: mol_type = genomic DNA
gatcttcgggggctccatccactatttccgtgtgcccagggagtactggagggaccgcctgctgaagatgaaggcctgtggcttgaacaccctcaccacctatgttccgtggaacctgcatgagccagaaagaggcaaatttgacttctctgggaacctggacctggaggccttcgtcctgatggccgcagagatcgggctgtgggtgattctgcgtccaggcccctacatctgcagtgagatggacctcgggggcttgcccagctggctactccaagaccctggcatgaggctgaggacaacttacaagggcttcaccgaagcagtggacctttattttgaccacctgatgtccagggtggtgccactccagtacaagcgtgggggacctatcattgccgtgcaggtggagaatgaatatggttcctataataaagaccccgcatacatgccctacgtcaagaaggcactggaggaccgtggcattgtggaactgctcctgacttcagacaacaaggatgggctgagcaaggggattgtccagggagtcttggccaccatcaacttgcagtcaacacacgagctgcagctactgaccacctttctcttcaacgtccaggggactcagcccaagatggtgatggagtactggacggggtggtttgactcgtggggaggccctcacaatatcttggattcttctgaggttttgaaaaccgtgtctgccattgtggacgccggctcctccatcaacctctacatgttccacggaggcaccaactttggcttcatgaatggagccatgcacttccatgactacaagtcagatgtcaccagctatgactatgatgctgtgctgacagaagccggcgattacacggccaagtacatgaagcttcgagacttcttcggctccatctcaggcatccctctccctcccccacctgaccttcttcccaagatgccgtatgagcccttaacgccagtcttgtacctgtctctgtgggacgccctcaagtacctgggggagccaatcaagtctgaaaagcccatcaacatggagaacctgccagtcaatgggggaaatggacagtccttcgggtacattctctatgagaccagcatcacctcgtctggcatcctcagtggccacgtgcatgatcgggggcaggtgtttgtgaacacagtatccataggattcttggactacaagacaacgaagattgctgtccccctgatccagggttacaccgtgctgaggatcttggtggagaatcgtgggcgagtcaactatggggagaatattgatgaccagcgcaaaggcttaattggaaatctctatctgaatgattcacccctgaaaaacttcagaatctatagcctggatatgaagaagagcttctttcagaggttcggcctggacaaatggagttccctcccagaaacacccacattacctgctttcttcttgggtagcttgtccatcagctccaccccttgtgacacctttctgaagctggagggctgggagaagggggttgtattcatcaatggccagaaccttggacgttactggaacattggaccccagaagacgctttacctcccaggtccctggttgagcagcggaatcaaccaggtcatcgtttttgaggagacgatggcgggccctgcattacagttcacggaaaccccccacctgggcaggaaccagtacattaagtgagcggtggcaccccctcctgctggtgccagtgggagactgccgcctcctcttgacctgaagcctggtggctgctgccccacccctcactgcaaaagcatctccttaagtagcaacctcagggactgggggctacagtctgcccctgtctcagctcaaaaccctaagcctgcagggaaaggtgggatggctctgggcctggctttgttgatgatggctttcctacagccctgctcttgtgccgaggctgtcgggctgtctctagggtgggagcagctaatcagatcgcccagcctttggccctcagaaaaagtgctgaaacgtgcccttgcactggacgtcacagccctgcgagcatctgctggactcaggcgtgctctttgctggttcctgggaggcttggccacatccctcatggccccattttatccccgaaatcctgggtgtgtcaccagtgtagagggtggggaaggggtgtctcacctgagctgactttgttcttccttcacaaccttctgagccttctttgggattctggaaggaactcggcgtgagaaacatgtgacttcccctttcccttcccactcgctgcttcccacagggtgacaggctgggctggagaaacagaaatcctcaccctgcgtcttcccaagttagcaggtgtctctggtgttcagtgaggaggacatgtgatcctggcagaagccatggcccatgtctgcacatccagggaggaggacagaaggcccagctcacatgtgagtcctggcagaagccatggcccatgtctgcacatccagggaggaggacagaaggcccagctcacatgtgagtcctggcagaagccatggcccatgtctgcacatccagggaggaggacagaaggcccagctcagtggcccccgccccccaccccccacgcccgaacagcaggggcagagcagccctccttcgaagtgtgtccaagtccgcatttgagccttgttctggggcccagcccaacacctggcttgggctcactgtcctgagttgcagtaaagctataaccttgaatcaca

SEQ ID NO: 1573 - DNA, 523 bp, Homo sapiens
  source 1..523: mol_type = genomic DNA
ccggccgtgcgtttgtggccgtccggcctccctgacatgcagatttccacccagaagacagagaaggagccagtggtcatggaatgggctggggtcaaagactgggtgcctgggagctgaggcagccaccgtttcagcctggccagcctctcggaactgccgtggctgttcaagcactcactgcctttgcctgtggctccatgtactgggtgctgctgtgcttgccctccctctggaccccgaggttggaccctactgtgacacacctaccatgcggacactcttcaacctcctctggcttgccctggcctgcagccctgttcacactaccctgtcaaagtcagatgccaaaaaagccgcctcaaagacgctgctggagaagagtcagttttcagataagccggtgcaagaccggggtttggtcgtgacggacctcaaagctgagagtgtggttcttgagcatcgcagctactgctcggcaaaggcccgggacagacactttgctggggatgtactgggctat

SEQ ID NO: 1574 - DNA, 974 bp, Homo sapiens
  source 1..974: mol_type = genomic DNA
gaaatcgtctcgactcctggggtccgtgtgctctggtagaagtgggcgacagtggctcaatttctgatcagcagcttgcagcctagatgatggcagccaaaggaaagacttggccagcgaggctccctaccactccgaaaaaagagagtggggaatgaaaaaggcaggcattgacctccctctgaggcagtttccaggcccaccgtggtgcacgcaaaccacttcctggccatgcgctccctcctgcttctcagcgccttctgcctcctggaggcggccctggccgccgaggtgaagaaacctgcagccgcagcagctcctggcactgcggagaagttgagccccaaggcggccacgcttgccgagcgcagcgccggcctggccttcagcttgtaccaggccatggccaaggaccaggcagtggagaacatcctggtgtcacccgtggtggtggcctcgtcgctagggctcgtgtcgctgggcggcaaggcgaccacggcgtcgcaggccaaggcagtgctgagcgccgagcagctgcgcgacgaggaggtgcacgccggcctgggcgagctgctgcgctcactcagcaactccacggcgcgcaacgtgacctggaagctgggcagccgactgtacggacccagctcagtgagcttcgctgatgacttcgtgcgcagcagcaagcagcactacaactgcgagcactccaagatcaacttccgcgacaagcgcagcgcgctgcagtccatcaacgagtgggccgcgcagaccaccgacggcaagctgcccgaggtcaccaaggacgtggagcgcacggacggcgccctgctagtcaacgccatgttcttcaagccacactgggatgagaaattccaccacaagatggtggacaaccgtggcttcatggtgactcggtcctataccgtgggtgtcatgatgatgcaccggacaggcctctacaactactacgacga

SEQ ID NO: 1575 - DNA, 438 bp, Homo sapiens
  source 1..438: mol_type = genomic DNA
agacacaaacccagccccaaaggccccacagccaccaggcacctccaacaaccaggtgtgagtaatttttttttttttttgagacagggtcctatctgtcgcccaggctggagtgcagcagtgcaatcacagctcactgcagccttgatgtcctgggctcaagtgatcagcctcccgaagtgctgggattacggcgtgagccaccactcccagccttcgagtgcttttgaggatgtctgtgagaggcatcctcaggctggggacccaggaatatcccagccctctggaccccgaggttggaccctactgtgacacacctaccatgcggacactcttcaacctcctctggcttgccctggcctgcagccctgttcacactaccctgtcaaagtcagatgccaaaaaagccgcctcaaagacgctgctggagaaggtaag

SEQ ID NO: 1576 - DNA, 882 bp, Homo sapiens
  source 1..882: mol_type = genomic DNA
ggagcgggctaagagtagaatcgtgtcgcggctcgagagcgagagtcacgtcccggcgctagcccagcccgacccaggtgaggggcgggagacgcctgcgcccaccgtggtgcacgcaaaccacttcctggccatgcgctccctcctgcttctcagcgccttctgcctcctggaggcggccctggccgccgaggtgaagaaacctgcagccgcagcagctcctggcactgcggagaagttgagccccaaggcggccacgcttgccgagcgcagcgccggcctggccttcagcttgtaccaggccatggccaaggaccaggcagtggagaacatcctggtgtcacccgtggtggtggcctcgtcgctagggctcgtgtcgctgggcggcaaggcgaccacggcgtcgcaggccaaggcagtgctgagcgccgagcagctgcgcgacgaggaggtgcacgccggcctgggcgagctgctgcgctcactcagcaactccacggcgcgcaacgtgacctggaagctgggcagccgactgtacggacccagctcagtgagcttcgctgatgacttcgtgcgcagcagcaagcagcactacaactgcgagcactccaagatcaacttccgcgacaagcgcagcgcgctgcagtccatcaacgagtgggccgcgcagaccaccgacggcaagctgcccgaggtcaccaaggacgtggagcgcacggacggcgccctgctagtcaacgccatgttcttcaagccacactgggatgagaaattccaccacaagatggtggacaaccgtggcttcatggtgactcggtcctataccgtgggtgtcatgatgatgcaccggacaggcctctacaactactacgacgacgagaa

SEQ ID NO: 1577 - DNA, 1059 bp, Homo sapiens
  source 1..1059: mol_type = genomic DNA
ctgttccctgacagccgatgtcagaccctgccactagcctccttaacagaagttcccagccatgaagcctctccttgttgtgtttgtctttcttttcctttgggatccagtgctggcaggtataaattcattatcatcagaaatgcacaagaaatgctataaaaatggcatctgcagacttgaatgctatgagagtgaaatgttagttgcctactgtatgtttcagctggagtgctgtgtcaaaggaaatcctgcaccctgacataagaaaccaatgaatggccactatcctgtaggcccttgattctgccatctttcacaaaaccagggaatttagatcaaactgtgacaccatgatgtgtccatgactactggtttttagcatttttataggccagcagactcttgtggtcttaaatttaaagagctgagctgtagccttctttaaaagagctcggtttttcacaaaaacaatgtagaagatattttctcacctcaacgtgatgtccagtgtgctcatcagcacctgtttctccctctaatcatagaggatattcttattatttagaaaggcttcaagggaaacaacttttgacacctaagtcgtgtcctaccttcgcttcagcttcgcatttcccatttctgtgaaattcccaactttagagaagcagatttgccatggccttctgacaaccttgtacatctctcacataaaccgcataggcagggcttaactacaggctggcccgagtctgcactgagtctgaccctgaagttcctttggaacaggagaggccatcttgtgatgggctggaacaaggtaatttctcatccacctccctagtttcagttgagcaatggaacttcccacctgagcccctagggttcagctacaggctataagactgccgtcctgtggtttagtgttggttccttagcagcagagtgatgccacctctgctgcccgtcatctgactcctctggatgggtgttatcctgtggcttaagagctaacaccatgctgatcttgctttgctatatgtgtaactaataaactgc

SEQ ID NO: 1578 - DNA, 1967 bp, Homo sapiens
  source 1..1967: mol_type = genomic DNA
cagaaggagatggtgagaagaaccacaccagagaggctggagtaggccagcctggcttgggaccgagtcccgagtccctggctggaccctcggttttcccttccgtggcagggctcacctggatccttaatgccgcccttggaggagttaggaggatcctggatgagaaaactcaccctcaggatgattgccccagggagcagcttcctgctttctggtggaagggaggggcagacagtgggtgtgtcctgctccagtgtctaggcaggagagtttgtgaagctgaccggacacctgtggctcttatttcctaggtggcccgaggcagccgggatgacagctctccccaggaatcctgctgcctgctgagaaacatggtcagcaagtcccgctggaagctcctggccatgttggctctggtcctggtcgtcatggtgtggtattccatctcccgggaagacaggtacatcgagcttttttattttcccatcccagagaagaaggagccgtgcctccagggtgaggcagagagcaaggcctctaagctctttggcaactactcccgggatcagcccatcttcctgcggcttgaggattatttctgggtcaagacgccatctgcttacgagctgccctatgggaccaaggggagtgaggatctgctcctccgggtgctagccatcaccagctcctccatccccaagaacatccagagcctcaggtgccgccgctgtgtggtcgtggggaacgggcaccggctgcggaacagctcactgggagatgccatcaacaagtacgatgtggtcatcagattgaacaatgccccagtggctggctatgagggtgacgtgggctccaagaccaccatgcgtctcttctaccctgaatctgcccacttcgaccccaaagtagaaaacaacccagacacactcctcgtcctggtagctttcaaggcaatggacttccactggattgagaccatcctgagtgataagaagcgggtgcgaaagggtttctggaaacagcctcccctcatctgggatgtcaatcctaaacagattcggattctcaaccccttcttcatggagattgcagctgacaaactgctgagcctgccaatgcaacagccacggaagattaagcagaagcccaccacgggcctgttggccatcacgctggccctccacctctgtgacttggtgcacattgccggctttggctacccagacgcctacaacaagaagcagaccattcactactatgagcagatcacgctcaagtccatggcggggtcaggccataatgtctcccaagaggccctggccattaagcggatgctggagatgggagctatcaagaacctcacgtccttctgacctgggcaagagctgtagcctgtcggttgcctactctgctgtctgggtgacccccatgcgtggctgtgggggtggctggtgccagtatgacccacttggactcaccccctcttggggagggagttctgggcctggccaggtctgagatgaggccatgcccctggctgctcttatggagccgagatccagtcagggtgggggcgctggagccgtgggagcccggccagggcagggggctcgttgctgtggcaccccctctctgccagcaccaagagattatttaatgggctatttaattaaggggtaggaaggtgctgtgggctggtcccacacatccaggaaagaggccagtagagaattctgcccactttttataaaaacttacagcgatggccccaccaaggcctagacacggcactggcctcccaggagggcaggggcattgggaatgggtgggtgccctccagagaggggctgctacctcccagcaggcatgggaagagcactggtgtgggggttccaccgagaaggggacctcatctagaaaagaggttacaaacctaccattaaactatttttcctaaaacggaa

SEQ ID NO: 1579 - DNA, 1050 bp, Homo sapiens
  source 1..1050: mol_type = genomic DNA
agccggctgtggtgggaggcagttgagccctggattgtgaccgcttcagggcagttggtagatgcccctctgggagagatccccaggggtgacagccatggaccctggaagggcctgggctagggacagggaccagagccagtccagggagaggacagagccaatggactggggtgtactgtaacagccctgctggcgagagggaccagggcaccgtcctccagggagcccatgctgcaagtcgggccagaggtgcccctgaacctgaaggccaatgagacccaagacaggccaagtgggttgtgagacccctgaggagctgggccctggtcccaggcagcgctggcccctgctgctgctgggtctggccatggtcgcccatggcctgctgcgcccaatggttgcaccgcaaagcggggacccagaccctggagcctcagttggaagcagccgatccagcctgcggagcctgtggggcaggctcctgctccagcccagcccccagagagcagaccccaggtgctggccccgggggttttggtctgagcctcagtcactgtgttatgtcttcggaactgggaccaaggtcaccgtcctaggtcagcccaaggccaaccccactgtcactctgttcccgccctcctctgaggagctccaagccaacaaggccacactagtgtgtctgatcagtgacttctacccgggagctgtgacagtggcctggaaggcagatggcagccccgtcaaggcgggagtggagaccaccaaaccctccaaacagagcaacaacaagtacgcggccagcagctacctgagcctgacgcccgagcagtggaagtcccacagaagctacagctgccaggtcacgcatgaagggagcaccgtggagaagacagtggcccctacagaatgttcataggttcccaactctaaccccacccacgggagcctggagctgcaggatcccaggggaggggtctctctccccatcccaagtcatccagcccttctccctgcactcatgaaaccccaataaatatcctcattgac

SEQ ID NO: 1580 - DNA, 1623 bp, Homo sapiens
  source 1..1623: mol_type = genomic DNA
tctgtacaagaacaggctcggctcaggcggccggggacggtgcatcaagcagggggagaactggtacagtcccaccgagtttgaggccatggcaggaagagccagcagtaaggactggaaaagaagcattcgctacgcgggccgacccttgcagtgcctcatccaggatgggatcttaaaccctcacgctgcctcttgcacctgtgctgcctgctgcgacgacatgaccttaagtggcccagtcaggctttttgtgccttacaaaaggcgcaagaaggagaatgaactgcccacaactcccgtgaagaaggactcccccaagaacatcacattgcttccagccaccgcggctaccaccttcaccgtgaccccctcgggacagatcacgacctcgggggcactgacctttgaccgagcgtccacggtagaggccactgctgtcatatcagagagtccggcccagggcgacgtcttcgcaggggccacagtccaagaggccagcgtgcagcccccatgcagggccagccaccctgagcctcactaccccggctatcaggacagctgccagatcgcaccgtttccagaagctgcgttgccaacgtcacatcccaaaatagtgttgacatccctgcctgcgctggcggtcccacccccgactcccaccaaagcggcacctcccgcgttggtcaatgggctggagctgtcagagccgcggagctggctgtacctagaagagatggtcaactccttgctcaacacagcgcagcagctgaagacgctgtttgagcaagccaagcatgccagcacctaccgagaagctgccacaaaccaggccaagatccacgctgacgcagagcggaaggagcagtcctgcgttaactgcggccgggaggctatgagcgagtgcaccggctgccacaaggtcaactactgctccaccttctgccaacgcaagagatggagtcttactatgttgaccagcctggtctccatctcctggcttcgggcgatcctcccatgtcagcctcccaaagtgctaggattataggcatgaggcactacaccagccaacagaagtttttatattaaaatttactttttctagctgggcacagtggctcacgcctgtcatcccagcactttgggaggctgaggcaggtggatcaccggtcgggagtttgagaccagcttggctaacatggactggaaggatcaccagcacatatgcggccagtcagcagctgtcaccgtccaggcagacgaagtccacgtggctgaaagcgtgatggagaaggtgaccgtgtgaggctccatcggccgccctgggagctggggcccctcgcactcctgtgaggcttttgcaggtcgaaggcccccctgaggactctggggggacgttgagaagaggggtgtgggaaggtaaagaaacttgctggacaagtcattaacacactttaagcgaatggtgccctgggaagcgcactccccctgcccgggccccctgcccgctcgcggacagattttttatccctgggatcatgagcgtccggtcttgcccacagggcctgtgctgcgacgcacatacatacgtgttgtgtctgtcaataaagtgtaaataaggtc

SEQ ID NO: 1581 - DNA, 873 bp, Homo sapiens
  source 1..873: mol_type = genomic DNA
acgtggccgtcaagccctctagtgccttagattccagcgagctacgcaagcaatcctggcccagccgagcttgcttccccaaatcccgtaatccttgaccttattcccccaaagaagcggcctcccgggaaggagcgccctggcggagaagactcgaacggctcccacagccgggcgttgggggaaagaatctccggcctgtgaaactgtgaggggattcggccaagacgtcctcttccctctgcctcccacccaggccactcttcacctccaccatgagcctggacatccagagcctggacatccagtgtgaggagctgagcgacgctagatgggccgagctcctccctctgctccagcagtgccaagtggtcaggctggacgactgtggcctcacggaagcacggtgcaaggacatcagctctgcacttcgagtcaaccctgcactggcagagctcaacctgcgcagcaacgagctgggcgatgtcggcgtgcattgcgtgctccagggcctgcagaccccctcctgcaagatccagaagctgagcctccagaactgctgcctgacgggggccggctgcggggtcctgtccagcacactacgcaccctgcccaccctgcaggagctgcacctcagcgacaacctcttgggggatgcgggcctgcagctgctctgcgaaggactcctggacccccagtgccgcctggaaaagctgcagctggagtattgcagcctctcggctgccagctgcgagcccctggcctccgtgctcagggccaagccggacttcaaggagctcacggttagcaacaacgacatcaatgaggctggcgtccgtgtgctgtgccagggcctgaaggactccccctgcc

SEQ ID NO: 1582 - DNA, 613 bp, Homo sapiens
  source 1..613: mol_type = genomic DNA
attgcctctgtcagtgtgacaggttccacagagctgtcaccctgcaaactcacccttcctccaggagcacaggcgcagagctgcagtggagggtacctgtgtggcttccttgtctgacacagatttgccttcatctgaacagtgctcggcatggcagggattccagggctcctcttccttctcttctttctgctctgtgctgttgggcaagtgagcccttacagtgccccctggaaacccacttggcctgcataccgcctccctgtcgtcttgccccagtctaccctcaatttagccaagccagactttggagccgaagccaaattagaagtatcttcttcatgtggaccccagtgtcataagggaactccactgcccacttacgaagaggccaagcaatatctgtcttatgaaacgctctatgccaatggcagccgcacagagacgcaggtgggcatctacatcctcagcagtagtggagatggggcccaacaccgagactcagggtcttcaggaaagtctcgaaggaagcggcagatttatggctatgacagcaggttcagcatttttgggaaggacttcctgctcaactaccctttctcaacatcagtga

SEQ ID NO: 1583 - DNA, 1386 bp, Homo sapiens
  source 1..1386: mol_type = genomic DNA
acacttaacccatctgttttctctaatgcacgacagattcctttcagacaggacaactgtgatatttcagttcctgattgtaaatacctcctaagcctgaagcttctgttactagccattgtgagcttcagtttcttcatctgcaaaatgggcataatacaatctattcttgccacatcaagggattgttattcctttaaaaaaaaaccaataccaaagaagcctacaatgttggccttagccaaaattctgttgatttcaacgttgttttattcacttctatcggggagccatggaaaagaaaatcaagacataaacacaacacagaacattgcagaagtttttaaaacaatggaaaataaacctatttctttggaaagtgaagcaaacttaaactcagataaagaaaatataaccacctcaaatctcaaggcgagtcattcccctcctttgaatctacccaacaacagccacggaataacagatttctccagtaactcatcagcagagcattctttgggcagtctaaaacccacatctaccatttccacaagccctcccttgatccatagctttgtttctaaagtgccttggaatgcacctatagcagatgaagatcttttgcccatctcagcacatcccaatgctacacctgctctgtcttcagaaaacttcacttggtctttggtcaatgacaccgtgaaaactcctgataacagttccattacagttagcatcctctcttcagaaccaacttctccatctgtgacccccttgatagtggaaccaagtggatggcttaccacaaacagtgatagcttcactgggtttaccccttatcaagaaaaaacaactctacagcctaccttaaaattcaccaataattcaaaactctttccaaatacgtcagatccccaaaaagttctgcgattagacaatgcaccggaaccttatgatgtgagttttgggaattctagctactacaatccaactttgaatgattcagccatgccagaaagtgaagaaaatgcacgtgatggcattcctatggatgacatacctccacttcgtacttctgtatagaactaacagcaaaaaggcgttaaacagcaagtgtcatctacatcctagccttttgacaaattcatctttcaaaaggttacacaaaattactgtcacgtggattttgtcaaggagaatcataaaagcaggagaccagtagcagaaatgtagacaggatgtatcatccaaaggttttctttcttacaatttttggccatcctgaggcatttactaagtagccttaatttgtattttagtagtattttcttagtagaaaatatttgtggaatcagataaaactaaaagatttcaccattacagccc

SEQ ID NO: 1584 - DNA, 1533 bp, Homo sapiens
  source 1..1533: mol_type = genomic DNA
gagggaacatctggaacattagacagggtaagccacctttgcaactcctttccccctgctgtgacgtacagatgctgatcttctggacaatcacacttttcctgctgggagcagccaaaggaaaagaagtttgctatgaggacctcgggtgcttttctgacactgagccctggggcgggacagcaatcaggcccctgaaaattctcccctggagccctgagaagatcggcacccgcttcctgctgtacaccaatgaaaacccaaacaactttcaaattctcctcctctctgatccatcaacaattgaggcatcaaattttcaaatggacagaaagacccggttcatcatccatggcttcatagacaaaggagatgagagctgggtgacagacatgtgcaagaaactgttcgaggtggaggaggtgaactgcatctgcgtggactggaagaagggctcccaagccacctacacacaggctgccaacaacgtgcgagtggtgggcgcccaggtggcccagatgctcgacatcctcttgacagagtatagctaccccccttccaaagttcacctcattggccacagcctgggagcccacgtggctggagaggcaggaagcaagactccaggcctgagcaggattacagggttggatcctgtagaagcaagtttcgagagtactcctgaagaggtgcgacttgatccctctgatgctgactttgttgatgtgattcacacggatgcagctcccctgatcccattcttgggttttggaacgaaccaacagatgggtcatcttgacttcttccccaatggaggagagagcatgccgggatgcaagaagaatgccctgtctcagatcgtggatctagatggcatctgggcgggaacccgggactttgtggcttgcaatcacctaagaagctacaagtattacttggaaagcatcctcaatcccgatgggtttgctgcatatccctgcacttcctacaagtcctttgagtctgacaagtgcttcccgtgtccagatcaaggatgcccacagatgggtcactatgctgataaatttgctggcaggacaagtgaagagcagcagaaattcttcttgaacacaggagaggctagcaatttcgctcgctggagatatggggtttccatcacactgtctggaagaacagccactggtcagatcaaagttgctttgtttggaaataagggaaacactcaccagtacagtatcttcagggggattctcaaaccaggctcaacccattcctatgagtttgatgcaaagctggatgttggaacaattgagaaagtcaagtttctttggaataacaatgtgataaatccaaccctccccaaagtgggtgccaccaagatcactgtgcaaaagggagaagagaagacagtgtacaacttctgtagcgaagacacagtgcgggaagacacgctgctcaccctcacgccctgctaagctcccggggcgacgaggctgctgcgttcacactaataaaatccactggtgcatctgt

SEQ ID NO: 1585 - DNA, 594 bp, Homo sapiens
  source 1..594: mol_type = genomic DNA; mol_type = genomic DNA
acagccaccaggcacctccaacaaccaggtgtgagtaatttttttttttttttgagacagggtcctatctgtcgcccaggctggagtgcagcagtgcaatcacagctcactgcagccttgatgtcctgggctcaagtgatcagcctcccgaagtgctgggattacggcgtgagccaccactcccagccttcgagtgcttttgaggatgtctgtgagaggcatcctcaggctggggacccaggaatatcccaggtaaggcatggggtctcctaaagcagggatccagtcagcagcagaaacactcatctctgcaggcctcctcaccccaccggcctgcccctgccctactctgtcccccccatgcccacggcagacaggcagtgggcaagcaggagggcctcagggcaggtcagacctgggcctacagggcagagcctggacctccgccagggcactccacacccaccccggccctctggaccccgaggttggaccctactgtgacacacctaccatgcggacactcttcaacctcctctggcttgccctggcctgcagccctgttcacactaccctgtcaaagtcagatgccaa

SEQ ID NO: 1586 - DNA, 1153 bp, Homo sapiens
  source 1..1153: mol_type = genomic DNA
cttccgtcgctgctgtagtcgcttcctgcggccagcccgggttcaatcagcggccgacaactgtctagggctcagacaccaccagccaatgagggagggcagcgtggagccgcccgtctgggctcgcggctcctggaccaatggggaagtggcatgtgggagggcgccggggggccccccgccaatggggagctacggcgcgcggccgggacttggaggcggtgcggcgcggcgggtgcggttcagtcggtcggcggcggcagcggaggaggaggaggaggaggaggaggaggaggatgaggaggatgtgggccacgcaggggctggcggtggcgctggctctgagcgtgctgccgggcagccgggcgctgcggccgggcgactgcgaagtttgtatttcttatctgggaagattttaccaggacctcaaagacagagatgtcacattctcaccagccactattgaaaacgaacttataaagttctgccgggaagcaagaggcaaagagaatcggttgtgctactatatcggggccacagatgatgcagccaccaaaatcatcaatgaggtatcaaagcctctggcccaccacatccctgtggagaagatctgtgagaagcttaagaagaaggacagccagatatgtgagcttaagtatgacaagcagatcgacctgagcacagtggacctgaagaagctccgagttaaagagctgaagaagattctggatgactggggggagacatgcaaaggctgtgcagaaaagtctgactacatccggaagataaatgaactgatgcctaaatatgcccccaaggcagccagtgcacggaccgatttgtagtctgctcaatctctgttgcacctgagggggaaaaaacagttcaactgcttactcccaaaacagcctttttgtaatttattttttaagtgggctcctgacaatactgtatcagatgtgaagcctggagctttcctgatgatgctggccctacagtacccccatgaggggattcccttccttctgttgctggtgtactctaggacttcaaagtgtgtctgggatttttttattaaagaaaaaaaatttctagctgtccttgcagaattatagtgaataccaaaatggggttttgccccaggaggctccta

SEQ ID NO: 1587 - DNA, 481 bp, Homo sapiens
  source 1..481: mol_type = genomic DNA; mol_type = genomic DNA
catatttgtgctccttcacgggagggcagggaggttcaacggaccttaaaacatgaaggtcttttttctgtttgctgttctcttttgtttggtccaaacaaactcagtgcacatctctcaccgggaggctcgaggaccctcatttaggatctgtgtggactttttagggcctagatgggccaggggatgttccaccgggaattagaaataccatctgccatatgcagcaagggatctgcagactttttttctgccattctggtgagaaaaagcgtgacatttgctctgatccctggaataggtgttgcgtatcaaatacagatgaagaaggaaaagagaaaccagagatggatggcagatctgggatctaaaatataagctcccggaaggcagggatgttgaagtatcccaagggcttaaaggaatgtgtggcttatagtaggtgttcaataaatatttgttgaatgaatttagcaccaaa

SEQ ID NO: 1588 - DNA, 946 bp, Homo sapiens
  source 1..946: mol_type = genomic DNA; mol_type = genomic DNA
aggtgcctggtaaacaatagctgttgtcgggtgtggtggctcacacttgtaatctcagcactttgggaggccaaggcaggaggggcgcttgagcccaggaattcaagaccagcctgggtcagagttggcattgctcaaatctgggcttcatttccaagaagtttcacaagtctgccaggggaagtccctggacttcttgcttctttcgtgtaggacaggctgtcgaaacctcagtggataaaagacctagagaatgtgtatcccagaagaagctggccaaggatatgggagcaaccaccatggaccagaagtctctctgggcaggtgtagtggtcttgctgcttctccagggaggatctgcctacaaactggtttgctactttaccaactggtcccaggaccggcaggaaccaggaaaattcacccctgagaatattgaccccttcctatgctctcatctcatctattcattcgccagcatcgaaaacaacaaggttatcatcaaggacaagagtgaagtgatgctctaccagaccatcaacagtctcaaaaccaagaatcccaaactgaaaattctcttgtccattggagggtacctgtttggttccaaagggttccaccctatggtggattcttctacatcacgcttggaattcattaactccataatcctgtttctgaggaaccataactttgatggactggatgtaagctggatctacccagatcagaaagaaaacactcatttcactgtgctgattcatgagttagcagaagcctttcagaaggacttcacaaaatccaccaaggaaaggcttctcttgactgcgggcgtatctgcagggaggcaaatgattgataacagctatcaagttgagaaactggcaaaagatctggatttcatcaacctcctgtcctttgacttccatgggtcttgggaaaagcc

SEQ ID NO: 1589 - DNA, 1431 bp, Homo sapiens
  source 1..1431: mol_type = genomic DNA; mol_type = genomic DNA
gtgcgtttgtggccgtccggcctccctgacatgcagccctctggaccccgaggttggaccctactgtgacacacctaccatgcggacactcttcaacctcctctggcttgccctggcctgcagccctgttcacactaccctgtcaaagtcagatgccaaaaaagccgcctcaaagacgctgctggagaaggtgaagttttgctcttgttgcccaggctggagcgcaatggcgcgatcttggctcaccgcaacctctgccacccagagtcagttttcagataagccggtgcaagaccggggtttggtcgtgacggacctcaaagctgagagtgtggttcttgagcatcgcagctactgctcggcaaaggcccgggacagacactttgctggggatgtactgggctatgtcactccatggaacagccatggctacgatgtcaccaaggtctttgggagcaagttcacacagatctcacccgtctggctgcagctgaagagacgtggccgtgagatgtttgaggtcacgggcctccacgacgtggaccaagggtggatgcgagctgtcaggaagcatgccaagggcctgcacatagtgcctcggctcctgtttgaggactggacttacgatgatttccggaacgtcttagacagtgaggatgagatagaggagctgagcaagaccgtggtccaggtggcaaagaaccagcatttcgatggcttcgtggtggaggtctggaaccagctgctaagccagaagcgcgtgggcctcatccacatgctcacccacttggccgaggctctgcaccaggcccggctgctggccctcctggtcatcccgcctgccatcacccccgggaccgaccagctgggcatgttcacgcacaaggagtttgagcagctggcccccgtgctggatggtttcagcctcatgacctacgactactctacagcgcatcagcctggccctaatgcacccctgtcctgggttcgagcctgcgtccaggtcctggacccgaagtccaagtggcgaagcaaaatcctcctggggctcaacttctatggtatggactacgcgacctccaaggatgcccgtgagcctgttgtcggggccaggtacatccagacactgaaggaccacaggccccggatggtgtgggacagccaggcctcagagcacttcttcgagtacaagaagagccgcagtgggaggcacgtcgtcttctacccaaccctgaagtccctgcaggtgcggctggagctggcccgggagctgggcgttggggtctctatctgggagctgggccagggcctggactacttctacgacctgctctaggtgggcattgcggcctccgcggtggacgtgttcttttctaagccatggagtgagtgagcaggtgtgaaatacaggcctccactccgtttgctgtg

SEQ ID NO: 1590 - DNA, 773 bp, Homo sapiens
  source 1..773: mol_type = genomic DNA; mol_type = genomic DNA
cgggactcccagcagagattttttttttgtactggctgtgtaacaggacaccgcatgcagccctcaggaggggctctgtgcttctaatgaaaaaggcaggcattgacctccctctgaggcagtttccaggcccaccgtggtgcacgcaaaccacttcctggccatgcgctccctcctgcttctcagcgccttctgcctcctggaggcggccctggccgccgaggtgaagaaacctgcagccgcagcagctcctggcactgcggagaagttgagccccaaggcggccacgcttgccgagcgcagcgccggcctggccttcagcttgtaccaggccatggccaaggaccaggcagtggagaacatcctggtgtcacccgtggtggtggcctcgtcgctagggctcgtgtcgctgggcggcaaggcgaccacggcgtcgcaggccaaggcagtgctgagcgccgagcagctgcgcgacgaggaggtgcacgccggcctgggcgagctgctgcgctcactcagcaactccacggcgcgcaacgtgacctggaagctgggcagccgactgtacggacccagctcagtgagcttcgctgatgacttcgtgcgcagcagcaagcagcactacaactgcgagcactccaagatcaacttccgcgacaagcgcagcgcgctgcagtccatcaacgagtgggccgcgcagaccaccgacggcaagctgcccgaggtcaccaaggacgtggagcgcacggacggcgccctgctagtcaacgcca

SEQ ID NO: 1591 - DNA, 587 bp, Homo sapiens
  source 1..587: mol_type = genomic DNA; mol_type = genomic DNA
tgagggaatttgagcttccggtggtgggaaaggaggtgaaatcgtctcgactcctggggcccaccgtggtgcacgcaaaccacttcctggccatgcgctccctcctgcttctcagcgccttctgcctcctggaggcggccctggccgccgaggtgaagaaacctgcagccgcagcagctcctggcactgcggagaagttgagccccaaggcggccacgcttgccgagcgcagcgccggcctggccttcagcttgtaccaggccatggccaaggaccaggcagtggagaacatcctggtgtcacccgtggtggtggcctcgtcgctagggctcgtgtcgctgggcggcaaggcgaccacggcgtcgcaggccaaggcagtgctgagcgccgagcagctgcgcgacgaggaggtgcacgccggcctgggcgagctgctgcgctcactcagcaactccacggcgcgcaacgtgacctggaagctgggcagccgactgtacggacccagctcagtgagcttcgctgatgacttcgtgcgcagcagcaagcagcactacaactgcgagcactccaagatcaacttccgcgac

SEQ ID NO: 1592 - DNA, 870 bp, Homo sapiens
  source 1..870: mol_type = genomic DNA; mol_type = genomic DNA
cgagctacgcaagcaatcctggcccagccgagcttgcttccccaaatcccgtaatccttgaccttattcccccaaagaagcggcctcccgggaaggagcgccctggcggagaagactcgaacggctcccacagccgggcgttgggggaaagctacaacaaatcatcgtcaacctgttccaccttctccagtctggtagcaaaaaggggtgtctcagaatctccggcctgtgaaactgtgaggggattcggccaagacgtcctcttccctctgcctcccacccaggccactcttcacctccaccatgagcctggacatccagagcctggacatccagtgtgaggagctgagcgacgctagatgggccgagctcctccctctgctccagcagtgccaagtggtcaggctggacgactgtggcctcacggaagcacggtgcaaggacatcagctctgcacttcgagtcaaccctgcactggcagagctcaacctgcgcagcaacgagctgggcgatgtcggcgtgcattgcgtgctccagggcctgcagaccccctcctgcaagatccagaagctgagcctccagaactgctgcctgacgggggccggctgcggggtcctgtccagcacactacgcaccctgcccaccctgcaggagctgcacctcagcgacaacctcttgggggatgcgggcctgcagctgctctgcgaaggactcctggacccccagtgccgcctggaaaagctgcagctggagtattgcagcctctcggctgccagctgcgagcccctggcctccgtgctcagggccaagccggacttcaaggagctcacggttagcaacaacgacatcaatgaggctggcgtccgtgtg

SEQ ID NO: 1593 - DNA, 727 bp, Homo sapiens
  source 1..727: mol_type = genomic DNA; mol_type = genomic DNA
cgactagcgggcgcggcccccagggtggactccccgccagccccggcctggaggctccgcccgcccccgcctgggcggaaggaacgcggagcggctctggccttgggtctgcggcggcggcgtcgggccactcttcacctccaccatgagcctggacatccagagcctggacatccagtgtgaggagctgagcgacgctagatgggccgagctcctccctctgctccagcagtgccaagtggtcaggctggacgactgtggcctcacggaagcacggtgcaaggacatcagctctgcacttcgagtcaaccctgcactggcagagctcaacctgcgcagcaacgagctgggcgatgtcggcgtgcattgcgtgctccagggcctgcagaccccctcctgcaagatccagaagctgagcctccagaactgctgcctgacgggggccggctgcggggtcctgtccagcacactacgcaccctgcccaccctgcaggagctgcacctcagcgacaacctcttgggggatgcgggcctgcagctgctctgcgaaggactcctggacccccagtgccgcctggaaaagctgcagctggagtattgcagcctctcggctgccagctgcgagcccctggcctccgtgctcagggccaagccggacttcaaggagctcacggttagcaacaacgacatcaatgaggctggcgtccgtgtgctgtgccagggcctg

SEQ ID NO: 1594 - DNA, 2084 bp, Homo sapiens
  source 1..2084: mol_type = genomic DNA; mol_type = genomic DNA
ggttcctgggcgctctgttacacaagcaagatacagccagccccacctaattttgtttccctggcaccctcctgctcagtgcgacattgtcacacttaacccatctgttttctctaatgcacgacagattcctttcagacaggacaactgtgatatttcagttcctgattgtaaatacctcctaagcctgaagcttctgttactagccattgtgagcttcagtttcttcatctgcaaaatgggcataatacaatctattcttgccacatcaagggattgttattcctttaaaaaaaaaccaataccaaagaagcctacaatgttggccttagccaaaattctgttgatttcaacgttgttttattcacttctatcggggagccatggaaaagaaaatcaagacataaacacaacacagaacattgcagaagtttttaaaacaatggaaaataaacctatttctttggaaagtgaagcaaacttaaactcagataaagaaaatataaccacctcaaatctcaaggcgagtcattcccctcctttgaatctacccaacaacagccacggaataacagatttctccagtaactcatcagcagagcattctttgggcagtctaaaacccacatctaccatttccacaagccctcccttgatccatagctttgtttctaaagtgccttggaatgcacctatagcagatgaagatcttttgcccatctcagcacatcccaatgctacacctgctctgtcttcagaaaacttcacttggtctttggtcaatgacaccgtgaaaactcctgataacagttccattacagttagcatcctctcttcagaaccaacttctccatctgtgacccccttgatagtggaaccaagtggatggcttaccacaaacagtgatagcttcactgggtttaccccttatcaagaaaaaacaactctacagcctaccttaaaattcaccaataattcaaaactctttccaaatacgtcagatccccaaaaagaaaatagaaatacaggaatagtattcggggccattttaggtgctattctgggtgtctcattgcttactcttgtgggctacttgttgtgtggaaaaaggaaaacggattcattttcccatcggcgactttatgacgacagaaatgaaccagttctgcgattagacaatgcaccggaaccttatgatgtgagttttgggaattctagctactacaatccaactttgaatgattcagccatgccagaaagtgaagaaaatgcacgtgatggcattcctatggatgacatacctccacttcgtacttctgtatagaactaacagcaaaaaggcgttaaacagcaagtgtcatctacatcctagccttttgacaaattcatctttcaaaaggttacacaaaattactgtcacgtggattttgtcaaggagaatcataaaagcaggagaccagtagcagaaatgtagacaggatgtatcatccaaaggttttctttcttacaatttttggccatcctgaggcatttactaagtagccttaatttgtattttagtagtattttcttagtagaaaatatttgtggaatcagataaaactaaaagatttcaccattacagccctgcctcataactaaataataaaaattattccaccaaaaaattctaaaacaatgaagatgactctttactgctctgcctgaagccctagtaccataattcaagattgcattttcttaaatgaaaattgaaagggtgctttttaaagaaaatttgacttaaagctaaaaagaggacatagcccagagtttctgttattgggaaattgaggcaatagaaatgacagacctgtattctagtacgttataattttctagatcagcacacacatgatcagcccactgagttatgaagctgacaatgactgcattcaacggggccatggcaggaaagctgaccctacccaggaaagtaatagcttctttaaaagtcttcaaaggttttgggaattttaacttgtcttaatatatcttaggcttcaattatttgggtgccttaaaaactcaatgagaatcatggt

SEQ ID NO: 1595 - DNA, 602 bp, Homo sapiens
  source 1..602: mol_type = genomic DNA; mol_type = genomic DNA
cccgaagtccaagtggcgaagcaaaatcctcctggggctcaacttctatggtatggactacgcgacctccaaggatgcccgtgagcctgttgtcggggccaggtacatccagacactgaaggaccacaggccccggatggtgtgggacagccaggcctcagagcacttcttcgagtacaagaagagccgcagtgggaggcacgtcgtcttctacccaaccctgaagtccctgcaggtgcggctggagctggcccgggagctgggcgttggggtctctatctgggagctgggccagggcctggactacttctacgacctgctctaggacgggagctggggagggggtcctgggtcggacccaaggcacccacacttgagaaagcctccgcctggacgtcagggaggcctgcgagctgccacagtgcaggtgcagccgttcccaccgccctgctgctgcttgacacgggcataggagatacaagtggtgtgtgcggcggttcatgcctgtaatcccagtactttggaaagccgtggcgggaggaacgctgggcaacatggtgaaaccccgtctctaccccctaaaaatagaaaaattagcaaga

SEQ ID NO: 1596 - DNA, 660 bp, Homo sapiens
  source 1..660: mol_type = genomic DNA; mol_type = genomic DNA
aagagtagaatcgtgtcgcggctcgagagcgagagtcacgtcccggcgctagcccagcccgacccaggtgaggggcgggagacgcctgcgtgcgtgcggcccgggggagcgccgagcaatctgggggcccaccgtggtgcacgcaaaccacttcctggccatgcgctccctcctgcttctcagcgccttctgcctcctggaggcggccctggccgccgaggtgaagaaacctgcagccgcagcagctcctggcactgcggagaagttgagccccaaggcggccacgcttgccgagcgcagcgccggcctggccttcagcttgtaccaggccatggccaaggaccaggcagtggagaacatcctggtgtcacccgtggtggtggcctcgtcgctagggctcgtgtcgctgggcggcaaggcgaccacggcgtcgcaggccaaggcagtgctgagcgccgagcagctgcgcgacgaggaggtgcacgccggcctgggcgagctgctgcgctcactcagcaactccacggcgcgcaacgtgacctggaagctgggcagccgactgtacggacccagctcagtgagcttcgctgatgacttcgtgcgcagcagcaagcagcactacaactgcgagcactccaagatcaacttccgcgacaagcg

SEQ ID NO: 1597 - DNA, 1620 bp, Homo sapiens
  source 1..1620: mol_type = genomic DNA; mol_type = genomic DNA
aaaaagttgggggtggtttgtgttggggaaggcctgcgattggactgcagaatccactagggaggaggaaagcaaaagtaaaaaggaaatagctgggggaagggaacggggggaagccatcttcaccccccaccccaatgcacacacaattaagccaggaagcagcttgcaaccactagcctggggagggtccgcatgtgtcaagggtgagggcaacagatgctggacccagggagctctctgccacaggatgatggtggcccttcgaggagcttctgcattgctggttctgttccttgcagcttttctgcccccgccgcagtgtacccaggacccagccatggtgcattacatctaccagcgctttcgagtcttggagcaagggctggaaaaatgtacccaagcaacgagggcatacattcaagaattccaagagttctcaaaaaatatatctgtcatgctgggaagatgtcagacctacacaagtgagtacaagagtgcagtgggtaacttggcactgagagttgaacgtgcccaacgggagattgactacatacaataccttcgagaggctgacgagtgcatcgaatcagaggacaagacactggcagaaatgttgctccaagaagctgaagaagagaaaaagatccggactctgctgaatgcaagctgtgacaacatgctgatgggcataaagtctttgaaaatagtgaagaagatgatggacacacatggctcttggatgaaagatgctgtctataactctccaaaggtgtacttattaattggatccagaaacaacactgtttgggaatttgcaaacatacgggcattcatggaggataacaccaagccagctccccggaagcaaatcctaacactttcctggcagggaacaggccaagtgatctacaaaggttttctattttttcataaccaagcaacttctaatgagataatcaaatataacctgcagaagaggactgtggaagatcgaatgctgctcccaggaggggtaggccgagcattggtttaccagcactccccctcaacttacattgacctggctgtggatgagcatgggctctgggccatccactctgggccaggcacccatagccatttggttctcacaaagattgagccgggcacactgggagtggagcattcatgggataccccatgcagaagccaggatgctgaagcctcattcctcttgtgtggggttctctatgtggtctacagtactgggggccagggccctcatcgcatcacctgcatctatgatccactgggcactatcagtgaggaggacttgcccaacttgttcttccccaagagaccaagaagtcactccatgatccattacaaccccagagataagcagctctatgcctggaatgaaggaaaccagatcatttacaaactccagacaaagagaaagctgcctctgaagtaatgcattacagctgtgagaaagagcactgtggctttggcagctgttctacaggacagtgaggctatagccccttcacaatatagtatccctctaatcacacacaggaagagtgtgtagaagtggaaatacgtatgcctcctttcccaaatgtcactgcctta

SEQ ID NO: 1598 - DNA, 1358 bp, Homo sapiens
  source 1..1358: mol_type = genomic DNA; mol_type = genomic DNA
aagagtagaatcgtgtcgcggctcgagagcgagagtcacgtcccggcgctagcccagcccgacccagaatgaaaaaggcaggcattgacctccctctgaggcagtttccaggcccaccgtggtgcacgcaaaccacttcctggccatgcgctccctcctgcttctcagcgccttctgcctcctggaggcggccctggccgccgaggtgaagaaacctgcagccgcagcagctcctggcactgcggagaagttgagccccaaggcggccacgcttgccgagcgcagcgccggcctggccttcagcttgtaccaggccatggccaaggaccaggcagtggagaacatcctggtgtcacccgtggtggtggcctcgtcgctagggctcgtgtcgctgggcggcaaggcgaccacggcgtcgcaggccaaggcagtgctgagcgccgagcagctgcgcgacgaggaggtgcacgccggcctgggcgagctgctgcgctcactcagcaactccacggcgcgcaacgtgacctggaagctgggcagccgactgtacggacccagctcagtgagcttcgctgatgacttcgtgcgcagcagcaagcagcactacaactgcgagcactccaagatcaacttccgcgacaagcgcagcgcgctgcagtccatcaacgagtgggccgcgcagaccaccgacggcaagctgcccgaggtcaccaaggacgtggagcgcacggacggcgccctgctagtcaacgccatgttcttcaagccacactgggatgagaaattccaccacaagatggtggacaaccgtggcttcatggtgactcggtcctataccgtgggtgtcatgatgatgcaccggacaggcctctacaactactacgacgacgagaaggaaaagctgcaaatcgtggagatgcccctggcccacaagctctccagcctcatcatcctcatgccccatcacgtggagcctctcgagcgccttgaaaagctgctaaccaaagagcagctgaagatctggatggggaagatgcagaagaaggctgttgccatctccttgcccaagggtgtggtggaggtgacccatgacctgcaggtaaggggtggcccagcctaggggcctgcaggccttggagccagggggaggtgcttgggggacccactcaccaattcagcaggtctgtcccaagaccccctggatgtccaggcagtgctgggctctgtgatgggggaagctggggcaggaggtgtgggccatgcccttgggaagatgatgataataccagcagctaaatataacggaacattcctgtatgctaggcgttcttctaagcactttatatgtattattatta

SEQ ID NO: 1599 - DNA, 1459 bp, Homo sapiens
  source 1..1459: mol_type = genomic DNA; mol_type = genomic DNA
gagccgcggggtcctcggccgcctgaccccagccggcgccgcgcctcccggagggggtcgggccctgcacgtgggcgcagcgcgggtcggggtggggctgccacagccctgcggagctgctttccggggtccctttccctggaccagattttcgcgggaagccggatcctctccgttcccttggagtgagcaagcgggacagttctgcggaaagtttccgcccccaatcccccagccctgcgcccggactgaagcggcggcccccacctccagcatcctcgagcgatggtttctcccacaactaccccggtcaggtccagcacttgggagctgactgtgctggaggtgacaggctttgcggggtccgcctgtgtgcaggagtcgcaaggtcgctgagcaggacccaaaggtggcccgaggcagccgggatgacagctctccccaggaatcctgctgcctgctgagaaacatggtcagcaagtcccgctggaagctcctggccatgttggctctggtcctggtcgtcatggtgtggtattccatctcccgggaagacagtttttattttcccatcccagagaagaaggagccgtgcctccagggtgaggcagagagcaaggcctctaagctctttggcaactactcccgggatcagcccatcttcctgcggcttgaggattatttctgggtcaagacgccatctgcttacgagctgccctatgggaccaaggggagtgaggatctgctcctccgggtgctagccatcaccagctcctccatccccaagaacatccagagcctcaggtgccgccgctgtgtggtcgtggggaacgggcaccggctgcggaacagctcactgggagatgccatcaacaagtacgatgtggtcatcagattgaacaatgccccagtggctggctatgagggtgacgtgggctccaagaccaccatgcgtctcttctaccctgaatctgcccacttcgaccccaaagtagaaaacaacccagacacactcctcgtcctggtagctttcaaggcaatggacttccactggattgagaccatcctgagtgataagaagcgggtgcgaaagggtttctggaaacagcctcccctcatctgggatgtcaatcctaaacagattcggattctcaaccccttcttcatggagattgcagctgacaaactgctgagcctgccaatgcaacagccacggaagattaagcagaagcccaccacgggcctgttggccatcacgctggccctccacctctgtgacttggtgcacattgccggctttggctacccagacgcctacaacaagaagcagaccattcactactatgagcagatcacgctcaagtccatggcggggtcaggccataatgtctcccaagaggccctggccattaagcggatgctggagatgggagctatcaagaacctcacgtccttctga

SEQ ID NO: 1600 - DNA, 571 bp, Homo sapiens
  source 1..571: mol_type = genomic DNA; mol_type = genomic DNA
gttttccggccgtgcgtttgtggccgtccggcctccctgacatgcaggtgagccccgcggcggccggcccctgctcctcctccttgcacggcctcagtttccctcccgcaaagtgggcgcgccgggcagcgaggctcggccccgggaggacgggcgtggggtcgcgggcgacgccgggcggccctctggaccccgaggttggaccctactgtgacacacctaccatgcggacactcttcaacctcctctggcttgccctggcctgcagccctgttcacactaccctgtcaaagtcagatgccaaaaaagccgcctcaaagacgctgctggagaagagtcagttttcagataagccggtgcaagaccggggtttggtcgtgacggacctcaaagctgagagtgtggttcttgagcatcgcagctactgctcggcaaaggcccgggacagacactttgctggggatgtactgggctatgtcactccatggaacagccatggctacgatgtcaccaaggtctttgggagcaagttcacacagatctcacccgtctggctgcagctgaagagacg

SEQ ID NO: 1601 - DNA, 2288 bp, Homo sapiens
  source 1..2288: mol_type = genomic DNA; mol_type = genomic DNA
attaaagccctgtgggccaagagttgtgataaccaacttggaatttcctgactcctatgcttactgatttttcccaacctgagttgaggggatggagagggatgtgtatgtgtgtagatgccctccatgcgctgtgttgaaaacgcgcgggtgactgcaggaaaccacagagcacagctcgggcctctactgatcgggaaacgtcggaagacagaaaaatgggcaatcataaaacccacggcaaccatgaagacacgcactctccccctagcaatcccaccccggaattgaggacacagggtccccgcgctcagcccttggtgccagcacttcttggacacctcaaccccctcagctaaacctgagatccaagcgctccggattccaaacgtttcctcgagcaggtcctctctagccggccgcttatctatggtttctgctatagggcgctctagcctgcgccaaggggtagtgagaccgcgcggcaacagcttgcggctgcggggagctcccgtgggcgctccgctggctgtgcaggcggccatggattccttgcggaaaatgctgatctcagtcgcaatgctgggcgcaggggctggcgtgggctacgcgctcctcgttatcgtgaccccgggagagcggcggaagcaggaaatgctaaaggagatgccactgcaggacccaaggagcagggaggaggcggccaggacccagcagctattgctggccactctgcaggaggcagcgaccacgcaggagaacgtggcctggaggaagaactggatggttggcggcgaaggcggcgccggcgggaggtcaccgtgagaccggacttgcctccgtgggcgccggaccttggcttgggcgcaggaatccgaggcagcctttctccttcgtgggcccagcggagagtccggaccgagataccatgccaggactctccggggtcctgtgagctgccgtcgggtgagcacgtttcccccaaaccctggactgactgctttaaggtccgcaaggcgggccagggccgagacgcgagtcggatgtggtgaactgaaagaaccaataaaatcatgttcctccacccagaatgagccctgcagtcgacacctaccaatgcttagagacgcgtggtcggtgctgggggcgcggcctggagctgctgcctgtcccaccccaccagaagaggctgatcccgataggtatctgaccacattttttttttttttttttttttgagacggagtcaatgtcacccaggctggagtgcagtggcacgatctcggctcactgcaacctccgcccctgggttccagcaattctcctgcctcagcttcccgagtagccgggatcacaagtgcgcgccaccaagcccagctaacttttgtgtttttagttgagacagggttcaccatgttggctagactggtctcgaactccagacccaggtgatccgcccgcctcggcctcccaaagggctgggattacaggcgtgaaccacctcgccctgccgcggccacattttttcttttttttgagatggagtcttgctcttgtcacccaggcaggagtgcagtggcgcaatcttggctcactgcaacctctgcctcctgggttcaagctgttctccttactcagcctcccatgtagctgggattacaggcgtccgcaaccacgcccggctgatattagtagttttagtagaggcgggtttcaccatgtggccaggctgatctcgaactcctgacctcaggcagttcacccgtctcagcctcccaaagtgctgggattagaggcgtgagccactgcgcccggccaaccacattttcaaaacaggtcatgtggtgtcaggttggagtgtacttccagggataaccgtgggacattcttgaaatctgaactatcctgggaagtcttgaagtaatggatgcctatagtggacactcaggactcctgtccttggagcgagattggaggggcatctagcacttaacatatgccacaatgctttctgtggccattatttaacctctggttaaacaagcttaggaggctgacttactagtagtaaaaggagtgtgctttgagtcacagatcctggttgaactccagcatgttacaaacctcagccctgttctatgaaaggtcataactacgaggattattgtaaaacattaatttagaaatgtaaagtggtccccaatctctggatctggtcaggatttattggagctgccactgaggggattaaataagtggggtcaaagccccacagcctagtcaaccaa

SEQ ID NO: 1602 - DNA, 882 bp, Homo sapiens
  source 1..882: mol_type = genomic DNA; mol_type = genomic DNA
ggcagttggtagatgcccctctgggagagatccccaggggtgacagccatggaccctggaagggcctgggctagggacagggaccagagccagtccagggagaggacagagccaatggactggggtgtactgtaacagccctgctggcgagagggaccagggcaccgtcctccagggagcccatgctgcaagtcgggccagaggtgcccctgaacctgaaggccaatgagacccaagacaggccaagtgggttgtgagacccctgaggagctgggccctggtcccaggcagcgctggcccctgctgctgctgggtctggccatggtcgcccatggcctgctgcgcccaatggttgcaccgcaaagcggggacccagaccctggagcctcagttggaagcagccgatccagcctgcggagcctgtggggcaggtcagcccaaggccaaccccactgtcactctgttcccgccctcctctgaggagctccaagccaacaaggccacactagtgtgtctgatcagtgacttctacccgggagctgtgacagtggcctggaaggcagatggcagccccgtcaaggcgggagtggagaccaccaaaccctccaaacagagcaacaacaagtacgcggccagcagctacctgagcctgacgcccgagcagtggaagtcccacagaagctacagctgccaggtcacgcatgaagggagcaccgtggagaagacagtggcccctacagaatgttcataggttcccaactctaaccccacccacgggagcctggagctgcaggatcccaggggaggggtctctctccccatcccaagtcatccagcccttctccctgcactcatgaaaccccaataaatatcctcattgac

SEQ ID NO: 1603 - DNA, 480 bp, Homo sapiens
  source 1..480: mol_type = genomic DNA; mol_type = genomic DNA
agaggacttctgcaccgtttcccgaggacagtttggcagtgtttcagaagggccttagaaccaggcaggcccccttctaggatggtggaaagcctaaagatctgaaaacggtctcaagtgtcgtcttagcgattggctgactaaaccgaatgcaagccggagactgcacacgatgttgccgttaacagttacactgggccgggcagtcagaggcaggcggatcacctgaggtcaggagttcgagaacagcctggccaacatggcatgaagaactcttgactgacagaaacggagggtgtgtccaaagttttgaggacggccgagcggcgctccaaaacccgtcctcacagcctcgccccgttcgcctcagctacaacaaatcatcgtcaacctgttccaccttctccagtctggtagcaaaaaggggtgtctcaggccactcttcacctccaccatgagcctggacatccagagcctgga

SEQ ID NO: 1604 - DNA, 734 bp, Homo sapiens
  source 1..734: mol_type = genomic DNA; mol_type = genomic DNA
agctactgtgagggctgttgaatttttctccaaagctcagatgcccagtattcctagtcttcgaaagagagagaggaagattgagagagagagagagagagagagagagagaagaagttttcttaatcagagatttctctttactttcaactaattgcagatgctgatcttctggacaatcacacttttcctgctgggagcagccaaaggaaaagaagtttgctatgaggacctcgggtgcttttctgacactgagccctggggcgggacagcaatcaggcccctgaaaattctcccctggagccctgagaagatcggcacccgcttcctgctgtacaccaatgaaaacccaaacaactttcaaattctcctcctctctgatccatcaacaattgaggcatcaaattttcaaatggacagaaagacccggttcatcatccatggcttcatagacaaaggagatgagagctgggtgacagacatgtgcaagaaactgttcgaggtggaggaggtgaactgcatctgcgtggactggaagaagggctcccaagccacctacacacaggctgccaacaacgtgcgagtggtgggcgcccaggtggcccagatgctcgacatcctcttgacagagtatagctaccccccttccaaagttcacctcattggccacagcctgggagcccacgtggctggagaggcaggaagcaagactccaggcctgagcaggattacag

SEQ ID NO: 1605 - DNA, 704 bp, Homo sapiens
  source 1..704: mol_type = genomic DNA; mol_type = genomic DNA
gaggacagtttggcagtgtttcagaagggccttagaaccaggcaggcccccttctaggatggtggaaagcctaaagatctgaaaacggtctcaagtgtcgtcttagcgattggctgactaaaccgaatgcaagccggagactgcacacgatgttgccgttaacagttacactgggccgggcagtcagaggcaggcggatcacctgaggtcaggagttcgagaacagcctggccaacatgaggccaccttcttccatcttcaaaacctactgtctctgcataagaactctcatgattatatgccggccgcccagacaccccagggcatgaagaactcttgactgacagaaacggagggtgtgtccaaagttttgaggacggccgagcggcgctccaaaacccgtcctcacagcctcgccccgttcgcctcagctacaacaaatcatcgtcaacctgttccaccttctccagtctggtagcaaaaaggggtgtctcagaatctccggcctgtgaaactgtgaggggattcggccaagacgtcctcttccctctgcctcccacccaggccactcttcacctccaccatgagcctggacatccagagcctggacatccagtgtgaggagctgagcgacgctagatgggccgagctcctccctctgctccagcagtgccaagtggtcaggctggacgactgtggcctca

SEQ ID NO: 1606 - DNA, 1053 bp, Homo sapiens
  source 1..1053: mol_type = genomic DNA; mol_type = genomic DNA
agccggctgtggtgggaggcagttgagccctggattgtgaccgcttcagggcagttggtagatgcccctctgggagagatccccaggggtgacagccatggaccctggaagggcctgggctagggacagggaccagagccagtccagggagaggacagagccaatggactggggtgtactgtaacagccctgctggcgagagggaccagggcaccgtcctccagggagcccatgctgcaagtcgggccagaggtgcccctgaacctgaaggccaatgagacccaagacaggccaagtgggttgtgagacccctgaggagctgggccctggtcccaggcagcgctggcccctgctgctgctgggtctggccatggtcgcccatggcctgctgcgcccaatggttgcaccgcaaagcggggacccagaccctggagcctcagttggaagcagccgatccagcctgcggagcctgtggggcagcaggctcctgctccagcccagcccccagagagcagaccccaggtgctggccccgggggttttggtctgagcctcagtcactgtgttatgtcttcggaactgggaccaaggtcaccgtcctaggtcagcccaaggccaaccccactgtcactctgttcccgccctcctctgaggagctccaagccaacaaggccacactagtgtgtctgatcagtgacttctacccgggagctgtgacagtggcctggaaggcagatggcagccccgtcaaggcgggagtggagaccaccaaaccctccaaacagagcaacaacaagtacgcggccagcagctacctgagcctgacgcccgagcagtggaagtcccacagaagctacagctgccaggtcacgcatgaagggagcaccgtggagaagacagtggcccctacagaatgttcataggttcccaactctaaccccacccacgggagcctggagctgcaggatcccaggggaggggtctctctccccatcccaagtcatccagcccttctccctgcactcatgaaaccccaataaatatcctcattgac

SEQ ID NO: 1607 - DNA, 1825 bp, Homo sapiens
  source 1..1825: mol_type = genomic DNA; mol_type = genomic DNA
ccaccctggaggacaggcctcagaagccgtcttcagcaggatcctgggacctctgggggctgtggagggacagacagggagccaggggcccttctcttcatcttgaaggacagtgggtacaatcagggtcaagccctcagccagggccaggagagggccagagactgcttctgttgagttaggggtcggagggactcagaagggggcaggtgggaaggtggacgggggttgtacctgcctgttgctgcctctagctcctctctgcatgtgtcctgcaggctggaagctcctggccatgttggctctggtcctggtcgtcatggtgtggtattccatctcccgggaagacaggtacatcgagcttttttattttcccatcccagagaagaaggagccgtgcctccagggtgaggcagagagcaaggcctctaagctctttggcaactactcccgggatcagcccatcttcctgcggcttgaggattatttctgggtcaagacgccatctgcttacgagctgccctatgggaccaaggggagtgaggatctgctcctccgggtgctagccatcaccagctcctccatccccaagaacatccagagcctcaggtgccgccgctgtgtggtcgtggggaacgggcaccggctgcggaacagctcactgggagatgccatcaacaagtacgatgtggtcatcagattgaacaatgccccagtggctggctatgagggtgacgtgggctccaagaccaccatgcgtctcttctaccctgaatctgcccacttcgaccccaaagtagaaaacaacccagacacactcctcgtcctggtagctttcaaggcaatggacttccactggattgagaccatcctgagtgataagaagcgggtgcgaaagggtttctggaaacagcctcccctcatctgggatgtcaatcctaaacagattcggattctcaaccccttcttcatggagattgcagctgacaaactgctgagcctgccaatgcaacagccacggaagattaagcagaagcccaccacgggcctgttggccatcacgctggccctccacctctgtgacttggtgcacattgccggctttggctacccagacgcctacaacaagaagcagaccattcactactatgagcagatcacgctcaagtccatggcggggtcaggccataatgtctcccaagaggccctggccattaagcggatgctggagatgggagctatcaagaacctcacgtccttctgacctgggcaagagctgtagcctgtcggttgcctactctgctgtctgggtgacccccatgcgtggctgtgggggtggctggtgccagtatgacccacttggactcaccccctcttggggagggagttctgggcctggccaggtctgagatgaggccatgcccctggctgctcttatggagccgagatccagtcagggtgggggcgctggagccgtgggagcccggccagggcagggggctcgttgctgtggcaccccctctctgccagcaccaagagattatttaatgggctatttaattaaggggtaggaaggtgctgtgggctggtcccacacatccaggaaagaggccagtagagaattctgcccactttttataaaaacttacagcgatggccccaccaaggcctagacacggcactggcctcccaggagggcaggggcattgggaatgggtgggtgccctccagagaggggctgctacctcccagcaggcatgggaagagcactggtgtgggggttccaccgagaaggggacctcatctagaaaagaggttacaaacc

SEQ ID NO: 1608 - DNA, 998 bp, Homo sapiens
  source 1..998: mol_type = genomic DNA; mol_type = genomic DNA
gtgcggcccgggggagcgccgagcaatctggggaatgaaaaaggcaggcattgacctccctctgaggcagtttccaggcccaccgtggtgcacgcaaaccacttcctggccatgcgctccctcctgcttctcagcgccttctgcctcctggaggcggccctggccgccgaggtgaagaaacctgcagccgcagcagctcctggcactgcggagaagttgagccccaaggcggccacgcttgccgagcgcagcgccggcctggccttcagcttgtaccaggccatggccaaggaccaggcagtggagaacatcctggtgtcacccgtggtggtggcctcgtcgctagggctcgtgtcgctgggcggcaaggcgaccacggcgtcgcaggccaaggcagtgctgagcgccgagcagctgcgcgacgaggaggtgcacgccggcctgggcgagctgctgcgctcactcagcaactccacggcgcgcaacgtgacctggaagctgggcagccgactgtacggacccagctcagtgagcttcgctgatgacttcgtgcgcagcagcaagcagcactacaactgcgagcactccaagatcaacttccgcgacaagcgcagcgcgctgcagtccatcaacgagtgggccgcgcagaccaccgacggcaagctgcccgaggtcaccaaggacgtggagcgcacggacggcgccctgctagtcaacgccatgttcttcaagccacactgggatgagaaattccaccacaagatggtggacaaccgtggcttcatggtgactcggtcctataccgtgggtgtcatgatgatgcaccggacaggcctctacaactactacgacgacgagaaggaaaagctgcaaatcgtggagatgcccctggcccacaagctctccagcctcatcatcctcatgccccatcacgtggagcctctcgagcgccttgaaaagctgctaaccaaagagcagctgaagatctggatggggaa

SEQ ID NO: 1609 - DNA, 752 bp, Homo sapiens
  source 1..752: mol_type = genomic DNA; mol_type = genomic DNA
ctggtgtgtgtccctctcttcctgggcttccggcctctgaactagaatgtttcaaggcctaggagtgacaggacgtggtcagcaatagtggcccaggtcctgcccttgggtgacccaggccaaggtctcctagttagaacaggacagagtcacgaggctgccactgttgggaagggccctgcctgtgctgactctgcaaatgaggagtcgcccagagccgccgcgaccccacccaggagcactggccagcctggggaagacacaaacccagccccaaaggccccacagccaccaggcacctccaacaaccaggtccctctggaccccgaggttggaccctactgtgacacacctaccatgcggacactcttcaacctcctctggcttgccctggcctgcagccctgttcacactaccctgtcaaagtcagatgccaaaaaagccgcctcaaagacgctgctggagaagagtcagttttcagataagccggtgcaagaccggggtttggtcgtgacggacctcaaagctgagagtgtggttcttgagcatcgcagctactgctcggcaaaggcccgggacagacactttgctggggatgtactgggctatgtcactccatggaacagccatggctacgatgtcaccaaggtctttgggagcaagttcacacagatctcacccgtctggctgcagctgaagagacgtggccgtgagatgtttgaggtcacgggcctccacgacgtggaccaagg

SEQ ID NO: 1610 - DNA, 578 bp, Homo sapiens
  source 1..578: mol_type = genomic DNA; mol_type = genomic DNA
gcactggccagcctggggaagacacaaacccagccccaaaggccccacagccaccaggcacctccaacaaccagatttccacccagaagacagagaaggagccagtggtcatggaatgggctggggtcaaagactgggtgcctgggagctgaggcagccaccgtttcagcctggccagccctctggaccccgaggttggaccctactgtgacacacctaccatgcggacactcttcaacctcctctggcttgccctggcctgcagccctgttcacactaccctgtcaaagtcagatgccaaaaaagccgcctcaaagacgctgctggagaagagtcagttttcagataagccggtgcaagaccggggtttggtcgtgacggacctcaaagctgagagtgtggttcttgagcatcgcagctactgctcggcaaaggcccgggacagacactttgctggggatgtactgggctatgtcactccatggaacagccatggctacgatgtcaccaaggtctttgggagcaagttcacacagatctcacccgtctggctgcagctgaagagacgtggccgtgag

SEQ ID NO: 1611 - DNA, 582 bp, Homo sapiens
  source 1..582: mol_type = genomic DNA; mol_type = genomic DNA
atttaaagaactcgccatcccacctgcacacccacgtagagacatctccccactgtgtttcagatgcctatggcgtcccctcaaaccctggtcctctatctgctggtcctggcagtcactgaagcctggggccaggaggcagtcatcccaggctgccacttgcaccccttcaatgtgacagtgcgaagtgaccgccaaggcacctgccagggctcccacgtggcacaggcctgtgtgggccactgtgagtccagcgccttcccttctcggtactctgtgctggtggccagtggttaccgacacaacatcacctccgtctctcagtgctgcaccatcagtggcctgaagaaggtcaaagtacagctgcagtgtgtggggagccggagggaggagctcgagatcttcacggccagggcctgccagtgtgacatgtgtcgcctctctcgctactagcccatcctctcccctccttcctcccctgggtcacagggcttgacgttctggtgggggaaacctgtgttcaagattcaaaaactggaaggagctccagccctgatggttacttgctatggaattttttta

SEQ ID NO: 1612 - DNA, 1829 bp, Homo sapiens
  source 1..1829: mol_type = genomic DNA; mol_type = genomic DNA
cgggtggggttgtcgacacgttcaacccgttctgctggctcgagaacgaagtaggccgtctcgctctgggtctccaggcccgcgaccgtccgccagtcgtcccgaggcatgaagaactcttgactgacagaaacggagggtgtgtccaaagttttgaggacggccgagcggcgctccaaaacccgtcctcacagcctcgccccgttcgcctcagctacaacaaatcatcgtcaacctgttccaccttctccagtctggtagcaaaaaggggtgtctcaggccactcttcacctccaccatgagcctggacatccagagcctggacatccagtgtgaggagctgagcgacgctagatgggccgagctcctccctctgctccagcagtgccaagtggtcaggctggacgactgtggcctcacggaagcacggtgcaaggacatcagctctgcacttcgagtcaaccctgcactggcagagctcaacctgcgcagcaacgagctgggcgatgtcggcgtgcattgcgtgctccagggcctgcagaccccctcctgcaagatccagaagctgagcctccagaactgctgcctgacgggggccggctgcggggtcctgtccagcacactacgcaccctgcccaccctgcaggagctgcacctcagcgacaacctcttgggggatgcgggcctgcagctgctctgcgaaggactcctggacccccagtgccgcctggaaaagctgcagctggagtattgcagcctctcggctgccagctgcgagcccctggcctccgtgctcagggccaagccggacttcaaggagctcacggttagcaacaacgacatcaatgaggctggcgtccgtgtgctgtgccagggcctgaaggactccccctgccagctggaggcgctcaagctggagagctgcggtgtgacatcagacaactgccgggacctgtgcggcattgtggcctccaaggcctcgctgcgggagctggccctgggcagcaacaagctgggtgatgtgggcatggcggagctgtgcccagggctgctccaccccagctccaggctcaggaccctgtggatctgggagtgtggcatcactgccaagggctgcggggatctgtgccgtgtcctcagggccaaggagagcctgaaggagctcagcctggccggcaacgagctgggggatgagggtgcccgactgctgtgtgagaccctgctggaacctggctgccagctggagtcgctgtgggtgaagtcctgcagcttcacagccgcctgctgctcccacttcagctcagtgctggcccagaacaggtttctcctggagctacagataagcaacaacaggctggaggatgcgggcgtgcgggagctgtgccagggcctgggccagcctggctctgtgctgcgggtgctctggttggccgactgcgatgtgagtgacagcagctgcagcagcctcgccgcaaccctgttggccaaccacagcctgcgtgagctggacctcagcaacaactgcctgggggacgccggcatcctgcagctggtggagagcgtccggcagccgggctgcctcctggagcagctggtcctgtacgacatttactggtctgaggagatggaggaccggctgcaggccctggagaaggacaagccatccctgagggtcatctcctgaggctcttcctgctgctgctctccctggacgaccggcctcgaggcaaccctggggcccaccagcccctgccatgctctcaccctgcatatcctaggtttgaagagaaacgctcagatccgcttatttctgccagtatattttggac

SEQ ID NO: 1613 - DNA, 582 bp, Homo sapiens
  source 1..582: mol_type = genomic DNA; mol_type = genomic DNA
aatttgagcttccggtggtgggaaaggaggtgaaatcgtctcgactcctgggaatgaaaaaggcaggcattgacctccctctgaggcagtttccaggcccaccgtggtgcacgcaaaccacttcctggccatgcgctccctcctgcttctcagcgccttctgcctcctggaggcggccctggccgccgaggtgaagaaacctgcagccgcagcagctcctggcactgcggagaagttgagccccaaggcggccacgcttgccgagcgcagcgccggcctggccttcagcttgtaccaggccatggccaaggaccaggcagtggagaacatcctggtgtcacccgtggtggtggcctcgtcgctagggctcgtgtcgctgggcggcaaggcgaccacggcgtcgcaggccaaggcagtgctgagcgccgagcagctgcgcgacgaggaggtgcacgccggcctgggcgagctgctgcgctcactcagcaactccacggcgcgcaacgtgacctggaagctgggcagccgactgtacggacccagctcagtgagcttcgctgatgacttcgtgcgcagcagcaa

SEQ ID NO: 1614 - DNA, 2299 bp, Homo sapiens
  source 1..2299: mol_type = genomic DNA; mol_type = genomic DNA
agtaggacccaggggccgggaggcgccggcagagggaggggccgggggccggggaggttttgagggaggtctttggctttttttggcggagctggggcgccctccggaagcgtttccaactttccagaagtttctcgggacgggcaggagggggtggggactgccatatatagatcccgggagcaggggagcgggctaagagtagaatcgtgtcgcggctcgagagcgagagtcacgtcccggcgctagcccagcccgacccagaatgaaaaaggcaggcattgacctccctctgaggcagtttccaggcccaccgtggtgcacgcaaaccacttcctggccatgcgctccctcctgcttctcagcgccttctgcctcctggaggcggccctggccgccgaggtgaagaaacctgcagccgcagcagctcctggcactgcggagaagttgagccccaaggcggccacgcttgccgagcgcagcgccggcctggccttcagcttgtaccaggccatggccaaggaccaggcagtggagaacatcctggtgtcacccgtggtggtggcctcgtcgctagggctcgtgtcgctgggcggcaaggcgaccacggcgtcgcaggccaaggcagtgctgagcgccgagcagctgcgcgacgaggaggtgcacgccggcctgggcgagctgctgcgctcactcagcaactccacggcgcgcaacgtgacctggaagctgggcagccgactgtacggacccagctcagtgagcttcgctgatgacttcgtgcgcagcagcaagcagcactacaactgcgagcactccaagatcaacttccgcgacaagcgcagcgcgctgcagtccatcaacgagtgggccgcgcagaccaccgacggcaagctgcccgaggtcaccaaggacgtggagcgcacggacggcgccctgctagtcaacgccatgttcttcaagccacactgggatgagaaattccaccacaagatggtggacaaccgtggcttcatggtgactcggtcctataccgtgggtgtcatgatgatgcaccggacaggcctctacaactactacgacgacgagaaggaaaagctgcaaatcgtggagatgcccctggcccacaagctctccagcctcatcatcctcatgccccatcacgtggagcctctcgagcgccttgaaaagctgctaaccaaagagcagctgaagatctggatggggaagatgcagaagaaggctgttgccatctccttgcccaagggtgtggtggaggtgacccatgacctgcagaaacacctggctgggctgggcctgactgaggccattgacaagaacaaggccgacttgtcacgcatgtcaggcaagaaggacctgtacctggccagcgtgttccacgccaccgcctttgagttggacacagatggcaacccctttgaccaggacatctacgggcgcgaggagctgcgcagccccaagctgttctacgccgaccaccccttcatcttcctagtgcgggacacccaaagcggctccctgctattcattgggcgcctggtccggcctaagggtgacaagatgcgagacgagttatagggcctcagggtgcacacaggatggcaggaggcatccaaaggctcctgagacacatgggtgctattggggttgggggggaggtgaggtaccagccttggatactccatggggtgggggtggaaaaacagaccggggttcccgtgtgcctgagcggaccttcccagctagaattcactccacttggacatgggccccagataccatgatgctgagcccggaaactccacatcctgtgggacctgggccatagtcattctgcctgccctgaaagtcccagatcaagcctgcctcaatcagtattcatatttatagccaggtaccttctcacctgtgagaccaaattgagctaggggggtcagccagccctcttctgacactaaaacacctcagctgcctccccagctctatcccaacctctcccaactataaaactaggtgctgcagcccctgggaccaggcacccccagaatgacctggccgcagtgaggcggattgagaaggagctcccaggaggggcttctgggcagactctggtcaagaagcatcgtgtctggcgttgtggggatgaactttttgttttgtttcttccttttttagttcttcaaagatagggagggaagggggaacatgagcctttgttgctatcaatccaagaacttatttgtacattttttttttcaataaaacttttccaatgaca

SEQ ID NO: 1615 - DNA, 1919 bp, Homo sapiens
  source 1..1919: mol_type = genomic DNA; mol_type = genomic DNA
cgcgggtcggggtggggctgccacagccctgcggagctgctttccggggtccctttccctggaccagattttcgcgggaagccggatcctctccgttcccttggagtgagcaagcgggacagttctgcggaaagtttccgcccccaatcccccagccctgcgcccggactgaagcggcggcccccacctccagcatcctcgagcgatggtttctcccacaactaccccggtcaggtccagcacttgggagctgactgtgctggaggtgacaggctttgcggggtccgcctgtgtgcaggagtcgcaaggtcgctgagcaggacccaaaggtggcccgaggcagccgggatgacagctctccccaggaatcctgctgcctgctgagaaacatggtcagcaagtcccgctggaagctcctggccatgttggctctggtcctggtcgtcatggtgtggtattccatctcccgggaagacaggtacatcgagcttttttattttcccatcccagagaagaaggagccgtgcctccagggtgaggcagagagcaaggcctctaagctctttggcaactactcccgggatcagcccatcttcctgcggcttgaggattatttctgggtcaagacgccatctgcttacgagctgccctatgggaccaaggggagtgaggatctgctcctccgggtgctagccatcaccagctcctccatccccaagaacatccagagcctcaggtgccgccgctgtgtggtcgtggggaacgggcaccggctgcggaacagctcactgggagatgccatcaacaagtacgatgtggtcatcagattgaacaatgccccagtggctggctatgagggtgacgtgggctccaagaccaccatgcgtctcttctaccctgaatctgcccacttcgaccccaaagtagaaaacaacccagacacactcctcgtcctggtagctttcaaggcaatggacttccactggattgagaccatcctgagtgataagaagcgggtgcgaaagggtttctggaaacagcctcccctcatctgggatgtcaatcctaaacagattcggattctcaaccccttcttcatggagattgcagctgacaaactgctgagcctgccaatgcaacagccacggaagattaagcagaagcccaccacgggcctgttggccatcacgctggccctccacctctgtgacttggtgcacattgccggctttggctacccagacgcctacaacaagaagcagaccattcactactatgagcagatcacgctcaagtccatggcggggtcaggccataatgtctcccaagaggccctggccattaagcggatgctggagatgggagctatcaagaacctcacgtccttctgacctgggcaagagctgtagcctgtcggttgcctactctgctgtctgggtgacccccatgcgtggctgtgggggtggctggtgccagtatgacccacttggactcaccccctcttggggagggagttctgggcctggccaggtctgagatgaggccatgcccctggctgctcttatggagccgagatccagtcagggtgggggcgctggagccgtgggagcccggccagggcagggggctcgttgctgtggcaccccctctctgccagcaccaagagattatttaatgggctatttaattaaggggtaggaaggtgctgtgggctggtcccacacatccaggaaagaggccagtagagaattctgcccactttttataaaaacttacagcgatggccccaccaaggcctagacacggcactggcctcccaggagggcaggggcattgggaatgggtgggtgccctccagagaggggctgctacctcccagcaggcatgggaagagcactggtgtgggggttccaccgaga

SEQ ID NO: 1616 - DNA, 987 bp, Homo sapiens
  source 1..987: mol_type = genomic DNA; mol_type = genomic DNA
atgtgtcctgcaggctggaagctcctggccatgttggctctggtcctggtcgtcatggtgtggtattccatctcccgggaagacagtttttattttcccatcccagagaagaaggagccgtgcctccagggtgaggcagagagcaaggcctctaagctctttggcaactactcccgggatcagcccatcttcctgcggcttgaggattatttctgggtcaagacgccatctgcttacgagctgccctatgggaccaaggggagtgaggatctgctcctccgggtgctagccatcaccagctcctccatccccaagaacatccagagcctcaggtgccgccgctgtgtggtcgtggggaacgggcaccggctgcggaacagctcactgggagatgccatcaacaagtacgatgtggtcatcagattgaacaatgccccagtggctggctatgagggtgacgtgggctccaagaccaccatgcgtctcttctaccctgaatctgcccacttcgaccccaaagtagaaaacaacccagacacactcctcgtcctggtagctttcaaggcaatggacttccactggattgagaccatcctgagtgataagaagcgggtgcgaaagggtttctggaaacagcctcccctcatctgggatgtcaatcctaaacagattcggattctcaaccccttcttcatggagattgcagctgacaaactgctgagcctgccaatgcaacagccacggaagattaagcagaagcccaccacgggcctgttggccatcacgctggccctccacctctgtgacttggtgcacattgccggctttggctacccagacgcctacaacaagaagcagaccattcactactatgagcagatcacgctcaagtccatggcggggtcaggccataatgtctcccaagaggccctggccattaagcggatgctggagatgggagctatcaagaacctcacgtccttctga

SEQ ID NO: 1617 - DNA, 1201 bp, Homo sapiens
  source 1..1201: mol_type = genomic DNA; mol_type = genomic DNA
atcctgcccttcccagaagcagctctggtgctgaagagagcactgcctccctgtgtgactgggtgagtccatattctctctttgggtctcaattttgccttccctaatgaaggggtaagattggactaggtaagcatcttacaaccatttgtggtcatgagagctggggtggggaaggattgtcacttgacccccccagctctgtttctaagtgctgaaagagctccaggctatgctacgggaggagaagccagctactgaggaaaagccagctactgagaaaaagcgggagtggtttaccattctcctcccccacctttcaccagagaagaggacgttgtcacagataaagagccaggctcaccagctcctgacgcatgcatcatgaccatgagacacaactggacaccagacctcagccctttgtgggtcctgctcctgtgtgcccacgtcgtcactctcctggtcagagccacacctgtctcgcagaccaccacagctgccactgcctcagttagaagcacaaaggacccctgcccctcccagcccccagtgttcccagcagctaagcagtgtccagcattggaagtgacctggccagaggtggaagtgccactgaatggaacgctgagcttatcctgtgtggcctgcagccgcttccccaacttcagcatcctctactggctgggcaatggttccttcattgagcacctcccaggccgactgtgggaggggagcaccagccgggaacgtgggagcacaggtacgcagctgtgcaaggccttggtgctggagcagctgacccctgccctgcacagcaccaacttctcctgtgtgctcgtggaccctgaacaggttgtccagcgtcacgtcgtcctggcccagctctgggctgggctgagggcaaccttgccccccacccaagaagccctgccctccagccacagcagtccacagcagcagggttaagactcagcacagggccagcagcagcacaaccttgaccagagcttgggtcctacctgtctacctggagtgaacagtccctgactgcctgcttcagttccactcccaggaactttgcctgtcccacgagggagtatgggagagagggactgccacacagaagctgaagacaacacctgcttcaggggaacacaggcgcttgaaaaagaaaagagagaacagcccataatgctcc

SEQ ID NO: 1618 - DNA, 2973 bp, Homo sapiens
  source 1..2973: mol_type = genomic DNA; mol_type = genomic DNA
cacaccctggtcggttttgctcacgtgcttcgggtcggttggattcagttcctccatgtggggccgtgggatgtcaccaccctttgccactgtccttgcaggccgggcgcccaggcgtgtggacccgagcccagccttgcgtctttcctcccagttggtaccaggggcctcttgcctccactcatgcagagtggaccagccgcctctgaagcagccccggggagaggagtgccaggcacacagactcaggaagctgggggtgtcagggcaccaggagcctctcaagcggtcctgttggccgtctttctgaagggcagctggggttgcatcatttccccaagtggatcctgccaactttctggggcttctggatgagagccctctccccaccccacccacccctccccgcattgtggcatcagtgctgctgcttccagggagccttcctggccatccaagcctcctctccaggttcctgccctgctgtagtccccaggccagtgcttggcaggtgctcagggaatgtatccaccaaccaaggtttggggtggctgtctctgcctgaccactttccccaggcccctggcgggtacctgagctgtgctctcagggcctcaggaacctccttccatattcagggcctgtgcctggggaggcttcagggtgtagcagctgtgcccatcccaggctgacccacccagcttgcctggtagcccagcctctgggctagtgtgccgtggggcaggggatgtgctgtagcctggtgcagagtccccaaccccagaagggggccatggaagctgacaccccaagtggccgcccccctgctctgtcttgcttcggacactgtggccgggtccaggatcctggcatcctgggaggtctctggctttgtgggcagcctgcctggcccgcacagtctgcctgtcctgagggtgagacacaggtcaagcccacagacccccttgctcccctgctggggcctccaggctcacagaccaccccaccctaccctgtccttgcccaagcaaatgagaggcaggggcttcccgggctgctgctgtcccgccctctgtggggcaggaggaggtgcccacagaggctgggtggtgatagccaggagatgggctggcatctgcattacccaagctctgctgcccatggtggcctttctgggggtgggtgctggtccctgccccctgccccacccctgatgtctgctccagagacaaaggtggggagggtgctgaagaggaagtgtttgcccagggagaggctgcggctcctcctgaaacatcagccctgtgggtcctgtttgcagaatctccggcctgtgaaactgtgaggggattcggccaagacgtcctcttccctctgcctcccacccaggccactcttcacctccaccatgagcctggacatccagagcctggacatccagtgtgaggagctgagcgacgctagatgggccgagctcctccctctgctccagcagtgccaagtggtcaggctggacgactgtggcctcacggaagcacggtgcaaggacatcagctctgcacttcgagtcaaccctgcactggcagagctcaacctgcgcagcaacgagctgggcgatgtcggcgtgcattgcgtgctccagggcctgcagaccccctcctgcaagatccagaagctgagcctccagaactgctgcctgacgggggccggctgcggggtcctgtccagcacactacgcaccctgcccaccctgcaggagctgcacctcagcgacaacctcttgggggatgcgggcctgcagctgctctgcgaaggactcctggacccccagtgccgcctggaaaagctgcagctggagtattgcagcctctcggctgccagctgcgagcccctggcctccgtgctcagggccaagccggacttcaaggagctcacggttagcaacaacgacatcaatgaggctggcgtccgtgtgctgtgccagggcctgaaggactccccctgccagctggaggcgctcaagctggagagctgcggtgtgacatcagacaactgccgggacctgtgcggcattgtggcctccaaggcctcgctgcgggagctggccctgggcagcaacaagctgggtgatgtgggcatggcggagctgtgcccagggctgctccaccccagctccaggctcaggaccctgtggatctgggagtgtggcatcactgccaagggctgcggggatctgtgccgtgtcctcagggccaaggagagcctgaaggagctcagcctggccggcaacgagctgggggatgagggtgcccgactgctgtgtgagaccctgctggaacctggctgccagctggagtcgctgtgggtgaagtcctgcagcttcacagccgcctgctgctcccacttcagctcagtgctggcccagaacaggtttctcctggagctacagataagcaacaacaggctggaggatgcgggcgtgcgggagctgtgccagggcctgggccagcctggctctgtgctgcgggtgctctggttggccgactgcgatgtgagtgacagcagctgcagcagcctcgccgcaaccctgttggccaaccacagcctgcgtgagctggacctcagcaacaactgcctgggggacgccggcatcctgcagctggtggagagcgtccggcagccgggctgcctcctggagcagctggtcctgtacgacatttactggtctgaggagatggaggaccggctgcaggccctggagaaggacaagccatccctgagggtcatctcctgaggctcttcctgctgctgctctccctggacgaccggcctcgaggcaaccctggggcccaccagcccctgccatgctctcaccctgcatatcctaggtttgaagagaaacgctcagatccgcttatttctgccagtatattttggacactttataatcattaaagcactttcttggcagga

SEQ ID NO: 1619 - DNA, 2544 bp, Homo sapiens
  source 1..2544: mol_type = genomic DNA; mol_type = genomic DNA
agatccagtaaggaacagacagtcagtatttaggtgttgagggaaagctgagagaatgaaggctctaaatccccagtggaagcatgatatggcgaagcagagctggtgctgaattgttctctctgatggctctatgggagtggatagcactgagtcttcattgctgggttttagcggttgctgctgtttcggatcagcatgccacaagccccttcgactggctcctctctgataagggacccttccatcgctcacaggaatacacagattttgtggacagaagccggcagggatttagcacaagatacaagatatacaggagaggagtcactcacaatttttgtggacaagcggaagttgagcaaacgagctgaaggaagtgattccaccaccaatagctcttcggtcactctggagacgctacatcagctagccgcttcttatttcattgacagggacagcacccttcggagacttcaccacattcaaattgcatccactgccataaaggtaacagaaacacggactggtcctcttggctgcagtaactatgacaacctagattctgtcagttctgttctggttcagagtcctgagaataagattcagttgcaagggcttcaagtacttctcccagactatcttcaggaacgttttgtacaagcagctttgagctacattgcttgcaattcagagggagagtttatctgcaaggaaaatgactgctggtgtcactgtggtcccaaatttccagaatgcaactgcccctccatggacattcaagccatggaagagaatcttcttcgaataactgaaacctggaaagcttacaacagtgactttgaggaatcagatgaattcaagttatttatgaaaaggctacctatgaattatttcctcaacacatctactataatgcatttgtggacaatggattctaattttcagcgccgttatgaacaactggagaacagcatgaaacaacttttcctaaaggcgcagaaaattgtacacaagctttttagccttagcaagaggtgtcataaacaacccctcatcagcctgccaagacaaagaacctcaacctactggcttactcgcatccagtcttttctctactgcaatgagaacggcctcctaggcagcttttcagaagagacgcactcgtgcacgtgtccgaatgaccaggtggtctgcaccgcgttcctgccctgcacagtgggagacgcctctgcctgcctgacatgcgcaccagacaaccgcacccgctgcggcacctgcaacaccggctacatgctcagccaggggctctgcaagcctgaagtcgccgagtccaccgatcactatattggctttgaaactgacctgcaagatctcgagatgaaatatctgctgcagaaaacggacagacgaatagaagtccatgccatttttatcagcaatgacatgcgcctcaatagctggtttgatccctcctggcgtaagcggatgctcctcaccttgaagagcaataagtacaagtcaagtctggtccatatgattttgggtctctctttacagatttgcttaactaaaaacagcaccttggagccagtgttggctgtttatgtcaatcccttcggaggcagccactctgagagctggtttatgcctgtgaatgaaaacagctttccagactgggagcggactaagttggacctacccctgcagtgttataactggacattaactctggggaacaaatggaagacattttttgagacagtacacatctacctgagaagtcgcatcaagtccaatggtcccaatggtaatgagagcatttactatgaacctctggagtttattgacccttcccggaacctgggctatatgaaaatcaataacattcaagtgtttggctacagcatgcactttgaccctgaagcaattcgggacctgattttgcagctggactacccctatactcagggatcccaggattcagcacttttgcaactactagagatcagagaccgtgtaaataaactctccccacctggtcagcgtcgtctagatcttttctcttgcttgcttcgtcatagactcaagctgtctactagtgaggtggtgaggatccaatctgctctgcaggcgtttaatgccaaattgccaaacacaatggattatgacacgaccaaattatgtagttaaccataaatgtcaagcacaacccaaaatcttgaaggagtttttacagtgcttttgtggaacagtttatgtttggaagagtaaatttaaattgtcttttcaatatctgtcttatatcagtcaataacattggatggcaatttacacacatgaacttgctgacaatgaatatattatacagcagttttggtttatgaatgacataaatactgacaccagtctagaagacattctactttttacaataaatttcatttgtaattttatatgttccgtggcaatgcttttgtgcattacatcctctagagggaacataaaaagataccaataaaattttgtagctgaacagttatt

SEQ ID NO: 1620 - DNA, 939 bp, Homo sapiens
  source 1..939: mol_type = genomic DNA; mol_type = genomic DNA
agttccggctgtttgttcgggaagtggatccgccgctgccggagcagcccgaagggagctgcggatcgcgaggccagtaccgaccccgcccgcccgcgcgcaccgcccccgcccgccatggcccgggactacgaccacctcttcaagctgctcatcatcggcgacagcggtgtgggcaagagcagtttactgttgcgttttgcagacaacactttctcaggcagctacatcaccacgatcggagtggatttcaagatccggaccgtggagatcaacggggagaaggtgaagctgcagatctgggacacagcggggcaggagcgcttccgcaccatcacctccacgtattatcgggggacccacggggtcattgtggtttacgacgtcaccagtgccgagtcctttgtcaacgtcaagcggtggcttcacgaaatcaaccagaactgtgatgatgtgtgccgaatattagatgttcaactgcatcacggagctggtcctccgagcaaagaaagacaacctggcaaaacagcagcagcaacaacagaacgatgtggtgaagctcacgaagaacagtaaacgaaagaaacgctgctgctaatggcacccagtccactgcagagactgcactgcggtccctcccccagcccgaggcccacggaggttcctcgggggacagtctcagtttcgtgccgttatttaaagaattctctccatgtttttgtatcgggaggtgccatcggcacttcctcccccgccctcctcgagtgccaagaaggtgttggaccagcccgcccttccctactggtgccccctcctccccggccaaggcgcctggacctggcgaggacgctgcccgccgagcggactgattcgcagagtctgtacatagtgtatattgctctacccggccgcacaccacgtcctgctctggcttttgcc

SEQ ID NO: 1621 - DNA, 1487 bp, Homo sapiens
  source 1..1487: mol_type = genomic DNA; mol_type = genomic DNA
aacacatcagcttcaaaggcagagagaatcgaaggtgctctccagctttggacacttcctctgcttgaggacaccttgactaacctccaagggcaactaaaggatcaagaaaggcccagcacagcagaagatcagctggatctagctcctgcaggagatgtgtacaaagacaatcccagtcctctggggatgtttcctcctgtggaatctctatgtctcatcctctcagaccatttaccctggaatcaaggtgttcaagctggaatgaagatgattgagcaaatgctaaaagaaaagaaactcccagatttaagcggttctgagtctcttgaatttctaaaagttgattatgtaaactacaatttttcaaatataaaaatcagtgccttttcatttccaaatacctcattggcttttgtgcctggagtgggaatcaaagcgctaaccaaccatggcactgccaacatcagcacagactgggggttcgagtctccacttttctctgtcccattattgcaagtgaagtcaaagcgctaaatgccaacctcagcacactggaggttttaaccaagattgacaactacactctgctggattactccctaatcagttctccagaaattactgagaactaccttgacctgaacttgaagggtgtattctacccactggaaaacctcaccgacccccccttctcaccagttccttttgtgctcccagaacgcagcaactccatgctctacattggaatcgccgagtatttctttaaatctgcgtcctttgctcatttcacagctggggttttcaatgtcactctctccaccgaagagatttccaaccattttgttcaaaactctcaaggccttggcaacgtgctctcccggattgcagagatctacatcttgtcccagcccttcatggtgaggatcatggccacagagcctcccataatcaatctacaaccaggcaatttcaccctggacatccctgcctccatcatgatgctcacccaacccaagaactccacagttgaaaccatcgtttccatggacttcgttgctagtaccagtgttggcctggttattttgggacaaagactggtctgctccttgtctctgaacagattccgccttgctttgccagagtccaatcgcagcaacattgaggtcttgaggtttgaaaatattctatcgtccattcttcactttggagtcctcccactggccaatgcaaaattgcagcaaggatttcctctgtccaatccacacaaattcttattcgtcaattcagatattgaagttcttgagggtttccttttgatttccaccgacctgaagtatgaaacatcctcaaagcagcagccaagtttccacgtatgggaaggtctgaacctgataagcagacagtggagggggaagtcagccccttgattgccggtttgcaattcaccccaggaagtaaatggtccttaatcctacaactactgt

SEQ ID NO: 1622 - DNA, 2906 bp, Homo sapiens
  source 1..2906: mol_type = genomic DNA; mol_type = genomic DNA
agagaacacgcgatgaccacgtggagcctccggcggaggccggcccgcacgctgggactcctgctgctggtcgtcttgggcttcctggtgctccgcaggctggactggagcaccctggtccctctgcggctccgccatcgacagctggggctgcaggccaagggctggaacttcatgctggaggattccaccttctggatcttcgggggctccatccactatttccgtgtgcccagggagtactggagggaccgcctgctgaagatgaaggcctgtggcttgaacaccctcaccacctatgttccgtggaacctgcatgagccagaaagaggcaaatttgacttctctgggaacctggacctggaggccttcgtcctgatggccgcagagatcgggctgtgggtgattctgcgtccaggcccctacatctgcagtgagatggacctcgggggcttgcccagctggctactccaagaccctggcatgaggctgaggacaacttacaagggcttcaccgaagcagtggacctttattttgaccacctgatgtccagggtggtgccactccagtacaagcgtgggggacctatcattgccgtgcaggtggagaatgaatatggttcctataataaagaccccgcatacatgccctacgtcaagaaggcactggaggaccgtggcattgtggaactgctcctgacttcagacaacaaggatgggctgagcaaggggattgtccagggagtcttggccaccatcaacttgcagtcaacacacgagctgcagctactgaccacctttctcttcaacgtccaggggactcagcccaagatggtgatggagtactggacggggtggtttgactcgtggggaggccctcacaatatcttggattcttctgaggttttgaaaaccgtgtctgccattgtggacgccggctcctccatcaacctctacatgttccacggaggcaccaactttggcttcatgaatggagccatgcacttccatgactacaagtcagatgtcaccagctatgactatgatgctgtgctgacagaagccggcgattacacggccaagtacatgaagcttcgagacttcttcggctccatctcaggcatccctctccctcccccacctgaccttcttcccaagatgccgtatgagcccttaacgccagtcttgtacctgtctctgtgggacgccctcaagtacctgggggagccaatcaagtctgaaaagcccatcaacatggagaacctgccagtcaatgggggaaatggacagtccttcgggtacattctctatgagaccagcatcacctcgtctggcatcctcagtggccacgtgcatgatcgggggcaggtgtttgtgaacacagtatccataggattcttggactacaagacaacgaagattgctgtccccctgatccagggttacaccgtgctgaggatcttggtggagaatcgtgggcgagtcaactatggggagaatattgatgaccagcgcaaaggcttaattggaaatctctatctgaatgattcacccctgaaaaacttcagaatctatagcctggatatgaagaagagcttctttcagaggttcggcctggacaaatggagttccctcccagaaacacccacattacctgctttcttcttgggtagcttgtccatcagctccaccccttgtgacacctttctgaagctggagggctgggagaagggggttgtattcatcaatggccagaaccttggacgttactggaacattggaccccagaagacgctttacctcccaggtccctggttgagcagcggaatcaaccaggtcatcgtttttgaggagacgatggcgggccctgcattacagttcacggaaaccccccacctgggcaggaaccagtacattaagtgagcggtggcaccccctcctgctggtgccagtgggagactgccgcctcctcttgacctgaagcctggtggctgctgccccacccctcactgcaaaagcatctccttaagtagcaacctcagggactgggggctacagtctgcccctgtctcagctcaaaaccctaagcctgcagggaaaggtgggatggctctgggcctggctttgttgatgatggctttcctacagccctcagaaaaagtgctgaaacgtgcccttgcactggacgtcacagccctgcgagcatctgctggactcaggcgtgctctttgctggttcctgggaggcttggccacatccctcatggccccattttatccccgaaatcctgggtgtgtcaccagtgtagagggtggggaaggggtgtctcacctgagctgactttgttcttccttcacaaccttctgagccttctttgggattctggaaggaactcggcgtgagaaacatgtgacttcccctttcccttcccactcgctgcttcccacagggtgacaggctgggctggagaaacagaaatcctcaccctgcgtcttcccaagttagcaggtgtctctggtgttcagtgaggaggacatgtgagtcctggcagaagccatggcccatgtctgcacatccagggaggaggacagaaggcccagctcacatgtgagtcctggcagaagccatggcccatgtctgcacatccagggaggaggacagaaggcccagctcacatgtgagtcctggcagaagccatggcccatgtctgcacatccagggaggaggacagaaggcccagctcagtggcccccgccccccaccccccacgcccgaacagcaggggcagagcagccctccttcgaagtgtgtccaagtccgcatttgagccttgttctggggcccagcccaacacctggcttgggctcactgtcctgagttgcagtaaagctataaccttgaatcac

SEQ ID NO: 1623 - DNA, 1598 bp, Homo sapiens
  source 1..1598: mol_type = genomic DNA; mol_type = genomic DNA
tttgtatgggctgcagcctgccgctgagctgcatcatggtgcggtctgtggcctgggcaggtttcatggtcctgctgatgatcccatggggctctgctgcaaaactggtctgctacttcaccaactgggcccagtacagacagggggaggctcgcttcctgcccaaggacttggaccccagcctttgcacccacctcatctacgccttcgctggcatgaccaaccaccagctgagcaccactgagtggaatgacgagactctctaccaggagttcaatggcctgaagaagatgttcacagatatggtagccacggccaacaaccgtcagacctttgtcaactcggccatcaggtttctgcgcaaatacagctttgacggccttgaccttgactgggagtacccaggaagccaggggagccctgccgtagacaaggagcgcttcacaaccctggtacaggacttggccaatgccttccagcaggaagcccagacctcagggaaggaacgccttcttctgagtgcagcggttccagctgggcagacctatgtggatgctggatacgaggtggacaaaatcgcccagaacctggattttgtcaaccttatggcctacgacttccatggctcttgggagaaggtcacgggacataacagccccctctacaagaggcaagaagagagtggtgcagcagccagcctcaacgtggatgctgctgtgcaacagtggctgcagaaggggacccctgccagcaagctgatccttggcatgcctacctacggacgctccttcacactggcctcctcatcagacaccagagtgggggccccagccacagggtctggcactccaggccccttcaccaaggaaggagggatgctggcctactatgaagtctgctcctggaagggggccaccaaacagagaatccaggatcagaaggtgccctacatcttccgggacaaccagtgggtgggctttgatgatgtggagagcttcaaaaccaaggtcagctatctgaagcagaagggactgggcggggccatggtctgggcactggacttagatgactttgccggcttctcctgcaaccagggccgataccccctcatccagacgctacggcaggaactgagtcttccatacttgccttcaggcaccccagagcttgaagttccaaaaccaggtcagccctctgaacctgagcatggccccagccctggacaagacacgttctgccagggcaaagctgatgggctctatcccaatcctcgggaacggtccagcttctacagctgtgcagcggggcggctgttccagcaaagctgcccgacaggcctggtgttcagcaactcctgcaaatgctgcacctggaattgagtcgctaaagcccctccagtcccagctttgaggctgggcccaggatcactctacagcctgcctcctgggttttccctgggggccgcaatctggctcctgcaggcctttctgtggtcttcctttatccaggctttctgctctcagccttgccttccttttttctgggtctcctgggctgcccctttcacttgcaaaataaatctttggtttgtgcccctc

SEQ ID NO: 1624 - DNA, 1472 bp, Homo sapiens
  source 1..1472: mol_type = genomic DNA; mol_type = genomic DNA
ctcactgcggaccctggattgaaacgatctccccgcggccgccgccgctacctggtgcccgcaggtgcctgcaggagtcctggggccagctggcctcgatgtacgtcagcacgcgggaacggtacaagtggctgcgcttcagcgaggactgtctgtacctgaacgtgtacgcgccggcgcgcgcgcccggggatccccagctgccagtgatggtctggttcccgggaggcgccttcatcgtgggcgctgcttcttcgtacgagggctctgacttggccgcccgcgagaaagtggtgctggtgtttctgcagcacaggctcggcatcttcggcttcctgaggtggcggggccgcacggacgacagccacgcgcgcgggaactgggggctgctggaccagatggcggctctgcgctgggtgcaggagaacatcgcagccttcgggggagacccaggaaatgtgaccctgttcggccagtcggcgggggccatgagcatctcaggactgatgatgtcacccctagcctcgggtctcttccatcgggccatttcccagagtggcaccgcgttattcagacttttcatcactagtaacccactgaaagtggccaagaaggttgcccacctggctggatgcaaccacaacagcacacagatcctggtaaactgcctgagggcactatcagggaccaaggtgatgcgtgtgtccaacaagatgagattcctccaactgaacttccagagagacccggaagagattatctggtccatgagccctgtggtggatggtgtggtgatcccagatgaccctttggtgctcctgacccaggggaaggtttcatctgtgccctaccttctaggtgtcaacaacctggaattcaattggctcttgccttatatcatgaagttcccgctaaaccggcaggcgatgagaaaggaaaccatcactaagatgctctggagtacccgcaccctgttgaatatcaccaaggagcaggtaccacttgtggtggaggagtacctggacaatgtcaatgagcatgactggaagatgctacgaaaccgtatgatggacatagttcaagatgccactttcgtgtatgccacactgcagactgctcactaccaccgagaaaccccaatgatgggaatctgccctgctggccacgctacaacaaggatgaaaagtacctgcagctggattttaccacaagagtgggcatgaagctcaaggagaagaagatggctttttggatgagtctgtaccagtctcaaagacctgagaagcagaggcaattctaagggtggctatgcaggaaggagccaaagaggggtttgcccccaccatccaggccctggggagactagccatggacatacctggggacaagagttctacccaccccagtttagaactgcaggagctccctgctgcctccaggccaaagctagagcttttgcctgttgtgtggga

SEQ ID NO: 1625 - DNA, 561 bp, Homo sapiens
  source 1..561: mol_type = genomic DNA; mol_type = genomic DNA
taaagttattcaatctcctgagcctaacagcaatgtagaaacggaactttttgcttttccaaaaggccataagatgttttattgaaagaaactttcaatatcaagtaatccaaccaaccttctaagataagccttttccttcaacacaaagaagtgcattttgccaaatctggaaagcatgaagactgggctttttttcctatgtctcttgggaactgcagctgcaatcccgacaaatgcaagattattatctgatcattccaaaccaactgctgaaacggtagcacctgacaacactgcaatccccagtttaagggctgaagctgaagaaaatgaaaaagaaacagcagtatccacagaagacgattcccaccataaggctgaaaaatcatcagtactaaagtcaaaagaggaaagccatgaacagtcagcagaacagggcaagagttctagccaagagctgggattgaaggatcaagaggacagtgatggtcacttaagtgtgaatttggagtatgcaccaactgaaggtacattggacataaaagaagatatgagtga

SEQ ID NO: 1626 - DNA, 432 bp, Homo sapiens
  source 1..432: mol_type = genomic DNA; mol_type = genomic DNA
gccctctctggtcaccctgcctagctagaggatctgtgaccccagccatgaggaccctcgccatccttgctgccattctcctggtggccctgcaggcccaggctgagccactccaggcaagagctgatgaggttgctgcagccccggagcagattgcagcggacatcccagaagtggttgtttcccttgcatgggacgaaagcttggctccaaagcatccaggctcaaggaaaaacatggcctgctattgcagaataccagcgtgcattgcaggagaacgtcgctatggaacctgcatctaccagggaagactctgggcattctgctgctgagcttgcagaaaaagaaaaatgagctcaaaatttgctttgagagctacagggaattgctattactcctgtaccttctgctcaatttcctttcctcatccca

SEQ ID NO: 1627 - DNA, 2028 bp, Homo sapiens
  source 1..2028: mol_type = genomic DNA; mol_type = genomic DNA
cacctttgggcccagggtgaccggatcctgggtcccaaggagagaagccccaggtccccgacccttcctgctcttcctgcccggccttggaagccaggcccatctctctggggtccgtctgtcgcgtggcagagaggctgggtgtggatggtgacccagagcaccggggtgggggtgagtgtccgaggagtacccaggtccagaggcccctcttgcggggaaggtgacccatagcccctggcgcgggcaggcagctggcacaggataaggccagaggggcagcagggagaaccggccgggcgagttgtcagcagaatccagggctgggccctgggcaccactggctccaggctttcccgaggccccaggcggggtagcctcacctgggggccacctgactctgctagaggaccccagggtgctgccccatgccaggccccagggacatgagccaggatctggagccggaagcctcagctagctgcagcccctacctctgggtagggtctctgagggagggcctcctccttcctcctgtcctccaaccagactcggcccatgtccaaggaatctgtccaggccagcaaaggtggggatggggccagccccaagggatggatgaggcactcatggaagcagatggcacagtgaggcagcaatggctgcactgagccgggcactgggtccactcagaaccccagctcctcctctgtggattgggctcttcctagtagccacaggaagtcaacaaagcctggcccagcccttgccaggaaacaccacagaggccacaccacgaagtctgagggcctccgggtccttgtgtggaccccatgctaaagcaccatacctgtgcgaggccacccatgaacctgctgcagccaggattcgtgcccaagtccccgacacgcgctggagcagggttgggggtcagcggttctacagccgtgtcctgagccccctgcaccgtggaccctcagggcacactgaggcctctgctcagaggtcccacatggggaagctgaaggagccgcagcctcaggaccacaagccagggttaggtgcttcctaacctctgtgcttcagagagggccgggagtggtggctcatgcctgtaatcccagcacattgggaggctgaggagggaggattgcttgagcccaggagttcgagaccagccagaaaaacaaggtgaaaccacgtctctgcaaaaaatacaaaaattagccaggtgtggtggtgcacgcctgtggtctcagctactctggaggctgaggcagaaggattgcttgagcccaggaggtcgaggctgcagtgagctatgattacaccactgcactccagcctgggcgatagagtgagaccctgtctcaaaaataaaaatacaaaaatataattcacataccatacaatttcccttcaaggccaggcgcggtggctcatgcctgaaatcccagcactttgggaggccaagaagggaggatcacttaagcccaggagttcaagaccagccagaaaaacaaggtgaagccacgtctatgcaagaaatacaaaaattagccgagtgtgatggtgcacacctgtggtcccagctactctggaggctgaggtggaagtattgcttgagcccaggaggtcgaggctgccgtgagctatgattgcaccactgcactccagcctgggtgacagagtgagaccctttctcagaaatgaaaataaatgtaattcacacaccatataattgctcttcaaagccaggtgcggcagctcatgcctgtaatgctcccagcattttgggaggccaaggcaggtggatcacgaggtcaagagattgagaccatcctggccaacatggtgactagtaaaaatacaaaaattagctgggcgtggtggtgcacgcctatagtcccagctactcaggaagctgtagcaggagaatcacttaaacctggggggaggtgaaggttgcagtaagccgagatggtgccactgcactccagcctgggcaacagggcaagactccatgtc

SEQ ID NO: 1628 - DNA, 574 bp, Homo sapiens
  source 1..574: mol_type = genomic DNA; mol_type = genomic DNA
ctaatttacattttcatcaacagtgtacgagggttctccgttttctgcactcttgccagcatccgttttttcctgtctttttgataaaaaccactttaactgggggccttctgctgaagggccacagaggaacaccaggctgggatggattcagggcaagcaagtcactgtgctgggaagccctgtgcctgtgaacgtgttcctcggagtcccctttgctgctcccccgctgggatccctgcgatttacgaacccgcagcctgcatcgccctgggataacttgcgagaagccacctcctaccctaatttgtgcctccagaactcagagtggctgctcttagatcaacatatgctcaaggtgcattacccgaaattcggagtgtcagaagactgcctctacctgaacatctatgcgcctgcccacgccgatacaggctccaagctccccgtcttggtgtggttcccaggaggtgccttcaagactggctcagcctccatctttgatgggtccgccctggctgcctatgaggacgtgctggttgtggtcgtccagtaccggctaggaatatttggt

SEQ ID NO: 1629 - DNA, 1891 bp, Homo sapiens
  source 1..1891: mol_type = genomic DNA; mol_type = genomic DNA
agtttcaccagaaaccagggggagaaggcggccgagccccagctctccgagcaccgggtcggaagccgcgacccgagccgcgcaggaagctgggaccggaacctcggcggacccggccccacccaactcacctgcgcaggtcaccagcaccctcggaacccagaggcccgcgctctgaaggtgacccccctggggaggaaggcgatggcccctgcgaggacgatggcccgcgcccgcctcgccccggccgactgcctgaacagctttaccgccggggtgcctggcttcgtgctggacaccaacgcctcggtcagcaacggagctaccttcctggagtcccccaccgtgcgccggggctgggactgcgtgcgcgcctgctgcaccacccagaactgcaacttggcgctagtggagctgcagcccgaccgcggggaggacgccatcgccgcctgcttcctcatcaactgcctctacgagcagaacttcgtgtgcaagttcgcgcccagggagggcttcatcaactacctcacgagggaagtgtaccgctcctaccgccagctgcggacccagggctttggagggtctgggatccccaaggcctgggcaggcatagacttgaaggtacaaccccaggaacccctggtgctgaaggatgtggaaaacacagattggcgcctactgcggggtgacacggatgtcagggtagagaggaaagacccaaaccaggtggaactgtggggactcaaggaaggcacctacctgttccagctgacagtgactagctcagaccacccagaggacacggccaacgtcacagtcactgtgctgtccaccaagcagacagaagactactgcctcgcatccaacaaggtgggtcgctgccggggctctttcccacgctggtactatgaccccacggagcagatctgcaagagtttcgtttatggaggctgcttgggcaacaagaacaactaccttcgggaagaagagtgcattctagcctgtcggggtgtgcaaggtgggcctttgagaggcagctctggggctcaggcgactttcccccagggcccctccatggaaaggcgccatccagtgtgctctggcacctgtcagcccacccagttccgctgcagcaatggctgctgcatcgacagtttcctggagtgtgacgacacccccaactgccccgacgcctccgacgaggctgcctgtgaaaaatacacgagtggctttgacgagctccagcgcatccatttccccagtgacaaagggcactgcgtggacctgccagacacaggactctgcaaggagagcatcccgcgctggtactacaaccccttcagcgaacactgcgcccgctttacctatggtggttgttacggcaacaagaacaactttgaggaagagcagcagtgcctcgagtcttgtcgcggcatctccaagaaggatgtgtttggcctgaggcgggaaatccccattcccagcacaggctctgtggagatggctgtcgcagtgttcctggtcatctgcattgtggtggtggtagccatcttgggttactgcttcttcaagaaccagagaaaggacttccacggacaccaccaccacccaccacccacccctgccagctccactgtctccactaccgaggacacggagcacctggtctataaccacaccacgcggcccctctgagcctgggtctcaccggctctcacctggccctgcttcctgcttgccaaggcagaggcctgggctgggaaaaactttggaaccagactcttgcctgtttcccaggcccactgtgcctcagagaccagggctccagcccctcttggagaagtctcagctaagctcacgtcctgagaaagctcaaaggtttggaaggagc

SEQ ID NO: 1630 - DNA, 911 bp, Homo sapiens
  source 1..911: mol_type = genomic DNA; mol_type = genomic DNA
gtcacgtggggctgcgcccaaggctgccgggagcagactgggctgcgggcggcggggccggcgcctgcctggagggatggggctgccgggcgcgtaggggccatgccgcccgggacccgggcctgccgcgttccgcgccccggccgccgcgccccacgtccgcgccgggatggtgaacctggcggccatggtgtggcgccggcttctgcggaagaggtgggtgctcgccctggtcttcgggctgtcgctcgtctacttcctcagcagcaccttcaagcaggctacgtttgcgagaggaaggatttgctggtaaatggctgctgtaatgtcaacgtccctagcacgaagcagtactgctgtgatggctgctggcccaacggctgctgcagcgcctatgagtactgtgtctcctgctgcctgcagcccaacaagcaacttctcctggagcgcttcctcaaccgggcagccgtggcattccagaacctcttcatggcagtcgaagatcactttgagttgtgcctggccaaatgcaggacctcatctcagagcgtgcagcatgagaacacctaccgggaccccatagcaaagtattgctatggagaaagcccgcccgagctcttccccgcttgacgggtgcagcggacttgctccagcctgggtgaggaggccccgctgaagaactcgcctcctgggacccagcttcagccatcgggccaggctgcaggaagaagacaaaggcagcgtgaggaaaccttggctttgaccccttctcgtgttgtcatctttggcttcgctcaccacccgggcttaccagatggaactcttctgtaaagcagcttggcccctccagccagtcccattcgggaaagatgaaaccggaggccgggctcacggtggtggtggagttcttg

SEQ ID NO: 1631 - DNA, 2077 bp, Homo sapiens
  source 1..2077: mol_type = genomic DNA; mol_type = genomic DNA
agcccagcgctcctccccgcaaatgatcccgccccaggggcctatcccagtccccccagtgcctttggttgctggagggaagaacacaatggatctggtgctaaaaagatgccttcttcatttggctgtgataggtgctttgctggctgtgggggctacaaaagtacccagaaaccaggactggcttggtgtctcaaggcaactcagaaccaaagcctggaacaggcagctgtatccagagtggacagaagcccagagacttgactgctggagaggtggtcaagtgtccctcaaggtcagtaatgatgggcctacactgattggtgcaaatgcctccttctctattgccttgaacttccctggaagccaaaaggtattgccagatgggcaggttatctgggtcaacaataccatcatcaatggtgaccaggtgtggggaggacagccagtgtatccccaggaaactgacgatgcctgcatcttccctgatggtggaccttgcccatctggctcttggtctcagaagagaagctttgtttatgtctggaagacctggggccaatactggcaagttctagggggcccagtgtctgggctgagcattgggacaggcagggcaatgctgggcacacacaccatggaagtgactgtctaccatcgccggggatcccggagctatgtgcctcttgctcattccagctcagccttcaccattactgaccaggtgcctttctccgtgagcgtgtcccagttgcgggccttggatggagggaacaagcacttcctgagaaatcagcctctgacctttgccctccagctccatgaccccagtggctatctggctgaagctgacctctcctacacctgggactttggagacagtagtggaaccctgatctctcgggcacttgtggtcactcatacttacctggagcctggcccagtcactgcccaggtggtcctgcaggctgccattcctctcacctcctgtggctcctccccagttccaggcaccacagatgggcacaggccaactgcagaggcccctaacaccacagctggccaagtgcctactacagaagttgtgggtactacacctggtcaggcgccaactgcagagccctctggaaccacatctgtgcaggtgccaaccactgaagtcataagcactgcacctgtgcagatgccaactgcagagagcacagctgcacaggtaacaactacagagtgggtggagaccacagctagagagctacctatccctgagcctgaaggtccagatgccagctcaatcatgtctacggaaagtattacaggttccctgggccccctgctggatggtacagccaccttaaggctggtgaagagacaagtccccctggattgtgttctgtatcgatatggttccttttccgtcaccctggacattgtccagggtattgaaagtgccgagatcctgcaggctgtgccgtccggtgagggggatgcatttgagctgactgtgtcctgccaaggcgggctgcccaaggaagcctgcatggagatctcatcgccagggtgccagccccctgcccagcggctgtgccagcctgtgctacccagcccagcctgccagctggttctgcaccagatactgaagggtggctcggggacatactgcctcaatgtgtctctggctgataccaacagcctggcagtggtcagcacccagcttatcatgcctgtgcctgggattcttctcacaggtcaagaagcaggccttgggcaggttccgctgatcgtgggcatcttgctggtgttgatggctgtggtccttgcatctctgatatataggcgcagacttatgaagcaagacttctccgtaccccagttgccacatagcagcagtcactggctgcgtctaccccgcatcttctgctcttgtcccattggtgagaacagccccctcctcagtgggcagcaggtctgagtactctcatatgatgctgtgattttcctggagttgacagaaacacctatatttcccccagtcttccctgggagactactattaactgaaataaatactcagagcctg

SEQ ID NO: 1632 - DNA, 3301 bp, Homo sapiens
  source 1..3301: mol_type = genomic DNA; mol_type = genomic DNA
attgttatcttaagacactcatctggtgtctgagtctgcaggtgacactgcttaggtacggagcgcggagtcggagcggggacgcgccgggctgcagctctgggatgcaatccgcctgcctcgcaagctgctcgccgctgcgctggcagcgcttacgctgagctcggaggatcccattaggacttgcccggggatgtgcacctgccgtgcgctccgaggtcagtggcaggtctgcaggcagccgagggagcggtgaagccggaagacctgtctctgcccatgtgcaaggcagtgatttcggctccgagccctggaggagcagcacggagcgggagagcgtggcgagagaatgaagaaaccaatcgcccgggagaagcatgaggtggcagtgtggcactcggtttagagggcttcggccggcggtggccccatggacagccctgctggcactgggcctgcctggctgggtgttggctgtctcagccacggcggctgctgtggtccccgagcagcatgcctccgtagctggccagcatcccctggactggctgctcacagaccggggccccttccaccgcgctcaggagtatgctgacttcatggagcggtaccgccagggtttcaccaccaggtacaggatttataggcttttcccccagggagtttgcccgttggaaggtgaacaacttggctctggaaaggaaggacttcttcagtttgccattgcctcttgccccagagtttatccggaacattcgcctccttggaaggagacccaatctgcaacaggttacagaaaatctgattaaaaagtacggcactcatttcttactttctgccacccttggaggagaagagtccctgaccatttttgtggacaagcagaaactgggaagaaagacagagacaacaggaggtgcctctataatcgggggcagtgggaacagcacagctgtgtccctggagaccctgcaccagctggccgcctcctacttcatcgacagagagagcacgctgcgacggctgcaccatatccagatagccacgggggccatcaaggtcaccgagaccaggaccggtcctctgggctgcagcaactatgacaatctggactcagtcagttctgtcttggtacagagtccagagaacaaagtacagttacttggtctcacagtgtcgctactggggagcctcctgcagatctgacctcgaacgtggcccagactgcatccaaaggcatgcctaccctttgttcatcctttggccttcaggtgctgctgcctgagtatctgcgtgagcgctttgtagctgcagcactcagctacatcacatgcagctctgagggtgagctcgtctgcaaggagaatgactgctggtgcaagtgcagccccaccttccctgaatgcaactgccctgatgctgacatccaggccatggaggacagcctgctgcagatccaggactcctgggccactcacaaccggcagtttgaagagtcagaagagttccaggccctgctgaaaaggctgcccgatgaccggttcctgaactccacagctatctcccagttctgggccatggacaccagccttcagcaccgctaccagcagctgggagctggcttgaaagtgctgttcaaaaagacccatcggatcctacgccggctcttcaacctctgcaagcgctgccatcgccagcctcgcttccgcctgcccaaggagagctccccaaggtccttgtcctactggtggaaccgaatccagtccctcctctactgtggggaaagcacctttcctggcactttcctggaacagagccacagctgcacctgcccctatgaccaatcttcctgccagggccccatcccatgtgccttgggcgaagggcccgcgtgtgcccactgtgctccagacaatagcacacgctgtgggagctgcaacccgggctatgtgctggcccaggggctgtgccggccagaggtggccgagtccctggaaaactttcttgggctggagacagacttgcaggacctggagctaaagtacctgctgcagaagcaggatagccgcattgaggtacactccatcttcatcagcaatgacatgcggctgggcagctggtttgacccttcctggaggaagcgcatgctgctcaccctgaagagcaacaagtacaagcctgggctggtgcacgtgatgttggccttgtccttgcagatctgtctcaccaagaacagcaccctggagcctgtcatggccatctacgtcaacccctttgggggcagccactctgagagctggttcatgcctgtgaatgagggcagctttcctgactgggaaaggactaacgtggatgcagctgcccagtgccaaaactggactatcaccttggggaataggtggaagactttctttgagacagttcatgtttacctacggagccgaatcaagtccctggatgacagctccaatgagacaatctactatgagcccctggagatgactgatccctctaagaatttgggttacatgaaaattaacaccttgcaggtctttggctacagcctgccctttgacccagatgctatccgggacttaattctccagttggactacccatatactcaaggttcccaggactctgcactcttgcagctcattgagctcagggaccgggtgaaccagctttctccacctggcaaagtccgacttgaccttttctcctgcttgctccggcatcggcttaagctggccaacaatgaggtgggcaggatccagtcctccctgagggctttcaattctaagctgccaaaccctgtggaatatgagaccggcaaactctgtagctaatgggcggcccacttcagcactgggcaaggaggggatccatgaatctggggtacaaagataatctaagccctcaccttagtgccaacagggtgtgctcccacgagactttcagcatccagtagatgggacctcgaggctcgagctgaagcaggcgagagagaaacagctactgcgtgcgtgcgcgcacgcatacacacacacacacacacactggcacagggaggctacaactaagcagcctcagatctgtaaagttgattggtgctttctaaaatgaatgcaattgaaagaaaggagccaaggaagagattaagaaaaagaaccagctgaaccatgaaacaaacaaaaatcctaaaagtgattcttgtcattcaagaaagcaagaggggacaacaatgggaggggtcggagctcttccttcccctctgtggagtcacttttgtattcttttt

SEQ ID NO: 1633 - DNA, 2801 bp, Homo sapiens
  source 1..2801: mol_type = genomic DNA; mol_type = genomic DNA
tcagactcagattagtcctaaagaagggtggcaggtgtacagctcagctcaggatcctgatgggcggtgcatttgcacagttgttgctccagaacaaaacctgtgttcccgggatgccaaaagcaggcaacttcgccaactactggaaaaggttcagaacatgtcccagtctattgaagtcttaaacttgagaactcagagagatttccaatatgttttaaaaatggaaacccaaatgaaagggctgaaggcaaaatttcggcagattgaagatgatcgaaagacacttatgaccaagcattttcaggagttgaaagagaaaatggacgagctcctgcctttgatccccgtgctggaacagtacaaaacagatgctaagttaatcacccagttcaaggaggaaataaggaatctgtctgctgtcctcactggtattcaggaggaaattggtgcctatgactacgaggaactacaccaaagagtgctgagcttggaaacaagacttcgtgactgcatgaaaaagctaattgatttaaaaaagagaaaagaagaagaaaaaaggcaacagaaaggagaagcataagcaatagtattttgggaagctataacacgcgacttgcctccctgttcacctttgtattctcagcacctagaatagttctggtacaaaataagttcacagtaaatggttgtcaaatgaataaattaattattatatctttaaatagtaactattgtttttaccctctaacatatttcagagaaatgcttagtgctacaagaaagtaaagtttgctttctaaggtatgattgactggagtaagaatcaattttcctcacaaaaccaggtacaaaataaaagagtcaactagccaaaagaccactttaccatggtcacccaatgtttagtttaagagccagaagcttttaacctccggtacaaattctgtcctaagttttggccgaaacaacctaagactcagcagtatccctttgccatagagatgcaaggctggattagattcaagcaccatcgaagccaaagacaccccaagccagtgatgtgctgtgggttgtttggaaatgtcgattagataaggctcatggtatgattcagagctccaaggacagttcttgttcaggtttcaactaatcaacatcggattatgcacacctcaacatctgaaatatgcagacatttgagacaaataccagaattgtgtcttcttgctttgtacaaatcatgcttcagtctggcaataagcatgtggcaaactgatgaaaatcacaggcccagttacagtcaagacatctggaacccgatttggtgcttggatgacagaccctttagcatctgagaaaaacaacagagtctggtacatggacagttatactaacaataaaattgttcgtgaatacaaatcaattgcagactttgtcagtggggctgaatcaaggacatacaaccttcctttcaagtgggcaggaactaaccatgttgtctacaatggctcactctattttaacaagtatcagagtaatatcatcatcaaatacagctttgatatggggagagtgcttgcccaacgaagcctggagtatgctggttttcataatgtttacccctacacatggggtggattctctgacatcgacctaatggctgatgaaatcgggctgtgggctgtgtatgcaactaaccagaatgcaggcaatattgtcatcagccaacttaaccaagataccttggaggtgatgaagagctggagcactggctaccccaagagaagtgcaggggaatctttcatgatctgtgggacactgtatgtcaccaactcccacttaactggagccaaggtgtattattcctattccaccaaaacctccacatatgagtacacagacattcccttccataaccaatactttcacatatccatgcttgactacaatgcaagagatcgagctctctatgcctggaacaatggccaccaggtgctgttcaatgtcacccttttccatatcatcaagacagaggatgacacataggcaaatgtgacatgttttcattgatttaaacagtgtgatttgtgataaactctataagaccccttccgtttttttcttcactattatttttcatcatttctccaaagcaaagcatttttattgtaaagttggtgtttcaaaaacatagctgagcttgtctaacttaccatgttggaaacacatcttaacttctaaatttacaaggcctatcatgtccttgtcatgaaaagcactaaaaaaaaaaagagtttaagtggctaaagtcatagttttgcaagagattaatgatctgccttatattagagtcagagactaatggtggcttaaatgcacgaatgtctttttttttaaaactgtcattttttactgtcttttgctccatatcaggaaatattttggtaggaattaggagaacaaaaagcacttttatcccatttatttctttaaaaaatgtaaggatttcatttatattgaaaaataatattaatcattttgctgttaacacaattctctgatgcggtgctgtacagtcatttttaaatctcttgctaacattttattggcagtatgtatttctaccattgtaaccaccattgtgctattgtatctcttcacttctgtgaaagtaatattttttataaaatacactgaaatttaacctcagtaattgagtccattttcaagtgtggtcaagaataatcttcttggcttacccctttacataagcattataaactaaaatgaaaaccaaa

SEQ ID NO: 1634 - DNA, 2235 bp, Homo sapiens
  source 1..2235: mol_type = genomic DNA; mol_type = genomic DNA
cagatctgccggattatgataggagaccgttgggttttggctcctgccatgaagaactgtactcaagtcgcccttatggagcccttgattcaggcttcaatagtgtggacagtggtgataagagatggtcagggaatgaacctacagatgaattttcagatctgcctcttcgagtagcagagattactaaagaacaaagactacgaagagaaagccagtaccaagagaaccgcggcagtttggtagtaacaaacggcggagtggaacatgatctggatcagattgactacatagacagctgcaccgcagaggaagaggaggccgaggtgagacagcccaagggaccagacccagacagccttagttcacagtttatggcgtatattgaacagcggcgaatctctcatgagggttcaccagtaaagccagtagccattagggagtttcaaaaaacagaagatatgagaagatatttacatcaaaacagggttccagctgagccatcttccctcctgtcactatcagcaagtcacaatcagctgtcacacacagacctggaacttcatcagagaagggagcagttagtagagcgcactcggagagaggctcagcttgctgccctgcagtatgaggaggagaaaataaggaccaagcagatccagagagatgctgtcctggactttgtcaaacaaaaagcatcacaaagtccacaaaaacagcacccgctcctagatggcgtagatggtgagtgccccttcccatccagaaggtctcagcacactgatgatagtgccttgtgcatgtcgctgtcagggttgaatcaagtgggctgtgctgctaccctgcctcattcttctgccttcacgcctcttaagagtgatgacagacctaatgctctattaagttcacctgcaacagaaacagttcatcattcccctgcatattcttttcctgctgctatccagagaaatcagcctcagcgccctgaaagcttccttttccgagcaggtgtcagggcagaaaccaacaaaggtcatgcttcaccccttcctccatctgctgcacctaccactgattctacagattccataacaggacagaattcaagacagagagaagaagagctggaattaatagaccaactgcgtaaacatattgagtaccggttgaaagtgtctctaccttgtgatctcggagcagctctaactgacggtgttgttctttgccatttggccaatcatgtgcgacctcgatctgtcccaagcattcatgttccctcaccagctgtacctaaattaacaatggcgaaatgcaggcgaaatgtggaaaatttcctagaagcttgcagaaaaattggtgtacctcaggagcaattatgtttgcctctccacattttagaagagaaaggtttgagccaggttgcagtgacggtccaggctctcctggaacttgccccacccaagcaacagcagcaccagttatctgctgtttgaggatccccaggacggtgggcactggcctggccaaaacaaggaacaggacaccgtgattgctgctgccagctgtctgcttaaacaaagctcttgtgtgttctcagaagggaccgttcccatgattcctaacaggaatattttgcttcatttctccattttaggggaggttatttccatttccattgaatttttttacgaagacaccattggttttctcagatgaaacttctcttactgaaaacccagcacctaacttggctgtgttttcctggagagcaggcgtgtttcacgtgccagaaagcacatcttctgtgttaggcacaagcatgctgtgccattgtttttacctggtctcaagacaactggtctgctggtttctaaacttggttgttcattagactctcctggagtatttgttaaaatacagattcacattcagtagagctggggtaaggcctaggaatctgcattttcaacaaccattgcaccccagcctgggcaacaaaagcgaaattccatctcaaaaaaagaaaacgcgccccatctcgctccaccacaagcgcctttatatactcaatgatgggtggaggaaaagggcccaagggctcacaccgcacaggagcctttactcaagtttcagctagttttccttcccctgcattttgaactccttttagttgttggtgatatcctttggtgttcactgcctttgtaaaacaagtaaataaagtaagcggaagat

SEQ ID NO: 1635 - DNA, 2604 bp, Homo sapiens
  source 1..2604: mol_type = genomic DNA; mol_type = genomic DNA
atcgccccctttcccctcccatctcccggccgtggtgcggcgcagctctctccccctccgcagtctcagtggcgagctctgggtgctgtggcccggccttggcggggcggcctccggctcaggctggctgagaggctcccagctgcagcgtccccgcccgcctcctcgggagctctgatctcagctgacagtgccctcggggaccaaacaagcctggcagggtctcactttgttgcccaggctggagttcagtgccatgatcatggtttactgcagccttgacctcctgggttcaagcgatcctgctgagtagctgggactacaggacaaaattagaagatcaaaatggaaaatatgctgctttggttgatatttttcacccctgggtggaccctcattgatggatctgaaatggaatgggattttatgtggcacttgagaaaggtaccccggattgtcagtgaaaggactttccatctcaccagccccgcatttgaggcagatgctaagatgatggtaaatacagtgtgtggcatcgaatgccagaaagaactcccaactcccagcctttctgaattggaggattatctttcctatgagactgtctttgagaatggcacccgaaccttaaccagggtgaaagttcaagatttggttcttgagccgactcaaaatatcaccacaaagggagtatctgttaggagaaagagacaggtgtatggcaccgacagcaggttcagcatcttggacaaaaggttcttaaccaatttccctttcagcacagctgtgaagctttccacgggctgtagtggcattctcatttcccctcagcatgttctaactgctgcccactgtgttcatgatggaaaggactatgtcaaagggagtaaaaagctaagggtagggttgttgaagatgaggaataaaagtggaggcaagaaacgtcgaggttctaagaggagcaggagagaagctagtggtggtgaccaaagagagggtaccagagagcatctgcgggagagagcgaagggtgggagaagaagaaaaaaatctggccggggtcagaggattgccgaagggaggccttcctttcagtggacccgggtcaagaatacccacattccgaagggctgggcacgaggaggcatgggggacgctaccttggactatgactatgctcttctggagctgaagcgtgctcacaaaaagaaatacatggaacttggaatcagcccaacgatcaagaaaatgcctggtggaatgatccacttctcaggatttgataacgatagggctgatcagttggtctatcggttttgcagtgtgtccgacgaatccaatgatctcctttaccaatactgcgatgctgagtcgggctccaccggttcgggggtctatctgcgtctgaaagatccagacaaaaagaattggaagcgcaaaatcattgcggtctactcagggcaccagtgggtggatgtccacggggttcagaaggactacaacgttgctgttcgcatcactcccctaaaatacgcccagatttgcctctggattcacgggaacgatgccaattgtgcttacggctaacagagacctgaaacagggcggtgtatcatctaaatcacagagaaaaccagctctgcttaccgtagtgagatcacttcataggttatgcctggacttgaactctgtcaatagcatttcaacatttttcaaaatcaggagattttcgtccatttaaaaaatgtataggtgcagatattgaaactaggtgggcacttcaatgccaagtatatactcttctttacatggtgatgagtttcatttgtagaaaaattttgttgccttcttaaaaattagacacactttaaaccttcaaacaggtattataaataacatgtgactccttaatggacttattctcagggtcctactctaagaagaatctaataggatgctggttgtgtattaaatgtgaaattgcatagataaaggtagatggtaaagcaattagtatcagaatagagacagaaagttacaacacagtttgtactactctgagatggatccattcagctcatgccctcaatgtttatattgtgttatctgttgggtctgggacatttagtttagtttttttgaagaattacaaatcagaagaaaaagcaagcattataaacaaaactaataactgttttactgctttaagaaataacaattacaatgtgtattatttaaaaatgggagaaatagtttgttctatgaaataaacctagtttagaaatagggaagctgagacattttaagatctcaagtttttatttaactaatactcaaaatatggacttttcatgtatgcatagggaagacacttcacaaattatgaatgatcatgtgttgaaagccacattattttatgctatacattctatgtatgaggtgctacatttttaggacaaagaattctgtaatctttttcaagaaagagtctttttctccttgacaaaatccagcttttgtatgaggactatagggtgaattctctgattagtaattttagatatgtcctttcctaaaaatgaataaaatttatgaatatgactt

SEQ ID NO: 1636 - DNA, 2541 bp, Homo sapiens
  source 1..2541: mol_type = genomic DNA; mol_type = genomic DNA
atgtttaagtgctggtcagttgtcttggttctcggattcatttttctggagtcggaaggaaggccaaccaaagaaggaggatatggccttaaatcctatcagcctctaatgagattgcgacataaggaaaaaaatcaagaaagttcaagagtcaaaggatttatgattcaggatggcccttttggatcttgtgaaaataagtactgtggtttgggaagacactgtgttaccagcagagagacagggcaagcagaatgtgcctgtatggacctttgcaaacgtcactacaaacctgtgtgtggatctgacggagaattctatgaaaaccactgtgaagtgcacagagctgcttgcctgaaaaaacaaaagattaccattgttcacaatgaagactgcttctttaaaggagataagtgcaagactactgaatacagcaagatgaaaaatatgctattagatttacaaaatcaaaaatatattatgcaagaaaatgaaaatcctaatggcgacgacatatctcggaagaagctattggtggatcaaatgtttaaatattttgatgcagacagtaatggacttgtagatattaatgaactaactcaggtgataaaacaggaagaacttggcaaggatctctttgattgtactttgtatgttctattgaaatatgatgattttaatgctgacaagcacctggctcttgaagaattttatagagcattccaagtgatccagttgagtctgccagaagatcagaaactaagcatcactgcagcaactgtgggacaaagtgctgttctgagctgtgccattcaaggaaccctgagacctcccattatctggaaaaggaacaatattattctaaataatttagatttggaagacatcaatgactttggagatgatgggtccttgtatattactaaggttaccacaactcacgttggcaattacacctgctatgcagatggctatgaacaagtctatcagactcacatcttccaagtgaatgttcctccagtcatccgggtgtatccagagagtcaggctagagagcctggggtaactgccagtcttaggtgccatgcagagggcataccaaagcctcagcttggctggttgaagaatggaattgatattacaccaaagctttccaaacaactcacgcttcaagcaaatggcagtgaggttcacataagcaatgtgcgctatgaagatactggagcatacacttgtatcgcaaagaatgaagcaggagtggatgaagacatctcttctctttttgtggaagactctgctagaaagaccctagctaacatattatggagagaagaaggtctgggaattgggaacatgttctatgttttttatgaagatggaatcaaagtgatacaacccatagaatgtgaatttcagaggcacattaagcctagtgaaaagctccttggatttcaggatgaagtctgtcccaaagctgagggagatgaagttcagaggtgtgtgtgggcatcagctgttaatgtcaaagacaagttcatttatgttgcacagccaactttggacagagtccttattgttgatgtgcagtcccaaaaagttgttcaggcagtgagcacagaccctgtcccagttaaattacactatgacaaatcacatgatcaggtctgggtgctaagctggggtaccttggagaagacatcaccaacactacaggtaattaccctggccagtgggaatgtgcctcaccacacgatccacacccaaccagtgggaaagcaatttgacagagtggatgattttttcattcccaccacaacactcattatcacccatatgaggtttggatttattcttcataaagatgaagctgcactacaaaaaattgatcttgaaaccatgtcatacatcaagacaattaacttgaaggactataagtgcgttcctcagtcattggcatatacacacttgggaggctactacttcattggctgcaaacctgacagcaccggagcagtttccccacaggtcatggtggacggtgtaactgactcagtcattgggttcaatagtgatgtgacgggcactccatatgtctctccagatggccactaccttgtcagcattaatgatgtgaaaggtcttgtaagggttcagtacattaccatcagaggagaaatacaggaggcttttgatatttacacaaatctgcacatatctgatctggcatttcaaccatcctttactgaagcccaccaatataacatctacggtagttcaagcacacaaactgatgtgctctttgtggagctctcttctgggaaggtcaagatgataaagagtctcaaggaaccactcaaggcagaagaatggccttggaaccggaaaaacaggcaaatccaggacagtggcttgtttggtcaatacctgatgacaccttccaaggactctctcttcatcctagatggacgactcaataaattaaactgtgagatcactgaagttgaaaaaggaaatacagtcatttgggttggagatgcctaa

SEQ ID NO: 1637 - DNA, 718 bp, Homo sapiens
  source 1..718: mol_type = genomic DNA; mol_type = genomic DNA
gagctgaggagggggcttcggagcgggactgggacggcggcgcgatgctgggcgtcctggagctgctgctgctgggggctgcgtggctggcgggcccggcccgcgggcagaatgagacggagcccatcgtgctggagggcaagtgcctggtggtgtgcgactccaaccccacgtccgaccccacgggcactgccctgggcatctctgtgcgctctggcagcgccaaggtggctttctctgccatcaggagcaccaaccacgagccgtccgagatgagtaatcgcaccatgatcatctacttcgaccaggtactagtgaacattgggaacaactttgattcagaacgcagcactttcatcgccccgcgcaaagggatctacagttttaacttccacgtggtaaaagtctacaacagacaaaccatacaggtgagcctcatgctaaacgggtggccggtgatttcagccttcgctggtgaccaggacgtgacccgggaggccgccagcaacggagtcctaatccaaatggagaaaggcgaccgagcatacctcaagctggagcggggaaacttgatggggggctggaagtactcgaccttctccggattcctggtgtttcctctctgactggctcgtagccggaagggaggcagggagagggcgaaggcaggaaggggagtgagaaagaggctgaaattaagagggcgagaaagcagcac

SEQ ID NO: 1638 - DNA, 3531 bp, Homo sapiens
  source 1..3531: mol_type = genomic DNA; mol_type = genomic DNA
agtggagatggagtttcaccatgttggccaggctggtctcaaactcctgacctcaggtgatccacctgcctcggcctcccaaagtgctgggattacagctatgcctggctaatttttttttttttttacttttttatttttatttttttgaaacggagtttcactcttgtcacccaggctggagtgcagtggcgcgatctcggctcactaaaccccatctctactaaaaatacaaaaatttgccgggcatggtagcagctatggtgggcagcatggtgggcaagtagtcccagctacttgggaggctgaggcaggagaatcacttgaacccaggaggcagaggttgcagtgagccaagatcatgccactgcactccagcctgggtgacagagcgagactccatctcaaaaaaaaaaaaaaagtttattggtaagaattttattctttttattctttttcattgcttttataaatgaaattgttttcttaatttcctttttggatttttcattattagtgtatagaaacaactaatttctatgtgttaattttgtatcctgcaactttgctgactttattaattctaataagtgtgtgtgtgtgtgtatgtgtgtgtaatccatcttggttttgtttttatttttacttggagactcaggcagggacaggttttcttgtcatcttccaaagcctgtgggtagactttttctaggtccctattcattgaagaagcaggcttcaaggatcccagctgtcctcaagagtactggttccagcttcctgcttcatgaaccggtcatggcccctgcaaggtcaaggtcattataatgccagcacctgactgctaaggctatttcccttccaataccttcccctcagagctcctggtgcatcagctcattcaaccttctgcttttctgctctctcttgatttaagaaacagacacattatatttctacatagttagagcacaggggtcccagcatcccacttccaaatgagcatgtcaagcacatgcattcagagaggatacctggaagccaaaattttgccatagtgaaaggccttattcctgaatacagctagagtggggaagaccttggcctctccccccgcaggcaagaatgttgcctccacagggggctggtagcctgctaaggcccaggccacatgagtgggttgtctactgttactgagggcctactatgtgccagacaccatactaggtgctttacatacattatatgtcattgaatcttccctctagtcctgtgagataggtactattattgtcactgattcacttgagaaagctgccaaaacacagatagcaaggggcagaaccaggattctgatttaggttggctcagccttttatcaaatacatctggtcttcctctgtcctttcaaaagcctatagcttcctcatcttgcccactcctctgtgggtagggtctgtggtttcctttctcttatctatcttcaacacacagtgggtgtgacctgggtgcaaccagtcacagctctgcagaggttactgtgattttgcccctgaaggatctgtccacaacttaggaactcacacagcttttggcctgagcccccgttaccaagagaaaggaggtttttgccaaggactccaaggggagtgcacttgatgctggtcgggacccaaagcgcccagccctccctgagacattgtgtgagtcgggctgggcctcaaacacggcccccactgccccaccccagccagggtggtgcttgtgtgggaaggactttaaatccagctgccagacccctggacgggagaaggagagacggctggccaccatgcacggctcctgcagtttcctgatgcttctgctgccgctactgctactgctggtggccaccacaggccccgttggagccctcacagatgaggagaaacgtttgatggtggagctgcacaacctctaccgggcccaggtatccccgacggcctcagacatgctgcacatgagatgggacgaggagctggccgccttcgccaaggcctacgcacggcagtgcgtgtggggccacaacaaggagcgcgggcgccgcggcgagaatctgttcgccatcacagacgagggcatggacgtgccgctggccatggaggagtggcaccacgagcgtgagcactacaacctcagcgccgccacctgcagcccaggccagatgtgcggccactacacgcaggtggtatgggccaagacagagaggatcggctgtggttcccacttctgtgagaagctccagggtgttgaggagaccaacatcgaattactggtgtgcaactatgagcctccggggaacgtgaaggggaaacggccctaccaggaggggactccgtgctcccaatgtccctctggctaccactgcaagaactccctctgtgaacccatcggaagcccggaagatgctcaggatttgccttacctggtaactgaggccccatccttccgggcgactgaagcatcagactctaggaaaatgggtgcagagggccctgacaagcctagcgtcgtgtcagggctgaactcgggccctggtcatgtgtggggccctctcctgggactactgctcctgcctcctctggtgttggctggaatcttctgaaggggataccactcaaaggcaaggcctggtgaggggggccctggcctcatacccacctggattgtcttcctccaagtgagagaccacagcttcctgggcaggtcctgctctgtggcccagcagccccccttcaccccaacttctggccagattccaggccagcactcttgtcctcctgggaggcgtctacagggccagcccctggcactgccccaggagtgccttggctctgggtaggcccatccttcagctggctgcagactgttctgagcggtatttacatgtgcccactctcaggttgtcctgtggccatcagcttctctcccagacagaggatctcaggcttcccaggaacccccgggcccctcccagtcccctggcctcttccttgagccatctgagtccaggactgttccccagaagtgcctcttgccttctcagggtgaagaggtcagctgtcctcctgtcatcttccccaccctgtccccagcccctaaacaagatacttcttggttaaggccctccggaagggaaaggctacggggcatgtgcctcatcacaccatccatcctggaggcacaaggcctggctggctgcgagctcaggaggccgcctgaggactgcacaccgggcccacacctctcctgcccctccctcctgagtcctgggggtgggaggatttgagggagctcactgcctacctggcctggggctgtctgcccacacagcatgtgcgctctccctgagtgcctgtgtagctggggatggggattcctaggggcagatgaaggacaagccccactggagtggggttctttgagtgggggaggcagggacgagggaaggaaagtaactcctgactctccaataaaaacctgtccaacctg

SEQ ID NO: 1639 - DNA, 1318 bp, Homo sapiens
  source 1..1318: mol_type = genomic DNA; mol_type = genomic DNA
gatgcggccggggctgcgcggtggtgatgcgagcctgcagggcggcgcgccggggcagccggagccgcgcgccgcggcgctgtaatcggacaccaagagcgctcgcccccggcctccggccactttccattcactccgaggtgcttgattgagcgacgcggagaagagctccgggtgccgcggcactgcagcgctgagattcctttacaaagaaactcagaggaccgggaagaaagaatttcacctttgcgacgtgctagaaaataaggtcgtctgggaaaaggactggagacacaagcgcatccaaccccggtagcaaactgatgacttttccgtgctgatttctttcaacctcggtattttcccttggatattaacttgcatatctgaagaaatggcattccggacaatttgcgtgttggttggagtatttatttgttctatctgtgtgaaaggatcttcccagccccaagcaagagtttatttaacatttgatggaccaagttttcatgattgactccaagtgtgaatctggaaaaggacgctgctctttcaaccccaacgtgaacacggtgtctgttatgatcaatgaggagcttttctctggaatgtatatagatttcatggggacagatgctgctatttttcgaagtttaaccaagaggaatgcggtcagaactgatcaacataattccaaatggctaagtgaacctatgtttgtagatgcacatgtcatcccagatggtactgatccaaatgatgctaaggtgtacttcttcttcaaagaaaaactgactgacaataacaggagcacgaaacagattcattccatgattgctcgaatatgtcctaatgacactggtggactgcgtagccttgtcaacaagtggaccactttcttaaaggcgaggctggtgtgctcggtaacagatgaagacggcccagaaacacactttgatgaattagaggatgtgtttctgctggaaactgataacccgaggacaacactagtgtatggcatttttacaacatcaagctcagttttcaaaggatcagccgtgtgtgtgtatcatttatctgatatacagactgtgtttaatgggccttttgcccacaaagaagggcccaatcatcagctgatttcctatcagggcagaattccatatcctcgccctggaactaatacttgtgtctgaagataacagtaattttttattcttgtgtcccctactgggcacatcaaagtgctttttggataaaatatgctcaagtaatggatacgtatattaacatataagtatattctgaaaactgacct

SEQ ID NO: 1640 - DNA, 1863 bp, Homo sapiens
  source 1..1863: mol_type = genomic DNA; mol_type = genomic DNA
ctcttttgtccaccagcccagcctgactcctggagattgtgaatagctccatccagcctgagaaacaagccgggtggctgagccaggctgtgcacggagtgcctgacgggcccaacagacccatgctgcatccagagacctcccctggccgggggcatctcctggctgtgctcctggccctccttggcaccgcctgggcagaggtgtggccaccccagctgcaggagcaggctccgatggccggagccctgaacaggaaggagagtttcttgctcctctccctgcacaaccgcctgcgcagctgggtccagccccctgcggctgacatgcggaggctggactggagtgacagcctggcccaactggctcaagccagggcagccctctgtggaatcccaaccccgagcctggcgtccggcctgtggcgcaccctgcaagtgggctggaacatgcagctgctgcccgcgggcttggcgtcctttgttgaagtggtcagcctatggtttgcagaggggcagcggtacagccacgcggcaggagagtgtgctcgcaacgccacctgcacccactacacgcagctcgtgtgggccacctcaagccagctgggctgtgggcggcacctgtgctctgcaggccaggcagcgatagaagcctttgtctgtgcctactcccccagaggcaactgggaggtcaacgggaagacaatcgtcccctataagaagggtgcctggtgttcgctctgcacagccagtgtctcaggctgcttcaaagcctgggaccatgcaggggggctctgtgaggtccccaggaatccttgtcgcatgagctgccagaaccatggacgtctcaacatcagcacctgccactgccactgtccccctggctacacgggcagatactgccaagtgaggtgcagcctgcagtgtgtgcacggccggttccgggaggaggagtgctcgtgcgtctgtgacatcggctacgggggagcccagtgtgccaccaaggtgcattttcccttccacacctgtgacctgaggatcgacggagactgcttcatggtgtcttcagaggcagacacctattacagagccaggatgaaatgtcagaggaaaggcggggtgctggcccagatcaagagccagaaagtgcaggacatcctcgccttctatctgggccgcctggagaccaccaacgaggtgattgacagtgacttcgagaccaggaacttctggatcgggctcacctacaagaccgccaaggactccttccgctgggccacaggggagcaccaggccttcaccagttttgcctttgggcagcctgacaaccacgggctggtgtggctgagtgctgccatggggtttggcaactgcgtggagctgcaggcttcagctgccttcaactggaacaaccagcgctgcaaaacccgaaaccgttacatctgccagtttgcccaggagcacatctcccggtggggcccagggtcctgaggcctgaccacatggctccctcgcctgccctgggagcaccggctctgcttacctgtccgcccacctgtctggaacaagggccaggttaagaccacatgcctcatgtccaaagaggtctcagaccttgcacaatgccagaagttgggcagagagaggcagggaggccagtgagggccagggagtgagtgttagaagaagctggggcccttcgcctgcttttgattgggaagatgggcttcaattagatggcaaaggagaggacaccgccagtggtccaaaaaggctgctctcttccacctggcccagaccctgtggggcagcggagcttccctgtggcatgaaccccacagggtattaaattatgaatcagctg

SEQ ID NO: 1641 - DNA, 3267 bp, Homo sapiens
  source 1..3267: mol_type = genomic DNA; mol_type = genomic DNA
acctgacatgagggcggggaccccgaaatgcacacgaagtccggaactggtcttctgtgattttcattcgccctggtctctgttccctttcgtactcaaagctcgtgcatccagggaggggaaaccggagatagggtcttcgggccccgggcagaccctctgtgccgctgcaaaccgttgcagcctgaggctgtcaggtcctcccccagacacctgcggaccctccctctcctggcttcccgtctggtcatggcgagattctgggtctgcgtagccggtgctggcttctttcttgcatttttggttttgcattcgcgtttttgtggctctccagttttgaggaactttacttttgcagtttcctggagaactgagaaaattctttaccggctggatgtgggttggcctaagcacccagaatattttaccggaacaacattttgtgttgcagttgactccctcaatggattggtttacataggtcaaagaggggataacatcccaaagatattagtgttcacagaggatggatatttcctacgagcctggaattatacagttgacacacctcatggtatatttgcagccagtactctatatgaacaatccgtctggatcacggatgtaggaagtgatttcatgatcctttggctgcatggagaaaatgggacagggcctgctaagttcaacatacctcacagtgttacatgattcagctggtcgggtgtgggttgctgaccgaggaaataaaagaatccaagtatttgataaagacactggggagtggttaggagcatggaataattgtttcacagaagagggaccttcttcagtcaggtttactcctgatgggaagtacttgattgtggcccagctgaatcttagcaggctctcagtcgtagcagcacccccagtgggaagcattggggagtgttctgtgatcagcacaatccaactagcagatcaagttttgccacatctcctagaagtcgacagaaagactggagcagtctatgtagcagaaattggagcaaaacaagtacaaaaatatgtccctttgaatagctatgttccttcatttggttcataatgtttctttcctgggaatatttcaagtggcagttcagattctcaattcactaagtgcttaaaaatgatgttcaagcacaagaatttatttttctagtataaaagatctagtatcagaaagatttgtttttgtatcattaagaatcttatattttgttgccctcttgggacttagttttatttgtaagtgcataaggatattttaatgaaaggaaagtaactaaaaaatggggttgggaagagggactaaggtggtaacctcattatttgccctggtagactgattctccctgggtaaaaaaaatgggaataaaaatgagcttgcatgataatttattaaatttcatgtgaagaactccagacctccagattgtgcaactaacataaaatgagctgcttgagagattgtaaataagatgaactattgattaatttgagtacccacagagtgctgtgtcttgacgacttaaaaatgaaaaagcaggattgccttttgagtagcttgcagtctagtggggagacaagcaggcaaacagtcacaacacagcaaaagcgaccttggagcatagtgggacttttggagtaggagtgctgcatttgactgagggaatcatggatacttcgcaggagaagtgaatttgagctcagacttgaaaactgaggaggagcttaccaagggacaaggaggagaaaacaataatttccaagtaaagaaggtataaaaagttagaagtgtactgtaaactttgataggcttttaggccttttttaaagcccaacttggcttctgtccattacctataagatatttaatgtcagtcagcctttaaatgtaggaataaaatggctggcatctaagcactttagtaaaagaggtttttacaaataactaaggattgtagagcttccttctctttttttttctttttctttcttttgttttacatgaactcaacttattcctaacatttgtctacctcaaagaaatttcaagattatttagataacatggatatgtgccaaatcctttgagctgttaagatgataatttcctgctttcctcctacatcttctcctcccactccctcctttggtgtgaatattggcttcccaattaagacctttttttttttttttccagtttgttttagcttattataggttttggaggaactttgccattttgtaatctttcaaatcattcttcacccttcctcacatcagcttcctgcttttcccagtgttttactgtaaattgtgtagcatatgacaaatcttgagctgactttcctcttcacctgttatggctggagtattttccagacctgaagggactcacacttgttttgatacttggatcacatctccgtgaggttaggaaggtaaatctaccaacaggaagccctgtactctgtattccaaggccattggtaaatgtgttggtgccactgatcggactgtatgaccttaaacaagtcaccttagttttcagtgaaatgggaatatcattgtctcctctttcatgaatgctgtgagaatcagatgtgcaacaggtacagacttgccctttgaaatctatacctctggatacattagaggcattttattaacaaaggcccttctaaatgtgctatttatttgacaataactatcagatttgccttaattttgtgtttatagcatttatcaaaacgtatcctcatagactttatgcagattaatatggtcaattgatttggataaaagaaagtaatttcagggtttgtttttaagccaggacaagaagtgcaaatgcctctttgaagcaatttaggctaaactgattttgaaatttcaaaatgttttattttactttgttttattaagccaggacaagaagtgcaaatgcctctttgaagcaattcaggctaggtaaaccgattttgccatttcaaaacgttttattttactttgttttatatcagagtcttataaaacctgctgcaaatatttctgaatgtctttgtaaaagtgtttgttagtgtacctgtgattatagtacttcacttttttcctttggattaattggttaaatgaatgagaaatgtgttatgttttttactaaaaagtataaattaaaattttggaaagaaaaggcaatattatctggctccccaattaaagtttgattttattgtc

SEQ ID NO: 1642 - DNA, 1083 bp, Homo sapiens
  source 1..1083: mol_type = genomic DNA; mol_type = genomic DNA
agagccaggaggcggaggcgcgcgggccagcctgggccccagcccacaccttcaccagggcccaggagccaccatgtggcgatgtccactggggctactgctgttgctgccgctggctggccacttggctctgggtgcccagcagggtcgtgggcgccgggagctagcaccgggtctgcacctgcggggcatccgggacgcgggaggccggtactgccaggagcaggacctgtgctgccgcggccgtgccgacgactgtgccctgccctacctgggcgccatctgttactgtgacctcttctgcaaccgcacggtctccgactgctgccctgacttctgggacttctgcctcggcgtgccacccccttttcccccgatccaagcacctgccaggagaacaggcagtggcagtgtgaccaagaaccatgcctggtggatccagacatgatcaaagccatcaaccagggcaactatgggtgagaggccctagaggcaccctcagtgggcacacatgcatactcatgcatgtatacacgcatgctgtgctgtggggcacgtccagcaggccactcctacacccagatttgactgtgtgtgcgctcagccactgtgcgtctctcccacccacatgcacccacgccaaggaccctgagcctcggcagatctgtgacttccttccgtcccctctccttcagctggcaggctgggaaccacagcgccttctggggcatgaccctggatgagggcattcgctaccgcctgggcaccatccgcccatcttcctcggtcatgaacatgcatgaaatttatacagtgctgaacccaggggaggtgcttcccacagccttcgaggcctctgagaagtggcccaacctgattcatgagcctcttgaccaaggcaactgtgcaggctcctgggccttctccacagcagctgtggcatccgatcgtgtctcaatccattctctgggacacatgacgcctgtcctgtcgccccagaacctgctgtcttgtgacacccaccagcagcagggctgccgcggtgggcgtctcgatggtgcctggtggttcctgcgtcgccga

SEQ ID NO: 1643 - DNA, 1539 bp, Homo sapiens
  source 1..1539: mol_type = genomic DNA; mol_type = genomic DNA
gtgtgcacactcagctacgggacacatttcaggtatccaaggcagcagaggtgagtgggtcccccgagctctgtgaccttatgctccacactaactctggcagagcctccgtttcctcatagaacaaagaacagccaccacccccgggagatgaagaagagagtcgaggacctccatgtaggtgccacggtggcccccagcagcaggagggcctgggcctcaacctccagaaaagctcagagaaggagctgcacagaggctttcagcagctccttcaggaactcaaccagcccagagatggcttccagctgagcctcggcaatgcccttttcaccgacctggtggtagacctgcaggacaccttcgtaagtgccatgaagacgctgtacctggcagacactttccctaccaactttagggactctgcaggggccatgaagcagatcaatgattatgtggcaaagcaaacgaagggcaagattgtggacttgcttaagaacctcgatagcaatgcggtcgtgatcatggtgaattacatcttctttaaagctaagtgggagacaagcttcaaccacaaaggcacccaagagcaagacttctacgtgacctcggagactgtggtgcgggtacccatgatgagccgcgaggatcagtatcactacctcctggaccggaacctctcctgcagggtggtgggggtcccctaccaaggcaatgccacggctttgttcattctccccagtgagggaaagatgcagcaggtggagaatggactgagtgagaaaacgctgaggaagtggcttaagatgttcaaaaagaggcagctcgagctttaccttcccaaattctccattgagggctcctatcagctggagaaagtcctccccagtctggggatcagtaacgtcttcacctcccatgctgatctgtccggcatcagcaaccactcaaatatccaggtgtctgagatggtgcacaaagctgtggtggaggtggacgagtcgggaaccagagcagcggcagccacggggacaatattcactttcaggtcggcccgcctgaactctcagaggctagtgttcaacaggccctttctgatgttcattgtggataacaacatcctcttccttggcaaagtgaaccgcccctgaggtggggcttctcctgaaatctacaggcctcagggtgggagatgaagggggctaagctatggcccatctgtatgctggtagctagtgatttacacaggtttagttgactaatgaggcattacaaataatattactctatgatgattgcttccacccacacgactgcaacatacaggtgccttggggaaatgtggagaacattcaatcttgccgtcactattcatcaatgaagattaacactgagatccagagaggctggatgacttgctcaagttcaccagcatggtagtggcaaagagaggtccagagtcctggcccttgatgcccagctcagtgccacaaagctcaataggagggatgttccagtggatgagggccaccaggaagc

SEQ ID NO: 1644 - DNA, 3586 bp, Homo sapiens
  source 1..3586: mol_type = genomic DNA; mol_type = genomic DNA
gcgcgtaatggcagcgccgtggcctcgcgtccatctttgccgttctctcggacctgtcacaaaggagtcgcgccgccgccgccgccccctccctccggtgggcccgggaggtagagaaagtcagtgccacagcccgaccgcgctgctctgagccctgggcacgcggaacgggagggagtctgagggttggggacgtctgtgagggaggggaacagccgctcgagcctggggcgggcggaccggactggggccggggtaggctctggaaagggcccgggagagaggtggcgttggtcagaacctgagaaacagccgagaggttttccaccgaggcccgcgcttgagggatctgaagaggttcctagaagagggtgttccctctttcgggggtcctcaccagaagaggttcttgggggtcgcccttctgaggaggctgcggctaacagggcccaggtgagaggcagctatctatctcctggggtggctcctggtaccgatggggtcctgacctactcaggggtgcccgggatagaaagggtagatgaagggacgctttaggagggttctttttgtggagtttacggtctaggtggcacggatgaggcatacctccccggggagatttagaaacgccttgggatagagagagaatggggctaggaagcaggagctagaactagcggaatgtcctactacggaagccggagctgaaaattggaactgccattggatgtccagaatcccctgtagttgataatgttgggaataagctctgcaactttctttggcattcagttgttaaaaacaaataggatgcaaattcctcaactccaggttatgaaaacagtacttggaaaactgaaaactacctaaatgatcgtctttggttgggccgtgttcttagcgagcagaagccttggccagggtctgttgttgactctcgaagagcacatagcccacttcctagggactggaggtgccgctactaccatgggtaattcctgtatctgccgagatgacagtggaacagatgacagtgttgacacccaacagcaacaggccgagaacagtgcagtacccactgctgacacaaggagccaaccacgggaccctgttcggccaccaaggaggggccgaggacctcatgagccaaggagaaagaaacaaaatgtggatgggctagtgttggacacactggcagtaatacggactcttgtagataatgatcaggaacctccctattcaatgataacattacacgaaatggcagaaacagatgaaggatggttggatgttgtccagtctttaattagagttattccactggaagatccactgggaccagctgttataacattgttactagatgaatgtccattgcccactaaagatgcactccagaaattgactgaaattctcaatttaaatggagaagtagcttgccaggactcaagccatcctgccaaacacaggaacacatctgcagtcctaggctgcttggccgagaaactagcaggtcctgcaagtataggtttacttagcccaggaatactggaatacttgctacagtgtctgaagttacagtcccaccccacagtcatgctttttgcacttatcgcactggaaaagtttgcacagacaagtgaaaataaattgactatttctgaatccagtattagtgaccggcttgtcacattggagtcctgggctaatgatcctgattatctgaaacgtcaagttggtttctgtgcccagtggagcttagacaatctctttttaaaagaaggtagacagctgacctatgagaaagtgaacttgagtagcattagggccatgctgaatagcaatgatgtcagcgagtacctgaagatctcacctcatggcttagaggctcgctgtgatgcctcctcttttgaaagtgtgcgttgcaccttttgtgtggatgccggggtatggtactatgaagtaacagtggtcacttctggcgtcatgcagattggctgggccactcgagacagcaaattcctcaatcatgaaggctacggcattggggatgatgaatactcctgtgcgtatgatggctgccggcagctgatttggtacaatgccagaagtaagcctcacatacacccatgctggaaagaaggagatacagtaggatttctgttagacttgaatgaaaagcaaatgatcttctttttaaatggcaaccagctgcctcctgaaaagcaagtcttttcatctactgtatctggattttttgctgcagctagtttcatgtcatatcaacaatgtgagttcaattttggagcaaaaccattcaaatacccaccatctatgaaatttagcacttttaatgactacgccttcctaacagctgaagaaaaaatcattttgccaaggcacaggcgtcttgctctgttgaagcaagtcagtatccgagaaaactgctgttccctttgttgtgatgaggtagcagacacacaattgaagccatgtggacacagtgacctgtgcatggattgtgccttgcagctggagacctgcccattgtgtcgtaaagaaatagtatctagaatcagacagatttctcatatttcatgacacatgtgaagaggcatcgtggacttttttctactcaattccagccaatgttgaaaagaaaaagaaaaaaaaaactctctaatcagttgtacacacattgaaacttatagccatggccagattttatgctaaaaatggtagtttgtcaaagacaaaattctcttagaatctaatccaacttgccagccctgagaaaatcccttttaaggccaaggaaagctgaatgctagcagccaggcctgtggtacttccatgagaaaccatagcagacaatgccctcccaagtactgaaatcacactggaatcccccttgttgggttcatttgattgtttaacacaggatgtgttgtgtcattctgaagtttttatttggggcagaagtctttatggagatgtaaatgacagcgtttctgggttatgcataacttctcactggtcagagacaccggtgtgtcaagcatggatattgcattgcaagacttgaatctataaaaattagaatcacacagtcagtactacaagcaaaacagagaacctgaaagaaggtgcacagactgtaagaaaaaacccaagtttgtgatatttcagtgattccaaagaacattctaggttttttgtttgtttttttgttttttgggttttttttttttactgcagaaaattggtggtattttcacattcatagtgtttctatccaatttcagtacccacatttaatgaggaaaaaatgttttaccaatgaaggaggaattcttaaattagctgtaatgttaggttggagaaaatttggtatttagggtattttcaaggtaccatcaaatcagatttctgtttttttgttaaaaaaaatttttttaatcagtattgtttttacaagtaatatactttgaaactcttgaactaatagtctcaaaaactctagaggacagtctgagaacacgtatttctattgttctaaataaatacatgtttttgaatagtt

SEQ ID NO: 1645 - DNA, 1442 bp, Homo sapiens
  source 1..1442: mol_type = genomic DNA; mol_type = genomic DNA
ggaagcggagagcggctgatcgcagtccggaggtgaggcggaactctgaggtggtccattatggctgacatgcaccgtgggtatgcagacagtccttcaaaagcaggagcagctccatatgtgcaggcatttgactcgctgcttgctggtcctgtggcagagtacttgaagatcagtaaagagattgggggagacgtgcagaaacatgcggagatggtccacacaggtttgaagttggagcgagctctgttggttacagcttctcagtgtcaacagccagcagaaaataagctttccgatttgttggcacccatctcagagcagatcaaagaagtgataacctttcgggagaagaaccgaggcagcaagttgtttaatcacctgtcagctgtcagcgaaagtatccaggccctgggctgggtggctatggctcccaagcctggcccttatgtgaaagaaatgaatgatgccgccatgttttatacaaaccgagtcctcaaagagtacaaagatgtggataagaagcatgtagactgggtcaaagcttatttaagtatatggacagagctgcaggcttacattaaggagttccataccaccggactggcctggagcaaaacggggcctgtggcaaaagaactgagcggactgccatctggaccctctgccggatcatgtcctcctccccctccaccatgcccccctcctcccccagtctctaccatttcatgctcatatgagtctgcttcccgctcatcactgttcgcgcagattaatcagggggagagcattacacatgccctgaaacatgtatctgatgacatgaagactcacaagaaccctgccctgaaggctcagagtggtccagtacgcagtggccccaaaccattctctgcacctaaaccccaaaccagcccatcccccaaacgagccacaaagaaggagccagctgtacttgaactggagggcaagaagtggagagtggaaaatcaggaaaatgtttccaacctggtgattgaggacacagagctgaaacaggtggcttacatatacaagtgtgtcaacacgacattgcaaatcaagggcaaaattaactccattacagtagataactgtaagaaacttggcctggtattcgatgacgtggtgggcattgtggagataatcaacagtaaggatgtcaaagttcaggtaatgggtaaagtgccaaccatatccatcaacaaaacagatggctgccatgcttacctgagcaagaattccctggattgtgaaatagtcagtgccaaatcttccgagatgaatgtcctcattcctacagaaggcggtgactttaatgaattcccagttcctgagcagttcaagaccctatggaacgggcagaagttggtcaccacagtgacagaaattgctggataagcgaagtgccactgggttctttg

SEQ ID NO: 1646 - DNA, 3307 bp, Homo sapiens
  source 1..3307: mol_type = genomic DNA; mol_type = genomic DNA
actgcccttacaaagctaccagcctcacggagaaggcgcagtccctgtccacagagacacagccttgccccagttactgcccacctgcaagagatccacatttctgccctccagagctcccaaactgatgggggagagagacatcatcccccagctctgggagtttccagtctgatggaggagacagagcctgcttcggtaactctcactctgcgggggaagactcagccctatccagggagctcccacactttcaatggggaggcccacccagtggccgagcctgctgctgctcctgctgttgccggggcccccgcccgtcgccggcttggaagacgctgccttcccccacctgggggagagcttgcagcccctgccccgggcctgtcccctgcgctgctcctgcccccgagtcgacactgtggactgtgatggcttggaccttcgagtgttcccggacaacatcaccagagccgctcagcacctctccctgcagaacaaccagctccaggaactcccctacaatgagctgtcccgcctcagtggcctgcgaaccctcaacctccacaacaacctcatctcctccgaaggcctgcctgacgaggccttcgagtccctcacccagctgcagcacctctgcgtggctcacaacaagctctcagtggcccctcagtttctgccccggtccctccgtgtcgcggatctggctgccaaccaagtgatggagatcttccccctcacctttggggagaagccggcactcaggtccgtgtacctccacaacaaccagctgagcaacgctggcctgccccccgacgccttccgcggctccgaggccatcgccaccctcagcctctccaacaaccagctcagctacctgccgcccagcctgccgccctcactcgagcggctccacctgcagaacaatctcatctccaaggtgccccgaggagccctgagccgccagactcaactccgtgagctctacctccagcacaaccagctgacagacagtggcctggatgccaccaccttcagcaagctgcatagccttgaatacctggatctctcccacaaccagctgaccacagtgcccgccggcctgccccggaccctggctatcctgcacctgggccgcaaccgcatccggcaggtggaggcggctcggctgcacggggcgcgtggtctgcgctatttgttgctgcagcacaaccagctggggagctcagggctgcccgccggggctctgcggccgctgcggggcctgcacacgctgcacctctatggcaatgggctggaccgcgtgcctccagccctgccccgccgcctgcgtgccctggtgctgccccacaaccacgtggccgcgctgggtgcccgtgacctggtcgccacaccgggcctgacggagcttaacctggcctataaccgcctggccagcgcccgtgtgcaccaccgggccttccgccggttgcgtgccctgcgcagcctcgacctggcagggaatcagctaacccggctgcccatgggcctgcccactggcctgcgcaccctgcagctgcaacgcaaccagctgcggatgctcgagcccgagcctctggccggcctggaccaactgcgggagctcagcctggcgcacaaccggctccgggtcggcgacatcgggccaggcacctggcatgagctccaagccctccaggtcaggcacaggctggttagccacactgtccccagggcccctccatccccctgcctgccctgccacgtcccaaacattctagttagctggtaaagcaatcagaacaagaaaatgataagagtgggttagaaggtgatgaggaggctgggtgaggtggctcatgcctgtaatcccagcactttggggagccaaggcaggagaatcgctttaggctatgggtttgagaccagcctggcaacacagcaagaccctatctctaccaaaaaaacatagccaagcgtggtggcacatgcctgtagtcccagctattcaggaggctgaggcaggaggatcgcttgagcccagaagtttgaggctgcaatgagccgtgatcgggccactgccctctagactgggcaacagagcaagaccctgtctcttgaaaaaaaaagtgatgaaagaggtatggtgcgattcaatgactgactcatttaatcaagtggggacctgtctgtctgtgccttcctgggaagggccttagtttacctctgcagaagggaggaatttggcaatcatggggggtggggggcagaagggccaggctggtatgaagggggcaggggactctcagagaggttgggggctggctgagctgagtggcccaggcctggggctgccacgatgccatctataaccccctgcccagatgctggacctcagccacaatgagctgtcctttgtgcccccggacctgcctgaggccctagaggagctgcacctcgagggcaaccgcatcggccacgtgggccccgaggccttcctcagcacaccccgcctgcgtgccctcttcctcaggtgccccgagggtgaccggaggggtggaggtgggcaggggagggcctgggagggtcatgaccgcctctctgtgcagggccaacaggcttcacatgacgagcatcgcggctgaggccttcctggggctcccaaacctgcgtgtggtggacacggcagggaatccggagcaggtcctgatccggctgcctcccaccaccccacgtgggccacgggcagggggcccctgatcctagagaggcccagcagagcagctcagactcctgggactccgctgggccgtggactgaggagacaacgcccaccaggggcccttggtctggctctcctgggcctccagggctgggcctgctctgcctgccactggccgagacacagaggcacacagctggcatactccaggctcacagaccacgccggcctggcgggacacaccctaccccaaactcccaacacagatggaggcagcaacaataaagccaaacccttccagcactcagcacggaccaggcaccctttgggggctctgtccacggactcctccccacaaccagtccagctggggaaactgaggctctgggatgctaagtgggtcaggactgaattttgaggtcttgaggcacacactggggtcaccaaacagcaccctgtgcgacctagccacgtgtgattgcagggacgcccaaggccacccactgaaaaaacactgggtgacagatatagggaccctcacatgtatccccccccacagcaagcatgggaatgaaatgcatccttcaa

SEQ ID NO: 1647 - DNA, 277 bp, Homo sapiens
  source 1..277: mol_type = genomic DNA; mol_type = genomic DNA
caccctggaaggtgcagttgggaagaaagtttctgaggctgtagacatggggatcggatgctggagaaaccccctgctgctgctgattgccctggtcctgtcagccaagctgggtcacttccaaaggtgggagggcttccagcagaagctcatgagcaagaagaacatgaattcaacactcaacttcttcattcaatcctacaacaatgccagcaacgacacctacttatatcgagtccagaggctaattcgaagtcagatgcagcaggtacattgt

SEQ ID NO: 1648 - DNA, 3040 bp, Homo sapiens
  source 1..3040: mol_type = genomic DNA; mol_type = genomic DNA
actgcccttacaaagctaccagcctcacggagaaggcgcagtccctgtccacagagacacagccttgccccagttactgcccacctgcaagagatccacatttctgccctccagagctcccaaactgatgggggagagagacatcatcccccagctctgggagtttccagtctgatggaggagacagagcctgcttcggtaactctcactctgcgggggaagactcagccctatccagggagctcccacactttcaatggggaggcccacccagtggccgagcctgctgctgctcctgctgttgccggggcccccgcccgtcgccggcttggaagacgctgccttcccccacctgggggagagcttgcagcccctgccccgggcctgtcccctgcgctgctcctgcccccgagtcgacactgtggactgtgatggcttggaccttcgagtgttcccggacaacatcaccagagccgctcagcacctctccctgcagaacaaccagctccaggaactcccctacaatgagctgtcccgcctcagtggcctgcgaaccctcaacctccacaacaacctcatctcctccgaaggcctgcctgacgaggccttcgagtccctcacccagctgcagcacctctgcgtggctcacaacaagaacaatctcatctccaaggtgccccgaggagccctgagccgccagactcaactccgtgagctctacctccagcacaaccagctgacagacagtggcctggatgccaccaccttcagcaagctgcatagccttgaatacctggatctctcccacaaccagctgaccacagtgcccgccggcctgccccggaccctggctatcctgcacctgggccgcaaccgcatccggcaggtggaggcggctcggctgcacggggcgcgtggtctgcgctatttgttgctgcagcacaaccagctggggagctcagggctgcccgccggggctctgcggccgctgcggggcctgcacacgctgcacctctatggcaatgggctggaccgcgtgcctccagccctgccccgccgcctgcgtgccctggtgctgccccacaaccacgtggccgcgctgggtgcccgtgacctggtcgccacaccgggcctgacggagcttaacctggcctataaccgcctggccagcgcccgtgtgcaccaccgggccttccgccggttgcgtgccctgcgcagcctcgacctggcagggaatcagctaacccggctgcccatgggcctgcccactggcctgcgcaccctgcagctgcaacgcaaccagctgcggatgctcgagcccgagcctctggccggcctggaccaactgcgggagctcagcctggcgcacaaccggctccgggtcggcgacatcgggccaggcacctggcatgagctccaagccctccaggtcaggcacaggctggttagccacactgtccccagggcccctccatccccctgcctgccctgccacgtcccaaacattctagttagctggtaaagcaatcagaacaagaaaatgataagagtgggttagaaggtgatgaggaggctgggtgaggtggctcatgcctgtaatcccagcactttggggagccaaggcaggagaatcgctttaggctatgggtttgagaccagcctggcaacacagcaagaccctatctctaccaaaaaaacatagccaagcgtggtggcacatgcctgtagtcccagctattcaggaggctgaggcaggaggatcgcttgagcccagaagtttgaggctgcaatgagccgtgatcgggccactgccctctagactgggcaacagagcaagaccctgtctcttgaaaaaaaaagtgatgaaagaggtatggtgcgattcaatgactgactcatttaatcaagtggggacctgtctgtctgtgccttcctgggaagggccttagtttacctctgcagaagggaggaatttggcaatcatggggggtggggggcagaagggccaggctggtatgaagggggcaggggactctcagagaggttgggggctggctgagctgagtggcccaggcctggggctgccacgatgccatctataaccccctgcccagatgctggacctcagccacaatgagctgtcctttgtgcccccggacctgcctgaggccctagaggagctgcacctcgagggcaaccgcatcggccacgtgggccccgaggccttcctcagcacaccccgcctgcgtgccctcttcctcaggtgccccgagggtgaccggaggggtggaggtgggcaggggagggcctgggagggtcatgaccgcctctctgtgcagggccaacaggcttcacatgacgagcatcgcggctgaggccttcctggggctcccaaacctgcgtgtggtggacacggcagggaatccggagcaggtcctgatccggctgcctcccaccaccccacgtgggccacgggcagggggcccctgatcctagagaggcccagcagagcagctcagactcctgggactccgctgggccgtggactgaggagacaacgcccaccaggggcccttggtctggctctcctgggcctccagggctgggcctgctctgcctgccactggccgagacacagaggcacacagctggcatactccaggctcacagaccacgccggcctggcgggacacaccctaccccaaactcccaacacagatggaggcagcaacaataaagccaaacccttccagcactcagcacggaccaggcaccctttgggggctctgtccacggactcctccccacaaccagtccagctggggaaactgaggctctgggatgctaagtgggtcaggactgaattttgaggtcttgaggcacacactggggtcaccaaacagcaccctgtgcgacctagccacgtgtgattgcagggacgcccaaggccacccactgaaaaaacactgggtgacagatatagggaccctcacatgtatccccccccacagcaagcatgggaatgaaatgcatccttcaa

SEQ ID NO: 1649 - DNA, 1265 bp, Homo sapiens
  source 1..1265: mol_type = genomic DNA; mol_type = genomic DNA
agaagcaaaagagcagagctaccatgtcctcttggagcagacagcgaccaaaaagcccagggggcattcaaccccatgtttctagaactctgttcctgctgctgctgttggcagcctcagcctggggggtcaccctgagccccaaagactgccaggtgttccgctcagaccatggcagctccatctcctgtcaaccacctgccgaaatccccggctacctgccagccgacaccgtgcacctggccgtggaattcttcaacctgacccacctgccagccaacctcctccagggcgcctctaagctccaagaattgcacctctccagcaatgggctggaaagcctctcgcccgaattcctgcggccagtgccgcagctgagggtgctggatctaacccgaaacgccctggtattgaaagaaaaccagctggaggtcctggaggtctcgtggctacacggcctgaaagctctggggcatctggacctgtctgggaaccgcctccggaaactgccccccgggctgctggccaacttcaccctcctgcgcacccttgaccttggggagaaccagttggagaccttgccacctgacctcctgaggggtccgctgcaattagaacggctacatctagaaggcaacaaattgcaagtactgggaaaagatctcctcttgccgcagccggacctgcgctacctcttcctgaacggcaacaagctggccagggtggcagccggtgccttccagggcctgcggcagctggacatgctggacctctccaataactcactggccagcgtgcccgaggggctctgggcatccctagggcagccaaactgggacatgcgggatggcttcgacatctccggcaacccctggatctgtgaccagaacctgagcgacctctatcgttggcttcaggcccaaaaagacaagatgttttcccagaatgacacgcgctgtgctgggcctgaagccgtgaagggccagacgctcctggcagtggccaagtcccagtgagaccaggggcttgggttgagggtggggggtctggtagaacactgcaacccgcttaacaaataatcctgcctttggccgggtgcgggggctcacgcctgtaatcccagcactttgggaggcccaggtgggcggatcacgaggtcaggagatcgagaccatcttggctaacatggtgaaaccctgtctctactaaaaatataaaaaattagccaggcgtggtggtgggcacctgtagtcccagcaactcgg

SEQ ID NO: 1650 - DNA, 5953 bp, Homo sapiens
  source 1..5953: mol_type = genomic DNA; mol_type = genomic DNA
ctccgctcgccaccccgccgagagctggagggcgcggggccaggcgccttctgcggcaggcggacagatcctcggcgcggcagggccggggcaagctggacgcagcatgatgcgcgcagtgtgggaggcgctggcggcgctggcggcggtggcgtgcctggtgggcgcggtgcgcggcgggcccgggctcagcatgttcgcgggccaggcggcgcagcccgatccctgctcggacgagaacggccacccgcgccgctgcatcccggactttgtcaatgcggccttcggcaaggacgtgcgcgtgtccagcacctgcggccggcccccggcgcgctactgcgtggtgagcgagcgcggcgaggagcggctgcgctcgtgccacctctgcaacgcgtccgaccccaagaaggcgcacccgcccgccttcctcaccgacctcaacaacccgcacaacctgacgtgctggcagtccgagaactacctgcagttcccgcacaacgtcacgctcacactgtccctcggcaagaagttcgaagtgacctacgtgagcctgcagttctgctcgccgcggcccgagtccatggccatctacaagtccatggactacgggcgcacgtgggtgcccttccagttctactccacgcagtgccgcaagatgtacaaccggccgcaccgcgcgcccatcaccaagcagaacgagcaggaggccgtgtgcaccgactcgcacaccgacatgcgcccgctctcgggcggcctcatcgccttcagcacgctggacgggcggccctcggcgcacgacttcgacaactcgcccgtgctgcaggactgggtcacggccacagacatccgcgtggccttcagccgcctgcacacgttcggcgacgagaacgaggacgactcggagctggcgcgcgactcgtacttctacgcggtgtccgacctgcaggtgggcggccggtgcaagtgcaacggccacgcggcccgctgcgtgcgcgaccgcgacgacagcctggtgtgcgactgcaggcacaacacggccggcccggagtgcgaccgctgcaagcccttccactacgaccggccctggcagcgcgccacagcccgcgaagccaacgagtgcgtggcctgtaactgcaacctgcatgcccggcgctgccgcttcaacatggagctctacaagctttcggggcgcaagagcggaggtgtctgcctcaactgtcgccacaacaccgccggccgccactgccattactgcaaggagggctactaccgcgacatgggcaagcccatcacccaccggaaggcctgcaaagcctgtgattgccaccctgtgggtgctgctggcaaaacctgcaaccaaaccaccggccagtgtccctgcaaggacggcgtgacgggtatcacctgcaaccgctgcgccaaaggctaccagcagagccgctctcccatcgccccctgcataaagatccctgtagcgccgccgacgactgcagccagcagcgtggaggagcctgaagactgcgattcctactgcaaggcctccaaggggaagctgaagattaacatgaaaaagtactgcaagaaggactatgccgtccagatccacatcctgaaggcggacaaggcgggggactggtggaagttcacggtgaacatcatctccgtgtataagcagggcacgagccgcatccgccgcggtgaccagagcctgtggatccgctcgcgggacatcgcctgcaagtgtcccaaaatcaagcccctcaagaagtacctgctgctgggcaacgcggaggactctccggaccagagcggcatcgtggccgataaaagcagcctggtgatccagtggcgggacacgtgggcgcggcggctgcgcaagttccagcagcgtgagaagaagggcaagtgcaagaaggcctagcgccgaggcagcgggcgggcgggcgggcgggcgccagggcggggccgagcgagagcgggcgccttggcccggccgccgcggacttggcccgcgagggctttcccaggtggggggagggagggggcggggccgcacggcgcggggggcgggaccctcggcggcccctccccctacccccaccctgcgcgctctgggcgggagccgcgtgcacgcggggcggggtgcgccgccggccgggccctggagaaatgacgagacgtagctacctcacggggctccttccagagcagagacgcgcttccctgggcctgggcgcggccgccgtggaggggctgggggcagcctgccctggggcccgggggcgggcgcagaatcgcacaactggggccccaggcgcggggcgtggatggcgcggagacgtggacgggaggagaactgtgaattctcaagcccgtagtgtgggcggggcgcggagcacccaccaaaccaccacccgacacgcagccgacgggatccccccctttctccccggccccttctagcagttccccgcgggccacctggctgtcacagcctggactcctccatctgaaggggcctggcagcatttggggagtggacagctcctgtccagccagcatgccccaggcggcctctgtctccactgctacctgctgagtgggtcctactgggtgggggcttggggtcggtgagtggttcacctgtggagagaggagaggaagcccctgctgctgcctgtctctgcccctgcccctgcccctgcccagcgtggggctggcccatccggaaggcagtgggcccagggacacccctgagaagcccaagccgggtggtcaccgcctcatgctggagctgcctgttggaggaggcatcgcaaacgcaaaacctcccagagagtttccttttggaaacttggaaccagccctttttatgacgttttccagggggagggggaggggcactggctgggtttacggcagtgacactatttatgtaaatgacatcagctcccgcaaggcccctcagcaatgtcaacagctggaaagggcctgaacgggcttggagtctgcaggctgcgaaggcacttgggcctggcttggggccgggggcttgtttgagctgggatggggtttgctggctcagtgaagtaccagagtgcctgagccatgggtgggcaggggcacaggaatgaccaggttcctgggggccaaggaggccatgctggcttctccaagggaaggcacagaggctgccggcctgccccctacagctgtcttgggtctggcctgggccacaccttgaccgtgcctttccagacggtctttgtggagtctgcccgtgccctccactgtgccccagccctccttccaaaatctcctagagacacggtcctcaagcaggcagccccttttgttctgacctcctcacacagggtccattcctgtgccctggggcctcctggctccctgccttcctgggctctctgcactgcccgggcctctggcccacatcctcacacccggcgcactgaattaagaggcctggctcccctcacagtcaggaaattggtttcactttcccggccagagtttggctgctcaaaagggtcataccaagtatgaagctcggcccccggtggtctggcttccctccgccttccccacatttacccgcatcacggctgccatttattgagcacctgctgtgtgccaggcactttacccacatgctcccagtgtgtactcatgacaaccctgtgggacagggactcattatcaccagcaaggagactggagtacacgtgcccaaggtcatgctgcaaattggtggcaggactggggctcaaactccagagcccgactttctgaccaggggccacgctggccctcactgcactccagctctgcagcctacccgcccaatccctgtgcaggctgggagggtgctcttgggggagtggccaccgagcccctggccctggttactgcctcttgaggacactggcatctgggctggagaacaggagcccggggtggggtagggcatggggacaatcacatcttcagaggaggcagcaaagtggtgcgggatgcagggacggacttgccagatggcagctccaggttccaggaaggcaggccttggatgctccgaagaggtggtagaaaggtgtttttagaaaggtgttttggctgcctcagggtggttggagagactccaggagagactggcagaggtgcctcaggggcagggagcagacagacctgccctgggaaggggcatttggcttccctgaatccagcccaaggctagaagacagggcccctctccaagctgtcagcgcccctcggatgcccagtgtggtgtgctgggcgccatcagcatcacaaggcactacgctgctggggcggttgtcctatttctgtctatgccagtgtggtttcttcaccctgcccagaagggctgtggcagccccacgatatcccaccctgggtctgggtctcacgggtgtcctgtgaggggcttgcatttgtggtggtctctgaggccacctcagcaacggagctggcgacacgccaagcaacaaggcatcttgcggaaaattcagccagtgtcctgcccctcccttcggctcagcaccccgcagggcacaggctgtccgcccggtggtctggcccttggggaatgcgtcagggtgaccagatccaccatgctagcagccaggtcactgttgggattgcacggtcgtcacgagctgcctttcctatccacacacccagccaggacccagcccaccactcccgactgcagccccggcctctgcggtgagcaccatccttgggaaagcacccctcctccactccggtgccccactccaaggagcagagggaaatgggaattgaggtgtcccggtttgtacagttaggaagggatgtaaaacggaactagattttgattttgaagagtgtattaaccagaattgtgctatgtaggtgtttgtttgaagaaaaacataccagattagtctttgtttttgaaacagcttccccagttgtcctttttcttaccagctgggtggtctggtgcccctgacagctgagtgcctgctttacggacacgcagtaatgccgaagatttgcgggggaggacatagggctgtccccgggattcacctgctggctgtggtctctgcccactgcttctgtccttggaaagcagggcaggaggcagcatccccaggggcctctatgtgggagggagggacacctggggtcacaacccagggagggagggtcacagcccagggaggctgggagctgctccaaggccctggaactctgcctcagtcgcggcatgctggagaggggtacggacttactttcttggagttgtcccaggttggaatgagactgaactcaagaagagaccctaagggactggggaatggttcctgccttcaggaaagtgaaagacgcttaggctgtcaacacttaaaggaagtccccttgaagcccagagtggacagactagacccattgatggggccactggccatggtccgtggacaagacattcctgtgggccatggcacaccgggggggatcaaaatgtgtacttgtggggtctcgccccttgccaaaagccaaaccagtcccactcctgtcattggacgtttcttcccattccctcctcccaaatgcacttcccctcctccctctgccccctcctgtgttttggatttctgttcactcagaattgtaaatgtttagttgtgaccatgacgtattgtttgggtcaatgtccctttccaatgcatactaatatattatggttattatatatgaatatatttaatgacatggaaaaagttgtggattttctttctttccttttttttgggggggggtggggggttggttagagttgtaatggacccagatggaacttgtaatgtgggccccacatgatagaactaaattcagatatcattaaataaactcttgtacacta

SEQ ID NO: 1651 - DNA, 1788 bp, Homo sapiens
  source 1..1788: mol_type = genomic DNA; mol_type = genomic DNA
agaaggagagacggctggccaccatgcacggctcctgcagtttcctgatgcttctgctgccgctactgctactgctggtggccaccacaggccccgttggagccctcacagatgaggagaaacgtttgatggtggagctgcacaacctctaccgggcccaggtatccccgacggcctcagacatgctgcacatgagatgggacgaggagctggccgccttcgccaaggcctacgcacggcagtgcgtgtggggccacaacaaggagcgcgggcgccgcggcgagaatctgttcgccatcacagacgagggcatggacgtgccgctggccatggaggagtggcaccacgagcgtgagcactacaacctcagcgccgccacctgcagcccaggccagatgtgcggccactacacgcaggtggtatgggccaagacagagaggagaccaacatcgaattactggtgtgcaactatgagcctccggggaacgtgaaggggaaacggccctaccaggaggggactccgtgctcccaatgtccctctggctaccactgcaagaactccctctgtgaacccatcggaagcccggaagatgctcaggatttgccttacctggtaactgaggccccatccttccgggcgactgaagcatcagactctaggaaaatgggtactccttcttccctagcaacggggattccggctttcttggtaacagaggtctcaggctccctggcaaccaaggctctgcctgctgtggaaacccaggccccaacttccttagcaacgaaagacccgccctccatggcaacagaggctccaccttgcgtaacaactgaggtcccttccattttggcagctcacagcctgccctccttggatgaggagccagttaccttccccaaatcgacccatgttcctatcccaaaatcagcagacaaagtgacagacaaaacaaaagtgccctctaggagcccagagaactctctggaccccaagatgtccctgacaggggcaagggaactcctaccccatgcccaggaggaggctgaggctgaggctgagttgcctccttccagtgaggtcttggcctcagtttttccagcccaggacaagccaggtgagctgcaggccacactggaccacacggggcacacctcctccaagtccctgcccaatttccccaatacctctgccaccgctaatgccacgggtgggcgtgccctggctctgcagtcgtccttgccaggtgcagagggccctgacaagcctagcgtcgtgtcagggctgaactcgggccctggtcatgtgtggggccctctcctgggactactgctcctgcctcctctggtgttggctggaatcttctgaaggggataccactcaaaggcaaggcctggtgaggggggccctggcctcatacccacctggattgtcttcctccaagtgagagaccacagcttcctgggcaggtcctgctctgtggcccagcagccccccttcaccccaacttctggccagattccaggccagcactcttgtcctcctgggaggcgtctacagggccagcccctggcactgccccaggagtgccttggctctgggtaggcccatccttcagctggctgcagactgttctgagcggtatttacatgtgcccactctcaggttgtcctgtggccatcagcttctctcccagacagaggatctcaggcttcccaggaacccccgggcccctcccagtcccctggcctcttccttgagccatctgagtccaggactgttcccca

SEQ ID NO: 1652 - DNA, 289 bp, Homo sapiens
  source 1..289: mol_type = genomic DNA; mol_type = genomic DNA
agaaggacgcaggcagcaaagagtagtcagtcccttcttggctctgctgacactcgagcccacattccatcacctgctcccaatcatgcaggtctccactgctgcccttgccgtcctcctctgcaccatggctctctgcaaccaggtcctctctgcaccacttgctgctgacacgccgaccgcctgctgcttcagctacacctcccgacagattccacagaatttcatagctgactactttgagacgagcagccagtgctccaagcccagtgtcatggctgccccaggc

SEQ ID NO: 1653 - DNA, 3719 bp, Homo sapiens
  source 1..3719: mol_type = genomic DNA; mol_type = genomic DNA
ctggagggtctgctccctgtctttccaaggatgagtctccaggagatgttccgcttccctatggggctcctgcttggctctgtgctcctggtggcttcggccccagccactctggagcctcccggctgcagcaacaaggagcaacaggtcactgtcagccacacctacaagatcgatgtgcccaagtctgccttggttcaggttgacgctgaccctcagcccctcagtgacgatggggcttcgctcttggccctgggggaggccagggaggaacagaacatcatcttcaggcacaacatccgccttcagacgccacagaaggactgcgagttggcaggcagtgtccaggacctcctggcccgggtgaagaagctggaggaagagatggtggagatgaaggaacagtgtagtgcccagcgctgctgccagggagtcactgatctaagccgccactgcagcggccacgggaccttctccctggagacctgcagctgccactgcgaagagggcagggagggccccgcctgcgagcggctggcctgccccggggcgtgcagcggccacgggcgttgcgtggacgggcgctgcctgtgccatgagccctacgtgggtgccgactgcggctacccggcctgccctgagaactgcagcggacacggcgagtgcgtgcgcggcgtgtgccagtgccacgaagacttcatgtcggaggactgcagcgagaagcgctgtcccggcgactgcagcggccacggcttctgtgacacgggcgagtgctactgcgaggagggcttcacaggcctggactgtgcccaggtggtcaccccacagggcctgcagctgctcaagaacacggaggattctctgctggtgagctgggagccctccagccaggtggatcactacctcctcagctactaccccctggggaaggagctctctgggaagcagatccaagtgcccaaggagcagcacagctatgagattcttggtttgctgcctggaaccaagtacatagtcaccctgcgtaacgtcaagaatgaagtttctagcagcccacagcatctacttgccaccacagaccttgctgtgcttggcactgcctgggtgacagatgagactgagaactcccttgacgtggagtgggaaaacccctcaactgaggtggactactacaagctgcgatatggccccatgacaggacaggaggtagctgaggtcactgtgcccaagagcagtgaccccaagagccgatatgacatcactggtctgcacccggggactgagtataagatcacggtggtgcccatgagaggagagctggagggcaagccgatcctcctgaatggcaggacagaaattgacagtccaaccaatgttgtcactgatcgagtgactgaagacacagcaactgtctcctgggacccagtgcaggctgtcatagacaagtatgtagtgcgctacacttctgctgatggggacaccaaggaaatggcagtgcacaaggatgagagcagcactgtcctgacgggcctgaagccaggagaggcatacaaggtctacgtgtgggctgaaaggggcaaccaggggagcaagaaagctgacaccaatgccctcacagaaattgacagcccagcaaacctggtgactgaccgggtgactgagaataccgccaccatctcctgggacccggtacaggccaccattgacaggtatgtggtgcgctacacctctgccaaggacggagagaccagggaggttccggtggggaaggagcagagtagcactgtcctgacgggcctgaggccgggtgtggagtacacggtgcacgtgtgggcccagaagggggcccaggagagcaagaaggctgacaccaaggcccagacagacattgacagcccccaaaacctggtcactgactgggtgacagagaatacagccactgtctcctgggacccggtgcaggccaccattgacaggtatgtggtgcactacacgtctgccaacggagagaccagggaggttccagtggggaaggagcagagcagcactgtcctgacgggcctgaggccgggcatggagtacacggtgcacgtgtgggcccagaaggggaaccaggagagcaagaaggctgacaccaaggcccagacagaaattgacggccccaaaaacctagtgactgactgggtgacggagaatatggccactgtctcctgggacccggttcaggccaccattgacaagtacatggtgcgctacacctctgctgacggagagaccagggaggttccggtggggaaggagcacagcagcactgtcctgacgggcctgagaccaggcatggagtacatggtgcacgtgtgggcccagaagggggcccaggagagcaagaaggctgacaccaaggcccagacagaactcgaccctcccagaaaccttcgtccatctgctgtaacgcagtctggtggcatattgacctggacgcccccctctgctcagatccacggctacattctgacttaccagttcccagatggcacagttaaggagatgcagctgggacgggaagaccagaggtttgcgttgcaaggccttgagcaaggcgccacctaccctgtctcccttgttgcctttaagggtggtcgccggagcagaaatgtatccaccaccctctccacagttggtgcccgtttcccacacccttcggactgcagtcaggttcagcagaacagcaatgccgccagtggtctgtacaccatctacctgcatggcgatgccagccggcccctgcaggtgtactgtgacatggaaacggacggaggtggctggattgtcttccagaggcggaacactgggcagctggatttcttcaagcgatggaggagctatgtggaaggctttggggaccccatgaaggagttctggcttggacttgacaagctacacaacctcaccaccggcactccagcgcggtatgaggtgagagtggatttacagactgccaatgaatctgcctatgctatatatgatttcttccaagtggcctccagcaaggagcggtataagctgacagttgggaaatacagaggcacggcaggggatgctcttacttaccacaatggatggaagtttacaacttttgacagagacaatgatatcgcactcagcaactgtgccctgacacatcatggtggctggtggtataagaactgccacttggccaaccctaatggcagatatggggagaccaagcacagtgagggggtgaactgggagccttggaaaggacatgaattctccattccttacgtggagttgaaaatccgccctcatggctacagcagggagcctgtcctgggcagaaagaagcggacgctgagaggaaggctgcgaacgttctgatggcccgtgtgagcagtcctcgcaggagacaccaccagctgtggcagcttggggcggggtgggtagtggtcactgcggtctgggagtgctcagatagcccgcagaacaaatcatgtcaccaagcttcaagccatggaggttccttccctctcacctgcatttttgcccgtctttatgagggtcttgaaaatcaaaatagtagttgcacagtatgtgtaggaaagacagtactggaacggcaaggtttctcagcttatcttcagcaacatatatactggattagggcaagagaaggaatcacccagcacttcaccagttgg

SEQ ID NO: 1654 - DNA, 1952 bp, Homo sapiens
  source 1..1952: mol_type = genomic DNA; mol_type = genomic DNA
tctgcctgctgtcgggggcgggctggccaggccgaggccggagcaggcaggcatcccccggagttgtctcttttcatgccagcgccaacaggaggctgtctggacacactgattactcactcaccagcctccctcttttgtccaccagcccagcctgactcctggagattgtgaatagctccatccagcctgagaaacaagccgggtggctgagccaggctgtgcacggagtgcctgacgggcccaacagacccatgctgcatccagagacctcccctggccgggggcatctcctggctgtgctcctggccctccttggcaccgcctgggcagaggtgtggccaccccagctgcaggagcaggctccgatggccggagccctgaacaggaaggagagtttcttgctcctctccctgcacaaccgcctgcgcagctgggtccagccccctgcggctgacatgcggaggctggactggagtgacagcctgaactggctcaagccagggcctctgtggaatcccaaccccgagcctggcgtccggcctgtggcgcaccctgcaagtgggctggaacatgcagcttgcccgcgggcttggcgtcctttgttgaagtggagcctatggtttgcagaggggcagcggtacagccacgcggcaggagagtgtgctcgcaacgccacctgcacccactacacgcagctcgtgtgggccacctcaagccagctgggctgtgggcggcacctgtgctctgcaggccaggcagcgatagaagcctttgtctgtgcctactcccccagaggcaactgggaggtcaacgggaagacaatcgtcccctataagaagggtgcctggtgttcgctctgcacagccagtgtctcaggctgcttcaaagcctgggaccatgcaggggggctctgtgaggtccccaggaatccttgtcgcatgagctgccagaaccatggacgtctcaacatcagcacctgccactgccactgtccccctggctacacgggcagatactgccaagtgaggtgcagcctgcagtgtgtgcacggccggttccgggaggaggagtgctcgtgcgtctgtgacatcggctacgagcccagtgtgccaccaaggtgcattttcccttccacacctgtgacctgaggatcgacggagactgcttcatggtgtcttcagaggcagacacctattacagagccaggatgaaatgtcagaggaaaggcggggtgctggcccagatcaagagccagaaagtgcaggacatcctcgccttctatctgggccgcctggagaccaccaacgaggtgattgacagtgacttcgagaccaggaacttctggatcgggctcacctacaagaccgccaaggactccttccgctgggccacaggggagcaccaggccttcaccagttttgcctttgggcagcctgacaaccacgggtttggcaactgcgtggagctgcaggcttcagctgccttcaactggaacaaccagcgctgcaaaacccgaaaccgttacatctgccagtttgcccaggagcacatctcccggtggggcccagggtcctgaggcctgaccacatggctccctcgcctgccctgggagcaccggctctgcttacctgtccgcccacctgtctggaacaagggccaggttaagaccacatgcctcatgtccaaagaggtctcagaccttgcacaatgccagaagttgggcagagagaggcagggaggccagtgagggccagggagtgagtgttagaagaagctggggcccttcgcctgcttttgattgggaagatgggcttcaattagatggcaaaggagaggacaccgccagtggtccaaaaaggctgctctcttccacctggcccagaccctgtggggcagcggagcttccctgtggcatgaaccccacagggtattaaattatgaatcagctg

SEQ ID NO: 1655 - DNA, 1924 bp, Homo sapiens
  source 1..1924: mol_type = genomic DNA; mol_type = genomic DNA
agcccagcgctcctccccgcaaatgatcccgccccaggggcctatcccagtccccccagtgcctttggttgctggagggaagaacacaatggatctggtgctaaaaagatgccttcttcatttggctgtgataggtgctttgctggctgtgggggctacaaaagggagccaggtgtggggaggacagccagtgtatccccaggaaactgacgatgcctgcatcttccctgatggtggaccttgcccatctggctcttggtctcagaagagaagctttgtttatgtctggaagacctggggccaatactggcaagttctagggggcccagtgtctgggctgagcattgggacaggcagggcaatgctgggcacacacaccatggaagtgactgtctaccatcgccggggatcccggagctatgtgcctcttgctcattccagctcagccttcaccattactgaccaggtgcctttctccgtgagcgtgtcccagttgcgggccttggatggagggaacaagcacttcctgagaaatcagcctctgacctttgccctccagctccatgaccccagtggctatctggctgaagctgacctctcctacacctgggactttggagacagtagtggaaccctgatctctcgggcacttgtggtcactcatacttacctggagcctggcccagtcactgcccaggtggtcctgcaggctgccattcctctcacctcctgtggctcctccccagttccaggcaccacagatgggcacaggccaactgcagaggcccctaacaccacagctggccaagtgcctactacagaagttgtgggtactacacctggtcaggcgccaactgcagagccctctggaaccacatctgtgcaggtgccaaccactgaagtcataagcactgcacctgtgcagatgccaactgcagagagcacaggtatgacacctgagaaggtgccagtttcagaggtcatgggtaccacactggcagagatgtcaactccagaggctacaggtatgacacctgcagaggtatcaattgtggtgctttctggaaccacagctgcacaggtaacaactacagagtgggtggagaccacagctagagagctacctatccctgagcctgaaggtccagatgccagctcaatcatgtctacggaaagtattacaggttccctgggccccctgctggatggtacagccaccttaaggctggtgaagagacaagtccccctggattgtgttctgtatcgatatggttccttttccgtcaccctggacattgtccagggtattgaaagtgccgagatcctgcaggctgtgccgtccggtgagggggatgcatttgagctgactgtgtcctgccaaggcgggctgcccaaggaagcctgcatggagatctcatcgccagggtgccagccccctgcccagcggctgtgccagcctgtgctacccagcccagcctgccagctggttctgcaccagatactgaagggtggctcggggacatactgcctcaatgtgtctctggctgataccaacagcctggcagtggtcagcacccagcttatcatgcctggtcaagaagcaggccttgggcaggttccgctgatcgtgggcatcttgctggtgttgatggctgtggtccttgcatctctgatatataggcgcagacttatgaagcaagacttctccgtaccccagttgccacatagcagcagtcactggctgcgtctaccccgcatcttctgctcttgtcccattggtgagaacagccccctcctcagtgggcagcaggtctgagtactctcatatgatgctgtgattttcctggagttgacagaaacacctatatttcccccagtcttccctgggagactactattaactgaaataaatactcagagcctg

SEQ ID NO: 1656 - DNA, 815 bp, Homo sapiens
  source 1..815: mol_type = genomic DNA; mol_type = genomic DNA
ctcaggacagtcgctgaaatcactgaatgcctcctcaggtcatttagcacttattttatccagtatctttgggctccttctcctggttctgtttattctatttctcacgtggtgccgagttcagaaacaaaaacatctgcccctcagagtttcaaccagaaggaggggttctctcgaggagaatttattccatgagatggagacctgcctcaagagagaggacccacatgggacaagaacctcagatgacacccccaaccatggttgtgaagatgctagcgacacatcgctgttgggagttcttcctgcctctgaagccacaaaatgactttagacttccagggctcaccagaatcttgatatgtgggtgatgttaagccctcctgacccagcaagttgaaaactcaccatgaagagcagcggtcaaaggaactagggaaatcctacagtgtgatcagtttttctgctgcaggtaagcagagagcatccctttgcactgaataggccactgagccgcattactgcttattaattcctcatcattcctgcctccttttatgttctccctaaatgactaggtttgcggggccaggaactttatttcccacaatccctaacaggaagaatctgggctcgcttccaccagagagacttgttcatggaagatacggtttcgcaaggatctttgtacttgtcctgaaaactgctagcctagatattacagcatggtgccctttagcagtggtttcctgggggttttaaaacttcctgatgagggttttgtaagcataattattccctgtagtaaaccactt

SEQ ID NO: 1657 - DNA, 577 bp, Homo sapiens
  source 1..577: mol_type = genomic DNA; mol_type = genomic DNA
acagtgggcagcccgattttctgctgagtaggcgctgtgatttcagaatgtctgggcgaggtaaaggtggcaaggggctgggtaagggaggcgccaagcgccaccggaaggtgctgcgggacaatatccaaggcattacaaagccggcgattcgccgtctcgcccgacgtgggggcgtcaagcgcatttctggtctcatctacgaggagacccggggagtcctcaaagtcttcctggagaacgtgatccgtgacgcggtgacttacacggagcacgccaagcgcaagaccgtcacggccatggatgtggtgtacgcgctgaaacgccagggtcgcaccctttatggtttcggcggttgagctgtccccacagcttctctacagactccaaaaggcccttttcagggcccccaaactgtcacagaaagagctgttaacacttcctagataacgggtaaatatcaaccctttgatgtcgccttccggataccggaaatgggatattcgcggcccgagcatctgctcgggattagacttggcgggcacggggagaactagacctcaaggagggggttccg

SEQ ID NO: 1658 - DNA, 3187 bp, Homo sapiens
  source 1..3187: mol_type = genomic DNA; mol_type = genomic DNA
atcttagttgctgccgctcccgccccgggctggcgatgctgcgccgccccgctcccgcgctggccccggccgcccggctgctgctggccgggctgctgtgcggcggcggggtctgggccgcgcgagttaacaagcacaagccctggctggagcccacctaccacggcatagtcacagagaacgacaacaccgtgctcctcgaccccccactgatcgcgctggataaagatgcgcctctgcgatttgcagagagttttgaggtgacagtcaccaaagaaggtgagatttgtggatttaaaattcacgggcagaatgtcccctttgatgcagtggtagtggataaatccactggtgagggagtcattcgctccaaagagaaactggactgtgagctgcagaaagactattcattcaccatccaggcctatgattgtgggaagggacctgatggcaccaacgtgaaaaagtctcataaagcaactgttcatattcaggtgaacgacgtgaatgagtacgcgcccgtgttcaaggagaagtcctacaaagccacggtcatcgaggggaagcagtacgacagcattttgagggtggaggccgtggatgccgactgctcccctcagttcagccagatttgcagctacgaaatcatcactccagacgtgccctttactgttgacaaagatggttatataaaaaacacagagaaattaaactacgggaaagaacatcaatataagctgaccgtcactgcctatgactgtgggaagaaaagagccacagaagatgttttggtgaagatcagcattaagcccacctgcacccctgggtggcaaggatggaacaacaggattgagtatgagccgggcaccggcgcgttggccgtctttccaaatatccacctggagacatgtgacgagccagtcgcctcagtacaggccacagtggagctagaaaccagccacatagggaaaggctgcgaccgagacacctactcagagaagtccctccaccggctctgtggtgcggccgcgggcactgccgagctgctgccatccccgagtggatccctcaactggaccatgggcctgcccaccgacaatggccacgacagcgaccaggtgtttgagttcaacggcacccaggcagtgaggatcccggatggcgtcgtgtcggtcagccccaaagagccgttcaccatctcggtgtggatgagacatgggccattcggcaggaagaaggagacaattctttgcagttctgataaaacagatatgaatcggcaccactactccctctatgtccacgggtgccggctgatcttcctcttccgtcaggatccttctgaggagaagaaatacagacctgcagagttccactggaagttgaatcaggtctgtgatgaggaatggcaccactacgtcctcaatgtagaattcccgagtgtgactctctatgtggatggcacgtcccacgagcccttctctgtgactgaggattacccgctccatccatccaagatagaaactcagctcgtggtgggggcttgctggcaaggtggcgacctgcacatgacccagtttttccgaggcaatctggctggcttaactctccgttccgggaaactcgcggataagaaggtgatcgactgtctgtatacctgcaaggaggggctggacctgcaggtcctcgaagacagtggcagaggcgtgcagatccaagcacaccccagccagttggtattgaccttggagggagaagacctcggggaattggataaggccatgcagcacatctcgtacctgaactcccggcagttccccacgcccggaattcgcagactcaaaatcaccagcacaatcaagtgttttaacgaggccacctgcatttcggtccccccggtagatggctacgtgatggttttacagcccgaggagcccaagatcagcctgagtggcgtccaccattttgcccgagcagcttctgaatttgaaagctcagaaggggtgttccttttccctgagcttcgcatcatcagcaccatcacgagagaagtggagcctgaaggggacggggctgaggaccccacagttcaagaatcactggtgtccgaggagatcgtgcacgacctggatacctgtgaggtcacggtggagggagaggagctgaaccacgagcaggagagcctggaggtggacatggcccgcctgcagcagaagggcattgaagtgagcagctctgaactgggcatgaccttcacaggcgtggacaccatggccagctacgaggaggttttgcacctgctgcgctatcggaactggcatgccaggtccttgcttgaccggaagtttaagctcatctgctcagagctgaatggccgctacatcagcaacgaatttaaggtggaggtgaatgtaatccacacggccaaccccatggaacacgccaaccacatggctgcccagccacagttcgtgcacccggaacaccgctcctttgttgacctgtcaggccacaacctggccaacccccacccgttcgcagtcgtccccagcactgcgacagttgtgatcgtggtgtgcgtcagcttcctggtgttcatgattatcctgggggtatttcggatccgggccgcacatcggcggaccatgcgggatcaggacaccgggaaggagaacgagatggactgggacgactctgccctgaccatcaccgtcaaccccatggagacctatgaggaccagcacagcagtgaggaggaggaggaagaggaagaggaagaggaaagcgaggacggcgaagaagaggatgacatcaccagcgccgagtcggagagcagcgaggaggaggagggggagcagggcgacccccagaacgcaacccggcagcagcagctggagtgggatgactccaccctcagctactgacccgtgcccccggccacctcggtttctgctttcgaagactctgctgccatccgttctcccagtcccaagggtccacgatgtacaaagtcatttcggccagtaggtgtgcagacccctccccgccacgatcgtcgctgtgcttggtgtgtaggaccctaggctccccgcccaccctctgcctggtcgcgctcttcagtcccacgaggagctgacacgtcctctctggccgccatccggctcgcacaggggcctcccagcgcctc

SEQ ID NO: 1659 - DNA, 1967 bp, Homo sapiens
  source 1..1967: mol_type = genomic DNA; mol_type = genomic DNA
tctgcctgctgtcgggggcgggctggccaggccgaggccggagcaggcaggcatcccccggagttgtctcttttcatgccagcgccaacaggaggctgtctggacacactgattactcactcaccagcctccctcttttgtccaccagcccagcctgactcctggagattgtgaatagctccatccagcctgagaaacaagccgggtggctgagccaggctgtgcacggagcgcctgacgggcccaacagacccatgctgcatccagagacctcccctggccgggggcatctcctggctgtgctcctggccctccttggcaccgcctgggcagaggtgtggccaccccagctgcaggagcaggctccgatggccggagccctgaacaggaaggagagtttcttgctcctctccctgcacaaccgcctgcgcagctgggtccagccccctgcggctgacatgcggaggctggactggagtgacagcctggcccagctggctcaagccagggcagccctctgtggaaccccaaccccgagcctggcgtccggcctgtggcgcaccctgcaagtgggctggaacatgcagctgctacccgcgggcttggtgtcctttgtcgaagtggtcagcctatggtttgcagaggggcagcggtacagccacgcggcaggagagtgtgctcgcaacgccacctgcacccactacacgcagctcgtgtgggccacctcaagccagctgggctgtgggcggcacctgtgctctgcaggccaggcagcgatagaagcctttgtctgtgcctactcccccagaggcaactgggaggtcaacgggaagacaatcgtcccctataagaagggtgcctggtgttcgctctgcacagccagtgtctcaggctgcttcaaagcctgggaccatgcaggggggctctgtgaggtccccaggaatccttgtcgcatgagctgccagaaccatggacgtctcaacatcagcacctgccactgccactgtccccctggctacacgggcagatactgccaagtgaggtgcagcctgcagtgtgtgcacggccggttccgggaggaggagtgctcgtgcgtctgtgacatcggctacggggagcccagtgtgccaccaaggtgcattttcccttccacacctgtgacctgaggatcgacggagactgcttcatggtgtcttcagaggcagacacctattacagagccaggatgaaatgtcagaggaaaggcggggtgctggcccagatcaagagccagaaagtgcaggacatcctcgccttctatctgggccgcctggagaccaccaacgaggtgattgacagtgacttcgagaccaggaacttctggatcgggctcacctacaagaccgccaaggactccttccgctgggccacaggggagcaccaggccttcaccagttttgcctttgggcagcctgacaaccacgggtttggcaactgcgtggagctgcaggcttcagctgccttcaactggaacgaccagcgctgcaaaacccgaaaccgttacatctgccagtttgcccaggagcacatctcccggtggggcccagggtcctgaggcctgaccacatggctccctcgcctgccctgggagcaccggctctgcttacctgtctgcccacctgtctggaacaagggccaggttaagatcacatgcctcatgtccaaagaggtctcagaccttgcacaatgccagaagttgggcagagagaggcagggaggccagtgagggccagggagtgagtgttagaagaagctggggcccttcgcctgcttttgattgggaagatgggcttcaattagatggcgaaggagaggacaccgccagtggtccaaaaaggctgctctcttccacctggcccagaccctgtggggcagcggagcttccctgtggcatgaaccccacagggtattaaattatgaatcagctg

SEQ ID NO: 1660 - DNA, 1560 bp, Homo sapiens
  source 1..1560: mol_type = genomic DNA; mol_type = genomic DNA
gtacctgtagctgcggcgctgaggtcggaacgtctgcgtgtgtgcgggctggttttgtggcggctgctgctagagctggagcatttgccgggttggtggctcctgcacatttttacagttctccagtccttctctttcgtcagtataaaagattaaactctacagaagaatgcaatcaagtgatggcttttcctttagaatttgaatatggaggctacaggaacagatgaagttgacaagctaaaaaccaaatttatatctgcttggaacaacatgaaatatagttgggtgttgaaaacaaagacgtattttagtagaaattctcctgtattattgcttggaaaatgttaccattttaaatatgaagatgaagataaaacgttacctgcagagtcgggatgtacaatagaggatcacgtaattgcaggaaatgtagaagaatttcgtaaagatttcatttctagaatatggctgacctacagggaagaattccctcaaatagaaggctcagctttgacaacagactgtgggtggggctgcacattgagaactggccagatgctcttggctcaaggactcatactacactttcttggtagagcttggacctggcctgatgctttgaatattgaaaattcagactctgaatcatggacttcccacactgtcaaaaaatttactgcatcatttgaagcatcactttcaggggaaagagaattcaaaaccccaacaatttctctgaaggaaacaattgggaaatattctgatgatcatgaaatgcgaaatgaagtttatcataggaaaatcatctcttggtttggtgattcccccttggctctttttggcttacatcaactaatagaatatggaaagaagtctgggaaaaaagcaggagattggtatggaccagctgtggttgctcacattttaagaaaagcagttgaagaagcaaggcatcctgatttacaaggaataactatttatgttgcacaagattgtacagtttacaattctgatgtaattgataaacagagtgcttccatgacttctgataatgcagatgacaaagctgttattattctagttcctgttagacttggtggagaaagaaccaacaccgactacttagaatttgtgaagggtattttaagcctggaatattgtgtgggtattattggtggcaaacctaaacagtcatattactttgctggatttcaagatgacagtttgatttacatggatcctcattactgccaatcttttgtagatgtcagcataaaggatttccctcttgagacattccactgcccttctcccaaaaagatgtcttttcgaaaaatggatcccagctgtacaataggattttactgtcgaaatgttcaggacttcaaacgagcttctgaagaaatcaccaagatgctgaaattttcttctaaggagaaatatcccttatttacttttgtaaatggtcattccagagactatgattttacatctactacaaccaatgaagaagaccttttttcagaggatgaaaagaaacaaaaaaaaaaaaaaaaa

SEQ ID NO: 1661 - DNA, 2199 bp, Homo sapiens
  source 1..2199: mol_type = genomic DNA; mol_type = genomic DNA
ggtttccaccctggaggttgctgacaccctgtgccctcggctgacttccagccggtggcacagacgcctccagggggcagcactcaagcgcatcttaggaatgacagagttgcgtccctctcggttgccaggctggagttcagtggcatgttcatagctcactgaagcctcaaattcctgggttcaagtgaccctcctacctcagccccatgaggacctgggactacagatggagtcttgctctcgttgcccagactggagtgcactgctgcaatctcagctcactgcaacctctacctcccaggttcaagcgattctcctgcctcagcctctcgagtggctgggactatagtaacagcgggaacatgaagccgccactcttggtgtttattgtgtgtctgctgtggttgaaagacagtcactgcgcacccacttggaaggacaaaactgctatcagtgaaaacctgaagagtttttctgaggtgggggagatagatgcagatgaagaggtgaagaaggctttgactggtattaagcaaatgaaaatcatgatggaaagaaaagagaaggaacacaccaatctaatgagcaccctgaagaaatgcagagaagaaaagcaggaggccctgaaacttctgaatgaagttcaagaacatctggaggaagaagaaaggctatgccgggagtctttggcagattcctggggtgaatgcaggtcttgcctggaaaataactgcatgagaatttatacaacctgccaacctagctggtcctctgtgaaaaataagattgaacggtttttcaggaagatatatcaatttctatttcctttccatgaagataatgaaaaagatctccccatcagtgaaaagctcattgaggaagatgcacaattgacccaaatggaggatgtgttcagccagttgactgtggatgtgaattctctctttaacaggagttttaacgtcttcagacagatgcagcaagagtttgaccagacttttcaatcacatttcatatcagatacagacctaactgagccttacttttttccagctttctctaaagagccgatgacaaaagcagatcttgagcaatgttgggacattcccaacttcttccagctgttttgtaatttcagtgtctctatttatgaaagtgtcagtgaaacaattactaagatgctgaaggcaatagaagatttaccaaaacaagacaaagctcctgaccacggaggcctgatttcaaagatgttacctgggcaggacagaggactgtgtggggaacttgaccagaatttgtcaagatgtttcaaatttcatgaaaaatgccaaaaatgtcaggctcacctatctgaagactgtcctgatgtacctgctctgcacacagaattagacgaggcgatcaggttggtcaatgtatccaatcagcagtatggccagattctccagatgacccggaagcacttggaggacaccgcctatctggtggagaagatgagagggcaatttggctgggtgtctgaactggcaaaccaggccccagaaacagagatcatctttaattcaatacaggtagttccaaggattcatgaaggaaatatttccaaacaagatgaaacaatgatgacagacttaagcattctgccttcctctaatttcacactcaagatccctcttgaagaaagtgctgagagttctaacttcattggctacgtagtggcaaaagctctacagcattttaaggaacattttaaaacctggtaagaagatctaatgcatcctatatccagtaagtagaattatctcttcatctgggacctggaaatcctgaaataaaaaaggataatgcaataaacacagttgcaggaaagtatgttagctatatactatgaagtactcttagtttacttatgttgaatggcttagctattaatactcaaattgagttaaaatgaaaattcctccttaaaaaatcaaacgtaatatgtattacatttcatggtacattagtagttctttgtatattgaataaatactaaatcacctaggtgtctatgttctatcacatctacaaacatgtcacttcctaattaacaaaatgttcttcctttagtttgcttttgcacttaaaatatatataattgacttttttggaaaaaaatctaagattcattgctttgttttgtaaagaccaata

SEQ ID NO: 1662 - DNA, 2131 bp, Homo sapiens
  source 1..2131: mol_type = genomic DNA; mol_type = genomic DNA
accaacagccgcatcgttccgaggctgtggaggccgggcgcagcggcgtcaagatggcggctgcggcagtggcggcgccagggcctcttctgcgacattaccctgtgcttcggcggggctggaggccgcgagttccgggcccaccgctcggtactggctgccgccaccgagtacttcacgcccctgctctcgggccagttttccgagtcccgctcgggacgggtggagatgcgcaagtggagctccgagccggggcccgaacccgacacagtggaagccgtaatcgagtacatgtacaccgggcgcatccgcgtcagcacgggcagcgtgcacgaggtgctggagttggccgacaggttcctactcattcgtttaaaagaattttgtggagaatttctcaagaaaaaacttcatctctcaaattgtgtggcaattcatagcttagcacacatgtacaccctgagccaacttgctctgaaggctgctgatatgatacggagaaatttccacaaagtgattcaggatgaagaattttatacgttacctttccatctcattagagactggctttcagatttggaaattacagttgattctgaagaggttctctttgaaaccgttttgaaatgggttcagagaaatgctgaagagagagagagatactttgaagaactttttaaattgctcaggttgtcccagatgaaacctacctaccttactcgacatgtcaaaccagagaggctggtagccaataatgaagtttgtgtcaagttggtcgctgacgcagtggagagacatgctctgagagctgagaatatacaatctggcacatgccagcaccccacttctcatgtgtcactattgcctcgttatgggcaaaacatggatgtgatcatggttattggaggtgtgtcagaaggaggggactatttaagtgaatgtgtgggatactttgttgatgaggacagatgggtaaatctgccacatattcataatcacctcgatggacatgctgttgcagtaacagaatcctacgtgtatgttgctggatcaatggagccagggtttgctaaaactgtagaaaggtataacccaaatttgaatacatgggaacatgtttgtagtctgatgacaagaaagcattcttttggactaacagaagtcaaagggaagctctatagcattggaggacatggcaactttagtcctggttttaaagatgtgactgtttataatcctgagcttgataaatggcacaacttggaatcggcaccaaagattcttcgagatgtcaaagcactagccattgaagaccggtttgtatacattgccgcccgcactcctgtagaccgggacactgaagatggattaaaggctgtaattacttgctatgatacagagactcgacagtggcaagatgtggaatctttgccgcttattgacaattactgctttttccaaatgtctgtggtcaattcaaacttttatcagacagcatcatgttgtcccaagagttattgtttagaaaacgaagaggcagtaagaaaaattgccagccaagtgtctgatgagatccttgaaagcttgcctccagaagtcctaagcatcgaaggagcagccatttgctattacaaagatgatgtcttcattataggaggctggaaaaacagtgatgatattgataaacagtatcggaaagaagcctaccgatattgtgcggagaggaagaggtggatgcttcttcctcctatgccacaacctcgttgtagagccactgcttgtcacgtgaggatcccataccggtacttgcatggcacacagagataccctatgcctcaaaacctgatgtggcagaaggaccgcatcagacagatgcaagagatacatcgtcacgccctgaacatgaggcgagtgccaagctctcagattgaatgctaggttctctcaagcgtgccgattaaaactgttacacccgtttcgtgaagctgaagatacccaggctgttatttaaaaaagtatgtcgataacttattttctacatgaactgattattaccccatataaaggaaatagagttaaaaactaaagaatgggagactcagttcaatacatggtcattttgttagcttgc

SEQ ID NO: 1663 - DNA, 1942 bp, Homo sapiens
  source 1..1942: mol_type = genomic DNA; mol_type = genomic DNA
ggccagctggctatcagacaatgacatgctttgacaggcccctgagctctgtgagtaaattcttgaacagctgagagtgctaccattttgtcatagccctaagggtgcagatgatgctgaaagcgtgttggccaaatctgaatgatgaaagccaattacaaactagaaaatgaaaacagaccccagatgcaaggagatgagacagttaaatttacttcctcttttctaatctgagaggtttcatgttgaagaaaatcagtgttggggttgcaggagacctaaacacagtcaccatgaagctgggctgtgtcctcatggcctgggccctctacctttcccttggtgtgctctgggtggcccagatgctactggcagctggatgtcatgccgaactgtttccagcgccaattctcagagctgtaccctcagctgaaccccaagcaggaagccccatgaccctgagttgtcagacaaagttgcccctgcagaggtcagctgcccgcctcctcttctccttctacaaggatggaaggatagtgcaaagcagggggctctcctcagaattccagatccccacagcttcagaagatcactccgggtcatactggtgtgaggcagccactgaggacaaccaagtttggaaacagagcccccagctagagatcagagtgcagggtgcttccagctctgctgcacctcccacattgaatccagctcctcagaaatcagctgctccaggaactgctcctgaggaggcccctgggcctctgcctccgccgccaaccccatcttctgaggatccaggcttttcttctcctctggggatgccagatcctcatctgtatcaccagatgggccttcttctcaaacacatgcaggatgtgagagtcctcctcggtcacctgctcatggagttgagggaattatctggccaccggaagcctgggaccacaaaggctactgctgaatagaagtaaacagttcatccatgatctcacttaaccaccccaataaatctgattctttattttctcttcctgtcctgcacatatgcataagtacttttacaagttgtcccagtgttttgttagaataatgtagttaggtgagtgtaaataaatttatataaagtgagaattagagtttagctataattgtgtattctctcttaacacaacagaattctgctgtctagatcaggaatttctatctgttatatcgaccagaatgttgtgatttaaagagaactaatggaagtggattgaatacagcagtctcaactgggggcaattttgccccccagaggacattgggcaatgtttggagacattttggtcattatacttggggggttgggggatggtgggatgtgtgtgctactggcatccagtaaatagaagccaggggtgccgctaaacatcctataatgcacagggcagtaccccacaacgaaaaataatctggcccaaaatgtcagttgtactgagtttgagaaaccccagcctaatgaaaccctaggtgttgggctctggaatgggactttgtcccttctaattattatctctttccagcctcattcagctattcttactgacataccagtctttagctggtgctatggtctgttctttagttctagtttgtatcccctcaaaagccattatgttgaaatcctaatccccaaggtgatggcattaagaagtgggcctttgggaagtgattagatcaggagtgcagagccctcatgattaggattagtgcccttatttaaaaaggccccagagagctaactcacccttccaccatatgaggacgtggcaagaagatgacatgtatgagaaccaaaaaacagctgtcgccaaacaccgactctgtcgttgccttgatcttgaacttccagcctccagaactatgagaaataaaattctgttgtttgtaagct

SEQ ID NO: 1664 - DNA, 1825 bp, Homo sapiens
  source 1..1825: mol_type = genomic DNA; mol_type = genomic DNA
ttttgctttgggttccgtcttctcactgcggaccctggattgaaacgatctccccgcggccgccgccgctacctggtgcccgcaggtgcctgcaggagtcctggggccagctggcctcgatgtacgtcagcacgcgggaacggtacaagtggctgcgcttcagcgaggactgtctgtacctgaacgtgtacgcgccggcgcgcgcgcccggggatccccagctgccagtgatggtctggttcccgggaggcgccttcatcgtgggcgctgcttcttcgtacgagggctctgacttggccgcccgcgagaaagtggtgctggtgtttctgcagcacaggctcggcatcttcggcttcctgagcacggacgacagccacgcgcgcgggaactgggggctgctggaccagatggcggctctgcgctgggtgcaggagaacatcgcagccttcgggggagacccaggaaatgtgaccctgttcggccagtcggcgggggccatgagcatctcaggactgatgatgtcacccctagcctcgggtctcttccatcgggccatttcccagagtggcaccgcgttattcagacttttcatcactagtaacccactgaaagtggccaagaaggttgcccacctggctggatgcaaccacaacagcacacagatcctggtaaactgcctgagggcactatcagggaccaaggtgatgcgtgtgtccaacaagatgagattcctccaactgaacttccagagagacccggaagagattatctggtccatgagccctgtggtggatggtgtggtgatcccagatgaccctttggtgctcctgacccaggggaaggtttcatctgtgccctaccttctaggtgtcaacaacctggaattcaattggctcttgccttatatcatgaagttcccgctaaaccggcaggcgatgagaaaggaaaccatcactaagatgctctggagtacccgcaccctgttgaatatcaccaaggagcaggtaccacttgtggtggaggagtacctggacaatgtcaatgagcatgactggaagatgctacgaaaccgtatgatggacatagttcaagatgccactttcgtgtatgccacactgcagactgctcactaccaccgagatgccggcctccctgtctacctgtatgaatttgagcaccacgctcgtggaataatcgtcaaaccccgcactgatggggcagaccatggggatgagatgtacttcctctttgggggccccttcgccacaggcctttccatgggtaaggagaaggcacttagcctccagatgatgaaatactgggccaactttgcccgcacaggaaaccccaatgatgggaatctgccctgctggccacgctacaacaaggatgaaaagtacctgcagctggattttaccacaagagtgggcatgaagctcaaggagaagaagatggctttttggatgagtctgtaccagtctcaaagacctgagaagcagaggcaattctaagggtggctatgcaggaaggagccaaagaggggtttgcccccaccatccaggccctggggagactagccatggacatacctggggacaagagttctacccaccccagtttagaactgcaggagctccctgctgcctccaggccaaagctagagcttttgcctgttgtgtgggacctgcactgccctttccagcctgacatcccatgatgcccctctacttcactgttgacatccagttaggccaggccctgtcaacaccacactgtgctcagctctccagcctcaggacaacctctttttttcccttcttcaaat

SEQ ID NO: 1665 - DNA, 2408 bp, Homo sapiens
  source 1..2408: mol_type = genomic DNA; mol_type = genomic DNA
cttctttccgctccaacgcacggagggtgaggtcggtacgcggtggtggcgtcacggcgccagctcctcccgacgccgagattgggtaactcaaggcgtccctggagtacactgaggataagtgtttgagaaatgctgtctgaaggaatgaagtcagtctatgacaacgtctctctgccgtgaatcattcctgcagatgaaaaagtgtgacttggcagctgccaatctaaaaagggccctcaggatcgcccacaatgcccagcttagcttcttgacaaacaccttaatggcgcagcattgcctgttggctgccatcggctcttgagtgggtggagccggcgcacgtgcaggagccaccagtggtgcaggagcagttggggtccatttcaagccgcggtaaggctggagatctcaagcgataatggagagacagcaaggcgcacgtggacggcgtgttcaccaattaccaaactttttgacctgagcaactagaagaatggagttgccattatttgacacaaagaagactgcaggagggacaggtttgagtagaaatatgaagagctcacccaagtggatgtgagacaggatctcactctgtcacccaggctggagtgcactggcatgatcatagctcactgcaacctcaaactcctgggctcgagcgatcctcccacctcagtctcctgagtagctatgactacggggagcgagtcaaggccatgttctaccacgcctacgacagctacctggagaatgcctttcccttcgatgagctgcgacctctcacctgtgacgggcacgacacctggggcagtttttctctgactctaattgatgcactggacaccttgctgattttggggaatgtctcagaattccaaagagtggttgaagtgctccaggacagcgtggactttgatattgatgtgaacgcctctgtgtttgaaacaaacattcgagtggtaggaggactcctgtctgctcatctgctctccaagaaggctggggtggaagtagaggctggatggccctgttccgggcctctcctgagaatggctgaggaggcggcccgaaaactcctcccagcctttcagacccccactggcatgccatatggaacagtgaacttacttcatggcgtgaacccaggagagacccctgtcacctgtacggcagggattgggaccttcattgttgaatttgccaccctgagcagcctcactggtgacccggtgttcgaagatgtggccagagtggctttgatgcgcctctgggagagccggtcagatatcgggctggtcggcaaccacattgatgtgctcactggcaagtgggtggcccaggacgcaggcatcggggctggcgtggactcctactttgagtacttggtgaaaggagccatcctgcttcaggataagaagctcatggccatgttcctagagtataacaaagccatccggaactacacccgcttcgatgactggtacctgtgggttcagatgtacaaggggactgtgtccatgccagtcttccagtccttggaggcctactggcctggtcttcagagcctcattggagacattgacaatgccatgaggaccttcctcaactactacactgtatggaagcagtttggggggctcccggaattctacaacattcctcagggatacacagtggagaagcgagagggctacccacttcggccagaacttattgaaagcgcaatgtacctctaccgtgccacgggggatcccaccctcctagaactcggaagagatgctgtggaatccattgaaaaaatcagcaaggtggagtgcggatttgcaacagtaagtgtttgcatggccccaagaactgggaagagtctccccttgctgctaaaaagcctctttaagggtagagctttgggagttctgacatatcagcactagaagggaccttggagatatacataatgctcatattttacagatggggagaccaaagaacagagaagctaagtgccttgctaaagatctcacagctagtagaggtagagctagaattagttccttgggatcttgaccccggcccttggcattcctcccacagtggagatctttgatctgtttgaataggtgactttgaaaaggtgagtttagcgaaaagttttgtgagacactaaaatagattttaaggggaatccagagtcccatagccctatattcaaacctgggactccttaacaaagcagtcctgcttagtctcacagatatttcttgaatgtctttcacatgccaggcactctgctaggcccaagggttacagcagtggccttgctctcatggagcttacattttaatgagaaaaaaaccatgaatgtgtatctggtagacagaaggccagtgtggctggagcggagc

SEQ ID NO: 1666 - DNA, 1726 bp, Homo sapiens
  source 1..1726: mol_type = genomic DNA; mol_type = genomic DNA
agaaacacctagagaagctaaagtactgctggggttatgagaaatcctgcaaaccagagttcaggtttggttacccagtttgcagctatgtcgacatgggatggacggacactcttgagtcagctgaggacatattttggaaacaagctgactttggatatgccagagagaggctggaggagatgcatgtgctctgtcagcctaaggaaacgagtgactcaagtctggtgtgttcccgttatcttcagtactgcagagcaaccaatctctatcttgatttaagaaacatcaagagaaatcatgacagatttaaggaggactttttccagagtggtgaaattggagggcactgtaaacttgacatccgtacattgacgtctgaaggtcagcgcaaaagccctctgcagtcatggtttgctgagctacaaagctatactcagctcaacttcagacctatagaagatgctaaatgtgacattgtcattgaaaaaccaacatatttcatgaaattagatgcaggtgttaacatgtatcaccacttctgtgatttcatcaatctttatattactcagcacgttaataactcattcagtactgacgtgtacatcgtgatgtgggacaccagttcttacggatatggtgacctattctccgacacatggaatgcatttactgattatgacgttatacatttgaaaacttatgattccaaaagggtatgttttaaagaagctgttttttcattactcccccgcatgaggtatgggctgttctataatactcctctgatatctggctgtcaaaatactggactattcagggcatttgcccagcatgtactacacagactaaacatcacacaagaaggacctaaggatggaaaaattcgagtcaccattcttgcacggagcacagaataccggaaaatccttaaccaaaatgagcttgtaaatgcactgaaaacagtatctacatttgaagtccagattgttgattacaagtatagagaacttgggtttttagatcaactaaggatcacacacaacacggacatatttattggaatgcatggagctggtctgacccatttacttttccttccagactgggctgctgtatttgaactgtacaactgtgaagatgaacgctgttacttagacttggccaggctgagaggcgttcactacatcacttggcgacggcagaacaaagtctttcctcaggataagggccaccatccaaccctgggggagcacccgaagttcaccaactactctttcgatgtagaagaatttatgtatcttgtccttcaggctgcagaccacgtattgcaacacccaaagtggccatttaagaagaaacatgatgagctataaatatgctgagtctgtttgcaaaaagagagtgtttaaacactccaacacccagacttagaattaaatcagtaaagcaatctgttatttcctatccccgaattaccttttctatgccaaaacataccttcaggatattgttatgtgttgtatagatgttaagtgtttcatgtggtttttgtgtcattgctatttatcaatagcaataattttgcactgaaaactttttatagttcaaaaattaagcatggactccccagtatactttaactttctttctttctttttttttttttggagacagagtctcactgtcacccaggctggagtgcagtggcatgatctcagtttat

SEQ ID NO: 1667 - DNA, 2362 bp, Homo sapiens
  source 1..2362: mol_type = genomic DNA; mol_type = genomic DNA
ggccagctggctatcagacaatgacatgctttgacaggcccctgagctctgtgagtaaattcttgaacagctgagagtgctaccattttgtcatagccctaagggtgcagatgatgctgaaagcgtgttggccaaatctgaatgatgaaagccaattacaaactagaaaatgaaaacagaccccagatgcaaggagatgagacagttaaatttacttcctcttttctaatctgagaggtttcatgttgaagaaaatcagtgttggggttgcaggagacctaaacacagtcaccatgaagctgggctgtgtcctcatggcctgggccctctacctttcccttggtgtgctctgggtggcccagatgctactggttgcatcatcattttctgctgccagttttgagacgctgcagtgtgagggacctgtctgcactgaggagagcagctgccacacggaggatgacttgactgatgcaagggaagctggcttccaggtcaaggcctacactttcagtgaacccttccacctgattgtgtcctatgactggctgatcctccaaggtccagccaagccagtttttgaaggggacctgctggttctgcgctgccaggcctggcaagactggccactgactcaggtgaccttctaccgagatggctcagctctgggtccccccgggcctaacagggaattctccatcaccgtggtacaaaaggcagacagcgggcactaccactgcagtggcatcttccagagccctggtcctgggatcccagaaacagcatctgttgtggctatcacagtccaagaactgtttccagcgccaattctcagagctgtaccctcagctgaaccccaagcaggaagccccatgaccctgagttgtcagacaaagttgcccctgcagaggtcagctgcccgcctcctcttctccttctacaaggatggaaggatagtgcaaagcagggggctctcctcagaattccagatccccacagcttcagaagatcactccgggtcatactggtgtgaggcagccactgaggacaaccaagtttggaaacagagcccccagctagagatcagagtgcagggtgcttccagctctgctgcacctcccacattgaatccagctcctcagaaatcagctgctccaggaactgctcctgaggaggcccctgggcctctgcctccgccgccaaccccatcttctgaggatccaggcttttcttctcctctggggatgccagatcctcatctgtatcaccagatgggccttcttctcaaacacatgcaggatgtgagagtcctcctcggtcacctgctcatggagttgagggaattatctggccaccggaagcctgggaccacaaaggctactgctgaatagaagtaaacagttcatccatgatctcacttaaccaccccaataaatctgattctttattttctcttcctgtcctgcacatatgcataagtacttttacaagttgtcccagtgttttgttagaataatgtagttaggtgagtgtaaataaatttatataaagtgagaattagagtttagctataattgtgtattctctcttaacacaacagaattctgctgtctagatcaggaatttctatctgttatatcgaccagaatgttgtgatttaaagagaactaatggaagtggattgaatacagcagtctcaactgggggcaattttgccccccagaggacattgggcaatgtttggagacattttggtcattatacttggggggttgggggatggtgggatgtgtgtgctactggcatccagtaaatagaagccaggggtgccgctaaacatcctataatgcacagggcagtaccccacaacgaaaaataatctggcccaaaatgtcagttgtactgagtttgagaaaccccagcctaatgaaaccctaggtgttgggctctggaatgggactttgtcccttctaattattatctctttccagcctcattcagctattcttactgacataccagtctttagctggtgctatggtctgttctttagttctagtttgtatcccctcaaaagccattatgttgaaatcctaatccccaaggtgatggcattaagaagtgggcctttgggaagtgattagatcaggagtgcagagccctcatgattaggattagtgcccttatttaaaaaggccccagagagctaactcacccttccaccatatgaggacgtggcaagaagatgacatgtatgagaaccaaaaaacagctgtcgccaaacaccgactctgtcgttgccttgatcttgaacttccagcctccagaactatgagaaataaaattctgttgtttgtaagct

SEQ ID NO: 1668 - DNA, 2203 bp, Homo sapiens
  source 1..2203: mol_type = genomic DNA; mol_type = genomic DNA
aaaagtgtgctcacacactgtagacacggctaccatgccatccacagtgttgccatccacagtgttgccatcactcctgcccacagcaggagctggctggagcatgaggtggattctgtgctggagcctcaccctctgcctgatggcgcagacggccttgggtgccttgcacaccaagaggcctcaagtggtcaccaaatatggaaccctgcaaggaaaacagatgcatgtggggaagacacccatccaagtctttttaggagtccccttctccagacctcctctaggtatcctcaggtttgcacctccagaacccccggagccctggaaaggaatcagagatgctaccacctacccgcctgggtgcctgcaggagtcctggggccagctggcctcgatgtacgtcagcacgcgggaacggtacaagtggctgcgcttcagcgaggactgtctgtacctgaacgtgtacgcgccggcgcgcgcgcccggggatccccagctgccagtgatggtctggttcccgggaggcgccttcatcgtgggcgctgcttcttcgtacgagggctctgacttggccgcccgcgagaaagtggtgctggtgtttctgcagcacaggctcggcatcttcggcttcctgagcacggacgacagccacgcgcgcgggaactgggggctgctggaccagatggcggctctgcgctgggtgcaggagaacatcgcagccttcgggggagacccaggaaatgtgaccctgttcggccagtcggcgggggccatgagcatctcaggactgatgatgtcacccctagcctcgggtctcttccatcgggccatttcccagagtggcaccgcgttattcagacttttcatcactagtaacccactgaaagtggccaagaaggttgcccacctggctggatgcaaccacaacagcacacagatcctggtaaactgcctgagggcactatcagggaccaaggtgatgcgtgtgtccaacaagatgagattcctccaactgaacttccagagagacccggaagagattatctggtccatgagccctgtggtggatggtgtggtgatcccagatgaccctttggtgctcctgacccaggggaaggtttcatctgtgccctaccttctaggtgtcaacaacctggaattcaattggctcttgccttatatcatgaagttcccgctaaaccggcaggcgatgagaaaggaaaccatcactaagatgctctggagtacccgcaccctgttgaatatcaccaaggagcaggtaccacttgtggtggaggagtacctggacaatgtcaatgagcatgactggaagatgctacgaaaccgtatgatggacatagttcaagatgccactttcgtgtatgccacactgcagactgctcactaccaccgagaaaccccaatgatgggaatctgccctgctggccacgctacaacaaggatgaaaagtacctgcagctggattttaccacaagagtgggcatgaagctcaaggagaagaagatggctttttggatgagtctgtaccagtctcaaagacctgagaagcagaggcaattctaagggtggctatgcaggaaggagccaaagaggggtttgcccccaccatccaggccctggggagactagccatggacatacctggggacaagagttctacccaccccagtttagaactgcaggagctccctgctgcctccaggccaaagctagagcttttgcctgttgtgtgggacctgcactgccctttccagcctgacatcccatgatgcccctctacttcactgttgacatccagttaggccaggccctgtcaacaccacactgtgctcagctctccagcctcaggacaacctctttttttcccttcttcaaatcctcccacccttcaatgtctccttgtgactccttcttatgggaggtcgacccagactgccactgcccctgtcactgcacccagcttggcatttaccatccatcctgctcaaccttgtgcctgtctgttcacattggcctggaggcctagggcaggttgtgacatggagcaaacttttggtagtttgggatcttctctcccacccacacttatctcccccagggccactccaaagtctatacacaggggtggtctcttcaataaagaagtgttgattagacctgaatttctccacctataaaa

SEQ ID NO: 1669 - DNA, 2243 bp, Homo sapiens
  source 1..2243: mol_type = genomic DNA; mol_type = genomic DNA
atgacgactccctcctctggaacagccgccgtctcctccgcctcctcctcggtagttcacggctgccccggctccaggcctgtggaaatcgaatcaagggtttctggagtggagtgattccagctgctttgagctgaaggaaaagtagcctggccagtaaagcgtccgtgtgctggaggagtgcagccacccatcccggcgggccttgcaggacgaccgacaccaggaaggctttgtgccaggcccagcagccacccccagccgccttatgcaagtgggtacatgccctcgccagacgccagctttctgatctgcgtctttagattttttccatcgcctaagcgttacttctccactgatcggttttagagacctgaaacatcacagaagcttctgagtggttctgaagattcaagaggtttgcaggttgctatgttaatgttgtttgtctttggagtcttacttcatgaagtctcactgagtggtcagaatgaagctcctcctaatactcacagcattccaggcgaacctctgtataactatgccagcatccgcttgccagaggagcacattcccttctttttgcacaacaataggcatattgccactgtctgtaggaaagactctctttgtccatataagaaacacctagagaagctaaagtactgctggggttatgagaaatcctgcaaaccagagttcaggtttggttacccagtttgcagctatgtcgacatgggatggacggacactcttgagtcagctgaggacatattttggaaacaagctgactttggatatgccagagagaggctggaggagatgcatgtgctctgtcagcctaaggaaacgagtgactcaagtctggtgtgttcccgttatcttcagtactgcagagcaaccaatctctatcttgatttaagaaacatcaagagaaatcatgacagatttaaggaggactttttccagagtggtgaaattggagggcactgtaaacttgacatccgtacattgacgtctgaaggtcagcgcaaaagccctctgcagtcatgagttcttacggatatggtgacctattctccgacacatggaatgcatttactgattatgacgttatacatttgaaaacttatgattccaaaagggtatgttttaaagaagctgttttttcattactcccccgcatgaggtatgggctgttctataatactcctctgatatctggctgtcaaaatactggactattcagggcatttgcccagcatgtactacacagactaaacatcacacaagaaggacctaaggatggaaaaattcgagtcaccattcttgcacggagcacagaataccggaaaatccttaaccaaaatgagcttgtaaatgcactgaaaacagtatctacatttgaagtccagattgttgattacaagtatagagaacttgggtttttagatcaactaaggatcacacacaacacggacatatttattggaatgcatggagctggtctgacccatttacttttccttccagactgggctgctgtatttgaactgtacaactgtgaagatgaacgctgttacttagacttggccaggctgagaggcgttcactacatcacttggcgacggcagaacaaagtctttcctcaggataagggccaccatccaaccctgggggagcacccgaagttcaccaactactctttcgatgtagaagaatttatgtatcttgtccttcaggctgcagaccacgtattgcaacacccaaagtggccatttaagaagaaacatgatgagctataaatatgctgagtctgtttgcaaaaagagagtgtttaaacactccaacacccagacttagaattaaatcagtaaagcaatctgttatttcctatccccgaattaccttttctatgccaaaacataccttcaggatattgttatgtgttgtatagatgttaagtgtttcatgtggtttttgtgtcattgctatttatcaatagcaataattttgcactgaaaactttttatagttcaaaaattaagcatggactccccagtatactttaactttctttctttctttttttttttttggagacagagtctcactgtcacccaggctggagtgcagtggcatgatctcagtttatgcaacttctgcctccccaggttcaagcgattcttttgcctcagccacctgactagctgggattgcagcctgcaccaccacacctggct

SEQ ID NO: 1670 - DNA, 1682 bp, Homo sapiens
  source 1..1682: mol_type = genomic DNA; mol_type = genomic DNA
cctttcctcatgggacacagaactaggcagaacaggatcaggaagcgatcaaacctaccaaggcagtctcacttctcaatgactggactgtgtgggtactctgctccagacatgcgtggcctcagactcatcatgataccagttgagctgctactttgctacctcctgctgcaccctgtggatgccacttcatatggaaagcagacaaatgtcttgatgcactttcccttgtccttggaatcccagacaccctcctcagaccccttgtcctgccaatttctgcacccaaagtcactgcctggtttcagccacatggcccctctacccaagttcttggtaagcctggctctaaggaatgccctggaggaagctggttgtcaggctgatgtttgggctctacagctacagctctaccgccagggtggtgtgaatgctacacaggtcctcatccagcatcttcgagggctccagaaaggcagaagcacagagaggaacgtgtcagtggaagccctggcctctgctctgcagctgttagccagggagcagcaaagcacaggaagggtcgggcgctccctcccgacagaggactgtgagaatgagaaggagcaagctgtgcacaatgtagtccagctgctgccaggagtgggaaccttctacaacctgggcacagctttgtattatgctactcaaaactgcctgggcaaggccagggaacgaggccgagatggggccatagatctgggatatgaccttctgatgaccatggctgggatgtcaggggggcctatgggtctagcgatcagtgctgcacttaaacctgcattaaggtctggggttcagcagttgatccagtattaccaagatcagaaagacgcaaacatctctcagccggagaccaccaaggagggtttgagggccatctcagatgtgagtgacttggaagaaacaactactctggcttctttcatatcagaagtagtaagttcagctccctactgggggtgggccataatcaagagctatgacttagatcctggggctgggagtcttgagatataaaagaatgtggtaaccacagaattaataactgtactaccctgacaagctatatacatgtcttcaaaattttaatctgatttatccaggaggaaggctgtacagtaaaacgtaagaacgtaaatgtttgggtgttgaagtcacagggtttggtttcgaatctaggctccacttgttagagcctcggtgatcactgaatagtaacttctttcttgaactaagatcagttttgaagtttctaaaggagatagaatgattttaacctcaatgagttgccctgtaaatttaaaatgatacaatgaatctaaaatgcttatcacagtactttcaataaatagctattagccaggtgcggtggctcacgcctgtaatcccagcactgtgagaggctgaggcgggatgatcacctgaggtcaggagttcaagatcagcctgggcaacatggcgaaaccccgtctctacaataaatacaaaaaattatcctggcggagttatgcacgcttgtagtcccaactacctgggaggctgaggcgggagaatcacctgagcctgggaggtcgaggctgcagcgagccgagatcgcgccgctgcattccagcctgggtgacagagcgagaccatgtctc

SEQ ID NO: 1671 - DNA, 3016 bp, Homo sapiens
  source 1..3016: mol_type = genomic DNA; mol_type = genomic DNA
catcccctgccctggctgcaaccatgagggtcttggcctgcctccttgcggccctggtggggatccaggctgttgagcgcctgcgcctggccgatggcccccatgggtgcgctggccgcctggaggtctggcatggcgggcgctggggcaccgtgtgtgatgacggctgggacctgcgcgatgccgccgtggcctgccggcagctgggctgcggaggggcactggccgccccgggaggcgccttcttcggggagggggcagggcctgtgtggctcagcgagctggcttgccggggcaacgaggggcagctgggcctctgccaccaccggggctggaaggcccacatctgctcccacgaggaggacgcgggcgtcgtctgcgcaggtcagcgtgtggctaactccagggacgactcaacatctcccctggatggggctccctggccagggctgttgctggagctgagccccagcacggaggagcccctggtgacacatgccccccgcccagctgggaacccccagaacgcctcccggaagaagagcccccggcccaagcaggccaagtccacccgggcccctctgctgacgacaggagccccccgccaagagcggctgcgcctggtctctggcccccacaggtgcgccggacgcctggaggtctggcacggcgggcgctggggcaccgtatgtgacgatggctgggacctgcgcgacgctgctgtagcctgccgggaactgggctgtgggggggcgctggctgcccccggcggtgccagattcgggcctggtgcagggcccgtgtggatggacgatgtggggtgtggaggaggagaacaggccctccgagactgcccccgaagcccctggggccggagcaactgtgaccacagcgaggatgcggggctggtctgcaccggcccagcacctcggctgcgcctggccgatggcccccacgggtgcgccggccgcctggaggtctggcacgggggtcgctgggggtcggtgtgtgacgacgcctgggacctgcgagacgccgctgtggcctgccgagagctgggctgcggaggggcgctggccgcccccgggggcgccttctttggggaggggtctggacccatcatcctggacgaccttcggtgtcggggaaacgagacggccttacgattctgcccagctcggccctggggccagcatgactgtcaccaccgcgaggacgccggggccgtgtgtgacggcatgcccctgggctacgtccctcccacggcccccacggacagcaacaactccacgcccagggaggctgcctccaggcccccgtccaccatgacgagccaggctccagggacggcaggcgtttcacctcctccagcctcccctactgtcctttgggagcctggaccggaagccgggtccccccagctgcgcctggtggctgggcccagcaagtgctcaggtcgactggaggtgtggcatgaccagcgctgggggaccgtgtgtgacgatagctgggacatgcgggattcagctgtggtctgccgggagctgggctgtggtggacctcagcagccagaccctgctgctggccgctttggctggggtgcgggccccatctggctagatgatgtgggctgtgtggggaccgaggcttcactgtccgactgccctgctgctccctggggaaagcacaactgcgctcacaatgaggatgttggggtcacctgcactgggcccccaggcctggactccatctcagaccccttcagctggagctggattcctggactggggagagatcgggatgcctggctcccgggagagctggccaccaagccctctgcaagtgtgactgccagtgttctggagaaaacaaccacgaaggccccagggaaaatgcctaagagtactaagaagtgggtgacaaaaaatgcaaagagaccaaccactcaacccccagtgatgccaaccacgaaacactccagggcccaaagccccccagacctaacctcacagaccactgcagcactgaccactgaggcctcccgaagacctacctctgagtttaccagaaggccgaccacggaggccccccagagatggacctctcacaccactgccacgctgacccctcaggccccccgagaacggaccactaagaccatggcaatgctgaccactcaaggcccccaagaaatgacctctgagtccactatcaagagtatccctcaggcctccctggagccatctgctgagatcccagaagggtctccagagtcacccaaagacccggccccctctcccagtgttagcaccactggggaatcaggcctgttccgggttcgtctggccgatgggcccaaccgctgtgctggccggctggaagtgtggcatgccggacgctggggaacagtgtgtgatgacaactgggacctgcgggacgccactgtggcctgctgggaactgggctgtggaaaggtccggcctcgagtaggcaaaacccattacggccctgggactgggcccatctggctggatgacatgggctgtaagggaagcgaggcctcactgagcgactgcccctcgggggcttgggggaagcacaactgtgaccacgaggaagacgtggggctcacctgcactggctacacagactatgacgattatcccccctggacctgggaccccacctcaagagaggacctggccaaggggactaccacagcgggggtacctggacacactctcccctggaggaccacccggcgcccgggtagctcctccccagcaataaggcgcctgccggacacagagccggaagcgggactccgagaggtgatgctcctcgttcaaggactgccagggttgcagcgcctccctagcccatagcgccccctcgtggtggaggcgggcacgtgccgggcacagcggctgcggagacagcgggtccggcctcgggacccctcccgtagggtagggaggcagccaatgagcagaaataaatgcagaatcacaaactg

SEQ ID NO: 1672 - DNA, 749 bp, Homo sapiens
  source 1..749: mol_type = genomic DNA; mol_type = genomic DNA
agtcctgtgtccgggccccgaggcacagccagggcaccaggtggagcaccagctacgcgtggcgcagcgcagcgtccctagcaccgagcctcccgcagccgccgagatgctgcgaacagagagctgccgccccaggtcgcccgccggacaggtggccgcggcgtccccgctcctgctgctgctgctgctgctcgcctggtgcgcgggcgcctgccgaggtgctccaatattacctcaaggattacagcctgaacaacagctacagttgtggaatgagatagatgatacttgttcgtcttttctgtccattgattctcagcctcaggcatccaacgcactggaggagctttgctttatgattatgggaatgctaccaaagcctcaggaacaagatgaaaaagataatactaaaaggtcgtcagttgtgcatccgttgctgcagctcgttcctcacctgcatgagagaagaatgaagagattcagagtggacgaagaattccaaagtccctttgcaagtcaaagtcgaggatattttttattcaggccacggaatggaagaaggtcagcagggttcatttaaaatggatgccagctaattttccacagagcaatgctatggaatacaaaatgtactgacattttgttttcttctgaaaaaaatccttgctaaatgtactctgttgaaaatccctgtgttgtcaatgttctcagttgtaacaatgttgtaaatgttcaatttgttgaaaatt

SEQ ID NO: 1673 - DNA, 2161 bp, Homo sapiens
  source 1..2161: mol_type = genomic DNA; mol_type = genomic DNA
atgccatccacagtgttgccatccacagtgttgccatcactcctgcccacagcaggagctggctggagcatgaggtggattctgtgctggagcctcaccctctgcctgatggcgcagacggccttgggtgccttgcacaccaagaggcctcaagtggtcaccaaatatggaaccctgcaaggaaaacagatgcatgtggggaagacacccatccaagtctttttaggagtccccttctccagacctcctctaggtatcctcaggtttgcacctccagaacccccggagccctggaaaggaatcagagatgctaccacctacccgcctgggtgcctgcaggagtcctggggccagctggcctcgatgtacgtcagcacgcgggaacggtacaagtggctgcgcttcagcgaggactgtctgtacctgaacgtgtacgcgccggcgcgcgcgcccggggatccccagctgccagtgatggtctggttcccgggaggcgccttcatcgtgggcgctgcttcttcgtacgagggctctgacttggccgcccgcgagaaagtggtgctggtgtttctgcagcacaggctcggcatcttcggcttcctgagcacggacgacagccacgcgcgcgggaactgggggctgctggaccagatggcggctctgcgctgggtgcaggagaacatcgcagccttcgggggagacccaggaaatgtgaccctgttcggccagtcggcgggggccatgagcatctcaggactgatgatgtcacccctagcctcgggtctcttccatcgggccatttcccagagtggcaccgcgttattcagacttttcatcactagtaacccactgaaagtggccaagaaggttgcccacctggctggatgcaaccacaacagcacacagatcctggtaaactgcctgagggcactatcagggaccaaggtgatgcgtgtgtccaacaagatgagattcctccaactgaacttccagagagacccggaagagattatctggtccatgagccctgtggtggatggtgtggtgatcccagatgaccctttggtgctcctgacccaggggaaggtttcatctgtgccctaccttctaggtgtcaacaacctggaattcaattggctcttgccttataatatcaccaaggagcaggtaccacttgtggtggaggagtacctggacaatgtcaatgagcatgactggaagatgctacgaaaccgtatgatggacatagttcaagatgccactttcgtgtatgccacactgcagactgctcactaccaccgaggcctttccatgggtaaggagaaggcacttagcctccagatgatgaaatactgggccaactttgcccgcacaggaaaccccaatgatgggaatctgccctgctggccacgctacaacaaggatgaaaagtacctgcagctggattttaccacaagagtgggcatgaagctcaaggagaagaagatggctttttggatgagtctgtaccagtctcaaagacctgagaagcagaggcaattctaagggtggctatgcaggaaggagccaaagaggggtttgcccccaccatccaggccctggggagactagccatggacatacctggggacaagagttctacccaccccagtttagaactgcaggagctccctgctgcctccaggccaaagctagagcttttgcctgttgtgtgggacctgcactgccctttccagcctgacatcccatgatgcccctctacttcactgttgacatccagttaggccaggccctgtcaacaccacactgtgctcagctctccagcctcaggacaacctctttttttcccttcttcaaatcctcccacccttcaatgtctccttgtgactccttcttatgggaggtcgacccagactgccactgcccctgtcactgcacccagcttggcatttaccatccatcctgctcaaccttgtgcctgtctgttcacattggcctggaggcctagggcaggttgtgacatggagcaaacttttggtagtttgggatcttctctcccacccacacttatctcccccagggccactccaaagtctatacacaggggtggtctcttcaataaagaagtgttgattagacctgaatttctccacctataaaa

SEQ ID NO: 1674 - DNA, 1878 bp, Homo sapiens
  source 1..1878: mol_type = genomic DNA; mol_type = genomic DNA
aatggtggctgtgacccaaactccatctgcaccaacactgtgggctctttcaagtgtggtccctgccgcctgggtttcctgggcaaccagagccagggctgcctcccagcccggacctgccacagcccagcccacagcccctgccacatccatgctcactgtctctttgaacgcaatggtgcagtgtcctgccaggacaactgccttttgacacccaactctgggcaggaagatgctgataatgatggtgtgggggaccagtgtgatgatgatgctgatggggatgggatcaagaatgttgaggacaactgccggctgttccccaacaaagaccagcagaactcagatacagattcatttggtgatgcctgtgacaattgccccaacgttcccaacaatgaccagaaggacacagatggcaatggggaaggagatgcctgtgacaacgacgtggatggggatggcatccccaatggattggacaattgccctaaagtccccaacccactacagacagacagggatgaggacggggtgggagatgcttgcgacagctgccctgaaatgagcaatcctacccagacagatgcagacagcgacctggtgggggatgtctgtgatactaatgaagacagcgatggggatgggcatcaggacaccaaggacaactgcccacagctgccaaatagctcccagctggactctgataacgatggacttggagatgagtgtgatggggatgatgacaatgatggcatcccagattatgtgcctcctggtcccgataactgccgcctggtacccaatcccaatcagaaggactcagatggcaatggcgttggtgatgtgtgtgaggatgactttgacaatgatgctgtggtcgaccccctggatgtgtgtcctgaaagtgcagaggtaacgcttacggattttcgggcctatcagaccgtcgtcctggatcctgagggtgatgctcagattgacccaaactgggttgtgctcaaccagggcatggaaatcgttcagaccatgaacagtgaccctggcttggcagttggatacacggccttcaatggtgtggactttgaaggcaccttccatgtgaacacagtgactgatgatgactacgcaggctttctcttcagttatcaagacagtggccgcttctacgtagtcatgtggaagcagaccgagcagacctactggcaggctacacccttccgggcggttgcccagcccgggctgcagctcaaggcagtgacatcagtgtctggcccaggtgagcacctccgaaatgccctgtggcatactggccacacccctgatcaggtacgactgctgtggacagacccacgaaatgtgggctggcgggacaagacctcctatcgctggcagcttctgcaccggcctcaagttggctacattcgggtgaagctctatgagggaccccagcttgtggcggattctggggtgatcattgacacatccatgcgaggggggcgtcttggtgtattctgcttctcccaagaaaacataatttggtccaatctccagtatcgatgcaatgacacagtgcctgaggactttgagccattccggaggcagctgctccagggaagggtgtgaggaggaggccaccagattcagaattcagaattttagaccctttggccttggggtccatcctggagaccctgaggtctaagctacagcccctcagccaaccacagacccttctctggctcccaaaaggagttcagtcccagaggggtggtcaccccacccttcaggggatgagaagttttcaaggggtattactcaggcactaaccccaggaaagatgacagcacattgccataaagttttggttgttttcta

SEQ ID NO: 1675 - DNA, 1776 bp, Homo sapiens
  source 1..1776: mol_type = genomic DNA; mol_type = genomic DNA
ctctgttgtgactgtaagtgggacaggcagaggcattactttgcctcatttagttttagggggatcagatctagggcagccataatatctggtatttgattttcttactaagcggctgggatttctgtccttttgcagtttttctctgactctaattgatgcactggacaccttgctgattttggggaatgtctcagaattccaaagagtggttgaagtgctccaggacagcgtggactttgatattgatgtgaacgcctctgtgtttgaaacaaacattcgagtggtaggaggactcctgtctgctcatctgctctccaagaaggctggggtggaagtagaggctggatggccctgttccgggcctctcctgagaatggctgaggaggcggcccgaaaactcctcccagcctttcagacccccactggcatgccatatggaacagtgaacttacttcatggcgtgaacccaggagagacccctgtcacctgtacggcagggattgggaccttcattgttgaatttgccaccctgagcagcctcactggtgacccggtgttcgaagatgtggccagagtggctttgatgcgcctctgggagagccggtcagatatcgggctgtactattaacccatggaaattgaacacactttggaccagatgatctctaaggtcggcaaccacattgatgtgctcactggcaagtgggtggcccaggacgcaggcatcggggctggcgtggactcctactttgagtacttggtgaaaggagccatcctgcttcaggataagaagctcatggccatgttcctagagtataacaaagccatccggaactacacccgcttcgatgactggtacctgtgggttcagatgtacaaggggactgtgtccatgccagtcttccagtccttggaggcctactggcctggtcttcagagcctcattggagacattgacaatgccatgaggaccttcctcaactactacactgtatggaagcagtttggggggctcccggaattctacaacattcctcagggatacacagtggagaagcgagagggctacccacttcggccagaacttattgaaagcgcaatgtacctctaccgtgccacgggggatcccaccctcctagaactcggaagagatgctgtggaatccattgaaaaaatcagcaaggtggagtgcggatttgcaacaatcaaagatctgcgagaccacaagctggacaaccgcatggagtcgttcttcctggccgagactgtgaaatacctctacctcctgtttgacccaaccaacttcatccacaacaatgggtccaccttcgacgcggtgatcaccccctatggggagtgcatcctgggggctggggggtacatcttcaacacagaagctcaccccatcgaccctgccgccctgcactgctgccagaggctgaaggaagagcagtgggaggtggaggacttgatgagggaattctactctctcaaacggagcaggtcgaaatttcagaaaaacactgttagttcggggccatgggaacctccagcaaggccaggaacactcttctcaccagaaaaccatgaccaggcaagggagaggaagcctgccaaacagaaggtcccacttctcagctgccccagtcagcccttcacctccaagttggcattactgggacaggttttcctagactcctcataaccactggataatttttttatttttatttttttgaggctaaactataataaattgcttttggctatcat

SEQ ID NO: 1676 - DNA, 1953 bp, Homo sapiens
  source 1..1953: mol_type = genomic DNA; mol_type = genomic DNA
cgaggtcctcctcccagggcccggggctggggagcggaagccatcagtgggctcggaggacactgtcccagccaggacacggccatcggtcactaatctgcagcactggaatgtccgcaggccaatcagcgggcccagcctgactcctggagattgtgaatagctccatccagcctgagaaacaagccgggtggctgagccaggctgtgcacggagtgcctgacgggcccaacagacccatgctgcatccagagacctcccctggccgggggcatctcctggctgtgctcctggccctccttggcaccgcctgggcagaggtgtggccaccccagctgcaggagcaggctccgatggccggagccctgaacaggaaggagagtttcttgctcctctccctgcacaaccgcctgcgcagctgggtccagccccctgcggctgacatgcggaggctggactggagtgacagcctggcccaactggctcaagccagggcagccctctgtggaatcccaaccccgagcctggcgtccggcctgtggcgcaccctgcaagtgggctggaacatgcagctgctgcccgcgggcttggcgtcctttgttgaagtggtcagcctatggtttgcagaggggcagcggtacagccacgcggcaggagagtgtgctcgcaacgccacctgcacccactacacgcagctcgtgtgggccacctcaagccagctgggctgtgggcggcacctgtgctctgcaggccaggcagcgatagaagcctttgtctgtgcctactcccccagaggcaactgggaggtcaacgggaagacaatcgtcccctataagaagggtgcctggtgttcgctctgcacagccagtgtctcaggctgcttcaaagcctgggaccatgcaggggggctctgtgaggtccccaggaatccttgtcgcatgagctgccagaaccatggacgtctcaacatcagcacctgccactgccactgtccccctggctacacgggcagatactgccaagtgaggtgcagcctgcagtgtgtgcacggccggttccgggaggaggagtgctcgtgcgtctgtgacatcggctacgggggagcccagtgtgccaccaaggtgcattttcccttccacacctgtgacctgaggatcgacggagactgcttcatggtgtcttcagaggcagacacctattacagagccaggatgaaatgtcagaggaaaggcggggtgctggcccagatcaagagccagaaagtgcaggacatcctcgccttctatctgggccgcctggagaccaccaacgaggtgattgacagtgacttcgagaccaggaacttctggatcgggctcacctacaagaccgccaaggactccttccgctgggccacaggggagcaccaggccttcaccagttttgcctttgggcagcctgacaaccacgggtttggcaactgcgtggagctgcaggcttcagctgccttcaactggaacaaccagcgctgcaaaacccgaaaccgttacatctgccagtttgcccaggagcacatctcccggtggggcccagggtcctgaggcctgaccacatggctccctcgcctgccctgggagcaccggctctgcttacctgtccgcccacctgtctggaacaagggccaggttaagaccacatgcctcatgtccaaagaggtctcagaccttgcacaatgccagaagttgggcagagagaggcagggaggccagtgagggccagggagtgagtgttagaagaagctggggcccttcgcctgcttttgattgggaagatgggcttcaattagatggcaaaggagaggacaccgccagtggtccaaaaaggctgctctcttccacctggcccagaccctgtggggcagcggagcttccctgtggcatgaaccccacagggtattaaattatgaatcagctg

SEQ ID NO: 1677 - DNA, 2162 bp, Homo sapiens
  source 1..2162: mol_type = genomic DNA; mol_type = genomic DNA
ctgcctcccaggccactcctagactcacgtgcctggccgccccacccaggggcttctgccagccctggcggcgccttggtgctgtgtgggtgtcattggcatgttgaccaacagcctcctgccctgcccagctggagctgtgcccccagctgcgctgcctgaggcctgtgggtgggtgggaggaccagggacggggacagggagatctgggagcctcggcctccaccgcagggtgagcaggtggagcagcagcaggagatgctgggtagggagtgtggctggtcctacctgcgctgccttgctttccctgaagggattctgctcagggaggcagagtctaggcgacctaatttctaggggcgaggacaagaacacagccgcaccgggatgtggctgaccgtctacctccctcctagggggctggcaggggcttctgggacggttttgggacaggtctggggcaccagaaccggctcaggcaggtctcccaccccttaccctgggggtctccatgggaatgaaagccaggagttcatcaggcacccagctgagtcgagggggcgggacccagtgcagcccggcccctgccttggtgccagagctactgccagagggagtcagtgcagtcctgtgtcggacacgcccgcagcctggacccgggatccccatccccctaggatctctgagcctcgggcctctgcacccacatccaaggtgagtctctcggctgccctgagctggggctggatgggccggaccctccattccggctgcagcttcccgcgcagtgagaaggcagcggtccctgagagcccagcagtgccctgggagcctgcagaacgcaggggcggattccgcgtcgcactggccgtcaaggggcggccgcggagggaaggggtgggtcggtgggtctgacagcgggtctgcgtaggcggcagcgtctgtccctcccagcctctcgctccgcgccatgggcgggccccgggctctgctggccgcactctgggcgctggaagccgccgggaccgccgcgcttcgcatcggagccttcaacattcagagcttcggtgacagcaaagtgtcggaccccgcttgcggcagcatcatcgcgaagatcctggctggctatgacctcgcgctggtgcaggaggtgcgagacccagacctcagcgccgtgtccgcgctcatggagcagatcaacagcgtgtccgagcacgagtacagctttgtgagcagccagcccctgggccgggaccagtacaaggagatgtacctgttcgtgtacaggaaagacgcggtgtcggtcgtggacacctacctgtacccagaccccgaggacgtcttcagccgcgagcccttcgtggtcaagttctcggcccccggcaccggtgagcgggccccgcccctcccctcccgccgagctctgacgcccccaccccttcccgcagcagcacagaacctggtgctgatcccgctgcacgcggcgccgcatcaagccgtggcggagatcgacgcgctctacgacgtgtacctggacgtgatcgacaagtggggcaccgacgacatgctgttcctgggcgacttcaacgccgactgcagctatgtgcgggcgcaggactgggccgccatccgtctgaggagcagtgaggtcttcaagtggctcatccctgacagcgccgacaccacggtgggcaactcagactgcgcctacgaccgcattgtggcctgtggcgcccgcctgcgccggagcctgaagccccagtcggccaccgtgcacgacttccaggaggaattcggcctggaccagactcaggctcttgccatcagcgaccactttccagtggaggtgaccctcaagttccaccgatgactcgaggcctggctggggcatgccacctgcagaccctggctctgaggaatggcccaacagtggccccttcagggtggcagccacccttcagtgaggccccaaggcagagtcggctgggcgtggaccaggggccatggacacgtgatgtgctgctctgtacctccgttccccatctgtgggacgggctgcatccagcgacctcatggggtgttgtgagccccatgaggggtgcagggggcactgcccggcagatgtctgctcaataaatgagctgctcccggtcgggccccac

SEQ ID NO: 1678 - DNA, 2928 bp, Homo sapiens
  source 1..2928: mol_type = genomic DNA
gggtagtgagccggctgagaggcatggagacgcaggaacttcggggggccctggctcttctcctcctttgctttttcacatctgccagtcaggatctgcaggtaattgacctgctgactgtgggcgagtctcggcagatggtagctgtggcagagaagatccggacagccttgctcactgctggggacatctacctcttatccaccttccgcctgccccccaagcagggtggtgtcctctttggcctctattctcgccaagacaacactcgatggctggaggcctctgttgtaggcaagatcaacaaaggtgactgtactggtgcgataccagcgggaggatggcaaagtccacgccgtgaacctacagcaagcgggcctggctgatgggcgcacacacacagttctcctgcgactccgaggtccctccagacccagccctgccctacatctctacgtggactgcaaactgggtgaccaacatgcaggccttccagcactggcccccattcctccagcggaggtcgatgggctggagattaggactggacagaaggcgtatttgaggatgcagtgaccaatgcactgcactccattctaggggagcagaccaaggcgctggtcacccaactcaccctcttcaaccagatcctggtggagctgcgggatgatatacgagaccaggtgaaggaaatgtccctgatccgaaacaccattatggagtgtcaggtgtgcggcttccatgagcagcgttcccactgcagccccaatccctgcttccgaggtgtggactgcatggaagtgtacgagtacccaggctaccgctgtgggccctgcccccctggcctgcagggcaacggcacccactgcagtgacatcaatgagtgtgctcacgctgacccctgtttcccgggctccagctgcatcaacaccatgcccggcttccactgtgaggcctgtcctcgagggtacaagggcacacaggtgtctggtgtgggcattgactatgcccgggccagcaaacagataaggccataccagtgtcctctgctgtatctgaggagacccaccataggtctggttccacccaaagtctgccccttcaggtctgcaatgacatcgatgaatgcaacgatggcaacaatggtggctgtgacccaaactccatctgcaccaacactgtgggctctttcaagtgtggtccctgccgcctgggtttcctgggcaaccagagccagggctgcctcccagcccggacctgccacagcccagcccacagcccctgccacatccatgctcactgtctctttgaacgcaatggtgcagtgtcctgccagtgtaacgtgggctgggctgggaatgggaacgtgtgtgggactgacacagacatcgatggctacccagaccaagcactgccctgcatggacaacaacaaacactgcaaacaggacaactgccttttgacacccaactctgggcaggaagatgctgataatgatggtgtgggggaccagtgtgatgatgatgctgatggggatgggatcaagaatgttgaggacaactgccggctgttccccaacaaagaccagcagaactcagatacagattcatttggtgatgcctgtgacaattgccccaacgttcccaacaatgaccagaaggacacagatggcaatggggaaggagatgcctgtgacaacgacgtggatggggatggcatccccaatggattggacaattgccctaaagtccccaacccactacagacagacagggatgaggacggggtgggagatgcttgcgacagctgccctgaaatgagcaatcctacccagacagatgcagacagcgacctggtgggggatgtctgtgatactaatgaagacagcgatggggatgggcatcaggacaccaaggacaactgcccacagctgccaaatagctcccagctggactctgataacgatggacttggagatgagtgtgatggggatgatgacaatgatggcatcccagattatgtgcctcctggtcccgataactgccgcctggtacccaatcccaatcagaaggactcagatggcaatggcgttggtgatgtgtgtgaggatgactttgacaatgatgctgtggtcgaccccctggatgtgtgtcctgaaagtgcagaggtaacgcttacggattttcgggcctatcagaccgtcgtcctggatcctgagggtgatgctcagattgacccaaactgggttgtgctcaaccagggcatggaaatcgttcagaccatgaacagtgaccctggcttggcagttggatacacggccttcaatggtgtggactttgaaggcaccttccatgtgaacacagtgactgatgatgactacgcaggctttctcttcagttatcaagacagtggccgcttctacgtagtcatgtggaagcagaccgagcagacctactggcaggctacacccttccgggcggttgcccagcccgggctgcagctcaaggcagtgacatcagtgtctggcccaggtgagcacctccgaaatgccctgtggcatactggccacacccctgatcaggtacgactgctgtggacagacccacgaaatgtgggctggcgggacaagacctcctatcgctggcagcttctgcaccggcctcaagttggctacattcgggtgaagctctatgagggaccccagcttgtggcggattctggggtgatcattgacacatccatgcgaggggggcgtcttggtgtattctgcttctcccaagaaaacataatttggtccaatctccagtatcgatgcaatgacacagtgcctgaggactttgagccattccggaggcagctgctccagggaagggtgtgaggaggaggccaccagattcagaattcagaattttagaccctttggccttg

SEQ ID NO: 1679 - DNA, 3547 bp, Homo sapiens
  source 1..3547: mol_type = genomic DNA; mol_type = genomic DNA
gagagggacagaggctggagaaggatgtatggcctgccctgggcttgtctgttccctcctgagcctgagccccttaccttcctgaccccatgaagcacacactggctctgctggctcccctgctgggcctgggcctggggctggccctgagtcagctggctgcaggggccacagactgcaagttccttggcccggcagagcacctgacattcaccccagcagccagggcccggtggctggcccctcgagttcgtgcgccaggactcctggactccctctatggcaccgtgcgccgcttcctctcggtggtgcagctcaatcctttcccttcagagttggtaaaggccctactgaatgagctggcctccgtgaaggtgaatgaggtggtgcggtacgaggcgggctacgtggtatgcgctgtgatcgcgggcctctacctgctgctggtgcccactgccgggctttgcttctgctgctgccgctgccaccggcgctgcgggggacgagtgaagacagagcacaaggcgctggcctgtgagcgcgcggccctcatggtcttcctgctgctgaccaccctcttgctgctgattggtgtggtctgtgcctttgtcaccaaccagcgcacgcatgaacagatgggccccagcatcgaggccatgcctgagaccctgctcagcctctggggcctggtctctgatgtcccccaagagctgcaggccgtggcacagcaattctccctgccccaggagcaagtctcagaggagctggatggtgttggtgtgagcattgggagcgcgatccacactcagctcaggagctccgtgtaccccttgctggcggccgtgggcagtttgggccaggtcctgcaggtctccgtgcaccacctgcaaaccttgaatgctacagtggtagagctgcaggccgggcagcaggacctggagccagccatccgggaacaccgggaccgcctccttgagctgctgcaggaggccaggtgccagggagattgtgcaggggccctgagctgggcccgcaccctggagctgggtgctgacttcagccaggtgccctctgtggaccatgtcctgcaccagctaaaaggtgtccccgaggccaacttctccagcatggtccaggaggagaacagcaccttcaacgcccttccagccctggctgccatgcagacatccagcgtggtgcaagagctgaagaaggcagtggcccagcagccggaaggggtgaggacactggctgaagggttcccgggcttggaggcagcttcccgctgggcccaggcactgcaggaggtggaggagagcagccgcccctacctgcaggaggtgcagagatacgagacctacaggtggatcgtgggctgcgtgctgtgctccgtggtcctattcgtggtgctctgcaacctgctgggcctcaatctgggcatctggggcctgtctgccagggacgaccccagccacccagaagccaagggcgaggctggagcccgcttcctcatggcaggtgtgggcctcagcttcctctttgctgcacccctcatcctcctggtgttcgccaccttcctggtgggtggcaacgtgcagacgctggtgtgccagagctgggagaacggcgagctctttgagtttgcagacaccccagggaacctgcccccgtccatgaacctgtcgcaacttcttggcctgaggaagaacatcagcatccaccaagcctatcagcagtgcaaggaaggggcagcgctctggacagtcctgcagctcaacgactcctacgacctggaggagcacctggatatcaaccagatccagaggcccgtggtgaagaccagcatggagcagctggcccaggagctgcaaggactggcccaggcccaagacaattctgtgctggggcagcggctgcaggaggaggcccaaggactcagaaaccttcaccaggagaaggtcgtcccccagcagagccttgtggcaaagctcaacctcagcgtcagggccctggagtcctctgccccgaatctccagctggagacctcagatgtcctagccaatgtcacctacctgaaaggagagctgcctgcctgggcagccaggatcctgaggaatgtgagtgagtgtttcctggcccgggagatgggctacttctcccagtacgtggcctgggtgagagaggaggtgactcagcgcattgccacctgccagcccctctccggagccctggacaacagccgtgtgatcctgtgtgacatgatggctgacccctggaatgccttctggttctgcctggcatggtgcaccttcttcctgatccccagcatcatctttgccgtcaagacctccaaatacttccgtcctatccggaaacgcctcagctccaccagctctgaggagactcagctcttccacatcccccgggttacctccctgaagctgtagggccttgtggggtgaggtgaccctgaggctgcctgtcctcccctttgatttagcctgggccacaggacttcggtagctcttgccccagagcccaggctggcatccaggcctggactgtccccagttccggcttacctggccccaccttgcctgctcctttccacccctttctgctcacgacccccatcattcacgctcagaatcacatgggacttctgtgcagctgcagagccagcaagtccctccaggtgtcaccccttacccccatgctggtggcatcctcacaggaagagcctgttctccacctgctggagcctggaccctggggtgggacagaggcctcgtccaaccccactccccttcccgtgtgtcttccccctgccaagcctccccctgccaagcctccccctgcccctctctgagcccctcgccccccacaccgtcctcatctggcctcccccctggcccccacttccctcttatgcccttcctggccctttgcttcctcccttagtcccctcttcaccatatctccactgctaccttgctggccccagagaccaccctgcccaaccaaaccactcaggtaacgccactaatcaggcaggggccaccatggcctaggtctgggctggctgcaggccctgcctcatggcctctgagccctccactgccccagggccttgggccctctgcagatctcatccaggatttattggtgtccagtggggtgagggaggcctgtctgaaggccgagcctccctgcctgcacccaagttagaaatgggggtaccagcacttagcttctctctgagtgctggctcccaaggaagggacctgggacctgggccacagtgggggcttgcccttacctcttcagaaggaagcatcttccacagcccccacccaactttcttaggagtgatctggtggccagaacaggattttgcacggccccttttatcctgcgcatgtggcctagggtcatccccagcccatccctgtgtcagccctgagtgctggacactgcgttccagaaatgaggaagaggagagagaagagatggacagacctcagatccattaaagtgttctcacttc

SEQ ID NO: 1680 - DNA, 1714 bp, Homo sapiens
  source 1..1714: mol_type = genomic DNA; mol_type = genomic DNA
agtcttaacatgctgactgcgaggtgcctgtcagacgacacactggcccatctagaggctgcagggcacgtgtgcgttttgaaggatgcctttgactttgaaagccgatctgagattgcaaacctcatcttggctgagaactgcgaggctgccctggctcttcatctctataggggaggcaggcttttgcaaggccaccgaatcccttttggagtcatctttggtggaactgatgtaaatgaagatgccaaccaggcggaaaaaaacacagtcatgggcagagttcttgaggaagccagatttgctgtcgctttcacagagtcaatgaaggaaatggcacaagcgcagtggaaagcaagacagatctcattggctgtcacaagtgcagttcctgtacagccgcatgctaagggtaaggtctatgtccagagtcaaggaattgcaacaacaccaaacgccgcttttaactggaatacctttcttcaacgctctgagattaaccaaagtgctgataatttgcacatatttcttctgatatgtggacttcgacaagttaaggatcctctctatctggtggacgcattttcagcctggcatcaggaggagcccaatgtgcacctggtgattgtgggtcctgaagtcgatccagtgtttacaagggaagtgaaagccaaagtgaaaagagccgctggggtacgattgattggagagatgcctcaagaagatctgcacgcggtggtgaagaattgcttcgcggtggtgaatagctctgtctctgaaggcatgtcagctgcaattttggaggcaatggatttagaagtaccggtattggccaggaacatccccgggaatgctgccgtggtgaagcatgaagtcacagggctactgttttccaatcctcaggagtttgttcatctggcaaagagactggttagtgatcctgcattagaaaaggaaatcgtagtgaacggaagggaatacgtgagaatgtatcattcatggcaggtggaaagagacacctaccaacagctcatcaggaagctggaaggaagcactgaagattgagggccccgcctcatcagacacctgctctctgacacacagctctgggtgcacactcagagacagagttctggatcacgtgggcccagtgcagttcaaataaaaccagcctcagcggaatcctagaaaatgttagtcgtgagtccccagagccactgcattcatcccatatccttctgtgcgttcagatgctgtcccaggcgtgttcaccagccagtcctgatggaggtgcatgagtgactgggttgactgggacagggaaaggggaactggttttcagggaatttgggagagaatttgattacctgccttagggctttggtgtggacaatagaggcttattttcaagcagtcatggttcagactcctcccgcctgccttctgaccaacctctccccatcgttgccagtttgaaaggcaaaagcaaaacagacgtgtcagctgagccgagtcctcgcaggatttttgttgtgatctcaggactctgacaggcacgtgggtgacccgaggcttctctgaacactagaaagcgctgtgagtgagctcacgcccggcacagctcacttttcaatggtggaattgaaagttgtgctttttagaaaagtggccaggctgcccgcaggccccgcccacctcttggctgaatttgagt

SEQ ID NO: 1681 - DNA, 1194 bp, Homo sapiens
  source 1..1194: mol_type = genomic DNA; mol_type = genomic DNA
actcggcacccacctcctgccagggccgctgctacgaagcctttgacaagcaccaccaatgtcactgcaatgcccgctgccaagagtttgggaactgctgcaaggattttgagagcctgtgtagtgaccacgaggtctcccacagcagtgatgccataacaaaagaggagattcagagcatctctgagaagatctacagggcagacaccaacaaagcccagaaggaagacatcgttctcaatagccaaaactgcatctccccgtcagagaccagaaaccaagtggatcgctgcccaaagccactcttcacttatgtcaatgagaagctgttctccaagcccacctatgcagccttcatcaacctcctcaacaactaccagcgggcaacaggccatggggagcacttcagtgcccaggagctggccgagcaggacgccttcctcagagagatcatgaagacagcagtcatgaaggagctctacagcttcctccatcaccagaatcgctatggctcagagcaagagtttgtcgatgacttgaagaacatgtggtttgggctctattcaagaggcaatgaagagggggactcgagtggctttgaacatgtcttctcaggtgaggtaaaaaaaggcaaggttactggcttccataactggatccgcttctacctggaggagaaggagggtctggttgactattacagtcacatctacgatgggcctgtgccagttaagcctgggaggatatcccttagctgtccggacatatacctgggacaagtccacctatgggaatggcaagaagtacatcgccacagcctacatagtgtcttccacctaatagaacttcgagccagaaaggggcatgagggctcttgcgagactgaagtgctatcttctctggactagagagaagagggagaggactggaagggatcaccaaatctcaaagcaatgagaagcattcctaaatcccaaagtgcccacatgggaaagagataaaatgtacaaattagaaaaatgtggataaacagtcaaacctttatcctctagaattttggcaatgttgactaagaaacagagtccaagcagagaaggtaggaaccctccatagctctctgccctgatgtgtgggggaactaggaagaagtcctttgacctcaccaggcctcatgcttccctttaatgtaaaggg

SEQ ID NO: 1682 - DNA, 575 bp, Homo sapiens
  source 1..575: mol_type = genomic DNA; mol_type = genomic DNA
acacccacatggtcggcgtgcaggatatttcgctggaccctagaaaagccaccacgacctgtgggccatgatgctaccccaatggctgctgctgctgttccttctcttcttctttctcttcctcctcaccaggggctcactttctccaacaaaatacaaccttttggagctcaaggagtcttgcatccggaaccaggactgcgagactggctgctgccaacgtgctccagacaattgcgagtcgcactgcgcggagaaggggtccgagggcagtctgtgtcaaacgcaggtgttctttggccaatatagagcgtgtccctgcctgcggaacctgacttgtatatattcaaagaatgagaaatggcttagcatcgcctatggccgttgtcagaaaattggaaggcagaagttggctaagaaaatgttcttctagtgctccctccttcttgctgcctcctcctcctccacctgctctcctccctacccagagctctgtgttcaccctgttccccagagcctccaccatgagtggagggaagtggggagtgattgaaataaagagctttttcaatgtt

SEQ ID NO: 1683 - DNA, 1421 bp, Homo sapiens
  source 1..1421: mol_type = genomic DNA; mol_type = genomic DNA
gtcggggaaaggcggggtctcggccggcgctgacgcagccatggcggaggcggctttggaagccgtgcggagcgagttacgagaattcccggccgctgcaagggagctctgcgtgcctcttgctgtgccctacctggacaaacccccaactccgctccacttctaccgggactgggtctgccccaacaggccgtgcattatccgcaacgctctgcagcactggccggccctccagaagtggtccctcccctatttcagagccacagtgggctccacagaggtgagtgtggccgtgaccccagatggttacgcggatgccgtgagaggggatcgcttcatgatgccagctgagcgccgcctgcccctgagcttcgtgctggatgtgctggagggccgggcccagcaccctggagtcctctatgtgcagaagcagtgctccaacctgcccagcgagctgccccagctgctgcctgatctggaatcccatgtgccctgggcctccgaagccctgggaaagatgcccgatgctgtgaacttctggctgggggaggcggctgcagtgacttctttgcacaaggaccactatgagaacctctactgcgtggtctcaggagagaagcatttcctgttccatccgcccagcgaccggcccttcatcccctatgagctgtacacgccggcaacctaccagctaactgaagagggcacctttaaggtggtggatgaagaggccatggagaaggtgccctggatcccactggaccccttggcgccagacctagcacggtaccctagttacagtcaggcccaggcccttcgctgcacggtgcgggccggtgagatgctctatctgccggctctgtggttccaccacgtccagcagtcccagggctgcatcgcagtgaatttctggtatgacatggaatacgacctcaagtatagttacttccagctgctcgactccctcaccaaggcttcaggccttgactgatggagcactggtgaacaccaccaagcacgcctcgggggacggagccagcccctccctggccaggtcaattctcgagagagcctggagtgtgcatgctggctgctggccccgggtccagcatggcttgagatcagctttggaggatcttggaatgtggtcataaggactcaaggtgccaggcaggtctgggtgagggttctcaggaagttgccacacaggtgagcagagtggggatcaggtgcagcggcacctctccccagcgctgtgatgttgggcgagtcactgcgtctcgggcattggtgtcctgtcagtaaagagataataatggctgtacctcgcggggctgttgtgggcttggagatgatgtctatgaggaccagcatggagctggcacacaggacatgttgaataaaaggtagctgtgagtcgt

SEQ ID NO: 1684 - DNA, 4600 bp, Homo sapiens
  source 1..4600: mol_type = genomic DNA; mol_type = genomic DNA
agaaataggagcgcgcaggcgcgacgtgcggctcgcagaacggcgagtagcggagcgggacccgctgtgagtgtggcggccgcgctgggttcctagctggggaaacgtgatccaggcgaagcgccccaggaaggattggggatgctcaccccatttagagaaagaaatccacctccccaaccccaatcaagaacctgctattgtatatcatcatagagccagattacctagggaatcatcatccagggacgtgccagaaaccacaagaaaacatggggagggttttcctcacgggagaaaaagccaattccatattaaaacgctacccaagagctaatgggttttttgaagaaataagacagggcaacattgagcgtgagtgcaaagaagaattctgtacatttgaagaagcaagagaagcttttgaaaataatgaaaaaactaaggagttttggagcacctacacaaaagcgcaacaaggggagagtaaccgaggaagtgactggtttcagttttaccttacctttccgttaatctttggcctcttcattatcctccttgtcattttcctaatctggagatgcttcctaagaaacaaaactcgtagacagacagtgactgaaggccacattcctttccctcagcaccttaatattatcaccccaccccccccaccagatgaagtgtttgacagcagtggattgtctccaggctttctgggatatgtagttgggcgctcagattccgtctctactcgcctgtccaattgtgatcccccgccaacctatgaggaagccactggccaagtgaacctgcagaggagtgaaacagaacctcatttagacccacccccagagtatgaggacatagtcaactccaactcagccagtgccattcctatggtgcctgtggtcaccaccatcaaatgaagctgcaaacttctttttactctaatcatttttaaaatactaatggaagaactttctagcactttaccactacataaatgttcattgacttattttattggactcttaccgcataccacttcacacttgttttattttctttagttttgtttcttgttatagaatcattatccatgctcatttttgctaggggaaatatatgaagagggaaaacatactaatgggggtctttctgtgatgtgatgagacatacatgtaagtgtatatatgtgtgtataggcatatatacgtgtgtatgcatcaacacagtatatgtaaaactgtcttaaaaatccattaacttctacctaaatcacctggaaggagagcattactcaccaaaattgcaaaacaagggtatcaagaatttgtgtaatagccagtgacatgctgtagatttttgcaaactggatgtacttagcatgttttctaattctgactggcttttgttaacttgataattcttcatctaccttaaaaagaaaaaaattacacatagtcattcttgatgttataaatagagaaaaagtgtgtgtgagcaataatgcataagctactgataacttgcttacagcagatagcaataaggtatttggtggcattcggcttgttttgtaatagggattttttttttggttgaccactcccccacacttccaaaattaaacagtgttttcttagcatcttgaatatctcctgcggtgtatattaacatcttgatgagacagatttccaggcaacaaaataatttctaaaatggatatatgtgtggattaatgacaggcagtaaatacccattactcctttactcatagctggtaaaattattcccactgttttattgccttttactgtacgttctacactctgtcctactcccacagaattttcaagcccttaagagtttagttaaaataaaatttttgaaattattgtcttaatatttttatataggctgatgtctttgcctcaagattgttaggaggtaattttccattgaattatcaactgtgatttttatattgccctccaagtggtagaagaagattgcaaagtccatgttatgctaggtgcacaataaatctagtaatagccccacacagatctcatcattgttgctacttccttttgtattttcatcaggtatttttttaactgtagggtttttacttttttcttggagcagagagaacaggctgtaaatgggttgccaacataagctggctgagaaataaaagaaaacaagacagttgttcataaagtttcattttgtatgcactgatggcaaattcattaggtcagttaagggaaatatttgtaccacttccaaacttttcagcgttggataaaatgattgatgaggcaggcagaaggaatgtaggtttcaggtgtgtcatttcctgctgcttccagctccatccctacagactcctccccgagtcctgccctggaaccaaaggaaggaggaacactgaggggaatcctgaagtaggagtcagatgacctgaactcagatctccctctatcacatgcttgccaccactgtaccttgagcaagaatcatatctgaccctcaacctcctcaactctaaaatggggataacatcatttgtcctgcacttctctaagggctttacaaggatcaaataagatggtgtgtatgtaagaaatttgtaaaatgtgaagagctatctacactaagttcgtaatgttattattattgtgcttcatggagaattttcccctctgttttcctaaattgtatgagagctttcacacagtgagaaatagagcaggctgccccataaatgggtaacatattcctaatctgagtgtgtgggctgttagagaacccctgccatgctctggtctgttctgaaactgtgccaactgaaagatgatagtccacacagcacaaacaggtttaagcaaatgatagaaagggaagtaaggcgtgtgtgctagttaataggtttagtagcttttatggactaaaaatgattgattgtatcttgaccctggtctcagaaatgacatttttacttttgccatgagtacacatcagatatctttggcttctatttaaagctaaaggtagaagtgtttgatccagtgaactgtgtatgtatgtgtggggtttttttctttatttttaaatgaaaattaagacaccttttgtgtggacatgtttttgtctttaatgtcaggctttagattagaccagcagttttcaaagtatggccaatggacccctgggttccttgagagcctttcaggggggactatgagatcaaaatatttttattataatgtgaagacattgtcttttcactctatctcaaaaaaagtgttgcaaatgtaaaacattgccatcttctcacaaatctctttttttgtttttgaaaatatggccatttttcataaaatgttatttgtgttagcatgtaatgggtttactatgtttaaataagttaatactttaaaaattttcaggtttttttagtatggtgaatattgatagatataaacctcatgaacaaaagtactttggcatccagattctcaataaatgttaagagcgtaagtgtaagggggtccagagaccaaaagttttagagctacaggattagacataggagcaggatattctgttagtgtgatttcttgcaactttattttacattttaaactgctgatattggatataatgctgctttttagagacacctaaattgcagtatcagaatgaatgttgatgtttgaagccaaaaagccaaatgcttaaactgatcaatgactgtagctttttagactgttggtcaaagaacattctacttcacagtaatagctctatcagccacagatctcatggtggctgttgcatgataatgataggataaacaaaataccactgtcttcaagaaacattatcttaggtttgtttgtttggtttgagtttgatttggcttttatattttttaaaatcccttttgctaccccatctggttttataaactgagtttcttagcattcgttaaaattaaggggtttgtttggaataatatatattttttatgcttttgtctttcttacctgattgatattacattcacctttgattgttttttaaaagtttatttttacagaatatatttagtacctttcttaaggagtaactgaattgaatcaaccagtttgcatttaaataaaagaacaggctcagtggtcttcctgtagaatggtttacatgcctgcatgtgcagtagttgtgtctggaatcctagaattggcactttctgcctccttgctctaaatgtcacaaaaaattatacttccttaaagtaaatgtaatgatttcttcttttcctattgaccagtacagatagatatgttgtgtttgcttcatttttaatgatgacttcaagattgatgatgtgatccaataactgtggaggtagctttaacttggttctgtgtaaatagtatgtattttattataatatttctcattttaagatgcttggtttacattaaattatggtatttaactatttttatgtttatactaggtagggtctttcttatgtttctgtgtttttggtatgctaaataaagctatttttaaacccaag

SEQ ID NO: 1685 - DNA, 1545 bp, Homo sapiens
  source 1..1545: mol_type = genomic DNA; mol_type = genomic DNA
aagaacccgcagcagctcccaggatgaactggttgcagtggctgctgctgctgcgggggcgctgagaggacacgagctctatgcctttccggctgctcatcccgctcggcctcctgtgcgcgctgctgcctcagcaccatggtgcgccaggtcccgacggctccgcgccagatcccgcccactacagggagcgagtcaaggccatgttctaccacgcctacgacagctacctggagaatgcctttcccttcgatgagctgcgacctctcacctgtgacgggcacgacacctggggcagtttttctctgactctaattgatgcactggacaccttgctgattttggggaatgtctcagaattccaaagagtggttgaagtgctccaggacagcgtggactttgatattgatgtgaacgcctctgtgtttgaaacaaacattcgaggtcggcaaccacattgatgtgctcactggcaagtgggtggcccaggacgcaggcatcggggctggcgtggactcctactttgagtacttggtgaaaggagccatcctgcttcaggataagaagctcatggccatgttcctagagtataacaaagccatccggaactacacccgcttcgatgactggtacctgtgggttcagatgtacaaggggactgtgtccatgccagtcttccagtccttggaggcctactggcctggtcttcagagcctcattggagacattgacaatgccatgaggaccttcctcaactactacactgtatggaagcagtttggggggctcccggaattctacaacattcctcagggatacacagtggagaagcgagagggctacccacttcggccagaacttattgaaagcgcaatgtacctctaccgtgccacgggggatcccaccctcctagaactcggaagagatgctgtggaatccattgaaaaaatcagcaaggtggagtgcggatttgcaacaatcaaagatctgcgagaccacaagctggacaaccgcatggagtcgttcttcctggccgagactgtgaaatacctctacctcctgtttgacccaaccaacttcatccacaacaatgggtccaccttcgacgcggtgatcaccccctatggggagtgcatcctgggggctggggggtacatcttcaacacagaagctcaccccatcgaccctgccgccctgcactgctgccagaggctgaaggaagagcagtgggaggtggaggacttgatgagggaattctactctctcaaacggagcaggtcgaaatttcagaaaaacactgttagttcggggccatgggaacctccagcaaggccaggaacactcttctcaccagaaaaccatgaccaggcaagggagaggaagcctgccaaacagaaggtcccacttctcagctgccccagtcagcccttcacctccaagttggcattactgggacaggttttcctagactcctcataaccactggataatttttttatttttatttttttgaggctaaactataataaattgcttttggctatc

SEQ ID NO: 1686 - DNA, 549 bp, Homo sapiens
  source 1..549: mol_type = genomic DNA; mol_type = genomic DNA
agttggtgagcttttccggtgctctgcacagatgctggggcgctgagcaaacagccctcagtttctggagctgttccgagtccaggcatcccgatgttggtggatggcccatctgagcggccagccctgtgcttcttgctgttggctgtggcaatgtctttcttcggctcagctctatccatagatgaaacacgggcgcatctgttgttgaaagaaaagatgatgcggctgggggggcggctggtgctgaacaccaaggaggagctggccaatgagaggctcatgacgctcaaaatcgctgagatgaaggaggccatgaggaccctgatattcccacccagcatgcactttttccaggccaagcatctcattgagagaagtcaagtgtttaatattctaaggatgatgccaaaaggggctgccttgcacctccatgacattggcatcgtgactatggactggctggtgaggaatgtcacctacaggcctcactgccacatctgtttcaccccaagggggatcatgcagttcagatttgctcacccaact

SEQ ID NO: 1687 - DNA, 4554 bp, Homo sapiens
  source 1..4554: mol_type = genomic DNA; mol_type = genomic DNA
agtccagcagccaccatcaccaccactgcggttgctgctgcagctgcagctgctgctctccctccggctgcttcttcgcgtggccagcagcgaatggagcgatggagcccagactgttctgctggaccactctctttctcctggccgggtggtgcctgccagggttgccctgccccagccggtgcctttgctttaagagcaccgtccgctgcatgcacttgatgctggaccacattcctcaggtaccacagcagaccacagttctagacttgaggtttaacagaataagagaaattccagggagcgccttcaagaaactcaagaatttgaacacacttctgctgaacaacaaccacatcagaaagatttccagaaatgcttttgaaggacttgaaaatttgctatatctgtacctgtataagaatgaaatccatgcactagataagcaaacatttaaaggactcatatctttggaacatctgtatattcatttcaaccaactagaaatgctacagccagagacctttggagaccttctgagattagagcgactatttttgcataacaacaaattatctaaaattccagctgggagcttttctaatctggattcattaaaaagattgcgtctggattccaacgccctggtttgtgactgtgatctgatgtggctgggggagcttttacaaggctttgcccaacacggccacacccaggctgcggctacctgcgaatatcccaggagactccatgggcgtgcagttgcttcagtaacagtagaggaattcaattgccagagcccccgaattacttttgagccgcaggatgtggaggtaccatcaggaaataccgtctacttcacctgccgggcggaaggaaaccccaaacctgagattatttggatacacaacaaccactcattggatttggaagatgatactcgacttaatgtgtttgatgatggcacactcatgatccgaaacaccagagagtcagaccaaggtgtctatcagtgcatggccagaaattccgctggggaagccaagacacagagtgccatgctcagatactccagtcttccagccaaaccaagctttgtaatccagcctcaggacacagaggttttaattggcaccagcacaactttggaatgtatggccacaggccacccacaccctcttatcacttggaccagggacaatggattggagctggatggatccaggcacgtggcaacgtccagtggactttacttacagaacatcacacaacgggatcatggtcgatttacctgtcatgccaacaatagccacggcactgttcaagctgcagcaaacataattgtacaagctcctccacaatttacagtaacccccaaggatcaagtggtgctggaagaacatgctgtagagtggctctgtgaagctgacggcaacccacctcctgttattgtctggacaaaaacaggagggcagctccctgtggaaggccagcatacagttctctcctctggcactttgagaattgaccgtgcagcacagcacgatcaaggccaatatgaatgtcaagcagtcagttcgttgggggtgaaaaaggtgtctgtgcagctgactgtaaaacccaaagctcttgcagtgtttactcaacttcctcaggatacaagtgtcgaggttggaaagaatataaacatttcatgtcatgctcaaggagaaccacagcccataattacttggaataaggaaggtgtgcagattactgagagtggtaaattccatgtggatgatgaaggcacgctgactatctacgacgcagggttccctgaccagggaagatatgaatgtgtggctcggaattcttttggccttgctgtgaccaacatgtttcttacagtcacggctatacagggtagacaagctggcgatgactttgttgaatcttccattcttgatgctgtacagagagttgacagtgcaattaactccacacgaagacatttgttttcacaaaaacctcacacctccagtgacctgctggctcaatttcattacccgcgtgacccactgattgtggaaatggcaagagcaggggagatttttgagcacacgctgcagctgatacgggaacgtgtgaagcaggggctcactgtggacttggaaggcaaagaattccggtacaatgacttggtgtccccgcgctccctcagcctcatcgccaatttatctggatgcacagctcgcaggcctctgccaaactgctccaaccggtgtttccatgcgaagtaccgcgcccacgacggcacgtgcaacaacctgcagcagcccacgtggggcgcggcgctgaccgccttcgcgcgcctgctgcagccagcctaccgggacggcatccgcgcgccccgcgggctcggccttcctgtgggctcccgccagcccctcccgccgccccggctggtcgccacagtgtgggcgcgcgcggcggccgtcacccccgaccacagctacacgcgcatgctcatgcactggggctggtttctagagcacgacttggaccacacagtgcctgcgctgagcacagcccgcttctcggatgggcggccgtgcagctccgtctgcaccaacgaccctccttgtttccccatgaacacccggcacgccgacccccggggcacccacgcgccctgcatgctcttcgcgcgctccagccccgcgtgtgccagcggccgtccctctgcgacggtggattcagtctatgcacgagagcagatcaaccagcaaacagcctacatcgatggctccaacgtttacgggagctcggagcgggaatcccaggctctcagagacccttcggtgcctcggggtctcctgaagacaggctttccttggcctccctccggaaagcccttattgcccttttctacaggcccacccaccgagtgcgcgcgacaggagcaggagagcccctgtttcctggccggggaccaccgggccaacgagcatctggctctggccgccatgcacaccctgtggttccgggaacacaacaggatggccacggagctgtccgccctgaacccccactgggagggaaacacggtttaccaggaagccaggaagatcgtgggcgcggagctgcagcacatcacctacagccactggctgcctaaggtcctgggggaccctggcactaggatgctgaggggttaccgaggctacaaccccaacgtgaatgcaggcatcattaactcttttgctactgcagcctttagatttggccacacattaatcaatcctattctttaccgactgaatgccaccttaggtgaaatttccgaaggccaccttccgttccataaagcgctcttttcaccgtccagaataatcaaggaaggtgggatagacccggttctccgggggctgtttggcgtggctgctaaatggcgggcaccctcctaccttctcagtcctgagctgacccagaggctcttctccgcggcttattctgcggccgtggattcggctgccaccatcattcaaaggggtagagaccacgggatcccaccatatgttgacttcagagttttctgtaatttgacttcagttaagaactttgaggatcttcaaaatgaaattaaagattcagagattagacaaaaactgagaaagttgtacggctctccaggtgacattgacctctggcccgcccttatggttgaagacctgattcctggtacaagagtgggaccaacacttatgtgcctgtttgttacccagtttcagcggctaagagatggagataggttctggtatgaaaaccctggagtatttaccccggcacaactcactcagctgaagcaggcgtccctgagccgggtgctttgtgacaatggtgacagcattcagcaagtgcaggctgatgtctttgtaaaggcagaatacccacaggattacctgaactgcagcgagatcccgaaggtggacctgcgagtgtggcaagactgctgtgcagataaacaagctggaggcacgcctgaggcaggcagggtgtacagatgttagaggggttccaaggaaggccgaggagcgctggatgaaagaagactgcactcactgcatttgtgagagtggccaggtcacctgtgtggtggagatttgtcccccggctccctgtcccagtcctgaattggtgaaaggaacctgctgtccagtttgcagagaccgaggaatgccaagtgattccccagagaagcgctaataaaagttttgtgctgttgagccccaaatgggaaatttctcaggaagagacatttaggacttcagaacttttaacttgtagtcacattgttgatatggaaaccactgacttaagcaacttagttcatctaatcttacatatacttacgatcttttattttttcattttctaacataccttgaaataattcaaaactaaaagcaataaagtgcatatgaagtgtttgatcataagaaatatttcttactgtaagctgtcagttttatatgccacacctggaaataaaaagaatatcatggaatattt

SEQ ID NO: 1688 - DNA, 1555 bp, Homo sapiens
  source 1..1555: mol_type = genomic DNA; mol_type = genomic DNA
ttcatttctccttgagcaggaacagttcatggacgaactctgaggaccattctgaggacaagaggcatccagtgtcatgagtggaacatgcagcattttatggctacagagttaaggcaagggttgaattccacgagtcaaaaagcagcccttttcagagacccaactctctggggtgctcaggggcttgggctggattgagaagaaaactgacaagagtaagctgccctctcttctctggccatctcacaaaccacagtgcgggccaactggtcctgcctctttaccacacagaaccaagcactagggataagacagctgcccatggtgtccgcggcgggtctctctggggatggcaagatgcgaggggtgctcctggtgctgctcggccttctctattcttccaccagaaggacattgtcgttatagtgggtataagtaacatggatcctagcaagattgctcacacagagtatccagtcaataccatcatcatccatgaggactttgataacaactccatgagcaacaacatagccctcctgaagacagacacagcgatgcattttggcaacctggtccagtccatctgcttcctcggcagaatgctgcatacaccaccagtcttgcagaactgctgggtgtcaggatggaatcccacatctgcaacaggaaatcacatgacgatgagtgtcctgaggaaaatcttcgtgaaagatcttgacatgtgtcccctatacaaactccagaagacagaatgcggcagccacacgaaagaggaaaccaagactgcctgcttgggggacccaggaagcccaatgatgtgccagctacagcagttcgatctgtgggttctgagaggagtcctgaacttcggtggtgagacgtgccctggcctgtttctgtacaccaaggtggaagactacagcaaatggatcacatccaaggctgagagggccggccctcccctgtcctcactccaccactgggaaaagttgatttctttctcccaccatggaccaaatgccaccatgacacagaagacatattctgattctgaactgggccatgttggatcatacttgcagggacaaagaaggaccatcacgcattcacgactaggaaacagctctagagatagtctagatgttagggagaaggatgtaaaggaatcaggcaggtctcctgaggcgtctgtacaacccttatactatgactattacggtggggaggtgggggaaggtaggatttttgcaggtcagaacaggttgtatcagcccgaagaaatcatcttggtttccttcgtgcttgttttcttttgcagcagtatctagtccaggagctaccccaccaaactgaagagtaaactgagaatgctgagtgccaggcattcaccatgctgttttgatgtctgtttttgatagttgcacactggggctgccacggataagcccatggcatacactgggctggctctccctcctctatccctctcccaggtgtgggaaggtcactttcactatgcttgtgaactaaatgctggctaacaagtgtc

SEQ ID NO: 1689 - DNA, 4820 bp, Homo sapiens
  source 1..4820: mol_type = genomic DNA; mol_type = genomic DNA
cttaggcctgtcccctcagttcccaggtgccatgaggaagcctcgtcggaagtcccggcagaatgccgagggccggcgttccccgtccccctacagtctcaagtgctcacccacccgggagaccctgacatatgcccaggcccagcggattgtcgaggtagacattgatggacgcctgcatcgtatcagcatctatgacccactcaaaatcattactgaagatgagctaactgcccaggatatcaccgaatgcaatagtaacaaggaaaacagtgaacagcctcagttccctggcaagtccaagaaaccctcatccaagggcaaaaagaaggaatcctgctccaagcatgcatctggtacttccttccacctcccacagcccagcttccgtatggtggactcaggcatccagccagaagcacccccgctgcctgctgcctactaccgctacattgagaagccacctgaagacctggatgcagaggtagagtatgacatggatgaggaggaccttgcctggctggacatggtgaatgaaaaacggcgagtagatgggcacagtttggtgtctgcagatacctttgagctgctggtagaccggcttgagaaagagtcatacttggagagtcgcagcagtggggcccaacagtcactcatcgatgaagacgctttctgctgtgtgtgcctggatgatgaatgtcacaatagcaatgttattctcttctgtgacatctgcaacctggctgtacaccaggagtgctatggcgtcccatacatccctgagggccagtggctatgccgctgctgcctgcagtctccctcccggcctgtggattgcatcctttgccccaataagggtggcgccttcaaacagaccagtgatgggcactgggcccatgtggtgtgtgccatctggatccctgaagtctgctttgctaacaccgtgttcttggaacctattgagggcattgacaatatcccgcctgcccgctggaaactaacctgctatatctgcaagcagaaagggctaggtgcagccatccagtgccataaggtgaactgctacacagcattccatgtgacatgtgcacagcgggctgggctcttcatgaagattgagcccatgcgcgaaaccagcctcaatggcaccatctttacagtgcgcaagactgcctactgtgaggcccactcgccaccaggtgcggccactgctaggaggaagggcgactcccctagaagcatcagtgagactggcgatgaggaagggctgaaggagggtgatggagaggaggaagaagaggaagaggtggaggaagaagagcaggaagctcaaggcggggtgagtggctccctcaagggagtgcccaagaaaagcaagatgagtttgaagcagaagatcaagaaggagccagaggaagcaggccaagacacaccctccactctccccatgcttgctgtcccacagataccctcttacaggttgaacaagatctgtagtggtctctcctttcagaggaaaaaccagtttatgcagcggcttcacaattattggctgttgaagcggcaggcacggaatggtgtccctcttatccggcgcttgcactcccatctgcagtcccaaagaaacgctgagcagcgagagcaggatgagaagacaagtgcagtgaaggaggagctgaagtattggcagaagctccggcatgacttggagcgggcgcggctgctgattgagctgattcggaagagagagaagctcaaacgagagcaggtcaaagtccagcaggctgccatggagctggagctgatgccattcaatgttctgttgaggacaacactggacctgctgcaggagaaggatcctgcacacatcttcgcagaaccagtcaacttgagtgaggttccagattacctggaattcatatccaagccaatggatttttctactatgaggcggaagctggagtcccacctgtaccgcaccttggaggagtttgaggaggactttaaccttatagttaccaactgcatgaagtataatgctaaagacacaattttccaccgagcagctgtccgcctgcgggacctgggaggggccatcctacggcacgcccggcggcaggcagagaacatcggctatgaccccgagaggggcactcacctgcccgagtcacccaaattggaagacttttaccgcttctcctgggaagacggcatgaccaacggctttggaaaacacaccgaaagcgggtctgactctgaatgtagtttgggtctcagtggtggactggcatttgaagcttgcagtggtctgacgccccccaaacgcagccgtgggaagccagccctgtctcgagtgcccttcctggaaggtgtgaacggagactctgactacaatggctcaggcagaagcctcctgctgccctttgaagaccgcggagacctggagcccttggagctggtgtgggccaagtgccgaggctacccctcctaccctgccttgatcatcgatcccaagatgccccgggagggcctcctgcacaatggcgttcccatccctgtccccccgctggacgtgctgaagctgggagagcagaaacaggcagaggctggagagaagctcttccttgtcctcttctttgacaacaagcgcacctggcagtggcttccaagggacaaagtcctgcccttgggtgtggaagacaccgtggacaagctcaagatgctggaaggccgcaagaccagcatccgcaagtcagtgcaggtggcctatgaccgtgcgatgatccacctgagcagagtccgggggccccactccttcgtcacttccagctacctgtaagggcagggctgggcctgcatccgcttgccctgcctccatcccgcagggcacagagaagcctcttctgcccctgccagatgtatggccggcagcttccccctctcatggtaggccagggactgggctttctccccactaagggcaaggccccagttttgaccaatcgcatggttctcctggcaggcctgctgtgtgccaaaaactcccacccaaggtccctcaggggatatttcactgaagaaccagttagaagtagaaacagctgtggggcttgggcccagcttaggagattgcccagatggcaagaggtcctgggctccttcttgaggggctgcctggcccgctccatcctactcccactaactacacctcagggcgggtgaggttccgacactgatcccagagatgccgtggatacgccagggtcccagggggaatctccccaagctcacactctctcccgcttatcgcctattctcacacctcttctcggtcccatcttctgcacccattgcccagtcttgctttctctttcccatattccttttctttttctcttgtgccaaactgacagaaaccgtcaccacactggtctttttctttaatgtctcattccccttgaggccagctgctatgccaggtggtgtctctgccaggctcctcaggcccagacagaggccagcccacaacctatgaccccctcccccaggacaccacctcccacccacagaccttccctttagctgttgacacaacttcccagctctgcaagtgtgccccctggatcaaggcgggtcccctcttgtttttttctttgctgccacgaggtggtccaagccttcagggtgggctcctatcaggctgggtgtgcgagtgtccatctgtccacatggatgtcgagggtggtttgtgtggagctgtgctcgtcagctgggtctgccctcttcccccttttctccttcttctctcctcatggactttttctgcaattgcagtcttaagcttcactctccaccacctggatggcatggcgcctgccaccaaacatcttcctggcctgcgctctgccctgccctgcctagcctctgctactcccacttcccaactccagggaatgcattacttttatttcaaaccctctgcctccttccttctttctcttcaaccccctccccaccttcaccttctcaaaaatggaaggaaaaaaaaactgtgaatggggaatgctgactgacaaaccaacacaactttcagaggcttcagtgtctgttctctggacatttcttttcacctcctgagcaccaaagtcgcagggccagttgcaggccgctgattgccatgttgatttttaacctgatattctttttaattgttttaaatttttcataggggagttttggacaaaacagtcactggggagatcactgccatttttacacacttgactttttaaaaatacaaccaaccaaccaccacaacttcttatacatttgggacatgagccagagtttaaaagggaaccaacaaaacactataacttaaaaggatggggttttggattttgtataataataaaaacaatacagcatatggctagggaaggacatggtgtatataattgtaaaatactgttctaaattattcaggcctatagtttccattactggagtcctccattgtgtggccacacagtgtcgttgatttaaaggagccagtgcttcccctctccccaggtagttggtcagctgtggactctgtgacctttgtctaaacctgtgttgtaagatcttgggacttcctctctttctatgtctatctcttccccccaacactttctcttcttagtctctctctttatttttcaatctctgaatattttagtctctctctgagtctcattttttaaaatgctcttttagaacgggaaacggctcagatcctgctgtggcacggggcctatgtgtctctgtcgcgtctgctg

SEQ ID NO: 1690 - DNA, 583 bp, Homo sapiens
  source 1..583: mol_type = genomic DNA; mol_type = genomic DNA
actagttgacagagcagcagaatttcaactccagtagacttgaatatgcctctgggcaaagaagcagagctaacgaggaaagggatttaaagagtttttcttgggtgtttgtcaaacttttattccctgtctgtgtgcagaggggattcaacttcaatttttctgcagtggctctgggtccagccccttacttaaaggtattaaaggtcactctgcaagagaaaaaaagaaaagaaaggaaaagaaaagaaaaaaaaacatgcttttaactgcagatcaatactgttgaaacagtacaccaagagatctggaaagcatgaagactgggctttttttcctatgtctcttgggaactgcagctgcaatcccgacaaatgcaagattattatctgatcattccaaaccaactgctgaaacggtagcacctgacaacactgcaatccccagtttaagggctgaagctgaagaaaatgaaaaagaaacagcagtatccacagaagacgattcccaccataaggctgaaaaatcatcagtactaaagtcaaaagaggaaagccatgaacagtcagcagaacagggcaag

SEQ ID NO: 1691 - DNA, 4509 bp, Homo sapiens
  source 1..4509: mol_type = genomic DNA; mol_type = genomic DNA
agaaataggagcgcgcaggcgcgacgtgcggctcgcagaacggcgagtagcggagcgggacccgctgtgagtgtggcggccgcgctgggttcctagctggggaaacgtgatccaggcgaagcgccccaggaaggattgggggaatcatcatccagggacgtgccagaaaccacaagaaaacatggggagggttttcctcacgggagaaaaagccaattccatattaaaacgctacccaagagctaatgggttttttgaagaaataagacagggcaacattgagcgtgagtgcaaagaagaattctgtacatttgaagaagcaagagaagcttttgaaaataatgaaaaaactaaggagttttggagcacctacacaaaagcgcaacaaggggagagtaaccgaggaagtgactggtttcagttttaccttacctttccgttaatctttggcctcttcattatcctccttgtcattttcctaatctggagatgcttcctaagaaacaaaactcgtagacagacagtgactgaaggccacattcctttccctcagcaccttaatattatcaccccaccccccccaccagatgaagtgtttgacagcagtggattgtctccaggctttctgggatatgtagttgggcgctcagattccgtctctactcgcctgtccaattgtgatcccccgccaacctatgaggaagccactggccaagtgaacctgcagaggagtgaaacagaacctcatttagacccacccccagagtatgaggacatagtcaactccaactcagccagtgccattcctatggtgcctgtggtcaccaccatcaaatgaagctgcaaacttctttttactctaatcatttttaaaatactaatggaagaactttctagcactttaccactacataaatgttcattgacttattttattggactcttaccgcataccacttcacacttgttttattttctttagttttgtttcttgttatagaatcattatccatgctcatttttgctaggggaaatatatgaagagggaaaacatactaatgggggtctttctgtgatgtgatgagacatacatgtaagtgtatatatgtgtgtataggcatatatacgtgtgtatgcatcaacacagtatatgtaaaactgtcttaaaaatccattaacttctacctaaatcacctggaaggagagcattactcaccaaaattgcaaaacaagggtatcaagaatttgtgtaatagccagtgacatgctgtagatttttgcaaactggatgtacttagcatgttttctaattctgactggcttttgttaacttgataattcttcatctaccttaaaaagaaaaaaattacacatagtcattcttgatgttataaatagagaaaaagtgtgtgtgagcaataatgcataagctactgataacttgcttacagcagatagcaataaggtatttggtggcattcggcttgttttgtaatagggattttttttttggttgaccactcccccacacttccaaaattaaacagtgttttcttagcatcttgaatatctcctgcggtgtatattaacatcttgatgagacagatttccaggcaacaaaataatttctaaaatggatatatgtgtggattaatgacaggcagtaaatacccattactcctttactcatagctggtaaaattattcccactgttttattgccttttactgtacgttctacactctgtcctactcccacagaattttcaagcccttaagagtttagttaaaataaaatttttgaaattattgtcttaatatttttatataggctgatgtctttgcctcaagattgttaggaggtaattttccattgaattatcaactgtgatttttatattgccctccaagtggtagaagaagattgcaaagtccatgttatgctaggtgcacaataaatctagtaatagccccacacagatctcatcattgttgctacttccttttgtattttcatcaggtatttttttaactgtagggtttttacttttttcttggagcagagagaacaggctgtaaatgggttgccaacataagctggctgagaaataaaagaaaacaagacagttgttcataaagtttcattttgtatgcactgatggcaaattcattaggtcagttaagggaaatatttgtaccacttccaaacttttcagcgttggataaaatgattgatgaggcaggcagaaggaatgtaggtttcaggtgtgtcatttcctgctgcttccagctccatccctacagactcctccccgagtcctgccctggaaccaaaggaaggaggaacactgaggggaatcctgaagtaggagtcagatgacctgaactcagatctccctctatcacatgcttgccaccactgtaccttgagcaagaatcatatctgaccctcaacctcctcaactctaaaatggggataacatcatttgtcctgcacttctctaagggctttacaaggatcaaataagatggtgtgtatgtaagaaatttgtaaaatgtgaagagctatctacactaagttcgtaatgttattattattgtgcttcatggagaattttcccctctgttttcctaaattgtatgagagctttcacacagtgagaaatagagcaggctgccccataaatgggtaacatattcctaatctgagtgtgtgggctgttagagaacccctgccatgctctggtctgttctgaaactgtgccaactgaaagatgatagtccacacagcacaaacaggtttaagcaaatgatagaaagggaagtaaggcgtgtgtgctagttaataggtttagtagcttttatggactaaaaatgattgattgtatcttgaccctggtctcagaaatgacatttttacttttgccatgagtacacatcagatatctttggcttctatttaaagctaaaggtagaagtgtttgatccagtgaactgtgtatgtatgtgtggggtttttttctttatttttaaatgaaaattaagacaccttttgtgtggacatgtttttgtctttaatgtcaggctttagattagaccagcagttttcaaagtatggccaatggacccctgggttccttgagagcctttcaggggggactatgagatcaaaatatttttattataatgtgaagacattgtcttttcactctatctcaaaaaaagtgttgcaaatgtaaaacattgccatcttctcacaaatctctttttttgtttttgaaaatatggccatttttcataaaatgttatttgtgttagcatgtaatgggtttactatgtttaaataagttaatactttaaaaattttcaggtttttttagtatggtgaatattgatagatataaacctcatgaacaaaagtactttggcatccagattctcaataaatgttaagagcgtaagtgtaagggggtccagagaccaaaagttttagagctacaggattagacataggagcaggatattctgttagtgtgatttcttgcaactttattttacattttaaactgctgatattggatataatgctgctttttagagacacctaaattgcagtatcagaatgaatgttgatgtttgaagccaaaaagccaaatgcttaaactgatcaatgactgtagctttttagactgttggtcaaagaacattctacttcacagtaatagctctatcagccacagatctcatggtggctgttgcatgataatgataggataaacaaaataccactgtcttcaagaaacattatcttaggtttgtttgtttggtttgagtttgatttggcttttatattttttaaaatcccttttgctaccccatctggttttataaactgagtttcttagcattcgttaaaattaaggggtttgtttggaataatatatattttttatgcttttgtctttcttacctgattgatattacattcacctttgattgttttttaaaagtttatttttacagaatatatttagtacctttcttaaggagtaactgaattgaatcaaccagtttgcatttaaataaaagaacaggctcagtggtcttcctgtagaatggtttacatgcctgcatgtgcagtagttgtgtctggaatcctagaattggcactttctgcctccttgctctaaatgtcacaaaaaattatacttccttaaagtaaatgtaatgatttcttcttttcctattgaccagtacagatagatatgttgtgtttgcttcatttttaatgatgacttcaagattgatgatgtgatccaataactgtggaggtagctttaacttggttctgtgtaaatagtatgtattttattataatatttctcattttaagatgcttggtttacattaaattatggtatttaactatttttatgtttatactaggtagggtctttcttatgtttctgtgtttttggtatgctaaataaagctatttttaaacccaag

SEQ ID NO: 1692 - DNA, 1582 bp, Homo sapiens
  source 1..1582: mol_type = genomic DNA; mol_type = genomic DNA
cctcctccttatcccctcccctcttccctgtcccctttcacagctggctgtagctggccaaggagttctcgattaaagaggaaggggcagtgctcacatttctgggcaggtgtctggaaaatatgaggggccacccctctctgctgctgctatatatggcattaaccacctgcctggatacttcacccagtgaggagacagaccaaggtgagtgtttgggggaagtggcatccagacacttggcgttggcctccccctgactcaggaatgtttctagtccttcctcttccaggagtccaggacccagccccttcctccttcagacccaggaatctggattcccagcccctgctccttcctccaggaccccactgctttccatccccctatgactccagccctagggaccctccatttttctgtccctcatgtctttgggtccagaagtcttcctgggtcccccagaggcccagagcttcctgagtagccatacccggattccaagagccaaccactgggacctggagctgctcacaccagggaacctggaacgggagtgtctggaagagaggtgttcctgggaagaggccagggagtattttgaggacaacactctcacggagcgcttttgggagagctacatctacaatggcaaaggagggcgtggacgagtggatgtggccagcctggctgtggggctgacaggtggcatcctgctcattgtcctggccggcctgggagccttttggtatctgcgctggcgacagcaccgaggccagcagccctgtccccaagaggccgggctcattagccctctgagtcctttgaaccctctgggcccaccgacgcccctgcctccacccccacccccacccccaggcctccccacctatgagcaggcgctggcagcctctggggtacacgacgcacctccacccccctacaccagcctcaggaggcctcactgaagagctgctttcgagacccggctctccgaaccgtgcccctgattcataccggattccggaagccgctaggcctcatagacgccgaagctggacttggagtggggaatggtgggagtaggggtcatccggcccgaggcctgccctggcacacgcgtttccgccgcgtatggatatacacatgttttcggcaacgtgttcccgtgtcctggcccctcacgggcccccacactctcctgaccgtgagggcactggtcagttccgcccccgtggtaggcagacgcgcggggaaattcggacccaggagcccagccccggctgtgccatcttgtgtatgggcagatatgacctgacagccccctccagtgccacagggtacgcacacgcagagccccgcctgtgcacacgcgtgtcttcgtgcactccccgtgcggtacaggggcacttcgtaacccagggaaagggcggggggcatatttgcaagcgcgctcggtgcgggcaggctcgcattgcacccagggagctggagttgagctgttcccctaaataaaaacccttcggaaaggagaccaaaaaaagcagaaataatgcaaaaaataataatgaaatgaactgcg

SEQ ID NO: 1693 - DNA, 2067 bp, Homo sapiens
  source 1..2067: mol_type = genomic DNA; mol_type = genomic DNA
taggtccaactccagggctaacttccagttgcaaccgctgctcccgcccgcgggaggtgcctcgcaccgccccccgaccccctccatcccctccacccactcacccactccctgtgggtccctgcagaagcggcccggcaggctctgcccaccggcccctcctggcctttccccatcccgcacacacctcagctccaggacactcttcccgggaggaactctgctcacaaagcccaaggaccagacagaacggcccttcctcccctcacccacctgaaccaccccagaaagccctgagcagaggccaggccacccagccctctgccatgtatgaaccacctggtcccacaccttccgggtgtcccaggccccctcacctcacacctcaacaccgcagctctaattattttaaaccccacatctttttcttttttttcttcttgatctttaaaagaatatcatgacaaaaaaaaccccacatcttaaattcagatactcacggccaggcacggtggctcacacccgtaatcccagcactttgggaggccaaggcgggcagatcagttgagcccaggagttcaagaccagcccgggcaacacagcaagaccctgtctctactaaaaataaaaaaaaattaaaaaacaaaaaacaaacaaacaaaaaaaccccaggtgcagtggtgcctgtggtcccaagtactcaggaagctgaggcgagaggatggcttgagcccaggagttggaggctgcagtgagctacagttgcactgctgcactccagcctgggtgacagaatgagaactctgtctctaggggaaaaaaaaaatcggaaactcgggctgagagagggcaggtcacctgccagaggcccgcaggtggggctggccctgctgcacctggagggtggttctctccgagccagcctttcaggtaggcactgtgactgtccccacagcacaggtgagaaagctgcatcacagagaacttgttaagtgacttgcccaaggccacacagcggccaggggtggaggtggaaatctgagtcgggcggtctggcttcaatgtcaacacgcatcaccgctgcacctggctgtcctagagatgactctcgaagacattgtgcagagagaggtgtggggcacggtggtggccagaggagccccagcccctcccgggcctgtccccacacgaggggccgcctcacgccgcctctctgtttctcccgccagcacctctgagacgtccctgtaccaggtcctgctgggggcaaggcagctagtgcagccgggaccacacgctatgtatgcccgggtgaggcaggtggagagcaaccccctgtaccagggcacggcctccagcgctgacgtggccctggtggagctggaggcaccagtgcccttcaccaattacatcctccccgtgtgcctgcctgacccctcggtgatctttgagacgggcatgaactgctgggtcactggctggggcagccccagtgaggaagacctcctgcccgaaccgcggatcctgcagaaactcgctgtgcccatcatcgacacacccaagtgcaacctgctctacagcaaagacaccgagtttggctaccaacccaaaaccatcaagaatgacatgctgtgcgccggcttcgaggagggcaagaaggatgcctgcaagggcgactcgggcggccccctggtgtgcctcgtgggtcagtcgtggctgcaggcgggggtgatcagctggggtgagggctgtgcccgccagaaccgcccaggtgtctacatccgtgtcaccgcccaccacaactggatccatcggatcatccccaaactgcagttccagccagcgaggttgggcggccagaagtgagacccccggggccaggagccccttgagcagagctctgcacccagcctgcccgcccacaccatcctgctggtcctcccagcgctgctgttgcacctgtgagccccaccagactcatttgtaaatagcgctccttcctcccctctcaaatacccttattttatttatgtttctcccaataaaaacccagcctgtgtgccagct

SEQ ID NO: 1694 - DNA, 4086 bp, Homo sapiens
  source 1..4086: mol_type = genomic DNA; mol_type = genomic DNA
aataccagcaacaactcctaccttccctgcatctgtcatcacttatgaaacccaaacagagagatctagagcacaaacaatacaaagagaacaggagcctcaaaagaagaacaggactgacccaaacatctctccagaccagagttctggcttcactacacccactgctatgacacctcctgttctaaccacagccgaaacttcagtcaagcccagtgtctctgcattcactcattccccaccagaaaacacaactgggatttcaagcacaatcagttttcattcaagaactcttaatctgacagatgtgattgaagaactagcccaagcaagtactcagactttgaagagcacaattgcttctgaaacaactttgtccagcaaatcacaccagagtaccacaactaggaaagcaatcattagacactcaaccataccaccattcttgagcagcagtgctactctaatgccagttcccatctcccctccctttactcagagagcagttactgacaacgtggcgactcccatttccgggcttatgacaaatacagtggtcaagctgcacgaatcctcaaggcacaatgctaaaccacagcaattagtagcagaggttgcaacatcccccaaggttcacccaaatgccaagttcacaattggaaccactcacttcatctactctaatctgttacattctactcccatgccagcactaacaacagttaaatcacagaattctaaattaactccatctccctgggcagaaaaccaattttggcacaaaccatactcagaaattgctgaaaaaggcaaaaagccagaagtaagcatgttggctactacaggcctgtccgaggccaccactcttgtttcagattgggatggacagaagaacacaaagaagagtgactttgataagaaaccagttcaagaagcaacaacttccaaactccttccctttgactctttgtctaggtatatatttgaaaagcccaggatagttggaggaaaagctgcaagttttactattccagctaactcagatgcctttcttccctgtgaagctgttggaaatcccctgcccaccattcattggaccagagtcccatcaggacttgatttatctaagaggaaacagaatagcagggtccaggttctccccaatggtaccctgtccatccagagggtggaaattcaggaccgcggacagtacttgtgttccgcatccaatctgtttggcacagaccaccttcatgtcaccttgtctgtggtttcctatcctcccaggatcctggagagacgtaccaaagagatcacagttcattccggaagcactgtggaactgaagtgcagagcagaaggtaggccaagccctacagttacctggattcttgcaaaccaaacagttgtctcagaatcatcccagggaagtaggcaggctgtggtgacggttgacggaacattggtcctccacaatctcagtatttatgaccgtggcttttacaaatgtgtggccagcaacccaggtggccaggattcactgctggttaaaatacaagtcattgcagcaccacctgttattctagagcaaaggaggcaagtcattgtaggcacttggggtgaaagtttaaaactgccctgtactgcaaaaggaactcctcagcccagcgtttactgggtcctctctgatggcactgaagtgaaaccattacagtttaccaattccaagttgttcttattttcaaatgggactttgtatataagaaacctagcctcttcagacaggggcacttatgaatgcattgctaccagttccactggttcggagcgaagagtagtaatgcttacaatggaagagcgagtgaccagccccaggatagaagctgcatcccagaaaaggactgaagtgaattttggggacaaattactactgaactgctcagccactggggagcccaaaccccaaataatgtggaggttaccatccaaggctgtggtcgaccagcagcatagagtggcagctggatccacgtctaccctaatggatccctgtttattggatcagtaacagaaaaagacagtggtgtctacttgtgtgtggcaagaaacaaaatgggggatgatctgatactgatgcatgttagcctaagactgaaacctgccaaaattgaccacaagcagtattttagaaagcaagtgctccatgggaaagatttccaagtagattgcaaagcttccggctccccagtgccagagatatcttggagtttgcctgatggaaccatgatcaacaatgcaatgcaagccgatgacagtggccacaggactaggagatatacccttttcaacaatggaactttatacttcaacaaagttggggtagcggaggaaggagattatacttgctatgcccagaacaccctagggaaagatgaaatgaaggtccacttaacagttataacagctgctccccggataaggcagagtaacaaaaccaacaagagaatcaaagctggagacacagctgtccttgactgtgaggtcactggggatcccaaaccaaaaatattttggttgctgccttccaatgacatgatttccttctccattgataggtacacatttcatgccaatgggtctttgaccatcaacaaagtgaaactgctcgattctggagagtacgtatgtgtagcccgaaatcccagtggggatgacaccaaaatgtacaaactggatgtggtctctaaacctccattaatcaatggtctgtatacaaacagaactgttattaaagccacagctgtgagacattccaaaaaacactttgactgcagagctgaagggacaccatctcctgaagtcatgtggatcatgccagacaatattttcctcacagccccatactatggaagcagaatcacagtccataaaaatggaaccttggaaattaggaatgtgaggctttcagattcagccgactttatctgtgtggcccgaaatgaaggtggagagagcgtgttggtagtacagttagaagtactggaaatgctgagaagaccgacatttagaaatccatttaatgaaaaaatagttgcccagctgggaaagtccacagcattgaattgctctgttgatggtaacccaccacctgaaataatctggattttaccaaatggcacacgattttccaatggaccacaaagttatcagtatctgatagcaagcaatggttcttttatcatttctaaaacaactcgggaggatgcaggaaaatatcgctgtgcagctaggaataaagttggctatattgagaaattagtcatattagaaattggccagaagccagttattcttacctatgcaccagggacagtaaaaggcatcagtggagaatctctatcactgcattgtgtgtctgatggaatccctaagccaaatatcaaatggactatgccaagtggttatgtagtagacaggcctcaaattaatgggaaatacatattgcatgacaatggcaccttagtcattaaagaagcaacagcttatgacagaggaaactatatctgtaaggctcaaaatagtgttggtcatacactgattactgttccagtaatgattgtagcctaccctccccgaattacaaatcgtccacccaggagtattgtcaccaggacaggggcagcctttcagctccactgtgtggccttgggagttcccaagccagaaatcacatgggagatgcctgaccactcccttctctcaacggcaagtaaagagaggacacatggaagtgagcagcttcacttacaaggtaccctagtcattcagaatccccaaacctccgattctgggatatacaaatgcacagcaaagaacccacttggtagtgattatgcagcaacgtatattcaagtaatctgacatgaaataataaagtcaacaacatctgggcagaatttattttttggaagaagtttaatcaaaggcagccataggcatgtaaatgaatttgaatacatttacagtattaaatttacaatgaacatgcaaaataaaaggacttgtaaataaatgcattatgaactg

SEQ ID NO: 1695 - DNA, 1072 bp, Homo sapiens
  source 1..1072: mol_type = genomic DNA; mol_type = genomic DNA
acattcgcagcccgggcagccctgctgcgcaccgggcctcgcgccccgcgccccgcgccccgcgccccgcgccccgcaccgcccatccaggaacatctggggacacaggaagtgctgccattgagagtgttcaaggggcaaagaacatggacattatcgttctgctgcccaaaggtcactgcacaaagattcaggagctccagatgacaacggtgctgaagcagaacgtacatgtgtttggagtggagggaaacagcgatgagctcgatgagccgatcaagactgtgtttgccgatgtggcttttgtcaagaagcacaatctgatgagcctgaattcgatcaactggtcccgggtcctggtgcagatggcccatcacttctttgcttacttccagtgtacgccatccttggacacacatcccctacccctggtggaggtggttgtgccaacaggggctgccggtaaccttgcagctgggtacattgctcaaaagataggcctgcccatccgtctggtcgtggcagtgaaccgcaatgacatcatccacaggactgtccagcagggagacttctctctctctgaggctgttaaatcaaccttggcatcagctatggacattcaggtgccctacaacatggagagggtgttctggctgctctctggctctgacagccaggtgacaagagccctcatggagcagtttgaaaggacccaaagtgtgaatctgcccaaggaactgcacagcaagcactccccggtgctgcctcgcccctgcctctgcagccaagttcccggaagctgtcctggctgctggcctgacccctgagactcccgcggagatcgtagccctggagcacaaggagacacgctgcaccctgatgcggagaggtgacaactggatgctgatgcttcgggacaccattgaggaccttagccgacagtggaggagtcatgccctcaacacctcccagtagcctggctggaggtggctttctttaggcttcagatcccaggaagatgcaccttctgagctgccttgtgcaccctccccattaagcgtaggttaggagg

SEQ ID NO: 1696 - DNA, 729 bp, Homo sapiens
  source 1..729: mol_type = genomic DNA; mol_type = genomic DNA
atgtttcaaactgggggcctcattgtcttctacgggctgttagcccagaccctgcccttgaatgtgaatccagccctgcccttgagtcccacaggtcttgcaggaagcttgacaaatgccctcagcaatggcctgctgtctgggggcctgttgggcattctggaaaaccttccgctcctggacatcctgaagcctggaggaggtacttctggtggcctccttgggggactgcttggaaaagtgacgtcagtgattcctggcctgaacaacatcattgacataaaggtcactgacccccagctgctggaacttggccttgtgcagagccctgatggccaccgtctctatgtcaccatccctctcggcataaagctccaagtgaatacgcccctggtcggtgcaagtctgttgaggctggctgtgaagctggacatcactgcagaaatcttagctgtgagagataagcaggagaggatccacctggtccttggtgactgcacccattcccctggaagcctgcaaatttctctgcttgatggacttggccccctccccattcaaggtcttctggacagcctcacagggatcttgaataaagtcctgcctgagttggttcagggcaacgtgtgccctctggtcaatgaggttctcagaggcttggacatcaccctggtgcatgacattgttaacatgctgatccacggactacagtttgtcatcaaggtctaa

SEQ ID NO: 1697 - DNA, 1892 bp, Homo sapiens
  source 1..1892: mol_type = genomic DNA; mol_type = genomic DNA
gtgcagtctgggacgcgggatgcttggcgctctacctcgccgcccctgagccttcccgtccgcctcgccacgcgcccggacggcctggggttgctgcccgtcagtctcgaaagaaacttggggactgtggcagccatggagccagtgtagtgccacatgtggggatggtgtcagagagcgtcgccgagtgtgtctcacttccttcccctccagtcctgtctgccctggaatgtccttggaggcctccctgtgttccctggaggagtgtgctgctttccagccatccagcccatctcctcttcagccccagggtccagtgaagtccaacaacatcgtgactgtcactggtatatccttgtgcttgttcatcatcattgccactgtgctcatcacgctgtggaggaggttcggccggccagccaagtgcagcacacctgctcgacacaactccatccactcccccagcttccggaagaactcggacgaggagaatatctgcgagctgagcgagcagcgcgggagcttctcggatgggggagacgggcccacggggagtccaggggacacaggcatccctctgacctacaggcggagcgggccggtacctcccgaggatgatgcctctggcagcgagagcttccagtccaacgcccagaagataatcccacctctgttcagctaccgccttgcccagcagcagttaaaggagatgaaaaagaaaggtctgacggaaactaccaaagtgtatcacgtgtctcagagtcccctgacagacactgccattgatgcggcccccagcgctcccttagatttggaaagcccggaagaagctgcagcaaacaagttccggatcaaatccccatttccggagcagcccgcggtcagtgccggggaaaggcctccctccaggctggatctaaatgtgactcaggccagttgtgccataagccccagccagactctgatccgcaagtcacaggcaaggcacgtgggcagcagagggggcccgtccgaaaggagccatgccaggaacgcccatttcaggaggacagcgagtttccatgaagccaggcaggcccggccgttccgagagaggagcatgtccactctgactccacggcaggcccctgcctacagctctaggacgcggacctgcgagcaggcagaggacagatttaggcctcagagtcgaggtgcccacctgtttcctgaaaaactggagcatttccaagaggcaagtggaacccgtggtccattaaaccctctccctaaatcctacactttggggcagcccttgaggaaaccagaccttggggatcaccaggcaggattagtggccggaattgagagaacagagccccacagagctcgtcggggaccgtcccccagtcacaagagtgtctcaaggaagcagtcttctcccatatcccccaaagataactaccagagggtcagttctctgagcccttctcagtgtagaaaagacaagtgtcaaagcttccccactcaccctgagtttgccttctatgacaatacgtcgtttggcctcactgaggctgagcagaggatgctggacctcccaggatattttgggtcaaatgaagaggatgaaaccacaagtacacttagcgtggagaagctggtgatctagactgagaatcagcctgagctttacacagctggggtctgctactcgcgttttgtagacttttgtgtaactatttgtaccgtaggacagaatgtgaggaggaagtaacacacagaggaggatgtgtgtgtatgcatgtgtttgaattcacaaggaagaaattatttatcttgagctttttcctttgttattcaatttctattgatttattagtaataacaatgataataaaatgtaaatgagc

SEQ ID NO: 1698 - DNA, 2415 bp, Homo sapiens; identical to SEQ ID NO: 1174
  source 1..2415: mol_type = genomic DNA; mol_type = genomic DNA

SEQ ID NO: 1699 - DNA, 1558 bp, Homo sapiens
  source 1..1558: mol_type = genomic DNA; mol_type = genomic DNA
agacagacagggggttgtacagaagaggtccggtttcttgaagcagctggaagtcctggatagttcccacctgaaagtctgtttgcaaaaggagcaactgtgttgaacaggggctcaagttccagggttttaaggtgcttggaactcccaggagcctggcaaaccttcatccagaacctcttcctcaagcaagacaaaaagctgctaagcactgctccctccgtctctgtgaagagaccagcttctaacagacggtgccgggctgaccccccatcatgccaggctggctcaccctccccacactctgccgcttccttctttgggccttcaccatcttccacaaagcccaaggagacccagcatcccacccgggcaccacgcctcccagctacaaggtgcgctggagcaaggtggagcctggggagctccgggaaacgctgatcctcatcaccaacggactgcacgcccgggggtatgggcccctgggagggcgcgccaggatgcggagggggcatcgactagacgcctccctggtcatcgcgggcgtgcgcctggaggacgagggccggtaccgctgcgagctcatcaacggcatcgaggacgagagcgtggcgctgaccttgagcttggagggtgtggtgtttccgtaccaacccagccggggccggtaccagttcaattactacgaggcgaagcaggcgtgcgaggagcaggacggacgcctggccacctactcccagctctaccaggcttggaccgagggtctggactggtgtaacgcgggctggctgctcgagggctccgtgcgctaccctgtgctcaccgcacgcgccccgtgcggcggccgaggccggcccgggatccgcagctacggaccccgcgaccggatgcgcgaccgctacgacgccttctgcttcacctccgcgctggcgggccaagtgttcttcgtgcccgggcggctgacgctgtctgaagcccacgcggcgtgccggcgacgcggcgccgtggtggccaaggttgggcacctctacgccgcctggaagttttcggggctagaccagtgcgacggcggctggctggctgacggcagtgtgcgcttcccaatcaccacgccgaggccgcgctgcggggggctcccggatcccggagtgcgcagtttcggcttccccaggccccaacaggcagcctatgggacctactgctacgccgagaattaggcgcccaccgtgtcccctccagcgcgcgcgaagaagcttgggagtcgtggcgggggtctctcgccacccctttccggagagcctcccctccctccagacccggagcggcctctccagacctgccttcccagccgggggctgcgggcctcggaccccggctggcccggcggcggggaggggaggcgggggcgcctccggcggcgagatgcagaggtgaccctcggacccgctgccgttcgcgaaccctagcagaggactcagccaccgccggggggagggtgaggcggccgggggcattaactgacctctgagtacagcaataaaataacctggggatcttt

SEQ ID NO: 1700 - DNA, 3038 bp, Homo sapiens
  source 1..3038: mol_type = genomic DNA; mol_type = genomic DNA
actgcccttacaaagctaccagcctcacggagaaggcgcagtccctgtccacagagacacagccttgccccagttactgcccacctgcaagagatccacatttctgccctccagagctcccaaactgatgggggagagagacatcatcccccagctctgggagtttccagtctgatggaggagacagagcctgcttcggtaactctcactctgcgggggaagactcagccctatccagggagctcccacactttcaatggggaggcccacccagtggccgagcctgctgctgctcctgctgttgccggggcccccgcccgtcgccggcttggaagacgctgccttcccccacctgggggagagcttgcagcccctgccccgggcctgtcccctgcgctgctcctgcccccgagtcgacactgtggactgtgatggcttggaccttcgagtgttcccggacaacatcaccagagccgctcagcacctctccctgcagaacaaccagctccaggaactcccctacaatgagctgtcccgcctcagtggcctgcgaaccctcaacctccacaacaacctcatctcctccgaaggcctgcctgacgaggccttcgagtccctcacccagctgcagcacctctgcgtggcacaacaagaacaatctcatctccaaggtgccccgaggagccctgagccgccagactcaactccgtgagctctacctccagcacaaccagctgacagacagtggcctggatgccaccaccttcagcaagctgcatagccttgaatacctggatctctcccacaaccagctgaccacagtgcccgccggcctgccccggaccctggctatcctgcacctgggccgcaaccgcatccggcaggtggaggcggctcggctgcacggggcgcgtggtctgcgctatttgttgctgcagcacaaccagctggggagctcagggctgcccgccggggctctgcggccgctgcggggcctgcacacgctgcacctctatggcaatgggctggaccgcgtgcctccagccctgccccgccgcctgcgtgccctggtgctgccccacaaccacgtggccgcgctgggtgcccgtgacctggtcgccacaccgggcctgacggagcttaacctggcctataaccgcctggccagcgcccgtgtgcaccaccgggccttccgccggttgcgtgccctgcgcagcctcgacctggcagggaatcagctaacccggctgcccatgggcctgcccactggcctgcgcaccctgcagctgcaacgcaaccagctgcggatgctcgagcccgagcctctggccggcctggaccaactgcgggagctcagcctggcgcacaaccggctccgggtcggcgacatcgggccaggcacctggcatgagctccaagccctccaggtcaggcacaggctggttagccacactgtccccagggcccctccatccccctgcctgccctgccacgtcccaaacattctagttagctggtaaagcaatcagaacaagaaaatgataagagtgggttagaaggtgatgaggaggctgggtgaggtggctcatgcctgtaatcccagcactttggggagccaaggcaggagaatcgctttaggctatgggtttgagaccagcctggcaacacagcaagaccctatctctaccaaaaaaacatagccaagcgtggtggcacatgcctgtagtcccagctattcaggaggctgaggcaggaggatcgcttgagcccagaagtttgaggctgcaatgagccgtgatcgggccactgccctctagactgggcaacagagcaagaccctgtctcttgaaaaaaaaagtgatgaaagaggtatggtgcgattcaatgactgactcatttaatcaagtggggacctgtctgtctgtgccttcctgggaagggccttagtttacctctgcagaagggaggaatttggcaatcatggggggtggggggcagaagggccaggctggtatgaagggggcaggggactctcagagaggttgggggctggctgagctgagtggcccaggcctggggctgccacgatgccatctataaccccctgcccagatgctggacctcagccacaatgagctgtcctttgtgcccccggacctgcctgaggccctagaggagctgcacctcgagggcaaccgcatcggccacgtgggccccgaggccttcctcagcacaccccgcctgcgtgccctcttcctcaggtgccccgagggtgaccggaggggtggaggtgggcaggggagggcctgggagggtcatgaccgcctctctgtgcagggccaacaggcttcacatgacgagcatcgcggctgaggccttcctggggctcccaaacctgcgtgtggtggacacggcagggaatccggagcaggtcctgatccggctgcctcccaccaccccacgtgggccacgggcagggggcccctgatcctagagaggcccagcagagcagctcagactcctgggactccgctgggccgtggactgaggagacaacgcccaccaggggcccttggtctggctctcctgggcctccagggctgggcctgctctgcctgccactggccgagacacagaggcacacagctggcatactccaggctcacagaccacgccggcctggcgggacacaccctaccccaaactcccaacacagatggaggcagcaacaataaagccaaacccttccagcactcagcacggaccaggcaccctttgggggctctgtccacggactcctccccacaaccagtccagctggggaaactgaggctctgggatgctaagtgggtcaggactgaattttgaggtcttgaggcacacactggggtcaccaaacagcaccctgtgcgacctagccacgtgtgattgcagggacgcccaaggccacccactgaaaaaacactgggtgacagatatagggaccctcacatgtatccccccccacagcaagcatgggaatgaaatgcatccttcaa

SEQ ID NO: 1701 - DNA, 1154 bp, Homo sapiens
  source 1..1154: mol_type = genomic DNA; mol_type = genomic DNA
tctgcctgctgtcgggggcgggctggccaggccgaggccggagcaggcaggcatcccccggagttgtctcttttcatgccagcgccaacaggaggctgtctggacacactgattactcactcaccagcctccctcttttgtccaccagcccagcctgactcctggagattgtgaatagctccatccagcctgagaaacaagccgggtggctgagccaggctgtgcacggagcgcctgacgggcccaacagacccatgctgcatccagagacctcccctggccgggggcatctcctggctgtgctcctggccctccttggcaccgcctgggcagaggtgtggccaccccagctgcaggagcaggctccgatggccggagccctgaacaggaaggagagtttcttgctcctctccctgcacaaccgcctgcgcagctgggtccagccccctgcggctgacatgcggaggctggactggagtgacagcctggcccagctggctcaaggcagccctctgtggaaccccaaccccgagcctggcgtccggcctgtggcgcaccctgcaagtgggctggaacatgcagctgctccgcgggcttggtgtcctttgtcgaagtggagcctatggtttgcagaggggcagcggtacagccacgcggcaggagagtgtgctcgcaacgccacctgcacccactacacgcagctcgtgtgggccacctcaagccagctgggctgtgggcggcacctgtgctctgcaggccaggcagcgatagaagcctttgtctgtgcctactcccccagaggcaactgggaggtcaacgggaagacaatcgtcccctataagaagggtgcctggtgttcgctctgcacagccagtgtctcaggctgcttcaaagcctgggaccatgcaggggggctctgtgaggtccccaggaatccttgtcgcatgagctgccagaaccatggacgtctcaacatcagcacctgccactgccactgtccccctggctacacgggcagatactgccaagtgaggtgcagcctgcagtgtgtgcacggccggttccgggaggaggagtgctcgtgcgtctgtgacatcggctacgagcccagtgtgccaccaaggtgcattttcccttccacacctgtgacctga

SEQ ID NO: 1702 - DNA, 1553 bp, Homo sapiens
  source 1..1553: mol_type = genomic DNA; mol_type = genomic DNA
atgcttgataccaacttgattcttctacctttgttccaatttattgtgcctaaagaatggaacagcaaatatagacctgtatgcattcatcttgctggaacaggagatcatcattactggaggcgacgaacactaatggcccgtcctatgattaaagaagcccgaatggcttctttattgttagaaaacccttattatggctgcaggaaacccaaggaccaagtaaggtccagcttaaaaaatgtgtccgacctttttgtgatgggaggagctcttgttttagaatctgcagctctcttgcactggctagagagggaaggttacggccctttaggaatgactggaatatccatgggaggacacatggcttccttagcggtatccaactggcctaagcccatgccattgattccatgcctgtcttggtccacagcatctggggtcttcactacgacagattctttcaaaatgggacaagagtttgtgaaacacttcactagcagtgcagacaagctaactaaccttaatctggtttccagaactttaaatttagatatatcaaaccaagttgtatcccaaaaacctgctgactgccataattctagcaaaacatctgtcagtgcgacatcagaaggactcttattgcaagatacctctaagatgaagcgcttcaatcaaacactttcaaccaacaaaagtggttatacaagtcgcaaccctcagtcataccacctacttagtaaagaacaaagcagaaacagtcttcggaaagagtctttaatatttatgaaaggagtcatggatgaatgtactcatgtagcaaatttctcagtcccagttgatccaagcctcattatagtggttcaagccaaagaagatgcctatattccacgaacaggagttcgaagtttacaagaaatttggcctggttgtgaaatccgatacttagaagggggtcatattagtgcttatctttttaaacaaggactcttcagacaagccatctatgatgcatttgaccgcttcctccataaatacgctaactagttggattattatatgtaaccagtgtggccatgatgtttcttacaaaagggagcttcatcctgtgatcatgtgaaggacaagcagacagcactaatatatctaatcgctatcaatttggtctggaattcattgttacacatcagttaactataaacttcgaatacatttgaataatttcaagataatatttgaagtaaataatgttaaagtgtttttactattgtttattggaatcccatatattcagtgtttagtctgttgttactgtttatgaaaaactaaatttttaatcatgaataatttattaaattaaataaatttattcatagaaacttttctgggttttagtaaaattgctaaatcaaaccaagattttaatatatcagcatttactttgtacccttataacatttcactcttgacttgatttgagaaacatgtttattttttgaatgttcttgtgttcaactaattttctgctgtggaaataaatacttatgatatat

SEQ ID NO: 1703 - DNA, 1513 bp, Homo sapiens
  source 1..1513: mol_type = genomic DNA; mol_type = genomic DNA
aagtcctggtgtctttaaaaggatcagcttgaggaataaggctcgtctgagagctgtgacattcatctgactctagtgaaagtccaacagccactccctttttggcctccaactgggcaccatgagggcctgcatctccctggtattggccgtgctgtgtggcctggcctgggctgacttgtactcggcacccacctcctgccagggccgctgctacgaagcctttgacaagcaccaccaatgtcactgcaatgcccgctgccaagagtttgggaactgctgcaaggattttgagagcctgtgtagtgaccacgaggtctcccacagcagtgatgccataacaaaagaggagattcagagcatctctgagaagatctacagggcagacaccaacaaagcccagaaggaagacatcgttctcaatagccaaaactgcatctccccgtcagagaccagaaaccaagtggatcgctgcccaaagccactcttcacttatgtcaatgagaagctgttctccaagcccacctatgcagccttcatcaacctcctcaacaactaccagcgggcaacaggccatggggagcacttcagtgcccaggagctggccgagcaggacgccttcctcagagagatcatgaagacagcagtcatgaaggagctctacagcttcctccatcaccagaatcgctatggctcagagcaagagtttgtcgatgacttgaagaacatgtggtttgggctctattcaagaggcaatgaagagggggactcgagtggctttgaacatgtcttctcaggtgaggtaaaaaaaggcaaggttactggcttccataactggatccgcttctacctggaggagaaggagggtctggttgactattacagtcacatctacgatgggccttgggattcttaccccgatgtgctggcaatgcagttcaactgggacggctactataaggaagtgggctctgctttcatcggcagcagccctgagtttgagtttgcactctactccctgtgcttcatcgccaggccaggcaaagtgtgccagttaagcctgggaggatatcccttagctgtccggacatatacctgggacaagtccacctatgggaatggcaagaagtacatcgccacagcctacatagtgtcttccacctaatagaacttcgagccagaaaggggcatgagggctcttgcgagactgaagtgctatcttctctggactagagagaagagggagaggactggaagggatcaccaaatctcaaagcaatgagaagcattcctaaatcccaaagtgcccacatgggaaagagataaaatgtacaaattagaaaaatgtggataaacagtcaaacctttatcctctagaattttggcaatgttgactaagaaacagagtccaagcagagaaggtaggaaccctccatagctctctgccctgatgtgtgggggaactaggaagaagtcctttgacctcaccaggcctcatgcttccctttaatgt

SEQ ID NO: 1704 - DNA, 2077 bp, Homo sapiens
  source 1..2077: mol_type = genomic DNA; mol_type = genomic DNA
ggccagctggctatcagacaatgacatgctttgacaggcccctgagctctgtgagtaaattcttgaacagctgagagtgctaccattttgtcatagccctaagggtgcagatgatgctgaaagcgtgttggccaaatctgaatgatgaaagccaattacaaactagaaaatgaaaacagaccccagatgcaaggagatgagacagttaaatttacttcctcttttctaatctgagaggtttcatgttgaagaaaatcagtgttggggttgcaggagacctaaacacagtcaccatgaagctgggctgtgtcctcatggcctgggccctctacctttcccttggtgtgctctgggtggcccagatgctactggctgccagttttgagacgctgcagtgtgagggacctgtctgcactgaggagagcagctgccacacggaggatgacttgactgatgcaagggaagctggcttccaggtcaaggcctacactttcagtgaacccttccacctgattgtgtcctatgaactgtttccagcgccaattctcagagctgtaccctcagctgaaccccaagcaggaagccccatgaccctgagttgtcagacaaagttgcccctgcagaggtcagctgcccgcctcctcttctccttctacaaggatggaaggatagtgcaaagcagggggctctcctcagaattccagatccccacagcttcagaagatcactccgggtcatactggtgtgaggcagccactgaggacaaccaagtttggaaacagagcccccagctagagatcagagtgcagggtgcttccagctctgctgcacctcccacattgaatccagctcctcagaaatcagctgctccaggaactgctcctgaggaggcccctgggcctctgcctccgccgccaaccccatcttctgaggatccaggcttttcttctcctctggggatgccagatcctcatctgtatcaccagatgggccttcttctcaaacacatgcaggatgtgagagtcctcctcggtcacctgctcatggagttgagggaattatctggccaccggaagcctgggaccacaaaggctactgctgaatagaagtaaacagttcatccatgatctcacttaaccaccccaataaatctgattctttattttctcttcctgtcctgcacatatgcataagtacttttacaagttgtcccagtgttttgttagaataatgtagttaggtgagtgtaaataaatttatataaagtgagaattagagtttagctataattgtgtattctctcttaacacaacagaattctgctgtctagatcaggaatttctatctgttatatcgaccagaatgttgtgatttaaagagaactaatggaagtggattgaatacagcagtctcaactgggggcaattttgccccccagaggacattgggcaatgtttggagacattttggtcattatacttggggggttgggggatggtgggatgtgtgtgctactggcatccagtaaatagaagccaggggtgccgctaaacatcctataatgcacagggcagtaccccacaacgaaaaataatctggcccaaaatgtcagttgtactgagtttgagaaaccccagcctaatgaaaccctaggtgttgggctctggaatgggactttgtcccttctaattattatctctttccagcctcattcagctattcttactgacataccagtctttagctggtgctatggtctgttctttagttctagtttgtatcccctcaaaagccattatgttgaaatcctaatccccaaggtgatggcattaagaagtgggcctttgggaagtgattagatcaggagtgcagagccctcatgattaggattagtgcccttatttaaaaaggccccagagagctaactcacccttccaccatatgaggacgtggcaagaagatgacatgtatgagaaccaaaaaacagctgtcgccaaacaccgactctgtcgttgccttgatcttgaacttccagcctccagaactatgagaaataaaattctgttgtttgtaagct

SEQ ID NO: 1705 - DNA, 5918 bp, Homo sapiens
  source 1..5918: mol_type = genomic DNA; mol_type = genomic DNA
ctccgcaggcgccttctgcggcaggcggacagatcctcggcgcggcagggccggggcaagctggacgcagcatgatgcgcgcagtgtgggaggcgctggcggcgctggcggcggtggcgtgcctggtgggcgcggtgcgcggcgggcccgggctcagcatgttcgcgggccaggcggcgcagcccgatccctgctcggacgagaacggccacccgcgccgctgcatcccggactttgtcaatgcggccttcggcaaggacgtgcgcgtgtccagcacctgcggccggcccccggcgcgctactgcgtggtgagcgagcgcggcgaggagcggctgcgctcgtgccacctctgcaacgcgtccgaccccaagaaggcgcacccgcccgccttcctcaccgacctcaacaacccgcacaacctgacgtgctggcagtccgagaactacctgcagttcccgcacaacgtcacgctcacactgtccctcggcaagaagttcgaagtgacctacgtgagcctgcagttctgctcgccgcggcccgagtccatggccatctacaagtccatggactacgggcgcacgtgggtgcccttccagttctactccacgcagtgccgcaagatgtacaaccggccgcaccgcgcgcccatcaccaagcagaacgagcaggaggccgtgtgcaccgactcgcacaccgacatgcgcccgctctcgggcggcctcatcgccttcagcacgctggacgggcggccctcggcgcacgacttcgacaactcgcccgtgctgcaggactgggtcacggccacagacatccgcgtggccttcagccgcctgcacacgttcggcgacgagaacgaggacgactcggagctggcgcgcgactcgtacttctacgcggtgtccgacctgcaggtgggcggccggtgcaagtgcaacggccacgcggcccgctgcgtgcgcgaccgcgacgacagcctggtgtgcgactgcaggcacaacacggccggcccggagtgcgaccgctgcaagcccttccactacgaccggccctggcagcgcgccacagcccgcgaagccaacgagtgcgtggcctgtaactgcaacctgcatgcccggcgctgccgcttcaacatggagctctacaagctttcggggcgcaagagcggaggtgtctgcctcaactgtcgccacaacaccgccggccgccactgccattactgcaaggagggctactaccgcgacatgggcaagcccatcacccaccggaaggcctgcaaagcctgtgattgccaccctgtgggtgctgctggcaaaacctgcaaccaaaccaccggccagtgtccctgcaaggacggcgtgacgggtatcacctgcaaccgctgcgccaaaggctaccagcagagccgctctcccatcgccccctgcataaagatccctgtagcgccgccgacgactgcagccagcagcgtggaggagcctgaagactgcgattcctactgcaaggcctccaaggggaagctgaagattaacatgaaaaagtactgcaagaaggactatgccgtccagatccacatcctgaaggcggacaaggcgggggactggtggaagttcacggtgaacatcatctccgtgtataagcagggcacgagccgcatccgccgcggtgaccagagcctgtggatccgctcgcgggacatcgcctgcaagtgtcccaaaatcaagcccctcaagaagtacctgctgctgggcaacgcggaggactctccggaccagagcggcatcgtggccgataaaagcagcctggtgatccagtggcgggacacgtgggcgcggcggctgcgcaagttccagcagcgtgagaagaagggcaagtgcaagaaggcctagcgccgaggcagcgggcgggcgggcgggcgggcgccagggcggggccgagcgagagcgggcgccttggcccggccgccgcggacttggcccgcgagggctttcccaggtggggggagggagggggcggggccgcacggcgcggggggcgggaccctcggcggcccctccccctacccccaccctgcgcgctctgggcgggagccgcgtgcacgcggggcggggtgcgccgccggccgggccctggagaaatgacgagacgtagctacctcacggggctccttccagagcagagacgcgcttccctgggcctgggcgcggccgccgtggaggggctgggggcagcctgccctggggcccgggggcgggcgcagaatcgcacaactggggccccaggcgcggggcgtggatggcgcggagacgtggacgggaggagaactgtgaattctcaagcccgtagtgtgggcggggcgcggagcacccaccaaaccaccacccgacacgcagccgacgggatccccccctttctccccggccccttctagcagttccccgcgggccacctggctgtcacagcctggactcctccatctgaaggggcctggcagcatttggggagtggacagctcctgtccagccagcatgccccaggcggcctctgtctccactgctacctgctgagtgggtcctactgggtgggggcttggggtcggtgagtggttcacctgtggagagaggagaggaagcccctgctgctgcctgtctctgcccctgcccctgcccctgcccagcgtggggctggcccatccggaaggcagtgggcccagggacacccctgagaagcccaagccgggtggtcaccgcctcatgctggagctgcctgttggaggaggcatcgcaaacgcaaaacctcccagagagtttccttttggaaacttggaaccagccctttttatgacgttttccagggggagggggaggggcactggctgggtttacggcagtgacactatttatgtaaatgacatcagctcccgcaaggcccctcagcaatgtcaacagctggaaagggcctgaacgggcttggagtctgcaggctgcgaaggcacttgggcctggcttggggccgggggcttgtttgagctgggatggggtttgctggctcagtgaagtaccagagtgcctgagccatgggtgggcaggggcacaggaatgaccaggttcctgggggccaaggaggccatgctggcttctccaagggaaggcacagaggctgccggcctgccccctacagctgtcttgggtctggcctgggccacaccttgaccgtgcctttccagacggtctttgtggagtctgcccgtgccctccactgtgccccagccctccttccaaaatctcctagagacacggtcctcaagcaggcagccccttttgttctgacctcctcacacagggtccattcctgtgccctggggcctcctggctccctgccttcctgggctctctgcactgcccgggcctctggcccacatcctcacacccggcgcactgaattaagaggcctggctcccctcacagtcaggaaattggtttcactttcccggccagagtttggctgctcaaaagggtcataccaagtatgaagctcggcccccggtggtctggcttccctccgccttccccacatttacccgcatcacggctgccatttattgagcacctgctgtgtgccaggcactttacccacatgctcccagtgtgtactcatgacaaccctgtgggacagggactcattatcaccagcaaggagactggagtacacgtgcccaaggtcatgctgcaaattggtggcaggactggggctcaaactccagagcccgactttctgaccaggggccacgctggccctcactgcactccagctctgcagcctacccgcccaatccctgtgcaggctgggagggtgctcttgggggagtggccaccgagcccctggccctggttactgcctcttgaggacactggcatctgggctggagaacaggagcccggggtggggtagggcatggggacaatcacatcttcagaggaggcagcaaagtggtgcgggatgcagggacggacttgccagatggcagctccaggttccaggaaggcaggccttggatgctccgaagaggtggtagaaaggtgtttttagaaaggtgttttggctgcctcagggtggttggagagactccaggagagactggcagaggtgcctcaggggcagggagcagacagacctgccctgggaaggggcatttggcttccctgaatccagcccaaggctagaagacagggcccctctccaagctgtcagcgcccctcggatgcccagtgtggtgtgctgggcgccatcagcatcacaaggcactacgctgctggggcggttgtcctatttctgtctatgccagtgtggtttcttcaccctgcccagaagggctgtggcagccccacgatatcccaccctgggtctgggtctcacgggtgtcctgtgaggggcttgcatttgtggtggtctctgaggccacctcagcaacggagctggcgacacgccaagcaacaaggcatcttgcggaaaattcagccagtgtcctgcccctcccttcggctcagcaccccgcagggcacaggctgtccgcccggtggtctggcccttggggaatgcgtcagggtgaccagatccaccatgctagcagccaggtcactgttgggattgcacggtcgtcacgagctgcctttcctatccacacacccagccaggacccagcccaccactcccgactgcagccccggcctctgcggtgagcaccatccttgggaaagcacccctcctccactccggtgccccactccaaggagcagagggaaatgggaattgaggtgtcccggtttgtacagttaggaagggatgtaaaacggaactagattttgattttgaagagtgtattaaccagaattgtgctatgtaggtgtttgtttgaagaaaaacataccagattagtctttgtttttgaaacagcttccccagttgtcctttttcttaccagctgggtggtctggtgcccctgacagctgagtgcctgctttacggacacgcagtaatgccgaagatttgcgggggaggacatagggctgtccccgggattcacctgctggctgtggtctctgcccactgcttctgtccttggaaagcagggcaggaggcagcatccccaggggcctctatgtgggagggagggacacctggggtcacaacccagggagggagggtcacagcccagggaggctgggagctgctccaaggccctggaactctgcctcagtcgcggcatgctggagaggggtacggacttactttcttggagttgtcccaggttggaatgagactgaactcaagaagagaccctaagggactggggaatggttcctgccttcaggaaagtgaaagacgcttaggctgtcaacacttaaaggaagtccccttgaagcccagagtggacagactagacccattgatggggccactggccatggtccgtggacaagacattcctgtgggccatggcacaccgggggggatcaaaatgtgtacttgtggggtctcgccccttgccaaaagccaaaccagtcccactcctgtcattggacgtttcttcccattccctcctcccaaatgcacttcccctcctccctctgccccctcctgtgttttggatttctgttcactcagaattgtaaatgtttagttgtgaccatgacgtattgtttgggtcaatgtccctttccaatgcatactaatatattatggttattatatatgaatatatttaatgacatggaaaaagttgtggattttctttctttccttttttttgggggggggtggggggttggttagagttgtaatggacccagatggaacttgtaatgtgggccccacatgatagaactaaattcagatatcattaaataaactcttgtacacta

SEQ ID NO: 1706 - DNA, 1156 bp, Homo sapiens
  source 1..1156: mol_type = genomic DNA; mol_type = genomic DNA
atcatttgcatgtctagctggagaataaaaataatatatcatttgcatgtcttagtaatgaagtcatgggtgtcgtggcatgagatcagctggagggagaggagagattaaagtgaggagagagctacaaccaagtaagcaagtgtcagggctcaccaaccatgcaaggacagggcaggagaagaggaacctgcaaaggctggttttggagaccccgagtcagaacatcttcttctcccctgtgagtgtctccacttccctggccatgctctcccttggggcccactcagtcaccaagacccagattctccagggcctgggcttcaacctcacacacacaccagagtctgccatccaccagggcttccagcacctggttcactcactgactgttcccagcaaagacctgaccttgaagatgggaagtgccctcttcgtcaagaaggagctgcagctgcaggcaaatttcttgggcaatgtcaagaggctgtatgaagcagaagtcttttctacagatttctccaacccctccattgcccaggcgaggatcaacagccatgtgaaaaagaagacccaagggaaggttgtagacataatccaaggccttgaccttctgacggccatggttctggtgaaccacattttctttaaagccaagtgggagaagccctttcaccctgaatatacaagaaagaacttcccattcctggtgggcgagcaggtcactgtgcatgtccccatgatgcaccagaaagagcagttcgcttttggggtggatacagagctgaactgctttgtgctgcagatggattacaagggagatgccgtggccttctttgtcctccctagcaagggcaagatgaggcaactggaacaggccttgtcagccagaacactgagaaagtggagccactcactccagaaaaggtggatagaggtgttcatccccagattttccatttctgcctcctacaatctggaaaccatcctcccgaagatgggcatccaaaatgtctttgacaaaaatgctgatttttctggaattgcaaagagagactccctgcaggtttctaaagtgagttgaatgaaaatatttgcaaaaaagtccaagctggaagcacctgcagaattaatcacatgctcttatttcgttgat

SEQ ID NO: 1707 - DNA, 1065 bp, Homo sapiens
  source 1..1065: mol_type = genomic DNA; mol_type = genomic DNA
atggccccggcccgccgccccgccggagcccgcctgctgctcgtctacgcgggcctgctggccgccgccgccgcgggcctggggtccccggagcctggggcgccctcgaggagccgcgcccgcagggagccgccgcccgggaacgagctgccccggggccccggggagagccgcgcggggccggccgctcgtccgccggagcccaccgctgagcgtgcacacagcgtcgacccccgggacgcctggatgctcttcgtcaggcagagtgacaagggtgtcaatggcaagaagaggagcaggggcaaggccaagaagctgaagttcggcttgccagggccccctgggcctcccggtccccagggccccccaggccccatcatcccacccgaggcgctgctgaaggagttccagctgctgctgaaaggtgcggtgcggcagcgggagcgcgcggagcccgaaccctgtacgtgtggccccgccgggccggtcgctgcgagcctcgccccggtctcggccaccgccggggaggacgacgacgacgtggtgggggacgtgctggcactgctggccgcgcccctggccccggggccgcgggcgccgcgcgtggaggccgctttcctctgccgcctgcgccgggacgcgttggtggagcggcgcgcgctgcacgagcttggcgtctactacctgcccgacgccgagggtgccttccgccgcggcccgggcctgaacttgaccagcggccagtacagggcgcccgtggctggcttctacgctctcgccgccacgctgcacgtggcgctcggggagccgccgaggagggggccgccgcgcccccgggaccacctgcgcctgctcatctgcatccagtcccggtgccagcgcaacgcctccctggaggccatcatgggcctggagagcagcagtgagctcttcaccatctctgtgaatggcgtcctgtacctgcagatggggcagtggacctccgtgttcttggacaacgccagcggctgctccctcacagtgcgcagtggctcccacttcagtgctgtcctcctgggcgtgtga

SEQ ID NO: 1708 - DNA, 3047 bp, Homo sapiens
  source 1..3047: mol_type = genomic DNA; mol_type = genomic DNA
gagccccgggaggaggtgctcctgtgcagccccactgagtcagctcatctatcgcctgccctccacctggccagtccctgcgggcatctaactgctaagcctccgctcagccaacacccagttggtcagtctggtcacagtccagcaaaaagagggactgccactctaacccaccagtgacaccactcttcccggctggatggtcaattagctctggcatgagagaatgtcactgccgagatgctgcccccacccccttaggcccgagggatcaggagctatgggaccagaggccctgtcatctttactgctgctgctcttggtggcaagtggagatgctgacatgaagggacattttgatcctgccaagtgccgctatgccctgggcatgcaggaccggaccatcccagacagtgacatctctgcttccagctcctggtcagattccactgccgcccgccacagcaggttggagagcagtgacggggatggggcctggtgccccgcagggtcggtgtttcccaaggaggaggagtacttgcaggtggatctacaacgactgcacctggtggctctggtgggcacccagggacggcatgccgggggcctgggcaaggagttctcccggagctaccggctgcgttactcccgggatggtcgccgctggatgggctggaaggaccgctggggtcaggaggtgatctcaggcaatgaggaccctgagggagtggtgctgaaggaccttgggccccccatggttgcccgactggttcgcttctacccccgggctgaccgggtcatgagcgtctgtctgcgggtagagctctatggctgcctctggagggatggactcctgtcttacaccgcccctgtggggcagacaatgtatttatctgaggccgtgtacctcaacgactccacctatgacggacataccgtgggcggactgcagtatgggggtctgggccagctggcagatggtgtggtggggctggatgactttaggaagagtcaggagctgcgggtctggccaggctatgactatgtgggatggagcaaccacagcttctccagtggctatgtggagatggagtttgagtttgaccggctgagggccttccaggctatgcaggtccactgtaacaacatgcacacgctgggagcccgtctgcctggcggggtggaatgtcgcttccggcgtggccctgccatggcctgggagggggagcccatgcgccacaacctagggggcaacctgggggaccccagagcccgggctgtctcagtgccccttggcggccgtgtggctcgctttctgcagtgccgcttcctctttgcggggccctggttactcttcagcgaaatctccttcatctctgatgtggtgaacaattcctctccggcactgggaggcaccttcccgccagccccctggtggccgcctggcccacctcccaccaacttcagcagcttggagctggagcccagaggccagcagcccgtggccaaggccgaggggagcccgaccgccatcctcatcggctgcctggtggccatcatcctgctcctgctgctcatcattgccctcatgctctggcggctgcactggcgcaggctcctcagcaaggctgaacggagggtgttggaagaggagctgacggttcacctctctgtccctggggacactatcctcatcaacaaccgcccaggtcctagagagccacccccgtaccaggagccccggcctcgtgggaatccgccccactccgctccctgtgtccccaatggctctgcctacagtggggactatatggagcctgagaagccaggcgccccgcttctgcccccacctccccagaacagcgtcccccattatgccgaggctgacattgttaccctgcagggcgtcaccgggggcaacacctatgctgtgcctgcactgcccccaggggcagtcggggatgggccccccagagtggatttccctcgatctcgactccgcttcaaggagaagcttggcgagggccagtttggggaggtgcacctgtgtgaggtcgacagccctcaagatctggttagtcttgatttcccccttaatgtgcgtaagggacaccctttgctggtagctgtcaagatcttacggccagatgccaccaagaatgccaggaatgatttcctgaaagaggtgaagatcatgtcgaggctcaaggacccaaacatcattcggctgctgggcgtgtgtgtgcaggacgaccccctctgcatgattactgactacatggagaacggcgacctcaaccagttcctcagtgcccaccagctggaggacaaggcagccgagggggcccctggggacgggcaggctgcgcaggggcccaccatcagctacccaatgctgctgcatgtggcagcccagatcgcctccggcatgcgctatctggccacactcaactttgtacatcgggacctggccacgcggaactgcctagttggggaaaatttcaccatcaaaatcgcagactttggcatgagccggaacctctatgctggggactattaccgtgtgcagggccgggcagtgctgcccatccgctggatggcctgggagtgcatcctcatggggaagttcacgactgcgagtgacgtgtgggcctttggtgtgaccctgtgggaggtgctgatgctctgtagggcccagccctttgggcagctcaccgacgagcaggtcatcgagaacgcgggggagttcttccgggaccagggccggcaggtgtacctgtcccggccgcctgcctgcccgcagggcctatatgagctgatgcttcggtgctggagccgggagtctgagcagcgaccacccttttcccagctgcatcggttcctggcagaggatgcactcaacacggtgtgaatcacacatccagctgcccctccctcagggagcgatccaggggaagccagtgacactaaaacaagaggacacaatggcacctctgcccttcccctcccgacagcccatcacctctaatagaggcagtgagactgca

SEQ ID NO: 1709 - DNA, 3047 bp, Homo sapiens
  source 1..3047: mol_type = genomic DNA; mol_type = genomic DNA
gagccccgggaggaggtgctcctgtgcagccccactgagtcagctcatctatcgcctgccctccacctggccagtccctgcgggcatctaactgctaagcctccgctcagccaacacccagttggtcagtctggtcacagtccagcaaaaagagggactgccactctaacccaccagtgacaccactcttcccggctggatggtcaattagctctggcatgagagaatgtcactgccgagatgctgcccccacccccttaggcccgagggatcaggagctatgggaccagaggccctgtcatctttactgctgctgctcttggtggcaagtggagatgctgacatgaagggacattttgatcctgccaagtgccgctatgccctgggcatgcaggaccggaccatcccagacagtgacatctctgcttccagctcctggtcagattccactgccgcccgccacagcaggttggagagcagtgacggggatggggcctggtgccccgcagggtcggtgtttcccaaggaggaggagtacttgcaggtggatctacaacgactccacctggtggctctggtgggcacccagggacggcatgccgggggcctgggcaaggagttctcccggagctaccggctgcgttactcccgggatggtcgccgctggatgggctggaaggaccgctggggtcaggaggtgatctcaggcaatgaggaccctgagggagtggtgctgaaggaccttgggccccccatggttgcccgactggttcgcttctacccccgggctgaccgggtcatgagtgtctgtctgcgggtagagctctatggctgcctctggagggatggactcctgtcttacaccgcccctgtggggcagacaatgtatttatctgaggccgtgtacctcaacgactccacctatgacggacataccgtgggcggactgcagtatgggggtctgggccagctggcagatggtgtggtggggctggatgactttaggaagagtcaggagctgcgggtctggccaggctatgactatgtgggatggagcaaccacagcttctccagtggctatgtggagatggagtttgagtttgaccggctgagggccttccaggctatgcaggtccactgtaacaacatgcacacgctgggagcccgtctgcctggcggggtggaatgtcgcttccggcgtggccctgccatggcctgggagggggagcccatgcgccacaacctagggggcaacctgggggaccccagagcccgggctgtctcagtgccccttggcggccgtgtggctcgctttctgcagtgccgcttcctctttgcggggccctggttactcttcagcgaaatctccttcatctctgatgtggtgaacaattcctctccggcactgggaggcaccttcccgccagccccctggtggccgcctggcccacctcccaccaacttcagcagcttggagctggagcccagaggccagcagcccgtggccaaggccgaggggagcccgaccgccatcctcatcggctgcctggtggccatcatcctgctcctgctgctcatcattgccctcatgctctggcggctgcactggcgcaggctcctcagcaaggctgaacggagggtgttggaagaggagctgacggttcacctctctgtccctggggacactatcctcatcaacaaccgcccaggtcctagagagccacccccgtaccaggagccccggcctcgtgggaatccgccccactccgctccctgtgtccccaatggctctgcctacagtggggactatatggagcctgagaagccaggcgccccgcttctgcccccacctccccagaacagcgtcccccattatgccgaggctgacattgttaccctgcagggcgtcaccgggggcaacacctatgctgtgcctgcactgcccccaggggcagtcggggatgggccccccagagtggatttccctcgatctcgactccgcttcaaggagaagcttggcgagggccagtttggggaggtgcacctgtgtgaggtcgacagccctcaagatctggtcagtcttgatttcccccttaatgtgcgtaagggacaccctttgctggtagctgtcaagatcttacggccagatgccaccaagaatgccaggaatgatttcctgaaagaggtgaagatcatgtcgaggctcaaggaccccaacatcattcggctgctgggcgtgtgtgtgcaggacgaccccctctgcatgattactgactacatggagaacggcgacctcaaccagttcctcagtgcccaccagctggaggacaaggcagccgagggggcccctggggacgggcaggctgcgcaggggcccaccatcagctacccaatgctgctgcatgtggcagcccagatcgcctccggcatgcgctatctggccacactcaactttgtacatcgggacctggccacgcggaactgcctagttggggaaaatttcaccatcaaaatcgcagactttggcatgagccggaacctctatgctggggactattaccgtgtgcagggccgggcagtgctgcccatccgctggatggcctgggagtgcatcctcatggggaagttcacgactgcgagtgacgtgtgggcctttggtgtgaccctgtgggaggtgctgatgctctgtagggcccagccctttgggcagctcaccgacgagcaggtcatcgagaacgcgggggagttcttccgggaccagggccggcaggtgtacctgtcccggccgcctgcctgcccgcagggcctatatgagctgatgcttcggtgctggagccgggagtctgagcagcgaccacccttttcccagctgcatcggttcctggcagaggatgcactcaacacggtgtgaatcacacatccagctgcccctccctcagggagtgatccaggggaagccagtgacactaaaacaagaggacacaatggcacctctgcccttcccctcccgacagcccatcacctctaatagaggcagtgagactgca

SEQ ID NO: 1710 - DNA, 4199 bp, Homo sapiens
  source 1..4199: mol_type = genomic DNA; mol_type = genomic DNA
atgttgctgctgctgctactggcgccactcttcctccgccccccgggcgcgggcggggcgcagacccccaacgccacctcagaaggttgccagatcatacacccgccctgggaagggggcatcaggtaccggggcctgactcgggaccaggtgaaggctatcaacttcctgccagtggactatgagattgagtatgtgtgccggggggagcgcgaggtggtggggcccaaggtccgcaagtgcctggccaacggctcctggacagatatggacacacccagccgctgtgtccgaatctgctccaagtcttatttgaccctggaaaatgggaaggttttcctgacgggtggggacctcccagctctggacggagcccgggtggatttccggtgtgaccccgacttccatctggtgggcagctcccggagcatctgtagtcagggccagtggagcacccccaagccccactgccaggtgaatcgaacgccacactcagaacggcgcgcagtgtacatcggggcactgtttcccatgagcgggggctggccagggggccaggcctgccagcccgcggtggagatggcgctggaggacgtgaatagccgcagggacatcctgccggactatgagctcaagctcatccaccacgacagcaagtgtgatccaggccaagccaccaagtacctatatgagctgctctacaacgaccctatcaagatcatccttatgcctggctgcagctctgtctccacgctggtggctgaggctgctaggatgtggaacctcattgtgctttcctatggctccagctcaccagccctgtcaaaccggcagcgtttccccactttcttccgaacgcacccatcagccacactccacaaccctacccgcgtgaaactctttgaaaagtggggctggaagaagattgctaccatccagcagaccactgaggtcttcacttcgactctggacgacctggaggaacgagtgaaggaggctggaattgagattactttccgccagagtttcttctcagatccagctgtgcccgtcaaaaacctgaagcgccaggatgcccgaatcatcgtgggacttttctatgagactgaagcccggaaagttttttgtgaggtgtacaaggagcgtctctttgggaagaagtacgtctggttcctcattgggtggtatgctgacaattggttcaagatctacgacccttctatcaactgcacagtggatgagatgactgaggcggtggagggccacatcacaactgagattgtcatgctgaatcctgccaatacccgcagcatttccaacatgacatcccaggaatttgtggagaaactaaccaagcgactgaaaagacaccctgaggagacaggaggcttccaggaggcaccgctggcctatgatgccatctgggccttggcactggccctgaacaagacatctggaggaggcggccgttctggtgtgcgcctggaggacttcaactacaacaaccagaccattaccgaccaaatctaccgggcaatgaactcttcgtcctttgagggtgtctctggccatgtggtgtttgatgccagcggctctcggatggcatggacgcttatcgagcagcttcagggtggcagctacaagaagattggctactatgacagcaccaaggatgatctttcctggtccaaaacagataaatggattggagggtcccccccagctgaccagaccctggtcatcaagacattccgcttcctgtcacagaaactctttatctccgtctcagttctctccagcctgggcattgtcctagctgttgtctgtctgtcctttaacatctacaactcacatgtccgttatatccagaactcacagcccaacctgaacaacctgactgctgtgggctgctcactggctttagctgctgtcttccccctggggctcgatggttaccacattgggaggaaccagttccctttcgtctgccaggcccgcctctggctcctgggcctgggctttagtctgggctacggttccatgttcaccaagatttggtgggtccacacggtcttcacaaagaaggaagaaaagaaggagtggaggaagactctggaaccctggaagctgtatgccacagtgggcctgctggtgggcatggatgtcctcactctcgccatctggcagatcgtggaccctctgcaccggaccattgagacatttgccaaggaggaacctaaggaagatattgacgtctctattctgccccagctggagcattgcagctccaggaagatgaatacatggcttggcattttctatggttacaaggggctgctgctgctgctgggaatcttccttgcttatgagaccaagagtgtgtccactgagaagatcaatgatcaccgggctgtgggcatggctatctacaatgtggcagtcctgtgcctcatcactgctcctgtcaccatgattctgtccagccagcaggatgcagcctttgcctttgcctctcttgccatagttttctcctcctatatcactcttgttgtgctctttgtgcccaagatgcgcaggctgatcacccgaggggaatggcagtcggaggcgcaggacaccatgaagacagggtcatcgaccaacaacaacgaggaggagaagtcccggctgttggagaaggagaaccgtgaactggaaaagatcattgctgagaaagaggagcgtgtctctgaactgcgccatcaactccagtctcggcagcagctccgctcccggcgccacccaccgacacccccagaaccctctgggggcctgcccaggggaccccctgagccccccgaccggcttagctgtgatgggagtcgagtgcatttgctttataagtgagggtagggtgagggaggacaggccagtagggggagggaaagggagaggggaagggcaggggactcaggaagcagggggtccccatccccagctgggaagaacatgctatccaatctcatctcttgtaaatacatgtccccctgtgagttctgggctgatttgggtctctcatacctctgggaaacagacctttttctctcttactgcttcatgtaattttgtatcacctcttcacaatttagttcgtacctggcttgaagctgctcactgctcacacgctgcctcctcagcagcctcactgcatctttctcttcccatgcaacaccctcttctagttaccacggcaacccctgcagctcctctgcctttgtgctctgttcctgtccagcaggggtctcccaacaagtgctctttccaccccaaaggggcctctccttttctccactgtcataatctctttccatcttacttgcccttccatactttctcacatgtggctccccctgaattttgcttcctttgggagctcattcttttcgccaaggctcacatgctccttgcctctgctctgtgcactcacgctcagcacacatgcatcctcccctctcctgcgtgtgcccactgaacatgctcatgtgtacacacgcttttcccgtatgctttcttcatgttcagtcacatgtgctctcgggtgccctgcattcacagctacgtgtgcccctctcatggtcatgggtctgcccttgagcgtgtttgggtaggcatgtgcaatttgtctagcatgctgagtcatgtctttcctatttgcacacgtccatgtttatccatgtactttccctgtgtaccctccatgtaccttgtgtactttcttcccttaaatcatggtattcttctgacagagccatatgtaccctaccctgcacattgttatgcacttttccccaattcatgtttggtggggccatccacaccctctccttgtcacagaatctccatttctgctcagattccccccatctccattgcattcatgtactaccctcagtctacactcacaatcatcttctcccaagactgctcccttttgttttgtgtttttttgaggggaattaaggaaaaataagtgggggcaggtttggagagctgcttccagtggatagttgatgagaatcctgaccaaaggaaggcacccttgactgttgggatagacagatggacctatggggtgggaggtggtgtccctttcacactgtggtgtctcttggggaaggatctccccgaatctcaataaaccagtgaacagtgtgactcgg

SEQ ID NO: 1711 - DNA, 2942 bp, Homo sapiens; identical to SEQ ID NO: 810
  source 1..2942: mol_type = genomic DNA; mol_type = genomic DNA

SEQ ID NO: 1712 - DNA, 886 bp, Homo sapiens
  source 1..886: mol_type = genomic DNA; mol_type = genomic DNA
gtcagggacactgagaggtgggtgtgtgcatgccacatttagcctcgctgtttacagccagttcaagatgctgcccccacccccttaggcccgagggatcaggagctatgggaccagaggccctgtcatctttactgctgctgctcttggtggcaagtggagatgctgacatgaagggacattttgatcctgccaagtgccgctatgccctgggcatgcaggaccggaccatcccagacagtgacatctctgcttccagctcctggtcagattccactgccgcccgccacagcaggttggagagcagtgacggggatggggcctggtgccccgcagggtcggtgtttcccaaggaggaggagtacttgcaggtggatctacaacgactgcacctggtggctctggtgggcacccagggacggcatgccgggggcctgggcaaggagttctcccggagctaccggctgcgttactcccgggatggtcgccgctggatgggctggaaggaccgctggggtcaggaggtgatctcaggcaatgaggaccctgagggagtggtgctgaaggaccttgggccccccatggttgcccgactggttcgcttctacccccgggctgaccgggtcatgagcgtctgtctgcgggtagagctctatggctgcctctggaggggtgagtggctcagcttcctgggaatctgtttcctgagcaggggactggagggtggggagtgtggagaatgggcatccaggatcccttctcctgctgggaagctgtcactctgaggagggggctagccagcattgtctcctccatgccaatgagccagtggagagatacaagaagggacctgaaacctgcccaggcctgatgcagggatggggga

SEQ ID NO: 1713 - DNA, 913 bp, Homo sapiens
  source 1..913: mol_type = genomic DNA; mol_type = genomic DNA
aaggctggcaaaaaggagaccagacaggaggcgtctgtagagatatcatgaacttcaacttagctttgttttccagagactggagctaaactgggctttcaacatcatcatgaagtttatcctcctctgggctctcttgaatctgactgttgctttggcctttaatccagattacacagtcagctccactcccccttacttggtctatttgaaatctgactacttgccctgcgctggagtcctgatccacccgctttgggtgatcacagctgcacactgcaatttaccaaagcttcgggtgatattgggggttacaatcccagcagactctaatgaaaagcatctgcaagtgattggctatgagaagatgattcatcatccacacttctcagtcacttctattgatcatgacatcatgctaatcaagctgaaaacagaggctgaactcaatgactatgtgaaattagccaacctgccctaccaaactatctctgaaaataccatgtgctctgtctctacctggagctacaatgtgtgtgatatctacaaagagcccgattcactgcaaactgtgaacatctctgtaatctccaagcctcagtgtcgcgatgcctataaaacctacaacatcacggaaaatatgctgtgtgtgggcattgtgccaggaaggaggcagccctgcaaggaagtttctgctgccccggcaatctgcaatgggatgcttcaaggaatcctgtcttttgcggatggatgtgttttgagagccgatgttggcatctatgccaaaattttttactatataccctggattgaaaatgtaatccaaaataactgagctgtggcagttgtggaccatatgacacagcttgtccccatcgttcacctttagaattaaatataaattaactcctca

SEQ ID NO: 1714 - DNA, 2054 bp, Homo sapiens
  source 1..2054: mol_type = genomic DNA; mol_type = genomic DNA
agaaggtagcagacagacagacggatctaacctctcttggatcctccagccatgaggctgctctgggggctgatctgggcatccagcttcttcaccttatctctgcagaagcccaggttgctcttgttctctccttctgtggttcatctgggggtccccctatcggtgggggtgcagctccaggatgtgccccgaggacaggtagtgaaaggatcagtgttcctgagaaacccatctcgtaataatgtcccctgctccccaaaggtggacttcacccttagctcagaaagagacttcgcactcctcagtctccaggtgcccttgaaagatgcgaagagctgtggcctccatcaactcctcagaggccctgaggtccagctggtggcccattcgccatggctaaaggactctctgtccagaacgacaaacatccagggtatcaacctgctcttctcctctcgccgggggcacctctttttgcagacggaccagcctacgccctgctgcacctcctgcttcacgagggcaaagcagagatggcagaccaggctgcggcctggctcacccgtcagggcagcttccaagggggattccgcagtacccaagacacggtgattgccctggatgccctgtctgcctactggattgcctcccacaccactgaggagaggggtctcaatgtgactctcagctccacaggccggaatgggttcaagtcccacgcgctgcagctgaacaaccgccagattcgcggcctggaggaggagctgcagttttccttgggcagcaagatcaatgtgaaggtgggaggaaacagcaaaggaaccctgaaggtccttcgtacctacaatgtcctggacatgaagaacacgacctgccaggacctacagatagaagtgacagtcaaaggccacgtcgagtacacgatggaagcaaacgaggactatgaggactatgagtacgatgagcttccagccaaggatgacccagatgcccctctgcagcccgtgacacccctgcagctgtttgagggtcggaggaaccgccgcaggagggaggcgcccaaggtggtggaggagcaggagtccagggtgcactacaccgtgtgcatctggcggaacggcaaggtggggctgtctggcatggccatcgcggacgtcaccctcctgagtggattccacgccctgcgtgctgacctggagaagctgacctccctctctgaccgttacgtgagtcactttgagaccgaggggccccacgtcctgctgtattttgactcggtccccacctcccgggagtgcgtgggctttgaggctgtgcaggaagtgccggtggggctggtgcagccggccagcgcaaccctgtacgactactacaaccccgagcgcagatgttctgtgttttacggggcaccaagtaagagcagactcttggccaccttgtgttctgctgaagtctgccagtgtgctgaggggaagtgccctcgccagcgtcgcgccctggagcggggtctgcaggacgaggatggctacaggatgaagtttgcctgctactacccccgtgtggagtacggcttccaggttaaggttctccgagaagacagcagagctgctttccgcctctttgagaccaagatcacccaagtcctgcacttcaccaaggatgtcaaggccgctgctaatcagatgcgcaacttcctggttcgagcctcctgccgccttcgcttggaacctgggaaagaatatttgatcatgggtctagatggggccacctatgacctcgagggacacccccagtacctgctggactcgaatagctggatcgaggagatgccctctgaacgcctgtgccggagcacccgccagcgggcagcctgtgcccagctcaacgacttcctccaggagtatggcactcaggggtgccaggtgtgagggctgccctcccacctccgctgggaggaacctgaacctgggaaccatgaagctggaagcactgctgtgtccgctttcatgaacacagcctgggaccagggcatattaaaggcttttggcagc

SEQ ID NO: 1715 - DNA, 2305 bp, Homo sapiens; identical to SEQ ID NO: 1383
  source 1..2305: mol_type = genomic DNA; mol_type = genomic DNA

SEQ ID NO: 1716 - DNA, 2942 bp, Homo sapiens; identical to SEQ ID NO: 810
  source 1..2942: mol_type = genomic DNA; mol_type = genomic DNA

SEQ ID NO: 1717 - DNA, 4048 bp, Homo sapiens
  source 1..4048: mol_type = genomic DNA; mol_type = genomic DNA
atgttgctgctgctgctactggcgccactcttcctccgccccccgggcgcgggcggggcgcagacccccaacgccacctcagaaggttgccagatcatacacccgccctgggaagggggcatcaggtaccggggcctgactcgggaccaggtgaaggctatcaacttcctgccagtggactatgagattgagtatgtgtgccggggggagcgcgaggtggtggggcccaaggtccgcaagtgcctggccaacggctcctggacagatatggacacacccagccgctgtgtccgaatctgctccaagtcttatttgaccctggaaaatgggaaggttttcctgacgggtggggacctcccagctctggacggagcccgggtggatttccggtgtgaccccgacttccatctggtgggcagctcccggagcatctgtagtcagggccagtggagcacccccaagccccactgccaggtgaatcgaacgccacactcagaacggcgcgcagtgtacatcggggcactgtttcccatgagcgggggctggccagggggccaggcctgccagcccgcggtggagatggcgctggaggacgtgaatagccgcagggacatcctgccggactatgagctcaagctcatccaccacgacagcaagtgtgatccaggccaagccaccaagtacctatatgagctgctctacaacgaccctatcaagatcatccttatgcctggctgcagctctgtctccacgctggtggctgaggctgctaggatgtggaacctcattgtgctttcctatggctccagctcaccagccctgtcaaaccggcagcgtttccccactttcttccgaacgcacccatcagccacactccacaaccctacccgcgtgaaactctttgaaaagtggggctggaagaagattgctaccatccagcagaccactgaggtcttcacttcgactctggacgacctggaggaacgagtgaaggaggctggaattgagattactttccgccagagtttcttctcagatccagctgtgcccgtcaaaaacctgaagcgccaggatgcccgaatcatcgtgggacttttctatgagactgaagcccggaaagttttttgtgaggtgtacaaggagcgtctctttgggaagaagtacgtctggttcctcattgggtggtatgctgacaattggttcaagatctacgacccttctatcaactgcacagtggatgagatgactgaggcggtggagggccacatcacaactgagattgtcatgctgaatcctgccaatacccgcagcatttccaacatgacatcccaggaatttgtggagaaactaaccaagcgactgaaaagacaccctgaggagacaggaggcttccaggaggcaccgctggcctatgatgccatctgggccttggcactggccctgaacaagacatctggaggaggcggccgttctggtgtgcgcctggaggacttcaactacaacaaccagaccattaccgaccaaatctaccgggcaatgaactcttcgtcctttgagggtgtctctggccatgtggtgtttgatgccagcggctctcggatggcatggacgcttatcgagcagcttcagggtggcagctacaagaagattggctactatgacagcaccaaggatgatctttcctggtccaaaacagataaatggattgttatatccagaactcacagcccaacctgaacaacctgactgctgtgggctgctcactggctttagctgctgtcttccccctggggctcgatggttaccacattgggaggaaccagttccctttcgtctgccaggcccgcctctggctcctgggcctgggctttagtctgggctacggttccatgttcaccaagatttggtgggtccacacggtcttcacaaagaaggaagaaaagaaggagtggaggaagactctggaaccctggaagctgtatgccacagtgggcctgctggtgggcatggatgtcctcactctcgccatctggcagatcgtggaccctctgcaccggaccattgagacatttgccaaggaggaacctaaggaagatattgacgtctctattctgccccagctggagcattgcagctccaggaagatgaatacatggcttggcattttctatggttacaaggggctgctgctgctgctgggaatcttccttgcttatgagaccaagagtgtgtccactgagaagatcaatgatcaccgggctgtgggcatggctatctacaatgtggcagtcctgtgcctcatcactgctcctgtcaccatgattctgtccagccagcaggatgcagcctttgcctttgcctctcttgccatagttttctcctcctatatcactcttgttgtgctctttgtgcccaagatgcgcaggctgatcacccgaggggaatggcagtcggaggcgcaggacaccatgaagacagggtcatcgaccaacaacaacgaggaggagaagtcccggctgttggagaaggagaaccgtgaactggaaaagatcattgctgagaaagaggagcgtgtctctgaactgcgccatcaactccagtctcggcagcagctccgctcccggcgccacccaccgacacccccagaaccctctgggggcctgcccaggggaccccctgagccccccgaccggcttagctgtgatgggagtcgagtgcatttgctttataagtgagggtagggtgagggaggacaggccagtagggggagggaaagggagaggggaagggcaggggactcaggaagcagggggtccccatccccagctgggaagaacatgctatccaatctcatctcttgtaaatacatgtccccctgtgagttctgggctgatttgggtctctcatacctctgggaaacagacctttttctctcttactgcttcatgtaattttgtatcacctcttcacaatttagttcgtacctggcttgaagctgctcactgctcacacgctgcctcctcagcagcctcactgcatctttctcttcccatgcaacaccctcttctagttaccacggcaacccctgcagctcctctgcctttgtgctctgttcctgtccagcaggggtctcccaacaagtgctctttccaccccaaaggggcctctccttttctccactgtcataatctctttccatcttacttgcccttccatactttctcacatgtggctccccctgaattttgcttcctttgggagctcattcttttcgccaaggctcacatgctccttgcctctgctctgtgcactcacgctcagcacacatgcatcctcccctctcctgcgtgtgcccactgaacatgctcatgtgtacacacgcttttcccgtatgctttcttcatgttcagtcacatgtgctctcgggtgccctgcattcacagctacgtgtgcccctctcatggtcatgggtctgcccttgagcgtgtttgggtaggcatgtgcaatttgtctagcatgctgagtcatgtctttcctatttgcacacgtccatgtttatccatgtactttccctgtgtaccctccatgtaccttgtgtactttcttcccttaaatcatggtattcttctgacagagccatatgtaccctaccctgcacattgttatgcacttttccccaattcatgtttggtggggccatccacaccctctccttgtcacagaatctccatttctgctcagattccccccatctccattgcattcatgtactaccctcagtctacactcacaatcatcttctcccaagactgctcccttttgttttgtgtttttttgaggggaattaaggaaaaataagtgggggcaggtttggagagctgcttccagtggatagttgatgagaatcctgaccaaaggaaggcacccttgactgttgggatagacagatggacctatggggtgggaggtggtgtccctttcacactgtggtgtctcttggggaaggatctccccgaatctcaataaaccagtgaacagtgtgactcgg

SEQ ID NO: 1718 - DNA, 1593 bp, Homo sapiens; identical to SEQ ID NO: 674
  source 1..1593: mol_type = genomic DNA; mol_type = genomic DNA

SEQ ID NO: 1719 - DNA, 3047 bp, Homo sapiens; identical to SEQ ID NO: 1708
  source 1..3047: mol_type = genomic DNA; mol_type = genomic DNA

SEQ ID NO: 1720 - DNA, 463 bp, Homo sapiens
  source 1..463: mol_type = genomic DNA; mol_type = genomic DNA
tcacgtgcctgcgccggcagcgctcccactttcctgtccggtgcggccccgggtccctgtattttgggtccggcctgctcgccgtccgctccgtccgcccttagacctgttgcccagcatccctgcagttcgcgcctgccgaccatgcccgcgggcgtgcccatgtccacctacctgaaaatgttcgcagccagtctcctggccatgtgcgcaggggcagaagtggtgcacaggtactaccgaccggacctgacaatacctgaaattccaccaaagcgtggagaactcaaaacggagcttttgggactgaaagaaagaaaacacaaacctcaagtttctcaacaggaggaacttaaataactatgccaagaattctgtgaataatataagtcttaaatatgtatttcttaatttattgcatcaaactacttgtccttaagcacttagtctaatgctaactgca

SEQ ID NO: 1721 - DNA, 3949 bp, Homo sapiens
  source 1..3949: mol_type = genomic DNA; mol_type = genomic DNA
gtcttcccctcgtgggccctgagcgggactgcagccagccccctggggcgccagctttggaggcccccgacagctgctctcgggagccgcctcccgacacccgagccccgccggcgcctcccgctcccggctcccggctcctggctccctccgcctcccccgcccctcgccccgccgccgaagaggccccgctcccgggtcggacgcctgggtctgccgggaagagcgatgagaggtgtctgaaggtggctattcactgagcgatggggttggacttgaaggaatgccaagagatgctgcccccacccccttaggcccgagggatcaggagctatgggaccagaggccctgtcatctttactgctgctgctcttggtggcaagtggagatgctgacatgaagggacattttgatcctgccaagtgccgctatgccctgggcatgcaggaccggaccatcccagacagtgacatctctgcttccagctcctggtcagattccactgccgcccgccacagcaggttggagagcagtgacggggatggggcctggtgccccgcagggtcggtgtttcccaaggaggaggagtacttgcaggtggatctacaacgactccacctggtggctctggtgggcacccagggacggcatgccgggggcctgggcaaggagttctcccggagctaccggctgcgttactcccgggatggtcgccgctggatgggctggaaggaccgctggggtcaggaggtgatctcaggcaatgaggaccctgagggagtggtgctgaaggaccttgggccccccatggttgcccgactggttcgcttctacccccgggctgaccgggtcatgagtgtctgtctgcgggtagagctctatggctgcctctggagggatggactcctgtcttacaccgcccctgtggggcagacaatgtatttatctgaggccgtgtacctcaacgactccacctatgacggacataccgtgggcggactgcagtatgggggtctgggccagctggcagatggtgtggtggggctggatgactttaggaagagtcaggagctgcgggtctggccaggctatgactatgtgggatggagcaaccacagcttctccagtggctatgtggagatggagtttgagtttgaccggctgagggccttccaggctatgcaggtccactgtaacaacatgcacacgctgggagcccgtctgcctggcggggtggaatgtcgcttccggcgtggccctgccatggcctgggagggggagcccatgcgccacaacctagggggcaacctgggggaccccagagcccgggctgtctcagtgccccttggcggccgtgtggctcgctttctgcagtgccgcttcctctttgcggggccctggttactcttcagcgaaatctccttcatctctgatgtggtgaacaattcctctccggcactgggaggcaccttcccgccagccccctggtggccgcctggcccacctcccaccaacttcagcagcttggagctggagcccagaggccagcagcccgtggccaaggccgaggggagcccgaccgccatcctcatcggctgcctggtggccatcatcctgctcctgctgctcatcattgccctcatgctctggcggctgcactggcgcaggctcctcagcaaggctgaacggagggtgttggaagaggagctgacggttcacctctctgtccctggggacactatcctcatcaacaaccgcccaggtcctagagagccacccccgtaccaggagccccggcctcgtgggaatccgccccactccgctccctgtgtccccaatggctctgcgttgctgctctccaatccagcctaccgcctccttctggccacttacgcccgtccccctcgaggcccgggcccccccacacccgcctgggccaaacccaccaacacccaggcctacagtggggactatatggagcctgagaagccaggcgccccgcttctgcccccacctccccagaacagcgtcccccattatgccgaggctgacattgttaccctgcagggcgtcaccgggggcaacacctatgctgtgcctgcactgcccccaggggcagtcggggatgggccccccagagtggatttccctcgatctcgactccgcttcaaggagaagcttggcgagggccagtttggggaggtgcacctgtgtgaggtcgacagccctcaagatctggtcagtcttgatttcccccttaatgtgcgtaagggacaccctttgctggtagctgtcaagatcttacggccagatgccaccaagaatgccagcttctccttgttctccaggaatgatttcctgaaagaggtgaagatcatgtcgaggctcaaggaccccaacatcattcggctgctgggcgtgtgtgtgcaggacgaccccctctgcatgattactgactacatggagaacggcgacctcaaccagttcctcagtgcccaccagctggaggacaaggcagccgagggggcccctggggacgggcaggctgcgcaggggcccaccatcagctacccaatgctgctgcatgtggcagcccagatcgcctccggcatgcgctatctggccacactcaactttgtacatcgggacctggccacgcggaactgcctagttggggaaaatttcaccatcaaaatcgcagactttggcatgagccggaacctctatgctggggactattaccgtgtgcagggccgggcagtgctgcccatccgctggatggcctgggagtgcatcctcatggggaagttcacgactgcgagtgacgtgtgggcctttggtgtgaccctgtgggaggtgctgatgctctgtagggcccagccctttgggcagctcaccgacgagcaggtcatcgagaacgcgggggagttcttccgggaccagggccggcaggtgtacctgtcccggccgcctgcctgcccgcagggcctatatgagctgatgcttcggtgctggagccgggagtctgagcagcgaccacccttttcccagctgcatcggttcctggcagaggatgcactcaacacggtgtgaatcacacatccagctgcccctccctcagggagtgatccaggggaagccagtgacactaaaacaagaggacacaatggcacctctgcccttcccctcccgacagcccatcacctctaatagaggcagtgagactgcaggtgggctgggcccacccagggagctgatgccccttctccccttcctggacacactctcatgtccccttcctgttcttccttcctagaagcccctgtcgcccacccagctggtcctgtggatgggatcctctccaccctcctctagccatcccttggggaagggtggggagaaatataggatagacactggacatggcccattggagcacctgggccccactggacaacactgattcctggagaggtggctgcgcccccagcttctctctccctgtcacacactggaccccactggctgagaatctgggggtgaggaggacaagaaggagaggaaaatgtttccttgtgcctgctcctgtacttgtcctcagcttgggcttcttcctcctccatcacctgaaacactggacctgggggtagccccgccccagccctcagtcacccccacttcccacctgcagtcttgtagctagaacttctctaagcctatacgtttctgtggagtaaatattgggattggggggaaagagggagcaacggcccatagccttggggttggacatctctagtgtagctgccacattgatttttctataatcacttggggtttgtacatttttggggggagagacacagatttttacactaatatatggacctagcttgaggcaattttaatcccctgcactaggcaggtaataataaaggttgagttttcc

SEQ ID NO: 1722 - DNA, 720 bp, Homo sapiens; identical to SEQ ID NO: 814
  source 1..720: mol_type = genomic DNA; mol_type = genomic DNA

SEQ ID NO: 1723 - DNA, 5220 bp, Homo sapiens
  source 1..5220: mol_type = genomic DNA; mol_type = genomic DNA
atgaggctgctctgggggctgatctgggcatccagcttcttcaccttatctctgcagaagcccaggttgctcttgttctctccttctgtggttcatctgggggtccccctatcggtgggggtgcagctccaggatgtgccccgaggacaggtagtcaaaggatcagtgttcctgagaaacccatctcgtaataatgtcccctgctccccaaaggtggacttcacccttagctcagaaagagacttcgcactcctcagtctccaggtgcccttgaaagatgcgaagagctgtggcctccatcaactcctcagaggccctgaggtccagctggtggcccattcgccatggctaaaggactctctgtccagaacgacaaacatccagggtatcaacctgctcttctcctctcgccgggggcacctctttttgcagacggaccagcccatttacaaccctggccagcgggttcggtaccgggtctttgctctggatcagaagatgcgcccgagcactgacaccatcacagtcatggtggagaactctcacggcctccgcgtgcggaagaaggaggtgtacatgccctcgtccatcttccaggatgactttgtgatcccagacatctcagagccagggacctggaagatctcagcccgattctcagatggcctggaatccaacagcagcacccagtttgaggtgaagaaatatgtccttcccaactttgaggtgaagatcacccctggaaagccctacatcctgacggtgccaggccatcttgatgaaatgcagttagacatccaggccaggtacatctatgggaagccagtgcagggggtggcatatgtgcgctttgggctcctagatgaggatggtaagaagactttctttcgggggctggagagtcagaccaagctggtgaatggacagagccacatttccctctcaaaggcagagttccaggacgccctggagaagctgaatatgggcattactgacctccaggggctgcgcctctacgttgctgcagccatcattgagtatccaggtggggagatggaggaggcagagctcacatcctggtattttgtgtcatctcccttctccttggatcttagcaagaccaagcgacaccttgtgcctggggcccccttcctgctgcaggccttggtccgtgagatgtcaggctccccagcttctggcattcctgtcaaagtttctgccacggtgtcttctcctgggtctgttcctgaagtccaggacattcagcaaaacacagacgggagcggccaagtcagcattccaataattatccctcagaccatctcagagctgcagctctcagtatctgcaggctccccacatccagcgatagccaggctcactgtggcagccccaccttcaggaggccccgggtttctgtctattgagcggccggattctcgacctcctcgtgttggggacactctgaacctgaacttgcgagccgtgggcagtggggccaccttttctcattactactacatgatcctatcccgagggcagatcgtgttcatgaatcgagagcccaagaggaccctgacctcggtctcggtgtttgtggaccatcacctggcaccctccttctactttgtggccttctactaccatggagaccacccagtggccaactccctgcgagtggatgtccaggctggggcctgcgagggcaagctggagctcagcgtggacggtgccaagcagtaccggaacggggagtccgtgaagctccacttagaaaccgactccctagccctggtggcgctgggagccttggacacagctctgtatgctgcaggcagcaagtcccacaagcccctcaacatgggcaaggtctttgaagctatgaacagctatgacctcggctgtggtcctgggggtggggacagtgcccttcaggtgttccaggcagcgggcctggccttttctgatggagaccagtggaccttatccagaaagagactaagctgtcccaaggagaagacaacccggaaaaagagaaacgtgaacttccaaaaggcgattaatgagaaattgggtcagtatgcttccccgacagccaagcgctgctgccaggatggggtgacacgtctgcccatgatgcgttcctgcgagcagcgggcagcccgcgtgcagcagccggactgccgggagcccttcctgtcctgctgccaatttgctgagagtctgcgcaagaagagcagggacaagggccaggcgggcctccaacgagccctggagatcctgcaggaggaggacctgattgatgaggatgacattcccgtgcgcagcttcttcccagagaactggctctggagagtggaaacagtggaccgctttcaaatattgacactgtggctccccgactctctgaccacgtgggagatccatggcctgagcctgtccaaaaccaaaggcctatgtgtggccaccccagtccagctccgggtgttccgcgagttccacctgcacctccgcctgcccatgtctgtccgccgctttgagcagctggagctgcggcctgtcctctataactacctggataaaaacctgactgtgagcgtccacgtgtccccagtggaggggctgtgcctggctgggggcggagggctggcccagcaggtgctggtgcctgcgggctctgcccggcctgttgccttctctgtggtgcccacggcagccgccgctgtgtctctgaaggtggtggctcgagggtccttcgaattccctgtgggagatgcggtgtccaaggttctgcagattgagaaggaaggggccatccatagagaggagctggtctatgaactcaaccccttggaccaccgaggccggaccttggaaatacctggcaactctgatcccaatatgatccctgatggggactttaacagctacgtcagggttacagcctcagatccattggacactttaggctctgagggggccttgtcaccaggaggcgtggcctccctcttgaggcttcctcgaggctgtggggagcaaaccatgatctacttggctccgacactggctgcttcccgctacctggacaagacagagcagtggagcacactgcctcccgagaccaaggaccacgccgtggatctgatccagaaaggctacatgcggatccagcagtttcggaaggcggatggttcctatgcggcttggttgtcacggggcagcagcacctggctcacagcctttgtgttgaaggtcctgagtttggcccaggagcaggtaggaggctcgcctgagaaactgcaggagacatctaactggcttctgtcccagcagcaggctgacggctcgttccaggacctctctccagtgatacataggagcatgcaggggggtttggtgggcaatgatgagactgtggcactcacagcctttgtgaccatcgcccttcatcatgggctggccgtcttccaggatgagggtgcagagccattgaagcagagagtggaagcctccatctcaaaggcaagctcatttttgggggagaaagcaagtgctgggctcctgggtgcccacgcagctgccatcacggcctatgccctgacactgaccaaggcccctgcggacctgcggggtgttgcccacaacaacctcatggcaatggcccaggagactggagataacctgtactggggctcagtcactggttctcagagcaatgccgtgtcgcccaccccagctcctcgcaacccatccgaccccatgccccaggccccagccctgtggattgaaaccacagcctacgccctgctgcacctcctgcttcacgagggcaaagcagagatggcagaccaggctgcggcctggctcacccgtcagggcagcttccaagggggattccgcagtacccaagacacggtgattgccctggatgccctgtctgcctactggattgcctcccacaccactgaggagaggggtctcaatgtgactctcagctccacaggccggaatgggttcaagtcccacgcgctgcagctgaacaaccgccagattcgcggcctggaggaggagctgcagttttccttgggcagcaagatcaatgtgaaggtgggaggaaacagcaaaggaaccctgaaggtccttcgtacctacaatgtcctggacatgaagaacacgacctgccaggacctacagatagaagtgacagtcaaaggccacgtcgagtacacgatggaagcaaacgaggactatgaggactatgagtacgatgagcttccagccaaggatgacccagatgcccctctgcagcccgtgacacccctgcagctgtttgagggtcggaggaaccgccgcaggagggaggcgcccaagctgacctccctctctgaccgttacgtgagtcactttgagaccgaggggccccacgtcctgctgtattttgactcggtccccacctcccgggagtgcgtgggctttgaggctgtgcaggaagtgccggtggggctggtgcagccggccagcgcaaccctgtacgactactacaaccccgagcgcagatgttctgtgttttacggggcaccaagtaagagcagactcttggccaccttgtgttctgctgaagtctgccagtgtgctgaggggaagtgccctcgccagcgtcgcgccctggagcggggtctgcaggacgaggatggctacaggatgaagtttgcctgctactacccccgtgtggagtacggcttccaggttaaggttctccgagaagacagcagagctgctttccgcctctttgagaccaagatcacccaagtcctgcacttcaccaaggatgtcaaggccgctgctaatcagatgcgcaacttcctggttcgagcctcctgccgccttcgcttggaacctgggaaagaatatttgatcatgggtctagatggggccacctatgacctcgagggacacccccagtacctgctggactcgaatagctggatcgaggagatgccctctgaacgcctgtgccggagcacccgccagcgggcagcctgtgcccagctcaacgacttcctccaggagtatggcactcaggggtgccaggtgtgagggctgccctcccacctccgctgggaggaacctgaacctgggaaccatgaagctggaagcactgctgtgtccgctttcatgaacacagcctgggaccagggcatattaaaggcttttggcagc

SEQ ID NO: 1724 - DNA, 2204 bp, Homo sapiens
  source 1..2204: mol_type = genomic DNA; mol_type = genomic DNA
tcaacgtcagagccggggggcgagcccagcgctcctccccgcaaatgatcccgccccaggggcctatcccagtccccccagtgcctttggttgctggagggaagaacacaatggatctggtgctaaaaagatgccttcttcatttggctgtgataggtgctttgctggctgtgggggctacaaaagtacccagaaaccaggactggcttggtgtctcaaggcaactcagaaccaaagcctggaacaggcagctgtatccagagtggacagaagcccagagacttgactgctggagaggtggtcaagtgtccctcaaggtcagtaatgatgggcctacactgattggtgcaaatgcctccttctctattgccttgaacttccctggaagccaaaaggtattgccagatgggcaggttatctgggtcaacaataccatcatcaatgggagccaggtgtggggaggacagccagtgtatccccaggaaactgacgatgcctgcatcttccctgatggtggaccttgcccatctggctcttggtctcagaagagaagctttgtttatgtctggaagacctggggccaatactggcaagttctagggggcccagtgtctgggctgagcattgggacaggcagggcaatgctgggcacacacaccatggaagtgactgtctaccatcgccggggatcccggagctatgtgcctcttgctcattccagctcagccttcaccattactgaccaggtgcctttctccgtgagcgtgtcccagttgcgggccttggatggagggaacaagcacttcctgagaaatcagcctctgacctttgccctccagctccatgaccccagtggctatctggctgaagctgacctctcctacacctgggactttggagacagtagtggaaccctgatctctcgggcacttgtggtcactcatacttacctggagcctggcccagtcactgcccaggtggtcctgcaggctgccattcctctcacctcctgtggctcctccccagttccaggcaccacagatgggcacaggccaactgcagaggcccctaacaccacagctggccaagtgcctactacagaagttgtgggtactacacctggtcaggcgccaactgcagagccctctggaaccacatctgtgcaggtgccaaccactgaagtcataagcactgcacctgtgcagatgccaactgcagagagcacaggtatgacacctgagaaggtgccagtttcagaggtcatgggtaccacactggcagagatgtcaactccagaggctacaggtatgacacctgcagaggtatcaattgtggtgctttctggaaccacagctgcacaggtaacaactacagagtgggtggagaccacagctagagagctacctatccctgagcctgaaggtccagatgccagctcaatcatgtctacggaaagtattacaggttccctgggccccctgctggatggtacagccaccttaaggctggtgaagagacaagtccccctggattgtgttctgtatcgatatggttccttttccgtcaccctggacattgtccagggtattgaaagtgccgagatcctgcaggctgtgccgtccggtgagggggatgcatttgagctgactgtgtcctgccaaggcgggctgcccaaggaagcctgcatggagatctcatcgccagggtgccagccccctgcccagcggctgtgccagcctgtgctacccagcccagcctgccagctggttctgcaccagatactgaagggtggctcggggacatactgcctcaatgtgtctctggctgataccaacagcctggcagtggtcagcacccagcttatcatgcctggtcaagaagcaggccttgggcaggttccgctgatcgtgggcatcttgctggtgttgatggctgtggtccttgcatctctgatatataggcgcagacttatgaagcaagacttctccgtaccccagttgccacatagcagcagtcactggctgcgtctaccccgcatcttctgctcttgtcccattggtgagaacagccccctcctcagtgggcagcaggtctgagtactctcatatgatgctgtgattttcctggagttgacagaaacacctatatttcccccagtcttccctgggagactactattaactgaaataaatactcagagcctg

SEQ ID NO: 1725 - DNA, 1347 bp, Homo sapiens; identical to SEQ ID NO: 1414
  source 1..1347: mol_type = genomic DNA; mol_type = genomic DNA

SEQ ID NO: 1726 - DNA, 2757 bp, Homo sapiens
  source 1..2757: mol_type = genomic DNA; mol_type = genomic DNA
agtttggttcttgggggctagacaagtttcttccccggtggggcggctgaacactcttcccaagtacctgctttgggtccaagtttcctacctatgtctctagtctgtagggatttcttgatttctaactcactattttcaccaatcctggggaaaatatgtatcgacctaaggttaaattccacctggcccaggagcctcctttggaaaccaggaagccgggaatctcgttgcaaaggaatcctgggcctcagaggagtcgttgcctctgcctcatagcataccccgacactgtctctgttttgggatgcagggttctgtttctgtctttttgagaagttcctggtttaattcactctcccatgataaactgttgtgtctggtatgtgttacgcagctgcctttcagttagctcttgcccgggagtgcatcaagatgagagtgacccagtgaaaccagaaactgtcattgagtagcaggatgggaaagcaatgtctagggaccaggatccctttgtcagtttttcctttttcctctcctccggcccctcccaggccttctctgagggagaagaggaagggctatgcaaatgagcacccttttcttatataggggcctatcccagtccccccagtgcctttggttgctggagggaagaacacaatggatctggtgctaaaaagatgccttcttcatttggctgtgataggtgctttgctggctgtgggggctacaaaagtacccagaaaccaggactggcttggtgtctcaaggcaactcagaaccaaagcctggaacaggcagctgtatccagagtggacagaagcccagagacttgactgctggagaggtggtcaagtgtccctcaaggtcagtaatgatgggcctacactgattggtgcaaatgcctccttctctattgccttgaacttccctggaagccaaaaggtattgccagatgggcaggttatctgggtcaacaataccatcatcaatgggagccaggtgtggggaggacagccagtgtatccccaggaaactgacgatgcctgcatcttccctgatggtggaccttgcccatctggctcttggtctcagaagagaagctttgtttatgtctggaagacctggggccaatactggcaagttctagggggcccagtgtctgggctgagcattgggacaggcagggcaatgctgggcacacacaccatggaagtgactgtctaccatcgccggggatcccggagctatgtgcctcttgctcattccagctcagccttcaccattactgaccaggtgcctttctccgtgagcgtgtcccagttgcgggccttggatggagggaacaagcacttcctgagaaatcagcctctgacctttgccctccagctccatgaccccagtggctatctggctgaagctgacctctcctacacctgggactttggagacagtagtggaaccctgatctctcgggcacttgtggtcactcatacttacctggagcctggcccagtcactgcccaggtggtcctgcaggctgccattcctctcacctcctgtggctcctccccagttccaggcaccacagatgggcacaggccaactgcagaggcccctaacaccacagctggccaagtgcctactacagaagttgtgggtactacacctggtcaggcgccaactgcagagccctctggaaccacatctgtgcaggtgccaaccactgaagtcataagcactgcacctgtgcagatgccaactgcagagagcacaggtatgacacctgagaaggtgccagtttcagaggtcatgggtaccacactggcagagatgtcaactccagaggctacaggtatgacacctgcagaggtatcaattgtggtgctttctggaaccacagctgcacaggtaacaactacagagtgggtggagaccacagctagagagctacctatccctgagcctgaaggtccagatgccagctcaatcatgtctacggaaagtattacaggttccctgggccccctgctggatggtacagccaccttaaggctggtgaagagacaagtccccctggattgtgttctgtatcgatatggttccttttccgtcaccctggacattgtccagggtattgaaagtgccgagatcctgcaggctgtgccgtccggtgagggggatgcatttgagctgactgtgtcctgccaaggcgggctgcccaaggaagcctgcatggagatctcatcgccagggtgccagccccctgcccagcggctgtgccagcctgtgctacccagcccagcctgccagctggttctgcaccagatactgaagggtggctcggggacatactgcctcaatgtgtctctggctgataccaacagcctggcagtggtcagcacccagcttatcatgcctggtcaagaagcaggccttgggcaggttccgctgatcgtgggcatcttgctggtgttgatggctgtggtccttgcatctctgatatataggcgcagacttatgaagcaagacttctccgtaccccagttgccacatagcagcagtcactggctgcgtctaccccgcatcttctgctcttgtcccattggtgagaacagccccctcctcagtgggcagcaggtctgagtactctcatatgatgctgtgattttcctggagttgacagaaacacctatatttcccccagtcttccctgggagactactattaactgaaataaatactcagagcctg

SEQ ID NO: 1727 - DNA, 4385 bp, Homo sapiens; identical to SEQ ID NO: 837
  source 1..4385: mol_type = genomic DNA; mol_type = genomic DNA

SEQ ID NO: 1728 - DNA, 1593 bp, Homo sapiens
  source 1..1593: mol_type = genomic DNA; mol_type = genomic DNA
tctgaggccgtgtacctcaacgactccacctatgacggacataccgtgggcggactgcagtatgggggtctgggccagctggcagatggtgtggtggggctggatgactttaggaagagtcaggagctgcgggtctggccaggctatgactatgtgggatggagcaaccacagcttctccagtggctatgtggagatggagtttgagtttgaccggctgagggccttccaggctatgcaggtccactgtaacaacatgcacacgctgggagcccgtctgcctggcggggtggaatgtcgcttccggcgtggccctgccatggcctgggagggggagcccatgcgccacaacctagggggcaacctgggggaccccagagcccgggctgtctcagtgccccttggcggccgtgtggctcgctttctgcagtgccgcttcctctttgcggggccctggttactcttcagcgaaatctccttcatctctgatgtggtgaacaattcctctccggcactgggaggcaccttcccgccagccccctggtggccgcctggcccacctcccaccaacttcagcagcttggagctggagcccagaggccagcagcccgtggccaaggccgaggggagcccgaccgccatcctcatcggctgcctggtggccatcatcctgctcctgctgctcatcattgccctcatgctctggcggctgcactggcgcaggctcctcagcaaggtcctagagagccacccccgtaccaggagccccggcctcgtgggaatccgccccactccgctccctgtgtccccaatggctctgcgttgctgctctccaatccagcctaccgcctccttctggccacttacgcccgtccccctcgaggcccgggcccccccacacccgcctgggccaaacccaccaacacccaggggcgtcaccgggggcaacacctatgctgtgcctgcactgcccccaggggcagtcggggatgggccccccagagtggatttccctcgatctcgactccgcttcaaggagaagcttggcgagggccagtttggggaggtgcacctgtgtgaggtcgacagccctcaagatctggtcagtcttgatttcccccttaatgtgcgtaagggacaccctttgctggtagctgtcaagatcttacggccagatgccaccaagaatgccaggaatgatttcctgaaagaggtgaagatcatgtcgaggctcaaggaccccaacatcattcggctgctgggcgtgtgtgtgcaggacgaccccctctgcatgattactgactacatggagaacggcgacctcaaccagttcctcagtgcccaccagctggaggacaaggcagccgagggggcccctggggacgggcaggctgcgcaggggcccaccatcagctacccaatgctgctgcatgtggcagcccagatcgcctccggcatgcgctatctggccacactcaactttgtacatttttggggggagagacacagatttttacactaatatatggacctagcttgaggcaattttaatcccctgcactaggcaggtaataataaaggttgagttttccac

SEQ ID NO: 1729 - DNA, 720 bp, Homo sapiens
  source 1..720: mol_type = genomic DNA; mol_type = genomic DNA
atgcagaccttcccagttgctggggcgctggaccctgctatactggacacaagcagcccccaagccctctacacggtcctcttaatagtgctggtcatgatgagcttggtgtttggtaagtttgttcctgtcaattgggaaccccctcaaccacttccattccccaaatacctgcgctgctaccgatgcctcttggagaccaaggagttagggtgccttctgggatctgacatctgcctcaccccagctggcagcagctgcatcactctccacaaaaagaacagcagcggttctgacgtcatggtgagtgactgccgaagtaaggagcagatgagtgattgttcaaatacccgaacttctccggtgtctggcttctggatattctctcaatactgcttcctggatttctgcaatgaccctcaaaacagagggctctatactccttagtgtgactgcagcaaactttggtgtaaaattccaccagtttccagccaccttcctgacttctatctgggcttggccaggacttctagtccctcacaccagccctccttgcctccctccagccactggaccccagccttggctcttcctcttggttgacgcccttcagcacacttactgctactctgtacccccagccctactgcccaccaggtttcctctcttgtcccctagtccctggatgtttctcccaaataaatttgtgtgtaaactgtt

SEQ ID NO: 1730 - DNA, 3720 bp, Homo sapiens
  source 1..3720: mol_type = genomic DNA; mol_type = genomic DNA
gtcttcccctcgtgggccctgagcgggactgcagccagccccctggggcgccagctttggaggcccccgacagctgctctcgggagccgcctcccgacacccgagccccgccggcgcctcccgctcccggctcccggctcctggctccctccgcctcccccgcccctcgccccgccgccgaagaggccccgctcccgggtcggacgcctgggtctgccgggaagagcgatgagaggtgtctgaaggtggctattcactgagcgatggggttggacttgaaggaatgccaagagatgctgcccccacccccttaggcccgagggatcaggagctatgggaccagaggccctgtcatctttactgctgctgctcttggtggcaagtggagatgctgacatgaagggacattttgatcctgccaagtgccgctatgccctgggcatgcaggaccggaccatcccagacagtgacatctctgcttccagctcctggtcagattccactgccgcccgccacagcaggttggagagcagtgacggggatggggcctggtgccccgcagggtcggtgtttcccaaggaggaggagtacttgcaggtggatctacaacgactccacctggtggctctggtgggcacccagggacggcatgccgggggcctgggcaaggagttctcccggagctaccggctgcgttactcccgggatggtcgccgctggatgggctggaaggaccgctggggtcaggaggtgatctcaggcaatgaggaccctgagggagtggtgctgaaggaccttgggccccccatggttgcccgactggttcgcttctacccccgggctgaccgggtcatgagtgtctgtctgcgggtagagctctatggctgcctctggagggactgcagtatgggggtctgggccagctggcagatggtgtggtggggctggatgactttaggaagagtcaggagctgcgggtctggccaggctatgactatgtgggatggagcaaccacagcttctccagtggctatgtggagatggagtttgagtttgaccggctgagggccttccaggctatgcaggtccactgtaacaacatgcacacgctgggagcccgtctgcctggcggggtggaatgtcgcttccggcgtggccctgccatggcctgggagggggagcccatgcgccacaacctagggggcaacctgggggaccccagagcccgggctgtctcagtgccccttggcggccgtgtggctcgctttctgcagtgccgcttcctctttgcggggccctggttactcttcagcgaaatctccttcatctctgatgtggtgaacaattcctctccggcactgggaggcaccttcccgccagccccctggtggccgcctggcccacctcccaccaacttcagcagcttggagctggagcccagaggccagcagcccgtggccaaggccgaggggagcccgaccgccatcctcatcggctgcctggtggccatcatcctgctcctgctgctcatcattgccctcatgctctggcggctgcactggcgcaggctcctcagcaaggctgaacggagggtgttggaagaggagctgacggttcacctctctgtccctggggacactatcctcatcaacaaccgcccaggtcctagagagccacccccgtaccaggagccccggcctcgtgggaatccgccccactccgctccctgtgtccccaatggctctgcctacagtggggactatatggagcctgagaagccaggcgccccgcttctgcccccacctccccagaacagcgtcccccattatgccgaggctgacattgttaccctgcagggcgtcaccgggggcaacacctatgctgtgcctgcactgcccccaggggcagtcggggatgggccccccagagtggatttccctcgatctcgactccgcttcaaggagaagcttggcgagggccagtttggggaggtgcacctgtgtgaggtcgacagccctcaagatctggtcagtcttgatttcccccttaatgtgcgtaagggacaccctttgctggtagctgtcaagatcttacggccagatgccaccaagaatgccaggaatgatttcctgaaagaggtgaagatcatgtcgaggctcaaggaccccaacatcattcggctgctgggcgtgtgtgtgcaggacgaccccctctgcatgattactgactacatggagaacggcgacctcaaccagttcctcagtgcccaccagctggaggacaaggcagccgagggggcccctggggacgggcaggctgcgcaggggcccaccatcagctacccaatgctgctgcatgtggcagcccagatcgcctccggcatgcgctatctggccacactcaactttgtacatcgggacctggccacgcggaactgcctagttggggaaaatttcaccatcaaaatcgcagactttggcatgagccggaacctctatgctggggactattaccgtgtgcagggccgggcagtgctgcccatccgctggatggcctgggagtgcatcctcatggggaagttcacgactgcgagtgacgtgtgggcctttggtgtgaccctgtgggaggtgctgatgctctgtagggcccagccctttgggcagctcaccgacgagcaggtcatcgagaacgcgggggagttcttccgggaccagggccggcaggtgtacctgtcccggccgcctgcctgcccgcagggcctatatgagctgatgcttcggtgctggagccgggagtctgagcagcgaccacccttttcccagctgcatcggttcctggcagaggatgcactcaacacggtgtgaatcacacatccagctgcccctccctcagggagtgatccaggggaagccagtgacactaaaacaagaggacacaatggcacctctgcccttcccctcccgacagcccatcacctctaatagaggcagtgagactgcaggtgggctgggcccacccagggagctgatgccccttctccccttcctggacacactctcatgtccccttcctgttcttccttcctagaagcccctgtcgcccacccagctggtcctgtggatgggatcctctccaccctcctctagccatcccttggggaagggtggggagaaatataggatagacactggacatggcccattggagcacctgggccccactggacaacactgattcctggagaggtggctgcgcccccagcttctctctccctgtcacacactggaccccactggctgagaatctgggggtgaggaggacaagaaggagaggaaaatgtttccttgtgcctgctcctgtacttgtcctcagcttgggcttcttcctcctccatcacctgaaacactggacctgggggtagccccgccccagccctcagtcacccccacttcccacctgcagtcttgtagctagaacttctctaagcctatacgtttctgtggagtaaatattgggattggggggaaagagggagcaacggcccatagccttggggttggacatctctagtgtagctgccacattgatttttctataatcacttggggtttgtacatttttggggggagagacacagatttttacactaatatatggacctagcttgaggcaattttaatcccctgcactaggcaggtaataataaaggttgagttttcc

SEQ ID NO: 1731 - DNA, 3720 bp, Homo sapiens; identical to SEQ ID NO: 1374
  source 1..3720: mol_type = genomic DNA; mol_type = genomic DNA

SEQ ID NO: 1732 - DNA, 1611 bp, Homo sapiens
  source 1..1611: mol_type = genomic DNA
tacttaggaagcctgtggtgagaacaacaacagtgcctgagaatcccacggctctggggaagtgagccccgaggatgaggctgctcgcctggctgattttcctggctaactggggaggtgccagggctgaaccagggaagttctggcacatcgctgacctgcaccttgaccctgactacaaggtatccaaagaccccttccaggtgtgcccatcagctggatcccagccagtgcccgacgcaggcccctggggtgactacctctgtgattctccctgggccctcatcaactcctccatctatgccatgaaggagattgagccagagccagacttcattctctggactggtgatgacacgcctcatgtgcccgatgagaaactgggagaggcagctgtactggaaattgtggaacgcctgaccaagctcatcagagaggtctttccaggtgccttctactgtgagaagctgccgggtcccagcggggctgggcgaattgtggtcctcaacaccaatctgtactataccagcaatgcgctgacagcagacatggcggaccctggccagcagttccagtggctggaagatgtgctgaccgatgcatccaaagctggggacatggtgtacattgtcggccacgtgcccccggggttctttgagaagacgcaaaacaaggcatggttccgggagggcttcaatgaaaaatacctgaaggtggtccggaagcatcatcgcgtcatagcagggcagttcttcgggcaccaccacaccgacagctttcggatgctctatgatgatgcaggtgtccccataagcgccatgttcatcacacctggagtcaccccatggaaaaccacattacctggagtggtcaatggggccaacaatccagccatccgggtgttcgaatatgaccgagccacactgagcctgaaggacatggtgacctacttcatgaacctgagccaggcgaatgctcaggggacgccgcgctgggagctcgagtaccagctgaccgaggcctatggggtgccggacgccagcgcccactccatgcacacagtgctggaccgcatcgctggcgaccagagcacactgcagcgctactacgtctataactcagtcagctactctgctggggtctgcgacgaggcctgcagcatgcagcacgtgtgtgccatgcgccaggtggacattgacgcttacaccacctgtctgtatgcctctggcaccacgcccgtgccccagctcccgctgctgctgatggccctgctgggcctgtgcacgctcgtgctgtgacctgccaggctcaccttcttcctggtaacgggtaacgggggcagcgcccaggatcacccagagctgggccttccaccatttcctccgcgcctgaggagtgaactgaaataggacaaccgaatcaggaagcgaagccccaggagctgcagccatccgtgatcgcgccactgcactccagcctgggtgacaaagccagactctctccaaaaacaaaccagaaacagaaaagaaatgacgacccaagacccccctacaagcatacttcttttgcgtattatgtttaactcacaaaacaaagctcatcatgcgtttg

SEQ ID NO: 1733 - DNA, 886 bp, Homo sapiens
  source 1..886: mol_type = genomic DNA; mol_type = genomic DNA
gtcagggacactgagaggtgggtgtgtgcatgccacatttagcctcgctgtttacagccagttcaagatgctgcccccacccccttaggcccgagggatcaggagctatgggaccagaggccctgtcatctttactgctgctgctcttggtggcaagtggagatgctgacatgaagggacattttgatcctgccaagtgccgctatgccctgggcatgcaggaccggaccatcccagacagtgacatctctgcttccagctcctggtcagattccactgccgcccgccacagcaggttggagagcagtgacggggatggggcctggtgccccgcagggtcggtgtttcccaaggaggaggagtacttgcaggtggatctacaacgactccacctggtggctctggtgggcacccagggacggcatgccgggggcctgggcaaggagttctcccggagctaccggctgcgttactcccgggatggtcgccgctggatgggctggaaggaccgctggggtcaggaggtgatctcaggcaatgaggaccctgagggagtggtgctgaaggaccttgggccccccatggttgcccgactggttcgcttctacccccgggctgaccgggtcatgagtgtctgtctgcgggtagagctctatggctgcctctggaggggtgagtggctcagcttcctgggaatctgtttcctgagcaggggactggagggtggggagtgtggagaatgggcatccaggatcccttctcctgctgggaagctgtcactctgaggagggggctagccagcattgtctcctccatgccaatgagccagtggagagatacaagaagggacctgaaacctgcccaggcctgatgcagggatggggga

SEQ ID NO: 1734 - DNA, 886 bp, Homo sapiens; identical to SEQ ID NO: 1712
  source 1..886: mol_type = genomic DNA; mol_type = genomic DNA

SEQ ID NO: 1735 - DNA, 568 bp, Homo sapiens
  source 1..568: mol_type = genomic DNA
aagtttggttcttgggggctagacaagtttcttccccggtggggcggctgaacactcttcccaagggcctatcccagtccccccagtgcctttggttgctggagggaagaacacaatggatctggtgctaaaaagatgccttcttcatttggctgtgataggtgctttgctggctgtgggggctacaaaagtacccagaaaccaggactggcttggtgtctcaaggcaactcagaaccaaagcctggaacaggcagctgtatccagagtggacagaagcccagagacttgactgctggagaggtggtcaagtgtccctcaaggtcagtaatgatgggcctacactgattggtgcaaatgcctccttctctattgccttgaacttccctggaagccaaaaggtattgccagatgggcaggttatctgggtcaacaataccatcatcaatgggagccaggtgtggggaggacagccagtgtatccccaggaaactgacgatgcctgcatcttccctgatggtggaccttgcccatctggctcttggtctcagaagagaagctttgtttat

SEQ ID NO: 1736 - DNA, 1446 bp, Homo sapiens
  source 1..1446: mol_type = genomic DNA; mol_type = genomic DNA
gtccgctccgtccgcccttagacctgttgcccagcatccctgcagttcgcggtacagtctctagtagagcgcgtgtatagaggcagagaggagtgaagtccacagttcctctcctccaagaggtagaaggggcgcggggaaacgacctggtatcggttttccgcttgctgatcaagagctccctttaatgccgcacgcaggccggcgcccctcactgataaacgattggggctgggcctcggcctggagggcgttcgtcctctcagtgccctcagctcgtaaaggaggaaaccgaggcgtggggttgggcgagaacccaggggtcctcctgcacccccgccgccgtgtgtctcgtgtccagcgctggctggagcgcctcagccctggcgcggtgtagtcgtgagctggaacttctgacactgccccttccttccccgtccagcctgccgaccatgcccgcgggcgtgcccatgtccacctacctgaaaatgttcgcagccagtctcctggccatgtgcgcaggggcagaagtggtgcacaggtactaccgaccggacctgacaatacctgaaattccaccaaagcgtggagaactcaaaacggagcttttgggactgaaagaaagaaaacacaaacctcaagtttctcaacaggaggaacttaaataactatgccaagaattctgtgaataatataagtcttaaatatgtatttcttaatttattgcatcaaactacttgtccttaagcacttagtctaatgctaactgcaagaggaggtgctcagtggatgtttagccgatacgttgaaatttaattacggtttgattgatatttcttgaaaactgccaaagcacatatcatcaaaccatttcatgaatatggtttggaagatgtttagtcttgaatataacgcgaaatagaatatttgtaagtctactatatgggttgtctttatttcatataaattaagaaattatttaaaactatgaactagtttcattaattgaatttgctaagtggagttatttctcattgctaaactgttttttttcaaattctagatctctgctaactttagtaaatgaacactaaagtggtgagctttgataatgcattttgtggatacaaaatcatcgcctcatcactttctagaatgaaaggctgggggcattgctcaccttttgcgtgaagaaaagacctgtcccttagagccagtttttgcttaaggggaggacagaccgtcgtcacccagtggaccacgtgaatgaatggatgcagtgcatgctttagaagcaccgcatacctccttttacaggtacagagtaagtggtctggctactgagggaaagagtcatgatttgaatccgagtcttctgtaagacaatgacttcatgaaggtgaaaaatcagttttatggttattaaagtaaaaatttaccttgggt

SEQ ID NO: 1737 - DNA, 720 bp, Homo sapiens; identical to SEQ ID NO: 814
  source 1..720: mol_type = genomic DNA; mol_type = genomic DNA

SEQ ID NO: 1738 - DNA, 720 bp, Homo sapiens; identical to SEQ ID NO: 814
  source 1..720: mol_type = genomic DNA; mol_type = genomic DNA

SEQ ID NO: 1739 - DNA, 1593 bp, Homo sapiens; identical to SEQ ID NO: 674
  source 1..1593: mol_type = genomic DNA; mol_type = genomic DNA

SEQ ID NO: 1740 - DNA, 2305 bp, Homo sapiens; identical to SEQ ID NO: 1383
  source 1..2305: mol_type = genomic DNA; mol_type = genomic DNA

SEQ ID NO: 1741 - DNA, 1593 bp, Homo sapiens
  source 1..1593: mol_type = genomic DNA; mol_type = genomic DNA
tctgaggccgtgtacctcaacgactccacctatgacggacataccgtgggcggactgcagtatgggggtctgggccagctggcagatggtgtggtggggctggatgactttaggaagagtcaggagctgcgggtctggccaggctatgactatgtgggatggagcaaccacagcttctccagtggctatgtggagatggagtttgagtttgaccggctgagggccttccaggctatgcaggtccactgtaacaacatgcacacgctgggagcccgtctgcctggcggggtggaatgtcgcttccggcgtggccctgccatggcctgggagggggagcccatgcgccacaacctagggggcaacctgggggaccccagagcccgggctgtctcagtgccccttggcggccgtgtggctcgctttctgcagtgccgcttcctctttgcggggccctggttactcttcagcgaaatctccttcatctctgatgtggtgaacaattcctctccggcactgggaggcaccttcccgccagccccctggtggccgcctggcccacctcccaccaacttcagcagcttggagctggagcccagaggccagcagcccgtggccaaggccgaggggagcccgaccgccatcctcatcggctgcctggtggccatcatcctgctcctgctgctcatcattgccctcatgctctggcggctgcactggcgcaggctcctcagcaaggtcctagagagccacccccgtaccaggagccccggcctcgtgggaatccgccccactctgctccctgtgtccccaatggctctgcgttgctgctctccaatccagcctaccgcctccttctggccacttacgcccgtccccctcgaggcccgggcccccccacacccgcctgggccaaacccaccaacacccaggggcgtcaccgggggcaacacctatgctgtgcctgcactgcccccaggggcagtcggggatgggccccccagagtggatttccctcgatctcgactccgcttcaaggagaagcttggcgagggccagtttggggaggtgcacctgtgtgaggtcgacagccctcaagatctggtcagtcttgatttcccccttaatgtgcgtaagggacaccctttgctggtagctgtcaagatcttacggccagatgccaccaagaatgccaggaatgatttcctgaaagaggtgaagatcatgtcgaggctcaaggacccaaacatcattcggctgctgggcgtgtgtgtgcaggacgaccccctctgcatgattactgactacatggagaacggcgacctcaaccagttcctcagtgcccaccagctggaggacaaggcagccgagggggcccctggggacgggcaggctgcgcaggggcccaccatcagctacccaatgctgctgcatgtggcagcccagatcgcctccggcatgcgctatctggccacactcaactttgtacatttttggggggagagacacagatttttacactaatatatggacctagcttgaggcaattttaatcccctgcactaggcaggtaataataaaggttgagttttccac

SEQ ID NO: 1742 - DNA, 2942 bp, Homo sapiens; identical to SEQ ID NO: 810
  source 1..2942: mol_type = genomic DNA; mol_type = genomic DNA

SEQ ID NO: 1743 - DNA, 3720 bp, Homo sapiens; identical to SEQ ID NO: 1374
  source 1..3720: mol_type = genomic DNA; mol_type = genomic DNA

SEQ ID NO: 1744 - DNA, 3949 bp, Homo sapiens; identical to SEQ ID NO: 830
  source 1..3949: mol_type = genomic DNA; mol_type = genomic DNA

SEQ ID NO: 1745 - DNA, 4013 bp, Homo sapiens
  source 1..4013: mol_type = genomic DNA; mol_type = genomic DNA
atgttgctgctgctgctactggcgccactcttcctccgccccccgggcgcgggcggggcgcagacccccaacgccacctcagaaggttgccagatcatacacccgccctgggaagggggcatcaggtaccggggcctgactcgggaccaggtgaaggctatcaacttcctgccagtggactatgagattgagtatgtgtgccggggggagcgcgaggtggtggggcccaaggtccgcaagtgcctggccaacggctcctggacagatatggacacacccagccgctgtgtgaatcgaacgccacactcagaacggcgcgcagtgtacatcggggcactgtttcccatgagcgggggctggccagggggccaggcctgccagcccgcggtggagatggcgctggaggacgtgaatagccgcagggacatcctgccggactatgagctcaagctcatccaccacgacagcaagtgtgatccaggccaagccaccaagtacctatatgagctgctctacaacgaccctatcaagatcatccttatgcctggctgcagctctgtctccacgctggtggctgaggctgctaggatgtggaacctcattgtgctttcctatggctccagctcaccagccctgtcaaaccggcagcgtttccccactttcttccgaacgcacccatcagccacactccacaaccctacccgcgtgaaactctttgaaaagtggggctggaagaagattgctaccatccagcagaccactgaggtcttcacttcgactctggacgacctggaggaacgagtgaaggaggctggaattgagattactttccgccagagtttcttctcagatccagctgtgcccgtcaaaaacctgaagcgccaggatgcccgaatcatcgtgggacttttctatgagactgaagcccggaaagttttttgtgaggtgtacaaggagcgtctctttgggaagaagtacgtctggttcctcattgggtggtatgctgacaattggttcaagatctacgacccttctatcaactgcacagtggatgagatgactgaggcggtggagggccacatcacaactgagattgtcatgctgaatcctgccaatacccgcagcatttccaacatgacatcccaggaatttgtggagaaactaaccaagcgactgaaaagacaccctgaggagacaggaggcttccaggaggcaccgctggcctatgatgccatctgggccttggcactggccctgaacaagacatctggaggaggcggccgttctggtgtgcgcctggaggacttcaactacaacaaccagaccattaccgaccaaatctaccgggcaatgaactcttcgtcctttgagggtgtctctggccatgtggtgtttgatgccagcggctctcggatggcatggacgcttatcgagcagcttcagggtggcagctacaagaagattggctactatgacagcaccaaggatgatctttcctggtccaaaacagataaatggattggagggtcccccccagctgaccagaccctggtcatcaagacattccgcttcctgtcacagaaactctttatctccgtctcagttctctccagcctgggcattgtcctagctgttgtctgtctgtcctttaacatctacaactcacatgtccgttatatccagaactcacagcccaacctgaacaacctgactgctgtgggctgctcactggctttagctgctgtcttccccctggggctcgatggttaccacattgggaggaaccagttccctttcgtctgccaggcccgcctctggctcctgggcctgggctttagtctgggctacggttccatgttcaccaagatttggtgggtccacacggtcttcacaaagaaggaagaaaagaaggagtggaggaagactctggaaccctggaagctgtatgccacagtgggcctgctggtgggcatggatgtcctcactctcgccatctggcagatcgtggaccctctgcaccggaccattgagacatttgccaaggaggaacctaaggaagatattgacgtctctattctgccccagctggagcattgcagctccaggaagatgaatacatggcttggcattttctatggttacaaggggctgctgctgctgctgggaatcttccttgcttatgagaccaagagtgtgtccactgagaagatcaatgatcaccgggctgtgggcatggctatctacaatgtggcagtcctgtgcctcatcactgctcctgtcaccatgattctgtccagccagcaggatgcagcctttgcctttgcctctcttgccatagttttctcctcctatatcactcttgttgtgctctttgtgcccaagatgcgcaggctgatcacccgaggggaatggcagtcggaggcgcaggacaccatgaagacagggtcatcgaccaacaacaacgaggaggagaagtcccggctgttggagaaggagaaccgtgaactggaaaagatcattgctgagaaagaggagcgtgtctctgaactgcgccatcaactccagtctcggcagcagctccgctcccggcgccacccaccgacacccccagaaccctctgggggcctgcccaggggaccccctgagccccccgaccggcttagctgtgatgggagtcgagtgcatttgctttataagtgagggtagggtgagggaggacaggccagtagggggagggaaagggagaggggaagggcaggggactcaggaagcagggggtccccatccccagctgggaagaacatgctatccaatctcatctcttgtaaatacatgtccccctgtgagttctgggctgatttgggtctctcatacctctgggaaacagacctttttctctcttactgcttcatgtaattttgtatcacctcttcacaatttagttcgtacctggcttgaagctgctcactgctcacacgctgcctcctcagcagcctcactgcatctttctcttcccatgcaacaccctcttctagttaccacggcaacccctgcagctcctctgcctttgtgctctgttcctgtccagcaggggtctcccaacaagtgctctttccaccccaaaggggcctctccttttctccactgtcataatctctttccatcttacttgcccttccatactttctcacatgtggctccccctgaattttgcttcctttgggagctcattcttttcgccaaggctcacatgctccttgcctctgctctgtgcactcacgctcagcacacatgcatcctcccctctcctgcgtgtgcccactgaacatgctcatgtgtacacacgcttttcccgtatgctttcttcatgttcagtcacatgtgctctcgggtgccctgcattcacagctacgtgtgcccctctcatggtcatgggtctgcccttgagcgtgtttgggtaggcatgtgcaatttgtctagcatgctgagtcatgtctttcctatttgcacacgtccatgtttatccatgtactttccctgtgtaccctccatgtaccttgtgtactttcttcccttaaatcatggtattcttctgacagagccatatgtaccctaccctgcacattgttatgcacttttccccaattcatgtttggtggggccatccacaccctctccttgtcacagaatctccatttctgctcagattccccccatctccattgcattcatgtactaccctcagtctacactcacaatcatcttctcccaagactgctcccttttgttttgtgtttttttgaggggaattaaggaaaaataagtgggggcaggtttggagagctgcttccagtggatagttgatgagaatcctgaccaaaggaaggcacccttgactgttgggatagacagatggacctatggggtgggaggtggtgtccctttcacactgtggtgtctcttggggaaggatctccccgaatctcaataaaccagtgaacagtgtgactcgg

SEQ ID NO: 1746 - DNA, 720 bp, Homo sapiens; identical to SEQ ID NO: 814
  source 1..720: mol_type = genomic DNA; mol_type = genomic DNA

SEQ ID NO: 1747 - DNA, 1347 bp, Homo sapiens
  source 1..1347: mol_type = genomic DNA; mol_type = genomic DNA
tctgaggccgtgtacctcaacgactccacctatgacggacataccgtgggcggactgcagtatgggggtctgggccagctggcagatggtgtggtggggctggatgactttaggaagagtcaggagctgcgggtctggccaggctatgactatgtgggatggagcaaccacagcttctccagtggctatgtggagatggagtttgagtttgaccggctgagggccttccaggctatgcaggtccactgtaacaacatgcacacgctgggagcccgtctgcctggcggggtggaatgtcgcttccggcgtggccctgccatggcctgggagggggagcccatgcgccacaacctagggggcaacctgggggaccccagagcccgggctgtctcagtgccccttggcggccgtgtggctcgctttctgcagtgccgcttcctctttgcggggccctggttactcttcagcgaaatctccttcatctctgatgtggtgaacaattcctctccggcactgggaggcaccttcccgccagccccctggtggccgcctggcccacctcccaccaacttcagcagcttggagctggagcccagaggccagcagcccgtggccaaggccgaggggagcccgaccgccatcctcatcggctgcctggtggccatcatcctgctcctgctgctcatcattgccctcatgctctggcggctgcactggcgcaggctcctcagcaaggtcctagagagccacccccgtaccaggagccccggcctcgtgggaatccgccccactccgctccctgtgtccccaatggctctggtgcacctgtgtgaggtcgacagccctcaagatctggtcagtcttgatttcccccttaatgtgcgtaagggacaccctttgctggtagctgtcaagatcttacggccagatgccaccaagaatgccaggaatgatttcctgaaagaggtgaagatcatgtcgaggctcaaggaccccaacatcattcggctgctgggcgtgtgtgtgcaggacgaccccctctgcatgattactgactacatggagaacggcgacctcaaccagttcctcagtgcccaccagctggaggacaaggcagccgagggggcccctggggacgggcaggctgcgcaggggcccaccatcagctacccaatgctgctgcatgtggcagcccagatcgcctccggcatgcgctatctggccacactcaactttgtacatttttggggggagagacacagatttttacactaatatatggacctagcttgaggcaattttaatcccctgcactaggcaggtaataataaaggttgagttttccac

SEQ ID NO: 1748 - DNA, 1452 bp, Homo sapiens
  source 1..1452: mol_type = genomic DNA; mol_type = genomic DNA
tcatgactacacagttaagggtcgtccatctgcttccccttctcctagcctgctttgtgcaaacaagtcccaagcaggagaagatgaagatggattgccacaaagacgagaaaggcaccatctatgactatgaggccatcgcacttaataagaatgaatatgtttccttcaagcagtatgtgggcaagcacatcctcttcgtcaacgtggccacctactgtggtctgacagcgcaatatcctgaactaaatgcactccaggaggagctgaagccctatggtctagttgtgttgggctttccctgcaaccaatttggaaagcaagaaccaggagataacaaagagattcttcctgggctcaagtatgtccgtccagggggaggatttgtacctagtttccagctttttgagaaaggggatgtgaatggtgaaaaagaacagaaagtcttcagtttcttgaagcactcctgtcctcatccctctgagattttgggcacattcaaatctatatcctgggaccctgtaaaggtccatgacatccgttggaactttgaaaagttcctggtggggcctgatggaatccctgtcatgcgctggtcccaccgggctacggtcagctcagtcaagacagacatcctggcgtacttgaagcaattcaaaaccaaataggaaggtggagttaagggcaggagcaaccctacttctcacctaatgacttgctctccccacccctccaaaaaaaaggaatacccatcttctcaccacactctcttcctgcatgggctccacctgagtaaatcaccgccacatactgccagaattcccactctccacaaactagatttatatttggaaggctactgctcttttgcctctcaagagtatgtgggtgaagactgaaacaaatggaaacctaaaatccccagacctctgttacaggttgaatcattcatatccaccagagggaaatcatccttccacgacaatggttcagtcggccatcacatcctgaagaacattcctagacattctgactcttccatctctctctaccctggaggtgtagaaatagcaatggggtcacagtcacacaatttaggttccacttcataacattttttgtctcctaggacaaacgtgtatcatcagtttccaactgttttggctcagttttcatccatgacacctccccctaccagccattctcctgtgggagcaagaacattgcttcaaaagaagagagggcatctccatgcttgtgggacccaaaacctatctctggccctacaaaagttttcctaattgtctgatctttagtgcattcaggttatggcacctggagaggaatgccctttatcttttgaaggatgggatttcccatctcaaccctggattcctcaccttcagaacgagccctgccactgtctccaataaaatgttttctgcagcatcg

SEQ ID NO: 1749 - DNA, 720 bp, Homo sapiens; identical to SEQ ID NO: 1729
  source 1..720: mol_type = genomic DNA; mol_type = genomic DNA

SEQ ID NO: 1750 - DNA, 4385 bp, Homo sapiens; identical to SEQ ID NO: 837
  source 1..4385: mol_type = genomic DNA; mol_type = genomic DNA

SEQ ID NO: 1751 - DNA, 4385 bp, Homo sapiens
  source 1..4385: mol_type = genomic DNA; mol_type = genomic DNA
ccctctcttccccccgccctgccttcccttgcaccctccttcttccctccgcccgggagctctccctggtccccggcgccgcctccttccctcccggctccccgctccccgctcccgtggctgccgccgccccggggaagaagagacaggggtggggtttgggggaagcgagagaggaggggagagaccctggccaggctggagcctggattcgaggggaggagggacgggaggaggagaaaggtggaggagaagggaggggggagcggggaggagcggccgggcctggggccttgaggcccggggagagccggggagccgggcccgcgcgccgagatgttgctgctgctgctactggcgccactcttcctccgccccccgggcgcgggcggggcgcagacccccaacgccacctcagaaggttgccagatcatacacccgccctgggaagggggcatcaggtaccggggcctgactcgggaccaggtgaaggctatcaacttcctgccagtggactatgagattgagtatgtgtgccggggggagcgcgaggtggtggggcccaaggtccgcaagtgcctggccaacggctcctggacagatatggacacacccagccgctgtgtccgaatctgctccaagtcttatttgaccctggaaaatgggaaggttttcctgacgggtggggacctcccagctctggacggagcccgggtggatttccggtgtgaccccgacttccatctggtgggcagctcccggagcatctgtagtcagggccagtggagcacccccaagccccactgccaggtgaatcgaacgccacactcagaacggcgcgcagtgtacatcggggcactgtttcccatgagcgggggctggccagggggccaggcctgccagcccgcggtggagatggcgctggaggacgtgaatagccgcagggacatcctgccggactatgagctcaagctcatccaccacgacagcaagtgtgatccaggccaagccaccaagtacctatatgagctgctctacaacgaccctatcaagatcatccttatgcctggctgcagctctgtctccacgctggtggctgaggctgctaggatgtggaacctcattgtgctttcctatggctccagctcaccagccctgtcaaaccggcagcgtttccccactttcttccgaacgcacccatcagccacactccacaaccctacccgcgtgaaactctttgaaaagtggggctggaagaagattgctaccatccagcagaccactgaggtcttcacttcgactctggacgacctggaggaacgagtgaaggaggctggaattgagattactttccgccagagtttcttctcagatccagctgtgcccgtcaaaaacctgaagcgccaggatgcccgaatcatcgtgggacttttctatgagactgaagcccggaaagttttttgtgaggtgtacaaggagcgtctctttgggaagaagtacgtctggttcctcattgggtggtatgctgacaattggttcaagatctacgacccttctatcaactgcacagtggatgagatgactgaggcggtggagggccacatcacaactgagattgtcatgctgaatcctgccaatacccgcagcatttccaacatgacatcccaggaatttgtggagaaactaaccaagcgactgaaaagacaccctgaggagacaggaggcttccaggaggcaccgctggcctatgatgccatctgggccttggcactggccctgaacaagacatctggaggaggcggccgttctggtgtgcgcctggaggacttcaactacaacaaccagaccattaccgaccaaatctaccgggcaatgaactcttcgtcctttgagggtgtctctggccatgtggtgtttgatgccagcggctctcggatggcatggacgcttatcgagcagcttcagggtggcagctacaagaagattggctactatgacagcaccaaggatgatctttcctggtccaaaacagataaatggattgttatatccagaactcacagcccaacctgaacaacctgactgctgtgggctgctcactggctttagctgctgtcttccccctggggctcgatggttaccacattgggaggaaccagtttcctttcgtctgccaggcccgcctctggctcctgggcctgggctttagtctgggctacggttccatgttcaccaagatttggtgggtccacacggtcttcacaaagaaggaagaaaagaaggagtggaggaagactctggaaccctggaagctgtatgccacagtgggcctgctggtgggcatggatgtcctcactctcgccatctggcagatcgtggaccctctgcaccggaccattgagacatttgccaaggaggaacctaaggaagatattgacgtctctattctgccccagctggagcattgcagctccaggaagatgaatacatggcttggcattttctatggttacaaggggctgctgctgctgctgggaatcttccttgcttatgagaccaagagtgtgtccactgagaagatcaatgatcaccgggctgtgggcatggctatctacaatgtggcagtcctgtgcctcatcactgctcctgtcaccatgattctgtccagccagcaggatgcagcctttgcctttgcctctcttgccatagttttctcctcctatatcactcttgttgtgctctttgtgcccaagatgcgcaggctgatcacccgaggggaatggcagtcggaggcgcaggacaccatgaagacagggtcatcgaccaacaacaacgaggaggagaagtcccggctgttggagaaggagaaccgtgaactggaaaagatcattgctgagaaagaggagcgtgtctctgaactgcgccatcaactccagtctcggcagcagctccgctcccggcgccacccaccgacacccccagaaccctctgggggcctgcccaggggaccccctgagccccccgaccggcttagctgtgatgggagtcgagtgcatttgctttataagtgagggtagggtgagggaggacaggccagtagggggagggaaagggagaggggaagggcaggggactcaggaagcagggggtccccatccccagctgggaagaacatgctatccaatctcatctcttgtaaatacatgtccccctgtgagttctgggctgatttgggtctctcatacctctgggaaacagacctttttctctcttactgcttcatgtaattttgtatcacctcttcacaatttagttcgtacctggcttgaagctgctcactgctcacacactgcctcctcagcagcctcactgcatctttctcttcccatgcaacaccctcttctagttaccacggcaacccctgcagctcctctgcctttgtgctctgttcctgtccagcaggggtctcccaacaagtgctctttccaccccaaaggggcctctccttttctccactgtcataatctctttccatcttacttgcccttctatactttctcacatgtggctccccctgaattttgcttcctttgggagctcattcttttcgccaaggctcacatgctccttgcctctgctctgtgcactcacgctcagcacacatgcatcctcccctctcctgcgtgtgcccactgaacatgctcatgtgtacacacgcttttcccgtatgctttcttcatgttcagtcacatgtgctctcgggtgccctgcattcacagctacgtgtgcccctctcatggtcatgggtctgcccttgagcgtgtttgggtaggcatgtgcaatttgtctagcatgctgagtcatgtctttcctatttgcacacgtccatgtttatccatgtactttccctgtgtaccctccatgtaccttgtgtactttcttcccttaaatcatggtattcttctgacagagccatatgtaccctaccctgcacattgttatgcacttttccccaattcatgtttggtggggccatccacaccctctccttgtcacagaatctccatttctgctcagattccccccatctccattgcattcatgtactaccctcagtctacactcacaatcatcttctcccaagactgctcccttttgttttgtgtttttttgaggggaattaaggaaaaataagtgggggcaggtttggagagctgcttccagtggatagttgatgagaatcctgaccaaaggaaggcacccttgactgttgggatagacagatggacctatggggtgggaggtggtgtccctttcacactgtggtgtctcttggggaaggatctccccgaatctcaataaaccagtgaacagtgtgactcggc

SEQ ID NO: 1752 - DNA, 886 bp, Homo sapiens; identical to SEQ ID NO: 1712
  source 1..886: mol_type = genomic DNA; mol_type = genomic DNA

SEQ ID NO: 1753 - DNA, 2309 bp, Homo sapiens
  source 1..2309: mol_type = genomic DNA; mol_type = genomic DNA
atccgccccctgcctcatccaggcttcgccccagtcagtctccggcagcttctcgcggcttcgcaagccccttcccgtgatgccccgcgcctggctgtcgcggttgccgggcaacgcgctgtccatgtcgcgggcctcgctgggactccctgggagatgaggccgcgaggtctcccgccgctcctggtggtgctcctgggctgctgggcctccgtgagcgcccagaccgatgccaccccggcggtgacgacagagggcctcaactccaccgaggcagccctggccaccttcggaactttcccgtcgaccaggccccccgggactcccagggctccagggccctcctccggccccaggcctaccccagtcacggacgttgctgttctctgtgtctgtgacttatccccagcacagtgtgacatcaactgctgctgtgatcccgactgcagctccgtggatttcagtgtcttttctgcctgctcagttccagttgtcacgggcgacagccagttttgtagtcaaaaagcagtcatctattcattgaattttacagcaaacccacctcaaagagtatttgaacttgttgaccagattaatccatctattttctgcattcatattacaaactataaacctgcattatcctttattaatccagaagtacctgatgaaaacaattttgatacattgatgaaaacatctgatggttttacattgaatgctgaatcatatgtttccttcacaaccaaactggatattcctactgctgctaaatatgagtatggggttcctctgcagacttcagattcgtttctgagatttccttcgtccctgacatcatctctgtgcactgataataaccctgcagcgtttctggtgaaccaggctgttaagtgcaccagaaaaataaatttagaacagtgtgaagaaattgaagccctcagcatggctttttacagcagcccggaaattctgagggtacctgattcaagaaaaaaggtccctatcactgttcagtccatcgtcattcagtctctaaataaaacgctcacccgacgggaggacactgatgtgctgcagccgactctcgtcaacgctggacactttagcctttgcgtgaatgttgttcttgaggtaaagtacagcctcacatacacagatgcaggtgaagtcaccaaagctgatctctcattcgttctggggacagttagcagcgtagtggtcccactgcagcaaaagtttgaaattcattttcttcaggaaaatacccagccagtccctctcagtggaaaccctggttatgtcgtggggctcccattagctgctggattccagcctcataaggggtctgggattattcagaccacaaatagatatggacagcttactattcttcatagcacaactgagcaagactgcttagcactggagggggtccggaccccagtattatttggttacactatgcaatctggctgtaaactaagactgactggagctctcccgtgtcagctcgtagcacagaaggtgaagagcctgctgtggggccagggcttcccagattacgtggccccttttggaaattcccaggcccaggacatgctggactgggtgcccatccacttcatcacccagtcattcaacaggaaggattcctgccagctcccaggggctttggttatagaagtgaagtggactaaatacggatccctgctgaatccacaggccaaaatagtcaatgtaactgcaaatctaatttcatcctcctttcctgaggccaactcaggaaatgaaaggacgattcttatttccactgcggttacttttgtggatgtgtctgcacctgcagaggcaggcttcagagctccaccagccatcaatgccaggctgccctttaacttcttcttcccgtttgtttgacaatgctcagatgcatcagttccttaatatacacgtgaaatttgaaaactgtacattcggtgagattaaattttatatacaactagcaattgtccagctttgttgctcattttcaattaaggctaaagtgttcaacatgagaaaatgtgatacatttgatacagtgtggggtgggagtggatgggcagctcttggtggtactggaccttccacaaggctgtgtccacccagaatccatgctggcaggagggaggcagaggtatcaaaccaaacctctcaccaagcggcccaggaggggcagctgttcctctcgtgacagcacaggcccatgagacagtgtcttctttttgaggggagctggtccgggtctagttcacttcaccaagaag

SEQ ID NO: 1754 - DNA, 2305 bp, Homo sapiens; identical to SEQ ID NO: 1383
  source 1..2305: mol_type = genomic DNA; mol_type = genomic DNA

SEQ ID NO: 1755 - DNA, 1334 bp, Homo sapiens
  source 1..1334: mol_type = genomic DNA; mol_type = genomic DNA
tcatgactacacagttaagggtcgtccatctgcttccccttctcctagcctgctttgtgcaaacaagtcccaagcaggagaagatgaagatggattgccacaaagacgagaaaggcaccatctatgactatgaggccatcgcacttaataagaatgaatatgtttccttcaagcagtatgtgggcaagcacatcctcttcgtcaacgtggccacctactgtggtctgacagcgcaatatcctggtatgtccgtccagggggaggatttgtacctagtttccagctttttgagaaaggggatgtgaatggtgaaaaagaacagaaagtcttcagtttcttgaagcactcctgtcctcatccctctgagattttgggcacattcaaatctatatcctgggaccctgtaaaggtccatgacatccgttggaactttgaaaagttcctggtggggcctgatggaatccctgtcatgcgctggtcccaccgggctacggtcagctcagtcaagacagacatcctggcgtacttgaagcaattcaaaaccaaataggaaggtggagttaagggcaggagcaaccctacttctcacctaatgacttgctctccccacccctccaaaaaaaaggaatacccatcttctcaccacactctcttcctgcatgggctccacctgagtaaatcaccgccacatactgccagaattcccactctccacaaactagatttatatttggaaggctactgctcttttgcctctcaagagtatgtgggtgaagactgaaacaaatggaaacctaaaatccccagacctctgttacaggttgaatcattcatatccaccagagggaaatcatccttccacgacaatggttcagtcggccatcacatcctgaagaacattcctagacattctgactcttccatctctctctaccctggaggtgtagaaatagcaatggggtcacagtcacacaatttaggttccacttcataacattttttgtctcctaggacaaacgtgtatcatcagtttccaactgttttggctcagttttcatccatgacacctccccctaccagccattctcctgtgggagcaagaacattgcttcaaaagaagagagggcatctccatgcttgtgggacccaaaacctatctctggccctacaaaagttttcctaattgtctgatctttagtgcattcaggttatggcacctggagaggaatgccctttatcttttgaaggatgggatttcccatctcaaccctggattcctcaccttcagaacgagccctgccactgtctccaataaaatgttttctgcagcatcg

SEQ ID NO: 1756 - DNA, 790 bp, Homo sapiens
  source 1..790: mol_type = genomic DNA; mol_type = genomic DNA
acagccattggtcaggggcaaataccactagctctgcatcctcagtcactttgtgccatttcatcaggtcagagccaaagcttgaaaaatgaagacattagcaggacttgttctgggacttgtcatctttgatgctgctgtgactgccccaactctagagtccatcaactatgactcagaaacctatgatgccaccttagaagacctggataatttgtacaactatgaaaacatacctgttgataaagttgagattgaaatagccacagtgatgccttcagggaacagagagctcctcactccacccccacagcctgagaaggcccaggaagaggaagaggaggaggaatctactcccaggctgattgatggctcttctccccaggagcctgaattcacaggggttctggggccacacacaaatgaagactttccaacctgtcttttgtgtacttgtataagtaccaccgtgtactgtgatgaccatgaacttgatgctattcctccgctgccaaagaacaccgcttatttctattcccgctttaacagaattaaaaagatcaacaaaaatgactttgcaagcctaagtgatttaaaaaggattgatctgacatcaaatttaatatctgagattgatgaagatgcattccgaaaactgcctcaacttcgagagcttgtcctgcgtgacaacaaaataaggcagctcccagaattgccaaccactttgacatttattgatattagcaacaatagacttggaaggaaagggataaagcaagaagcatttaaa

SEQ ID NO: 1757 - DNA, 2942 bp, Homo sapiens; identical to SEQ ID NO: 810
  source 1..2942: mol_type = genomic DNA; mol_type = genomic DNA

SEQ ID NO: 1758 - DNA, 3949 bp, Homo sapiens; identical to SEQ ID NO: 830
  source 1..3949: mol_type = genomic DNA; mol_type = genomic DNA

SEQ ID NO: 1759 - DNA, 4385 bp, Homo sapiens; identical to SEQ ID NO: 837
  source 1..4385: mol_type = genomic DNA; mol_type = genomic DNA

SEQ ID NO: 1760 - DNA, 1347 bp, Homo sapiens; identical to SEQ ID NO: 1414
  source 1..1347: mol_type = genomic DNA; mol_type = genomic DNA

SEQ ID NO: 1761 - DNA, 2305 bp, Homo sapiens; identical to SEQ ID NO: 1383
  source 1..2305: mol_type = genomic DNA; mol_type = genomic DNA

SEQ ID NO: 1762 - DNA, 5268 bp, Homo sapiens
  source 1..5268: mol_type = genomic DNA; mol_type = genomic DNA
gacagacagacggatctaacctctcttggatcctccagccatgaggctgctctgggggctgatctgggcatccagcttcttcaccttatctctgcagaagcccaggttgctcttgttctctccttctgtggttcatctgggggtccccctatcggtgggggtgcagctccaggatgtgccccgaggacaggtagtgaaaggatcagtgttcctgagaaacccatctcgtaataatgtcccctgctccccaaaggtggacttcacccttagctcagaaagagacttcgcactcctcagtctccaggtgcccttgaaagatgcgaagagctgtggcctccatcaactcctcagaggccctgaggtccagctggtggcccattcgccatggctaaaggactctctgtccagaacgacaaacatccagggtatcaacctgctcttctcctctcgccgggggcacctctttttgcagacggaccagcccatttacaaccctggccagcgggttcggtaccgggtctttgctctggatcagaagatgcgcccgagcactgacaccatcacagtcatggtggagaactctcacggcctccgcgtgcggaagaaggaggtgtacatgccctcgtccatcttccaggatgactttgtgatcccagacatctcagagccagggacctggaagatctcagcccgattctcagatggcctggaatccaacagcagcacccagtttgaggtgaagaaatatgtccttcccaactttgaggtgaagatcacccctggaaagccctacatcctgacggtgccaggccatcttgatgaaatgcagttagacatccaggccaggtacatctatgggaagccagtgcagggggtggcatatgtgcgctttgggctcctagatgaggatggtaagaagactttctttcgggggctggagagtcagaccaagctggtgaatggacagagccacatttccctctcaaaggcagagttccaggacgccctggagaagctgaatatgggcattactgacctccaggggctgcgcctctacgttgctgcagccatcattgagtatccaggtggggagatggaggaggcagagctcacatcctggtattttgtgtcatctcccttctccttggatcttagcaagaccaagcgacaccttgtgcctggggcccccttcctgctgcaggccttggtccgtgagatgtcaggctccccagcttctggcattcctgtcaaagtttctgccacggtgtcttctcctgggtctgttcctgaagtccaggacattcagcaaaacacagacgggagcggccaagtcagcattccaataattatccctcagaccatctcagagctgcagctctcagtatctgcaggctccccacatccagcgatagccaggctcactgtggcagccccaccttcaggaggccccgggtttctgtctattgagcggccggattctcgacctcctcgtgttggggacactctgaacctgaacttgcgagccgtgggcagtggggccaccttttctcattactactacatgatcctatcccgagggcagatcgtgttcatgaatcgagagcccaagaggaccctgacctcggtctcggtgtttgtggaccatcacctggcaccctccttctactttgtggccttctactaccatggagaccacccagtggccaactccctgcgagtggatgtccaggctggggcctgcgagggcaagctggagctcagcgtggacggtgccaagcagtaccggaacggggagtccgtgaagctccacttagaaaccgactccctagccctggtggcgctgggagccttggacacagctctgtatgctgcaggcagcaagtcccacaagcccctcaacatgggcaaggtctttgaagctatgaacagctatgacctcggctgtggtcctgggggtggggacagtgcccttcaggtgttccaggcagcgggcctggccttttctgatggagaccagtggaccttatccagaaagagactaagctgtcccaaggagaagacaacccggaaaaagagaaacgtgaacttccaaaaggcgattaatgagaaattgggtcagtatgcttccccgacagccaagcgctgctgccaggatggggtgacacgtctgcccatgatgcgttcctgcgagcagcgggcagcccgcgtgcagcagccggactgccgggagcccttcctgtcctgctgccaatttgctgagagtctgcgcaagaagagcagggacaagggccaggcgggcctccaacgagccctggagatcctgcaggaggaggacctgattgatgaggatgacattcccgtgcgcagcttcttcccagagaactggctctggagagtggaaacagtggaccgctttcaaatattgacactgtggctccccgactctctgaccacgtgggagatccatggcctgagcctgtccaaaaccaaaggcctatgtgtggccaccccagtccagctccgggtgttccgcgagttccacctgcacctccgcctgcccatgtctgtccgccgctttgagcagctggagctgcggcctgtcctctataactacctggataaaaacctgactgtgagcgtccacgtgtccccagtggaggggctgtgcctggctgggggcggagggctggcccagcaggtgctggtgcctgcgggctctgcccggcctgttgccttctctgtggtgcccacggcagccgccgctgtgtctctgaaggtggtggctcgagggtccttcgaattccctgtgggagatgcggtgtccaaggttctgcagattgagaaggaaggggccatccatagagaggagctggtctatgaactcaaccccttggaccaccgaggccggaccttggaaatacctggcaactctgatcccaatatgatccctgatggggactttaacagctacgtcagggttacagcctcagatccattggacactttaggctctgagggggccttgtcaccaggaggcgtggcctccctcttgaggcttcctcgaggctgtggggagcaaaccatgatctacttggctccgacactggctgcttcccgctacctggacaagacagagcagtggagcacactgcctcccgagaccaaggaccacgccgtggatctgatccagaaaggctacatgcggatccagcagtttcggaaggcggatggttcctatgcggcttggttgtcacggggcagcagcacctggctcacagcctttgtgttgaaggtcctgagtttggcccaggagcaggtaggaggctcgcctgagaaactgcaggagacatctaactggcttctgtcccagcagcaggctgacggctcgttccaggacctctctccagtgatacataggagcatgcaggggggtttggtgggcaatgatgagactgtggcactcacagcctttgtgaccatcgcccttcatcatgggctggccgtcttccaggatgagggtgcagagccattgaagcagagagtggaagcctccatctcaaaggcaagctcatttttgggggagaaagcaagtgctgggctcctgggtgcccacgcagctgccatcacggcctatgccctgacactgaccaaggcccctgcggacctgcggggtgttgcccacaacaacctcatggcaatggcccaggagactggagataacctgtactggggctcagtcactggttctcagagcaatgccgtgtcgcccaccccagctcctcgcaacccatccgaccccatgccccaggccccagccctgtggattgaaaccacagcctacgccctgctgcacctcctgcttcacgagggcaaagcagagatggcagaccaggctgcggcctggctcacccgtcagggcagcttccaagggggattccgcagtacccaagacacggtgattgccctggatgccctgtctgcctactggattgcctcccacaccactgaggagaggggtctcaatgtgactctcagctccacaggccggaatgggttcaagtcccacgcgctgcagctgaacaaccgccagattcgcggcctggaggaggagctgcagttttccttgggcagcaagatcaatgtgaaggtgggaggaaacagcaaaggaaccctgaaggtccttcgtacctacaatgtcctggacatgaagaacacgacctgccaggacctacagatagaagtgacagtcaaaggccacgtcgagtacacgatggaagcaaacgaggactatgaggactatgagtacgatgagcttccagccaaggatgacccagatgcccctctgcagcccgtgacacccctgcagctgtttgagggtcggaggaaccgccgcaggagggaggcgcccaagctgacctccctctctgaccgttacgtgagtcactttgagaccgaggggccccacgtcctgctgtattttgactcggtccccacctcccgggagtgcgtgggctttgaggctgtgcaggaagtgccggtggggctggtgcagccggccagcgcaaccctgtacgactactacaaccccgagcgcagatgttctgtgttttacggggcaccaagtaagagcagactcttggccaccttgtgttctgctgaagtctgccagtgtgctgaggggaagtgccctcgccagcgtcgcgccctggagcggggtctgcaggacgaggatggctacaggatgaagtttgcctgctactacccccgtgtggagtacggcttccaggttaaggttctccgagaagacagcagagctgctttccgcctctttgagaccaagatcacccaagtcctgcacttcaccaaggatgtcaaggccgctgctaatcagatgcgcaacttcctggttcgagcctcctgccgccttcgcttggaacctgggaaagaatatttgatcatgggtctagatggggccacctatgacctcgagggacacccccagtacctgctggactcgaatagctggatcgaggagatgccctctgaacgcctgtgccggagcacccgccagcgggcagcctgtgcccagctcaacgacttcctccaggagtatggcactcaggggtgccaggtgtgagggctgccctcccacctccgctgggaggaacctgaacctgggaaccatgaagctggaagcactgctgtgtccgctttcatgaacacagcctgggaccagggcatattaaaggcttttggcagcaaagtgtc

SEQ ID NO: 1763 - DNA, 1123 bp, Homo sapiens
  source 1..1123: mol_type = genomic DNA; mol_type = genomic DNA
cgtctgtagagatatcatgaacttcaacttagctttggtactttcttccctgaagacagagggcagaactctgagttccagaaccattttcaactgtattggggaccaatcacttgactctattcttgtctctctgacagatgacgctacactctcctctgaataatggacaccatttctaaaactgaatcctgctactaaaataattcagatgatatatttttccaattctacaatcttgctttgttttatttagttgttttctctctctcttcccagttttccagagactggagctaaactgggctttcaacatcatcatgaagtttatcctcctctgggctctcttgaatctgactgttgctttggcctttaatccagattacacagtcagctccactcccccttacttggtctatttgaaatctgactacttgccctgcgctggagtcctgatccacccgctttgggtgatcacagctgcacactgcaatttaccaaagcttcgggtgatattgggggttacaatcccagcagactctaatgaaaagcatctgcaagtgattggctatgagaagatgattcatcatccacacttctcagtcacttctattgatcatgacatcatgctaatcaagctgaaaacagaggctgaactcaatgactatgtgaaattagccaacctgccctaccaaactatctctgaaaataccatgtgctctgtctctacctggagctacaatgtgtgtgatatctacaaagagcccgattcactgcaaactgtgaacatctctgtaatctccaagcctcagtgtcgcgatgcctataaaacctacaacatcacggaaaatatgctgtgtgtgggcattgtgccaggaaggaggcagccctgcaaggaagtttctgctgccccggcaatctgcaatgggatgcttcaaggaatcctgtcttttgcggatggatgtgttttgagagccgatgttggcatctatgccaaaattttttactatataccctggattgaaaatgtaatccaaaataactgagctgtggcagttgtggaccatatgacacagcttgtccccatcgttcacctttagaattaaatataaattaactcctc

SEQ ID NO: 1764 - DNA, 3720 bp, Homo sapiens
  source 1..3720: mol_type = genomic DNA; mol_type = genomic DNA
gtcttcccctcgtgggccctgagcgggactgcagccagccccctggggagccagctttggaggcccccgacagctgctctcgggagccgcctcccgacacccgagccccgccggcgcctcccgctcccggctcccggctcctggctccctccgcctcccccgcccctcgccccgccgccgaagaggccccgctcccgggtcggacgcctgggtctgccgggaagagcgatgagaggtgtctgaaggtggctattcactgagcgatggggttggacttgaaggaatgccaagagatgctgcccccacccccttaggcccgagggatcaggagctatgggaccagaggccctgtcatctttactgctgctgctcttggtggcaagtggagatgctgacatgaagggacattttgatcctgccaagtgccgctatgccctgggcatgcaggaccggaccatcccagacagtgacatctctgcttccagctcctggtcagattccactgccgcccgccacagcaggttggagagcagtgacggggatggggcctggtgccccgcagggtcggtgtttcccaaggaggaggagtacttgcaggtggatctacaacgactgcacctggtggctctggtgggcacccagggacggcatgccgggggcctgggcaaggagttctcccggagctaccggctgcgttactcccgggatggtcgccgctggatgggctggaaggaccgctggggtcaggaggtgatctcaggcaatgaggaccctgagggagtggtgctgaaggaccttgggccccccatggttgcccgactggttcgcttctacccccgggctgaccgggtcatgagcgtctgtctgcgggtagagctctatggctgcctctggagggactgcagtatgggggtctgggccagctggcagatggtgtggtggggctggatgactttaggaagagtcaggagctgcgggtctggccaggctatgactatgtgggatggagcaaccacagcttctccagtggctatgtggagatggagtttgagtttgaccggctgagggccttccaggctatgcaggtccactgtaacaacatgcacacgctgggagcccgtctgcctggcggggtggaatgtcgcttccggcgtggccctgccatggcctgggagggggagcccatgcgccacaacctagggggcaacctgggggaccccagagcccgggctgtctcagtgccccttggcggccgtgtggctcgctttctgcagtgccgcttcctctttgcggggccctggttactcttcagcgaaatctccttcatctctgatgtggtgaacaattcctctccggcactgggaggcaccttcccgccagccccctggtggccgcctggcccacctcccaccaacttcagcagcttggagctggagcccagaggccagcagcccgtggccaaggccgaggggagcccgaccgccatcctcatcggctgcctggtggccatcatcctgctcctgctgctcatcattgccctcatgctctggcggctgcactggcgcaggctcctcagcaaggctgaacggagggtgttggaagaggagctgacggttcacctctctgtccctggggacactatcctcatcaacaaccgcccaggtcctagagagccacccccgtaccaggagccccggcctcgtgggaatccgccccactctgctccctgtgtccccaatggctctgcctacagtggggactatatggagcctgagaagccaggcgccccgcttctgcccccacctccccagaacagcgtcccccattatgccgaggctgacattgttaccctgcagggcgtcaccgggggcaacacctatgctgtgcctgcactgcccccaggggcagtcggggatgggccccccagagtggatttccctcgatctcgactccgcttcaaggagaagcttggcgagggccagtttggggaggtgcacctgtgtgaggtcgacagccctcaagatctggtcagtcttgatttcccccttaatgtgcgtaagggacaccctttgctggtagctgtcaagatcttacggccagatgccaccaagaatgccaggaatgatttcctgaaagaggtgaagatcatgtcgaggctcaaggacccaaacatcattcggctgctgggcgtgtgtgtgcaggacgaccccctctgcatgattactgactacatggagaacggcgacctcaaccagttcctcagtgcccaccagctggaggacaaggcagccgagggggcccctggggacgggcaggctgcgcaggggcccaccatcagctacccaatgctgctgcatgtggcagcccagatcgcctccggcatgcgctatctggccacactcaactttgtacatcgggacctggccacgcggaactgcctagttggggaaaatttcaccatcaaaatcgcagactttggcatgagccggaacctctatgctggggactattaccgtgtgcagggccgggcagtgctgcccatccgctggatggcctgggagtgcatcctcatggggaagttcacgactgcgagtgacgtgtgggcctttggtgtgaccctgtgggaggtgctgatgctctgtagggcccagccctttgggcagctcaccgacgagcaggtcatcgagaacgcgggggagttcttccgggaccagggccggcaggtgtacctgtcccggccgcctgcctgcccgcagggcctatatgagctgatgcttcggtgctggagccgggagtctgagcagcgaccacccttttcccagctgcatcggttcctggcagaggatgcactcaacacggtgtgaatcacacatccagctgcccctccctcagggagcgatccaggggaagccagtgacactaaaacaagaggacacaatggcacctctgcccttcccctcccgacagcccatcacctctaatagaggcagtgagactgcaggtgggctgggcccacccagggagctgatgccccttctccccttcctggacacactctcatgtccccttcctgttcttccttcctagaagcccctgtcgcccacccagctggtcctgtggatgggatcctctccaccctcctctagccatcccttggggaagggtggggagaaatataggatagacactggacatggcccattggagcacctgggccccactggacaacactgattcctggagaggtggctgcgcccccagcttctctctccctgtcacacactggaccccactggctgagaatctgggggtgaggaagacaagaaggagaggaaaatgtttccttgtgcctgctcctgtacttgtcctcagcttgggcttcttcctcctccatcacctgaaacactggacctgggggtagccccgccccagccctcagtcacccccacttcccacttgcagtcttgtagctagaacttctctaagcctatacgtttctgtggagtaaatattgggattggggggaaagagggagcaacggcccatagccttggggttggacatctctagtgtagctgccacattgatttttctataatcacttggggtttgtacatttttggggggagagacacagatttttacactaatatatggacctagcttgaggcaattttaatcccctgcactaggcaggtaataataaaggttgagttttcc

SEQ ID NO: 1765 - DNA, 2516 bp, Homo sapiens
  source 1..2516: mol_type = genomic DNA; mol_type = genomic DNA
gggggctagacaagtttcttccccggtggggcggctgaacactcttcccaagtacctgctttgggtccaagtttcctacctatgtctctagtctgtagggatttcttgatttctaactcactattttcaccaatcctggggaaaatatgtatcgacctaaggttaaattccacctggcccaggagcctcctttggaaaccaggaagccgggaatctcgttgcaaaggaatcctgggcctcagaggagtcgttgcctctgcctcatagcataccccgacactgtctctgttttgggatgcagggttctgtttctgtctttttgagaagttcctggtttaattcactctcccatgataaactgttgtgtctggggcctatcccagtccccccagtgcctttggttgctggagggaagaacacaatggatctggtgctaaaaagatgccttcttcatttggctgtgataggtgctttgctggctgtgggggctacaaaagtacccagaaaccaggactggcttggtgtctcaaggcaactcagaaccaaagcctggaacaggcagctgtatccagagtggacagaagcccagagacttgactgctggagaggtggtcaagtgtccctcaaggtcagtaatgatgggcctacactgattggtgcaaatgcctccttctctattgccttgaacttccctggaagccaaaaggtattgccagatgggcaggttatctgggtcaacaataccatcatcaatgggagccaggtgtggggaggacagccagtgtatccccaggaaactgacgatgcctgcatcttccctgatggtggaccttgcccatctggctcttggtctcagaagagaagctttgtttatgtctggaagacctggggccaatactggcaagttctagggggcccagtgtctgggctgagcattgggacaggcagggcaatgctgggcacacacaccatggaagtgactgtctaccatcgccggggatcccggagctatgtgcctcttgctcattccagctcagccttcaccattactgaccaggtgcctttctccgtgagcgtgtcccagttgcgggccttggatggagggaacaagcacttcctgagaaatcagcctctgacctttgccctccagctccatgaccccagtggctatctggctgaagctgacctctcctacacctgggactttggagacagtagtggaaccctgatctctcgggcacttgtggtcactcatacttacctggagcctggcccagtcactgcccaggtggtcctgcaggctgccattcctctcacctcctgtggctcctccccagttccaggcaccacagatgggcacaggccaactgcagaggcccctaacaccacagctggccaagtgcctactacagaagttgtgggtactacacctggtcaggcgccaactgcagagccctctggaaccacatctgtgcaggtgccaaccactgaagtcataagcactgcacctgtgcagatgccaactgcagagagcacaggtatgacacctgagaaggtgccagtttcagaggtcatgggtaccacactggcagagatgtcaactccagaggctacaggtatgacacctgcagaggtatcaattgtggtgctttctggaaccacagctgcacaggtaacaactacagagtgggtggagaccacagctagagagctacctatccctgagcctgaaggtccagatgccagctcaatcatgtctacggaaagtattacaggttccctgggccccctgctggatggtacagccaccttaaggctggtgaagagacaagtccccctggattgtgttctgtatcgatatggttccttttccgtcaccctggacattgtccagggtattgaaagtgccgagatcctgcaggctgtgccgtccggtgagggggatgcatttgagctgactgtgtcctgccaaggcgggctgcccaaggaagcctgcatggagatctcatcgccagggtgccagccccctgcccagcggctgtgccagcctgtgctacccagcccagcctgccagctggttctgcaccagatactgaagggtggctcggggacatactgcctcaatgtgtctctggctgataccaacagcctggcagtggtcagcacccagcttatcatgcctggtcaagaagcaggccttgggcaggttccgctgatcgtgggcatcttgctggtgttgatggctgtggtccttgcatctctgatatataggcgcagacttatgaagcaagacttctccgtaccccagttgccacatagcagcagtcactggctgcgtctaccccgcatcttctgctcttgtcccattggtgagaacagccccctcctcagtgggcagcaggtctgagtactctcatatgatgctgtgattttcctggagttgacagaaacacctatatttcccccagtcttccctgggagactactattaactgaaataaatactcagagcctga

SEQ ID NO: 1766 - DNA, 3949 bp, Homo sapiens
  source 1..3949: mol_type = genomic DNA; mol_type = genomic DNA
gtcttcccctcgtgggccctgagcgggactgcagccagccccctggggagccagctttggaggcccccgacagctgctctcgggagccgcctcccgacacccgagccccgccggcgcctcccgctcccggctcccggctcctggctccctccgcctcccccgcccctcgccccgccgccgaagaggccccgctcccgggtcggacgcctgggtctgccgggaagagcgatgagaggtgtctgaaggtggctattcactgagcgatggggttggacttgaaggaatgccaagagatgctgcccccacccccttaggcccgagggatcaggagctatgggaccagaggccctgtcatctttactgctgctgctcttggtggcaagtggagatgctgacatgaagggacattttgatcctgccaagtgccgctatgccctgggcatgcaggaccggaccatcccagacagtgacatctctgcttccagctcctggtcagattccactgccgcccgccacagcaggttggagagcagtgacggggatggggcctggtgccccgcagggtcggtgtttcccaaggaggaggagtacttgcaggtggatctacaacgactgcacctggtggctctggtgggcacccagggacggcatgccgggggcctgggcaaggagttctcccggagctaccggctgcgttactcccgggatggtcgccgctggatgggctggaaggaccgctggggtcaggaggtgatctcaggcaatgaggaccctgagggagtggtgctgaaggaccttgggccccccatggttgcccgactggttcgcttctacccccgggctgaccgggtcatgagcgtctgtctgcgggtagagctctatggctgcctctggagggatggactcctgtcttacaccgcccctgtggggcagacaatgtatttatctgaggccgtgtacctcaacgactccacctatgacggacataccgtgggcggactgcagtatgggggtctgggccagctggcagatggtgtggtggggctggatgactttaggaagagtcaggagctgcgggtctggccaggctatgactatgtgggatggagcaaccacagcttctccagtggctatgtggagatggagtttgagtttgaccggctgagggccttccaggctatgcaggtccactgtaacaacatgcacacgctgggagcccgtctgcctggcggggtggaatgtcgcttccggcgtggccctgccatggcctgggagggggagcccatgcgccacaacctagggggcaacctgggggaccccagagcccgggctgtctcagtgccccttggcggccgtgtggctcgctttctgcagtgccgcttcctctttgcggggccctggttactcttcagcgaaatctccttcatctctgatgtggtgaacaattcctctccggcactgggaggcaccttcccgccagccccctggtggccgcctggcccacctcccaccaacttcagcagcttggagctggagcccagaggccagcagcccgtggccaaggccgaggggagcccgaccgccatcctcatcggctgcctggtggccatcatcctgctcctgctgctcatcattgccctcatgctctggcggctgcactggcgcaggctcctcagcaaggctgaacggagggtgttggaagaggagctgacggttcacctctctgtccctggggacactatcctcatcaacaaccgcccaggtcctagagagccacccccgtaccaggagccccggcctcgtgggaatccgccccactctgctccctgtgtccccaatggctctgcgttgctgctctccaatccagcctaccgcctccttctggccacttacgcccgtccccctcgaggcccgggcccccccacacccgcctgggccaaacccaccaacacccaggcctacagtggggactatatggagcctgagaagccaggcgccccgcttctgcccccacctccccagaacagcgtcccccattatgccgaggctgacattgttaccctgcagggcgtcaccgggggcaacacctatgctgtgcctgcactgcccccaggggcagtcggggatgggccccccagagtggatttccctcgatctcgactccgcttcaaggagaagcttggcgagggccagtttggggaggtgcacctgtgtgaggtcgacagccctcaagatctggtcagtcttgatttcccccttaatgtgcgtaagggacaccctttgctggtagctgtcaagatcttacggccagatgccaccaagaatgccagcttctccttgttctccaggaatgatttcctgaaagaggtgaagatcatgtcgaggctcaaggacccaaacatcattcggctgctgggcgtgtgtgtgcaggacgaccccctctgcatgattactgactacatggagaacggcgacctcaaccagttcctcagtgcccaccagctggaggacaaggcagccgagggggcccctggggacgggcaggctgcgcaggggcccaccatcagctacccaatgctgctgcatgtggcagcccagatcgcctccggcatgcgctatctggccacactcaactttgtacatcgggacctggccacgcggaactgcctagttggggaaaatttcaccatcaaaatcgcagactttggcatgagccggaacctctatgctggggactattaccgtgtgcagggccgggcagtgctgcccatccgctggatggcctgggagtgcatcctcatggggaagttcacgactgcgagtgacgtgtgggcctttggtgtgaccctgtgggaggtgctgatgctctgtagggcccagccctttgggcagctcaccgacgagcaggtcatcgagaacgcgggggagttcttccgggaccagggccggcaggtgtacctgtcccggccgcctgcctgcccgcagggcctatatgagctgatgcttcggtgctggagccgggagtctgagcagcgaccacccttttcccagctgcatcggttcctggcagaggatgcactcaacacggtgtgaatcacacatccagctgcccctccctcagggagcgatccaggggaagccagtgacactaaaacaagaggacacaatggcacctctgcccttcccctcccgacagcccatcacctctaatagaggcagtgagactgcaggtgggctgggcccacccagggagctgatgccccttctccccttcctggacacactctcatgtccccttcctgttcttccttcctagaagcccctgtcgcccacccagctggtcctgtggatgggatcctctccaccctcctctagccatcccttggggaagggtggggagaaatataggatagacactggacatggcccattggagcacctgggccccactggacaacactgattcctggagaggtggctgcgcccccagcttctctctccctgtcacacactggaccccactggctgagaatctgggggtgaggaagacaagaaggagaggaaaatgtttccttgtgcctgctcctgtacttgtcctcagcttgggcttcttcctcctccatcacctgaaacactggacctgggggtagccccgccccagccctcagtcacccccacttcccacttgcagtcttgtagctagaacttctctaagcctatacgtttctgtggagtaaatattgggattggggggaaagagggagcaacggcccatagccttggggttggacatctctagtgtagctgccacattgatttttctataatcacttggggtttgtacatttttggggggagagacacagatttttacactaatatatggacctagcttgaggcaattttaatcccctgcactaggcaggtaataataaaggttgagttttcc

SEQ ID NO: 1767 - DNA, 660 bp, Homo sapiens
  source 1..660: mol_type = genomic DNA; mol_type = genomic DNA
cagaagacggggactaggagcgctctgccgacgtcagcttttgtctccagtattttcgggggctggtggacgcgtgggcgatagggtgctgtccttggggtgctgtgtatatgggatgatgacgcttatcagcattatctagtcctttccaccccgaaattcgccccgattaaagactgtgttgcattatcagcctgccgaccatgcccgcgggcgtgcccatgtccacctacctgaaaatgttcgcagccagtctcctggccatgtgcgcaggggcagaagtggtgcacaggtactaccgaccggacctgacaatacctgaaattccaccaaagcgtggagaactcaaaacggagcttttgggactgaaagaaagaaaacacaaacctcaagtttctcaacaggaggaacttaaataactatgccaagaattctgtgaataatataagtcttaaatatgtatttcttaatttattgcatcaaactacttgtccttaagcacttagtctaatgctaactgcaagaggaggtgctcagtggatgtttagccgatacgttgaaatttaattacggtttgattgatatttcttgaaaactgccaaagcacatatcatcaaaccatttcatgaatatggtttggaagatgtttagtcttgaata

SEQ ID NO: 1768 - DNA, 3047 bp, Homo sapiens
  source 1..3047: mol_type = genomic DNA; mol_type = genomic DNA
gagccccgggaggaggtgctcctgtgcagccccactgagtcagctcatctatcgcctgccctccacctggccagtccctgcgggcatctaactgctaagcctccgctcagccaacacccagttggtcagtctggtcacagtccagcaaaaagagggactgccactctaacccaccagtgacaccactcttcccggctggatggtcaattagctctggcatgagagaatgtcactgccgagatgctgcccccacccccttaggcccgagggatcaggagctatgggaccagaggccctgtcatctttactgctgctgctcttggtggcaagtggagatgctgacatgaagggacattttgatcctgccaagtgccgctatgccctgggcatgcaggaccggaccatcccagacagtgacatctctgcttccagctcctggtcagattccactgccgcccgccacagcaggttggagagcagtgacggggatggggcctggtgccccgcagggtcggtgtttcccaaggaggaggagtacttgcaggtggatctacaacgactgcacctggtggctctggtgggcacccagggacggcatgccgggggcctgggcaaggagttctcccggagctaccggctgcgttactcccgggatggtcgccgctggatgggctggaaggaccgctggggtcaggaggtgatctcaggcaatgaggaccctgagggagtggtgctgaaggaccttgggccccccatggttgcccgactggttcgcttctacccccgggctgaccgggtcatgagcgtctgtctgcgggtagagctctatggctgcctctggagggatggactcctgtcttacaccgcccctgtggggcagacaatgtatttatctgaggccgtgtacctcaacgactccacctatgacggacataccgtgggcggactgcagtatgggggtctgggccagctggcagatggtgtggtggggctggatgactttaggaagagtcaggagctgcgggtctggccaggctatgactatgtgggatggagcaaccacagcttctccagtggctatgtggagatggagtttgagtttgaccggctgagggccttccaggctatgcaggtccactgtaacaacatgcacacgctgggagcccgtctgcctggcggggtggaatgtcgcttccggcgtggccctgccatggcctgggagggggagcccatgcgccacaacctagggggcaacctgggggaccccagagcccgggctgtctcagtgccccttggcggccgtgtggctcgctttctgcagtgccgcttcctctttgcggggccctggttactcttcagcgaaatctccttcatctctgatgtggtgaacaattcctctccggcactgggaggcaccttcccgccagccccctggtggccgcctggcccacctcccaccaacttcagcagcttggagctggagcccagaggccagcagcccgtggccaaggccgaggggagcccgaccgccatcctcatcggctgcctggtggccatcatcctgctcctgctgctcatcattgccctcatgctctggcggctgcactggcgcaggctcctcagcaaggctgaacggagggtgttggaagaggagctgacggttcacctctctgtccctggggacactatcctcatcaacaaccgcccaggtcctagagagccacccccgtaccaggagccccggcctcgtgggaatccgccccactctgctccctgtgtccccaatggctctgcctacagtggggactatatggagcctgagaagccaggcgccccgcttctgcccccacctccccagaacagcgtcccccattatgccgaggctgacattgttaccctgcagggcgtcaccgggggcaacacctatgctgtgcctgcactgcccccaggggcagtcggggatgggccccccagagtggatttccctcgatctcgactccgcttcaaggagaagcttggcgagggccagtttggggaggtgcacctgtgtgaggtcgacagccctcaagatctggtcagtcttgatttcccccttaatgtgcgtaagggacaccctttgctggtagctgtcaagatcttacggccagatgccaccaagaatgccaggaatgatttcctgaaagaggtgaagatcatgtcgaggctcaaggacccaaacatcattcggctgctgggcgtgtgtgtgcaggacgaccccctctgcatgattactgactacatggagaacggcgacctcaaccagttcctcagtgcccaccagctggaggacaaggcagccgagggggcccctggggacgggcaggctgcgcaggggcccaccatcagctacccaatgctgctgcatgtggcagcccagatcgcctccggcatgcgctatctggccacactcaactttgtacatcgggacctggccacgcggaactgcctagttggggaaaatttcaccatcaaaatcgcagactttggcatgagccggaacctctatgctggggactattaccgtgtgcagggccgggcagtgctgcccatccgctggatggcctgggagtgcatcctcatggggaagttcacgactgcgagtgacgtgtgggcctttggtgtgaccctgtgggaggtgctgatgctctgtagggcccagccctttgggcagctcaccgacgagcaggtcatcgagaacgcgggggagttcttccgggaccagggccggcaggtgtacctgtcccggccgcctgcctgcccgcagggcctatatgagctgatgcttcggtgctggagccgggagtctgagcagcgaccacccttttcccagctgcatcggttcctggcagaggatgcactcaacacggtgtgaatcacacatccagctgcccctccctcagggagcgatccaggggaagccagtgacactaaaacaagaggacacaatggcacctctgcccttcccctcccgacagcccatcacctctaatagaggcagtgagactgca

SEQ ID NO: 1769 - DNA, 574 bp, Homo sapiens
  source 1..574: mol_type = genomic DNA; mol_type = genomic DNA
ctctgccctttctgagcccgagggactgccacctccactgtgtgcacactcagctacgggacacagtaagtaccgatgccgcaaagggaggtccccagggcttgagggcatgtgaggcgaggagaggatggactctagagttttggggtttggggtctgcaaagctctgaaggagtctcatctctgcagtttcaggtatccaaggcagcagaggtgagtgggtcccccgagctctgtgaccttatgctccacactaactctggcagagcctccgtttcctcatagaacaaagaacagccaccatgcagctcttcctcctcttgtgcctggtgcttctcagccctcagggggcctcccttcaccgccaccacccccgggagatgaagaagagagtcgaggacctccatgtaggtgccacggtggcccccagcagcagaagggactttacctttgacctctacagggccttggcttccgctgcccccagccagagcatcttcttctcccctgtgagcatctccatgagcctggccatgctctccctgggggctgggtccagcacaaagatgcagat

SEQ ID NO: 1770 - DNA, 1136 bp, Homo sapiens
  source 1..1136: mol_type = genomic DNA; mol_type = genomic DNA
gctctacctcttggacttccaacttctgtgagtcaacatagtgcctcttgcatttaagaaacatctcatcacactcttatcagcattgagtttaaatttcaattagtgagaactgaggaaaaaccaagaagcctgcattccacagtgtctgcaggaaaaatgatgagaactctcatcaccacacacccactgcccctgcttctattgccgcagcagctgctgcagctggtgcagtttcaagaggtggatacagattttgatttcccagaagaagataaaaaagaagaatttgaagagtgtttggaaaaattttttagtacagggcccgccagaccacctaccaaagaaaaagtcaaaagacgtgtccttattgaacctggaatgccactaaatcatatagagtactgtaaccatgaaatcatgggaaaaaatgtttactacaaacaccgttgggtggcagaacattacttccttcttatgcaatatgacgagctccaaaaaatctgttacaacagatttgtgccatgtaagaatggaattaggaaatgtaacaggagcaaaggtcttgtagaaggagtgtattgtaatttaacagaagcatttgaaataccagcgtgtaaatacgaatcactttataggaagggctacgtccttatcacttgttcatggcaaaatgaaatgcaaaaacgtattcctcatactataaatgatctcgtggagccacctgaacacagaagtttcctcagtgaggatggtgtctttgtcatatcgccctagcagagcgttctctgagagcttagggtgggaggaatatttctctccatactgatccttatagatcaaagttgagaatggtaattttgcttccattcactttaatcacccaccttcctttcttcctttcccaacacctcacaaaagcaccttaggctaggttcacagacggtgctctgagatgtggtctcatgcaggtcccctaagttagcatgccttgaatgtgttacggatacagatgcctgcagtggaaggatgaccagcaccaagaggaaaaggaaatggttgcctgaagtgtgctccaaagacacatccatgtgattctctagttcagcagaaagaataaaaattgcttcaatcta

SEQ ID NO: 1771 - DNA, 467 bp, Homo sapiens
  source 1..467: mol_type = genomic DNA; mol_type = genomic DNA
ctttttgcacacacacgaatacaaagagccatacgaccttcggttttaatttggtttaacctttagtttcaggtttagctgtgcctcccagtgactataatgacaaggaagctgtaaatgtatttgagttaagcttttgcgagaagcaaagtgacagcatagctgttcaaacattcctgttgaattttggatccacccttaaggagcttgagaaatgaagataaggggccccacgggtgatttctctgggctcctggctggaagattcaggacagctagtttccattacagaggctcatggcccagaccctacagcttggggcctgggctcctctgaccatcctcattgagaaaggaaagtgagtccagagaagttgatgcttcctacctgttggagcggcccagcagtgtaagcgtggttgttactgccccatccgccatgtccttcagtgccaccattctcttct

SEQ ID NO: 1772 - DNA, 852 bp, Homo sapiens
  source 1..852: mol_type = genomic DNA; mol_type = genomic DNA
ctttttgcacacacacgaatacaaagagccatacgaccttcggtttcaggtttagctgtgcctcccagtgactataatgacaaggaagctgtaaatgtatttgagttaagcttttgcgagaaaccctacagcttggggcctgggctcctctgaccatcctcattgagaaaggaaagtgagtccagagaagttgatgcttcctacctgttggagcggcccagcagtgtaagcgtggttgttactgccccatccgccatgtccttcagtgccaccattctcttctcccctcccagtggcagcgaggccagatgctgctgctgcgcctgtaagagtgagactaatggaggcaacacaggctcccagggtgggaatcctcctcccagcacccccatcacagtgactggacatggcttggctgttcagagctcagagcagctcctgcatgttatctaccagcgggtcgataaggcagtgggtttggctgaagctgctctgggtcttgccagggccaacaatgagttgttaaaacgtctccaggaggaagtgggtgacctgaggcaagggaaagtgtccatccctgatgaagatggggaaagccgggcacatagttccccacctgaggagcctgggcctctcaaggaaagtcccggggaagcctttaaggctctgtctgccgtggaagaggagtgtgacagcgtgggcagcggcgtgcaggtggtgattgaggagctgcggcagctgggagcagcctcagtggggcctgggcctttgggcttcccagcaactcagagggacatgcggctcccagggtgcacgctggctgccagcgaggcggcccccctgctcaatcct

SEQ ID NO: 1773 - DNA, 1172 bp, Homo sapiens
  source 1..1172: mol_type = genomic DNA; mol_type = genomic DNA
gctctacctcttggacttccaacttctgtgagtcaacatagtgcctcttgcatttaagaaacatctcatcacactcttatcagcattgagtttaaatttcaattagtgagaactgaggaaaaaccaagaagcctgcattccacagatcaagatgttgcagaggctccgcgttcttgtgagatgtctgcaggaaaaatgatgagaactctcatcaccacacacccactgcccctgcttctattgccgcagcagctgctgcagctggtgcagtttcaagaggtggatacagattttgatttcccagaagaagataaaaaagaagaatttgaagagtgtttggaaaaattttttagtacagggcccgccagaccacctaccaaagaaaaagtcaaaagacgtgtccttattgaacctggaatgccactaaatcatatagagtactgtaaccatgaaatcatgggaaaaaatgtttactacaaacaccgttgggtggcagaacattacttccttcttatgcaatatgacgagctccaaaaaatctgttacaacagatttgtgccatgtaagaatggaattaggaaatgtaacaggagcaaaggtcttgtagaaggagtgtattgtaatttaacagaagcatttgaaataccagcgtgtaaatacgaatcactttataggaagggctacgtccttatcacttgttcatggcaaaatgaaatgcaaaaacgtattcctcatactataaatgatctcgtggagccacctgaacacagaagtttcctcagtgaggatggtgtctttgtcatatcgccctagcagagcgttctctgagagcttagggtgggaggaatatttctctccatactgatccttatagatcaaagttgagaatggtaattttgcttccattcactttaatcacccaccttcctttcttcctttcccaacacctcacaaaagcaccttaggctaggttcacagacggtgctctgagatgtggtctcatgcaggtcccctaagttagcatgccttgaatgtgttacggatacagatgcctgcagtggaaggatgaccagcaccaagaggaaaaggaaatggttgcctgaagtgtgctccaaagacacatccatgtgattctctagttcagcagaaagaataaaaattgcttcaatcta

SEQ ID NO: 1774 - DNA, 2071 bp, Homo sapiens
  source 1..2071: mol_type = genomic DNA; mol_type = genomic DNA
aagacagagctgagacagccacccagggggtccactccaggacagactgtgcctgtgggctcacagggaagaggtcatgggcgaacagagtgaaggcaaccatctataagtgccagagagccctcaccagagaccaaccctgacggcaccttgaccttggatttccagcgtccagaactccacataattgggccccaaagccatgaagaaggaagaggaaatgtcttaaaggttgtcgatggacagtgtttgctgaacatcaaaatcactttccagaacaaagaacagccaccatgcagctcttcctcctcttgtgcctggtgcttctcagccctcagggggcctcccttcaccgccaccacccccgggagatgaagaagagagtcgaggacctccatgtaggtgccacggtggcccccagcagcagaagggactttacctttgacctctacagggccttggcttccgctgcccccagccagagcatcttcttctcccctgtgagcatctccatgagcctggccatgctctccctgggggctgggtccagcacaaagatgcagatcctggagggcctgggcctcaacctccagaaaagctcagagaaggagctgcacagaggctttcagcagctccttcaggaactcaaccagcccagagatggcttccagctgagcctcggcaatgcccttttcaccgacctggtggtagacctgcaggacaccttcgtaagtgccatgaagacgctgtacctggcagacactttccctaccaactttagggactctgcaggggccatgaagcagatcaatgattatgtggcaaagcaaacgaagggcaagattgtggacttgcttaagaacctcgatagcaatgcggtcgtgatcatggtgaattacatcttctttaaagctaagtgggagacaagcttcaaccacaaaggcacccaagagcaagacttctacgtgacctcggagactgtggtgcgggtacccatgatgagccgcgaggatcagtatcactacctcctggaccggaacctctcctgcagggtggtgggggtcccctaccaaggcaatgccacggctttgttcattctccccagtgagggaaagatgcagcaggtggagaatggactgagtgagaaaacgctgaggaagtggcttaagatgttcaaaaagaggcagctcgagctttaccttcccaaattctccattgagggctcctatcagctggagaaagtcctccccagtctggggatcagtaacgtcttcacctcccatgctgatctgtccggcatcagcaaccactcaaatatccaggtgtctgagatggtgcacaaagctgtggtggaggtggacgagtcgggaaccagagcagcggcagccacggggacaatattcactttcaggtcggcccgcctgaactctcagaggctagtgttcaacaggccctttctgatgttcattgtggataacaacatcctcttccttggcaaagtgaaccgcccctgaggtggggcttctcctgaaatctacaggcctcagggtgggagatgaagggggctaagctatggcccatctgtatgctggtagctagtgatttacacaggtttagttgactaatgaggcattacaaataatattactctatgatgattgcttccacccacacgactgcaacatacaggtgccttggggaaatgtggagaacattcaatcttgccgtcactattcatcaatgaagattaacactgagatccagagaggctggatgacttgctcaagttcaccagcatggtagtggcaaagagaggtccagagtcctggcccttgatgcccagctcagtgccacaaagctcaataggagggatgttccagtggatgagggccaccaggaagcacaggtccaaggctggtcccacacttatcagcagcaacaactgtcagttcatcctgcatgggaaaaatgttggaatgggagtctgaaatggggctactgtttcagtcctaatgtgctgtgtgacattgggacaacactttccctctctggacctcagtttccctctgta

SEQ ID NO: 1775 - DNA, 1101 bp, Homo sapiens
  source 1..1101: mol_type = genomic DNA; mol_type = genomic DNA
actcatctcatggcttcttccatcttaggtggccgtttttcagctgagtttcattttctagttctctgtggtaattctgttgtcattgttgtctccatagaattttgggtgtcaccaggtaaacagagccctcagcatctgaatagaaactgaacaggaacagaagagattacactacatctgagatggagacctttcctctgctgctgctcagcctgggcctggttcttgcagaagcatcagaaagcacaatgaagataattaaagaagaatttacagacgaagagatgcaatatgacatggcaaaaagtggccaagaaaaacagaccattgagatattaatgaacccgatcctgttagttaaaaataccagcctcagcatgtccaaggatgatatgtcttccacattactgacattcagaagtttacattataatgaccccaagggaaacagttcgggtaatgacaaagagtgttgcaatgacatgacagtctggagaaaagtttcagaagcaaacggatcgtgcaagtggagcaataacttcatccgcagctccacagaagtgatgcgcagggtccacagggcccccagctgcaagtttgtacagaatcctggcataagctgctgtgagagcctagaactggaaaatacagtgtgccagttcactacaggcaaacaattccccaggtgccaataccatagtgttacctcattagagaagatattgacagtgctgacaggtcattctctgatgagctggttagtttgtggctctaagttgtaaatcccacagagctttaggactagggtcttactaaagaaggacctcttcttgttcattcttgtttaaacctttccttaatatctactctttagcactatagtgaactcctgattatttattctaactggaggagtgaaaaatccaaaattgtggataattcaattaaaagttatgactgatactggcgtgcagattcttctctctctatctctctctctgtgtggggggagggtggggagggtgtaaaacaaactgaatttcatcctagctcagctataaagccaagaaacagaatccacctaactaggcagaatta

SEQ ID NO: 1776 - DNA, 585 bp, Homo sapiens
  source 1..585: mol_type = genomic DNA; mol_type = genomic DNA
ctttttgcacacacacgaatacaaagagccatacgaccttcggaccctacagcttggggcctgggctcctctgaccatcctcattgagaaaggaaagtgagtccagagaagttgatgcttcctacctgttggagcggcccagcagtgtaagcgtggttgttactgccccatccgccatgtccttcagtgccaccattctcttctcccctcccagtggcagcgaggccagatgctgctgctgcgcctgtaagagtgagactaatggaggcaacacaggctcccagggtgggaatcctcctcccagcacccccatcacagtgactggacatggcttggctgttcagagctcagagcagctcctgcatgttatctaccagcgggtcgataaggcagtgggtttggctgaagctgctctgggtcttgccagggccaacaatgagttgttaaaacgtctccaggaggaagtgggtgacctgaggcaagggaaagtgtccatccctgatgaagatggggaaagccgggcacatagttccccacctgaggagcctgggcctctcaaggaaagtcccggggaagcctttaagg

SEQ ID NO: 1777 - DNA, 588 bp, Homo sapiens
  source 1..588: mol_type = genomic DNA; mol_type = genomic DNA
ctttttgcacacacacgaatacaaagagccatacgaccttcgggcaaagtgacagcatagctgttcaaacattcctgttgaattttggatccacccttaaggagcttgagaaatgaagataaggggccccacgggtgatttctctgggctcctggctggaagattcaggacagctagtttccattacagaggctcatggcccagaccctacagcttggggcctgggctcctctgaccatcctcattgagaaaggaaagtgagtccagagaagttgatgcttcctacctgttggagcggcccagcagtgtaagcgtggttgttactgccccatccgccatgtccttcagtgccaccattctcttctcccctcccagtggcagcgaggccagatgctgctgctgcgcctgtaagagtgagactaatggaggcaacacaggctcccagggtgggaatcctcctcccagcacccccatcacagtgactggacatggcttggctgttcagagctcagagcagctcctgcatgttatctaccagcgggtcgataaggcagtgggtttggctgaagctgctctgggtcttgccag

SEQ ID NO: 1778 - DNA, 441 bp, Homo sapiens
  source 1..441: mol_type = genomic DNA; mol_type = genomic DNA
gagtcctcctttttgcacacacacgaatacaaagagccatacgaccttcgggtatcctttttccattttttttcctccttaatcttgtgtgtgttttcaaattttttaaaaatagagatctgtagcagtgttgggaatgtcttactaccctatcagttaatcctatacattgctcaaggctcaactggaagcttttcttcttttcaggtttagctgtgcctcccagtgactataatgacaaggaagctgtaaatgtatttgagttaagcttttgcgagaaaccctacagcttggggcctgggctcctctgaccatcctcattgagaaaggaaagtgagtccagagaagttgatgcttcctacctgttggagcggcccagcagtgtaagcgtggttgttactgccccatccgccatgtccttcagtgccaccattctcttct

SEQ ID NO: 1779 - DNA, 586 bp, Homo sapiens
  source 1..586: mol_type = genomic DNA; mol_type = genomic DNA
aagacagagctgagacagccacccagggggtccactccaggacagactgtgccaacaaagaacagccaccatgcagctcttcctcctcttgtgcctggtgcttctcagccctcagggggcctcccttcaccgccaccacccccgggagatgaagaagagagtcgaggacctccatgtaggtgccacggtggcccccagcagcagaagggactttacctttgacctctacagggccttggcttccgctgcccccagccagagcatcttcttctcccctgtgagcatctccatgagcctggccatgctctccctgggggctgggtccagcacaaagatgcagatcctggagggcctgggcctcaacctccagaaaagctcagagaaggagctgcacagaggctttcagcagctccttcaggaactcaaccagcccagagatggcttccagctgagcctcggcaatgcccttttcaccgacctggtggtagacctgcaggacaccttcgtaagtgccatgaagacgctgtacctggcagacactttccctaccaactttagggactctgcaggggccatgaagcagatc

SEQ ID NO: 1780 - DNA, 1462 bp, Homo sapiens
  source 1..1462: mol_type = genomic DNA; mol_type = genomic DNA
cgcgcagatgtgagcgtgcgagagttgtgtaggggattttgttccctccgaaactgagacccagggcgcccagtgggcacccgtgccttgactctgtcctttctgcagccgctggtccgagctgtctggcctcagtttccctccgacttttctccgctctgccagccctcactgctgcccgtcattgttctcgcagttagatgggggtgctttgtgacggctgccaagttggggtgtgttctctttattccgtttttcaaacagaacaaggcctccaaggctgaccccagacaacccaccccctcggaccctaattcaccttattgcactgattttttttatcaagtcgtattttattgtacaggagccacgccctgatttcttaaaggcgccttgcactctggccatgtgttatctctgcagccggtgtgtgggaggcctcttgtgagccagttgttttcccgcctccaccacccccctcgaagatttagggatgccaggggggaagaaggtggctgggggtggcagcagcggtgccactccaacgtccgctgcggccaccgccccctctggggtcaggcgtttggagaccagcgaaggaacctcagcccagagagatgaggagccagaagaggaaggggaagaggacctgcgagacggaggcgtccccttctttgtcaaccggggtgggctacctgtggatgaggccacctgggaaaggatgtggaaacacgtggccaagatccaccccgatggagagaaggtggcgcaacggatccgtggggccacagacctgcccaagatccccataccgagtgtgcctacgttccagccgtctacacctgtccctgagcgcctggaagctgtgcagcgctacatcagagagctgcagtacaatcacacagggacacagttctttgaaattaagaagagcagacctctgacagggctgatggacctggccaaggaaatgaccaaagaggccctgccaatcaaatgcctggaagccgtgatcctgggaatgtatccttcctcacctgaaggggaggggtccgggcttctctgggcctcagcttcctgctctgaaagtgagggtggggtaggttgaatgggctccagggctctcccatatgcagtcatctgcttggccccaagatggagaagcaccccactaaagtggaagaaccccccaaaatggaggagccccgaggtcccagtaccccacatctcagttgctaccttcccaggcttactgggcagctcttttttgagtcacgtggatacagggaccgttttctgaaccccaaatcagggcacagtgtctcacaaagacagttgtaccatttccaagaactagacagtctgggaggcacagttggaatgcccagatgttggcatttccagaacatgttgatttctggacgagatattaaagcaaaactgccttaaaaaaaaaaaaaac

SEQ ID NO: 1781 - DNA, 2210 bp, Homo sapiens
  source 1..2210: mol_type = genomic DNA; mol_type = genomic DNA
tttcaggtatccaaggcagcagaggtgagtgggtcccccgagctctgtgaccttatgctccacactaactctggcagagcctccgtttcctcatagaacaaagaacagccaccatgcagctcttcctcctcttgtgcctggtgcttctcagccctcagggggcctcccttcaccgccaccacccccgggagatgaagaagagagtcgaggacctccatgtaggtgccacggtggcccccagcagcagaagggactttacctttgacctctacagggccttggcttccgctgcccccagccagagcatcttcttctcccctgtgagcatctccatgagcctggccatgctctccctgggggctgggtccagcacaaagatgcagatcctggagggcctgggcctcaacctccagaaaagctcagagaaggagctgcacagaggctttcagcagctccttcaggaactcaaccagcccagagatggcttccagctgagcctcggcaatgcccttttcaccgacctggtggtagacctgcaggacaccttcgtaagtgccatgaagacgctgtacctggcagacactttccctaccaactttagggactctgcaggggccatgaagcagatcaatgattatgtggcaaagcaaacgaagggcaagattgtggacttgcttaagaacctcgatagcaatgcggtcgtgatcatggtgaattacatcttctttaaagctaagtgggagacaagcttcaaccacaaaggcacccaagagcaagacttctacgtgacctcggagactgtggtgcgggtacccatgatgagccgcgaggatcagtatcactacctcctggaccggaacctctcctgcagggtggtgggggtcccctaccaaggcaatgccacggctttgttcattctccccagtgagggaaagatgcagcaggtggagaatggactgagtgagaaaacgctgaggaagtggcttaagatgttcaaaaagaggcagctcgagctttaccttcccaaattctccattgagggctcctatcagctggagaaagtcctccccagtctggggatcagtaacgtcttcacctcccatgctgatctgtccggcatcagcaaccactcaaatatccaggtgtctgagatggtgcacaaagctgtggtggaggtggacgagtcgggaaccagagcagcggcagccacggggacaatattcactttcaggtcggcccgcctgaactctcagaggctagtgttcaacaggccctttctgatgttcattgtggataacaacatcctcttccttggcaaagtgaaccgcccctgaggtggggcttctcctgaaatctacaggcctcagggtgggagatgaagggggctaagctatggcccatctgtatgctggtagctagtgatttacacaggtttagttgactaatgaggcattacaaataatattactctatgatgattgcttccacccacacgactgcaacatacaggtgccttggggaaatgtggagaacattcaatcttgccgtcactattcatcaatgaagattaacactgagatccagagaggctggatgacttgctcaagttcaccagcatggtagtggcaaagagaggtccagagtcctggcccttgatgcccagctcagtgccacaaagctcaataggagggatgttccagtggatgagggccaccaggaagcacaggtccaaggctggtcccacacttatcagcagcaacaactgtcagttcatcctgcatgggaaaaatgttggaatgggagtctgaaatggggctactgtttcagtcctaatgtgctgtgtgacattgggacaacactttccctctctggacctcagtttccctctgtatacaaggatcagattcttgctgtgacccaagaactcctgaaatcatatagaaaggctggggtgggccctgtcattcgtggttgatttcaatacactcaagtgccattcatcctttaagaaaaacatctggatatcaaggtggaaatggcccatttaatgattgattatatcattttgtggatatagttataatctgatgggcctggctgggagtggaagaagggaagccttttgcaaatagtagagtatcagttgcaggtgccaatgactaactttttgaattctatgttggcattaacaataaagcattttgcaaaca

SEQ ID NO: 1782 - DNA, 4090 bp, Homo sapiens
  source 1..4090: mol_type = genomic DNA; mol_type = genomic DNA
gtgttctctgcggtgcaccgaggcgcacccggctgtcctgttgcgggtctcctggtcacctgtgggccatagggagagacgcgcccacacactctcgcccgcgcccaggacagctgcgggagccccgggccgctctaacccaatgcgtctcccgcaggctgagatgcggctgctcctgctcgtgccgctgctgctggctccagcgcccgggtcctcggctcccaaggtgaggcggcagagtgacacctggggaccctggagccagtggagcccctgcagccggacctgtggagggggtgtcagcttccgggagcgcccctgctactcccagaggagagatggaggctccagctgcgtgggccccgcccggagccaccgctcttgtcgcacggagagctgccccgacggcgcccgggacttccgggccgagcagtgcgcggagttcgacggagcggagttccaggggcggcggtatcggtggctgccctactacagcgccccaaacaagtgtgaactgaactgcattcccaagggggagaacttctactacaagcacagggaggctgtggttgatgggacgccctgcgagcctggcaagagggatgtctgtgtggatggcagctgccgggttgtcggctgtgatcacgagctggactcgtccaagcaggaggacaagtgtctgcggtgtgggggtgacggcacgacctgctaccccgtcgcaggcacctttgacgctaatgacctcagccgaggctacaaccagatcctcatagttcccatgggtgccaccagcatcctcatcgacgaggctgctgccagcaggaacttcctggctgtgaagaatgttcgtggggaatactacctcaatgggcactggaccatcgaggcggcccgggccctgccagcagccagcaccatcctgcattacgagcggggtgctgagggggacctggcccctgagcgactccatgcccggggccccacctcggagcccctggtcatcgagctcatcagccaggagcccaaccccggtgtgcactatgagtaccacctgcccctgcgccgccccagccccggcttcagctggagccacggctcatggagtgactgcagcgcggagtgtggcggaggtcaccagtcccgcctggtgttctgcaccatcgaccatgaggcctaccccgaccacatgtgccagcgccagccacggccagctgaccggcgttcctgcaatcttcacccttgcccggagaccaagcgctggaaggcagggccatgggcaccctgctcagcctcctgtggaggaggctcccagtcccgctccgtgtactgcatctcgtctgacggggccggcatccaggaggccgtggaggaggctgagtgtgccgggctgcctgggaagccccctgccattcaggcctgtaacctgcagcgctgtgcagcctggagcccggagccctggggagagtgttctgtcagttgtggcgttggcgtccggaagcggagcgttacttgccggggtgaaaggggttctttgctccataccgcagcgtgctccttggaagaccggccacctctgactgagccctgtgtgcatgaggactgccccctcctcagtgaccaggcctggcatgttggcacctggggtctatgctccaagagctgcagctcgggcactcggaggcgacaggtcatctgtgccattgggccgcccagccactgcgggagcctgcagcactccaagcctgtggatgtggagccttgtaacacgcagccctgtcatctcccccaggaggtccccagcatgcaggatgtgcacacccctgccagcaacccctggatgccgttgggccctcaggagtcccctgcctcagactccagaggccagtggtgggcagcccaggaacacccctcagccaggggtgaccacaggggagaacgaggtgaccccaggggcgaccaaggcacccacctgtcagccctgggccccgctccctctctgcagcagcccccataccagcaacccctgcggtcgggctcagggccccacgactgcagacacagtcctcacgggtgctgccccgatggccacacggcatctctcgggcctcagtggcaaggctgccctggggccccctgtcagcagagcaggtacgggtgctgccctgacagggtatctgtcgctgaggggccccatcacgctggctgcacaaagtcgtatggtggtgacagcaccgggggcatgcccaggtcaagggcagtggcttctacagtccacaacacccaccagccccaggcccagcagaatgagcccagtgagtgccggggctcccagtttggctgttgctatgacaacgtggccactgcagccggtcctcttggggaaggctgtgtgggccagcccagccatgcctaccccgtgcggtgcctgctgcccagtgcccatggctcttgcgcagactgggctgcccgctggtacttcgttgcctctgtgggccaatgtaaccgcttctggtatggcggctgccatggcaatgccaataactttgcctcggagcaagagtgcatgagcagctgccagggatctctccatgggccccgtcgtccccagcctggggcttctggaaggagcacccacacggatggtggcggcagcagtcctgcaggcgagcaggaacccagccagcacaggacaggggccgcggtgcagagaaagccctggccttctggtggtctctggcggcaagaccaacagcctgggccaggggaggccccccacacccaggcctttggagaatggccatgggggcaggagcttgggtccagggcccctggactgggtggagatgccggatcaccagcgccacccttccacagctcctcctacaggattagcttggcaggtgtggagccctcgttggtgcaggcagccctggggcagttggtgcggctctcctgctcagacgacactgccccggaatcccaggctgcctggcagaaagatggccagcccatctcctctgacaggcacaggctgcagttcgacggatccctgatcatccaccccctgcaggcagaggacgcgggcacctacagctgtggcagcacccggccaggccgcgactcccagaagatccaacttcgcatcatagggggtgacatggccgtgctgtctgaggctgagctgagccgcttccctcagcccagggacccagctcaggactttggccaagcgggggctgctgggcccctgggggccatcccctcttcacacccacagcctgcaaacaggctgcgtttggaccagaaccagccccgggtggtggatgccagtccaggccagcggatccggatgacctgccgtgccgaaggcttcccgcccccagccatcgagtggcagagagatgggcagcctgtctcttctcccagacaccagctgcagcctgatggctccctggtcattagccgagtggctgtagaagatggcggcttctacacctgtgtcgctttcaatgggcaggaccgagaccagcgatgggtccagctcagagttctgggggagctgacaatctcaggactgccccctactgtgacagtgccagagggtgatacggccaggctattgtgtgtggtagcaggagaaagtgtgaacatcaggtggtccaggaacgggctacctgtgcaggctgatggccaccgtgtccaccagtccccagatggcacgctgctcatttacaacttgcgggccagggatgagggctcctacacgtgcagtgcctaccaggggagccaggcagtcagccgcagcaccgaggtgaaggtggtctcaccagcacccaccgcccagcccagggaccctggcagggactgcgtcgaccagccagagctggccaactgtgatttgatcctgcaggcccagctttgtggcaatgagtattactccagcttctgctgtgccagctgttcacgtttccagcctcacgctcagcccatctggcagtagggatgaaggctagttccagccccagtccaaaatagttcatagggctagggagaaaggaagatggactcttggcttcctctctctggctgg

SEQ ID NO: 1783 - DNA, 533 bp, Homo sapiens
  source 1..533: mol_type = genomic DNA; mol_type = genomic DNA
gtgcacactcagctacgggacacatttcaggtatccaaggcagcagaggtgagtgggtcccccgagctctgtgaccttatgctccacactaactctggcagagcctccgtttcctcatagggcaaggccagcagtgctgatggtcccaggcatgtagctggtctgagttcatagaaggaccacagcgccctgccatgtgccaaaccaggacaccagagtgaaggccagaagctcacatggaagcagcttagttccctgaacaaagaacagccaccatgcagctcttcctcctcttgtgcctggtgcttctcagccctcagggggcctcccttcaccgccaccacccccgggagatgaagaagagagtcgaggacctccatgtaggtgccacggtggcccccagcagcagaagggactttacctttgacctctacagggccttggcttccgctgcccccagccagagcatcttcttctcccctgtgagcatctccatgagcctggccatgctctccctgggggctgggtccagc

SEQ ID NO: 1784 - DNA, 1113 bp, Homo sapiens
  source 1..1113: mol_type = genomic DNA; mol_type = genomic DNA
agtgacaaatgctggctgcaatccagccagccctctgccctttctgagcccgagggactgccacctccactgtgtgcacactcagctacgggacacatttcaggtatccaaggcagcagaggtgagtgggtcccccgagctctgtgaccttatgctccacactaactctggcagagcctccgtttcctcatagaacaaagaacagccaccatgcagctcttcctcctcttgtgcctggtgcttctcagccctcagggggcctcccttcaccgccaccacccccgggagatgaagaagagagtcgaggacctccatgtaggtgccacggtggcccccagcagcagaagggactttacctttgacctctacagggccttggcttccgctgcccccagccagagcatcttcttctcccctgtgagcatctccatgagcctggccatgctctccctgggggctgggtccagcacaaagatgcagatcctggagggcctgggcctcaacctccagaaaagctcagagaaggagctgcacagaggctttcagcagctccttcaggaactcaaccagcccagagatggcttccagctgagcctcggcaatgcccttttcaccgacctggtggtagacctgcaggacaccttcgtaagtgccatgaagacgctgtacctggcagacactttccctaccaactttagggactctgcaggggccatgaagcagatcaatgattatgtggcaaagcaaacgaagggcaagattgtggacttgcttaagaacctcgatagcaatgcggtcgtgatcatggtgaattacatcttctttaaagctaagtgggagacaagcttcaaccacaaaggcacccaagagcaagacttctacgtgacctcggagactgtggtgcgggtacccatgatgagccgcgaggatcagtatcactacctcctggaccggaacctctcctgcagggtggtgggggtcccctaccaaggcaatgccacggctttgttcattctccccagtgagggaaagatgcagcaggtggagaatggactgagtgagaaaacgctgaggaagtggcttaagatgttcaaaaagaggtactttcagact

SEQ ID NO: 1785 - DNA, 527 bp, Homo sapiens
  source 1..527: mol_type = genomic DNA; mol_type = genomic DNA
gtcactaattctgagctatggcatttcaatcctaattttgggtgtcaccaggtaaacagagccctcagcatctgaatagaaactgaacaggaacagaagagattacactacatctgagatggagacctttcctctgctgctgctcagcctgggcctggttcttgcagaagcatcagaaagcacaatgaagataattaaagaagaatttacagacgaagagatgcaatatgacatggcaaaaagtggccaagaaaaacagaccattgagatattaatgaacccgatcctgttagttaaaaataccagcctcagcatgtccaaggatgatatgtcttccacattactgacattcagaagtttacattataatgaccccaagggaaacagttcgggtaatgacaaagagtgttgcaatgacatgacagtctggagaaaagtttcagaagcaaacggatcgtgcaagtggagcaataacttcatccgcagctccacagaagtgatgcgcagggtccacagggcccccagct

SEQ ID NO: 1786 - DNA, 2211 bp, Homo sapiens
  source 1..2211: mol_type = genomic DNA; mol_type = genomic DNA
agtgacaaatgctggctgcaatccagccagccctctgccctttctgagcccgagggactgccacctccactgtgtgcacactcagctacgggacacaaacaaagaacagccaccatgcagctcttcctcctcttgtgcctggtgcttctcagccctcagggggcctcccttcaccgccaccacccccgggagatgaagaagagagtcgaggacctccatgtaggtgccacggtggcccccagcagcagaagggactttacctttgacctctacagggccttggcttccgctgcccccagccagagcatcttcttctcccctgtgagcatctccatgagcctggccatgctctccctgggggctgggtccagcacaaagatgcagatcctggagggcctgggcctcaacctccagaaaagctcagagaaggagctgcacagaggctttcagcagctccttcaggaactcaaccagcccagagatggcttccagctgagcctcggcaatgcccttttcaccgacctggtggtagacctgcaggacaccttcgtaagtgccatgaagacgctgtacctggcagacactttccctaccaactttagggactctgcaggggccatgaagcagatcaatgattatgtggcaaagcaaacgaagggcaagattgtggacttgcttaagaacctcgatagcaatgcggtcgtgatcatggtgaattacatcttctttaaagctaagtgggagacaagcttcaaccacaaaggcacccaagagcaagacttctacgtgacctcggagactgtggtgcgggtacccatgatgagccgcgaggatcagtatcactacctcctggaccggaacctctcctgcagggtggtgggggtcccctaccaaggcaatgccacggctttgttcattctccccagtgagggaaagatgcagcaggtggagaatggactgagtgagaaaacgctgaggaagtggcttaagatgttcaaaaagaggcagctcgagctttaccttcccaaattctccattgagggctcctatcagctggagaaagtcctccccagtctggggatcagtaacgtcttcacctcccatgctgatctgtccggcatcagcaaccactcaaatatccaggtgtctgagatggtgcacaaagctgtggtggaggtggacgagtcgggaaccagagcagcggcagccacggggacaatattcactttcaggtcggcccgcctgaactctcagaggctagtgttcaacaggccctttctgatgttcattgtggataacaacatcctcttccttggcaaagtgaaccgcccctgaggtggggcttctcctgaaatctacaggcctcagggtgggagatgaagggggctaagctatggcccatctgtatgctggtagctagtgatttacacaggtttagttgactaatgaggcattacaaataatattactctatgatgattgcttccacccacacgactgcaacatacaggtgccttggggaaatgtggagaacattcaatcttgccgtcactattcatcaatgaagattaacactgagatccagagaggctggatgacttgctcaagttcaccagcatggtagtggcaaagagaggtccagagtcctggcccttgatgcccagctcagtgccacaaagctcaataggagggatgttccagtggatgagggccaccaggaagcacaggtccaaggctggtcccacacttatcagcagcaacaactgtcagttcatcctgcatgggaaaaatgttggaatgggagtctgaaatggggctactgtttcagtcctaatgtgctgtgtgacattgggacaacactttccctctctggacctcagtttccctctgtatacaaggatcagattcttgctgtgacccaagaactcctgaaatcatatagaaaggctggggtgggccctgtcattcgtggttgatttcaatacactcaagtgccattcatcctttaagaaaaacatctggatatcaaggtggaaatggcccatttaatgattgattatatcattttgtggatatagttataatctgatgggcctggctgggagtggaagaagggaagccttttgcaaatagtagagtatcagttgcaggtgccaatgactaactttttgaattctatgttggcattaacaataaagcattttgcaaaca

SEQ ID NO: 1787 - DNA, 1101 bp, Homo sapiens
  source 1..1101: mol_type = genomic DNA; mol_type = genomic DNA
gctctacctcttggacttccaacttctgtgagtcaacatagtgcctcttgcatttaagaaatttcaattagtgagaactgaggaaaaaccaagaagcctgcattccacagtgtctgcaggaaaaatgatgagaactctcatcaccacacacccactgcccctgcttctattgccgcagcagctgctgcagctggtgcagtttcaagaggtggatacagattttgatttcccagaagaagataaaaaagaagaatttgaagagtgtttggaaaaattttttagtacagggcccgccagaccacctaccaaagaaaaagtcaaaagacgtgtccttattgaacctggaatgccactaaatcatatagagtactgtaaccatgaaatcatgggaaaaaatgtttactacaaacaccgttgggtggcagaacattacttccttcttatgcaatatgacgagctccaaaaaatctgttacaacagatttgtgccatgtaagaatggaattaggaaatgtaacaggagcaaaggtcttgtagaaggagtgtattgtaatttaacagaagcatttgaaataccagcgtgtaaatacgaatcactttataggaagggctacgtccttatcacttgttcatggcaaaatgaaatgcaaaaacgtattcctcatactataaatgatctcgtggagccacctgaacacagaagtttcctcagtgaggatggtgtctttgtcatatcgccctagcagagcgttctctgagagcttagggtgggaggaatatttctctccatactgatccttatagatcaaagttgagaatggtaattttgcttccattcactttaatcacccaccttcctttcttcctttcccaacacctcacaaaagcaccttaggctaggttcacagacggtgctctgagatgtggtctcatgcaggtcccctaagttagcatgccttgaatgtgttacggatacagatgcctgcagtggaaggatgaccagcaccaagaggaaaaggaaatggttgcctgaagtgtgctccaaagacacatccatgtgattctctagttcagcagaaagaataaaaattgcttcaatcta

SEQ ID NO: 1788 - DNA, 618 bp, Homo sapiens
  source 1..618: mol_type = genomic DNA; mol_type = genomic DNA
ctttttgcacacacacgaatacaaagagccatacgaccttcgggttgcactagtcgggggttccatgctggggggcagaaggaatgctctctaccgtctgaaaccgttcatcaggaaggccttgatttgtgatgtgctaggagagcacaggatctgcaaatagaaggcacctgtctcccttctgcaggccgaggagaggccgccatggactgtgtgcttcttcatggcttgtttactcttctttcacagaccctacagcttggggcctgggctcctctgaccatcctcattgagaaaggaaagtgagtccagagaagttgatgcttcctacctgttggagcggcccagcagtgtaagcgtggttgttactgccccatccgccatgtccttcagtgccaccattctcttctcccctcccagtggcagcgaggccagatgctgctgctgcgcctgtaagagtgagactaatggaggcaacacaggctcccagggtgggaatcctcctcccagcacccccatcacagtgactggacatggcttggctgttcagagctcagagcagctcctgcatgttatctaccagcgggtcgataaggcagtgggtttggctgaagctgc

SEQ ID NO: 1789 - DNA, 2668 bp, Homo sapiens
  source 1..2668: mol_type = genomic DNA; mol_type = genomic DNA
gctctacctcttggacttccaacttctgtgagtcaacatagtgcctcttgcatttaagaaatttcaattagtgagaactgaggaaaaaccaagaagcctgcattccacagatcaagatgttgcagaggctccgcgttcttgtgagagtatgttccgagctctctgacctgtcaccatgggatcactcttttgaagagacttcctggaggacactgatgacagtgtgaaagcagggatgggaggaaaagcagggaggggagggacagtgtggcacatggccgccccagagtgcccattctcacatcgccattttaggcaactttttcttttctttcccattctctgcactcctatgctcaactttcctgtctctactttctgatgtgttccccaacacccacctttctttaattccatcattctctaacctttctacacacatatatacaaacttagtatccagcctagaacaggaggctgtccatctccatcactgatagatcaaggtctccaggtaatgactgttagagaatcactcaggttgccaccaagtaggacttcttttacaacgagcctggtaaggtaagaaaactcaggaggttgcttctgcaattaaataattggttcttcatggagcatggaccaatttgtcaaagcactctaggggctcaaattccgttttagcactggccatttcagtagtcattgtgtttgacagcctagagagagagatacagtctagccttaagaagggaaaccagactgatagaggccatagaatagcagctaaggacagatgtgtggaatttagacaaaaataggcttgaaccaggagtctgccggatctaatgtgagattttaagcaacttcccttcacggagagatgttaataactttacacttctttttgcaactttcattgttataataacaacaatgctaaaaataatatatttattatagggttgtttggatgatggtgataatgtacttagagtgcttagtctagtgcttggcacttaactcctcattatgctagctatgactgtgtatcattgtttttactttagggtgacttcaagaatgtatttatcccagctgctcaaacttgaaccttccttgaccccttccccaagggcatctatggtcaaataagggcaagaggagaaagaaagacatggttaaggaatttttcttatcaaagtggaatgttcgaaaggggagggtggctcttttcagagcaagttctcaactcctggaaagggaaaagatgcatttatttcagacgaaaggagcatgtgagcctcctctctgcaccctccctttctccccactgctgtcttgatttcctttctccttccctctctccttaatctctctcttgctccatttcttccttgtttccttttcttcctccttacctttatttctctccctttctcattctccttcctttcaccttttcttctcttaccacagctctagactgactgtaggcctagtaaggtcatttttgtcaataatttagaagtattcagatcgattatgagttggtaatttaaaaatggtccaaaatcttagagcccagaacagcaacatgtggcataactgtgccccacacaggaaatggaagcaagcacattatcacaatagaacatatcccgttatctcttttagtgtctgcaggaaaaatgatgagaactctcatcaccacacacccactgcccctgcttctattgccgcagcagctgctgcagctggtgcagtttcaagaggtggatacagattttgatttcccagaagaagataaaaaagaagaatttgaagagtgtttggaaaaattttttagtacagggcccgccagaccacctaccaaagaaaaagtcaaaagacgtgtccttattgaacctggaatgccactaaatcatatagagtactgtaaccatgaaatcatgggaaaaaatgtttactacaaacaccgttgggtggcagaacattacttccttcttatgcaatatgacgagctccaaaaaatctgttacaacagatttgtgccatgtaagaatggaattaggaaatgtaacaggagcaaaggtcttgtagaaggagtgtattgtaatttaacagaagcatttgaaataccagcgtgtaaatacgaatcactttataggaagggctacgtccttatcacttgttcatggcaaaatgaaatgcaaaaacgtattcctcatactataaatgatctcgtggagccacctgaacacagaagtttcctcagtgaggatggtgtctttgtcatatcgccctagcagagcgttctctgagagcttagggtgggaggaatatttctctccatactgatccttatagatcaaagttgagaatggtaattttgcttccattcactttaatcacccaccttcctttcttcctttcccaacacctcacaaaagcaccttaggctaggttcacagacggtgctctgagatgtggtctcatgcaggtcccctaagttagcatgccttgaatgtgttacggatacagatgcctgcagtggaaggatgaccagcaccaagaggaaaaggaaatggttgcctgaagtgtgctccaaagacacatccatgtgattctctagttcagcagaaagaataaaaattgcttcaatcta

SEQ ID NO: 1790 - DNA, 4282 bp, Homo sapiens
  source 1..4282: mol_type = genomic DNA; mol_type = genomic DNA
gcggtgcaccgaggcgcacccggctgtcctgttgcgggtctcctggtcacctgtgggccatagggagagacgcgcccacacactctcgcccgcgcccaggacagctgcgggagccccgggccgctctaacccaatgcgtctcccgcaggctgagatgcggctgctcctgctcgtgccgctgctgctggctccagcgcccgggtcctcggctcccaaggtgaggcggcagagtgacacctggggaccctggagccagtggagcccctgcagccggacctgtggagggggtgtcagcttccgggagcgcccctgctactcccagaggagagatggaggctccagctgcgtgggccccgcccggagccaccgctcttgtcgcacggagagctgccccgacggcgcccgggacttccgggccgagcagtgcgcggagttcgacggagcggagttccaggggcggcggtatcggtggctgccctactacagcgccccaaacaagtgtgaactgaactgcattcccaagggggagaacttctactacaagcacagggaggctgtggttgatgggacgccctgcgagcctggcaagagggatgtctgtgtggatggcagctgccgggttgtcggctgtgatcacgagctggactcgtccaagcaggaggacaagtgtctgcggtgtgggggtgacggcacgacctgctaccccgtcgcaggcacctttgacgctaatgacctcagccgaggctacaaccagatcctcatagttcccatgggtgccaccagcatcctcatcgacgaggctgctgccagcaggaacttcctggctgtgaagaatgttcgtggggaatactacctcaatgggcactggaccatcgaggcggcccgggccctgccagcagccagcaccatcctgcattacgagcggggtgctgagggggacctggcccctgagcgactccatgcccggggccccacctcggagcccctggtcatcgagctcatcagccaggagcccaaccccggtgtgcactatgagtaccacctgcccctgcgccgccccagccccggcttcagctggagccacggctcatggagtgactgcagcgcggagtgtggcggaggtcaccagtcccgcctggtgttctgcaccatcgaccatgaggcctaccccgaccacatgtgccagcgccagccacggccagctgaccggcgttcctgcaatcttcacccttgcccggagaccaagcgctggaaggcagggccatgggcaccctgctcagcctcctgtggaggaggctcccagtcccgctccgtgtactgcatctcgtctgacggggccggcatccaggaggccgtggaggaggctgagtgtgccgggctgcctgggaagccccctgccattcaggcctgtaacctgcagcgctgtgcagcctggagcccggagccctggggagagtgttctgtcagttgtggcgttggcgtccggaagcggagcgttacttgccggggtgaaaggggttctttgctccataccgcagcgtgctccttggaagaccggccacctctgactgagccctgtgtgcatgaggactgccccctcctcagtgaccaggcctggcatgttggcacctggggtctatgctccaagagctgcagctcgggcactcggaggcgacaggtcatctgtgccattgggccgcccagccactgcgggagcctgcagcactccaagcctgtggatgtggagccttgtaacacgcagccctgtcatctcccccaggaggtccccagcatgcaggatgtgcacacccctgccagcaacccctggatgccgttgggccctcaggagtcccctgcctcagactccagaggccagtggtgggcagcccaggaacacccctcagccaggggtgaccacaggggagaacgaggtgaccccaggggcgaccaaggcacccacctgtcagccctgggccccgctccctctctgcagcagcccccataccagcaacccctgcggtcgggctcagggccccacgactgcagacacagtcctcacgggtgctgccccgatggccacacggcatctctcgggcctcagtggcaaggctgccctggggccccctgtcagcagagcaggtacgggtgctgccctgacagggtatctgtcgctgaggggccccatcacgctggctgcacaaagtcgtatggtggtgacagcaccgggggcatgcccaggtcaagggcagtggcttctacagtccacaacacccaccagccccaggcccagcagaatgagcccagtgagtgccggggctcccagtttggctgttgctatgacaacgtggccactgcagccggtcctcttggggaaggctgtgtgggccagcccagccatgactgggctgcccgctggtacttcgttgcctctgtgggccaatgtaaccgcttctggtatggcggctgccatggcaatgccaataactttgcctcggagcaagagtgcatgagcagctgccagggatctctccatgggccccgtcgtccccagcctggggcttctggaaggagcacccacacggatggtggcggcagcagtcctgcaggcgagcaggaacccagccagcacaggacaggggccgcggtgcagagaaagccctggccttctggtggtctctggcggcaagaccaacagcctgggccaggggaggccccccacacccaggcctttggagaatggccatgggggcaggagcttgggtccagggcccctggactgggtggagatgccggatcaccagcgccacccttccacagctcctcctacaggattagcttggcaggtgtggagccctcgttggtgcaggcagccctggggcagttggtgcggctctcctgctcagacgacactgccccggaatcccaggctgcctggcagaaagatggccagcccatctcctctgacaggcacaggctgcagttcgacggatccctgatcatccaccccctgcaggcagaggacgcgggcacctacagctgtggcagcacccggccaggccgcgactcccagaagatccaacttcgcatcatagggggtgacatggccgtgctgtctgaggctgagctgagccgcttccctcagcccagggacccagctcaggactttggccaagcgggggctgctgggcccctgggggccatcccctcttcacacccacagcctgcaaacaggctgcgtttggaccagaaccagccccgggtggtggatgccagtccaggccagcggatccggatgacctgccgtgccgaaggcttcccgcccccagccatcgagtggcagagagatgggcagcctgtctcttctcccagacaccagctgcagcctgatggctccctggtcattagccgagtggctgtagaagatggcggcttctacacctgtgtcgctttcaatgggcaggaccgagaccagcgatgggtccagctcagagttctgggggagctgacaatctcaggactgccccctactgtgacagtgccagagggtgatacggccaggctattgtgtgtggtagcaggagaaagtgtgaacatcaggtggtccaggaacgggctacctgtgcaggctgatggccaccgtgtccaccagtccccagatggcacgctgctcatttacaacttgcgggccagggatgagggctcctacacgtgcagtgcctaccaggggagccaggcagtcagccgcagcaccgaggtgaaggtggtctcaccagcacccaccgcccagcccagggaccctggcagggactgcgtcgaccagccagagctggccaactgtgatttgatcctgcaggcccagctttgtggcaatgagtattactccagcttctgctgtgccagctgttcacgtttccagcctcacgctcagcccatctggcagtagggatgaaggctagttccagccccagtccaaaatagttcatagggctagggagaaaggaagatggactcttggcttcctctctctggctggcaaagggagttatcttctggaatacattagctctttcaaaaacccacccagtgtttagcctcaacggcagccagttaccagcttctctctgtagccttcagcagtgtttgcatctctgacataaccacaggctgctgttttcaagaagagcaatctgtttggataagaaaaacctttactttacagcttccctttataatttgttacacaggaatagttaaatgcatttgtttgtttgttttttgagac

SEQ ID NO: 1791 - DNA, 568 bp, Homo sapiens
  source 1..568: mol_type = genomic DNA; mol_type = genomic DNA
ctttttgcacacacacgaatacaaagagccatacgaccttcgggtttagctgtgcctcccagtgactataatgacaaggaagctgtaaatgtatttgagttaagcttttgcgagaaaccctacagcttggggcctgggctcctctgaccatcctcattgagaaaggaaagtgagtccagagaagttgatgcttcctacctgttggagcggcccagcagtgtaagcgtggttgttactgccccatccgccatgtccttcagtgccaccattctcttctcccctcccagtggcagcgaggccagatgctgctgctgcgcctgtaagagtgagactaatggaggcaacacaggctcccagggtgggaatcctcctcccagcacccccatcacagtgactggacatggcttggctgttcagagctcagagcagctcctgcatgttatctaccagcgggtcgataaggcagtgggtttggctgaagctgctctgggtcttgccagggccaacaatgagttgttaaaacgtctccaggaggaagtgggtgacctgaggcaagggaaagtgtcca

SEQ ID NO: 1792 - DNA, 1341 bp, Homo sapiens
  source 1..1341: mol_type = genomic DNA; mol_type = genomic DNA
acacaactggaacccatctccaggaacaaacagctggaacccatctcccgttgaagggaaactgccagatttttgtaagattcttcctcctgggcacctctaagatactgatggctctgcagaggacccattcattgcttctgcttttgctgctgaccctgctggggctggggctggtccagccctcctatggccaggatggcatgtaccagcgattcctgcggcaacacgtgcaccctgaggagacaggtggcagtgatcgctactgcaacttgatgatgcaaagacggaagatgactttgtatcactgcaagcgcttcaacaccttcatccatgaagatatctggaacattcgtagtatctgcagcaccaccaatatccaatgcaagaacggcaagatgaactgccatgagggtgtagtgaaggtcacagattgcagggacacaggaagttccagggcacccaactgcagatatcgggccatagcgagcactagacgtgttgtcattgcctgtgagggtaacccacaggtgcctgtgcactttgacggttagatgccaccatgtagggattatcgcgagtggttgaccttacacttactccttaaatagcagtgagtaatgcatttgagctgtcccaggctctgtctcctcagctcatttcctactctttttctctatataactcattctattaaatacattgcaccaaagagatatggagacataaacctgtaatgaatgaggctgggcttttctgtaataagcttccttttataatactggtcagcttagctctctcagatcctatcctgtggaatttagttattatgtgtatttatgtagtatttcaaacatttcaaaatgctttcatctatgtttatcacattttaataccacagcacttataatgatgtcactacatatagaagctcaaagttaagggatttgctgaagactgtaaagttaatggaagaattgagacaaaaatccagtgtagctggccacttatccagggctttttctacttcatcacaaggaatgttttgaaagtgtctgctttttttatccttaaaattcacctgtcagggaggcattaaaaatttggaaatgtatgccagcaaaatgtgagctctgtattttttggcattcttatgtttgggtttaataagattaagaaaatgatactgggaattttctttttcctgaaactttgaatcaccctagtaagtcaaagtactaaaaaatgtactagatcattaagacttatgtgctcttactgattgaaagattttttatgttttccttgtaataaaggacctaaaccgaaggtacctgagaa

SEQ ID NO: 1793 - DNA, 618 bp, Homo sapiens
  source 1..618: mol_type = genomic DNA; mol_type = genomic DNA
acactcagctacgggacacagtaagtaccgatgccgcaaagggaggtccccagggcttgagggcatgtgaggcgaggagaggatggactctagagttttggggtttggggtctgcaaagctctgaaggagtctcatctctgcagtttcaggtatccaaggcagcagagaacaaagaacagccaccatgcagctcttcctcctcttgtgcctggtgcttctcagccctcagggggcctcccttcaccgccaccacccccgggagatgaagaagagagtcgaggacctccatgtaggtgccacggtggcccccagcagcagaagggactttacctttgacctctacagggccttggcttccgctgcccccagccagagcatcttcttctcccctgtgagcatctccatgagcctggccatgctctccctgggggctgggtccagcacaaagatgcagatcctggagggcctgggcctcaacctccagaaaagctcagagaaggagctgcacagaggctttcagcagctccttcaggaactcaaccagcccagagatggcttccagctgagcctcggcaatgcccttttcaccgacctggtggtagacctgcaggacacct

SEQ ID NO: 1794 - DNA, 1131 bp, Homo sapiens
  source 1..1131: mol_type = genomic DNA; mol_type = genomic DNA
attccaaattcgggaaccaccagaaaggctggcctctcttcaacatgggatcttctggacttttgagcctcctggtgctattcgtcctcttagcgaatgtccagggacctggtctgactgattggttatttcccaggagatgtcccaaaatcagagaagaatgtgaattccaagaaagggatgtgtgtacaaaggacagacaatgccaggacaacaagaagtgttgtgtcttcagctgcggaaaaaaatgtttagatctcaaacaagatgtatgcgaaatgccaaaagaaactggcccctgcctggcttattttcttcattggtggtatgacaagaaagataatacttgctccatgtttgtctatggtggctgccagggaaacaataacaacttccaatccaaagccaactgcctgaacacctgcaagaataaacagccgtgtcccaaaatcaaagtggaatgcgaagtggaagaaatagaccagtgtaccaaacccagagattgcccagaaaacatgaagtgttgcccgttcagccgtggaaagaaatgtttagacttcagaaaggcctctctgtctacataaatccaggatgccttccctgaccaccttagaccgcctacactctttcttctctgcccatattattgagctctaaagaagatcatcaaggaccattcgttcattctattcattcaacaaatattgattggtgcccctgacacccatgatgggttccacttgctcattgtggccaggaaggtcagaaaagtttttctgggaaagagatccatgatttaagatctgaaagatgagtacttagaccaaaaatgggaagaaatagcctttcaggccagataataggatgtgcaaaggctctgtggcaggaggcaggatgttcaggtctagaaaggctagaaagcagagagtgagcaagagacaagaaacaggaaactggtagtgtatattcagggcaacttgaatctgtattcccaagtggccatcctcaagttttggggtcaaataaatgccctacttaatgatattttctgaatcttgttactttaggttgacatacctttcaagacaataactaggttttcagtgctttgataaaacctcaaatgtgtgg

SEQ ID NO: 1795 - DNA, 1907 bp, Homo sapiens
  source 1..1907: mol_type = genomic DNA; mol_type = genomic DNA
tttttccacccccttttgtcaactactgaaaaaaagtctccgttaaatttgaaacacaaactgtctcgcgatgggctgtcctgccaaagaaagcagcagcgaataagtacgtggcagatggtgctgtcgaccagtgtcaagaccaagtttcatgggttcctggacgctcagccaggggtagtctctgaagggccgcctggcaattgggagcagaagccagtttcccgccatctgctctccgtggaggcagtgctctcgcggctgctgcccgttggggtccagctgaggaaggagcgcggatcccaggctcgttctttgcctgggctgcccctgcggcccctggggcgggtgctgctgcggcgccagctccaagggcggatccaggcgggaggggcctcctcggagaagcggggcgcggtcccaactacgcagaggctggcacgccgaccctccacacctcaccacgcccccatctccgtccgtgtacacacactcacacaaggacgccaaccccacctagatgcaaagcaggattcaaaagaacatctttgcgttttctaccggctccccatcatcgtactagggaggaagaagcgggtgagaaacaaaacttctttccattgtcctgcccgtttctgcggacttgttctgaggccgaggcacctctaagatactgatggctctgcagaggacccattcattgcttctgcttttgctgctgaccctgctggggctggggctggtccagccctcctatggccaggatggcatgtaccagcgattcctgcggcaacacgtgcaccctgaggagacaggtggcagtgatcgctactgcaacttgatgatgcaaagacggaagatgactttgtatcactgcaagcgcttcaacaccttcatccatgaagatatctggaacattcgtagtatctgcagcaccaccaatatccaatgcaagaacggcaagatgaactgccatgagggtgtagtgaaggtcacagattgcagggacacaggaagttccagggcacccaactgcagatatcgggccatagcgagcactagacgtgttgtcattgcctgtgagggtaacccacaggtgcctgtgcactttgacggttagatgccaccatgtagggattatcgcgagtggttgaccttacacttactccttaaatagcagtgagtaatgcatttgagctgtcccaggctctgtctcctcagctcatttcctactctttttctctatataactcattctattaaatacattgcaccaaagagatatggagacataaacctgtaatgaatgaggctgggcttttctgtaataagcttccttttataatactggtcagcttagctctctcagatcctatcctgtggaatttagttattatgtgtatttatgtagtatttcaaacatttcaaaatgctttcatctatgtttatcacattttaataccacagcacttataatgatgtcactacatatagaagctcaaagttaagggatttgctgaagactgtaaagttaatggaagaattgagacaaaaatccagtgtagctggccacttatccagggctttttctacttcatcacaaggaatgttttgaaagtgtctgctttttttatccttaaaattcacctgtcagggaggcattaaaaatttggaaatgtatgccagcaaaatgtgagctctgtattttttggcattcttatgtttgggtttaataagattaagaaaatgatactgggaattttctttttcctgaaactttgaatcaccctagtaagtcaaagtactaaaaaatgtactagatcattaagacttatgtgctcttactgattgaaagattttttatgttttccttgtaataaaggacctaaaccgaaggtacctgagaa

SEQ ID NO: 1796 - DNA, 886 bp, Homo sapiens
  source 1..886: mol_type = genomic DNA; mol_type = genomic DNA
cagtgacctagagcaggcatggaattttgggtgtcaccaggtaaacagagccctcagcatctgaatagaaactgaacaggaacagaagagattacactacatctgagatggagacctttcctctgctgctgctcagcctgggcctggttcttgcagaagcatcagaaagcacaatgaagataattaaagaagaatttacagacgaagagatgcaatatgacatggcaaaaagtggccaagaaaaacagaccattgagatattaatgaacccgatcctgttagttaaaaataccagcctcagcatgtccaaggatgatatgtcttccacattactgacattcagaagtttacattataatgaccccaagggaaacagttcgggtaatgacaaagagtgttgcaatgacatgacagtctggagaaaagtttcagaagcaaacggatcgtgcaagtggagcaataacttcatccgcagctccacagaagtgatgcgcagggtccacagggcccccagctgcaagtttgtacagaatcctggcataagctgctgtgagagcctagaactggaaaatacagtgtgccagttcactacaggcaaacaattccccaggtgccaataccatagtgttacctcattagagaagatattgacagtgctgacaggtcattctctgatgagctggttagtttgtggctctaagttgtaaatcccacagagctttaggactagggtcttactaaagaaggacctcttcttgttcattcttgtttaaacctttccttaatatctactctttagcactatagtgaactcctgattatttattctaactggaggagtgaaaaatccaaaattgtggataattcaattaaaagttatgactga

SEQ ID NO: 1797 - DNA, 571 bp, Homo sapiens
  source 1..571: mol_type = genomic DNA; mol_type = genomic DNA
acacacgaatacaaagagccatacgaccttcggagactgggtcttgctatgctgccgaggttggtctcaaactcctgggctcaagcgatcctcctcctcccaaagtgctgggattacaggcatgagccaccatgcccagccatgaatgtcttactaccctatcagttaatcctatacattgctcaaggctcaactggaagcttttcttcttttcaggtttagctgtgcctcccagtgactataatgacaaggaagctgtaaatgtatttgagttaagcttttgcgagaaaccctacagcttggggcctgggctcctctgaccatcctcattgagaaaggaaagtgagtccagagaagttgatgcttcctacctgttggagcggcccagcagtgtaagcgtggttgttactgccccatccgccatgtccttcagtgccaccattctcttctcccctcccagtggcagcgaggccagatgctgctgctgcgcctgtaagagtgagactaatggaggcaacacaggctcccagggtgggaatcctcctcccagcacccccatcacagtgactgg

SEQ ID NO: 1798 - DNA, 462 bp, Homo sapiens
  source 1..462: mol_type = genomic DNA; mol_type = genomic DNA
aaaatgtcggctggataggaggtgctcagtaagtggcagcttctgttgttttctgtgcctggagtcttgggcctttagaaatcaggaacaatgatccaatattatcggcttccgtgagataagggcatcttgcctggaggctgccacccaggccggtcatggcagctgctcatgaaggacagtaacaatttggcagtttgttaaatgaacaaaatgtagaaataaagtaagcagaatttttagtttttctgaaggtagggcttttggccagatatgcagcaataaaagagcaaactgcttccttgggccagtgtccttgctcatagatcaggaaaccgaagcatgaagaatacaggcggcagatgcctgaagaacaaagaacagccaccatgcagctcttcctcctcttgtgcctggtgcttctcagccctcagggggcctcccttcaccgccaccaccccc

SEQ ID NO: 1799 - DNA, 1212 bp, Homo sapiens
  source 1..1212: mol_type = genomic DNA; mol_type = genomic DNA
gctctacctcttggacttccaacttctgtgagtcaacatagtgcctcttgcatttaagaaatttcaattagtgagaactgaggaaaaaccaagaagcctgcattccacagatcaagatgttgcagaggctccgcgttcttgtgagagtatgttccgagctctctgacctgtcaccatgggatcactcttttgaagagacttcctggaggacactgatgacatgtctgcaggaaaaatgatgagaactctcatcaccacacacccactgcccctgcttctattgccgcagcagctgctgcagctggtgcagtttcaagaggtggatacagattttgatttcccagaagaagataaaaaagaagaatttgaagagtgtttggaaaaattttttagtacagggcccgccagaccacctaccaaagaaaaagtcaaaagacgtgtccttattgaacctggaatgccactaaatcatatagagtactgtaaccatgaaatcatgggaaaaaatgtttactacaaacaccgttgggtggcagaacattacttccttcttatgcaatatgacgagctccaaaaaatctgttacaacagatttgtgccatgtaagaatggaattaggaaatgtaacaggagcaaaggtcttgtagaaggagtgtattgtaatttaacagaagcatttgaaataccagcgtgtaaatacgaatcactttataggaagggctacgtccttatcacttgttcatggcaaaatgaaatgcaaaaacgtattcctcatactataaatgatctcgtggagccacctgaacacagaagtttcctcagtgaggatggtgtctttgtcatatcgccctagcagagcgttctctgagagcttagggtgggaggaatatttctctccatactgatccttatagatcaaagttgagaatggtaattttgcttccattcactttaatcacccaccttcctttcttcctttcccaacacctcacaaaagcaccttaggctaggttcacagacggtgctctgagatgtggtctcatgcaggtcccctaagttagcatgccttgaatgtgttacggatacagatgcctgcagtggaaggatgaccagcaccaagaggaaaaggaaatggttgcctgaagtgtgctccaaagacacatccatgtgattctctagttcagcagaaagaataaaaattgcttcaatcta

SEQ ID NO: 1800 - DNA, 499 bp, Homo sapiens
  source 1..499: mol_type = genomic DNA; mol_type = genomic DNA
ctttttgcacacacacgaatacaaagagccatacgaccttcgggtatcctttttccattttttttcctccttaatcttgtgtgtgttttcaaattttttaaaaatagagatctgtagcagtgttggggttgcactagtcgggggttccatgctggggggcagaaggaatgctctctaccgtctgaaaccgttcatcaggaaggccttgatttgtgatgtgctaggagagcacaggatctgcaaatagaaggcacctgtctcccttctgcaggccgaggagaggccgccatggactgtgtgcttcttcatggcttgtttactcttctttcacagaccctacagcttggggcctgggctcctctgaccatcctcattgagaaaggaaagtgagtccagagaagttgatgcttcctacctgttggagcggcccagcagtgtaagcgtggttgttactgccccatccgccatgtccttcagtgccaccattctcttctcccct

SEQ ID NO: 1801 - DNA, 631 bp, Homo sapiens
  source 1..631: mol_type = genomic DNA; mol_type = genomic DNA
ggggttggagcaggaggaatctgactgtcctttgctactttctatcttcccttactcaacagcagtcaaagccaaagatgcgaagtcactcttacctctgatgataataatggtgataattttcttggtgcttctgttctgggaaaatgaggtgaatgatgaagcagtgatgtcaactttagaacacttgcatgtggactaccctcagaatgacgttcccgttcctgcaaggtactgcaaccacatgatcatacaaagagttatcagggaacctgaccacacttgtaaaaaggagcatgtcttcatccatgagaggcctcgaaaaatcaatggtatttgcatttctcccaagaaggttgcttgccaaaacctttcggccattttctgctttcagagtgagacaaagttcaaaatgacagtctgtcagctcattgaaggcacaagataccctgcctgcaggtaccactattcccccacagaggggtttgttcttgtcacttgtgatgacttgaggccagatagtttccttggctatgttaaataactcaagatcagctcccgagtctgagatctcttctctcaatggcattggagctggctgtgcctgaggcagacctggaccgtggacatg

SEQ ID NO: 1802 - DNA, 829 bp, Homo sapiens
  source 1..829: mol_type = genomic DNA; mol_type = genomic DNA
gacaaatgctggctgcaatccagccagccctctgccctttctgagcccgagggactgccacctccactgtgtgcacactcagctacgggacacatttcaggtatccaaggcagcagagaacaaagaacagccaccatgcagctcttcctcctcttgtgcctggtgcttctcagccctcagggggcctcccttcaccgccaccacccccgggagatgaagaagagagtcgaggacctccatgtaggtgccacggtggcccccagcagcagaagggactttacctttgacctctacagggccttggcttccgctgcccccagccagagcatcttcttctcccctgtgagcatctccatgagcctggccatgctctccctgggggctgggtccagcacaaagatgcagatcctggagggcctgggcctcaacctccagaaaagctcagagaaggagctgcacagaggctttcagcagctccttcaggaactcaaccagcccagagatggcttccagctgagcctcggcaatgcccttttcaccgacctggtggtagacctgcaggacaccttcgtaagtgccatgaagacgctgtacctggcagacactttccctaccaactttagggactctgcaggggccatgaagcagatcaatgattatgtggcaaagcaaacgaagggcaagattgtggacttgcttaagaacctcgatagcaatgcggtcgtgatcatggtgaattacatcttctttaaagctaagtgggagacaagcttcaaccacaaaggcacccaagagcaagacttctacgtgacctcggagactgtggtgc

SEQ ID NO: 1803 - DNA, 1626 bp, Homo sapiens
  source 1..1626: mol_type = genomic DNA; mol_type = genomic DNA
atggcaaaatttggcgttcacagaatccttcttctggctatttctctgacaaagtgtctggagagtacaaaactgctggcagaccttaaaaaatgtggtgacttggaatgtgaagctttaataaacagagtctcagccatgagagattatagaggacctgactgccgatacctgaacttcactaagggagaagagatatctgtttatgttaaacttgcaggagaaagggaagatttgtgggcaggaaaaggaaaggagtttggatattttcccagagatgcagtccagattgaagaggtgttcatatctgaggaaattcagatgtcaacgaaagaatctgactttctttgtcttcttggagtaagttacacatttgacaatgaagatagtgaattaaacggtgattatggtgaaaatatatatccttatgaagaagataaagatgaaaaatctagtatatatgaaagtgattttcagatagaacctggattttatgcaacttatgaaagtactttgtttgaagaccaagttccagcattagaggctcctgaagatatcggaagtaccagtgaatcaaaagactgggaagaagtagttgttgaaagtatggaacaggatcgtattccagaagtgcatgtcccaccatcttcagctgtgtctggagtcaaagaatggtttggattgggaggagaacaagctgaagagaaggcttttgaatcagttattgaacctgtacaagaaagctcatttcggagtagaaaaatagcagtggaagatgagaatgacctagaggaattaaataatggtgagcctcaaacagaacatcagcaagaatctgaatcagaaattgattcagtgccaaagacacagtctgaactagcatctgagtcagagcacattcccaaacctcaatccactggttggtttggtggaggatttacaagttatttaggttttggagatgaggatacagggcttgaattaatagctgaagaaagcaatccaccactacaagattttcccaattccatatcatctgataaagaagccacagttccatgtacagaaatattaacagaaaaaaaagacacaatcactaatgatagcttgagtctcaagccaagttggtttgattttggttttgctatactaggctttgcatatgccaaggaagataaaattatgttagatgacaggaaaaatgaagaagatggtggggcagatgaacatgaacatcctctaacaagtgaattagaccctgaaaaagaacaagaaatagaaacgataaaaattatagaaacagaagatcaaatagacaagaaaccagtctcagaaaaaacagacgaatctgatactataccatatttgaaaaagttcttgtataattttgacaacccttggaacttccagaacattccaaaggaaacagaattgccatttcccaaacagatactggatcaaaataatgtaattgaaaatgaagaaactggagaattttccattgataattatcccacagataatacaaaagttatgatattcaaaagttcatacagtctgtcaggttggtatgaaaatatttacattagaatttattttatttttaaacataatttatttttataa

SEQ ID NO: 1804 - DNA, 1497 bp, Homo sapiens
  source 1..1497: mol_type = genomic DNA; mol_type = genomic DNA
ggccttactcttccaagaggccatggaagtataaataataaagcaagaaaggcagatgcatttggctggctcagtggacttctgaatgtactgtgagtatgagaccttcccttccaaaagatccggtgcttcttgtctattccacacgaagcttgcttcagatcgagggaggatgtagcactgtccacaggtctactactcaacaggatattcttcaaggaaaatgaaccccacactaggcctggccatttttctggctgttctcctcacggtgaaaggtcttctaaagccgagcttctcaccaaggaattataaagctttgagcgaggtccaaggatggaagcaaaggatggcagccaaggagcttgcaaggcagaacatggacttaggctttaagctgctcaagaagctggccttttacaaccctggcaggaacatcttcctatcccccttgagcatctctacagctttctccatgctgtgcctgggtgcccaggacagcaccctggacgagatcaagcaggggttcaacttcagaaagatgccagaaaaagatcttcatgagggcttccattacatcatccacgagctgacccagaagacccaggacctcaaactgagcattgggaacacgctgttcattgaccagaggctgcagccacagcgtaagtttttggaagatgccaagaacttttacagtgccgaaaccatccttaccaactttcagaatttggaaatggctcagaagcagatcaatgactttatcagtcaaaaaacccatgggaaaattaacaacctgatcgagaatatagaccccggcactgtgatgcttcttgcaaattatattttctttcgagccaggtggaaacatgagtttgatccaaatgtaactaaagaggaagatttctttctggagaaaaacagttcagtcaaggtgcccatgatgttccgtagtggcatataccaagttggctatgacgataagctctcttgcaccatcctggaaataccctaccagaaaaatatcacagccatcttcatccttcctgatgagggcaagctgaagcacttggagaagggattgcaggtggacactttctccagatggaaaacattactgtcacgcagggtcgtagacgtgtctgtacccagactccacatgacgggcaccttcgacctgaagaagactctctcctacataggtgtctccaaaatctttgaggaacatggtgatctcaccaagatcgcccctcatcgcagcctgaaagtgggcgaggctgtgcacaaggctgagctgaagatggatgagaggggtacggaaggggccgctggcaccggagcacagactctgcccatggagacaccactcgtcgtcaagatagacaaaccctatctgctgctgatttacagcgagaaaataccttccgtgctcttcctgggaaagattgttaaccctattggaaaataaaggagaattcctgcttgccacagaccccg

SEQ ID NO: 1805 - DNA, 2703 bp, Homo sapiens
  source 1..2703: mol_type = genomic DNA; mol_type = genomic DNA
gctctacctcttggacttccaacttctgtgagtcaacatagtgcctcttgcatttaagaaacatctcatcacactcttatcagcattgagtttaaatttcaattagtgagaactgaggaaaaaccaagaagcctgcattccacagatcaagatgttgcagaggctccgcgttcttgtgagagtatgttccgagctctctgacctgtcaccatgggatcactcttttgaagagacttcctggaggacactgatgacagtgtgaaagcagggatgggaggaaaagcagggaggggagggacagtgtggcacatggccgccccagagtgcccattctcacatcgccattttaggcaactttttcttttctttcccattctctgcactcctatgctcaactttcctgtctctactttctgatgtgttccccaacacccacctttctttaattccatcattctctaacctttctacacacatatatacaaacttagtatccagcctagaacaggaggctgtccatctccatcactgatagatcaaggtctccaggtaatgactgttagagaatcactcaggttgccaccaagtaggacttcttttacaacgagcctggtaaggtaagaaaactcaggaggttgcttctgcaattaaataattggttcttcatggagcatggaccaatttgtcaaagcactctaggggctcaaattccgttttagcactggccatttcagtagtcattgtgtttgacagcctagagagagagatacagtctagccttaagaagggaaaccagactgatagaggccatagaatagcagctaaggacagatgtgtggaatttagacaaaaataggcttgaaccaggagtctgccggatctaatgtgagattttaagcaacttcccttcacggagagatgttaataactttacacttctttttgcaactttcattgttataataacaacaatgctaaaaataatatatttattatagggttgtttggatgatggtgataatgtacttagagtgcttagtctagtgcttggcacttaactcctcattatgctagctatgactgtgtatcattgtttttactttagggtgacttcaagaatgtatttatcccagctgctcaaacttgaaccttccttgaccccttccccaagggcatctatggtcaaataagggcaagaggagaaagaaagacatggttaaggaatttttcttatcaaagtggaatgttcgaaaggggagggtggctcttttcagagcaagttctcaactcctggaaagggaaaagatgcatttatttcagacgaaaggagcatgtgagcctcctctctgcaccctccctttctccccactgctgtcttgatttcctttctccttccctctctccttaatctctctcttgctccatttcttccttgtttccttttcttcctccttacctttatttctctccctttctcattctccttcctttcaccttttcttctcttaccacagctctagactgactgtaggcctagtaaggtcatttttgtcaataatttagaagtattcagatcgattatgagttggtaatttaaaaatggtccaaaatcttagagcccagaacagcaacatgtggcataactgtgccccacacaggaaatggaagcaagcacattatcacaatagaacatatcccgttatctcttttagtgtctgcaggaaaaatgatgagaactctcatcaccacacacccactgcccctgcttctattgccgcagcagctgctgcagctggtgcagtttcaagaggtggatacagattttgatttcccagaagaagataaaaaagaagaatttgaagagtgtttggaaaaattttttagtacagggcccgccagaccacctaccaaagaaaaagtcaaaagacgtgtccttattgaacctggaatgccactaaatcatatagagtactgtaaccatgaaatcatgggaaaaaatgtttactacaaacaccgttgggtggcagaacattacttccttcttatgcaatatgacgagctccaaaaaatctgttacaacagatttgtgccatgtaagaatggaattaggaaatgtaacaggagcaaaggtcttgtagaaggagtgtattgtaatttaacagaagcatttgaaataccagcgtgtaaatacgaatcactttataggaagggctacgtccttatcacttgttcatggcaaaatgaaatgcaaaaacgtattcctcatactataaatgatctcgtggagccacctgaacacagaagtttcctcagtgaggatggtgtctttgtcatatcgccctagcagagcgttctctgagagcttagggtgggaggaatatttctctccatactgatccttatagatcaaagttgagaatggtaattttgcttccattcactttaatcacccaccttcctttcttcctttcccaacacctcacaaaagcaccttaggctaggttcacagacggtgctctgagatgtggtctcatgcaggtcccctaagttagcatgccttgaatgtgttacggatacagatgcctgcagtggaaggatgaccagcaccaagaggaaaaggaaatggttgcctgaagtgtgctccaaagacacatccatgtgattctctagttcagcagaaagaataaaaattgcttcaatcta

SEQ ID NO: 1806 - DNA, 703 bp, Homo sapiens
  source 1..703: mol_type = genomic DNA; mol_type = genomic DNA
cacaggctttggagagcactctctgtcctgatcttttcagttgagagacttcagctgttcattgctcatttggacttagttcaaggtcatgtcaaagaagaagaattttgggtgtcaccaggtaaacagagccctcagcatctgaatagaaactgaacaggaacagaagagattacactacatctgagatggagacctttcctctgctgctgctcagcctgggcctggttcttgcagaagcatcagaaagcacaatgaagataattaaagaagaatttacagacgaagagatgcaatatgacatggcaaaaagtggccaagaaaaacagaccattgagatattaatgaacccgatcctgttagttaaaaataccagcctcagcatgtccaaggatgatatgtcttccacattactgacattcagaagtttacattataatgaccccaagggaaacagttcgggtaatgacaaagagtgttgcaatgacatgacagtctggagaaaagtttcagaagcaaacggatcgtgcaagtggagcaataacttcatccgcagctccacagaagtgatgcgcagggtccacagggcccccagctgcaagtttgtacagaatcctggcataagctgctgtgagagcctagaactggaaaatacagtgtgccagttcactacaggcaaacaattccccaggtgccaatacca

SEQ ID NO: 1807 - DNA, 1137 bp, Homo sapiens
  source 1..1137: mol_type = genomic DNA; mol_type = genomic DNA
gctctacctcttggacttccaacttctgtgagtcaacatagtgcctcttgcatttaagaaatttcaattagtgagaactgaggaaaaaccaagaagcctgcattccacagatcaagatgttgcagaggctccgcgttcttgtgagatgtctgcaggaaaaatgatgagaactctcatcaccacacacccactgcccctgcttctattgccgcagcagctgctgcagctggtgcagtttcaagaggtggatacagattttgatttcccagaagaagataaaaaagaagaatttgaagagtgtttggaaaaattttttagtacagggcccgccagaccacctaccaaagaaaaagtcaaaagacgtgtccttattgaacctggaatgccactaaatcatatagagtactgtaaccatgaaatcatgggaaaaaatgtttactacaaacaccgttgggtggcagaacattacttccttcttatgcaatatgacgagctccaaaaaatctgttacaacagatttgtgccatgtaagaatggaattaggaaatgtaacaggagcaaaggtcttgtagaaggagtgtattgtaatttaacagaagcatttgaaataccagcgtgtaaatacgaatcactttataggaagggctacgtccttatcacttgttcatggcaaaatgaaatgcaaaaacgtattcctcatactataaatgatctcgtggagccacctgaacacagaagtttcctcagtgaggatggtgtctttgtcatatcgccctagcagagcgttctctgagagcttagggtgggaggaatatttctctccatactgatccttatagatcaaagttgagaatggtaattttgcttccattcactttaatcacccaccttcctttcttcctttcccaacacctcacaaaagcaccttaggctaggttcacagacggtgctctgagatgtggtctcatgcaggtcccctaagttagcatgccttgaatgtgttacggatacagatgcctgcagtggaaggatgaccagcaccaagaggaaaaggaaatggttgcctgaagtgtgctccaaagacacatccatgtgattctctagttcagcagaaagaataaaaattgcttcaatcta

SEQ ID NO: 1808 - DNA, 681 bp, Homo sapiens
  source 1..681: mol_type = genomic DNA; mol_type = genomic DNA
ggcatttcaatcctgtatgtgagagctagagactcatacagtgacctagagcaggcatggaattttgggtgtcaccaggtaaacagagccctcagcatctgaatagaaactgaacaggaacagaagagattacactacatctgagatggagacctttcctctgctgctgctcagcctgggcctggttcttgcagaagcatcagaaagcacaatgaagataattaaagaagaatttacagacgaagagatgcaatatgacatggcaaaaagtggccaagaaaaacagaccattgagatattaatgaacccgatcctgttagttaaaaataccagcctcagcatgtccaaggatgatatgtcttccacattactgacattcagaagtttacattataatgaccccaagggaaacagttcgggtaatgacaaagagtgttgcaatgacatgacagtctggagaaaagtttcagaagcaaacggatcgtgcaagtggagcaataacttcatccgcagctccacagaagtgatgcgcagggtccacagggcccccagctgcaagtttgtacagaatcctggcataagctgctgtgagagcctagaactggaaaatacagtgtgccagttcactacaggcaaacaattccccaggtgccaataccatagtgttacctcattagagaa

SEQ ID NO: 1809 - DNA, 607 bp, Homo sapiens
  source 1..607: mol_type = genomic DNA; mol_type = genomic DNA
acaatgcccaggacaagatcacaaagcatcatcctgttcaaaaggtcaacaggatcaaggttgagagaccctgaaataaggccatggggacaaaatgtcggctggataggaggtgctcaaacaaagaacagccaccatgcagctcttcctcctcttgtgcctggtgcttctcagccctcagggggcctcccttcaccgccaccacccccgggagatgaagaagagagtcgaggacctccatgtaggtgccacggtggcccccagcagcagaagggactttacctttgacctctacagggccttggcttccgctgcccccagccagagcatcttcttctcccctgtgagcatctccatgagcctggccatgctctccctgggggctgggtccagcacaaagatgcagatcctggagggcctgggcctcaacctccagaaaagctcagagaaggagctgcacagaggctttcagcagctccttcaggaactcaaccagcccagagatggcttccagctgagcctcggcaatgcccttttcaccgacctggtggtagacctgcaggacaccttcgtaagtgccatgaagacgctgtacctggcagacact

SEQ ID NO: 1810 - DNA, 2596 bp, Homo sapiens
  source 1..2596: mol_type = genomic DNA; mol_type = genomic DNA
tcccccctcttaaaacacgatgcctcccaggatgctagtggcaccactgccactgcatttcctgttggcagcagtgagcagtgaaaaccgaagcggcagaaggcagtggcagcaggcagtggcagcaggcagtggcccaggcagaaatagctcccgcgcgattcactggagccttccccgggccctggtcccggctaccgggactcgcgcgtccggatctcaaaagcggcagaggccaccgaagggacaggaagcactttggtccagaccacactcccggcacagtgcggaaagagccggcgggagccactctgatcccggacgcctcagcgcccccttgggcttgggcttgccctcgggccggggaaggctgaccgcgatgccaggacgcgctcccctccgcaccgtcccgggcgccctgggtgcctggctgctgggcggcctctgggcctggaccctgtgcggcctgtgcagcctgggggcggtgggagccccgcgcccgtgccaggcgccgcagcagtgggaggggcgccaggttatgtaccagcaaagtagcgggcgcaacagccgcgccctgctctcctacgacgggctcaaccagcgcgtgcgggtgctggacgagaggaaggcgctgatcccctgcaagagattatttgaatatattttgctgtataaggatggagtgatgtttcagattgaccaagccaccaagcagtgctcaaagatgaccctgacacagccctgggatcctcttgacattcctcaaaactccacctttgaagaccagtactccatcggggggcctcaggagcagatcaccgtccaggagtggtcggacagaaagtcagctagatcctatgaaacctggattggcatctatacagtcaaggattgctatcctgtccaggaaacctttaccataaactacagtgtgatattgtctacgcggttttttgacatccagctgggtattaaagacccctcggtgtttacccctccaagcacgtgccagatggcccaactggagaagatgagcgaagactgctcctggtgagcctgtgcatagggaagcggcagcatcggatgtcagccccctgcggccccagctggagatggatatgagactagtcaagatgtgaatgctaattggagagaaatataattttaggaagatgcacattgatgtggggttttgatgtgtctgattttgactactcaagctctgtttacagaagaaaattgaatggcgagggtgtggccatatgaactgactagatggctaatatggacactttgggtatttctaatgcctgttcagggctggttttctgcatgcacgggtatacacataatgcagtgccatgcacatagggaagggtcagtaagagaagtttgccttggcagcaagtatttattgttgacattattcagaattagtgataataaaaagcagagtgattttggtcaattttattattaattcttaaattccctgcagagaatgccccctttattgctgcaccagggttggcattgctcccactgagccctactccaccctgtccctgcactcccttggttgccaaaaaaatgataacttaaatcccttccagacttaagaattttatggcatggcccaattgatataaacatttagaaggaaatgaaaagctaaaataggaagtaattattcctctaaagaaacattttgagcaaggcagtttagagaatcctaatgtctacactggcatagcacgagccatgtaagcttcttttttttctatgcaagagtattgatgtatgtgctgaatcttcacagacttgtcaatacacaggcagtattctaaaatagcactgaacagggagtcaggagactattgtctcctaaacccaggactagagttccctcgtactgtcactcctttggtcattaaatgcactgggcttgcccgcactttggccttcctagaacactgcttcataacctctctgtctgacttctgcatctccttccaggtcagctcattcacaagagttgctcccaagcctggatgagttgcaccttgcatcttgagcatgcatttctcacaataattattaagctgtgtgataatttctgctttcaggacactcatccattatcttggctgtgagctccttgggtacgggtaccttgtatgtttacttttatatccctagcacaaagcaagtgcctggcacatagtcagtgccctaagtattcgtagagtgaagaatgccagcctctcttgtccctggtttccttatgtgttgaatgtggttgagtttgtccattgctagggagagacttccagtaataaaatttactattctagatgcttctactgttatgttttatctgcccatttatctttcttagttaccaggagaaatgtgtgacacctatattataatgaaaacaatctcattacttatagtttatctatattaaacaaatttaattgcattttaaagcattctttgatactgttgcttttgcaataaatatggataatcttggttataagggagttaaaacaatgctgtaataaataaagtgcttcatgtgatcaaaatc

SEQ ID NO: 1811 - DNA, 321 bp, Homo sapiens
  source 1..321: mol_type = genomic DNA; mol_type = genomic DNA
ggtcagcccaaggctgccccctcggtcactctgttcccaccctcctctgaggagcttcaagccaacaaggccacactggtgtgtctcgtaagtgacttctacccgggagccgtgacagtggcctggaaggcagatggcagccccgtcaaggtgggagtggagaccaccaaaccctccaaacaaagcaacaacaagtatgcggccagcagctacctgagcctgacgcccgagcagtggaagtcccacagaagctacagctgccgggtcacgcatgaagggagcaccgtggagaagacagtggcccctgcagaatgctcttag

SEQ ID NO: 1812 - DNA, 1708 bp, Homo sapiens
  source 1..1708: mol_type = genomic DNA; mol_type = genomic DNA
gagttatcagaggtgagcccgtgctcttcagcggagaagatcccctacctggccgccggccactttctgtgggccgtggggtcctcaaggagacggcccttgggctcaggggctgcgtttccacacgcgcctttcccagggctcccgcgcccgttcctgcctggccgccggccgctccaacagcagcacaaggcgggactcagaaccggcgttcagggccgccagcggccgcgaggccctgagatgaggctccaaagaccccgacaggccccggcgggtgggaggcgcgcgccccggggcgggcggggctccccctaccggccagacccggggagaggcgcgcggaggctgcgaaggttccagaagggcggggagggggcgccgcgcgctgaccctccctgggcaccgctggggacgatggcgctgctcgccttgctgctggtcgtggccctaccgcgggtgtggacagacgccaacctgactgcgagacaacgagatccagaggactcccagcgaacggacgagggtgacaatagagtgtggtgtcatgtttgtgagagagaaaacactttcgagtgccagaacccaaggaggtgcaaatggacagagccatactgcgttatagcggccgtgaaaatatttccacgttttttcatggttgcgaagcagtgctccgctggttgtgcagcgatggagagacccaagccagaggagaagcggtttctcctggaagagcccatgcccttcttttacctcaagtgttgtaaaattcgctactgcaatttagaggggccacctatcaactcatcagtgttcaaagaatatgctgggagcatgggtgagagctgtggtgggctgtggctggccatcctcctgctgctggcctccattgcagccggcctcagcctgtcttgagccacgggactgccacagactgagccttccggagcatggactcgctccagaccgttgtcacctgttgcattaaacttgttttctgttgattacctcttggtttgacttcccagggtcttgggatgggagagtggggatcaggtgcagttggctcttaaccctcaagggttctttaactcacattcagaggaagtccagatctcctgagtagtgattttggtgacaagtttttctctttgaaatcaaaccttgtaactcatttattgctgatggccactcttttccttgactcccctctgcctctgagggcttcagtattgatggggagggaggcctaagtaccactcatggagagtatgtgctgagatgcttccgacctttcaggtgacgcaggaacactgggggagtctgaatgattggggtgaagacatccctggagtgaaggactcctcagcatggggggcagtggggcacacgttagggctgcccccattccagtggtggaggcgctgtggatggctgcttttcctcaacctttcctaccagattccaggaggcagaagataactaattgtgttgaagaaacttagacttcacccaccagctggcacaggtgcacagattcataaattcccacacgtgtgtgttcaacatctgaaacttaggccaagtagagagcatcagggtaaatggcgttcatttctctgttaagatgcagccatccatggggagctgagaaatcagactcaaagttccaccaaaaacaaatacaaggggacttcaaaagttcacg

SEQ ID NO: 1813 - DNA, 2844 bp, Homo sapiens
  source 1..2844: mol_type = genomic DNA; mol_type = genomic DNA
gcacgcacgcacgcacgccctcgggaagcgacgagtccgggacgcccagcgcgggcccggagcagggggaagggaagtgcggctcggtcggcgcgggtggagggggcgtgaggccgccctacggtggccgtcgagggacggcgctacggctcccacgctaggccaaacgcctccggcggccgcgcccgagagccccttcacctgcagggcgaccccagccggcgacgcgtgaaccacgccctcagccgccttgccagcgcccccagccgcgcgccccagcaccatgcggccgccctgcgcacggagccccgagggacaggggcacccgcaggcccggcccctagcaccgccggccggccccgaggtccgggacgccggcgccgccgcggagagggcaccgggccgacgcctccccccagggtcagctgcgggctcccaggcctaggcgcccatgacccctacgccaacagccgcctggacaccgccgccgccactgcgacctagcgccgccgccgccggggcccaatgccggtcatgcccattccgcggcgggtgcgctccttccacggcccgcacaccacctgcctgcatgcggcctgcgggcccgtgcgcgcctcccacctggcccgcaccaagtacaacaacttcgacgtgtacatcaagacgcgctggctgtacggcttcatccgcttcctactctactttagctgcagcctgttcactgcggcgctctggggtgcgctggccgccctcttctgcctacagtacctgggcgttcgcgtcctgctgcgcttccagcgcaagctgtcggtgctgctgctgctgctgggccgccggcgcgtggacttccgcctggtgaacgagctgctcgtctatggcatccacgtcaccatgctgctggtcgggggcctgggctggtgcttcatggtcttcgtggacatgtgagggccgtgggtgcgagcttgatgtatcgtcccggcctgtggctgtgttctctccatgggtggggtcggccagcgccttcccttcgcccatcccccaggcagtcgctgctgcccggcgcccacggagagaaaagaaagggctgagacttctgtgatgggggcgcggacaccacccctaggctggcttcctggacccaccctccccgtatgcactctcaggggcagcgcccacctgccggtggctcctgctcacatgtcttcgggtcgtactgcggggtgggccctccgttccgcctctctgtgggcctctctccaggaccacagctgccagggactttagacatcaccctgggaggcccctggacacagagggctgtgtgcccaggagcaattccggaggggggccctcctggctgcacagccccttctgcgtgccctggccccagccccagccaacgggacacggaaggctcccctcgctgacacaccacactgccacaaagctgcttactctgccctgggccgcctgaggcctggcactgcccgcggaccaccctgtgtgtgtcatcctgaggggctgtgtgggtcctgagtccccagccagccttcagggtccccttggattgtgtagatgcagtctagcggggggccggagaagggctcaggtgggaggggcctcagcaggctcccagctcaggggctggcctggggggaaccctgggagccaggggctgactccagcaacactggcctgtctgcctgttctgggagggctgtgaggatgtcttgcagatgctctggatttctgcggaggcacctccattcctttctggctttttttgcgggggagggctttgggcctctttctttgagggaacaccgtcaaagaaagcctgggagatcgaggcttcagtgagccaggatggaaacgcgtgtcccaagtgtccggagcaggcggcagaggcctcagtgcggcaaacacagccccagagcctgtgtggcaccagcagcatcttagagccccaggtatatgctgagatcttatctcacgctgtcctccagtgtctggggggcccaaatgatggcacaggggcaggtgggctggaggggcgcagatgcctgtgttcagggagggtggccaccatgggccgaggtctcacccaggaccccttgctctgctcctcagccttgcagtcacggcagcactatggtggactgcccatggccgtgtgactttgggggcaagtgggagggcgccctgaataatgattgcaaggacaacaggcagaggctaccctagagcaggacacagggtgtggtactgacaaccctagtgtcacctcaaatccatgtccccacactctgggcatgggtgggacttgtgaccctaccctgtcaggcggaccagtggcccaggagccatgaggacagttgtgtgccactggaagagaaactttttgaaaaaccctaaatcaggtagagaaagcaaaaaatctctggccgtaaaccgtgctctctaatttatcggcagcttctgtggatgacctctgatgagcccgggctgcgtccacgccctgggcaggtaggcgggagcttccctgcgtgggcctcatttcttgctgcagagaatcttttgcactaagtcatgctgtttcctcaaagaagctttgttttttgttaacgtattactcagagtcacccaagcctcttggctgagggtgaaggtgggacgggaggcgggagggggctggtggtgccgctcgtgcggtgtcaacgctgcagggagttgtggcaccttggtgccctctgagcacctggccgcctgctgtccccggtgcctgtgaaattcgtcatgccatgacccacctgcattaaacctatttttttaatgtgttgatgg

SEQ ID NO: 1814 - DNA, 2456 bp, Homo sapiens
  source 1..2456: mol_type = genomic DNA; mol_type = genomic DNA
atgtcggccccgccccgacggcgctgactcagtttcaccagaaaccagggggagaaggcggccgagccccagctctccgagcaccgggtcggaagccgcgacccgagccgcgcaggaagctgggaccggaacctcggcggacccggccccacccaactcacctgcgcaggtcaccagcaccctcggaacccagaggcccgcgctctgaaggtgacccccctggggaggaaggcgatggcccctgcgaggacgatggcccgcgcccgcctcgccccggccggcatccctgccgtcgccttgtggcttctgtgcacgctcggcctccagggcacccaggccgggccaccgcccgcgccccctgggctgcccgcgggagccgactgcctgaacagctttaccgccggggtgcctggcttcgtgctggacaccaacgcctcggtcagcaacggagctaccttcctggagtcccccaccgtgcgccggggctgggactgcgtgcgcgcctgctgcaccacccagaactgcaacttggcgctagtggagctgcagcccgaccgcggggaggacgccatcgccgcctgcttcctcatcaactgcctctacgagcagaacttcgtgtgcaagttcgcgcccagggagggcttcatcaactacctcacgagggaagtgtaccgctcctaccgccagctgcggacccagggctttggagggtctgggatccccaaggcctgggcaggcatagacttgaaggtacaaccccaggaacccctggtgctgaaggatgtggaaaacacagattggcgcctactgcggggtgacacggatgtcagggtagagaggaaagacccaaaccaggtggaactgtggggactcaaggaaggcacctacctgttccagctgacagtgactagctcagaccacccagaggacacggccaacgtcacagtcactgtgctgtccaccaagcagacagaagactactgcctcgcatccaacaaggtgggtcgctgccggggctctttcccacgctggtactatgaccccacggagcagatctgcaagagtttcgtttatggaggctgcttgggcaacaagaacaactaccttcgggaagaagagtgcattctagcctgtcggggtgtgcaaggcccctccatggaaaggcgccatccagtgtgctctggcacctgtcagcccacccagttccgctgcagcaatggctgctgcatcgacagtttcctggagtgtgacgacacccccaactgccccgacgcctccgacgaggctgcctgtgaaaaatacacgagtggctttgacgagctccagcgcatccatttccccagtgacaaagggcactgcgtggacctgccagacacaggactctgcaaggagagcatcccgcgctggtactacaaccccttcagcgaacactgcgcccgctttacctatggtggttgttacggcaacaagaacaactttgaggaagagcagcagtgcctcgagtcttgtcgcggcatctccaagaaggatgtgtttggcctgaggcgggaaatccccattcccagcacaggctctgtggagatggctgtcgcagtgttcctggtcatctgcattgtggtggtggtagccatcttgggttactgcttcttcaagaaccagagaaaggacttccacggacaccaccaccacccaccacccacccctgccagctccactgtctccactaccgaggacacggagcacctggtctataaccacaccacgcggcccctctgagcctgggtctcaccggctctcacctggccctgcttcctgcttgccaaggcagaggcctgggctgggaaaaactttggaaccagactcttgcctgtttcccaggcccactgtgcctcagagaccagggctccagcccctcttggagaagtctcagctaagctcacgtcctgagaaagctcaaaggtttggaaggagcagaaaacccttgggccagaagtaccagactagatggacctgcctgcataggagtttggaggaagttggagttttgtttcctctgttcaaagctgcctgtccctaccccatggtgctaggaagaggagtggggtggtgtcagaccctggaggccccaaccctgtcctcccgagctcctcttccatgctgtgcgcccagggctgggaggaaggacttccctgtgtagtttgtgctgtaaagagttgctttttgtttatttaatgctgtggcatgggtgaagaggaggggaagaggcctgtttggcctctctatcctctcttcctcttcccccaagattgagctctctgcccttgatcagccccaccctggcctagaccagcagacagagccaggagaagctcagctgcattccgcagcccccacccccaaggttctccaacatcacagcccagcccgcccactgggtaataaaagtggtttgtgga

SEQ ID NO: 1815 - DNA, 1970 bp, Homo sapiens
  source 1..1970: mol_type = genomic DNA; mol_type = genomic DNA
tctgcctgctgtcgggggcgggctggccaggccgaggccggagcaggcaggcatcccccggagttgtctcttttcatgccagcgccaacaggaggctgtctggacacactgattactcactcaccagcctccctcttttgtccaccagcccagcctgactcctggagattgtgaatagctccatccagcctgagaaacaagccgggtggctgagccaggctgtgcacggagtgcctgacgggcccaacagacccatgctgcatccagagacctcccctggccgggggcatctcctggctgtgctcctggccctccttggcaccgcctgggcagaggtgtggccaccccagctgcaggagcaggctccgatggccggagccctgaacaggaaggagagtttcttgctcctctccctgcacaaccgcctgcgcagctgggtccagccccctgcggctgacatgcggaggctggactggagtgacagcctggcccaactggctcaagccagggcagccctctgtggaatcccaaccccgagcctggcgtccggcctgtggcgcaccctgcaagtgggctggaacatgcagctgctgcccgcgggcttggcgtcctttgttgaagtggtcagcctatggtttgcagaggggcagcggtacagccacgcggcaggagagtgtgctcgcaacgccacctgcacccactacacgcagctcgtgtgggccacctcaagccagctgggctgtgggcggcacctgtgctctgcaggccaggcagcgatagaagcctttgtctgtgcctactcccccagaggcaactgggaggtcaacgggaagacaatcgtcccctataagaagggtgcctggtgttcgctctgcacagccagtgtctcaggctgcttcaaagcctgggaccatgcaggggggctctgtgaggtccccaggaatccttgtcgcatgagctgccagaaccatggacgtctcaacatcagcacctgccactgccactgtccccctggctacacgggcagatactgccaagtgaggtgcagcctgcagtgtgtgcacggccggttccgggaggaggagtgctcgtgcgtctgtgacatcggctacgggggagcccagtgtgccaccaaggtgcattttcccttccacacctgtgacctgaggatcgacggagactgcttcatggtgtcttcagaggcagacacctattacagagccaggatgaaatgtcagaggaaaggcggggtgctggcccagatcaagagccagaaagtgcaggacatcctcgccttctatctgggccgcctggagaccaccaacgaggtgattgacagtgacttcgagaccaggaacttctggatcgggctcacctacaagaccgccaaggactccttccgctgggccacaggggagcaccaggccttcaccagttttgcctttgggcagcctgacaaccacgggtttggcaactgcgtggagctgcaggcttcagctgccttcaactggaacaaccagcgctgcaaaacccgaaaccgttacatctgccagtttgcccaggagcacatctcccggtggggcccagggtcctgaggcctgaccacatggctccctcgcctgccctgggagcaccggctctgcttacctgtccgcccacctgtctggaacaagggccaggttaagaccacatgcctcatgtccaaagaggtctcagaccttgcacaatgccagaagttgggcagagagaggcagggaggccagtgagggccagggagtgagtgttagaagaagctggggcccttcgcctgcttttgattgggaagatgggcttcaattagatggcaaaggagaggacaccgccagtggtccaaaaaggctgctctcttccacctggcccagaccctgtggggcagcggagcttccctgtggcatgaaccccacagggtattaaattatgaatcagctgaa

SEQ ID NO: 1816 - DNA, 984 bp, Homo sapiens
  source 1..984: mol_type = genomic DNA; mol_type = genomic DNA
cccccagaacaagatgggagtcatggccatgctgatgctccccctgctgctgctgggaatcagcggcctcctcttcatttaccaagaggtgtccaggctgtggtcaaagtcagctgtgcagaacaaagtggtggtgatcaccgatgccatctcaggactgggcaaggagtgtgctcgggtgttccacacaggtggggcaaggctggtgctgtgtggaaagaactgggagaggctagagaacctatatgatgccttgatcagcgtggctgaccccagcaagacattcaccccaaagctggtcctgttggacctctcagacatcagctgtgtcccagatgtggcaaaagaagtcctggattgctatggctgtgtggacatcctcatcaacaatgccagtgtgaaggtgaaggggcctgcccataagatttctctggagctcgacaaaaagatcatggatgccaattactttggccccatcacattgacgaaagccctgcttcccaacatgatctcccggagaacaggccaaatcgtgttagtgaataatatccaagggaagtttggaatcccgttccgtacgacttacgctgcctccaagcacgcagccctgggcttctttgactgcctccgagccgaagtggaggaatacgatgttgtcatcagcaccgtgagcccgactttcatccggtcgtaccacgtgtatccagagcaaggaaactgggaagcttccatttggaaattctttttcaggaagctgacctacggcgtgcacccagtagaggtggcggaggaggtgatgcgcaccgtgcggaggaagaagcaagaggtgtttatggccaaccccatccccaaggccgccgtgtacgtccgcaccttcttcccggagttctttttcgccgtggtggcctgtggggtgaaggagaagctcaatgtcccggaggaggggtaactgcaggaggccaaatgggccaccccttggaaata

SEQ ID NO: 1817 - DNA, 1931 bp, Homo sapiens
  source 1..1931: mol_type = genomic DNA; mol_type = genomic DNA
gcaagatgtagctgtgtagtctccttccatagctgctctaagggggctggcaacatggctcagcaggcttgccccagagccatggcaaagaatggacttgtaatttgcatcctggtgatcaccttactcctggaccagaccaccagccacacatccagattaaaagccaggaagcacagcaaacgtcgagtgagagacaaggatggagatctgaagactcaaattgaaaagctctggacagaagtcaatgccttgaaggaaattcaagccctgcagacagtctgtctccgaggcactaaagttcacaagaaatgctaccttgcttcagaaggtttgaagcatttccatgaggccaatgaagactgcatttccaaaggaggaatcctggttatccccaggaactccgacgaaatcaacgccctccaagactatggtaaaaggagcctgccaggtgtcaatgacttttggctgggcatcaatgacatggtcacggaaggcaagtttgttgacgtcaacggaatcgctatctccttcctcaactgggaccgtgcacagcctaacggtggcaagcgagaaaactgtgtcctgttctcccaatcagctcagggcaagtggagtgatgaggcctgtcgcagcagcaagagatacatatgcgagttcaccatccctcaataggtctttctccaatgtgtcctccaagcaagattcatcataacttataggttcatgatctctaagatcaagtaaaaatcataatttttacttattaaaaaattgcaacacaagatcaatgtccatagcaatatgatagcatcagccaattttgctaacacatttctttgggattttgcccttcctggggtataggggatcagaaatattgatccatgtgcacgcagataaaatggcttctgctaaacagactaaaatctttctctctagtctttctcacttgtacaaacccagtttgttttcaaaaaatcacagtagcaatgcaactcatcactctagaaaagcaagcttaggctacctgaaagattttcccttggaagtttagcgtatgtttgactaacaaaaattccctacatcagagactctaggtgctatataatccaaaaacttttcagcctgttgctcattctgtcccatgctggcaataataccttgtcagcccattacccttattttgaattgctccatctcctggtgggacttgtatcttgtctgccatatcagaacacaaacccctgaagaggttctgatttgattttttttttttcttcatgcctaccctttttttggaagtttccagccgcaatttgaaatgaaatgacaaggtgtatatttgatcaattttcattcccaccattgcattacaacctctaacttaaatgggtaaccctaaggcatatcaaagaagcagattgcatgataaacggaaacagaaaaaaagaacctacatttattttgctttagcatccttactctcaccttttatgagattgagagtggacttacatttccttttttacattttcgtatacttattttttttagccatcattatatgtttaagtctattatgggcaaccaatctttggaagctgaaaactgaatttaaagaatgctatcttggaaaattgcatacgtctgtgcaattttttattctgcctagtgctattctgcttgtttaactagattgtacaaaataacttcattgcttaatatcaaattacaaagtttagacttggagggaaatgggctttttagaagcaaacaattttaaatatattttgttcttcaaataaatagtgtttaaacattgaatgtgttttgtgaacaatatcccactttgcaaactttaactacacatgcttggaattaagttttagctgttttcattgctcaataataaagcctgaattctgatc

SEQ ID NO: 1818 - DNA, 1553 bp, Homo sapiens
  source 1..1553: mol_type = genomic DNA; mol_type = genomic DNA
gtagttcggcccggccctggcaccgtgaggggaaagaggcgtcaggtgcctggctgaagcctgaaggtgacccgaaaacaagtcagagcccgagagatccacccgcgcccgcgcgggggaccaagggcccggatttaagaagagtgtgcctacaaggcggttgtcacggcaacgagagggcgggattgttcgagcgctgcggccccctcacgtgatcgattcggaggcggggcgtccgcccagtgggcggggccgggcccctgctgggaggcgaagaccaggcgggcactgttgcccggcgacgctccggcgctgggtccccgaggcccggcccctccccgggaggaggtgggcttcgagtcacgtgacccgtgccctacgggagggggtgcggtcggggacccggcaggaggcggccgagaagagaggaccgtgggggcgttcgcgtggctcccagcccgggaccccacccccgctggacagtgggggaaactgaggcctgagcgggcccacacaggaccatgaaggtgcttctcctcacagggctgggggccctgttcttcgcctattattgggatgacaacttcgacccaggcgggctggactacctcgtgctgaaccacatcggcggcgccccggccggcacgcgagcccgcagcccccaggcaactcgctggctcatgcaggtaaactttgtgagctacgtgcaactgacgtcgcgggcgctgcccagcctgacggacagcaagggctccctggtggtggtgtcctcgctgctcggccgcgtgcccacgtcgttctccactccctactcggcggccaagtttgcgctggacggcttcttcggctccctgcggcgggagctggacgtgcaggacgtgaacgtggccatcaccatgtgcgtcctgggcctccgagatcgcgcctccgccgccgaggcagtcaggagctcaacgtcacggccgcggcagcctgagcaccggggggtgcccctccagtcccagacggcaatgttcctccctccaactgtccctggagccagaacactcacagagacacccctgagagggtggccacagcccaagatgaagtcatcaagacagaaaagcaaaaccgagaaaaacgacgggcacctggaaccagtcacggcttgggaggtgcaggtgccccgtgttaggcgcctttgtcggggacttgcaaggcctcacctgtttggccatgattgatgacgtgactgcttccattttgcagatgaggaaactaaggctcagagaggccacgccacccttgagccacccatggacccctctccatctcctgcctgcgcctttaagtccctgatttattctttccattcattccatctgggaggaacccccccaactcctgccagcttcccctagctggggtctctggtactcttcacacctgcaggggcgtctacactgttcgtctacctggtggcagggtctgagcgggaggaggagggaaagagtgtgttctgagctggacccagcctcttgttcgagaataaaaactcttcttctcttgca

SEQ ID NO: 1819 - DNA, 1575 bp, Homo sapiens
  source 1..1575: mol_type = genomic DNA; mol_type = genomic DNA
gaagaccaggcgggcactgttgcccggcgacgctccggcgctgggtccccgaggcccggcccctccccgggaggaggtgggcttcgagtcacgtgacccgtgccctacgggagggggtgcggtcggggacccggcaggaggcggccgagaagagaggaccgtgggggcgttcgcgtggctcccagcccgggaccccacccccgctggacagtgggggaaactgaggcctgagcgggcccacacaggaccatgaaggtgcttctcctcacagggctgggggccctgttcttcgcctattattgggatgacaacttcgacccagccagcctccagggagcgcgagtgctgctgacaggggccaacgctggtgttggtgaggagctggcctatcactacgcgcgtctgggctcccacctggtgctcactgcccacactgaggctctcctgcagaaggcgggctggactacctcgtgctgaaccacatcggcggcgccccggccggcacgcgagcccgcagcccccaggcaactcgctggctcatgcaggtaaactttgtgagctacgtgcaactgacgtcgcgggcgctgcccagcctgacggacagcaagggctccctggtggtggtgtcctcgctgctcggccgcgtgcccacgtcgttctccactccctactcggcggccaagtttgcgctggacggcttcttcggctccctgcggcgggagctggacgtgcaggacgtgaacgtggccatcaccatgtgcgtcctgggcctccgagatcgcgcctccgccgccgaggcagtcaggggagtcacgagggtcaaggcggccccggggcccaaggcagccctggccgtgatccgcggcggcgccacgcgcgcggccggcgtcttctacccgtggcgtttccgcctgctgtgcttgctccggcgctggctaccgcgcccgcgggcctggtttatccgccaggagctcaacgtcacggccgcggcagcctgagcaccggggggtgcccctccagtcccagacggcaatgttcctccctccaactgtccctggagccagaacactcacagagacacccctgagagggtggccacagcccaagatgaagtcatcaagacagaaaagcaaaaccgagaaaaacgacgggcacctggaaccagtcacggcttgggaggtgcaggtgccccgtgttaggcgcctttgtcggggacttgcaaggcctcacctgtttggccatgattgatgacgtgactgcttccattttgcagatgaggaaactaaggctcagagaggccacgccacccttgagccacccatggacccctctccatctcctgcctgcgcctttaagtccctgatttattctttccattcattccatctgggaggaacccccccaactcctgccagcttcccctagctggggtctctggtactcttcacacctgcaggggcgtctacactgttcgtctacctggtggcagggtctgagcgggaggaggagggaaagagtgtgttctgagctggacccagcctcttgttcgagaataaaaactcttcttctcttgca

SEQ ID NO: 1820 - DNA, 2033 bp, Homo sapiens
  source 1..2033: mol_type = genomic DNA; mol_type = genomic DNA
cccgactccgagctgtccccgctcccggcgcggcgctccgctctcagccacctcacggctgccaggagtgcgcgggagtttgccccggagcgcggggaagtttcctccgaagctgcgctcctggaacagcagcacctgcaagcgcccggcagcggcccgcgaggttactttatggaattgggctcttagagaacaagaaaagactgaagttttacgggaaaacaaatcatgtggtcttcagattctgaaataaggagaaatgcagccatctgaaatggtcatgaaccccaaacaagtcttcctctctgtgctgatatttggagtagctgggctactcctcttcatgtatttgcaagtctggattgaagaacaacatacagggagagtggagaagagaagagaacaaaaagtaacttcaggatggggaccagtgaagtacttgcggcctgtacccagaatcaaaccccaagtttcacatgcctgaggatgtacgagaaaaaaaggaaaatcttctactcaattctgagagatctactaggctcttaacaaagaccagtcattcacaaggaggggatcaagctttaagtaagtccacagggtcaccaacagagaagttgattgaaaaacgtcaaggagctaagactgtttttaacaagttcagcaacatgaattggccagtggacattcaccctttaaacaaaagtttagtcaaagataataaatggaagaaaactgaggagacccaagagaaacgaaggtctttccttcaggagttttgcaagaaatacggtggggtgagtcatcatcagtcacatctttttcatacagtatccagaatctatgtagaagataaacacaaaatcttatattgtgaggtacctaaggctggctgttccaattggaaaagaattctgatggtactaaatggattggcttcctctgcatacaacatctcccacaatgctgtccactacgggaagcatttgaagaagctagatagctttgacctaaaagggatatatacccgcttaaatacttacaccaaagctgtgtttgttcgtgatcccatggaaagattagtatcagcctttagggacaaatttgaacaccccaatagttattaccatccagtattcggaaaggcaattatcaagaaatatcgaccaaatgcctgtgaagaagcattaattaatggatctggagtcaagttcaaagagtttatccactacttgctggattcccaccgtccagtaggaatggacattcactgggaaaaggtcagcaaactctgctatccgtgtttgatcaactatgattttgtagggaaatttgagactttggaagaagatgccaattactttttacagatgatcggtgctccaaaggagctgaaatttcccaactttaaggataggcactcttccgatgaaagaaccaatgctcaagtcgtgagacagtatttaaaggatctgactagaactgagagacaattaatctatgacttttattacttggactatttaatgtttaattatacaactccatttttgtagtttgcattcattttctaaaaccctgtatatacttaatgatgataagttcaaatcagctgtaatttttctataattctctgtatgacagaaatttaaccaagtgcagttgtcttgatttaatgtagatttttaccaaatagtatgacaccaattggcacaaagttataggaaaatcacctacaggagatgtaaacaacttgagttgctctaaaatgtttggaaaagagctgcttttgcattatgaattatattgttgaagcaataacctagccagctgttgcattagctaaagcagcctcttgcaatggtaggaaaaaaggatctcaaatagcatgagtgtatgtctatatcctgaaatttattgtctaaaatgcatgaatatatttttagcagtctgtggcatattaatcaaactgttgaattgttttcttacaccctggaaatctttctatcaactataatgataaatccattttgaag

SEQ ID NO: 1821 - DNA, 1687 bp, Homo sapiens
  source 1..1687: mol_type = genomic DNA; mol_type = genomic DNA
ctgctgggaggcgaagaccaggcgggcactgttgcccggcgacgctccggcgctgggtccccgaggcccggcccctccccgggaggaggtgggcttcgagtcacgtgacccgtgccctacgggagggggtgcggtcggggacccggcaggaggcggccgagaagagaggaccgtgggggcgttcgcgtggctcccagcccgggaccccacccccgctggacagtgggggaaactgaggcctgagcgggctggagtgcaatggcaaatctcggcacactacaacttctgcctcccaggttcaagcgattctcctgcctcagcctcccaaatatctggattacaggcatgcctgtgccggccacctctgtcccctgtccctctgcaggcccacacaggaccatgaaggtgcttctcctcacagggctgggggccctgttcttcgcctattattgggatgacaacttcgacccagccagcctccagggagcgcgagtgctgctgacaggggccaacgctggtgttggtgaggagctggcctatcactacgcgcgtctgggctcccacctggtgctcactgcccacactgaggctctcctgcagaaggtggtagggaactgccggaagctgggcgcccccaaggtcttctacatcgcggcggacatggcctcccctgaggcgcccgagagcgtggtgcagtttgcgctggacaagctgggcgggctggactacctcgtgctgaaccacatcggcggcgccccggccggcacgcgagcccgcagcccccaggcaactcgctggctcatgcaggtaaactttgtgagctacgtgcaactgacgtcgcgggcgctgcccagcctgacggacagcaagggctccctggtggtggtgtcctcgctgctcggccgcgtgcccacgtcgttctccactccctactcggcggccaagtttgcgctggacggcttcttcggctccctgcggcgggagctggacgtgcaggacgtgaacgtggccatcaccatgtgcgtcctgggcctccgagatcgcgcctccgccgccgaggcagtcaggggagtcacgagggtcaaggcggccccggggcccaaggcagccctggccgtgatccgcggcggcgccacgcgcgcggccggcgtcttctacccgtggcgtttccgcctgctgtgcttgctccggcgctggctaccgcgcccgcgggcctggtttatccgccaggagctcaacgtcacggccgcggcagcctgagcaccggggggtgcccctccagtcccagacggcaatgttcctccctccaactgtccctggagccagaacactcacagagacacccctgagagggtggccacagcccaagatgaagtcatcaagacagaaaagcaaaaccgagaaaaacgacgggcacctggaaccagtcacggcttgggaggtgcaggtgccccgtgttaggcgcctttgtcggggacttgcaaggcctcacctgtttggccatgattgatgacgtgactgcttccattttgcagatgaggaaactaaggctcagagaggccacgccacccttgagccacccatggacccctctccatctcctgcctgcgcctttaagtccctgatttattctttccattcattccatctgggaggaacccccccaactcctgccagcttcccctag

SEQ ID NO: 1822 - DNA, 1540 bp, Homo sapiens
  source 1..1540: mol_type = genomic DNA; mol_type = genomic DNA
gggcggggccgggcccctgctgggaggcgaagaccaggcgggcactgttgcccggcgacgctccggcgctgggtccccgaggcccggcccctccccgggaggaggtgggcttcgagtcacgtgacccgtgccctacgggagggggtgcggtcggggacccggcaggaggcggccgagaagagaggaccgtgggggcgttcgcgtggctcccagcccgggaccccacccccgctggacagtgggggaaactgaggcctgagcggagtgaccaccccggctatggccagccagcctccagggagcgcgagtgctgctgacaggggccaacgctggtgttggtgaggagctggcctatcactacgcgcgtctgggctcccacctggtgctcactgcccacactgaggctctcctgcagaaggcgggctggactacctcgtgctgaaccacatcggcggcgccccggccggcacgcgagcccgcagcccccaggcaactcgctggctcatgcaggtaaactttgtgagctacgtgcaactgacgtcgcgggcgctgcccagcctgacggacagcaagggctccctggtggtggtgtcctcgctgctcggccgcgtgcccacgtcgttctccactccctactcggcggccaagtttgcgctggacggcttcttcggctccctgcggcgggagctggacgtgcaggacgtgaacgtggccatcaccatgtgcgtcctgggcctccgagatcgcgcctccgccgccgaggcagtcaggggagtcacgagggtcaaggcggccccggggcccaaggcagccctggccgtgatccgcggcggcgccacgcgcgcggccggcgtcttctacccgtggcgtttccgcctgctgtgcttgctccggcgctggctaccgcgcccgcgggcctggtttatccgccaggagctcaacgtcacggccgcggcagcctgagcaccggggggtgcccctccagtcccagacggcaatgttcctccctccaactgtccctggagccagaacactcacagagacacccctgagagggtggccacagcccaagatgaagtcatcaagacagaaaagcaaaaccgagaaaaacgacgggcacctggaaccagtcacggcttgggaggtgcaggtgccccgtgttaggcgcctttgtcggggacttgcaaggcctcacctgtttggccatgattgatgacgtgactgcttccattttgcagatgaggaaactaaggctcagagaggccacgccacccttgagccacccatggacccctctccatctcctgcctgcgcctttaagtccctgatttattctttccattcattccatctgggaggaacccccccaactcctgccagcttcccctagctggggtctctggtactcttcacacctgcaggggcgtctacactgttcgtctacctggtggcagggtctgagcgggaggaggagggaaagagtgtgttctgagctggacccagcctcttgttcgagaataaaaactcttcttctcttgca

SEQ ID NO: 1823 - DNA, 3017 bp, Homo sapiens
  source 1..3017: mol_type = genomic DNA; mol_type = genomic DNA
catcccctgccctggctgcaaccatgagggtcttggcctgcctccttgcggccctggtggggatccaggctgttgagcgcctgcgcctggccgatggcccccatgggtgcgctggccgcctggaggtctggcatggcgggcgctggggcaccgtgtgtgatgacggctgggacctgcgcgatgccgccgtggcctgccggcagctgggctgcggaggggcactggccgccccgggaggcgccttcttcggggagggggcagggcctgtgtggctcagcgagctggcttgccggggcaacgaggggcagctgggcctctgccaccaccggggctggaaggcccacatctgctcccacgaggaggacgcgggcgtcgtctgcgcaggtcagcgtgtggctaactccagggacgactcaacatctcccctggatggggctccctggccagggctgttgctggagctgagccccagcacggaggagcccctggtgacacatgccccccgcccagctgggaacccccagaacgcctcccggaagaagagcccccggcccaagcaggccaagtccacccgggcccctctgctgacgacaggagccccccgccaagagcggctgcgcctggtctctggcccccacaggtgcgccggacgcctggaggtctggcacggcgggcgctggggcaccgtatgtgacgatggctgggacctgcgcgacgctgctgtagcctgccgggaactgggctgtgggggggcgctggctgcccccggcggtgccagattcgggcctggtgcagggcccgtgtggatggacgatgtggggtgtggaggaggagaacaggccctccgagactgcccccgaagcccctggggccggagcaactgtgaccacagcgaggatgcggggctggtctgcaccggcccagcacctcggctgcgcctggccgatggcccccacgggtgcgccggccgcctggaggtctggcacgggggtcgctgggggtcggtgtgtgacgacgcctgggacctgcgagacgccgctgtggcctgccgagagctgggctgcggaggggcgctggccgcccccgggggcgccttctttggggaggggtctggacccatcatcctggacgaccttcggtgtcggggaaacgagacggccttacgattctgcccagctcggccctggggccagcatgactgtcaccaccgcgaggacgccggggccgtgtgtgacggcatgcccctgggctacgtccctcccacggcccccacggacagcaacaactccacgcccagggaggctgcctccaggcccccgtccaccatgacgagccaggctccagggacggcaggcgtttcacctcctccagcctcccctactgtcctttgggagcctggaccggaagccgggtccccccagctgcgcctggtggctgggcccagcaagtgctcaggtcgactggaggtgtggcatgaccagcgctgggggaccgtgtgtgacgatagctgggacatgcgggattcagctgtggtctgccgggagctgggctgtggtggacctcagcagccagaccctgctgctggccgctttggctggggtgcgggccccatctggctagatgatgtgggctgtgtggggaccgaggcttcactgtccgactgccctgctgctccctggggaaagcacaactgcgctcacaatgaggatgttggggtcacctgcactgggcccccaggcctggactccatctcagaccccttcagctggagctggattcctggactggggagagatcgggatgcctggctcccgggagagctggccaccaagccctctgcaagtgtgactgccagtgttctggagaaaacaaccacgaaggccccagggaaaatgcctaagagtactaagaagtgggtgacaaaaaatgcaaagagaccaaccactcaacccccagtgatgccaaccacgaaacactccagggcccaaagccccccagacctaacctcacagaccactgcagcactgaccactgaggcctcccgaagacctacctctgagtttaccagaaggccgaccacggaggccccccagagatggacctctcacaccactgccacgctgacccctcaggccccccgagaacggaccactaagaccatggcaatgctgaccactcaaggcccccaagaaatgacctctgagtccactatcaagagtatccctcaggcctccctggagccatctgctgagatcccagaagggtctccagagtcacccaaagacccggccccctctcccagtgttagcaccactggggaatcaggcctgttccgggttcgtctggccgatgggcccaaccgctgtgctggccggctggaagtgtggcatgccggacgctggggaacagtgtgtgatgacaactgggacctgcgggacgccactgtggcctgctgggaactgggctgtggaaaggtccggcctcgagtaggcaaaacccattacggccctgggactgggcccatctggctggatgacatgggctgtaagggaagcgaggcctcactgagcgactgcccctcgggggcttgggggaagcacaactgtgaccacgaggaagacgtggggctcacctgcactggctacacagactatgacgattatcccccctggacctgggaccccacctcaagagaggacctggccaaggggactaccacagcgggggtacctggacacactctcccctggaggaccacccggcgcccgggtagctcctccccagcaataaggcgcctgccggacacagagccggaagcgggagctccgagaggtgatgctcctcgttcaaggactgccagggttgcagcgcctccctagcccatagcgccccctcgtggtggaggcgggcacgtgccgggcacagcggctgcggagacagcgggtccggcctcgggacccctcccgtagggtagggaggcagccaatgagcagaaataaatgcagaatcacaaactg

SEQ ID NO: 1824 - DNA, 9362 bp, Homo sapiens
  source 1..9362: mol_type = genomic DNA; mol_type = genomic DNA
aaaagtcagagccccacctccaccttagtctcgatccgaaaacgcggccccggcagcccctactaggcgcccccagcccgccctcacatccctccagtccatcggagtttttcactcggagccccggaccctcccccgagccgcagcctctctccccgccccggatcggagccccccgtccccgccccgggagctaagaggtgcaaacgcgccctcctccaactcctcccgcccccaactcccccccgagtggcagctctgggctgggaacgcggcggggtcggcctctcggctttgcgttcccgccccgggtccccggcgccgcaggagcccgccctgcagcgctgagtcccgcgcgtccgcctgccgtgcccgcctccacgcgcgccgcctcgcagcctccaggggacacgccatgactctggagggtctgtatttggcaaggggccccctggcccggctcctgctggcctggtcggccctgttgtgcatggcaggtggccaaggccgctgggacggggccttggaggctgcaggtcctggacgtgtgcggaggcggggcagcccaggcatcttgcaggggccgaatgtgtgcggctcccggttccatgcctactgctgtccaggctggaggacattccctggcaggagccagtgtgtcgtacccatctgtaggcgcgcctgcggtgaaggcttctgctcccagcccaacctgtgcacctgtgcggatgggacgctggctcccagctgcggggtgagccgagggtcagggtgcagtgtgagctgtatgaatgggggcacctgccggggggcgtcctgtctgtgtcagaagggctacacaggcaccgtgtgtgggcagcccatctgtgaccgcggctgccacaatgggggtcgctgcattgggcccaaccgctgcgcctgtgtgtatggcttcatgggacctcaatgtgagagagattaccggacgggaccctgctttggccaagtaggccccgaggggtgccagcatcagctgacgggcctcgtgtgcaccaaggcactttgctgtgccactgtgggccgtgcctggggccttccatgtgaactttgccctgcacagccacacccctgccgccgcggcttcatccccaatatccacacgggggcctgccaagatgtggatgagtgccaggctgtgccaggcctgtgccagggaggcagctgcgtcaacatggtgggctccttccattgccgctgtccagttggacaccggctcagtgacagcagcgccgcatgtgaagactaccgggccggcgcctgcttctcagtgcttttcgggggccgctgtgctggagacctcgccggccactacactcgcaggcagtgctgctgtgacaggggcaggtgctgggcagctggcccggtccctgagctgtgtcctcctcggggctccaatgaattccagcaactgtgcgcccagcggctgccgctgctacccggccaccctggcctcttccctggcctcctgggcttcggatccaatggcatgggtccccctcttgggccagcgcgactcaacccccatggctctgatgcgcgtgggatccccagcctgggccctggcaactctaatattggcactgctaccctgaaccagaccattgacatctgccgacacttcaccaacctgtgtctgaatggccgctgcctgcccacgccttccagctaccgctgcgagtgtaacgtgggctacacccaggacgtgcgcggcgagtgcattgatgtagacgaatgcaccagcagcccctgccaccacggtgactgcgtcaacatccccggcacctaccactgccggtgctacccgggcttccaggccacgcccaccaggcaggcatgcgtggatgtggacgagtgcattgtcagtggtggcctttgtcacctgggccgctgtgtcaacacagagggcagcttccagtgtgtctgcaatgcaggcttcgagctcagccctgacggcaagaactgtgtggaccacaacgagtgtgccaccagcaccatgtgcgtcaacggcgtgtgtctcaacgaggatggcagcttctcctgcctctgcaaacccggcttcctgctggcgcctggcggccactactgcatggacattgacgagtgccagacgcccggcatctgcgtgaacggccactgtaccaacaccgagggctccttccgctgccagtgcctgggggggctggcggtaggcacggatggccgcgtgtgcgtggacacccacgtgcgcagcacctgctatggggccatcgagaagggctcctgtgcccgccccttccctggcactgtcaccaagtccgagtgctgctgtgccaatccggaccacggttttggggagccctgccagctttgtcctgccaaagactccgctgagttccaggcactgtgcagcagtgggcttggcattaccacggatggtcgagacatcaacgagtgtgctctggatcctgaggtttgtgccaatggcgtgtgcgagaaccttcggggcagctaccgctgtgtctgcaacctgggttatgaggcaggtgcctcaggcaaggactgcacagacgtggatgagtgtgccctcaacagcctcctgtgtgacaacgggtggtgccagaatagccctggcagctacagctgctcctgcccccccggcttccacttctggcaggacacggagatctgcaaagatgtcgacgaatgcctgtccagcccgtgtgtgagtggcgtctgtcggaacctggccggctcctacacctgcaaatgtggccctggcagccggctggacccctctggtaccttctgtctagacagcaccaagggcacctgctggctgaagatccaggagagccgctgtgaggtgaaccttcagggagccagcctgcggtctgagtgctgcgccaccctcggggcagcctgggggagcccctgcgaacgctgcgagatcgaccctgcctgtgcccggggctttgcccggatgacgggtgtcacctgcgatgatgtgaacgagtgtgagtccttcccgggagtctgtcccaacgggcgttgcgtcaacactgctgggtctttccgctgtgagtgtccagagggcctgatgctggacgcctcaggccggctgtgcgtggatgtgagattggaaccatgtttcctgcgatgggatgaggatgagtgtggggtcaccctgcctggcaagtaccggatggacgtctgctgctgctccatcggggccgtgtggggagtcgagtgcgaggcctgcccggatcccgagtctctggagttcgccagcctgtgcccgcgggggctgggcttcgccagccgggacttcctgtctggccgaccattctataaagatgtgaatgaatgcaaggtgttccctggcctctgcacgcacggtacctgcagaaacacggtgggcagcttccactgcgcctgtgcggggggcttcgccctggatgcccaggaacggaactgcacagatatcgacgagtgtcgcatctctcctgacctctgcggccagggcacctgtgtcaacacgccgggcagctttgagtgcgagtgttttcccggctacgagagtggcttcatgctgatgaagaactgcatggacgtggacgagtgtgcaagggacccgctgctctgccggggaggcacttgcaccaacacggatgggagctacaagtgccagtgtccccctgggcatgagctgacggccaagggcactgcctgtgaggacatcgatgagtgctccctgagtgatggcctgtgtccccatggccagtgtgtcaatgtcatcggtgccttccagtgctcctgccatgccggcttccagagcacacctgaccgccagggctgcgtggacatcaacgaatgccgggtccagaatggtgggtgtgacgtgcactgtattaacactgagggcagctaccggtgcagctgtgggcagggctactcgctgatgcccgacggaagggcatgtgcagacgtggacgagtgtgaagagaacccccgcgtttgtgaccaaggccactgcaccaacatgccagggggtcaccgctgcctgtgctatgatggcttcatggccacgccagacatgaggacatgtgttgatgtggatgagtgtgacctgaaccctcacatctgcctccatggggactgcgagaacacgaagggttcctttgtctgccactgtcagctgggctacatggtcaggaagggggccacaggctgctctgatgtggatgaatgcgaggttggaggacacaactgtgacagtcacgcctcctgtctcaacatcccggggagtttcagctgtaggtgcctgccaggctgggtgggggatggcttcgaatgtcacgacctggatgaatgcgtctcccaggagcaccggtgcagcccaagaggtgactgtctcaatgtccctggctcctaccgctgcacctgccgccagggctttgccggggatggcttcttctgcgaagacagggatgaatgtgccgagaacgtggacctctgtgacaacgggcagtgcctcaatgcgcccggcgggtaccgctgtgaatgtgagatgggctttgaccccaccgaggaccaccgggcctgccaggatgtggacgagtgtgcgcaagggaacctctgtgcatttgggagctgtgagaacctgcctggaatgttccgctgcatctgcaatggtggctacgaactggaccgagggggtggcaactgcacagacatcaacgagtgtgcagacccagtaaactgcatcaacggcgtgtgcattaacacccccggcagctacctctgcagctgcccccaggattttgagctgaaccccagcggagtgggctgcgtggacactcgggccgggaactgtttcctggagacgcatgaccgaggggacagtggcatttcctgcagtgccgagatcggagttggtgtcacccgagcttcctgctgttgctccctgggccgggcttggggcaatccctgtgagctgtgccctatggccaacaccactgagtacagaaccctgtgcccgggtggtgagggcttccagcctaaccgcatcactgtcattctggaagacatcgacgagtgccaagagctgccagggctgtgtcaggggggtgactgcgtcaacacgtttggcagtttccagtgtgagtgcccacctggctaccacctcagtgagcacacccgcatctgtgaggatattgacgaatgctccacacactccggcatctgtggccctggcacctgctacaacaccctggggaactacacctgtgtctgccctgcagagtacctccaagtcaatggtggcaacaactgcatggatatgaggaagagtgtctgcttccggcactataacggcacatgtcaaaatgagctggccttcaacgtgacccggaaaatgtgttgctgctcctacaacattggccaggcctggaatagaccctgtgaggcctgccccactcccatcagtcctgactaccagatcctgtgtggaaatcaggccccgggattcctcactgacatccacacggggaagccccttgacattgatgagtgtggggagatccccgccatctgtgccaatggcatctgcataaaccagatcgggagtttccgctgcgagtgccccgcaggcttcaactacaacagcatcctgctggcttgtgaagatgtcgatgagtgtggcagcagggagagtccctgccagcagaatgctgactgcatcaacatccccggtagctaccgctgcaagtgcacccgagggtacaaactgtcgccaggcggggcttgtgtgggacggaatgagtgtcgggagatcccgaatgtctgtagccatggtgactgcatggacacagaaggcagctacatgtgtctgtgtcaccgtggattccaggcctctgcagaccagaccctgtgcatggacattgacgagtgtgaccggcagccttgtggaaatgggacctgcaagaacatcattggctcctacaactgcctctgcttccctggctttgtggtgacacacaatggggattgtgtggattttgatgagtgtactaccctggtggggcaggtgtgccgatttggccattgcctcaacacagctggttccttccactgcctctgccaggatggctttgagctcacagctgatgggaagaactgtgtggacaccaatgagtgcctcagccttgcaggaacctgcctacccggcacttgccagaacctcgagggctccttccgctgcatctgtccccctggcttccaggtgcagagtgaccactgcattgatatcgacgagtgctcagaggagcccaacctctgcctctttggcacctgtaccaacagccctgggagcttccagtgcctctgcccacctggctttgtcctctctgacaatgggcaccgttgctttgacacacggcagagtttctgcttcacccgttttgaggctgggaagtgctcggtgcccaaagctttcaacaccaccaagacccgctgctgctgcagtaagaggcctggggagggctggggagacccctgcgaactgtgtccccaggagggcagcgctgcctttcaggagctctgcccctttggccacggggcagtcccaggcccggatgactcccgagaagacgtgaatgagtgtgcagagaaccctggcgtctgcactaacggcgtctgtgtcaacaccgatggatccttccgctgtgagtgtccctttggctacagcctggacttcactggcatcaactgtgtggacacagacgagtgctctgtcggccacccctgtgggcaagggacatgcaccaatgtcatcggaggcttcgaatgtgcctgtgctgacggctttgagcctggcctcatgatgacctgcgaggacatcgacgaatgctccctgaacccgctgctctgtgccttccgctgccacaataccgagggctcctacctgtgcacctgtccagccggctacaccctgcgggaggatggggccatgtgtcgagatgtggacgagtgtgcagatggtcagcaggactgccacgcccggggcatggagtgcaagaacctcatcggtaccttcgcgtgcgtctgtcccccaggcatgcggcccctgcctggctctggggagggctgcacagatgacaatgaatgccacgctcagcctgacctctgtgtcaacggccgctgtgtcaacaccgcgggcagcttccggtgcgactgtgatgagggattccagcccagccccacccttaccgagtgccacgacatccggcaggggccctgctttgccgaggtgctgcagaccatgtgccggtctctgtccagcagcagtgaggctgtcaccagggccgagtgctgctgtgggggtggccggggctgggggccccgctgcgagctctgtcccctgcccggcacctctgcctacaggaagctgtgcccccatggctcaggctacactgctgagggccgagatgtagatgaatgccgtatgcttgctcacctgtgtgctcatggggagtgcatcaacagccttggctccttccgctgccactgtcaggccgggtacacaccggatgctactgctactacctgcctggatatggatgagtgcagccaggtccccaagccatgtaccttcctctgcaaaaacacgaagggcagtttcctgtgcagctgtccccgaggctacctgctggaggaggatggcaggacctgcaaagacctggacgaatgcacctcccggcagcacaactgtcagttcctctgtgtcaacactgtgggcgccttcacctgccgctgtccgcccggcttcacccagcaccaccaggcctgcttcgacaatgatgagtgctcagcccagcctggcccatgtggtgcccacgggcactgccacaacaccccgggcagcttccgctgtgaatgccaccaaggcttcaccctggtcagctcaggccatggctgtgaagatgtgaatgaatgtgatgggccccaccgctgccagcatggctgtcagaaccagctagggggctaccgctgcagctgcccccagggtttcacccagcactcccagtgggcccagtgtgtggatgagaatgagtgtgccctgtcgccccccacctgcgggagcgcctcctgtcgcaacactcttggtggcttccgctgcgtctgcccctctggctttgactttgatcaggccctcgggggctgccaggaggtggatgagtgcgccggacggcgtggcccctgtagctacagctgtgccaacacgcctggtggcttcctgtgcggctgtcctcaaggctacttccgggctgggcaagggcactgtgtctccggcctgggcttcagccccggaccccaggacaccccggacaaagaggagctgctctcgtctgaagcctgctacgaatgcaagatcaatggcctctcccctcgggaccggccacgacgcagtgcccacagggaccaccaggtgaacctggccacccttgactccgaggccctgctgaccttgggcctgaacctctcacacctgggccgggccgagcgcatcctggagctccggccggccctggagggtctagagggccggatccgctacgtcatcgtccgcggaaacgagcaaggtttctttcgcatgcatcacctccgtggcgtcagctccctgcagctggggcggaggcggccggggcctggaacctaccggctggaggtggtgagccacatggcaggaccctggggtgtccagccagaggggcagccagggccatggggccaggccttgaggctgaaggtgcagctgcagttgctttagttgggaggagcctcagtgggccccagctgtccagagaagggggattctggaactgggaaggactgatccccagaagcgatggctgaccagattgaaccccgaaactcaggaagagtgaaatgctacacgacaacctcaggcaagcccggcctctgcctgggcctctgtgccagccccgggggccccccagttactcagtctttcctggagacagcaagaagctgcaatgtgcaatccccctgcccccacagccaaggtcaggaagaggccctgtggtcaccgtgtctggccaatctcaggctttcacttctgtactgcactgtggcttgccctggcggggggcagggggttggcaggacatggcaatgggcaactggggtgggcacagggcttattcctcggagtagaagggtgtacagggggcccagactccacagtgacttgccacatttgccccccatttggagaatgcttttatatcaaaagtggagacgataataaagttattttgggttaa

SEQ ID NO: 1825 - DNA, 2505 bp, Homo sapiens
  source 1..2505: mol_type = genomic DNA; mol_type = genomic DNA
agccagaccaggaacccaccagaaggaaccaattccggacacataacaagcagcagtgaggacaccaaagacacagacccagatgcagaggcagaggcagccacacagcccctcccagccacaatcacaacctcatattcatataatcacagaccctccaccccacatagtgggtggaatcctgccagcgcattccactcacacacacacaaaatcccattctcacacacgtgcacccaagcctcgtcccgcacacacaacatgacaggccacagagccggctgagagtctcagcacgcatggacgcctgcactgcgcaggttgcagcccaggctgcaggaccacaggtggcagggacgacacagcaggtggccggccagggagtggcagtggcctccatcctccctgctcagccacagcccctgcttcagcgtctgccagtccaactgtcaactcatccactcaactttacaactggaatgtgggggcgttcagggccctgccactggtgacggccactctaagtcctacccaatgctgggtaggtcctttaagaggcccaagtcctgggcgctactatgaggttctgtacgtgcacagtgatggctcatgcctggccgaggtgagcccactcagtctgggtggcacagcctaatctaggaactgctctgcggttctacatggctctcagcagcccagtgagtgtcctctgcaccgggcgtgtccctcaggtgctcctagccagaccctcccttgacacagtagggcacaaaccgctattggagcggcactggcacccgagtgtacaagcgtcagcatccctgctgccttccccacccccagctgtccccacctgctgattctgcccctggggtcacacttacaatttagggtcctgtcaggagacaaaaatcacgtgagtgacatcagctccctcatatgtaggtgctgggaaaagggcttgtggggtgcctgtataaactggccataaaaatacgggaataagttgtggaaagccacaaaaggcctctgaggaggaaagcctcctaattgccatcatgttcccatgctcagagcaagacccgctgtcttctctgtaaacactgtgctcagggagaaagacacttctttgaaacactggaatgtggacagacgtgcaggctcccagtcaaggccgctcctactagctactctccaacaagttaaagttatgctgtttgagcacaaaggagactcatttaaactgctattgctatagattatgcctgtgatgcactgccaccctttcactgtttctccctgaacatctgcttcttagatcgaagggactgtactcaataaatagtgtggagaccagagctcggcaccttttgcagcctccacattttgcactggccccctggctccccacctttcactcttaacttgtcttttctcaatcctttgtcaccaccagacttcgggtaccctacgggtagtgttgaggctggtccccaacatgtaggatcccttcactgtgtcacatgtgtccctaacacacttgctacatctcatgtcctttaggttctgtgttttactccagataatgttctttgaatctaaattacagtttactgatttctcaaaagctgcacctaatgtgctatccattcagacagacatactcacttagcaaatgtttgttgagccagcactcagtggcagattctgtgctagggcgtgccaagtgcagacacacgtttgccaagacacagggtcacatgtgcatgcacactcagacttgcaggcttacaccagtgttcagcctgctcccaatcccagggagctccagggaggacagagagaatgtcacaacacccaacccctcccactgcatgctgagtccagttcccgatacgctgccaccccaacagcatggcccagggccgagggtctctctgcagacctgccctgaccacattcacacacacacacacacacacacacacacacacacacacacacacacacacgaagaggcatgtgccttgttcagatatacataaagctcacccatcgccaaattccctgcctgtgcctgctgggaccagactccgctgtcatgagggtgacatccgccacctgtgctcttctgctggctctgatctgcagcgtccagctgggggatgcctgcctggatatcgataaactgcttgcgaatgttgtgtttgatgtgtcccaagacctcctgaaggaggagcttgctcgttacaaccccagtcccctgacagaggagtccttcctcaatgtccagcaatgctttgccaatgtctccgtgacagaaagatttgctcattcagttgttattaagaagatccttcagagcaacgattgcatagaagcagccttctgatctgaggacccctgcagatcagatattggccctcctgccttccttggggctccccgcgttcctggcctggctctgttcatcactacagagaccccaatgaacacctgcagctc

SEQ ID NO: 1826 - DNA, 2480 bp, Homo sapiens
  source 1..2480: mol_type = genomic DNA; mol_type = genomic DNA
agactcgctcctcccggcagggcgcacctaggcgggtccatcgccagccggggagaggggtttgggcagggagggaacaggtgcgcggcgggacccgccctatctcaacaggtgaatcgctccaagtgggtctcggttgcatggatctcggtgcgcttggtttggccggagcagatgggggccggaagggacctgtggtccgcaggcgccctcccagcgggccagtcacttggttcgggccctgggggacggagcgcacctgggtcagcccacttccggggagggaggcagaggaacccctccccgccgctcacccctaagcccagccctcggctcccacccttgtgtacctgggccgaaccattcaccggagcgcgcagcgggtggagtgtggctcggaggaccgcggcgggtcaagcacctttctcccccatatctgaaagcatgccctttgtccacgtcgtttacgctcattaaaacttccagaatgcaacaggacggacttggagtagggacaaggaacggaagtgggaaggggaggagcgtgcacccctcctggccttggtgcgcgccgcgccccctaaggtactttggaagggacgcgcgggccagacgcgcccagacggccgcgatggcgctgttggccggcgggctctccagagggctgggctcccacccggccgccgcaggccgggacgcggtcgtcttcgtgtggcttctgcttagcacctggtgcacagctcctgccagggccatccaggtgaccgtgtccaacccctaccacgtggtgatcctcttccagcctgtgaccctgccctgtacctaccagatgacctcgacccccacgcaacccatcgtcatctggaagtacaagtctttctgccgggaccgcatcgccgatgccttctccccggccagcgtcgacaaccagctcaatgcccagctggcagccgggaacccaggctacaacccctacgttgagtgccaggacagcgtgcgcaccgtcagggtcgtggccaccaagcagggcaacgctgtgaccctgggagattactaccagggccggaggattaccatcaccggaaatgctgacctgacctttgaccagacggcgtggggggacagtggtgtgtattactgctccgtggtctcagcccaggacctccaggggaacaatgaggcctacgcagagctcatcgtccttgactggctcttcgtggttgtggtatgcctggctgccttcctcatcttcctcctcctgggcatctgctggtgccagtgctgcccgcacacttgctgctgctacgtcaggtgcccctgctgcccagacaagtgctgctgccccgaggccctgtatgccgccggcaaagcagccacctcaggtgttcccagcatttatgcccccagcacctatgcccacctgtctcccgccaagaccccacccccaccagctatgattcccatgggccctgcctacaacgggtaccctggaggataccctggagacgttgacaggagtagctcagctggtggccaaggctcctatgtacccctgcttcgggacacggacagcagtgtggcctctgtccgcagtggctacaggattcaggccagccagcaggacgactccatgcgggtcctgtactacatggagaaggagctggccaacttcgacccttctcgacctggcccccccagtggccgtgtggagcgggccatgagtgaagtcacctccctccacgaggacgactggcgatctcggccttcccggggccctgccctcaccccgatccgggatgaggagtggggtggccactccccccggagtcccaggggatgggaccaggagcccgccagggagcaggcaggcgggggctggcgggccaggcggccccgggcccgctccgtggacgccctggacgacctcaccccgccgagcaccgccgagtcagggagcaggtctcccacgagtaatggtgggagaagccgggcctacatgcccccgcggagccgcagccgggacgacctctatgaccaagacgactcgagggacttcccacgctcccgggacccccactacgacgacttcaggtctcgggagcgccctcctgccgaccccaggtcccaccaccaccgtacccgggaccctcgggacaacggctccaggtccggggacctcccctatgatgggcggctactggaggaggctgtgaggaagaaggggtcggaggagaggaggagaccccacaaggaggaggaggaagaggcctactacccgcccgcgccgcccccgtactcggagaccgactcgcaggcgtcccgagagcgcaggctcaagaagaacttggccctgagtcgggaaagtttagtcgtctgatctgacgttttctacgtagcttttgtatttttttttttaatttgaaggaacactgatgaagccctgccatacccctcccgagtctaataaaacgtataatcac

SEQ ID NO: 1827 - protein, 196 aa, Homo sapiens
MSRRSMLLAWALPSLLRLGAAQETEDPACCSPIVPRNEWKALASECAQHLSLPLRYVVVSHTAGSSCNTPASCQQQARNVQHYHMKTLGWCDVGYNFLIGEDGLVYEGRGWNFTGAHSGHLWNPMSIGISFMGNYMDRVPTPQAIRAAQGLLACGVAQGALRSNYVLKGHRDVQRTLSPGNQLYHLIQNWPHYRSP

SEQ ID NO: 1828 - protein, 351 aa, Homo sapiens
MEAFALGPARRGRRRTRAAGSLLSRAAILLFISAFLVRVPSSVGHLVRLPRAFRLTKDSVKIVGSTSFPVKAYVMLHQKSPHVLCVTQQLRNAELIDPSFQWYGPKGKVVSVENRTAQITSTGSLVFQNFEESMSGIYTCFLEYKPTVEEIVKRLQLKYAIYAYREPHYYYQFTARYHAAPCNSIYNISFEKKLLQILSKLLLDLSCEISLLKSECHRVKMQRAGLQNELFFAFSVSSLDTEKGPKRCTDHNCEPYKRLFKAKNLIERFFNQQVEILGRRAEQLPQIYYIEGTLQMVWINRCFPGYGMNVQQHPKCPECCVICSPGSYNPRDGIHCLQCNSSLVYGAKTCL

SEQ ID NO: 1829 - protein, 139 aa, Homo sapiens
METNVFHLMLCVTSARTHKSTSLCFGHFNSYPSLPLIHDLLLEISFQLSAPHEDARLTPEELERASLLQILPEMLGAERGDILRKADSSTNIFNPRGNLRKFQDFSGQDPNILLSHLLARIWKPYKKRETPDCFWKYCV

SEQ ID NO: 1830 - protein, 201 aa, Homo sapiens
MGSGRRALSAVPAVLLVLTLPGLPVWAQNDTEPIVLEGKCLVVCDSNPATDSKGSSSSPLGISVRAANSKVAFSAVRSTNHEPSEMSNKTRIIYFDQILVNVGNFFTLESVFVAPRKGIYSFSFHVIKVYQSQTIQVNLMLNGKPVISAFAGDKDVTREAATNGVLLYLDKEDKVYLKLEKGNLVGGWQYSTFSGFLVFPL

SEQ ID NO: 1831 - protein, 87 aa, Homo sapiens
MKVLRAWLLCLLMLGLALRGAASRTHRHSMEIRTPDINPAWYASRGIRPVGRFGRRRATLGDVPKPGLRPRLTCFPLEGGAMSSQDG

SEQ ID NO: 1832 - protein, 365 aa, Homo sapiens
MPGGKKVAGGGSSGATPTSAAATAPSGVRRLETSEGTSAQRDEEPEEEGEEDLRDGGVPFFVNRGGLPVDEATWERMWKHVAKIHPDGEKVAQRIRGATDLPKIPIPSVPTFQPSTPVPERLEAVQRYIRELQYNHTGTQFFEIKKSRPLTGLMDLAKEMTKEALPIKCLEAVILGIYLTNSMPTLERFPISFKTYFSGNYFRHIVLGVNFAGRYGALGMSRREDLMYKPPAFRTLSELVLDFEAAYGRCWHVLKKVKLGQSVSHDPHSVEQIEWKHSVLDVERLGRDDFRKELERHARDMRLKIGKGTGPPSPTKDRKKDVSSPQRAQSSPHRRNSRSERRPSGDKKTSEPKAMPDLNGYQIRV

SEQ ID NO: 1833 - protein, 458 aa, Homo sapiens
MAWASRLGLLLALLLPVVGASTPGTVVRLNKAALSYVSEIGKAPLQRALQVTVPHFLDWSGEALQPTRIRILNVHVPRLHLKFIAGFGVRLLAAANFTFKVFRAPEPLELTLPVELLADTRVTQSSIRTPVVSISACSLFSGHANEFDGSNSTSHALLVLVQKHIKAVLSNKLCLSISNLVQGVNVHLGTLIGLNPVGPESQIRYSMVSVPTVTSDYISLEVNAVLFLLGKPIILPTDATPFVLPRHVGTEGSMATVGLSQQLFDSALLLLQKAGALNLDITGQLRSDDNLLNTSALGRLIPEVARQFPEPMPVVLKVRLGATPVAMLHTNNATLRLQPFVEVLATASNSAFQSLFSLDVVVNLRLQLSVSKVKLQGTTSVLGDVQLTVASSNVGFIDTDQVRTLMGTVFEKPLLDHLNALLAMGIALPGVVNLHYVAPEIFVYEGYVVISSGLFYQS

SEQ ID NO: 1834 - protein, 604 aa, Homo sapiens
MMRAVWEALAALAAVACLVGAVRGGPGLSMFAGQAAQPDPCSDENGHPRRCIPDFVNAAFGKDVRVSSTCGRPPARYCVVSERGEERLRSCHLCNASDPKKAHPPAFLTDLNNPHNLTCWQSENYLQFPHNVTLTLSLGKKFEVTYVSLQFCSPRPESMAIYKSMDYGRTWVPFQFYSTQCRKMYNRPHRAPITKQNEQEAVCTDSHTDMRPLSGGLIAFSTLDGRPSAHDFDNSPVLQDWVTATDIRVAFSRLHTFGDENEDDSELARDSYFYAVSDLQVGGRCKCNGHAARCVRDRDDSLVCDCRHNTAGPECDRCKPFHYDRPWQRATAREANECVACNCNLHARRCRFNMELYKLSGRKSGGVCLNCRHNTAGRHCHYCKEGYYRDMGKPITHRKACKACDCHPVGAAGKTCNQTTGQCPCKDGVTGITCNRCAKGYQQSRSPIAPCIKIPVAPPTTAASSVEEPEDCDSYCKASKGKLKINMKKYCKKDYAVQIHILKADKAGDWWKFTVNIISVYKQGTSRIRRGDQSLWIRSRDIACKCPKIKPLKKYLLLGNAEDSPDQSGIVADKSSLVIQWRDTWARRLRKFQQREKKGKCKKA

SEQ ID NO: 1835 - protein, 224 aa, Homo sapiens
MPGRAPLRTVPGALGAWLLGGLWAWTLCGLCSLGAVGAPRPCQAPQQWEGRQVMYQQSSGRNSRALLSYDGLNQRVRVLDERKALIPCKRLFEYILLYKDGVMFQIDQATKQCSKMTLTQPWDPLDIPQNSTFEDQYSIGGPQEQITVQEWSDRKSARSYETWIGIYTVKDCYPVQETFTINYSVILSTRFFDIQLGIKDPSVFTPPSTCQMAQLEKMSEDCSW

SEQ ID NO: 1836 - protein, 1701 aa, Homo sapiens
MGFLPKLLLLASFFPAGQASWGVSSPQDVQGVKGSCLLIPCIFSFPADVEVPDGITAIWYYDYSGQRQVVSHSADPKLVEARFRGRTEFMGNPEHRVCNLLLKDLQPEDSGSYNFRFEISEVNRWSDVKGTLVTVTEEPRVPTIASPVELLEGTEVDFNCSTPYVCLQEQVRLQWQGQDPARSVTFNSQKFEPTGVGHLETLHMAMSWQDHGRILRCQLSVANHRAQSEIHLQVKYAPKGVKILLSPSGRNILPGELVTLTCQVNSSYPAVSSIKWLKDGVRLQTKTGVLHLPQAAWSDAGVYTCQAENGVGSLVSPPISLHIFMAEVQVSPAGPILENQTVTLVCNTPNEAPSDLRYSWYKNHVLLEDAHSHTLRLHLATRADTGFYFCEVQNVHGSERSGPVSVVVNHPPLTPVLTAFLETQAGLVGILHCSVVSEPLATLVLSHGGHILASTSGDSDHSPRFSGTSGPNSLRLEIRDLEETDSGEYKCSATNSLGNATSTLDFHANAARLLISPAAEVVEGQAVTLSCRSGLSPTPDARFSWYLNGALLHEGPGSSLLLPAASSTDAGSYHCRARDGHSASGPSSPAVLTVLYPPRQPTFTTRLDLDAAGAGAGRRGLLLCRVDSDPPARLQLLHKDRVVATSLPSGGGCSTCGGCSPRMKVTKAPNLLRVEIHNPLLEEEGLYLCEASNALGNASTSATFNGQATVLAIAPSHTLQEGTEANLTCNVSREAAGSPANFSWFRNGVLWAQGPLETVTLLPVARTDAALYACRILTEAGAQLSTPVLLSVLYPPDRPKLSALLDMGQGHMALFICTVDSRPLALLALFHGEHLLATSLGPQVPSHGRFQAKAEANSLKLEVRELGLGDSGSYRCEATNVLGSSNTSLFFQVRGAWVQVSPSPELQEGQAVVLSCQVHTGVPEGTSYRWYRDGQPLQESTSATLRFAAITLTQAGAYHCQAQAPGSATTSLAAPISLHVSYAPRHVTLTTLMDTGPGRLGLLLCRVDSDPPAQLRLLHGDRLVASTLQGVGGPEGSSPRLHVAVAPNTLRLEIHGAMLEDEGVYICEASNTLGQASASADFDAQAVNVQVWPGATVREGQLVNLTCLVWTTHPAQLTYTWYQDGQQRLDAHSIPLPNVTVRDATSYRCGVGPPGRAPRLSRPITLDVLYAPRNLRLTYLLESHGGQLALVLCTVDSRPPAQLALSHAGRLLASSTAASVPNTLRLELRGPQPRDEGFYSCSARSPLGQANTSLELRLEGVRVILAPEAAVPEGAPITVTCADPAAHAPTLYTWYHNGRWLQEGPAASLSFLVATRAHAGAYSCQAQDAQGTRSSRPAALQVLYAPQDAVLSSFRDSRARSMAVIQCTVDSEPPAELALSHDGKVLATSSGVHSLASGTGHVQVARNALRLQVQDVPAGDDTYVCTAQNLLGSISTIGRLQVEGARVVAEPGLDVPEGAALNLSCRLLGGPGPVGNSTFAWFWNDRRLHAEPVPTLAFTHVARAQAGMYHCLAELPTGAAASAPVMLRVLYPPKTPTMMVFVEPEGGLRGILDCRVDSEPLASLTLHLGSRLVASSQPQGAPAEPHIHVLASPNALRVDIEALRPSDQGEYICSASNVLGSASTSTYFGVRALHRLHQFQQLLWVLGLLVGLLLLLLGLGACYTWSSLILMQPHVRPQPVPHPWADQWCCLPSGGESGQNL

SEQ ID NO: 1837 - protein, 305 aa, Homo sapiens
MAAGLARLLLLLGLSAGGPAPAGAAKMKVVEEPNAFGVNNPFLPQASRLQAKRDPSPVSGPVHLFRLSGKCFSLVESTYKYEFCPFHNVTQHEQTFRWNAYSGILGIWHEWEIANNTFTGMWMRDGDACRSRSRQSKVELACGKSNRLAHVSEPSTCVYALTFETPLVCHPHALLVYPTLPEALQRQWDQVEQDLADELITPQGHEKLLRTLFEDAGYLKTPEENEPTQLEGGPDSLGFETLENCRKAHKELSKEIKRLKGLLTQHGIPYTRPTETSNLEHLGHETPRAKSPEQLRGDPGLRGSL

SEQ ID NO: 1838 - protein, 1761 aa, Homo sapiens
MQFQLTLFLHLGWLSYSKAQDDCNRGACHPTTGDLLVGRNTQLMASSTCGLSRAQKYCILSYLEGEQKCFICDSRFPYDPYDQPNSHTIENVIVSFEPDREKKWWQSENGLDHVSIRLDLEALFRFSHLILTFKTFRPAAMLVERSTDYGHNWKVFKYFAKDCATSFPNITSGQAQGVGDIVCDSKYSDIEPSTGGEVVLKVLDPSFEIENPYSPYIQDLVTLTNLRINFTKLHTLGDALLGRRQNDSLDKYYYALYEMIVRGSCFCNGHASECRPMQKMRGDVFSPPGMVHGQCVCQHNTDGPNCERCKDFFQDAPWRPAADLQDNACRSCSCNSHSSRCHFDMTTYLASGGLSGGVCEDCQHNTEGQHCDRCRPLFYRDPLKTISDPYACIPCECDPDGTISGGICVSHSDPALGSVAGQCLCKENVEGAKCDQCKPNHYGLSATDPLGCQPCDCNPLGSLPFLTCDVDTGQCLCLSYVTGAHCEECTVGYWGLGNHLHGCSPCDCDIGGAYSNVCSPKNGQCECRPHVTGRSCSEPAPGYFFAPLNFYLYEAEEATTLQGLAPLGSETFGQSPAVHVVLGEPVPGNPVTWTGPGFARVLPGAGLRFAVNNIPFPVDFTIAIHYETQSAADWTVQIVVNPPGGSEHCIPKTLQSKPQSFALPAATRIMLLPTPICLEPDVQYSIDVYFSQPLQGESHAHSHVLVDSLGLIPQINSLENFCSKQDLDEYQLHNCVEIASAMGPQVLPGACERLIISMSAKLHDGAVACKCHPQGSVGSSCSRLGGQCQCKPLVVGRCCDRCSTGSYDLGHHGCHPCHCHPQGSKDTVCDQVTGQCPCHGEVSGRRCDRCLAGYFGFPSCHPCPCNRFAELCDPETGSCFNCGGFTTGRNCERCIDGYYGNPSSGQPCRPCLCPDDPSSNQYFAHSCYQNLWSSDVICNCLQGYTGTQCGECSTGFYGNPRISGAPCQPCACNNNIDVTDPESCSRVTGECLRCLHNTQGANCQLCKPGHYGSALNQTCRRCSCHASGVSPMECPPGGGACLCDPVTGACPCLPNVTGLACDRCADGYWNLVPGRGCQSCDCDPRTSQSSHCDQLTGQCPCKLGYGGKRCSECQENYYGDPPGRCIPCDCNRAGTQKPICDPDTGMCRCREGVSGQRCDRCARGHSQEFPTCLQCHLCFDQWDHTISSLSKAVQGLMRLAANMEDKRETLPVCEADFKDLRGNVSEIERILKHPVFPSGKFLKVKDYHDSVRRQIMQLNEQLKAVYEFQDLKDTIERAKNEADLLLEDLQEEIDLQSSVLNASIADSSENIKKYYHISSSAEKKINETSSTINTSANTRNDLLTILDTLTSKGNLSLERLKQIKIPDIQILNEKVCGDPGNVPCVPLPCGGALCTGRKGHRKCRGPGCHGSLTLSTNALQKAQEAKSIIRNLDKQVRGLKNQIESISEQAEVSKNNALQLREKLGNIRNQSDSEEENINLFIKKVKNFLLEENVPPEDIEKVANGVLDIHLPIPSQNLTDELVKIQKHMQLCEDYRTDENRLNEEADGAQKLLVKAKAAEKAANILLNLDKTLNQLQQAQITQGRANSTITQLTANITKIKKNVLQAENQTREMKSELELAKQRSGLEDGLSLLQTKLQRHQDHAVNAKVQAESAQHQAGSLEKEFVELKKQYAILQRKTSTTGLTKETLGKVKQLKDAAEKLAGDTEAKIRRITDLERKIQDLNLSRQAKADQLRILEDQVVAIKNEIVEQEKKYARCYS

SEQ ID NO: 1839 - protein, 950 aa, Homo sapiens
MTWRMGPRFTMLLAMWLVCGSEPHPHATIRGSHGGRKVPLVSPDSSRPARFLRHTGRSRGIERSTLEEPNLQPLQRRRSVPVLRLARPTEPPARSDINGAAVRPEQRPAARGSPREMIRDEGSSARSRMLRFPSGSSSPNILASFAGKNRVWVISAPHASEGYYRLMMSLLKDDVYCELAERHIQQIVLFHQAGEEGGKVRRITSEGQILEQPLDPSLIPKLMSFLKLEKGKFGMVLLKKTLQVEERYPYPVRLEAMYEVIDQGPIRRIEKIRQKGFVQKCKASGVEGQVVAEGNDGGGGAGRPSLGSEKKKEDPRRAQVPPTRESRVKVLRKLAATAPALPQPPSTPRATTLPPAPATTVTRSTSRAVTVAARPMTTTAFPTTQRPWTPSPSHRPPTTTEVITARRPSVSENLYPPSRKDQHRERPQTTRRPSKATSLESFTNAPPTTISEPSTRAAGPGRFRDNRMDRREHGHRDPNVVPGPPKPAKEKPPKKKAQDKILSNEYEEKYDLSRPTASQLEDELQVGNVPLKKAKESKKHEKLEKPEKEKKKKMKNENADKLLKSEKQMKKSEKKSKQEKEKSKKKKGGKTEQDGYQKPTNKHFTQSPKKSVADLLGSFEGKRRLLLITAPKAENNMYVQQRDEYLESFCKMATRKISVITIFGPVNNSTMKIDHFQLDNEKPMRVVDDEDLVDQRLISELRKEYGMTYNDFFMVLTDVDLRVKQYYEVPITMKSVFDLIDTFQSRIKDMEKQKKEGIVCKEDKKQSLENFLSRFRWRRRLLVISAPNDEDWAYSQQLSALSGQACNFGLRHITILKLLGVGEEVGGVLELFPINGSSVVEREDVPAHLVKDIRNYFQVSPEYFSMLLVGKDGNVKSWYPSPMWSMVIVYDLIDSMQLRRQEMAIQQSLGMRCPEDEYAGYGYHSYHQGYQDGYQDDYRHHESYHHGYPY

SEQ ID NO: 1840 - protein, 762 aa, Homo sapiens
MEGPRSSTHVPLVLPLLVLLLLAPARQAAAQRCPQACICDNSRRHVACRYQNLTEVPDAIPELTQRLDLQGNLLKVIPAAAFQGVPHLTHLDLRHCEVELVAEGAFRGLGRLLLLNLASNHLRELPQEALDGLGSLRRLELEGNALEELRPGTFGALGALATLNLAHNALVYLPAMAFQGLLRVRWLRLSHNALSVLAPEALAGLPALRRLSLHHNELQALPGPVLSQARGLARLELGHNPLTYAGEEDGLALPGLRELLLDGGALQALGPRAFAHCPRLHTLDLRGNQLDTLPPLQGPGQLRRLRLQGNPLWCGCQARPLLEWLARARVRSDGACQGPRRLRGEALDALRPWDLRCPGDAAQEEEELEERAVAGPRAPPRGPPRGPGEERAVAPCPRACVCVPESRHSSCEGCGLQAVPRGFPSDTQLLDLRRNHFPSVPRAAFPGLGHLVSLHLQHCGIAELEAGALAGLGRLIYLYLSDNQLAGLSAAALEGAPRLGYLYLERNRFLQVPGAALRALPSLFSLHLQDNAVDRLAPGDLGRTRALRWVYLSGNRITEVSLGALGPARELEKLHLDRNQLREVPTGALEGLPALLELQLSGNPLRALRDGAFQPVGRSLQHLFLNSSGLEQICPGAFSGLGPGLQSLHLQKNQLRALPALPSLSQLELIDLSSNPFHCDCQLLPLHRWLTGLNLRVGATCATPPNARGQRVKAAAAVFEDCPGWAARKAKRTPASRPSARRTPIKGRQCGADKVGKEKGRL

SEQ ID NO: 1841 - protein, 253 aa, Homo sapiens
MPLLPSTVGLAGLLFWAGQAVNALIMPNATPAPAQPESTAMRLLSGLEVPRYRRKRHISVRDMNALLDYHNHIRASVYPPAANMEYMVWDKRLARAAEAWATQCIWAHGPSQLMRYVGQNLSIHSGQYRSVVDLMKSWSEEKWHYLFPAPRDCNPHCPWRCDGPTCSHYTQMVWASSNRLGCAIHTCSSISVWGNTWHRAAYLVCNYAIKGNWIGESPYKMGKPCSSCPPSYQGSCNSNMCFKGLKSNKFTWF

SEQ ID NO: 1842 - protein, 2828 aa, Homo sapiens
MPKRAHWGALSVVLILLWGHPRVALACPHPCACYVPSEVHCTFRSLASVPAGIAKHVERINLGFNSIQALSETSFAGLTKLELLMIHGNEIPSIPDGALRDLSSLQVFKFSYNKLRVITGQTLQGLSNLMRLHIDHNKIEFIHPQAFNGLTSLRLLHLEGNLLHQLHPSTFSTFTFLDYFRLSTIRHLYLAENMVRTLPASMLRNMPLLENLYLQGNPWTCDCEMRWFLEWDAKSRGILKCKKDKAYEGGQLCAMCFSPKKLYKHEIHKLKDMTCLKPSIESPLRQNRSRSIEEEQEQEEDGGSQLILEKFQLPQWSISLNMTDEHGNMVNLVCDIKKPMDVYKIHLNQTDPPDIDINATVALDFECPMTRENYEKLWKLIAYYSEVPVKLHRELMLSKDPRVSYQYRQDADEEALYYTGVRAQILAEPEWVMQPSIDIQLNRRQSTAKKVLLSYYTQYSQTISTKDTRQARGRSWVMIEPSGAVQRDQTVLEGGPCQLSCNVKASESPSIFWVLPDGSILKAPMDDPDSKFSILSSGWLRIKSMEPSDSGLYQCIAQVRDEMDRMVYRVLVQSPSTQPAEKDTVTIGKNPGESVTLPCNALAIPEAHLSWILPNRRIINDLANTSHVYMLPNGTLSIPKVQVSDSGYYRCVAVNQQGADHFTVGITVTKKGSGLPSKRGRRPGAKALSRVREDIVEDEGGSGMGDEENTSRRLLHPKDQEVFLKTKDDAINGDKKAKKGRRKLKLWKHSEKEPETNVAEGRRVFESRRRINMANKQINPERWADILAKVRGKNLPKGTEVPPLIKTTSPPSLSLEVTPPFPAISPPSASPVQTVTSAEESSADVPLLGEEEHVLGTISSASMGLEHNHNGVILVEPEVTSTPLEEVVDDLSEKTEEITSTEGDLKGTAAPTLISEPYEPSPTLHTLDTVYEKPTHEETATEGWSAADVGSSPEPTSSEYEPPLDAVSLAESEPMQYFDPDLETKSQPDEDKMKEDTFAHLTPTPTIWVNDSSTSQLFEDSTIGEPGVPGQSHLQGLTDNIHLVKSSLSTQDTLLIKKGMKEMSQTLQGGNMLEGDPTHSRSSESEGQESKSITLPDSTLGIMSSMSPVKKPAETTVGTLLDKDTTTATTTPRQKVAPSSTMSTHPSRRRPNGRRRLRPNKFRHRHKQTPPTTFAPSETFSTQPTQAPDIKISSQVESSLVPTAWVDNTVNTPKQLEMEKNAEPTSKGTPRRKHGKRPNKHRYTPSTVSSRASGSKPSPSPENKHRNIVTPSSETILLPRTVSLKTEGPYDSLDYMTTTRKIYSSYPKVQETLPVTYKPTSDGKEIKDDVATNVDKHKSDILVTGESITNAIPTSRSLVSTMGEFKEESSPVGFPGTPTWNPSRTAQPGRLQTGIPVTTSGENLTDPPLLKELEDVDFTSEFLSSLTVSTPFHQEEAGSSTTLSSIKVEVASSQAETTTLDQDHLETTVAILLSETRPQNHTPTAARMKEPASSSPSTILMSLGQTTTTKPALPSPRISQASRDSKENVFLNYVGNPETEATPVNNEGTQHMSGPNELSTPSSDQDAFNLSTKLELEKQVFGSRSLPRGPDSQRQDGRVHASHQLTRVPAKPILPTATVRLPEMSTQSASRYFVTSQSPRHWTNKPEITTYPSGALPENKQFTTPRLSSTTIPLPLHMSKPSIPSKFTDRRTDQFNGYSKVFGNNNIPEARNPVGKPPSPRIPHYSNGRLPFFTNKTLSFPQLGVTRRPQIPTSPAPVMRERKVIPGSYNRIHSHSTFHLDFGPPAPPLLHTPQTTGSPSTNLQNIPMVSSTQSSISFITSSVQSSGSFHQSSSKFFAGGPPASKFWSLGEKPQILTKSPQTVSVTAETDTVFPCEATGKPKPFVTWTKVSTGALMTPNTRIQRFEVLKNGTLVIRKVQVQDRGQYMCTASNLHGLDRMVVLLSVTVQQPQILASHYQDVTVYLGDTIAMECLAKGTPAPQISWIFPDRRVWQTVSPVEGRITLHENRTLSIKEASFSDRGVYKCVASNAAGADSLAIRLHVAALPPVIHQEKLENISLPPGLSIHIHCTAKAAPLPSVRWVLGDGTQIRPSQFLHGNLFVFPNGTLYIRNLAPKDSGRYECVAANLVGSARRTVQLNVQRAAANARITGTSPRRTDVRYGGTLKLDCSASGDPWPRILWRLPSKRMIDALFSFDSRIKVFANGTLVVKSVTDKDAGDYLCVARNKVGDDYVVLKVDVVMKPAKIEHKEENDHKVFYGGDLKVDCVATGLPNPEISWSLPDGSLVNSFMQSDDSGGRTKRYVVFNNGTLYFNEVGMREEGDYTCFAENQVGKDEMRVRVKVVTAPATIRNKTYLAVQVPYGDVVTVACEAKGEPMPKVTWLSPTNKVIPTSSEKYQIYQDGTLLIQKAQRSDSGNYTCLVRNSAGEDRKTVWIHVNVQPPKINGNPNPITTVREIAAGGSRKLIDCKAEGIPTPRVLWAFPEGVVLPAPYYGNRITVHGNGSLDIRSLRKSDSVQLVCMARNEGGEARLILQLTVLEPMEKPIFHDPISEKITAMAGHTISLNCSAAGTPTPSLVWVLPNGTDLQSGQQLQRFYHKADGMLHISGLSSVDAGAYRCVARNAAGHTERLVSLKVGLKPEANKQYHNLVSIINGETLKLPCTPPGAGQGRFSWTLPNGMHLEGPQTLGRVSLLDNGTLTVREASVFDRGTYVCRMETEYGPSVTSIPVIVIAYPPRITSEPTPVIYTRPGNTVKLNCMAMGIPKADITWELPDKSHLKAGVQARLYGNRFLHPQGSLTIQHATQRDAGFYKCMAKNILGSDSKTTYIHVF

SEQ ID NO: 1843 - protein, 1313 aa, Homo sapiens
MSGWRYLICVSFLLTILLELTYQGPPVPASSSTKLLMTSYSMRSTVVSRYAHTLVTSVLFNPHAEAHEAIFDLDLPHLAFISNFTMTINNKVYIAEVKEKHQAKKIYEEAHQQGKTAAHVGIRDRESEKFRISTSLAAGTEVTFSLAYEELLQRHQGQYQLVVSLRPGQLVKRLSIEVTVSERTGISYVHIPPLRTGRLRTNAHASEVDSPPSTRIERGETCVRITYCPTLQDQSSISGSGIMADFLVQYDVVMEDIIGDVQIYDDYFIHYFAPRGLPPMEKNVVFVIDVSSSMFGTKMEQTKTAMNVILSDLQANDYFNIISFSDTVNVWKAGGSIQATIQNVHSAKDYLHCMEADGWTDVNSALLAAASVLNHSNQEPGRGPSVGRIPLIIFLTDGEPTAGVTTPSVILSNVRQALGHRVSLFSLAFGDDADFTLLRRLSLENRGIARRIYEDTDAALQLKGLYEEISMPLLADVRLNYLGGLVGASPWAVFPNYFGGSELVVAGQVQPGKQELGIHLAARGPKDQLLVAHHSEGATNNSQKAFGCPGEPAPNVAHFIRRLWAYVTIGELLDAHFQARDTTTRHLLAAKVLNLSLEYNFVTPLTSLVMVQPKQASEETRRQTSTSAGPDTIMPSSSSRHGLGVSTAQPALVPKVISPKSRPVKPKFYLSSTTTASTKKMLSSKELEPLGESPHTLSMPTYPKAKIPAQQDSGTLAQPTLRTKPTILVPSNSGTLLPLKPGSLSHQNPDILPTNSRTQVPPVKPGIPASPKADTVKCVTPLHSKPGAPSHPQLGALTSQAPKGLPQSRPGVSTLQVPKYPLHTRPRVPAPKTRNNMPHLGPGILLSKTPKILLSLKPSAPPHQISTSISLSKPETPNPHMPQTPLPPRPDRPRPPLPESLSTFPNTISSSTGPSSTTTTSVLGEPLPMPFTPTLPPGRFWHQYDLLPGPQRTRQVLGPSRPGVPTMSLLNSSRPTPEGSPPNLPILLPSSILPEAISLLLLPEELELLSESMVESKFVESLNPPAFYTFLTPDEDGSPNWDGNSEEILGGAGGSMESQGSSVGLAKGTLPSIFTFSSSVDGDPHFVIQIPHSEEKICFTLNGHPGDLLQLIEDPKAGLHVSGKLLGAPPRPGHKDQTRTYFQIITVTTDKPRAYTITISRSSISLRGEGTLRLSWDQPALLKRPQLELYVAAAARLTLRLGPYLEFLVLRHRYRHPSTLQLPHLGFYVANGSGLSPSARGLIGQFQHADIRLVTGPMGPCLRRHHGPDVPVILGKRLLKDSPRLLPRWASCWLVKRSHVELLLGHPYLSYVL

SEQ ID NO: 1844 - protein, 193 aa, Homo sapiens
MLGVLELLLLGAAWLAGPARGQNETEPIVLEGKCLVVCDSNPTSDPTGTALGISVRSGSAKVAFSAIRSTNHEPSEMSNRTMIIYFDQVLVNIGNNFDSERSTFIAPRKGIYSFNFHVVKVYNRQTIQVSLMLNGWPVISAFAGDQDVTREAASNGVLIQMEKGDRAYLKLERGNLMGGWKYSTFSGFLVFPL

SEQ ID NO: 1845 - protein, 395 aa, Homo sapiens
MVSAAGLSGDGKMRGVLLVLLGLLYSSTSCGVQKASVFYGPDPKEGLVSSMEFPWVVSLQDSQYTHLAFGCILSEFWVLSIASAIQNRKDIVVIVGISNMDPSKIAHTEYPVNTIIIHEDFDNNSMSNNIALLKTDTAMHFGNLVQSICFLGRMLHTPPVLQNCWVSGWNPTSATGNHMTMSVLRKIFVKDLDMCPLYKLQKTECGSHTKEETKTACLGDPGSPMMCQLQQFDLWVLRGVLNFGGETCPGLFLYTKVEDYSKWITSKAERAGPPLSSLHHWEKLISFSHHGPNATMTQKTYSDSELGHVGSYLQGQRRTITHSRLGNSSRDSLDVREKDVKESGRSPEASVQPLYYDYYGGEVGEGRIFAGQNRLYQPEEIILVSFVLVFFCSSI

SEQ ID NO: 1846 - protein, 412 aa, Homo sapiens
MGLHLRPYRVGLLPDGLLFLLLLLMLLADPALPAGRHPPVVLVPGDLGNQLEAKLDKPTVVHYLCSKKTESYFTIWLNLELLLPVIIDCWIDNIRLVYNKTSRATQFPDGVDVRVPGFGKTFSLEFLDPSKSSVGSYFHTMVESLVGWGYTRGEDVRGAPYDWRRAPNENGPYFLALREMIEEMYQLYGGPVVLVAHSMGNMYTLYFLQRQPQAWKDKYIRAFVSLGAPWGGVAKTLRVLASGDNNRIPVIGPLKIREQQRSAVSTSWLLPYNYTWSPEKVFVQTPTINYTLRDYRKFFQDIGFEDGWLMRQDTEGLVEATMPPGVQLHCLYGTGVPTPDSFYYESFPDRDPKICFGDGDGTVNLKSALQCQAWQSRQEHQVLLQELPGSEHIEMLANATTLAYLKRVLLGP

SEQ ID NO: 1847 - protein, 472 aa, Homo sapiens
MKFLIFAFFGGVHLLSLCSGKAICKNGISKRTFEEIKEEIASCGDVAKAIINLAVYGKAQNRSYERLALLVDTVGPRLSGSKNLEKAIQIMYQNLQQDGLEKVHLEPVRIPHWERGEESAVMLEPRIHKIAILGLGSSIGTPPEGITAEVLVVTSFDELQRRASEARGKIVVYNQPYINYSRTVQYRTQGAVEAAKVGALASLIRSVASFSIYSPHTGIQEYQDGVPKIPTACITVEDAEMMSRMASHGIKIVIQLKMGAKTYPDTDSFNTVAEITGSKYPEQVVLVSGHLDSWDVGQGAMDDGGGAFISWEALSLIKDLGLRPKRTLRLVLWTAEEQGGVGAFQYYQLHKVNISNYSLVMESDAGTFLPTGLQFTGSEKARAIMEEVMSLLQPLNITQVLSHGEGTDINFWIQAGVPGASLLDDLYKYFFFHHSHGDTMTVMDPKQMNVAAAVWAVVSYVVADMEEMLPRS

SEQ ID NO: 1848 - protein, 5405 aa, Homo sapiens
MGALWSWWILWAGATLLWGLTQEASVDLKNTGREEFLTAFLQNYQLAYSKAYPRLLISSLSESPASVSILSQADNTSKKVTVRPGESVMVNISAKAEMIGSKIFQHAVVIHSDYAISVQALNAKPDTAELTLLRPIQALGTEYFVLTPPGTSARNVKEFAVVAGAAGASVSVTLKGSVTFNGKFYPAGDVLRVTLQPYNVAQLQSSVDLSGSKVTASSPVAVLSGHSCAQKHTTCNHVVEQLLPTSAWGTHYVVPTLASQSRYDLAFVVASQATKLTYNHGGITGSRGLQAGDVVEFEVRPSWPLYLSANVGIQVLLFGTGAIRNEVTYDPYLVLIPDVAAYCPAYVVKSVPGCEGVALVVAQTKAISGLTIDGHAVGAKLTWEAVPGSEFSYAEVELGTADMIHTAEATTNLGLLTFGLAKAIGYATAADCGRTVLSPVEPSCEGMQCAAGQRCQVVGGKAGCVAESTAVCRAQGDPHYTTFDGRRYDMMGTCSYTMVELCSEDDTLPAFSVEAKNEHRGSRRVSYVGLVTVRAYSHSVSLTRGEVGFVLVDNQRSRLPVSLSEGRLRVYQSGPRAVVELVFGLVVTYDWDCQLALSLPARFQDQVCGLCGNYNGDPADDFLTPDGALAPDAVEFASSWKLDDGDYLCEDGCQNNCPACTPGQAQHYEGDRLCGMLTKLDGPFAVCHDTLDPRPFLEQCVYDLCVVGGERLSLCRGLSAYAQACLELGISVGDWRSPANCPLSCPANSRYELCGPACPTSCNGAAAPSNCSGRPCVEGCVCLPGFVASGGACVPASSCGCTFQGLQLAPGQEVWADELCQRRCTCNGATHQVTCRDKQSCPAGERCSVQNGLLGCYPDRFGTCQGSGDPHYVSFDGRRFDFMGTCTYLLVGSCGQNAALPAFRVLVENEHRGSQTVSYTRAVRVEARGVKVAVRREYPGQVLVDDVLQYLPFQAADGQVQVFRQGRDAVVRTDFGLTVTYDWNARVTAKVPSSYAEALCGLCGNFNGDPADDLALRGGGQAANALAFGNSWQEETRPGCGATEPGDCPKLDSLVAQQLQSKNECGILADPKGPFRECHSKLDPQGAVRDCVYDRCLLPGQSGPLCDALATYAAACQAAGATVHPWRSEELCPLSCPPHSHYEACSYGCPLSCGDLPVPGGCGSECHEGCVCDEGFALSGESCLPLASCGCVHQGTYHPPGQTFYPGPGCDSLCHCQEGGLVSCESSSCGPHEACQPSGGSLGCVAVGSSTCQASGDPHYTTFDGRRFDFMGTCVYVLAQTCGTRPGLHRFAVLQENVAWGNGRVSVTRVITVQVANFTLRLEQRQWKVTVNGVDMKLPVVLANGQIRASQHGSDVVIETDFGLRVAYDLVYYVRVTVPGNYYQQMCGLCGNYNGDPKDDFQKPNGSQAGNANEFGNSWEEVVPDSPCLPPTPCPPGSEDCIPSHKCPPELEKKYQKEEFCGLLSSPTGPLSSCHKLVDPQGPLKDCIFDLCLGGGNLSILCSNIHAYVSACQAAGGHVEPWRTETFCPMECPPNSHYELCADTCSLGCSALSAPPQCQDGCAEGCQCDSGFLYNGQACVPIQQCGCYHNGVYYEPEQTVLIDNCRQQCTCHAGKGMVCQEHSCKPGQVCQPSGGILSCVTKDPCHGVTCRPQETCKEQGGQGVCLPNYEATCWLWGDPHYHSFDGRKFDFQGTCNYVLATTGCPGVSTQGLTPFTVTTKNQNRGNPAVSYVRVVTVAALGTNISIHKDEIGKVRVNGVLTALPVSVADGRISVTQGASKALLVADFGLQVSYDWNWRVDVTLPSSYHGAVCGLCGNMDRNPNNDQVFPNGTLAPSIPIWGGSWRAPGWDPLCWDECRGSCPTCPEDRLEQYEGPGFCGPLAPGTGGPFTTCHAHVPPESFFKGCVLDVCMGGGDRDILCKALASYVAACQAAGVVIEDWRAQVGCEITCPENSHYEVCGSPCPASCPSPAPLTTPAVCEGPCVEGCQCDAGFVLSADRCVPLNNGCGCWANGTYHEAGSEFWADGTCSQWCRCGPGGGSLVCTPASCGLGEVCGLLPSGQHGCQPVSTAECQAWGDPHYVTLDGHRFNFQGTCEYLLSAPCHGPPLGAENFTVTVANEHRGSQAVSYTRSVTLQIYNHSLTLSARWPRKLQVDGVFVTLPFQLDSLLHAHLSGADVVVTTTSGLSLAFDGDSFVRLRVPAAYAGSLCGLCGNYNQDPADDLKAVGGKPAGWQVGGAQGCGECVSKPCPSPCTPEQQESFGGPDACGVISATDGPLAPCHGLVPPAQYFQGCLLDACQVQGHPGGLCPAVATYVAACQAAGAQLREWRRPDFCPFQCPAHSHYELCGDSCPGSCPSLSAPEGCESACREGCVCDAGFVLSGDTCVPVGQCGCLHDDRYYPLGQTFYPGPGCDSLCRCREGGEVSCEPSSCGPHETCRPSGGSLGCVAVGSTTCQASGDPHYTTFDGRRFDFMGTCVYVLAQTCGTRPGLHRFAVLQENVAWGNGRVSVTRVITVQVANFTLRLEQRQWKVTVNGVDMKLPVVLANGQIRASQHGSDVVIETDFGLRVAYDLVYYVRVTVPGNYYQLMCGLCGNYNGDPKDDFQKPNGSQAGNANEFGNSWEEVVPDSPCLPPPTCPPGSEGCIPSEECPPELEKKYQKEEFCGLLSSPTGPLSSCHKLVDPQGPLKDCIFDLCLGGGNLSILCSNIHAYVSACQAAGGQVEPWRNETFCPMECPQNSHYELCADTCSLGCSALSAPLQCPDGCAEGCQCDSGFLYNGQACVPIQQCGCYHNGAYYEPEQTVLIDNCRQQCTCHVGKVVVCQEHSCKPGQVCQPSGGILSCVNKDPCHGVTCRPQETCKEQGGQGVCLPNYEATCWLWGDPHYHSFDGRKFDFQGTCNYVLATTGCPGVSTQGLTPFTVTTKNQNRGNPAVSYVRVVTVAALGTNISIHKDEIGKVRVNGVLTALPVSVADGRISVTQGASKALLVADFGLQVSYDWNWRVDVTLPSSYHGAVCGLCGNMDRNPNNDQVFPNGTLAPSIPIWGGSWRAPGWDPLCWDECRGSCPTCPEDRLEQYEGPGFCGPLAPGTGGPFTTCHAHVPPESFFKGCVLDVCMGGGDRDILCKALASYVAACQAAGVVIEDWRAQVGCEITCPENSHYEVCGPPCPASCPSPAPLTTPAVCEGPCVEGCQCDAGFVLSADRCVPLNNGCGCWANGTYHEAGSEFWADGTCSQWCRCGPGGGSLVCTPASCGLGEVCGLLPSGQHGCQPVSTAECQAWGDPHYVTLDGHRFDFQGTCEYLLSAPCHGPPLGAENFTVTVANEHRGSQAVSYTRSVTLQIYNHSLTLSARWPRKLQVDGVFVTLPFQLDSLLHAHLSGADVVVTTTSGLSLAFDGDSFVRLRVPAAYAGSLCGLCGNYNQDPADDLKAVGGKPAGWQVGGAQGCGECVSKPCPSPCTPEQQESFGGPDACGVISATDGPLAPCHGLVPPAQYFQGCLLDACQVQGHPGGLCPAVATYVAACQAAGAQLREWRRPDFCPFQCPAHSHYELCGDSCPGSCPSLSAPEGCESACREGCVCDAGFVLSGDTCVPVGQCGCLHDDRYYPLGQTFYPGPGCDSLCRCREGGEVSCEPSSCGPHETCRPSGGSLGCVAVGSTTCQASGDPHYTTFDGHRFDFMGTCVYVLAQTCGTRPGLHRFAVLQENVAWGNGRVSVTRVITVQVANFTLRLEQRQWKVTVNGVDMKLPVVLANGQIRASQHGSDVVIETDFGLRVAYDLVYYVRVTVPGNYYQLMCGLCGNYNGDPKDDFQKPNGSQAGNANEFGNSWEEVVPDSPCLPPPTCPPGSAGCIPSDKCPPELEKKYQKEEFCGLLSSPTGPLSSCHKLVDPQGPLKDCIFDLCLGGGNLSILCSNIHAYVSACQAAGGHVEPWRNETFCPMECPQNSHYELCADTCSLGCSALSAPLQCPDGCAEGCQCDSGFLYNGQACVPIQQCGCYHNGVYYEPEQTVLIDNCRQQCTCHVGKVVVCQEHSCKPGQVCQPSGGILSCVTKDPCHGVTCRPQETCKEQGGQGVCLPNYEATCWLWGDPHYHSFDGRKFDFQGTCNYVLATTGCPGVSTQGLTPFTVTTKNQNRGNPAVSYVRVVTVAALGTNISIHKDEIGKVRVNGVLTALPVSVADGRISVAQGASKALLVADFGLQVSYDWNWRVDVTLPSSYHGAVCGLCGNMDRNPNNDQVFPNGTLAPSIPIWGGSWRAPGWDPLCWDECRGSCPTCPEDRLEQYEGPGFCGPLSSGTGGPFTTCHAHVPPESFFKGCVLDVCMGGGDRDILCKALASYVAACQAAGVVIEDWRAQVGCEITCPENSHYEVCGPPCPASCPSPAPLTTPAVCEGPCVEGCQCDAGFVLSADRCVPLNNGCGCWANGTYHEAGSEFWADGTCSQWCRCGPGGGSLVCTPASCGLGEVCGLLPSGQHGCQPVSTAECQAWGDPHYVTLDGHRFDFQGTCEYLLSAPCHGPPLGAENFTVTVANEHRGSQAVSYTRSVTLQIYNHSLTLSARWPRKLQVDGVFVALPFQLDSLLHAHLSGADVVVTTTSGLSLAFDGDSFVRLRVPAAYAASLCGLCGNYNQDPADDLKAVGGKPAGWQVGGAQGCGECVSKPCPSPCTPEQQESFGGPDACGVISATDGPLAPCHGLVPPAQYFQGCLLDACQVQGHPGGLCPAVATYVAACQAAGAQLGEWRRPDFCPLQCPAHSHYELCGDSCPVSCPSLSAPEGCESACREGCVCDAGFVLSGDTCVPVGQCGCLHDGRYYPLGEVFYPGPECERRCECGPGGHVTCQEGAACGPHEECRLEDGVQACHATGCGRCLANGGIHYITLDGRVYDLHGSCSYVLAQVCHPKPGDEDFSIVLEKNAAGDLQRLLVTVAGQVVSLAQGQQVTVDGEAVALPVAVGRVRVTAEGRNMVLQTTKGLRLLFDGDAHLLMSIPSPFRGRLCGLCGNFNGNWSDDFVLPNGSAASSVETFGAAWRAPGSSKGCGEGCGPQGCPVCLAEETAPYESNEACGQLRNPQGPFATCQAVLSPSEYFRQCVYDLCAQKGDKAFLCRSLAAYTAACQAAGVAVKPWRTDSFCPLHCPAHSHYSICTRTCQGSCAALSGLTGCTTRCFEGCECDDRFLLSQGVCIPVQDCGCTHNGRYLPVNSSLLTSDCSERCSCSSSSGLTCQAAGCPPGRVCEVKAEARNCWATRGLCVLSVGANLTTFDGARGATTSPGVYELSSRCPGLQNTIPWYRVVAEVQICHGKTEAVGQVHIFFQDGMVTLTPNKGVWVNGLRVDLPAEKLASVSVSRTPDGSLLVRQKAGVQVWLGANGKVAVIVSNDHAGKLCGACGNFDGDQTNDWHDSQEKPAMEKWRAQDFSPCYG

SEQ ID NO: 1849 - protein, 352 aa, Homo sapiens
MAPKLITVLCLGFCLNQKICPHAGAQDKFSLSAWPSPVVPLGGRVTLSCHSHLRFVIWTIFQTTGTRSHELHTGLSNNITISPVTPEHAGTYRCVGIYKHASKWSAESNSLKIIVTGLFTKPSISAHPSSLVHAGARVSLRCHSELAFDEFILYKEGHIQHSQQLDQGMEAGIHYVEAVFSMGPVTPAHAGAYRCCGCFSHSRYEWSAPSDPLDIVITGKYKKPSLSTQVDPMMRLGEKLTLFCSSEISFDQYHLFRHGVAHGQWLSGGQRHREAFQANFSVGRATPVPGGTYRCYGSFNDSPYKPPVTRCNFTPQETLRVLLCHSQNPPLNLTHLALKDSPATCICSLDSQ

SEQ ID NO: 1850 - protein, 360 aa, Homo sapiens
MPELVVTALLAPSRLSLKLLRAFMWSLVFSVALVAAAVYGCIALTHVLCRPRRGCCGRRRSASPACLSDPSLGEHGFLNLKSSGLRLHYVSAGRGNGPLMLFLHGFPENWFSWRYQLREFQSRFHVVAVDLRGYGPSDAPRDVDCYTIDLLLVDIKDVILGLGYSKCILVAHDWGALLAWHFSIYYPSLVERMVVVSGAPMSVYQDYSLHHISQFFRSHYMFLFQLPWLPEKLLSMSDFQILKTTLTHRKTGIPCLTPSELEAFLYNFSQPGGLTGPLNYYRNLFRNFPLEPQELTTPTLLLWGEKDTYLELGLVEAIGSRFVPGRLEAHILPGIGHWIPQSNPQEMHQYMWAFLQDLLD

SEQ ID NO: 1851 - protein, 365 aa, Homo sapiens
MDRAALLGLARLCALWAALLVLFPYGAQGNWMWLGIASFGVPEKLGCANLPLNSRQKELCKRKPYLLPSIREGARLGIQECGSQFRHERWNCMITAAATTAPMGASPLFGYELSSGTKETAFIYAVMAAGLVHSVTRSCSAGNMTECSCDTTLQNGGSASEGWHWGGCSDDVQYGMWFSRKFLDFPIGNTTGKENKVLLAMNLHNNEAGRQAVAKLMSVDCRCHGVSGSCAVKTCWKTMSSFEKIGHLLKDKYENSIQISDKTKRKMRRREKDQRKIPIHKDDLLYVNKSPNYCVEDKKLGIPGTQGRECNRTSEGADGCNLLCCGRGYNTHVVRHVERCECKFIWCCYVRCRRCESMTDVHTCK

SEQ ID NO: 1852 - protein, 196 aa, Homo sapiens [sequence omitted]

SEQ ID NO: 1853 - protein, 1158 aa, Homo sapiens
MAAVRGAPLLSCLLALLALCPGGRPQTVLTDDEIEEFLEGFLSELEPEPREDDVEAPPPPEPTPRVRKAQAGGKPGKRPGTAAEVPPEKTKDKGKKGKKDKGPKVPKESLEGSPRPPKKGKEKPPKATKKPKEKPPKATKKPKEKPPKATKKPKEKPPKATKKPPSGKRPPILAPSETLEWPLPPPPSPGPEELPQEGGAPLSNNWQNPGEETHVEAREHQPEPEEETEQPTLDYNDQIEREDYEDFEYIRRQKQPRPPPSRRRRPERVWPEPPEEKAPAPAPEERIEPPVKPLLPPLPPDYGDGYVIPNYDDMDYYFGPPPPQKPDAERQTDEEKEELKKPKKEDSSPKEETDKWAVEKGKDHKEPRKGEELEEEWTPTEKVKCPPIGMESHRIEDNQIRASSMLRHGLGAQRGRLNMQTGATEDDYYDGAWCAEDDARTQWIEVDTRRTTRFTGVITQGRDSSIHDDFVTTFFVGFSNDSQTWVMYTNGYEEMTFHGNVDKDTPVLSELPEPVVARFIRIYPLTWNGSLCMRLEVLGCSVAPVYSYYAQNEVVATDDLDFRHHSYKDMRQLMKVVNEECPTITRTYSLGKSSRGLKIYAMEISDNPGEHELGEPEFRYTAGIHGNEVLGRELLLLLMQYLCREYRDGNPRVRSLVQDTRIHLVPSLNPDGYEVAAQMGSEFGNWALGLWTEEGFDIFEDFPDLNSVLWGAEERKWVPYRVPNNNLPIPERYLSPDATVSTEVRAIIAWMEKNPFVLGANLNGGERLVSYPYDMARTPTQEQLLAAAMAAARGEDEDEVSEAQETPDHAIFRWLAISFASAHLTLTEPYRGGCQAQDYTGGMGIVNGAKWNPRTGTINDFSYLHTNCLELSFYLGCDKFPHESELPREWENNKEALLTFMEQVHRGIKGVVTDEQGIPIANATISVSGINHGVKTASGGDYWRILNPGEYRVTAHAEGYTPSAKTCNVDYDIGATQCNFILARSNWKRIREIMAMNGNRPIPHIDPSRPMTPQQRRLQQRRLQHRLRLRAQMRLRRLNATTTLGPHTVPPTLPPAPATTLSTTIEPWGLIPPTTAGWEESETETYTEVVTEFGTEVEPEFGTKVEPEFETQLEPEFETQLEPEFEEEEEEEKEEEIATGQAFPFTTVETYTVNFGDF

SEQ ID NO: 1854 - protein, 478 aa, Homo sapiens
MAHVPARTSPGPGPQLLLLLLPLFLLLLRDVAGSHRAPAWSALPAAADGLQGDRDLQRHPGDAAATLGPSAQDMVAVHMHRLYEKYSRQGARPGGGNTVRSFRARLEVVDQKAVYFFNLTSMQDSEMILTATFHFYSEPPRWPRALEVLCKPRAKNASGRPLPLGPPTRQHLLFRSLSQNTATQGLLRGAMALAPPPRGLWQAKDISPIVKAARRDGELLLSAQLDSEERDPGVPRPSPYAPYILVYANDLAISEPNSVAVTLQRYDPFPAGDPEPRAAPNNSADPRVRRAAQATGPLQDNELPGLDERPPRAHAQHFHKHQLWPSPFRALKPRPGRKDRRKKGQEVFMAASQVLDFDEKTMQKARRKQWDEPRVCSRRYLKVDFADIGWNEWIISPKSFDAYYCAGACEFPMPKIVRPSNHATIQSIVRAVGIIPGIPEPCCVPDKMNSLGVLFLDENRNVVLKVYPNMSVDTCACR

SEQ ID NO: 1855 - protein, 134 aa, Homo sapiens
MKSLTWILGLWALAACFTPGESQRGPRGPYPPGPLAPPPPPCFPFGTGFVPPPHPPPYGPGRFPPPLSPPYGPGRIPPSPPPPYGPGRIQSHSLPPPYGPGYPQPPSQPRPYPPGPPFFPVNSPTDPALPTPAP

SEQ ID NO: 1856 - protein, 329 aa, Homo sapiens
MVSKSRWKLLAMLALVLVVMVWYSISREDSFYFPIPEKKEPCLQGEAESKASKLFGNYSRDQPIFLRLEDYFWVKTPSAYELPYGTKGSEDLLLRVLAITSSSIPKNIQSLRCRRCVVVGNGHRLRNSSLGDAINKYDVVIRLNNAPVAGYEGDVGSKTTMRLFYPESAHFDPKVENNPDTLLVLVAFKAMDFHWIETILSDKKRVRKGFWKQPPLIWDVNPKQIRILNPFFMEIAADKLLSLPMQQPRKIKQKPTTGLLAITLALHLCDLVHIAGFGYPDAYNKKQTIHYYEQITLKSMAGSGHNVSQEALAIKRMLEMGAIKNLTSF

SEQ ID NO: 1857 - protein, 369 aa, Homo sapiens
MRACISLVLAVLCGLAWAEDHKESEPLPQLEEETEEALASNLYSAPTSCQGRCYEAFDKHHQCHCNARCQEFGNCCKDFESLCSDHEVSHSSDAITKEEIQSISEKIYRADTNKAQKEDIVLNSQNCISPSETRNQVDRCPKPLFTYVNEKLFSKPTYAAFINLLNNYQRATGHGEHFSAQELAEQDAFLREIMKTAVMKELYSFLHHQNRYGSEQEFVDDLKNMWFGLYSRGNEEGDSSGFEHVFSGEVKKGKVTGFHNWIRFYLEEKEGLVDYYSHIYDGPWDSYPDVLAMQFNWDGYYKEVGSAFIGSSPEFEFALYSLCFIARPGKVCQLSLGGYPLAVRTYTWDKSTYGNGKKYIATAYIVSST

SEQ ID NO: 1858 - protein, 543 aa, Homo sapiens
MRKPAAGFLPSLLKVLLLPLAPAAAQDSTQASTPGSPLSPTEYERFFALLTPTWKAETTCRLRATHGCRNPTLVQLDQYENHGLVPDGAVCSNLPYASWFESFCQFTHYRCSNHVYYAKRVLCSQPVSILSPNTLKEIEASAEVSPTTMTSPISPHFTVTERQTFQPWPERLSNNVEELLQSSLSLGGQEQAPEHKQEQGVEHRQEPTQEHKQEEGQKQEEQEEEQEEEGKQEEGQGTKEGREAVSQLQTDSEPKFHSESLSSNPSSFAPRVREVESTPMIMENIQELIRSAQEIDEMNEIYDENSYWRNQNPGSLLQLPHTEALLVLCYSIVENTCIITPTAKAWKYMEEEILGFGKSVCDSLGRRHMSTCALCDFCSLKLEQCHSEASLQRQQCDTSHKTPFVSPLLASQSLSIGNQVGSPESGRFYGLDLYGGLHMDFWCARLATKGCEDVRVSGWLQTEFLSFQDGDFPTKICDTDYIQYPNYCSFKSQQCLMRNRNRKVSRMRCLQNETYSALSPGKSEDVVLRWSQEFSTLTLGQFG

SEQ ID NO: 1859 - protein, 201 aa, Homo sapiens
MARDYDHLFKLLIIGDSGVGKSSLLLRFADNTFSGSYITTIGVDFKIRTVEINGEKVKLQIWDTAGQERFRTITSTYYRGTHGVIVVYDVTSAESFVNVKRWLHEINQNCDDVCRILVGNKNDDPERKVVETEDAYKFAGQMGIQLFETSAKENVNVEEMFNCITELVLRAKKDNLAKQQQQQQNDVVKLTKNSKRKKRCC

SEQ ID NO: 1860 - protein, 477 aa, Homo sapiens
MTSKFLLVSFILAALSLSTTFSLQPDQQKVLLVSFDGFRWDYLYKVPTPHFHYIMKYGVHVKQVTNVFITKTYPNHYTLVTGLFAENHGIVANDMFDPIRNKSFSLDHMNIYDSKFWEEATPIWITNQRAGHTSGAAMWPGTDVKIHKRFPTHYMPYNESVSFEDRVAKIIEWFTSKEPINLGLLYWEDPDDMGHHLGPDSPLMGPVISDIDKKLGYLIQMLKKAKLWNTLNLIITSDHGMTQCSEERLIELDQYLDKDHYTLIDQSPVAAILPKEGKFDEVYEALTHAHPNLTVYKKEDVPERWHYKYNSRIQPIIAVADEGWHILQNKSDDFLLGNHGYDNALADMHPIFLAHGPAFRKNFSKEAMNSTDLYPLLCHLLNITAMPHNGSFWNVQDLLNSAMPRVVPYTQSTILLPGSVKPAEYDQEGSYPYFIGVSLGSIIVIVFFVIFIKHLIHSQIPALQDMHAEIAQPLLQA

SEQ ID NO: 1861 - protein, 162 aa, Homo sapiens
MKGFTATLFLWTLIFPSCSGGGGGKAWPTHVVCSDSGLEVLYQSCDPLQDFGFSVEKCSKQLKSNINIRFGIILREDIKELFLDLALMSQGSSVLNFSYPICEAALPKFSFCGRRKGEQIYYAGPVNNPEFTIPQGEYQVLLELYTEKRSTVACANATIMCS

SEQ ID NO: 1862 - protein, 264 aa, Homo sapiens
MTKFSSFSLFFLIVGAYMTHVCFNMEIIGGKEVSPHSRPFMASIQYGGHHVCGGVLIDPQWVLTAAHCQYRFTKGQSPTVVLGAHSLSKNEASKQTLEIKKFIPFSRVTSDPQSNDIMLVKLQTAAKLNKHVKMLHIRSKTSLRSGTKCKVTGWGATDPDSLRPSDTLREVTVTVLSRKLCNSQSYYNGDPFITKDMVCAGDAKGQKDSCKGDSGGPLICKGVFHAIVSGGHECGVATKPGIYTLLTKKYQTWIKSNLVPPHTN

SEQ ID NO: 1863 - protein, 246 aa, Homo sapiens
MLWRQLIYWQLLALFFLPFCLCQDEYMESPQTGGLPPDCSKCCHGDYSFRGYQGPPGPPGPPGIPGNHGNNGNNGATGHEGAKGEKGDKGDLGPRGERGQHGPKGEKGYPGIPPELQIAFMASLATHFSNQNSGIIFSSVETNIGNFFDVMTGRFGAPVSGVYFFTFSMMKHEDVEEVYVYLMHNGNTVFSMYSYEMKGKSDTSSNHAVLKLAKGDEVWLRMGNGALHGDHQRFSTFAGFLLFETK

SEQ ID NO: 1864 - protein, 782 aa, Homo sapiens
MAPSAWAICWLLGGLLLHGGSSGPSPGPSVPRLRLSYRDLLSANRSAIFLGPQGSLNLQAMYLDEYRDRLFLGGLDALYSLRLDQAWPDPREVLWPPQPGQREECVRKGRDPLTECANFVRVLQPHNRTHLLACGTGAFQPTCALITVGHRGEHVLHLEPGSVESGRGRCPHEPSRPFASTFIDGELYTGLTADFLGREAMIFRSGGPRPALRSDSDQSLLHDPRFVMAARIPENSDQDNDKVYFFFSETVPSPDGGSNHVTVSRVGRVCVNDAGGQRVLVNKWSTFLKARLVCSVPGPGGAETHFDQLEDVFLLWPKAGKSLEVYALFSTVSAVFQGFAVCVYHMADIWEVFNGPFAHRDGPQHQWGPYGGKVPFPRPGVCPSKMTAQPGRPFGSTKDYPDEVLQFARAHPLMFWPVRPRHGRPVLVKTHLAQQLHQIVVDRVEAEDGTYDVIFLGTDSGSVLKVIALQAGGSAEPEEVVLEELQVFKVPTPITEMEISVKRQMLYVGSRLGVAQLRLHQCETYGTACAECCLARDPYCAWDGASCTHYRPSLGKRRFRRQDIRHGNPALQCLGQSQEEEAVGLVAATMVYGTEHNSTFLECLPKSPQAAVRWLLQRPGDEGPDQVKTDERVLHTERGLLFRRLSRFDAGTYTCTTLEHGFSQTVVRLALVVIVASQLDNLFPPEPKPEEPPARGGLASTPPKAWYKDILQLIGFANLPRVDEYCERVWCRGTTECSGCFRSRSRGKQARGKSWAGLELGKKMKSRVHAEHNRTPREVEAT

SEQ ID NO: 1865 - protein, 350 aa, Homo sapiens
MEPKRIREGYLVKKGSVFNTWKPMWVVLLEDGIEFYKKKSDNSPKGMIPLKGSTLTSPCQDFGKRMFVFKITTTKQQDHFFQAAFLEERDAWVRDIKKAIKCIEGGQKFARKSTRRSIRLPETIDLGALYLSMKDTEKGIKELNLEKDKKIFNHCFTGNCVIDWLVSNQSVRNRQEGLMIASSLLNEGYLQPAGDMSKSAVDGTAENPFLDNPDAFYYFPDSGFFCEENSSDDDVILKEEFRGVIIKQGCLLKQGHRRKNWKVRKFILREDPAYLHYYDPAGAEDPLGAIHLRGCVVTSVESNSNGRKSEEENLFEIITADEVHYFLQAATPKERTEWIRAIQMASRTGK

SEQ ID NO: 1866 - protein, 491 aa, Homo sapiens
MKTFTWTLGVLFFLLVDTGHCRGGQFKIKKINQRRYPRATDGKEEAKKCAYTFLVPEQRITGPICVNTKGQDASTIKDMITRMDLENLKDVLSRQKREIDVLQLVVDVDGNIVNEVKLLRKESRNMNSRVTQLYMQLLHEIIRKRDNSLELSQLENKILNVTTEMLKMATRYRELEVKYASLTDLVNNQSVMITLLEEQCLRIFSRQDTHVSPPLVQVVPQHIPNSQQYTPGLLGGNEIQRDPGYPRDLMPPPDLATSPTKSPFKIPPVTFINEGPFKDCQQAKEAGHSVSGIYMIKPENSNGPMQLWCENSLDPGGWTVIQKRTDGSVNFFRNWENYKKGFGNIDGEYWLGLENIYMLSNQDNYKLLIELEDWSDKKVYAEYSSFRLEPESEFYRLRLGTYQGNAGDSMMWHNGKQFTTLDRDKDMYAGNCAHFHKGGWWYNACAHSNLNGVWYRGGHYRSKHQDGIFWAEYRGGSYSLRAVQMMIKPID

SEQ ID NO: 1867 - protein, 376 aa, Homo sapiens
MLKKISVGVAGDLNTVTMKLGCVLMAWALYLSLGVLWVAQMLLAASFETLQCEGPVCTEESSCHTEDDLTDAREAGFQVKAYTFSEPFHLIVSYDWLILQGPAKPVFEGDLLVLRCQAWQDWPLTQVTFYRDGSALGPPGPNREFSITVVQKADSGHYHCSGIFQSPGPGIPETASVVAITVQELFPAPILRAVPSAEPQAGSPMTLSCQTKLPLQRSAARLLFSFYKDGRIVQSRGLSSEFQIPTASEDHSGSYWCEAATEDNQVWKQSPQLEIRVQGASSSAAPPTLNPAPQKSAAPGTAPEEAPGPLPPPPTPSSEDPGFSSPLGMPDPHLYHQMGLLLKHMQDVRVLLGHLLMELRELSGHRKPGTTKATAE

SEQ ID NO: 1868 - protein, 523 aa, Homo sapiens
MARKALKLASWTSMALAASGIYFYSNKYLDPNDFGAVRVGRAVATTAVISYDYLTSLKSVPYGSEEYLQLRSKVHLRSARRLCELCCANRGTFIKVGQHLGALDYLLPEEYTSTLKVLHSQAPQSSMQEIRQVIREDLGKEIHDLFQSFDDTPLGTASLAQVHKAVLHDGRTVAVKVQHPKVRAQSSKDILLMEVLVLAVKQLFPEFEFMWLVDEAKKNLPLELDFLNEGRNAEKVSQMLRHFDFLKVPRIHWDLSTERVLLMEFVDGGQVNDRDYMERNKIDVNEISRHLGKMYSEMIFVNGFVHCDPHPGNVLVRKHPGTGKAEIVLLDHGLYQMLTEEFRLNYCHLWQSLIWTDMKRVKEYSQRLGAGDLYPLFACMLTARSWDSVNRGISQAPVTATEDLEIRNNAANYLPQISHLLNHVPRQMLLILKTNDLLRGIEAALGTRASASSFLNMSRCCIRALAEHKKKNTCSFFRRTQISFSEAFNLWQINLHELILRVKGLKLADRVLALICWLFPAPL

SEQ ID NO: 1869 - protein, 398 aa, Homo sapiens
MWLLLTMASLISVLGTTHGLFGKLHPGSPEVTMNISQMITYWGYPNEEYEVVTEDGYILEVNRIPYGKKNSGNTGQRPVVFLQHGLLASATNWISNLPNNSLAFILADAGYDVWLGNSRGNTWARRNLYYSPDSVEFWAFSFDEMAKYDLPATIDFIVKKTGQKQLHYVGHSQGTTIGFIAFSTNPSLAKRIKTFYALAPVATVKYTKSLINKLRFVPQSLFKFIFGDKIFYPHNFFDQFLATEVCSREMLNLLCSNALFIICGFDSKNFNTSRLDVYLSHNPAGTSVQNMFHWTQAVKSGKFQAYDWGSPVQNRMHYDQSQPPYYNVTAMNVPIAVWNGGKDLLADPQDVGLLLPKLPNLIYHKEIPFYNHLDFIWAMDAPQEVYNDIVSMISEDKK

SEQ ID NO: 1870 - protein, 184 aa, Homo sapiens
MRGQGRKESLSDSRDLDGSYDQLTDSVDDEFELSTVCHRPEGLEQLQEQTKFTRKELQVLYRGFKNECPSGIVNEENFKQIYSQFFPQGDSSTYATFLFNAFDTNHDGSVSFEEMLDIMKSIYDMMGKYTYPALREEAPREHVESFFQKMDRNKDGVVTIEEFIESCQKVQLPALYITLTWTQA

SEQ ID NO: 1871 - protein, 1299 aa, Homo sapiens
MSLQEMFRFPMGLLLGSVLLVASAPATLEPPGCSNKEQQVTVSHTYKIDVPKSALVQVDADPQPLSDDGASLLALGEAREEQNIIFRHNIRLQTPQKDCELAGSVQDLLARVKKLEEEMVEMKEQCSAQRCCQGVTDLSRHCSGHGTFSLETCSCHCEEGREGPACERLACPGACSGHGRCVDGRCLCHEPYVGADCGYPACPENCSGHGECVRGVCQCHEDFMSEDCSEKRCPGDCSGHGFCDTGECYCEEGFTGLDCAQVVTPQGLQLLKNTEDSLLVSWEPSSQVDHYLLSYYPLGKELSGKQIQVPKEQHSYEILGLLPGTKYIVTLRNVKNEVSSSPQHLLATTDLAVLGTAWVTDETENSLDVEWENPSTEVDYYKLRYGPMTGQEVAEVTVPKSSDPKSRYDITGLHPGTEYKITVVPMRGELEGKPILLNGRTEIDSPTNVVTDRVTEDTATVSWDPVQAVIDKYVVRYTSADGDTKEMAVHKDESSTVLTGLKPGEAYKVYVWAERGNQGSKKADTNALTEIDSPANLVTDRVTENTATISWDPVQATIDKYVVRYTSADDQETREVLVGKEQSSTVLTGLRPGVEYTVHVWAQKGDRESKKADTNAPTDIDSPKNLVTDRVTENMATVSWDPVQAAIDKYVVRYTSAGGETREVPVGKEQSSTVLTGLRPGMEYMVHVWAQKGDQESKKADTKAQTDIDSPQNLVTDRVTENMATVSWDPVRATIDRYVVRYTSAKDGETREVPVGKEQSSTVLTGLRPGVEYTVHVWAQKGAQESKKADTKAQTDIDSPQNLVTDWVTENTATVSWDPVQATIDRYVVHYTSANGETREVPVGKEQSSTVLTGLRPGMEYTVHVWAQKGNQESKKADTKAQTEIDGPKNLVTDWVTENMATVSWDPVQATIDKYMVRYTSADGETREVPVGKEHSSTVLTGLRPGMEYMVHVWAQKGAQESKKADTKAQTELDPPRNLRPSAVTQSGGILTWTPPSAQIHGYILTYQFPDGTVKEMQLGREDQRFALQGLEQGATYPVSLVAFKGGRRSRNVSTTLSTVGARFPHPSDCSQVQQNSNAASGLYTIYLHGDASRPLQVYCDMETDGGGWIVFQRRNTGQLDFFKRWRSYVEGFGDPMKEFWLGLDKLHNLTTGTPARYEVRVDLQTANESAYAIYDFFQVASSKERYKLTVGKYRGTAGDALTYHNGWKFTTFDRDNDIALSNCALTHHGGWWYKNCHLANPNGRYGETKHSEGVNWEPWKGHEFSIPYVELKIRPHGYSREPVLGRKKRTLRGRLRTF

SEQ ID NO: 1872 - protein, 553 aa, Homo sapiens
MTRGGPGGRPGLPQPPPLLLLLLLLPLLLVTAEPPKPAGVYYATAYWMPAEKTVQVKNVMDKNGDAYGFYNNSVKTTGWGILEIRAGYGSQTLSNEIIMFVAGFLEGYLTAPHMNDHYTNLYPQLITKPSIMDKVQDFMEKQDKWTRKNIKEYKTDSFWRHTGYVMAQIDGLYVGAKKRAILEGTKPMTLFQIQFLNSVGDLLDLIPSLSPTKNGSLKVFKRWDMGHCSALIKVLPGFENILFAHSSWYTYAAMLRIYKHWDFNVIDKDTSSSRLSFSSYPGFLESLDDFYILSSGLILLQTTNSVFNKTLLKQVIPETLLSWQRVRVANMMADSGKRWADIFSKYNSGTYNNQYMVLDLKKVKLNHSLDKGTLYIVEQIPTYVEYSEQTDVLRKGYWPSYNVPFHEKIYNWSGYPLLVQKLGLDYSYDLAPRAKIFRRDQGKVTDTASMKYIMRYNNYKKDPYSRGDPCNTICCREDLNSPNPSPGGCYDTKVADIYLASQYTSYAISGPTVQGGLPVFRWDRFNKTLHQGMPEVYNFDFITMKPILKLDIK

SEQ ID NO: 1873 - protein, 756 aa, Homo sapiens
MSRPGTATPALALVLLAVTLAGVGAQGAALEDPDYYGQEIWSREPYYARPEPELETFSPPLPAGPGEEWERRPQEPRPPKRATKPKKAPKREKSAPEPPPPGKHSNKKVMRTKSSEKAANDDHSVRVAREDVRESCPPLGLETLKITDFQLHASTVKRYGLGAHRGRLNIQAGINENDFYDGAWCAGRNDLQQWIEVDARRLTRFTGVITQGRNSLWLSDWVTSYKVMVSNDSHTWVTVKNGSGDMIFEGNSEKEIPVLNELPVPMVARYIRINPQSWFDNGSICMRMEILGCPLPDPNNYYHRRNEMTTTDDLDFKHHNYKEMRQLMKVVNEMCPNITRIYNIGKSHQGLKLYAVEISDHPGEHEVGEPEFHYIAGAHGNEVLGRELLLLLVQFVCQEYLARNARIVHLVEETRIHVLPSLNPDGYEKAYEGGSELGGWSLGRWTHDGIDINNNFPDLNTLLWEAEDRQNVPRKVPNHYIAIPEWFLSENATVAAETRAVIAWMEKIPFVLGGNLQGGELVVAYPYDLVRSPWKTQEHTPTPDDHVFRWLAYSYASTHRLMTDARRRVCHTEDFQKEEGTVNGASWHTVAGSLNDFSYLHTNCFELSIYVGCDKYPHESQLPEEWENNRESLIVFMEQVHRGIKGLVRDSHGKGIPNAIISVEGINHDIRTANDGDYWRLLNPGEYVVTAKAEGFTASTKNCMVGYDMGATRCDFTLSKTNMARIREIMEKFGKQPVSLPARRLKLRGQKRRQRG

SEQ ID NO: 1874 - protein, 233 aa, Homo sapiens
MATPPFRLIRKMFSFKVSRWMGLACFRSLAASSPSIRQKKLMHKLQEEKAFREEMKIFREKIEDFREEMWTFRGKIHAFRGQILGFWEEERPFWEEEKTFWKEEKSFWEMEKSFREEEKTFWKKYRTFWKEDKAFWKEDNALWERDRNLLQEDKALWEEEKALWVEERALLEGEKALWEDKTSLWEEENALWEEERAFWMENNGHIAGEQMLEDGPHNANRGQRLLAFSRGRA

SEQ ID NO: 1875 - protein, 231 aa, Homo sapiens
MMLSCLFLLKALLALGSLESWITAGEHAKEGECPPHKNPCKELCQGDELCPAEQKCCTTGCGRICRDIPKGRKRDCPRVIRKQSCLKRCITDETCPGVKKCCTLGCNKSCVVPISKQKLAEFGGECPADPLPCEELCDGDASCPQGHKCCSTGCGRTCLGDIEGGRGGDCPKVLVGLCIVGCVMDENCQAGEKCCKSGCGRFCVPPVLPPKLTMNPNWTVRSDSELEIPVP

SEQ ID NO: 1876 - protein, 349 aa, Homo sapiens
MGPISAPSCRWRIPWQGLLLTASLFTFWNPPTTAQLTIEAVPSNAAEGKEVLLLVHNLPQDPRGYNWYKGETVDANRRIIGYVISNQQITPGPAYSNRETIYPNASLLMRNVTRNDTGSYTLQVIKLNLMSEEVTGQFSVHPETPKPSISSNNSNPVEDKDAVAFTCEPETQNTTYLWWVNGQSLPVSPRLQLSNGNRTLTLLSVTRNDVGPYECEIQNPASANFSDPVTLNVLYGPDAPTISPSDTYYHAGVNLNLSCHAASNPPSQYSWSVNGTFQQYTQKLFIPNITTKNSGSYACHTTNSATGRNRTTVRMITVSDALVQGSSPGLSARATVSIMIGVLARVALI

SEQ ID NO: 1877 - protein, 169 aa, Homo sapiens
MTAGRRMEMLCAGRVPALLLCLGFHLLQAVLSTTVIPSCIPGESSDNCTALVQTEDNPRVAQVSITKCSSDMNGYCLHGQCIYLVDMSQNYCRCEVGYTGVRCEHFFLTVHQPLSKEYVALTVILIILFLITVVGSTYYFCRWYRNRKSKEPKKEYERVTSGDPELPQV

SEQ ID NO: 1878 - protein, 90 aa, Homo sapiens
MKLSVCLLLVTLALCCYQANAEFCPALVSELLDFFFISEPLFKLSLAKFDAPPEAVAAKLGVKRCTDQMSLQKRSLIAEVLVKILKKCSV

SEQ ID NO: 1879 - protein, 142 aa, Homo sapiens
MPRCRWLSLILLTIPLALVARKDPKKNETGVLRKLKPVNASNANVKQCLWFAMQEYNKESEDKYVFLVVKTLQAQLQVTNLLEYLIDVEIARSDCRKPLSTNEICAIQENSKLKRKLSCSFLVGALPWNGEFTVMEKKCEDA

SEQ ID NO: 1880 - protein, 145 aa, Homo sapiens
MGIGCWRNPLLLLIALVLSAKLGHFQRWEGFQQKLMSKKNMNSTLNFFIQSYNNASNDTYLYRVQRLIRSQMQLTTGVEYIVTVKIGWTKCKRNDTSNSSCPLQSKKLRKSLICESLIYTMPWINYFQLWNNSCLEAEHVGRNLR

SEQ ID NO: 1881 - protein, 183 aa, Homo sapiens
MKLLFPIFASLMLQYQVNTEFIGLRRCLMGLGRCRDHCNVDEKEIQKCKMKKCCVGPKVVKLIKNYLQYGTPNVLNEDVQEMLKPAKNSSAVIQRKHILSVLPQIKSTSFFANTNFVIIPNATPMNSATISTMTPGQITYTATSTKSNTKESRDSATASPPPAPPPPNILPTPSLELEEAEEQ

SEQ ID NO: 1882 - protein, 202 aa, Homo sapiens
MRGHPSLLLLYMALTTCLDTSPSEETDQEVFLGPPEAQSFLSSHTRIPRANHWDLELLTPGNLERECLEERCSWEEAREYFEDNTLTERFWESYIYNGKGGRGRVDVASLAVGLTGGILLIVLAGLGAFWYLRWRQHRGQQPCPQEAGLISPLSPLNPLGPPTPLPPPPPPPPGLPTYEQALAASGVHDAPPPPYTSLRRPH

SEQ ID NO: 1883 - protein, 185 aa, Homo sapiens
MRLLILTCLVAVALARPKLPLRYPERLQNPSESSEPIPLESREEYMNGMNRQRNILREKQTDEIKDTRNESTQNCVVAEPEKMESSISSSSEEMSLSKCAEQFCRLNEYNQLQLQAAHAQEQIRRMNENSHVQVPFQQLNQLAAYPYAVWYYPQIMQYVPFPPFSDISNPTAHENYEKNNVMLQW

SEQ ID NO: 1884 - protein, 469 aa, Homo sapiens
MITEGAQAPRLLLPPLLLLLTLPATGSDPVLCFTQYEESSGKCKGLLGGGVSVEDCCLNTAFAYQKRSGGLCQPCRSPRWSLWSTWAPCSVTCSEGSQLRYRRCVGWNGQCSGKVAPGTLEWQLQACEDQQCCPEMGGWSGWGPWEPCSVTCSKGTRTRRRACNHPAPKCGGHCPGQAQESEACDTQQVCPTHGAWATWGPWTPCSASCHGGPHEPKETRSRKCSAPEPSQKPPGKPCPGLAYEQRRCTGLPPCPVAGGWGPWGPVSPCPVTCGLGQTMEQRTCNHPVPQHGGPFCAGDATRTHICNTAVPCPVDGEWDSWGEWSPCIRRNMKSISCQEIPGQQSRGRTCRGRKFDGHRCAGQQQDIRHCYSIQHCPLKGSWSEWSTWGLCMPPCGPNPTRARQRLCTPLLPKYPPTVSMVEGQGEKNVTFWGRPLPRCEELQGQKLVVEEKRPCLHVPACKDPEEEEL

SEQ ID NO: 1885 - protein, 150 aa, Homo sapiens
MLIATSFFLFFSSVVAAPTHSSFWQFQRRVKHITGRSAFFSYYGYGCYCGLGDKGIPVDDTDSPSSPSPYEKLKEFSCQPVLNSYQFHIVNGAVVCGCTLGPGASCHCRLKACECDKQSVHCFKESLPTYEKNFKQFSSQPRCGRHKPWC

SEQ ID NO: 1886 - protein, 448 aa, Homo sapiens
MRECISVHVGQAGVQMGNACWELYCLEHGIQPDGQMPSDKTIGGGDDSFTTFFCETGAGKHVPRAVFVDLEPTVIDEIRNGPYRQLFHPEQLITGKEDAANNYARGHYTIGKEIIDPVLDRIRKLSDQCTGLQGFLVFHSFGGGTGSGFTSLLMERLSVDYGKKSKLEFSIYPAPQVSTAVVEPYNSILTTHTTLEHSDCAFMVDNEAIYDICRRNLDIERPTYTNLNRLISQIVSSITASLRFDGALNVDLTEFQTNLVPYPRIHFPLATYAPVISAEKAYHEQLSVAEITNACFEPANQMVKCDPRHGKYMACCLLYRGDVVPKDVNAAIAAIKTKRSIQFVDWCPTGFKVGINYQPPTVVPGGDLAKVQRAVCMLSNTTAIAEAWARLDHKFDLMYAKRAFVHWYVGEGMEEGEFSEAREDMAALEKDYEEVGIDSYEDEDEGEE

SEQ ID NO: 1887 - protein, 313 aa, Homo sapiens
MRVVTIVILLCFCKAAELRKASPGSVRSRVNHGRAGGGRRGSNPVKRYAPGLPCDVYTYLHEKYLDCQERKLVYVLPGWPQDLLHMLLARNKIRTLKNNMFSKFKKLKSLDLQQNEISKIESEAFFGLNKLTTLLLQHNQIKVLTEEVFIYTPLLSYLRLYDNPWHCTCEIETLISMLQIPRNRNLGNYAKCESPQEQKNKKLRQIKSEQLCNEEEKEQLDPKPQVSGRPPVIKPEVDSTFCHNYVFPIQTLDCKRKELKKVPNNIPPDIVKLDLSYNKINQLRPKEFEDVHELKKLNLSSNGIEFIDPGSLR

SEQ ID NO: 1888 - protein, 323 aa, Homo sapiens
MQAAWLLGALVVPQLLGFGHGARGAEREWEGGWGGAQEEEREREALMLKHLQEALGLPAGRGDENPAGTVEGKEDWEMEEDQGEEEEEEATPTPSSGPSPSPTPEDIVTYILGRLAGLDAGLHQLHVRLHALDTRVVELTQGLRQLRNAAGDTRDAVQALQEAQGRAEREHGRLEGCLKGLRLGHKCFLLSRDFEAQAAAQARCTARGGSLAQPADRQQMEALTRYLRAALAPYNWPVWLGVHDRRAEGLYLFENGQRVSFFAWHRSPRPELGAQPSASPHPLSPDQPNGGTLENCVAQASDDGSWWDHDCQRRLYYVCEFPF

SEQ ID NO: 1889 - protein, 361 aa, Homo sapiens
MNGLSLSELCCLFCCPPCPGRIAAKLAFLPPEATYSLVPEPEPGPGGAGAAPLGTLRASSGAPGRWKLHLTERADFQYSQRELDTIEVFPTKSARGNRVSCMYVRCVPGARQGHQAQGGHPQLAWVGRLGDSNNPAPGGCLLGKSWGTGAALACGYIHLLARYTVLFSHGNAVDLGQMSSFYIGLGSRLHCNIFSYDYSGYGASSGRPSERNLYADIDAAWQALRTRYGISPDSIILYGQSIGTVPTVDLASRYECAAVVLHSPLTSGMRVAFPDTKKTYCFDAFPNIEKVSKITSPVLIIHGTEDEVIDFSHGLALYERCPKAVEPLWVEGAGHNDIELYSQYLERLRRFISQELPSQRA

SEQ ID NO: 1890 - protein, 467 aa, Homo sapiens
MRTAPSLRRCVCLLLAAILDLARGYLTVNIEPLPPVVAGDAVTLKCNFKTDGRMREIVWYRVTDGGTIKQKIFTFDAMFSTNYSHMENYRKREDLVYQSTVRLPEVRISDNGPYECHVGIYDRATREKVVLASGNIFLNVMAPPTSIEVVAADTPAPFSRYQAQNFTLVCIVSGGKPAPMVYFKRDGEPIDAVPLSEPPAASSGPLQDSRPFRSLLHRDLDDTKMQKSLSLLDAENRGGRPYTERPSRGLTPDPNILLQPTTENIPETVVSREFPRWVHSAEPTYFLRHSRTPSSDGTVEVRALLTWTLNPQIDNEALFSCEVKHPALSMPMQAEVTLVAPKGPKIVMTPSRARVGDTVRILVHGFQNEVFPEPMFTWTRVGSRLLDGSAEFDGKELVLERVPAELNGSMYRCTAQNPLGSTDTHTRLIVFENPNIPRGTEDSNGSIGPTGARLTLVLALTVILELT

SEQ ID NO: 1891 - protein, 260 aa, Homo sapiens
MARPGMERWRDRLALVTGASGGIGAAVARALVQQGLKVVGCARTVGNIEELAAECKSAGYPGTLIPYRCDLSNEEDILSMFSAIRSQHSGVDICINNAGLARPDTLLSGSTSGWKDMFNVNVLALSICTREAYQSMKERNVDDGHIININSMSGHRVLPLSVTHFYSATKYAVTALTEGLRQELREAQTHIRATCISPGVVETQFAFKLHDKDPEKAAATYEQMKCLKPEDVAEAVIYVLSTPAHIQIGDIQMRPTEQVT

SEQ ID NO: 1892 - protein, 405 aa, Homo sapiens
MSSPALTAGASGKVMDFNNGTYLVSFTLFWEGQVSLSLLLIHPSEGASALWRARNQGYDKIIFKGKFVNGTSHVFTECGLTLNSNAELCEYLDDRDQEAFYCMKPQHMPCEALTYMTTRNREVSYLTDKENSLFHRSKVGVEMMKDRKHIDVTNCNKREKIEETCQVGMKPPVPGGYTLQGKWITTFCNQVQLDTIKINGCLKGKLIYLLGDSTLRQWIYYFPKVVKTLKFFDLHETGIFKKHLLLDAERHTQIQWKKHSYPFVTFQLYSLIDHDYIPREIDRLSGDKNTAIVITFGQHFRPFPIDIFIRRAIGVQKAIERLFLRSPATKVIIKTENIREMHIETERFGDFHGYIHYLIMKDIFKDLNVGIIDAWDMTIAYGTDTIHPPDHVIGNQINMFLNYIC

SEQ ID NO: 1893 - protein, 198 aa, Homo sapiens
MPVPALCLLWALAMVTRPASAAPMGGPELAQHEELTLLFHGTLQLGQALNGVYRTTEGRLTKARNSLGLYGRTIELLGQEVSRGRDAAQELRASLLETQMEEDILQLQAEATAEVLGEVAQAQKVLRDSVQRLEVQLRSAWLGPAYREFEVLKAHADKQSHILWALTGHVQRQRREMVAQQHRLRQIQERLHTAALPA

SEQ ID NO: 1894 - protein, 484 aa, Homo sapiens
MAGPWTFTLLCGLLAATLIQATLSPTAVLILGPKVIKEKLTQELKDHNATSILQQLPLLSAMREKPAGGIPVLGSLVNTVLKHIIWLKVITANILQLQVKPSANDQELLVKIPLDMVAGFNTPLVKTIVEFHMTTEAQATIRMDTSASGPTRLVLSDCATSHGSLRIQLLHKLSFLVNALAKQVMNLLVPSLPNLVKNQLCPVIEASFNGMYADLLQLVKVPISLSIDRLEFDLLYPAIKGDTIQLYLGAKLLDSQGKVTKWFNNSAASLTMPTLDNIPFSLIVSQDVVKAAVAAVLSPEEFMVLLDSVLPESAHRLKSSIGLINEKAADKLGSTQIVKILTQDTPEFFIDQGHAKVAQLIVLEVFPSSEALRPLFTLGIEASSEAQFYTKGDQLILNLNNISSDRIQLMNSGIGWFQPDVLKNIITEIIHSILLPNQNGKLRSGVPVSLVKALGFEAAESSLTKDALVLTPASLWKPSSPVSQ

SEQ ID NO: 1895 - protein, 249 aa, Homo sapiens
MLQLWKLVLLCGVLTGTSESLLDNLGNDLSNVVDKLEPVLHEGLETVDNTLKGILEKLKVDLGVLQKSSAWQLAKQKAQEAEKLLNNVISKLLPTNTDIFGLKISNSLILDVKAEPIDDGKGLNLSFPVTANVTVAGPIIGQIINLKASLDLLTAVTIETDPQTHQPVAVLGECASDPTSISLSLLDKHSQIINKFVNSVINTLKSTVSSLLQKEICPLIRIFIHSLDVNVIQQVVDNPQHKTQLQTLI

SEQ ID NO: 1896 - protein, 652 aa, Homo sapiens
MQGPLLLPGLCFLLSLFGAVTQKTKTSCAKCPPNASCVNNTHCTCNHGYTSGSGQKLFTFPLETCNDINECTPPYSVYCGFNAVCYNVEGSFYCQCVPGYRLHSGNEQFSNSNENTCQDTTSSKTTEGRKELQKIVDKFESLLTNQTLWRTEGRQEISSTATTILRDVESKVLETALKDPEQKVLKIQNDSVAIETQAITDNCSEERKTFNLNVQMNSMDIRCSDIIQGDTQGPSAIAFISYSSLGNIINATFFEEMDKKDQVYLNSQVVSAAIGPKRNVSLSKSVTLTFQHVKMTPSTKKVFCVYWKSTGQGSQWSRDGCFLIHVNKSHTMCNCSHLSSFAVLMALTSQEEDPVLTVITYVGLSVSLLCLLLAALTFLLCKAIRNTSTSLHLQLSLCLFLAHLLFLVGIDRTEPKVLCSIIAGALHYLYLAAFTWMLLEGVHLFLTARNLTVVNYSSINRLMKWIMFPVGYGVPAVTVAISAASWPHLYGTADRCWLHLDQGFMWSFLGPVCAIFSANLVLFILVFWILKRKLSSLNSEVSTIQNTRMLAFKATAQLFILGCTWCLGLLQVGPAAQVMAYLFTIINSLQGFFIFLVYCLLSQQVQKQYQKWFREIVKSKSESETYTLSSKMGPDSKPSEGDVFPGQVKRKY

SEQ ID NO: 1897 - protein, 420 aa, Homo sapiens
MSPPPLLQPLLLLLPLLNVEPSGATLIRIPLHRVQPGRRILNLLRGWREPAELPKLGAPSPGDKPIFVPLSNYRDVQYFGEIGLGTPPQNFTVAFDTGSSNLWVPSRRCHFFSVPCWLHHRFDPKASSSFQANGTKFAIQYGTGRVDGILSEDKLTIGGIKGASVIFGEALWEPSLVFAFAHFDGILGLGFPILSVEGVRPPMDVLVEQGLLDKPVFSFYLNRDPEEPDGGELVLGGSDPAHYIPPLTFVPVTVPAYWQIHMERVKVGPGLTLCAKGCAAILDTGTSLITGPTEEIRALHAAIGGIPLLAGEYIILCSEIPKLPAVSFLLGGVWFNLTAHDYVIQTTRNGVRLCLSGFQALDVPPPAGPFWILGDVFLGTYVAVFDRGDMKSSARVGLARARTRGADLGWGETAQAQFPG

SEQ ID NO: 1898 - protein, 430 aa, Homo sapiens
MAWTFECSRTTSPEPLSTSPCRTTSSRNSPTMSCPASVACEPSTSTTTSSPPKLSVAPQFLPRSLRVADLAANQVMEIFPLTFGEKPALRSVYLHNNQLSNAGLPPDAFRGSEAIATLSLSNNQLSYLPPSLPPSLERLHLQNNLISKVPRGALSRQTQLRELYLQHNQLTDSGLDATTFSKLHSLEYLDLSHNQLTTVPAGLPRTLAILHLGRNRIRQVEAARLHGARGLRYLLLQHNQLGSSGLPAGALRPLRGLHTLHLYGNGLDRVPPALPRRLRALVLPHNHVAALGARDLVATPGLTELNLAYNRLASARVHHRAFRRLRALRSLDLAGNQLTRLPMGLPTGLRTLQLQRNQLRMLEPEPLAGLDQLRELSLAHNRLRVGDIGPGTWHELQALQVRHRLVSHTVPRAPPSPCLPCHVPNILVSW

SEQ ID NO: 1899 - protein, 1053 aa, Homo sapiens
MWQPRRPWPRVPWRWALALLALVGAGLCHAGPQPGYPARPSARNKNWCAYIVNKNVSCSVLEGSESFIQAQYNCAWNQMPCPSALVYRVNFRPRYVTRYKTVTQLEWRCCPGFRGGDCQEGPKDPVKTLRPTPARPRNSLKKATDNEPSQFSEPRKTLSPTGTAQPSWGVDPKEGPQELQEKKIQVLEEKVLRLTRTVLDLQSSLAGVSENLKHATQDDASRTRAPGLSSQHPKPDTTVSGDTETGQSPGVFNTKESGMKDIKSELAEVKDTLKNKSDKLEELDGKVKGYEGQLRQLQEAAQGPTVTMTTNELYQAYVDSKIDALREELMEGMDRKLADLKNSCEYKLTGLQQQCDDYGSSYLGVIELIGEKETSLRKEINNLRARLQEPSAQANCCDSEKNGDIGQQIKTLDQKIERVAEATRMLNGRLDNEFDRLIVPEPDVDFDAKWNELDARINVTEKNAEEHCFYIEETLRGAINGEVGDLKQLVDQKIQSLEDRLGSVLLQMTNNTGAELSPPGAAALPGVSGSGDERVMMELNHLKDKVQVVEDICLLNIQGKPHGMEGALPNREDRAVRDSLHLLKSLNDTMHRKFQETEQTIQKLQQDFSFLYSQLNHTENDVTHLQKEMSNCRAGENAGMGRFTKVGEQERTVDTLPSPQHPVAHCCSQLEERWQRLQSQVISELDACKECTQGVQREVSMVEGRVSHMEKTCSKLDSISGNLQRIKEGLNKHVSSLWNCVRQMNGTLRSHSRDISGLKNSVQQFYSHVFQISTDLQDLVKFQPSAKAPSPPPPAEAPKEPLQPEPAPPRPSGPATAEDPGRRPVLPQRPPEERPPQPPGSTGVIAETGQAGPPAGAGVSGRGLPRGVDGQTGSGTVPGAEGFAGAPGYPKSPPVASPGAPVPSLVSFSAGLTQKPFPSDGGVVLFNKVLVNDGDVYNPSTGVFTAPYDGRYLITATLTPERDAYVEAVLSVSNASVAQLHTAGYRREFLEYHRPPGALHTCGGPGAFHLIVHLKAGDAVNVVVTGGKLAHTDFDEMYSTFSGVFLYPFLSHL

SEQ ID NO: 1900 - protein, 515 aa, Homo sapiens
MAQLFLPLLAALVLAQAPAALADVLEGDSSEDRAFRVRIAGDAPLQGVLGGALTIPCHVHYLRPPPSRRAVLGSPRVKWTFLSRGREAEVLVARGVRVKVNEAYRFRVALPAYPASLTDVSLALSELRPNDSGIYRCEVQHGIDDSSDAVEDSQLYPIQTPREACYGDMDGFPGVRNYGVVDPDDLYDVYCYAEDLNGELFLGDPPEKLTLEEARAYCQERGAEIATTGQLYAAWDGGLDHCSPGWLADGSVRYPIVTPSQRCGGGLPGVKTLFLFPNQTGFPNKHSRFNVYCFRGSTCLLPSLRPPTQPPTQDGLEAIVTVTETLEELQLPQEATESESRGAIYSIPIMEDGGGGSSTPEDPAEAPRTLLEFETQSMVPPTGFSEEEGKALEEEEKYEDEEEKEEEEEEEEVEDEALWAWPSELSSPGPEASLPTEPAAQEESLSQAPARAVLQPGASPLPDGESEASRPPRVHGPPTETLPTPRERNLASPSPSTLVEAREVGEATGGPELSG

SEQ ID NO: 1901 - protein, 340 aa, Homo sapiens
MPGWLTLPTLCRFLLWAFTIFHKAQGDPASHPGPHYLLPPIHEVIHSHRGATATLPCVLGTTPPSYKVRWSKVEPGELRETLILITNGLHARGYGPLGGRARMRRGHRLDASLVIAGVRLEDEGRYRCELINGIEDESVALTLSLEGVVFPYQPSRGRYQFNYYEAKQACEEQDGRLATYSQLYQAWTEGLDWCNAGWLLEGSVRYPVLTARAPCGGRGRPGIRSYGPRDRMRDRYDAFCFTSALAGQVFFVPGRLTLSEAHAACRRRGAVVAKVGHLYAAWKFSGLDQCDGGWLADGSVRFPITTPRPRCGGLPDPGVRSFGFPRPQQAAYGTYCYAEN

SEQ ID NO: 1902 - protein, 229 aa, Homo sapiens
MDLLQFLAFLFVLLLSGMGATGTLRTSLDPSLEIYKKMFEVKRREQLLALKNLAQLNDIHQQYKILDVMLKGLFKVLEDSRTVLTAADVLPDGPFPQDEKLKDAFSHVVENTAFFGDVVLRFPRIVHYYFDHNSNWNLLIRWGISFCNQTGVFNQGPHSPILSLMAQELGISEKDSNFQNPFKIDRTEFIPSTDPFQKALREEEKRRKKEEKRKEIRKGPRISRSQSEL

SEQ ID NO: 1903 - protein, 154 aa, Homo sapiens
MSVGTSLEQAQMSTLTCPLFIPTVGRKTALHSGEDFQTLLFERVFVNLDGCFDMATGQFAAPLRGIYFFSLNVHSWNYKETYVHIMHNQKEAVILYAQPSERSIMQSQSVMLDLAYGDRVWVRLFKRQRENAIYSNDFDTYITFSGHLIKAEDD

SEQ ID NO: 1904 - protein, 299 aa, Homo sapiens
MRSVGEGAREWIRECQHQFRHHRWNCTTLDRDHTVFGRVMLRSSREAAFVYAISSAGVVHAITRACSQGELSVCSCDPYTRGRHHDQRGDFDWGGCSDNIHYGVRFAKAFVDAKEKRLKDARALMNLHNNRCGRTAVRRFLKLECKCHGVSGSCTLRTCWRALSDFRRTGDYLRRRYDGAVQVMATQDGANFTAARQGYRRATRTDLVYFDNSPDYCVLDKAAGSLGTAGRVCSKTSKGTDGCEIMCCGRGYDTTRVTRVTQCECKFHWCCAVRCKECRNTVDVHTCKAPKKAEWLDQT

SEQ ID NO: 1905 - protein, 569 aa, Homo sapiens
MLLLFSVILISWVSTVGGEGTLCDFPKIHHGFLYDEEDYNPFSQVPTGEVFYYSCEYNFVSPSKSFWTRITCTEEGWSPTPKCLRMCSFPFVKNGHSESSGLIHLEGDTVQIICNTGYSLQNNEKNISCVERGWSTPPICSFTKGECHVPILEANVDAQPKKESYKVGDVLKFSCRKNLIRVGSDSVQCYQFGWSPNFPTCKGQVRSCGPPPQLSNGEVKEIRKEEYGHNEVVEYDCNPNFIINGPKKIQCVDGEWTTLPTCVEQVKTCGYIPELEYGYVQPSVPPYQHGVSVEVNCRNEYAMIGNNMITCINGIWTELPMCVATHQLKRCKIAGVNIKTLLKLSGKEFNHNSRIRYRCSDIFRYRHSVCINGKWNPEVDCTEKREQFCPPPPQIPNAQNMTTTVNYQDGEKVAVLCKENYLLPEAKEIVCKDGRWQSLPRCVESTAYCGPPPSINNGDTTSFPLSVYPPGSTVTYRCQSFYKLQGSVTVTCRNKQWSEPPRCLDPCVVSEENMNKNNIQLKWRNDGKLYAKTGDAVEFQCKFPHKAMISSPPFRAICQEGKFEYPICE

SEQ ID NO: 1906 - protein, 116 aa, Homo sapiens
MKGLRSLAATTLALFLVFVFLGNSSCAPQRLLERRNWTPQAMLYLKGAQGRRFISDQSRRKDLSDRPLPERRSPNPQLLTIPEAATILLASLQKSPEDEEKNFDQTRFLEDSLLNW

SEQ ID NO: 1907 - protein, 63 aa, Homo sapiens
MKHVLNLYLLGVVLTLLSIFVRVMESLEGLLESPSPGTSWTTRSQLANTEPTKGLPDHPSRSM

SEQ ID NO: 1908 - protein, 188 aa, Homo sapiens
MVPGAAGWCCLVLWLPACVAAHGFRIHDYLYFQVLSPGDIRYIFTATPAKDFGGIFHTRYEQIHLVPAEPPEACGELSNGFFIQDQIALVERGGCSFLSKTRVVQEHGGRAVIISDNAVDNDSFYVEMIQDSTQRTADIPALFLLGRDGYMIRRSLEQHGLPWAIISIPVNVTSIPTFELLQPPWTFW

SEQ ID NO: 1909 - protein, 852 aa, Homo sapiens
MKPMLKDFSNLLLVVLCDYVLGEAEYLLLREPGHVALSNDTVYVDFQYFDGANGTLRNVSVLLLEANTNQTVTTKYLLTNQSQGTLKFECFYFKEAGDYWFTMTPEATDNSTPFPWWEKSAFLKVEWPVFHVDLNRSAKAAEGTFQVGLFTSQPLCPFPVDKPNIVVDVIFTNSLPEARRNSRQPLEIRTSKRTELAQGQWVEFGCAPLGPEAYVTVVLKLLGRDSVITSTGPIDLAQKFGYKLVMVPELTCESGVEVTVLPPPCTFVQGVVTVFKEAPRYPGKRTIHLAENSLPLGERRTIFNCTLFDMGKNKYCFDFGISSRSHFSAKEECMLIQRNTETWGLWQPWSQCSATCGDGVRERRRVCLTSFPSSPVCPGMSLEASLCSLEECAAFQPSSPSPLQPQGPVKSNNIVTVTGISLCLFIIIATVLITLWRRFGRPAKCSTPARHNSIHSPSFRKNSDEENICELSEQRGSFSDGGDGPTGSPGDTGIPLTYRRSGPVPPEDDASGSESFQSNAQKIIPPLFSYRLAQQQLKEMKKKGLTETTKVYHVSQSPLTDTAIDAAPSAPLDLESPEEAAANKFRIKSPFPEQPAVSAGERPPSRLDLNVTQASCAISPSQTLIRKSQARHVGSRGGPSERSHARNAHFRRTASFHEARQARPFRERSMSTLTPRQAPAYSSRTRTCEQAEDRFRPQSRGAHLFPEKLEHFQEASGTRGPLNPLPKSYTLGQPLRKPDLGDHQAGLVAGIERTEPHRARRGPSPSHKSVSRKQSSPISPKDNYQRVSSLSPSQCRKDKCQSFPTHPEFAFYDNTSFGLTEAEQRMLDLPGYFGSNEEDETTSTLSVEKLVI

SEQ ID NO: 1910 - protein, 122 aa, Homo sapiens
MGFHFCIWIIFLLPPPCKKCLSPPTMNLRPPKSCGNVFYWVLVLNSGLLYKFCQTIKCRANWRPARAPRGWNEATERHQERRTQMETEMGGISTTYWHRLCTCTDRRAEKLVMDGNNCWFHK

SEQ ID NO: 1911 - protein, 325 aa, Homo sapiens
MQGRVAGSCAPLGLLLVCLHLPGLFARSIGVVEEKVSQNLGTNLPQLGQPSSTGPSNSEHPQPALDPRSNDLARVPLKLSVPASDGFPPAGGSAVQRWPPSWGLPAMDSWPPEDPWQMMAAAAEDRLGEALPEELSYLSSAAALAPGSGPLPGESSPDATGLSPKASLLHQDSESRRLPRSNSLGAGGKILSQRPPWSLIHRVLPDHPWGTLNPSVSWGGGGPGTGWGTRPMPHPEGIWGINNQPPGTSWGNINRYPGGSWGNINRYPGGSWGNINRYPGGSWGNIHLYPGINNPFPPGVLRPPGSSWNIPAGFPNPPSPRLQWG

SEQ ID NO: 1912 - protein, 876 aa, Homo sapiens
MGPEALSSLLLLLLVASGDADMKGHFDPAKCRYALGMQDRTIPDSDISASSSWSDSTAARHSRLESSDGDGAWCPAGSVFPKEEEYLQVDLQRLHLVALVGTQGRHAGGLGKEFSRSYRLRYSRDGRRWMGWKDRWGQEVISGNEDPEGVVLKDLGPPMVARLVRFYPRADRVMSVCLRVELYGCLWRDGLLSYTAPVGQTMYLSEAVYLNDSTYDGHTVGGLQYGGLGQLADGVVGLDDFRKSQELRVWPGYDYVGWSNHSFSSGYVEMEFEFDRLRAFQAMQVHCNNMHTLGARLPGGVECRFRRGPAMAWEGEPMRHNLGGNLGDPRARAVSVPLGGRVARFLQCRFLFAGPWLLFSEISFISDVVNNSSPALGGTFPPAPWWPPGPPPTNFSSLELEPRGQQPVAKAEGSPTAILIGCLVAIILLLLLIIALMLWRLHWRRLLSKAERRVLEEELTVHLSVPGDTILINNRPGPREPPPYQEPRPRGNPPHSAPCVPNGSAYSGDYMEPEKPGAPLLPPPPQNSVPHYAEADIVTLQGVTGGNTYAVPALPPGAVGDGPPRVDFPRSRLRFKEKLGEGQFGEVHLCEVDSPQDLVSLDFPLNVRKGHPLLVAVKILRPDATKNARNDFLKEVKIMSRLKDPNIIRLLGVCVQDDPLCMITDYMENGDLNQFLSAHQLEDKAAEGAPGDGQAAQGPTISYPMLLHVAAQIASGMRYLATLNFVHRDLATRNCLVGENFTIKIADFGMSRNLYAGDYYRVQGRAVLPIRWMAWECILMGKFTTASDVWAFGVTLWEVLMLCRAQPFGQLTDEQVIENAGEFFRDQGRQVYLSRPPACPQGLYELMLRCWSRESEQRPPFSQLHRFLAEDALNTV

SEQ ID NO: 1913 - protein, 223 aa, Homo sapiens
MKFVPCLLLVTLSCLGTLGQAPRQKQGSTGEEFHFQTGGRDSCTMRPSSLGQGAGEVWLRVDCRNTDQTYWCEYRGQPSMCQAFAADPKPYWNQALQELRRLHHACQGAPVLRPSVCREAGPQAHMQQVTSSLKGSPEPNQQPEAGTPSLRPKATVKLTEATQLGKDSMEELGKAKPTTRPTAKPTQPGPRPGGNEEAKKKAWEHCWKPFQALCAFLISFFRG

SEQ ID NO: 1914 - protein, 194 aa, Homo sapiens
MTMRHNWTPDLSPLWVLLLCAHVVTLLVRATPVSQTTTAATASVRSTKDPCPSQPPVFPAAKQCPALEVTWPEVEVPLNGTLSLSCVACSRFPNFSILYWLGNGSFIEHLPGRLWEGSTSRERGSTGTQLCKALVLEQLTPALHSTNFSCVLVDPEQVVQRHVVLAQLWAGLRATLPPTQEALPSSHSSPQQQG

SEQ ID NO: 1915 - protein, 258 aa, Homo sapiens
MIAISAVSSALLFSLLCEASTVVLLNSTDSSPPTNNFTDIEAALKAQLDSADIPKARRKRYISQNDMIAILDYHNQVRGKVFPPAANMEYMVWDENLAKSAEAWAATCIWDHGPSYLLRFLGQNLSVRTGRYRSILQLVKPWYDEVKDYAFPYPQDCNPRCPMRCFGPMCTHYTQMVWATSNRIGCAIHTCQNMNVWGSVWRRAVYLVCNYAPKGNWIGEAPYKVGVPCSSCPPSYGGSCTDNLCFPGVTSNYLYWFK

SEQ ID NO: 1916 - protein, 301 aa, Homo sapiens
MLPLTMTVLILLLLPTGQAAPKDGVTRPDSEVQHQLLPNPFQPGQEQLGLLQSYLKGLGRTEVQLEHLSREQVLLYLFALHDYDQSGQLDGLELLSMLTAALAPGAANSPTTNPVILIVDKVLETQDLNGDGLMTPAELINFPGVALRHVEPGEPLAPSPQEPQAVGRQSLLAKSPLRQETQEAPGPREEAKGQVEARRESLDPVQEPGGQAEADGDVPGPRGEAEGQAEAKGDAPGPRGEAGGQAEAEGDAPGPRGEAGGQAEARENGEEAKELPGETLESKNTQNDFEVHIVQVENDEI

SEQ ID NO: 1917 - protein, 322 aa, Homo sapiens
MKTLAGLVLGLVIFDAAVTAPTLESINYDSETYDATLEDLDNLYNYENIPVDKVEIEIATVMPSGNRELLTPPPQPEKAQEEEEEEESTPRLIDGSSPQEPEFTGVLGPHTNEDFPTCLLCTCISTTVYCDDHELDAIPPLPKNTAYFYSRFNRIKKINKNDFASLSDLKRIDLTSNLISEIDEDAFRKLPQLRELVLRDNKIRQLPELPTTLTFIDISNNRLGRKGIKQEAFKDMYDLHHLYLTDNNLDHIPLPLPENLRALHLQNNNILEMHEDTFCNVKNLTYIRKALEDIRLDGNPINLSKTPQAYMCLPRLPVGSLV

SEQ ID NO: 1918 - protein, 205 aa, Homo sapiens
MVNLAAMVWRRLLRKRWVLALVFGLSLVYFLSSTFKQEERAVRDRNLLQVHDHNQPIPWKVQFNLGNSSRPSNQCRNSIQGKHLITDELGYVCERKDLLVNGCCNVNVPSTKQYCCDGCWPNGCCSAYEYCVSCCLQPNKQLLLERFLNRAAVAFQNLFMAVEDHFELCLAKCRTSSQSVQHENTYRDPIAKYCYGESPPELFPA

SEQ ID NO: 1919 - protein, 1018 aa, Homo sapiens
MVSHFMGSLSVLCFLLLLGFQFVCPQPSTQHRKVPQRMAAEGAPEDDGGGGAPGVWGAWGPWSACSRSCSGGVMEQTRPCLPRSYRLRGGQRPGAPARAFADHVVSAVRTSVPLHRSRDETPALAGTDASRQGPTVLRGSRHPQPQGLEVTGDRRSRTRGTIGPGKYGYGKAPYILPLQTDTAHTPQRLRRQKLSSRHSRSQGASSARHGYSSPAHQVPQHGPLYQSDSGPRSGLQAAEAPIYQLPLTHDQGYPAASSLFHSPETSNNHGVGTHGATQSFSQPARSTAISCIGAYRQYKLCNTNVCPESSRSIREVQCASYNNKPFMGRFYEWEPFAEVKGNRKCELNCQAMGYRFYVRQAEKVIDGTPCDQNGTAICVSGQCKSIGCDDYLGSDKVVDKCGVCGGDNTGCQVVSGVFKHALTSLGYHRVVEIPEGATKINITEMYKSNNYLALRSRSGRSIINGNWAIDRPGKYEGGGTMFTYKRPNEISSTAGESFLAEGPTNEILDVYMIHQQPNPGVHYEYVIMGTNAISPQVPPHRRPGEPFNGQMVTEGRSQEEGEQKGRNEEKEDLRGEAPEMFTSESAQTFPVRHPDRFSPHRPDNLVPPAPQPPRRSRDHNWKQLGTTECSTTCGKGSQYPIFRCVHRSTHEEAPESYCDSSMKPTPEEEPCNIFPCPAFWDIGEWSECSKTCGLGMQHRQVLCRQVYANRSLTVQPYRCQHLEKPETTSTCQLKICSEWQIRTDWTSCSVPCGVGQRTRDVKCVSNIGDVVDDEECNMKLRPNDIENCDMGPCAKSWFLTEWSERCSAECGAGVRTRSVVCMTNHVSSLPLEGCGNNRPAEATPCDNGPCTGKVEWFAGSWSQCSIECGSGTQQREVICVRKNADTFEVLDPSECSFLEKPPSQQSCHLKPCGAKWFSTEWSMCSKSCQGGFRVREVRCLSDDMTLSNLCDPQLKPEERESCNPQDCVPEVDENCKDKYYNCNVVVQARLCVYNYYKTACCASCTRVANRQTGFLGSR

SEQ ID NO: 1920 - protein, 500 aa, Homo sapiens
MKCTAREWLRVTTVLFMARAIPAMVVPNATLLEKLLEKYMDEDGEWWIAKQRGKRAITDNDMQSILDLHNKLRSQVYPTASNMEYMTWDVELERSAESWAESCLWEHGPASLLPSIGQNLGAHWGRYRPPTFHVQSWYDEVKDFSYPYEHECNPYCPFRCSGPVCTHYTQVVWATSNRIGCAINLCHNMNIWGQIWPKAVYLVCNYSPKGNWWGHAPYKHGRPCSACPPSFGGGCRENLCYKEGSDRYYPPREEETNEIERQQSQVHDTHVRTRSDDSSRNEVISAQQMSQIVSCEVRLRDQCKGTTCNRYECPAGCLDSKAKVIGSVHYEMQSSICRAAIHYGIIDNDGGWVDITRQGRKHYFIKSNRNGIQTIGKYQSANSFTVSKVTVQAVTCETTVEQLCPFHKPASHCPRVYCPRNCMQANPHYARVIGTRVYSDLSSICRAAVHAGVVRNHGGYVDVMPVDKRKTYIASFQNGIFSESLQNPPGGKAFRVFAVV

SEQ ID NO: 1921 - protein, 689 aa, Homo sapiens
MKFGAVTRIGGPPLGNQSPSSCSLLHEKDPPTTSGPQTDQPKKHLTNFKSATRRVARTQWLTADRQTWASISSVPWAQTISEKKPGGSLWETRSSPPTTAGTEEAMNTTSLLAPAAEIMATPGSPSQASPTLGAFTHGTQTPSPTKATAPRYPQTGDLSAEWPFTAGEEPVLVPRPHQVSRVRSSCCLSPILCSPAMIAFLLTSVLMIPHAGGHPLDTPHLPQELPPGLPNNINITFFSGMFKNVESVAEIFDCLGPHFTWLQAVFTNFPVLIQFVNGMKCVAGLCPRDFEDYGCTCRFEMEGLPVDESDSCCFQHRRCYEEAAEMDCLQDPAKLSTEVNCVSKKIICESKDNCEHLLCTCDKAAIECLARSSLNSSLNLLDTSFCLAQTPETTIKEDLTTLLPRVVPVEPTDTSLTALSGEVAAETEADRLITLSKKKAGHDQEGVGAARATSPPGSAEIVATRVTAKIVTLVPAGIKSLGLAVSSVENDPEETTEKACDRFTFLHLGSGDNMQVMPQLGEMLFCLTSRCPEEFESYGCYCGQEGRGEPRDDLDRCCLSHHCCLEQVRRLGCLLERLPWSPVVCVDHTPKCGGQSLCEKLLCACDQTAAECMTSASFNQSLKSPSRLGCPGQPAACEDSLHPVPAAPTLGSSSEEDSEEDPPQEDLGRAKRFLRKSLGPLGIGPLHGR

SEQ ID NO: 1922 - protein, 452 aa, Homo sapiens
MELALRRSPVPRWLLLLPLLLGLNAGAVIDWPTEEGKEVWDYVTVRKDAYMFWWLYYATNSCKNFSELPLVMWLQGGPGGSSTGFGNFEEIGPLDSDLKPRKTTWLQAASLLFVDNPVGTGFSYVNGSGAYAKDLAMVASDMMVLLKTFFSCHKEFQTVPFYIFSESYGGKMAAGIGLELYKAIQRGTIKCNFAGVALGDSWISPVDSVLSWGPYLYSMSLLEDKGLAEVSKVAEQVLNAVNKGLYREATELWGKAEMIIEQNTDGVNFYNILTKSTPTSTMESSLEFTQSHLVCLCQRHVRHLQRDALSQLMNGPIRKKLKIIPEDQSWGGQATNVFVNMEEDFMKPVISIVDELLEAGINVTVYNGQLDLIVDTMGQEAWVRKLKWPELPKFSQLKWKALYSDPKSLETSAFVKSYKNLAFYWILKAGHMVPSDQGDMALKMMRLVTQQE

SEQ ID NO: 1923 - protein, 464 aa, Homo sapiens
MVRLAAELLLLLGLLLLTLHITVLRGSGAADGPDAAAGNASQAQLQNNLNVGSDTTSETSFSLSKEAPREHLDHQAAHQPFPRPRFRQETGHPSLQRDFPRSFLLDLPNFPDLSKADINGQNPNIQVTIEVVDGPDSEADKDQHPENKPSWSVPSPDWRAWWQRSLSLARANSGDQDYKYDSTSDDSNFLNPPRGWDHTAPGHRTFETKDQPEYDSTDGEGDWSLWSVCSVTCGNGNQKRTRSCGYACTATESRTCDRPNCPGIEDTFRTAATEVSLLAGSEEFNATKLFEVDTDSCERWMSCKSEFLKKYMHKVMNDLPSCPCSYPTEVAYSTADIFDRIKRKDFRWKDASGPKEKLEIYKPTARYCIRSMLSLESTTLAAQHCCYGDNMQLITRGKGAGTPNLISTEFSAELHYKVDVLPWIICKGDWSRYNEARPPNNGQKCTESPSDEDYIKQFQEAREY

SEQ ID NO: 1924 - protein, 511 aa, Homo sapiens
MLVDGPSERPALCFLLLAVAMSFFGSALSIDETRAHLLLKEKMMRLGGRLVLNTKEELANERLMTLKIAEMKEAMRTLIFPPSMHFFQAKHLIERSQVFNILRMMPKGAALHLHDIGIVTMDWLVRNVTYRPHCHICFTPRGIMQFRFAHPTPRPSEKCSKWILLEDYRKRVQNVTEFDDSLLRNFTLVTQHPEVIYTNQNVVWSKFETIFFTISGLIHYAPVFRDYVFRSMQEFYEDNVLYMEIRARLLPVYELSGEHHDEEWSVKTYQEVAQKFVETHPEFIGIKIIYSDHRSKDVAVIAESIRMAMGLRIKFPTVVAGFDLVGHEDTGHSLHDYKEALMIPAKDGVKLPYFFHAGETDWQGTSIDRNILDALMLNTTRIGHGFALSKHPAVRTYSWKKDIPIEVCPISNQVLKLVSDLRNHPVATLMATGHPMVISSDDPAMFGAKGLSYDFYEVFMGIGGMKADLRTLKQLAMNSIKYSTLLESEKNTFMEIWKKRWDKFIADVATK

SEQ ID NO: 1925 - protein, 258 aa, Homo sapiens
MKQILHPALETTAMTLFPVLLFLVAGLLPSFPANEDKDPAFTALLTTQTQVQREIVNKHNELRRAVSPPARNMLKMEWNKEAAANAQKWANQCNYRHSNPKDRMTSLKCGENLYMSSASSSWSQAIQSWFDEYNDFDFGVGPKTPNAVVGHYTQVVWYSSYLVGCGNAYCPNQKVLKYYYVCQYCPAGNWANRLYVPYEQGAPCASCPDNCDDGLCTNGCKYEDLYSNCKSLKLTLTCKHQLVRDSCKASCNCSNSIY

SEQ ID NO: 1926 - protein, 237 aa, Homo sapiens
MVTPPPPPVFSLLKISQRIVCLVLDKSGSMGGKDRLNRMNQAAKHFLLQTVENGSWVGMVHFDSTATIVNKLIQIKSSDERNTLMAGLPTYPLGGTSICSGIKYAFQVIGELHSQLDGSEVLLLTDGEDNTASSCIDEVKQSGAIVHFIALGRAADEAVIEMSKITGGSHFYVSDEAQNNGLIDAFGALTSGNTDLSQKSLQVRVLIPWVFMFTFATRKNHLVVISFEFHIFLKVNF

SEQ ID NO: 1927 - protein, 152 aa, Homo sapiens
MDNVQPKIKHRPFCFSVKGHVKMLRLALTVTSMTFFIIAQAPEPYIVITGFEVTVILFFILLYVLRLDRLMKWLFWPLLDIINSLVTTVFMLIVSVLALIPETTTLTVGGGVFALVTAVCCLADGALIYRKLLFNPSGPYQKKPVHEKKEVL

SEQ ID NO: 1928 - protein, 1247 aa, Homo sapiens
MLASSSRIRAAWTRALLLPLLLAGPVGCLSRQELFPFGPGQGDLELEDGDDFVSPALELSGALRFYDRSDIDAVYVTTNGIIATSEPPAKESHPGLFPPTFGAVAPFLADLDTTDGLGKVYYREDLSPSITQRAAECVHRGFPEISFQPSSAVVVTWESVAPYQGPSRDPDQKGKRNTFQAVLASSDSSSYAIFLYPEDGLQFHTTFSKKENNQVPAVVAFSQGSVGFLWKSNGAYNIFANDRESVENLAKSSNSGQQGVWVFEIGSPATTNGVVPADVILGTEDGAEYDDEDEDYDLATTRLGLEDVGTTPFSYKALRRGGADTYSVPSVLSPRRAATERPLGPPTERTRSFQLAVETFHQQHPQVIDVDEVEETGVVFSYNTDSRQTCANNRHQCSVHAECRDYATGFCCSCVAGYTGNGRQCVAEGSPQRVNGKVKGRIFVGSSQVPIVFENTDLHSYVVMNHGRSYTAISTIPETVGYSLLPLAPVGGIIGWMFAVEQDGFKNGFSITGGEFTRQAEVTFVGHPGNLVIKQRFSGIDEHGHLTIDTELEGRVPQIPFGSSVHIEPYTELYHYSTSVITSSSTREYTVTEPERDGASPSRIYTYQWRQTITFQECVHDDSRPALPSTQQLSVDSVFVLYNQEEKILRYALSNSIGPVREGSPDALQNPCYIGTHGCDTNAACRPGPRTQFTCECSIGFRGDGRTCYDIDECSEQPSVCGSHTICNNHPGTFRCECVEGYQFSDEGTCVAVVDQRPINYCETGLHNCDIPQRAQCIYTGGSSYTCSCLPGFSGDGQACQDVDECQPSRCHPDAFCYNTPGSFTCQCKPGYQGDGFRCVPGEVEKTRCQHEREHILGAAGATDPQRPIPPGLFVPECDAHGHYAPTQCHGSTGYCWCVDRDGREVEGTRTRPGMTPPCLSTVAPPIHQGPAVPTAVIPLPPGTHLLFAQTGKIERLPLEGNTMRKTEAKAFLHVPAKVIIGLAFDCVDKMVYWTDITEPSIGRASLHGGEPTTIIRQDLGSPEGIAVDHLGRNIFWTDSNLDRIEVAKLDGTQRRVLFETDLVNPRGIVTDSVRGNLYWTDWNRDNPKIETSYMDGTNRRILVQDDLGLPNGLTFDAFSSQLCWVDAGTNRAECLNPSQPSRRKALEGLQYPFAVTSYGKNLYFTDWKMNSVVALDLAISKETDAFQPHKQTRLYGITTALSQCPQGHNYCSVNNGGCTHLCLATPGSRTCRCPDNTLGVDCIEQK

SEQ ID NO: 1929 - protein, 174 aa, Homo sapiens
MLRTESCRPRSPAGQVAAASPLLLLLLLLAWCAGACRGAPILPQGLQPEQQLQLWNEIDDTCSSFLSIDSQPQASNALEELCFMIMGMLPKPQEQDEKDNTKRFLFHYSKTQKLGKSNVVSSVVHPLLQLVPHLHERRMKRFRVDEEFQSPFASQSRGYFLFRPRNGRRSAGFI

SEQ ID NO: 1930 - protein, 405 aa, Homo sapiens
MDTIFLWSLLLLFFGSQASRCSAQKNTEFAVDLYQEVSLSHKDNIIFSPLGITLVLEMVQLGAKGKAQQQIRQTLKQQETSAGEEFFVLKSFFSAISEKKQEFTFNLANALYLQEGFTVKEQYLHGNKEFFQSAIKLVDFQDAKACAEMISTWVERKTDGKIKDMFSGEEFGPLTRLVLVNAIYFKGDWKQKFRKEDTQLINFTKKNGSTVKIPMMKALLRTKYGYFSESSLNYQVLELSYKGDEFSLIIILPAEGMDIEEVEKLITAQQILKWLSEMQEEEVEISLPRFKVEQKVDFKDVLYSLNITEIFSGGCDLSGITDSSEVYVSQVTQKVFFEINEDGSEAATSTGIHIPVIMSLAQSQFIANHPFLFIMKHNPTESILFMGRVTNPDTQEIKGRDLDSL

SEQ ID NO: 1931 - protein, 1228 aa, Homo sapiens
MKGARLFVLLSSLWSGGIGLNNSKHSWTIPEDGNSQKTMPSASVPPNKIQSLQILPTTRVMSAEIATTPEARTSEDSLLKSTLPPSETSAPAEGVRNQTLTSTEKAEGVVKLQNLTLPTNASIKFNPGAESVVLSNSTLKFLQSFARKSNEQATSLNTVGGTGGIGGVGGTGGVGNRAPRETYLSRGDSSSSQRTDYQKSNFETTRGKNWCAYVHTRLSPTVILDNQVTYVPGGKGPCGWTGGSCPQRSQKISNPVYRMQHKIVTSLDWRCCPGYSGPKCQLRAQEQQSLIHTNQAESHTAVGRGVAEQQQQQGCGDPEVMQKMTDQVNYQAMKLTLLQKKIDNISLTVNDVRNTYSSLEGKVSEDKSREFQSLLKGLKSKSINVLIRDIVREQFKIFQNDMQETVAQLFKTVSSLSEDLESTRQIIQKVNESVVSIAAQQKFVLVQENRPTLTDIVELRNHIVNVRQEMTLTCEKPIKELEVKQTHLEGALEQEHSRSILYYESLNKTLSKLKEVHEQLLSTEQVSDQKNAPAAESVSNNVTEYMSTLHENIKKQSLMMLQMFEDLHIQESKINNLTVSLEMEKESLRGECEDMLSKCRNDFKFQLKDTEENLHVLNQTLAEVLFPMDNKMDKMSEQLNDLTYDMEILQPLLEQGASLRQTMTYEQPKEAIVIRKKIENLTSAVNSLNFIIKELTKRHNLLRNEVQGRDDALERRINEYALEMEDGLNKTMTIINNAIDFIQDNYALKETLSTIKDNSEIHHKCTSDMETILTFIPQFHRLNDSIQTLVNDNQRYNFVLQVAKTLAGIPRDEKLNQSNFQKMYQMFNETTSQVRKYQQNMSHLEEKLLLTTKISKNFETRLQDIESKVTQTLIPYYISVKKGSVVTNERDQALQLQVLNSRFKALEAKSIHLSINFFSLNKTLHEVLTMCHNASTSVSELNATIPKWIKHSLPDIQLLQKGLTEFVEPIIQIKTQAALSNLTCCIDRSLPGSLANVVKSQKQVKSLPKKINALKKPTVNLTTVLIGRTQRNTDNIIYPEEYSSCSRHPCQNGGTCINGRTSFTCACRHPFTGDNCTIKLVEENALAPDFSKGSYRYAPMVAFFASHTYGMTIPGPILFNNLDVNYGASYTPRTGKFRIPYLGVYVFKYTIESFSAHISGFLVVDGIDKLAFESENINSEIHCDRVLTGDALLELNYGQEVWLRLAKGTIPAKFPPVTTFSGYLLYRT

SEQ ID NO: 1932 - protein, 454 aa, Homo sapiens
MWPLTVPPPLLLLLCSGLAGQTLFQNPEEGWQLYTSAQAPDGKCICTAVIPAQSTCSRDGRSRELRQLMEKVQNVSQSMEVLELRTYRDLQYVRGMETLMRSLDARLRAADGSLSAKSFQELKDRMTELLPLSSVLEQYKADTRTIVRLREEVRNLSGSLAAIQEEMGAYGYEDLQQRVMALEARLHACAQKLGCGKLTGVSNPITVRAMGSRFGSWMTDTMAPSADSRVWYMDGYYKGRRVLEFRTLGDFIKGQNFIQHLLPQPWAGTGHVVYNGSLFYNKYQSNVVVKYHFRSRSVLVQRSLPGAGYNNTFPYSWGGFSDMDFMVDESGLWAVYTTNQNAGNIVVSRLDPHTLEVMRSWDTGYPKRSAGEAFMICGVLYVTNSHLAGAKVYFAYFTNTSSYEYTDVPFHNQYSHISMLDYNPRERALYTWNNGHQVLYNVTLFHVISTSGDP

SEQ ID NO: 1933 - protein, 302 aa, Homo sapiens
MCAERLGQFMTLALVLATFDPARGTDATNPPEGPQDRSSQQKGRLSLQNTAEIQHCLVNAGDVGCGVFECFENNSCEIRGLHGICMTFLHNAGKFDAQGKSFIKDALKCKAHALRHRFGCISRKCPAIREMVSQLQRECYLKHDLCAAAQENTRVIVEMIHFKDLLLHEPYVDLVNLLLTCGEEVKEAITHSVQVQCEQNWGSLCSILSFCTSAIQKPPTAPPERQPQVDRTKLSRAHHGEAGHHLPEPSSRETGRGAKGERGSKSHPNAHARGRVGGLGAQGPSGSSEWEDEQSEYSDIRR

SEQ ID NO: 1934 - protein, 842 aa, Homo sapiens
MKPGGFWLHLTLLGASLPAALGWMDPGTSRGPDVGVGESQAEEPRSFEVTRREGLSSHNELLASCGKKFCSRGSRCVLSRKTGEPECQCLEACRPSYVPVCGSDGRFYENHCKLHRAACLLGKRITVIHSKDCFLKGDTCTMAGYARLKNVLLALQTRLQPLQEGDSRQDPASQKRLLVESLFRDLDADGNGHLSSSELAQHVLKKQDLDEDLLGCSPGDLLRFDDYNSDSSLTLREFYMAFQVVQLSLAPEDRVSVTTVTVGLSTVLTCAVHGDLRPPIIWKRNGLTLNFLDLEDINDFGEDDSLYITKVTTIHMGNYTCHASGHEQLFQTHVLQVNVPPVIRVYPESQAQEPGVAASLRCHAEGIPMPRITWLKNGVDVSTQMSKQLSLLANGSELHISSVRYEDTGAYTCIAKNEVGVDEDISSLFIEDSARKTLANILWREEGLSVGNMFYVFSDDGIIVIHPVDCEIQRHLKPTEKIFMSYEEICPQREKNATQPCQWVSAVNVRNRYIYVAQPALSRVLVVDIQAQKVLQSIGVDPLPAKLSYDKSHDQVWVLSWGDVHKSRPSLQVITEASTGQSQHLIRTPFAGVDDFFIPPTNLIINHIRFGFIFNKSDPAVHKVDLETMMPLKTIGLHHHGCVPQAMAHTHLGGYFFIQCRQDSPASAARQLLVDSVTDSVLGPNGDVTGTPHTSPDGRFIVSAAADSPWLHVQEITVRGEIQTLYDLQINSGISDLAFQRSFTESNQYNIYAALHTEPDLLFLELSTGKVGMLKNLKEPPAGPAQPWGGTHRIMRDSGLFGQYLLTPARESLFLINGRQNTLRCEVSGIKGGTTVVWVGEV

SEQ ID NO: 1935 - protein, 751 aa, Homo sapiens
MAFRTICVLVGVFICSICVKGSSQPQARVYLTFDELRETKTSEYFSLSHHPLDYRILLMDEDQDRIYVGSKDHILSLNINNISQEALSVFWPASTIKVEECKMAGKDPTHGCGNFVRVIQTFNRTHLYVCGSGAFSPVCTYLNRGRRSEDQVFMIDSKCESGKGRCSFNPNVNTVSVMINEELFSGMYIDFMGTDAAIFRSLTKRNAVRTDQHNSKWLSEPMFVDAHVIPDGTDPNDAKVYFFFKEKLTDNNRSTKQIHSMIARICPNDTGGLRSLVNKWTTFLKARLVCSVTDEDGPETHFDELEDVFLLETDNPRTTLVYGIFTTSSSVFKGSAVCVYHLSDIQTVFNGPFAHKEGPNHQLISYQGRIPYPRPGTCPGGAFTPNMRTTKEFPDDVVTFIRNHPLMYNSIYPIHKRPLIVRIGTDYKYTKIAVDRVNAADGRYHVLFLGTDRGTVQKVVVLPTNNSVSGELILEELEVFKNHAPITTMKISSKKQQLYVSSNEGVSQVSLHRCHIYGTACADCCLARDPYCAWDGHSCSRFYPTGKRRSRRQDVRHGNPLTQCRGFNLKAYRNAAEIVQYGVKNNTTFLECAPKSPQASIKWLLQKDKDRRKEVKLNERIIATSQGLLIRSVQGSDQGLYHCIATENSFKQTIAKINFKVLDSEMVAVVTDKWSPWTWASSVRALPFHPKDIMGAFSHSEMQMINQYCKDTRQQHQQGDESQKMRGDYGKLKALINSRKSRNRRNQLPES

SEQ ID NO: 1936 - protein, 771 aa, Homo sapiens [sequence omitted]

SEQ ID NO: 1937 - protein, 1534 aa, Homo sapiens
MALTPGWGSSAGPVRPELWLLLWAAAWRLGASACPALCTCTGTTVDCHGTGLQAIPKNIPRNTERLELNGNNITRIHKNDFAGLKQLRVLQLMENQIGAVERGAFDDMKELERLRLNRNQLHMLPELLFQNNQALSRLDLSENAIQAIPRKAFRGATDLKNLQLDKNQISCIEEGAFRALRGLEVLTLNNNNITTIPVSSFNHMPKLRTFRLHSNHLFCDCHLAWLSQWLRQRPTIGLFTQCSGPASLRGLNVAEVQKSEFSCSGQGEAGRVPTCTLSSGSCPAMCTCSNGIVDCRGKGLTAIPANLPETMTEIRLELNGIKSIPPGAFSPYRKLRRIDLSNNQIAEIAPDAFQGLRSLNSLVLYGNKITDLPRGVFGGLYTLQLLLLNANKINCIRPDAFQDLQNLSLLSLYDNKIQSLAKGTFTSLRAIQTLHLAQNPFICDCNLKWLADFLRTNPIETSGARCASPRRLANKRIGQIKSKKFRCSAKEQYFIPGTEDYQLNSECNSDVVCPHKCRCEANVVECSSLKLTKIPERIPQSTAELRLNNNEISILEATGMFKKLTHLKKINLSNNKVSEIEDGAFEGAASVSELHLTANQLESIRSGMFRGLDGLRTLMLRNNRISCIHNDSFTGLRNVRLLSLYDNQITTVSPGAFDTLQSLSTLNLLANPFNCNCQLAWLGGWLRKRKIVTGNPRCQNPDFLRQIPLQDVAFPDFRCEEGQEEGGCLPRPQCPQECACLDTVVRCSNKHLRALPKGIPKNVTELYLDGNQFTLVPGQLSTFKYLQLVDLSNNKISSLSNSSFTNMSQLTTLILSYNALQCIPPLAFQGLRSLRLLSLHGNDISTLQEGIFADVTSLSHLAIGANPLYCDCHLRWLSSWVKTGYKEPGIARCAGPQDMEGKLLLTTPAKKFECQGPPTLAVQAKCDLCLSSPCQNQGTCHNDPLEVYRCACPSGYKGRDCEVSLDSCSSGPCENGGTCHAQEGEDAPFTCSCPTGFEGPTCGVNTDDCVDHACANGGVCVDGVGNYTCQCPLQYEGKACEQLVDLCSPDLNPCQHEAQCVGTPDGPRCECMPGYAGDNCSENQDDCRDHRCQNGAQCMDEVNSYSCLCAEGYSGQLCEIPPHLPAPKSPCEGTECQNGANCVDQGNRPVCQCLPGFGGPECEKLLSVNFVDRDTYLQFTDLQNWPRANITLQVSTAEDNGILLYNGDNDHIAVELYQGHVRVSYDPGSYPSSAIYSAETINDGQFHTVELVAFDQMVNLSIDGGSPMTMDNFGKHYTLNSEAPLYVGGMPVDVNSAAFRLWQILNGTGFHGCIRNLYINNELQDFTKTQMKPGVVPGCEPCRKLYCLHGICQPNATPGPMCHCEAGWVGLHCDQPADGPCHGHKCVHGQCVPLDALSYSCQCQDGYSGALCNQAGALAEPCRGLQCLHGHCQASGTKGAHCVCDPGFSGELCEQESECRGDPVRDFHQVQRGYAICQTTRPLSWVECRGSCPGQGCCQGLRLKRRKFTFECSDGTSFAEEVEKPTKCGCALCA

SEQ ID NO: 1938 - protein, 113 aa, Homo sapiens
MDSRQAAALLVLLLLIDGGCAEGPGGQQEDQLSAEEDSEPLPPQDAQTSGSLLHYLLQAMERPGRSQAFLFQPQRFGRNTQGSWRNEWLSPRAGEGLNSQFWSLAAPQRFGKK

SEQ ID NO: 1939 - protein, 855 aa, Homo sapiens
MARHLLLPLVMLVISPIPGAFQDSALSPTQEEPEDLDCGRPEPSARIVGGSNAQPGTWPWQVSLHHGGGHICGGSLIAPSWVLSAAHCFMTNGTLEPAAEWSVLLGVHSQDGPLDGAHTRAVAAIVVPANYSQVELGADLALLRLASPASLGPAVWPVCLPRASHRFVHGTACWATGWGDVQEADPLPLPWVLQEVELRLLGEATCQCLYSQPGPFNLTLQILPGMLCAGYPEGRRDTCQGDSGGPLVCEEGGRWFQAGITSFGFGCGRRNRPGVFTAVATYEAWIREQVMGSEPGPAFPTQPQKTQSDPQEPREENCTIALPECGKAPRPGAWPWEAQVMVPGSRPCHGALVSESWVLAPASCFLDPNSSDSPPRDLDAWRVLLPSRPRAERVARLVQHENASWDNASDLALLQLRTPVNLSAASRPVCLPHPEHYFLPGSRCRLARWGRGEPALGPGALLEAELLGGWWCHCLYGRQGAAVPLPGDPPHALCPAYQEKEEVGSCWNDSRWSLLCQEEGTWFLAGIRDFPSGCLRPRAFFPLQTHGPWISHVTRGAYLEDQLAWDWGPDGEETETQTCPPHTEHGACGLRLEAAPVGVLWPWLAEVHVAGDRVCTGILLAPGWVLAATHCVLRPGSTTVPYIEVYLGRAGASSLPQGHQVSRLVISIRLPQHLGLRPPLALLELSSRVEPSPSALPICLHPAGIPPGASCWVLGWKEPQDRVPVAAAVSILTQRICDCLYQGILPPGTLCVLYAEGQENRCEMTSAPPLLCQMTEGSWILVGMAVQGSRELFAAIGPEEAWISQTVGEANFLPPSGSPHWPTGGSNLCPPELAKASGSPHAVYFLLLLTLLIQS

SEQ ID NO: 1940 - protein, 303 aa, Homo sapiens [sequence omitted]

SEQ ID NO: 1941 - protein, 385 aa, Homo sapiens
MKMLPGVGVFGTGSSARVLVPLLRAEGFTVEALWGKTEEEAKQLAEEMNIAFYTSRTDDILLHQDVDLVCISIPPPLTRQISVKALGIGKNVVCEKAATSVDAFRMVTASRYYPQLMSLVGNVLRFLPAFVRMKQLISEHYVGAVMICDARIYSGSLLSPSYGWICDELMGGGGLHTMGTYIVDLLTHLTGRRAEKVHGLLKTFVRQNAAIRGIRHVTSDDFCFFQMLMGGGVCSTVTLNFNMPGAFVHEVMVVGSAGRLVARGADLYGQKNSATQEELLLRDSLAVGAGLPEQGPQDVPLLYLKGMVYMVQALRQSFQGQGDRRTWDRTPVSMAASFEDGLYMQSVVDAIKRSSRSGEWEAVEVLTEEPDTNQNLCEALQRNNL

SEQ ID NO: 1942 - protein, 489 aa, Homo sapiens
MPVTFALLLLLGQATADPCYDPQGRPQFCLPPVTQLAAVAASCPQACALSPGNHLGARETCNGSLTLALGGPFLLTSVSLRFCTPGPPALILSAAWASGGPWRLLWHRPAWPGALGGPERVTFHSTPGPKATVAASHLRVEFGGQAGLAAAGLRGRCQCHGHAARCAARARPPRCHCRHHTTGPGCESCRPSHRDWPWRPATPRHPHPCLPCSCNQHARRCRFNSELFRLSGGRSGGVCERCRHHTAGRHCHYCQPGFWRDPSQPIFSRRACRACQCHPIGATGGTCNQTSGQCTCKLGVTGLTCNRCGPGYQQSRSPRMPCQRIPEATTTLATTPGAYSSDPQCQNYCNMSDTRVHMSLRRYCQQDHVLRAQVLASEAAGPAWQRLAVRVLAVYKQRAQPVRRGDQDAWVPRADLTCGCLRLQPGTDYLLLGSAVGDPDPTRLILDRHGLALPWRPRWARPLKRLQQEERAGGCRGVRAPTPSPRPEH

SEQ ID NO: 1943 - protein, 2809 aa, Homo sapiens
MTLEGLYLARGPLARLLLAWSALLCMAGGQGRWDGALEAAGPGRVRRRGSPGILQGPNVCGSRFHAYCCPGWRTFPGRSQCVVPICRRACGEGFCSQPNLCTCADGTLAPSCGVSRGSGCSVSCMNGGTCRGASCLCQKGYTGTVCGQPICDRGCHNGGRCIGPNRCACVYGFMGPQCERDYRTGPCFGQVGPEGCQHQLTGLVCTKALCCATVGRAWGLPCELCPAQPHPCRRGFIPNIHTGACQDVDECQAVPGLCQGGSCVNMVGSFHCRCPVGHRLSDSSAACEDYRAGACFSVLFGGRCAGDLAGHYTRRQCCCDRGRCWAAGPVPELCPPRGSNEFQQLCAQRLPLLPGHPGLFPGLLGFGSNGMGPPLGPARLNPHGSDARGIPSLGPGNSNIGTATLNQTIDICRHFTNLCLNGRCLPTPSSYRCECNVGYTQDVRGECIDVDECTSSPCHHGDCVNIPGTYHCRCYPGFQATPTRQACVDVDECIVSGGLCHLGRCVNTEGSFQCVCNAGFELSPDGKNCVDHNECATSTMCVNGVCLNEDGSFSCLCKPGFLLAPGGHYCMDIDECQTPGICVNGHCTNTEGSFRCQCLGGLAVGTDGRVCVDTHVRSTCYGAIEKGSCARPFPGTVTKSECCCANPDHGFGEPCQLCPAKDSAEFQALCSSGLGITTDGRDINECALDPEVCANGVCENLRGSYRCVCNLGYEAGASGKDCTDVDECALNSLLCDNGWCQNSPGSYSCSCPPGFHFWQDTEICKDVDECLSSPCVSGVCRNLAGSYTCKCGPGSRLDPSGTFCLDSTKGTCWLKIQESRCEVNLQGASLRSECCATLGAAWGSPCERCEIDPACARGFARMTGVTCDDVNECESFPGVCPNGRCVNTAGSFRCECPEGLMLDASGRLCVDVRLEPCFLRWDEDECGVTLPGKYRMDVCCCSIGAVWGVECEACPDPESLEFASLCPRGLGFASRDFLSGRPFYKDVNECKVFPGLCTHGTCRNTVGSFHCACAGGFALDAQERNCTDIDECRISPDLCGQGTCVNTPGSFECECFPGYESGFMLMKNCMDVDECARDPLLCRGGTCTNTDGSYKCQCPPGHELTAKGTACEDIDECSLSDGLCPHGQCVNVIGAFQCSCHAGFQSTPDRQGCVDINECRVQNGGCDVHCINTEGSYRCSCGQGYSLMPDGRACADVDECEENPRVCDQGHCTNMPGGHRCLCYDGFMATPDMRTCVDVDECDLNPHICLHGDCENTKGSFVCHCQLGYMVRKGATGCSDVDECEVGGHNCDSHASCLNIPGSFSCRCLPGWVGDGFECHDLDECVSQEHRCSPRGDCLNVPGSYRCTCRQGFAGDGFFCEDRDECAENVDLCDNGQCLNAPGGYRCECEMGFDPTEDHRACQDVDECAQGNLCAFGSCENLPGMFRCICNGGYELDRGGGNCTDINECADPVNCINGVCINTPGSYLCSCPQDFELNPSGVGCVDTRAGNCFLETHDRGDSGISCSAEIGVGVTRASCCCSLGRAWGNPCELCPMANTTEYRTLCPGGEGFQPNRITVILEDIDECQELPGLCQGGDCVNTFGSFQCECPPGYHLSEHTRICEDIDECSTHSGICGPGTCYNTLGNYTCVCPAEYLQVNGGNNCMDMRKSVCFRHYNGTCQNELAFNVTRKMCCCSYNIGQAWNRPCEACPTPISPDYQILCGNQAPGFLTDIHTGKPLDIDECGEIPAICANGICINQIGSFRCECPAGFNYNSILLACEDVDECGSRESPCQQNADCINIPGSYRCKCTRGYKLSPGGACVGRNECREIPNVCSHGDCMDTEGSYMCLCHRGFQASADQTLCMDIDECDRQPCGNGTCKNIIGSYNCLCFPGFVVTHNGDCVDFDECTTLVGQVCRFGHCLNTAGSFHCLCQDGFELTADGKNCVDTNECLSLAGTCLPGTCQNLEGSFRCICPPGFQVQSDHCIDIDECSEEPNLCLFGTCTNSPGSFQCLCPPGFVLSDNGHRCFDTRQSFCFTRFEAGKCSVPKAFNTTKTRCCCSKRPGEGWGDPCELCPQEGSAAFQELCPFGHGAVPGPDDSREDVNECAENPGVCTNGVCVNTDGSFRCECPFGYSLDFTGINCVDTDECSVGHPCGQGTCTNVIGGFECACADGFEPGLMMTCEDIDECSLNPLLCAFRCHNTEGSYLCTCPAGYTLREDGAMCRDVDECADGQQDCHARGMECKNLIGTFACVCPPGMRPLPGSGEGCTDDNECHAQPDLCVNGRCVNTAGSFRCDCDEGFQPSPTLTECHDIRQGPCFAEVLQTMCRSLSSSSEAVTRAECCCGGGRGWGPRCELCPLPGTSAYRKLCPHGSGYTAEGRDVDECRMLAHLCAHGECINSLGSFRCHCQAGYTPDATATTCLDMDECSQVPKPCTFLCKNTKGSFLCSCPRGYLLEEDGRTCKDLDECTSRQHNCQFLCVNTVGAFTCRCPPGFTQHHQACFDNDECSAQPGPCGAHGHCHNTPGSFRCECHQGFTLVSSGHGCEDVNECDGPHRCQHGCQNQLGGYRCSCPQGFTQHSQWAQCVDENECALSPPTCGSASCRNTLGGFRCVCPSGFDFDQALGGCQEVDECAGRRGPCSYSCANTPGGFLCGCPQGYFRAGQGHCVSGLGFSPGPQDTPDKEELLSSEACYECKINGLSPRDRPRRSAHRDHQVNLATLDSEALLTLGLNLSHLGRAERILELRPALEGLEGRIRYVIVRGNEQGFFRMHHLRGVSSLQLGRRRPGPGTYRLEVVSHMAGPWGVQPEGQPGPWGQALRLKVQLQLL

SEQ ID NO: 1944 - protein, 100 aa, Homo sapiens
METRQVSRSPRVRLLLLLLLLLVVPWGVRTASGVALPPVGVLSLRPPGRAWADPATPRPRRSLALADDAAFRERARLLAALERRHWLNSYMHKLLVLDAP

SEQ ID NO: 1945 - protein, 467 aa, Homo sapiens
MWRCPLGLLLLLPLAGHLALGAQQGRGRRELAPGLHLRGIRDAGGRYCQEQDLCCRGRADDCALPYLGAICYCDLFCNRTVSDCCPDFWDFCLGVPPPFPPIQGCMHGGRIYPVLGTYWDNCNRCTCQENRQWQCDQEPCLVDPDMIKAINQGNYGWQAGNHSAFWGMTLDEGIRYRLGTIRPSSSVMNMHEIYTVLNPGEVLPTAFEASEKWPNLIHEPLDQGNCAGSWAFSTAAVASDRVSIHSLGHMTPVLSPQNLLSCDTHQQQGCRGGRLDGAWWFLRRRGVVSDHCYPFSGRERDEAGPAPPCMMHSRAMGRGKRQATAHCPNSYVNNNDIYQVTPVYRLGSNDKEIMKELMENGPVQALMEVHEDFFLYKGGIYSHTPVSLGRPERYRRHGTHSVKITGWGEETLPDGRTLKYWTAANSWGPAWGERGHFRIVRGVNECDIESFVLGVWGRVGMEDMGHH

SEQ ID NO: 1946 - protein, 734 aa, Homo sapiens
MFYVCSSCVFLCGSNFPNFPFQVASAKSAPEIPTIDQAYSKLSNSITVEWATVPGATSYLLTAEDGDTVIETTVANSPGTVTGLKAATWYEITIRSISAAGRSQASPPKQAKTVLAAPILEVSSPSSDSILVQWEAVYMAIAFSVSIMRANGLGSIWKENTTNTSLTFTSLEAGTLYTIKAYAWNANRIPGDDSTCNQRTSPRAPANIQVSFDSGALKASFSWARAEGAFNYTVMALSDSSELTCSTTFSSCTISSLQCGTEYLISVLASNDAGSSKSSSAMTLKTVACAPGRVTIQEDPPGHLSVAWSSVDLGDYYVVFVKSDDGLEVHCNTSLTQCNFLSECGFTYFISVFVYNKAGQSPLGDIFNYTTAPCCPSDINPVLVSSDRVEIVWSPVRGAELYETKAVDGYNMVECNDTTPACTLSALECDTKYNITVYSFNEVRGSNMSCTPQFITTAPCSPEIKNVSRDAFSMINVHWRSTNDDATYTVTAQGEKGLYQCSSTGESCTMRGLPCGSVFSVTAVAETQAGRSLPSYSVPLETVPCCPTGLTVTQITQSVINVSWTIGRVAQTHVAVLESHTGQSKCHTHQNHCLLGCITCGINYTVTLKAISATGLTADCSYQSYFSGACCPLGVKLYRLGPNGIRIYWQASRGSANYSTDLYGSKGIFTCTPSAGLSFCDVTEIPCGDVYTVMVSPVAKTGLKLTFCPKKIYSVTCSGSTLGMVIYRGKRNEE

SEQ ID NO: 1947 - protein, 365 aa, Homo sapiens
MLDGSPLARWLAAAFGLTLLLAALRPSAAYFGLTGSEPLTILPLTLEPEAAAQAHYKACDRLKLERKQRRMCRRDPGVAETLVEAVSMSALECQFQFRFERWNCTLEGRYRASLLKRGFKETAFLYAISSAGLTHALAKACSAGRMERCTCDEAPDLENREAWQWGGCGDNLKYSSKFVKEFLGRRSSKDLRARVDFHNNLVGVKVIKAGVETTCKCHGVSGSCTVRTCWRQLAPFHEVGKHLKHKYETALKVGSTTNEAAGEAGAISPPRGRASGAGGSDPLPRTPELVHLDDSPSFCLAGRFSPGTAGRRCHREKNCESICCGRGHNTQSRVVTRPCQCQVRWCCYVECRQCTQREEVYTCKG

SEQ ID NO: 1948 - protein, 264 aa, Homo sapiens
MRLRPLPLVVVPGLLQLLFCDSKEVVHATEGLDWEDKDAPGTLVGNVVHSRIISPLRLFVKQSPVPKPGPMAYADSMENFWDWLANITEIQEPLARTKRRPIVKTGKFKKMFGWGDFHSNIKTVKLNLLITGKIVDHGNGTFSVYFRHNSTGLGNVSVSLVPPSKVVEFEVSPQSTLETKESKSFNCRIEYEKTDRAKKTALCNFDPSKICYQEQTQSHVSWLCSKPFKVICIYIAFYSVDYKLVQKVCPDYNYHSETPYLSSG

SEQ ID NO: 1949 - protein, 374 aa, Homo sapiens
MKPLLETLYLLGMLVPGGLGYDRSLAQHRQEIVDKSVSPWSLETYSYNIYHPMGEIYEWMREISEKYKEVVTQHFLGVTYETHPMYYLKISQPSGNPKKIIWMDCGIHAREWIAPAFCQWFVKEILQNHKDNSSIRKLLRNLDFYVLPVLNIDGYIYTWTTDRLWRKSRSPHNNGTCFGTDLNRNFNASWCSIGASRNCQDQTFCGTGPVSEPETKAVASFIESKKDDILCFLTMHSYGQLILTPYGYTKNKSSNHPEMIQVGQKAANALKAKYGTNYRVGSSADILYASSGSSRDWARDIGIPFSYTFELRDSGTYGFVLPEAQIQPTCEETMEAVLSVLDDVYAKHWHSDSAGRVTSATMLLGLLVSCMSLL

SEQ ID NO: 1950 - protein, 575 aa, Homo sapiens
MASWLRRKLRGKRRPVIAFCLLMILSAMAVTRFPPQRPSAGPDPGPMEPQGVTGAPATHIRQALSSSRRQRARNMGFWRSRALPRNSILVCAEEQGHRARVDRSRESPGGDLRHPGRVRRDITLSGHPRLSTQHVVLLREDEVGDPGTKDLGHPQHGSPIQETQSEVVTLVSPLPGSDMAALPAWRATSGLTLWPHTAEGRDLLGAENRALTGGQQAEDPTLASGAHQWPGSVEKLQGSVWCDAETLLSSSRTGGQAPPWLTDHDVQMLRLLAQGEVVDKARVPAHGQVLQVGFSTEAALQDLSSPRLSQLCSQGLCGLIKRPGDLPEVLSFHVDRVLGLRRSLPAVARRFHSPLLPYRYTDGGARPVIWWAPDVQHLSDPDEDQNSLALGWLQYQALLAHSCNWPGQAPCPGIHHTEWARLALFDFLLQVHDRLDRYCCGFEPEPSDPCVEERLREKCQNPAELRLVHILVRSSDPSHLVYIDNAGNLQHPEDKLNFRLLEGIDGFPESAVKVLASGCLQNMLLKSLQMDPVFWESQGGAQGLKQVLQTLEQRGQVLLGHIQKHNLTLFRDEDP

SEQ ID NO: 1951 - protein, 559 aa, Homo sapiens
MWTNFFKLRLFCCLLAVLMVVVLVINVTQVEYLDHETVSATFIDSSGQFVSSQVTGISRNPYCGYDQQTLSSQERMEEDSLLAALHRQVPDVGPVPFVKSTDPSSSYFVILNSAAFFKVGSQLEVLVHVQDFQRKPKKYGGDYLQARIHSLKLQAGAVGRVVDYQNGFYKVFFTLLWPGKVKVSVSLVHPSEGIRVLQRLQEDKPDRVYFKSLFRSGRISETTECNVCLPGNLPLCNFTDLYTGEPWFCFKPKKLPCSSRITHFKGGYLKGLLTAAESAFFQSGVNIKMPVNSSGPDWVTVIPRRIKETNSLELSQGSGTFPSGYYYKDQWRPRKFKMRQFNDPDNITECLQRKVVHLFGDSTIRQWFEYLTTFVPDLVEFNLGSPKNVGPFLAVDQKHNILLKYRCHGPPIRFTTVFSNELHYVANELNGIVGGKNTVVAIAVWSHFSTFPLEVYIRRLRNIRRAVVRLLDRSPKTVVVIRTANAQELGPEVSLFNSDWYNFQLDTILRRMFSGVGVYLVDAWEMTLAHYLPHKLHPDEVIVKNQLDMFLSFVCPLET

SEQ ID NO: 1952 - protein, 1207 aa, Homo sapiens
MRLTHICCCCLLYQLGFLSNGIVSELQFAPDREEWEVVFPALWRREPVDPAGGSGGSADPGWVRGVGGGGSARAQAAGSSREVRSVAPVPLEEPVEGRSESRLRPPPPSEGEEDEELESQELPRGSSGAAALSPGAPASWQPPPPPQPPPSPPPAQHAEPDGDEVLLRIPAFSRDLYLLLRRDGRFLAPRFAVEQRPNPGPGPTGAASAPQPPAPPDAGCFYTGAVLRHPGSLASFSTCGGGLMGFIQLNEDFIFIEPLNDTMAITGHPHRVYRQKRSMEEKVTEKSALHSHYCGIISDKGRPRSRKIAESGRGKRYSYKLPQEYNIETVVVADPAMVSYHGADAARRFILTILNMVFNLFQHKSLSVQVNLRVIKLILLHETPPELYIGHHGEKMLESFCKWQHEEFGKKNDIHLEMSTNWGEDMTSVDAAILITRKDFCVHKDEPCDTVGIAYLSGMCSEKRKCIIAEDNGLNLAFTIAHEMGHNMGINHDNDHPSCADGLHIMSGEWIKGQNLGDVSWSRCSKEDLERFLRSKASNCLLQTNPQSVNSVMVPSKLPGMTYTADEQCQILFGPLASFCQEMQHVICTGLWCKVEGEKECRTKLDPPMDGTDCDLGKWCKAGECTSRTSAPEHLAGEWSLWSPCSRTCSAGISSRERKCPGLDSEARDCNGPRKQYRICENPPCPAGLPGFRDWQCQAYSVRTSSPKHILQWQAVLDEEKPCALFCSPVGKEQPILLSEKVMDGTSCGYQGLDICANGRCQKVGCDGLLGSLAREDHCGVCNGNGKSCKIIKGDFNHTRGAGYVEVLVIPAGARRIKVVEEKPAHSYLALRDAGKQSINSDWKIEHSGAFNLAGTTVHYVRRGLWEKISAKGPTTAPLHLLVLLFQDQNYGLHYEYTIPSDPLPENQSSKAPEPLFMWTHTSWEDCDATCGGGERKTTVSCTKIMSKNISIVDNEKCKYLTKPEPQIRKCNEQPCQTRWMMTEWTPCSRTCGKGMQSRQVACTQQLSNGTLIRARERDCIGPKPASAQRCEGQDCMTVWEAGVWSECSVKCGKGIRHRTVRCTNPRKKCVLSTRPREAEDCEDYSKCYVWRMGDWSKCSITCGKGMQSRVIQCMHKITGRHGNECFSSEKPAAYRPCHLQPCNEKINVNTITSPRLAALTFKCLGDQWPVYCRVIREKNLCQDMRWYQRCCETCRDFYAQKLQQKS

SEQ ID NO: 1953 - protein, 85 aa, Homo sapiens
MKITGGLLLLCTVVYFCSSSEAASLSPKKVDCSIYKKYPVVAIPCPITYLPVCGSDYITYGNECHLCTESLKSNGRVQFLHDGSC

SEQ ID NO: 1954 - protein, 993 aa, Homo sapiens
MGSGRVPGLCLLVLLVHARAAQYSKAAQDVDECVEGTDNCHIDAICQNTPRSYKCICKSGYTGDGKHCKDVDECEREDNAGCVHDCVNIPGNYRCTCYDGFHLAHDGHNCLDVDECAEGNGGCQQSCVNMMGSYECHCREGFFLSDNQHTCIQRPEEGMNCMNKNHGCAHICRETPKGGIACECRPGFELTKNQRDCKLTCNYGNGGCQHTCDDTEQGPRCGCHIKFVLHTDGKTCIETCAVNNGGCDSKCHDAATGVHCTCPVGFMLQPDRKTCKDIDECRLNNGGCDHICRNTVGSFECSCKKGYKLLINERNCQDIDECSFDRTCDHICVNTPGSFQCLCHRGYLLYGITHCGDVDECSINRGGCRFGCINTPGSYQCTCPAGQGRLHWNGKDCTEPLKCQGSPGASKAMLSCNRSGKKDTCALTCPSRARFLPESENGFTVSCGTPSPRAAPARAGHNGNSTNSNHCHEAAVLSIKQRASFKIKDAKCRLHLRNKGKTEEAGRITGPGGAPCSECQVTFIHLKCDSSRKGKGRRARTPPGKEVTRLTLELEAEVRAEETTASCGLPCLRQRMERRLKGSLKMLRKSINQDRFLLRLAGLDYELAHKPGLVAGERAEPMESCRPGQHRAGTKCVSCPQGTYYHGQTEQCVPCPAGTFQEREGQLSCDLCPGSDAHGPLGATNVTTCAGQCPPGQHSVDGFKPCQPCPRGTYQPEAGRTLCFPCGGGLTTKHEGAISFQDCDTKVQCSPGHYYNTSIHRCIRCAMGSYQPDFRQNFCSRCPGNTSTDFDGSTSVAQCKNRQCGGELGEFTGYIESPNYPGNYPAGVECIWNINPPPKRKILIVVPEIFLPSEDECGDVLVMRKNSSPSSITTYETCQTYERPIAFTARSRKLWINFKTSEANSARGFQIPYVTYDEDYEQLVEDIVRDGRLYASENHQEILKDKKLIKAFFEVLAHPQNYFKYTEKHKEMLPKSFIKLLRSKVSSFLRPYK

SEQ ID NO: 1955 - protein, 1590 aa, Homo sapiens
MPGGACVLVIALMFLAWGEAQECSPGGHQFLRSPYRSVRFDSWHLQQSAVQDLICDHSLSPGWYRFLILDRPAEMPTKCVEMNHCGTQAPIWLSLRDSETLPSPGEIKQLTACATWQFLFSTTKDCCLFQIPVSVRNCGNFSVYLLQPTQGCMGYCAEAISDARLHPCGSDETETGGDCVRQLAASLPPPPAGRPEVLVELIESRLFCRCSFDVPATKNSVGFHIAWSRLSSQEVKEELTQETTVQAFSLLELDGINLRLGDRIFCSASVFFLENPHVQSVAIESQEFFAGFKLQPELSTISEDGKEYYLRIESTVPIICSEFSELDQECKISLKLKTIGQGREHLGLNLALSSCHVDLLQTSSCANGTCSHTFVYYTAVTDFSRDGDRVSNIVVQPIVNEDFLWNNYIPDSIQIKVKDVPTAYCYTFTDPHIITFDGRVYDNFKTGTFVLYKSMSRDFEVHVRQWDCRSLHYPVSCNCGFVAQEGGDIVTFDMCNGQLRESQPYLFIKSQDVTRNIKISESYLGRKVTIWFSSGAFIRADLGEWGMSLTIRAPSVDYRNTLGLCGTFDENPENDFHDKNGMQIDQNFNNYVAFINEWRILPGKSMSDTLPVSMTSPGKPSYCSCSLDTAAYPSSEDLDSVSRSEIALGCKDLNHVSLSSLIPELDVTSEYINSDTLVREINKHTSPEEYNLNLFLQEKKHINLTKLGLNVQKHPGNEKEDSLQYLANKKYTQGRGSHSQEMRYNRQNRWKRQNFHEFPPLFAFPSLSQTDLEELTYFFPEDHAEDVQQEFFPSWPTPSGLTEYSTLTLCQETLANSSIGRLCLAFLGKRLDSVIEMCVKDVLLKDDLSWAEAGVALLENECEKRIVEEGKYNTEEYGTSIEDILSVLKCPNLCSGNGQCMEWGCACSPSFSSYDCSDSYDKAPEITELGNAGFCDVQKYNCMMVRVFGKGFKELPSIKCEVTKLQYNSSEWMPGEPIYTQTVFHNSRAVDCQLPTDVQQFDTMDLVGGKPTGKWQLKVSNDGYKFSNPKITVIYDGACQVCGLYKNDSCTIKENVCIIDGLCYVEGDKNPTSPCLICRPKISRFTWSFLENNQPPVIQALQDKLQTFYGENFEYQFVAFDPEGSDIHFTLDSGPEGASVSSAGLFMWKTDLLTTQQITVRLNDDCDAETRVTIEVTVKSCDCLNGGSCVSDRNFSPGSGVYLCVCLPGFHGSLCEVDISGCQSNPCGLGSYISGFHSYSCDCPPELKVETQFVNQFTTQTVVLTRSDKSVNKEEDDKNAQGRKRHVKPTSGNAFTICKYPCGKSRECVAPNICKCKPGYIGSNCQTALCDPDCKNHGKCIKPNICQCLPGHGGATCDEEHCNPPCQHGGTCLAGNLCTCPYGFVGPRCETMVCNRHCENGGQCLTPDICQCKPGWYGPTCSTALCDPVCLNGGSCNKPNTCLCPNGFFGEHCQNAFCHPPCKNGGHCMRNNVCVCREGYTGRRFQKSICDPTCMNGGKCVGPSTCSCPSGWSGKRCNTPICLQKCKNGGECIAPSICHCPSSWEGVRCQIPICNPKCLYGGRCIFPNVCSCRTEYSGVKCEKKIQIRRH

SEQ ID NO: 1956 - protein, 207 aa, Homo sapiens
MSTKPDMIQKCLWLEILMGIFIAGTLSLDCNLLNVHLRRVTWQNLRHLSSMSNSFPVECLRENIAFELPQEFLQYTQPMKRDIKKAFYEMSLQAFNIFSQHTFKYWKERHLKQIQIGLDQQAEYLNQCLEEDKNENEDMKEMKENEMKPSEARVPQLSSLELRRYFHRIDNFLKEKKYSDCAWEIVRVEIRRCLYYFYKFTALFRRK

SEQ ID NO: 1957 - protein, 312 aa, Homo sapiens
MESALPAAGFLYWVGAGTVAYLALRISYSLFTALRVWGVGNEAGVGPGLGEWAVVTGSTDGIGKSYAEELAKHGMKVVLISRSKDKLDQVSSEIKEKFKVETRTIAVDFASEDIYDKIKTGLAGLEIGILVNNVGMSYEYPEYFLDVPDLDNVIKKMININILSVCKMTQLVLPGMVERSKGAILNISSGSGMLPVPLLTIYSATKTFVDFFSQCLHEEYRSKGVFVQSVLPYFVATKLAKIRKPTLDKPSPETFVKSAIKTVGLQSRTNGYLIHALMGSIISNLPSWIYLKIVMNMNKSTRAHYLKKTKKN

SEQ ID NO: 1958 - protein, 737 aa, Homo sapiens
MELGCWTQLGLTFLQLLLISSLPREYTVINEACPGAEWNIMCRECCEYDQIECVCPGKREVVGYTIPCCRNEENECDSCLIHPGCTIFENCKSCRNGSWGGTLDDFYVKGFYCAECRAGWYGGDCMRCGQVLRAPKGQILLESYPLNAHCEWTIHAKPGFVIQLRFVMLSLEFDYMCQYDYVEVRDGDNRDGQIIKRVCGNERPAPIQSIGSSLHVLFHSDGSKNFDGFHAIYEEITACSSSPCFHDGTCVLDKAGSYKCACLAGYTGQRCENLLEAGKSKIKASEDSLSVLEERNCSDPGGPVNGYQKITGGPGLINGRHAKIGTVVSFFCNNSYVLSGNEKRTCQQNGEWSGKQPICIKACREPKISDLVRRRVLPMQVQSRETPLHQLYSAAFSKQKLQSAPTKKPALPFGDLPMGYQHLHTQLQYECISPFYRRLGSSRRTCLRTGKWSGRAPSCIPICGKIENITAPKTQGLRWPWQAAIYRRTSGVHDGSLHKGAWFLVCSGALVNERTVVVAAHCVTDLGKVTMIKTADLKVVLGKFYRDDDRDEKTIQSLQISAIILHPNYDPILLDADIAILKLLDKARISTRVQPICLAASRDLSTSFQESHITVAGWNVLADVRSPGFKNDTLRSGVVSVVDSLLCEEQHEDHGIPVSVTDNMFCASWEPTAPSDICTAETGGIAAVSFPGRASPEPRWHLMGLVSWSYDKTCSHRLSTAFTKVLPFKDWIERNMK

SEQ ID NO: 1959 - protein, 500 aa, Homo sapiens
MGTARWLALGSLFALAGLLEGRLVGEEEAGFGECDKFFYAGTPPAGLAADSHVKICQRAEGAERFATLYSTRDRIPVYSAFRAPRPAPGGAEQRWLVEPQIDDPNSNLEEAINEAEAITSVNSLGSKQALNTDYLDSDYQRGQLYPFSLSSDVQVATFTLTNSAPMTQSFQERWYVNLHSLMDRALTPQCGSGEDLYILTGTVPSDYRVKDKVAVPEFVWLAACCAVPGGGWAMGFVKHTRDSDIIEDVMVKDLQKLLPFNPQLFQNNCGETEQDTEKMKKILEVVNQIQDEERMVQSQKSSSPLSSTRSKRSTLLPPEASEGSSSFLGKLMGFIATPFIKLFQLIYYLVVAILKNIVYFLWCVTKQVINGIESCLYRLGSATISYFMAIGEELVSIPWKVLKVVAKVIRALLRILCCLLKAICRVLSIPVRVLVDVATFPVYTMGAIPIVCKDIALGLGGTVSLLFDTAFGTLGGLFQVVFSVCKRIGYKVTFDNSGEL

SEQ ID NO: 1960 - protein, 99 aa, Homo sapiens
MKSAKLGFLLRFFIFCSLNTLLLGGVNKIAEKICGDLKDPCKLDMNFGSCYEVHFRYFYNRTSKRCETFVFSGCNGNLNNFKLKIEREVACVAKYKPPR

SEQ ID NO: 1961 - protein, 129 aa, Homo sapiens
MPMASPQTLVLYLLVLAVTEAWGQEAVIPGCHLHPFNVTVRSDRQGTCQGSHVAQACVGHCESSAFPSRYSVLVASGYRHNITSVSQCCTISGLKKVKVQLQCVGSRREELEIFTARACQCDMCRLSRY

SEQ ID NO: 1962 - protein, 654 aa, Homo sapiens
MAKFGVHRILLLAISLTKCLESTKLLADLKKCGDLECEALINRVSAMRDYRGPDCRYLNFTKGEEISVYVKLAGEREDLWAGSKGKEFGYFPRDAVQIEEVFISEEIQMSTKESDFLCLLGVSYTFDNEDSELNGDYGENIYPYEEDKDEKSSIYESDFQIEPGFYATYESTLFEDQVPALEAPEDIGSTSESKDWEEVVVESMEQDRIPEVHVPPSSAVSGVKEWFGLGGEQAEEKAFESVIEPVQESSFRSRKIAVEDENDLEELNNGEPQTEHQQESESEIDSVPKTQSELASESEHIPKPQSTGWFGGGFTSYLGFGDEDTGLELIAEESNPPLQDFPNSISSDKEATVPCTEILTEKKDTITNDSLSLKPSWFDFGFAILGFAYAKEDKIMLDDRKNEEDGGADEHEHPLTSELDPEKEQEIETIKIIETEDQIDKKPVSEKTDESDTIPYLKKFLYNFDNPWNFQNIPKETELPFPKQILDQNNVIENEETGEFSIDNYPTDNTKVMIFKSSYSLSDMVSNIELPTRIHEEVYFEPSSSKDSDENSKPSVDTEGPALVEIDRSVENTLLNSQMVSTDNSLSSQNYISQKEDASEFQILKYLFQIDVYDFMNSAFSPIVILTERVSLPFKPFAIILPILLNIRVATKYV

SEQ ID NO: 1963 - protein, 383 aa, Homo sapiens
MAGIPGLLFLLFFLLCAVGQVSPYSAPWKPTWPAYRLPVVLPQSTLNLAKPDFGAEAKLEVSSSCGPQCHKGTPLPTYEEAKQYLSYETLYANGSRTETQVGIYILSSSGDGAQHRDSGSSGKSRRKRQIYGYDSRFSIFGKDFLLNYPFSTSVKLSTGCTGTLVAEKHVLTAAHCIHDGKTYVKGTQKLRVGFLKPKFKDGGRGANDSTSAMPEQMKFQWIRVKRTHVPKGWIKGNANDIGMDYDYALLELKKPHKRKFMKIGVSPPAKQLPGGRIHFSGYDNDRPGNLVYRFCDVKDETYDLLYQQCDAQPGASGSGVYVRMWKRQQQKWERKIIGIFSGHQWVDMNGSPQDFNVAVRITPLKYAQICYWIKGNYLDCREG

SEQ ID NO: 1964 - protein, 553 aa, Homo sapiens
MKWCWGPVLLIAGATVLMEGLQAAQRACGQRGPGPPKPQEGNTVPGEWPWQASVRRQGAHICSGSLVADTWVLTAAHCFEKAAATELNSWSVVLGSLQREGLSPGAEEVGVAALQLPRAYNHYSQGSDLALLQLAHPTTHTPLCLPQPAHRFPFGASCWATGWDQDTSDAPGTLRNLRLRLISRPTCNCIYNQLHQRHLSNPARPGMLCGGPQPGVQGPCQGDSGGPVLCLEPDGHWVQAGIISFASSCAQEDAPVLLTNTAAHSSWLQARVQGAAFLAQSPETPEMSDEDSCVACGSLRTAGPQAGAPSPWPWEARLMHQGQLACGGALVSEEAVLTAAHCFIGRQAPEEWSVGLGTRPEEWGLKQLILHGAYTHPEGGYDMALLLLAQPVTLGASLRPLCLPYPDHHLPDGERGWVLGRARPGAGISSLQTVPVTLLGPRACSRLHAAPGGDGSPILPGMVCTSAVGELPSCEGLSGAPLVHEVRGTWFLAGLHSFGDACQGPARPAVFTALPAYEDWVSSLDWQVYFAEEPEPEAEPGSCLANISQPTSC

SEQ ID NO: 1965 - protein, 311 aa, Homo sapiens
MGIIQSILATSRDCYSFKKKPIPKKPTMLALAKILLISTLFYSLLSGSHGKENQDINTTQNIAEVFKTMENKPISLESEANLNSDKENITTSNLKASHSPPLNLPNNSHGITDFSSNSSAEHSLGSLKPTSTISTSPPLIHSFVSKVPWNAPIADEDLLPISAHPNATPALSSENFTWSLVNDTVKTPDNSSITVSILSSEPTSPSVTPLIVEPSGWLTTNSDSFTGFTPYQEKTTLQPTLKFTNNSKLFPNTSDPQKVLRLDNAPEPYDVSFGNSSYYNPTLNDSAMPESEENARDGIPMDDIPPLRTSV

SEQ ID NO: 1966 - protein, 1039 aa, Homo sapiens
MQSRLLLLGAPGGHGGPASRRMRLLLRQVVQRRPGGDRQRPEVRLLHAGSGADTGDTVNIGDVSYKLKIPKNPELVPQNYISDSLAQSVVQHLRWIMQKDLLGQDVFLIGPPGPLRRSIAMQYLELTKREVEYIALSRDTTETDLKQRREIRAGTAFYIDQCAVRAATEGRTLILEGLEKAERNVLPVLNNLLENREMQLEDGRFLMSAERYDKLLRDHTKKELDSWKIVRVSENFRVIALGLPVPRYSGNPLDPPLRSRFQARDIYYLPFKDQLKLLYSIGANVSAEKVSQLLSFATTLCSQESSTLGLPDFPLDSLAAAVQILDSFPMMPIKHAIQWLYPYSILLGHEGKMAVEGVLKRFELQDSGSSLLPKEIVKVEKMMENHVSQASVTIRIADKEVTIKVPAGTRLLSQPCASDRFIQTLSHKQLQAEMMQSHMVKDICLIGGKGCGKTVIAKNFADTLGYNIEPIMLYQDMTARDLLQQRYTLPNGDTAWRSSPLVNAALEGKLVLLDGIHRVNAGTLAVLQRLIHDRELSLYDGSRLLREDRYMRLKEELQLSDEQLQKRSIFPIHPSFRIIALAEPPVIGSTAHQWLGPEFLTMFFFHYMKPLVKSEEIQVIKEKVPNVPQEALDKLLSFTHKLRETQDPTAQSLAASLSTRQLLRISRRLSQYPNENLHSAVTKACLSRFLPSLARSALEKNLADATIEINTDDNLEPELKDYKCEVTSGTLRIGAVSAPIYNAHEKMKVPDVLFYDNIQHVIVMEDMLKDFLLGEHLLLVGNQGVGKNKIVDRFLHLLNRPREYIQLHRDTTVQTLTLQPSVKDGLIVYEDSPLVKAVKLGHILVVDEADKAPTNVTCILKTLVENGEMILADGRRIVANSANVNGRENVVVIHPDFRMIVLANRPGFPFLGNDFFGTLGDIFSCHAVDNPKPHSELEMLRQYGPNVPEPILQKLVAAFGELRSLADQGIINYPYSTREVVNIVKHLQKFPTEGLSSVVRNVFDFDSYNNDMREILINTLHKYGIPIGAKPTSVQLAKE

SEQ ID NO: 1967 - protein, 266 aa, Homo sapiens
MRLLFLAVLRPHTGNAVTAQRVRAHLEAAGHVCVLKDAFDFESRSEIANLILAENCEAALALHLYRGGRLLQGHRIPFGVIFGGTDVNEDANQAEKNTVMGRVLEEARFAVAFTESMKEMAQAQWVDPVFTREVKAKVKRAAGVRLIGEMPQEDLHAVVKNCFAVVNSSVSEGMSAAILEAMDLEVPVLARNIPGNAAVVKHEVTGLLFSNPQEFVHLAKRLVSDPALEKEIVVNGREYVRMYHSWQVERDTYQQLIRKLEGSTED

SEQ ID NO: 1968 - protein, 825 aa, Homo sapiens
MFSGFNVFRVGISFVIMCIFYMPTVNSLPELSPQKYFSTLQPGKASLAYFCQADSPRTSVFLEELNEAVRPLQDYGISVAKVNCVKEEISRYCGKEKDLMKAYLFKGNILLREFPTDTLFDVNAIVAHVLFALLFSEVKYITNLEDLQNIENALKGKANIIFSYVRAIGIPEHRAVMEAAFVYGTTYQFVLTTEIALLESIGSEDVEYAHLYFFHCKLVLDLTQQCRRTLMEQPLTTLNIHLFIKTMKAPLLTEVAEDPQQVSTVHLQLGLPLVFIVSQQATYEADRRTAEWVAWRLLGKAGVLLLLRDSLEVNIPQDANVVFKRAEEGVPVEFLVLHDVDLIISHVENNMHIEEIQEDEDNDMEGPDIDVQDDEVAETVFRDRKRKLPLELTVELTEETFNATVMASDSIVLFYAGWQAVSMAFLQSYIDVAVKLKGTSTMLLTRINCADWSDVCTKQNVTEFPIIKMYKKGENPVSYAGMLGTEDLLKFIQLNRISYPVNITSIQEAEEYLSGELYKDLILYSSVSVLGLFSPTMKTAKEDFSEAGNYLKGYVITGIYSEEDVLLLSTKYAASLPALLLARHTEGKIESIPLASTHAQDIVQIITDALLEMFPEITVENLPSYFRLQKPLLILFSDGTVNPQYKKAILTLVKQKYLDSFTPCWLNLKNTPVGRGILRAYFDPLPPLPLLVLVNLHSGGQVFAFPSDQAIIEENLVLWLKKLEAGLENHITILPAQEWKPPLPAYDFLSMIDAATSQRGTRKVPKCMKETDVQENDKEQHEDKSAVRKEPIETLRIKHWNRSNWFKEAEKSFRRDKELGCSKVN

SEQ ID NO: 1969 - protein, 223 aa, Homo sapiens
MTWRHHVRLLFTVSLALQIINLGNSYQREKHNGGREEVTKVATQKHRQSPLNWTSSHFGEVTGSAEGWGPEEPLPYSWAFGEGASARPRCCRNGGTCVLGSFCVCPAHFTGRYCEHDQRRSECGALEHGAWTLRACHLCRCIFGALHCLPLQTPDRCDPKDFLASHAHGPSAGGAPSLLLLLPCALLHRLLRPDAPAHPRSLVPSVLQRERRPCGRPGLGHRL

SEQ ID NO: 1970 - protein, 439 aa, Homo sapiens
MPAIAVLAAAAAAWCFLQVESRHLDALAGGAGPNHGNFLDNDQWLSTVSQYDRDKYWNRFRDDDYFRNWNPNKPFDQALDPSKDPCLKVKCSPHKVCVTQDYQTALCVSRKHLLPRQKKGNVAQKHWVGPSNLVKCKPCPVAQSAMVCGSDGHSYTSKCKLEFHACSTGKSLATLCDGPCPCLPEPEPPKHKAERSACTDKELRNLASRLKDWFGALHEDANRVIKPTSSNTAQGRFDTSILPICKDSLGWMFNKLDMNYDLLLDPSEINAIYLDKYEPCIKPLFNSCDSFKDGKLSNNEWCYCFQKPGGLPCQNEMNRIQKLSKGKSLLGAFIPRCNEEGYYKATQCHGSTGQCWCVDKYGNELAGSRKQGAVSCEEEQETSGDFGSGGSVVLLDDLEYERELGPKDKEGKLRVHTRAVTEDDEDEDDDKEDEVGYIW

SEQ ID NO: 1971 - protein, 2623 aa, Homo sapiens
MKVKGRGITCLLVSFAVICLVATPGGKACPRRCACYMPTEVHCTFRYLTSIPDSIPPNVERINLGYNSLVRLMETDFSGLTKLELLMLHSNGIHTIPDKTFSDLQALQVLKMSYNKVRKLQKDTFYGLRSLTRLHMDHNNIEFINPEVFYGLNFLRLVHLEGNQLTKLHPDTFVSLSYLQIFKISFIKFLYLSDNFLTSLPQEMVSYMPDLDSLYLHGNPWTCDCHLKWLSDWIQEKPDVIKCKKDRSPSSAQQCPLCMNPRTSKGKPLAMVSAAAFQCAKPTIDSSLKSKSLTILEDSSSAFISPQGFMAPFGSLTLNMTDQSGNEANMVCSIQKPSRTSPIAFTEENDYIVLNTSFSTFLVCNIDYGHIQPVWQILALYSDSPLILERSHLLSETPQLYYKYKQVAPKPEDIFTNIEADLRADPSWLMQDQISLQLNRTATTFSTLQIQYSSDAQITLPRAEMRPVKHKWTMISRDNNTKLEHTVLVGGTVGLNCPGQGDPTPHVDWLLADGSKVRAPYVSEDGRILIDKSGKLELQMADSFDTGVYHCISSNYDDADILTYRITVVEPLVEAYQENGIHHTVFIGETLDLPCHSTGIPDASISWVIPGNNVLYQSSRDKKVLNNGTLRILQVTPKDQGYYRCVAANPSGVDFLIFQVSVKMKGQRPLEHDGETEGSGLDESNPIAHLKEPPGAQLRTSALMEAEVGKHTSSTSKRHNYRELTLQRRGDSTHRRFRENRRHFPPSARRIDPQHWAALLEKAKKNAMPDKRENTTVSPPPVVTQLPNIPGEEDDSSGMLALHEEFMVPATKALNLPARTVTADSRTISDSPMTNINYGTEFSPVVNSQILPPEEPTDFKLSTAIKTTAMSKNINPTMSSQIQGTTNQHSSTVFPLLLGATEFQDSDQMGRGREHFQSRPPITVRTMIKDVNVKMLSSTTNKLLLESVNTTNSHQTSVREVSEPRHNHFYSHTTQILSTSTFPSDPHTAAHSQFPIPRNSTVNIPLFRRFGRQRKIGGRGRIISPYRTPVLRRHRYSIFRSTTRGSSEKSTTAFSATVLNVTCLSCLPRERLTTATAALSFPSAAPITFPKADIARVPSEESTTLVQNPLLLLENKPSVEKTTPTIKYFRTEISQVTPTGAVMTYAPTSIPMEKTHKVNASYPRVSSTNEAKRDSVITSSLSGAITKPPMTIIAITRFSRRKIPWQQNFVNNHNPKGRLRNQHKVSLQKSTAVMLPKTSPALPRDKVSPFHFTTLSTSVMQIPSNTLTTAHHTTTKTHNPGSLPTKKELPFPPLNPMLPSIISKDSSTKSIISTQTAIPATTPTFPASVITYETQTERSRAQTIQREQEPQKKNRTDPNISPDQSSGFTTPTAMTPPVLTTAETSVKPSVSAFTHSPPENTTGISSTISFHSRTLNLTDVIEELAQASTQTLKSTIASETTLSSKSHQSTTTRKAIIRHSTIPPFLSSSATLMPVPISPPFTQRAVTDNVATPISGLMTNTVVKLHESSRHNAKPQQLVAEVATSPKVHPNAKFTIGTTHFIYSNLLHSTPMPALTTVKSQNSKLTPSPWAENQFWHKPYSEIAEKGKKPEVSMLATTGLSEATTLVSDWDGQKNTKKSDFDKKPVQEATTSKLLPFDSLSRYIFEKPRIVGGKAASFTIPANSDAFLPCEAVGNPLPTIHWTRVPSGLDLSKRKQNSRVQVLPNGTLSIQRVEIQDRGQYLCSASNLFGTDHLHVTLSVVSYPPRILERRTKEITVHSGSTVELKCRAEGRPSPTVTWILANQTVVSESSQGSRQAVVTVDGTLVLHNLSIYDRGFYKCVASNPGGQDSLLVKIQVIAAPPVILEQRRQVIVGTWGESLKLPCTAKGTPQPSVYWVLSDGTEVKPLQFTNSKLFLFSNGTLYIRNLASSDRGTYECIATSSTGSERRVVMLTMEERVTSPRIEAASQKRTEVNFGDKLLLNCSATGEPKPQIMWRLPSKAVVDQQHRVGSWIHVYPNGSLFIGSVTEKDSGVYLCVARNKMGDDLILMHVSLRLKPAKIDHKQYFRKQVLHGKDFQVDCKASGSPVPEISWSLPDGTMINNAMQADDSGHRTRRYTLFNNGTLYFNKVGVAEEGDYTCYAQNTLGKDEMKVHLTVITAAPRIRQSNKTNKRIKAGDTAVLDCEVTGDPKPKIFWLLPSNDMISFSIDRYTFHANGSLTINKVKLLDSGEYVCVARNPSGDDTKMYKLDVVSKPPLINGLYTNRTVIKATAVRHSKKHFDCRAEGTPSPEVMWIMPDNIFLTAPYYGSRITVHKNGTLEIRNVRLSDSADFICVARNEGGESVLVVQLEVLEMLRRPTFRNPFNEKIVAQLGKSTALNCSVDGNPPPEIIWILPNGTRFSNGPQSYQYLIASNGSFIISKTTREDAGKYRCAARNKVGYIEKLVILEIGQKPVILTYAPGTVKGISGESLSLHCVSDGIPKPNIKWTMPSGYVVDRPQINGKYILHDNGTLVIKEATAYDRGNYICKAQNSVGHTLITVPVMIVAYPPRITNRPPRSIVTRTGAAFQLHCVALGVPKPEITWEMPDHSLLSTASKERTHGSEQLHLQGTLVIQNPQTSDSGIYKCTAKNPLGSDYAATYIQVI

SEQ ID NO: 1972 - protein, 664 aa, Homo sapiens
MKTGLFFLCLLGTAAAIPTNARLLSDHSKPTAETVAPDNTAIPSLRAEAEENEKETAVSTEDDSHHKAEKSSVLKSKEESHEQSAEQGKSSSQELGLKDQEDSDGHLSVNLEYAPTEGTLDIKEDMSEPQEKKLSENTDFLAPGVSSFTDSNQQESITKREENQEQPRNYSHHQLNRSSKHSQGLRDQGNQEQDPNISNGEEEEEKEPGEVGTHNDNQERKTELPREHANSKQEEDNTQSDDILEESDQPTQVSKMQEDEFDQGNQEQEDNSNAEMEEENASNVNKHIQETEWQSQEGKTGLEAISNHKETEEKTVSEALLMEPTDDGNTTPRNHGVDDDGDDDGDDGGTDGPRHSASDDYFIPSQAFLEAERAQSIAYHLKIEEQREKVHENENIGTTEPGEHQEAKKAENSSNEEETSSEGNMRVHAVDSCMSFQCKRGHICKADQQGKPHCVCQDPVTCPPTKPLDQVCGTDNQTYASSCHLFATKCRLEGTKKGHQLQLDYFGACKSIPTCTDFEVIQFPLRMRDWLKNILMQLYEANSEHAGYLNEKQRNKVKKIYLDEKRLLAGDHPIDLLLRDFKKNYHMYVYPVHWQFSELDQHPMDRVLTHSELAPLRASLVPMEHCITRFFEECDPNKDKHITLKEWGHCFGIKEEDIDENLLF

SEQ ID NO: 1973 - protein, 417 aa, Homo sapiens
MLALLVLVTVALASAHHGGEHFEGEKVFRVNVEDENHINIIRELASTTQIDFWKPDSVTQIKPHSTVDFRVKAEDTVTVENVLKQNELQYKVLISNLRNVVEAQFDSRVRATGHSYEKYNKWETIEAWTQQVATENPALISRSVIGTTFEGRAIYLLKVGKAGQNKPAIFMDCGFHAREWISPAFCQWFVREAVRTYGREIQVTELLDKLDFYVLPVLNIDGYIYTWTKSRFWRKTRSTHTGSSCIGTDPNRNFDAGWCEIGASRNPCDETYCGPAAESEKETKALADFIRNKLSSIKAYLTIHSYSQMMIYPYSYAYKLGENNAELNALAKATVKELASLHGTKYTYGPGATTIYPAAGGSDDWAYDQGIRYSFTFELRDTGRYGFLLPESQIRATCEETFLAIKYVASYVLEHLY

SEQ ID NO: 1974 - protein, 195 aa, Homo sapiens
MAVSQGDGTLCFVLLLCCWQETELRPRTVIPGSPTEIPFSSKQEDMSELLDEILVQEILDLNKTTPSEMPSTASTLSTPLHAGIDENYQAGGSENYHELLENLQFSPGIEVKISNDEANANANLHGDPSENYRGPQVSPGSEKSVSSKEKNSKNTQYENLSILDQILQNIGRSSGNIFHKEQQRTSAQRRSQGSQ

SEQ ID NO: 1975 - protein, 777 aa, Homo sapiens
MNANKDERLKARSQDFHLFPALMMLSMTMLFLPVTGTLKQNIPRLKLTYKDLLLSNSCIPFLGSSEGLDFQTLLLDEERGRLLLGAKDHIFLLSLVDLNKNFKKIYWPAAKERVELCKLAGKDANTECANFIRVLQPYNKTHIYVCGTGAFHPICGYIDLGVYKEDIIFKLDTHNLESGRLKCPFDPQQPFASVMTDEYLYSGTASDFLGKDTAFTRSLGPTHDHHYIRTDISEHYWLNGAKFIGTFFIPDTYNPDDDKIYFFFRESSQEGSTSDKTILSRVGRVCKNDVGGQRSLINKWTTFLKARLICSIPGSDGADTYFDELQDIYLLPTRDERNPVVYGVFTTTSSIFKGSAVCVYSMADIRAVFNGPYAHKESADHRWVQYDGRIPYPRPGTCPSKTYDPLIKSTRDFPDDVISFIKRHSVMYKSVYPVAGGPTFKRINVDYRLTQIVVDHVIAEDGQYDVMFLGTDIGTVLKVVSISKEKWNMEEVVLEELQIFKHSSIILNMELSLKQQQLYIGSRDGLVQLSLHRCDTYGKACADCCLARDPYCAWDGNACSRYAPTSKRRARRQDVKYGDPITQCWDIEDSISHETADEKVIFGIEFNSTFLECIPKSQQATIKWYIQRSGDEHREELKPDERIIKTEYGLLIRSLQKKDSGMYYCKAQEHTFIHTIVKLTLNVIENEQMENTQRAEHEEGKVKDLLAESRLRYKDYIQILSSPNFSLDQYCEQMWHREKRRQRNKGGPKWKHMQEMKKKRNRRHHRDLDELPRAVAT

SEQ ID NO: 1976 - protein, 443 aa, Homo sapiens
MQPSEMVMNPKQVFLSVLIFGVAGLLLFMYLQVWIEEQHTGRVEKRREQKVTSGWGPVKYLRPVPRIMSTEKIQEHITNQNPKFHMPEDVREKKENLLLNSERSTRLLTKTSHSQGGDQALSKSTGSPTEKLIEKRQGAKTVFNKFSNMNWPVDIHPLNKSLVKDNKWKKTEETQEKRRSFLQEFCKKYGGVSHHQSHLFHTVSRIYVEDKHKILYCEVPKAGCSNWKRILMVLNGLASSAYNISHNAVHYGKHLKKLDSFDLKGIYTRLNTYTKAVFVRDPMERLVSAFRDKFEHPNSYYHPVFGKAIIKKYRPNACEEALINGSGVKFKEFIHYLLDSHRPVGMDIHWEKVSKLCYPCLINYDFVGKFETLEEDANYFLQMIGAPKELKFPNFKDRHSSDERTNAQVVRQYLKDLTRTERQLIYDFYYLDYLMFNYTTPFL

SEQ ID NO: 1977 - protein, 1075 aa, Homo sapiens
MRGGKCNMLSSLGCLLLCGSITLALGNAQKLPKGKRPNLKVHINTTSDSILLKFLRPSPNVKLEGLLLGYGSNVSPNQYFPLPAEGKFTEAIVDAEPKYLIVVRPAPPPSQKKSCSGKTRSRKPLQLVVGTLTPSSVFLSWGFLINPHHDWTLPSHCPNDRFYTIRYREKDKEKKWIFQICPATETIVENLKPNTVYEFGVKDNVEGGIWSKIFNHKTVVGSKKVNGKIQSTYDQDHTVPAYVPRKLIPITIIKQVIQNVTHKDSAKSPEKAPLGGVILVHLIIPGLNETTVKLPASLMFEISDALKTQLAKNETLALPAESKTPEVEKISARPTTVTPETVPRSTKPTTSSALDVSETTLASSEKPWIVPTAKISEDSKVLQPQTATYDVFSSPTTSDEPEISDSYTATSDRILDSIPPKTSRTLEQPRATLAPSETPFVPQKLEIFTSPEMQPTTPAPQQTTSIPSTPKRRPRPKPPRTKPERTTSAGTITPKISKSPEPTWTTPAPGKTQFISLKPKIPLSPEVTHTKPAPKQTPRAPPKPKTSPRPRIPQTQPVPKVPQRVTAKPKTSPSPEVSYTTPAPKDVLLPHKPYPEVSQSEPAPLETRGIPFIPMISPSPSQEELQTTLEETDQSTQEPFTTKIPRTTELAKTTQAPHRFYTTVRPRTSDKPHIRPGVKQAPRPSGADRNVSVDSTHPTKKPGTRRPPLPPRPTHPRRKPLPPNNVTGKPGSAGIISSGPITTPPLRSTPRPTGTPLERIETDIKQPTVPASGEELENITDFSSSPTRETDPLGKPRFKGPHVRYIQKPDNSPCSITDSVKRFPKEEATEGNATSPPQNPPTNLTVVTVEGCPSFVILDWEKPLNDTVTEYEVISRENGSFSGKNKSIQMTNQTFSTVENLKPNTSYEFQVKPKNPLGEGPVSNTVAFSTESADPRVSEPVSAGRDAIWTERPFNSDSYSECKGKQYVKRTWYKKFVGVQLCNSLRYKIYLSDSLTGKFYNIGDQRGHGEDHCQFVDSFLDGRTGQQLTSDQLPIKEGYFRAVRQEPVQFGEIGGHTQINYVQWYECGTTIPGKW

SEQ ID NO: 1978 - protein, 160 aa, Homo sapiens [sequence omitted]

SEQ ID NO: 1979 - protein, 259 aa, Homo sapiens
MAALMRSKDSSCCLLLLAAVLMVESSQIGSSRAKLNSIKSSLGGETPGQAANRSAGMYQGLAFGGSKKGKNLGQAYPCSSDKECEVGRYCHSPHQGSSACMVCRRKKKRCHRDGMCCPSTRCNNGICIPVTESILTPHIPALDGTRHRDRNHGHYSNHDLGWQNLGRPHTKMSHIKGHEGDPCLRSSDCIEGFCCARHFWTKICKPVLHQGEVCTKQRKKGSHGLEIFQRCDCAKGLSCKVWKDATYSSKARLHVCQKI

SEQ ID NO: 1980 - protein, 1009 aa, Homo sapiens
MGQLCWLPLLAPLLLLRPPGVQSAGPIRAFVVPHSHMDVGWVYTVQESMRAYAANVYTSVVEELARGQQRRFIAVEQEFFRLWWDGVASDQQKYQVRQLLEEGRLEFVIGGQVMHDEAVTHLDDQILQLTEGHGFLYETFGIRPQFSWHVDPFGASATTPTLFALAGFNAHLGSRIDYDLKAAMQEARGLQFVWRGSPSLSERQEIFTHIMDQYSYCTPSHIPFSNRSGFYWNGVAVFPKPPQDGVYPNMSEPVTPANINLYAEALVANVKQRAAWFRTPHVLWPWGCDKQFFNASVQFANMDPLLDHINSHAAELGVSVQYATLGDYFRALHALNVTWRVRDHHDFLPYSTEPFQAWTGFYTSRSSLKGLARRASALLYAGESMFTRYLWPAPRGHLDPTWALQQLQQLRWAVSEVQHHDAITGTESPKVRDMYATHLASGMLGMRKLMASIVLDELQPQAPMAASSDAGPAGHFASVYNPLAWTVTTIVTLTVGFPGVRVTDEAGHPVPSQIQNSTETPSAYDLLILTTIPGLSYRHYNIRPTAGAQEGTQEPAATVASTLQFGRRLRRRTSHAGRYLVPVANDCYIVLLDQDTNLMHSIWERQSNRTVRVTQEFLEYHVNGDVKQGPISDNYLFTPGKAAVPAWEAVEMEIVAGQLVTEIRQYFYRNMTAQNYTYAIRSRLTHVPQGHDGELLCHRIEQEYQAGPLELNREAVLRTSTNLNSQQVIYSDNNGYQMQRRPYVSYVNNSIARNYYPMVQSAFMEDGKSRLVLLSERAHGISSQGNGQVEVMLHRRLWNNFDWDLGYNLTLNDTSVVHPVLWLLLGSWSLTTALRQRSALALQHRPVVLFGDLAGTAPKLPGPQQQEAVTLPPNLHLQILSIPGWRYSSNHTEHSQNLRKGHRGEAQADLRRVLLRLYHLYEVGEDPVLSQPVTVNLEAVLQALGSVVAVEERSLTGTWDLSMLHRWSWRTGPGRHRGDTTSPSRPPGGPIITVHPKEIRTFFIHFQQQ

SEQ ID NO: 1981 - protein, 480 aa, Homo sapiens
MLFRNRFLLLLALAALLAFVSLSLQFFHLIPVSTPKNGMSSKSRKRIMPDPVTEPPVTDPVYEALLYCNIPSVAERSMEGHAPHHFKLVSVHVFIRHGDRYPLYVIPKTKRPEIDCTLVANRKPYHPKLEAFISHMSKGSGASFESPLNSLPLYPNHPLCEMGELTQTGVVQHLQNGQLLRDIYLKKHKLLPNDWSADQLYLETTGKSRTLQSGLALLYGFLPDFDWKKIYFRHQPSALFCSGSCYCPVRNQYLEKEQRRQYLLRLKNSQLEKTYGEMAKIVDVPTKQLRAANPIDSMLCHFCHNVSFPCTRNGCVDMEHFKVIKTHQIEDERERREKKLYFGYSLLGAHPILNQTIGRMQRATEGRKEELFALYSAHDVTLSPVLSALGLSEARFPRFAARLIFELWQDREKPSEHSVRILYNGVDVTFHTSFCQDHHKRSPKPMCPLENLVRFVKRDMFVALGGSGTNYYDACHREGF

SEQ ID NO: 1982 - protein, 446 aa, Homo sapiens
MLHPETSPGRGHLLAVLLALLGTAWAEVWPPQLQEQAPMAGALNRKESFLLLSLHNRLRSWVQPPAADMRRLDWSDSLAQLAQARAALCGTPTPSLASGLWRTLQVGWNMQLLPAGLVSFVEVVSLWFAEGQRYSHAAGECARNATCTHYTQLVWATSSQLGCGRHLCSAGQAAIEAFVCAYSPRGNWEVNGKTIVPYKKGAWCSLCTASVSGCFKAWDHAGGLCEVPRNPCRMSCQNHGRLNISTCHCHCPPGYTGRYCQVRCSLQCVHGRFREEECSCVCDIGYGGAQCATKVHFPFHTCDLRIDGDCFMVSSEADTYYRARMKCQRKGGVLAQIKSQKVQDILAFYLGRLETTNEVIDSDFETRNFWIGLTYKTAKDSFRWATGEHQAFTSFAFGQPDNHGFGNCVELQASAAFNWNDQRCKTRNRYICQFAQEHISRWGPGS

SEQ ID NO: 1983 - protein, 770 aa, Homo sapiens
MVESAGRAGQKRPGFLEGGLLLLLLLVTAALVALGVLYADRRGKQLPRLASRLCFLQEERTFVKRKPRGIPEAQEVSEVCTTPGCVIAAARILQNMDPTTEPCDDFYQFACGGWLRRHVIPETNSRYSIFDVLRDELEVILKAVLENSTAKDRPAVEKARTLYRSCMNQSVIEKRGSQPLLDILEVVGGWPVAMDRWNETVGLEWELERQLALMNSQFNRRVLIDLFIWNDDQNSSRHIIYIDQPTLGMPSREYYFNGGSNRKVREAYLQFMVSVATLLREDANLPRDSCLVQEDMVQVLELETQLAKATVPQEERHDVIALYHRMGLEELQSQFGLKGFNWTLFIQTVLSSVKIKLLPDEEVVVYGIPYLQNLENIIDTYSARTIQNYLVWRLVLDRIGSLSQRFKDTRVNYRKALFGTMVEEVRWRECVGYVNSNMENAVGSLYVREAFPGDSKSMVRELIDKVRTVFVETLDELGWMDEESKKKAQEKAMSIREQIGHPDYILEEMNRRLDEEYSNLNFSEDLYFENSLQNLKVGAQRSLRKLREKVDPNLWIIGAAVVNAFYSPNRNQIVFPAGILQPPFFSKEQPQALNFGGIGMVIGHEITHGFDDNGRNFDKNGNMMDWWSNFSTQHFREQSECMIYQYGNYSWDLADEQNVNGFNTLGENIADNGGVRQAYKAYLKWMAEGGKDQQLPGLDLTHEQLFFINYAQVWCGSYRPEFAIQSIKTDVHSPLKYRVLGSLQNLAAFADTFHCARGTPMHPKERCRVW

SEQ ID NO: 1984 - protein, 438 aa, Homo sapiens
MSKRDKAGKDTARGKGKDISKYGSVQKSFADRGLPKPPKEKLLQVEKLRKESGKGSFLQPTAKPRALAQQQAVIRGFTYYKAGKQEVTEAVADNTLQGTSWLEQLPPKVEGRSNSAEPNSAEQDEAEPRSSERVDLASGTPTSIPATTTTATTTPTPTTSLLPTEPPSGPEVSSQGREASCEGTLRAVDPPVRHHSYGRHEGAWMKDPAARDDRIYVTNYYYGNSLVEFRNLENFKQGRWSNMYKLPYNWIGTGHVVYQGAFYYNRAFTKNIIKYDLRQRFVASWALLPDVVYEDTTPWKWRGHSDIDFAVDESGLWVIYPAVDDRDEAQPEVIVLSRLDPGDLSVHRETTWKTRLRRNSYGNCFLVCGILYAVDTYNQQEGQVAYAFDTHTGTDARPQLPFLNEHAYTTQIDYNPKERVLYAWDNGHQLTYTLHFVV

SEQ ID NO: 1985 - protein, 1189 aa, Homo sapiens
MPGLLNWITGAALPLTASDVTSCVSGYALGLTASLTYGNLEAQPFQGLFVYPLDECTTVIGFEAVIADRVVTVQIKDKAKLESGHFDASHVRSPTVTGNILQDGVSIAPHSCTPGKVTLDEDLERILFVANLGTIAPMENVTIFISTSSELPTLPSGAVRVLLPAVCAPTVPQFCTKSTGTSNQQAQGKDRHCFGAWAPGSWNKLCLATLLNTEVSNPMEYEFNFQLEIRGPCLLAGVESPTHEIRADAAPSARSAKSIIITLANKHTFDRPVEILIHPSEPHMPHVLIEKGDMTLGEFDQHLKGRTDFIKGMKKKSRAERKTEIIRKRLHKDIPHHSVIMLNFCPDLQSVQPCLRKAHGEFIFLIDRSSSMSGISMHRVKDAMLVALKSLMPACLFNIIGFGSTFKSLFPSSQTYSEDSLAMACDDIQRMKADMGGTNILSPLKWVIRQPVHRGHPRLLFVITDGAVNNTGKVLELVRNHAFSTRCYSFGIGPNVCHRLVKGLASVSEGSAELLMEGERLQPKMVKSLKKAMAPVLSDVTVEWIFPETTEVLVSPVSASSLFPGERLVGYGIVCDASLHISNPRSDKRRRYSMLHSQESGSSVFYHSQDDGPGLEGGDCAKNSGAPFILGQAKNARLASGDSTTKHDLNLSQRRRAYSTNQITNHKPLPRATMASDPMPAAKRYPLRKARLQDLTNQTSLDVQRWQIDLQPLLNSGQDLNQGPKLRGPGARRPSLLPQGCQPFLPWGQETQAWSPVRERTSDSRSPGDLEPSHHPSAFETETSSDWDPPAESQERASPSRPATPAPVLGKALVKGLHDSQRLQWEVSFELGTPGPERGGAQDADLWSETFHHLAARAIIRDFEQLAEREGEIEQGSNRRYQVSALHTSKACNIISKYTAFVPVDVSKSRYLPTVVEYPNSAALRMLGSRALAQQWRGTSSGFGRPQTMLGEDSAPGNGPQRSLATNTLSSMKASENLFGSWLNLNKSRLLTRAAKGFLSKPLIKAVESTSGNQSFDYIPLVSLQLASGAFLLNEAFCEATHIPMEKLKWTSPFTCHRVSLTTRPSESKTPSPQLCTSSPPRHPSCDSFSLEPLAKGKLGLEPRAVVEHTGKLWATVVGLAWLEHSSASYFTEWELVAAKANSWLEQQEVPEGRTQGTLKAAARQLFVLLRHWDENLEFNMLCYNPNYV

SEQ ID NO: 1986 - protein, 447 aa, Homo sapiens
MPHVLIEKGDMTLGEFDQHLKGRTDFIKGMKKKSRAERKTEIIRKRLHKDIPHHSVIMLNFCPDLQSVQPCLRKAHGEFIFLIDRSSSMSGISMHRVKDAMLVALKSLMPACLFNIIGFGSTFKSLFPSSQTYSEDSLAMACDDIQRMKADMGGTNILSPLKWVIRQPVHRGHPRLLFVITDGAVNNTGKVLELVRNHAFSTRCYSFGIGPNVCHRLVKGLASVSEGSAELLMEGERLQPKMVKSLKKAMAPVLSDVTVEWIFPETTEVLVSPVSASSLFPGERLVGYGIVCDASLHISNPRSDKRRRYSMLHSQESGSSVFYHSQDDGPGLEGGDCAKNSGAPFILGQAKNARLASGDSTTKHDLNLSQRRRAYSTNQITNHKPLPRATMASDPMPAAKRYPLRKARLQDLTNQTSLDVQRWQIDLQAFICLTSEDTFQIRTPTGQ

SEQ ID NO: 1987 - protein, 241 aa, Homo sapiens
MWTVRTEGGHFPLHSPTFSWRNVAFLLLLSLALEWTSAMLTKKIKHKPGLCPKERLTCTTELPDSCNTDFDCKEYQKCCFFACQKKCMDPFQEPCMLPVRHGNCNHEAQRWHFDFKNYRCTPFKYRGCEGNANNFLNEDACRTACMLIVKDGQCPLFPFTERKECPPSCHSDIDCPQTDKCCESRCGFVCARAWTVKKGFCPRKPLLCTKIDKPKCLQDEECPLVEKCCSHCGLKCMDPRR

SEQ ID NO: 1988 - protein, 357 aa, Homo sapiens
MRPPPALALAGLCLLALPAAAASYFGLTGREVLTPFPGLGTAAAPAQGGAHLKQCDLLKLSRRQKQLCRREPGLAETLRDAAHLGLLECQFQFRHERWNCSLEGRMGLLKRGFKETAFLYAVSSAALTHTLARACSAGRMERCTCDDSPGLESRQAWQWGVCGDNLKYSTKFLSNFLGSKRGNKDLRARADAHNTHVGIKAVKSGLRTTCKCHGVSGSCAVRTCWKQLSPFRETGQVLKLRYDSAVKVSSATNEALGRLELWAPARQGSLTKGLAPRSGDLVYMEDSPSFCRPSKYSPGTAGRVCSREASCSSLCCGRGYDTQSRLVAFSCHCQVQWCCYVECQQCVQEELVYTCKH

SEQ ID NO: 1989 - protein, 269 aa, Homo sapiens
MVRCLGPALLLLLLLGSASSVGGNRCVDAAEACTADARCQRLRSEYVAQCLGRAAQGGCPRARCRRALRRFFARGPPALTHALLFCPCAGPACAERRRQTFVPSCAFSGPGPAPPSCLEPLNFCERSRVCRPRLLAFQVSCTPAPSAPDGCLLDQGARCLRAYAGLVGTAVTPNYVDNVSARVAPWCDCGASGNRREDCEAFRGLFTRNRCLDGAIQAFASGWPPVLLDQLNPQGDPEHSLLQVSSTGRALERRSLLSILPVLALPALL

SEQ ID NO: 1990 - protein, 575 aa, Homo sapiens
MSGNWVHPGQILIWAIWVLAAPTKGPSAEGPQRNTRLGWIQGKQVTVLGSPVPVNVFLGVPFAAPPLGSLRFTNPQPASPWDNLREATSYPNLCLQNSEWLLLDQHMLKVHYPKFGVSEDCLYLNIYAPAHADTGSKLPVLVWFPGGAFKTGSASIFDGSALAAYEDVLVVVVQYRLGIFGFFTTWDQHAPGNWAFKDQVAALSWVQKNIEFFGGDPSSVTIFGESAGAISVSSLILSPMAKGLFHKAIMESGVAIIPYLEAHDYEKSEDLQVVAHFCGNNASDSEALLRCLRTKPSKELLTLSQKTKSFTRVVDGAFFPNEPLDLLSQKAFKAIPSIIGVNNHECGFLLPMKEAPEILSGSNKSLALHLIQNILHIPPQYLHLVANEYFHDKHSLTEIRDSLLDLLGDVFFVVPALITARYHRDAGAPVYFYEFRHRPQCFEDTKPAFVKADHADEVRFVFGGAFLKGDIVMFEGATEEEKLLSRKMMKYWATFARTGNPNGNDLSLWPAYNLTEQYLQLDLNMSLGQRLKEPRVDFWTSTIPLILSASDMLHSPLSSLTFLSLLQPFFFFCAP

SEQ ID NO: 1991 - protein, 341 aa, Homo sapiens
MGTLPWLLAFFILGLQAWDTPTIVSRKEWGARPLACRALLTLPVAYIITDQLPGMQCQQQSVCSQMLRGLQSHSVYTIGWCDVAYNFLVGDDGRVYEGVGWNIQGLHTQGYNNISLGIAFFGNKIGSSPSPAALSAAEGLISYAIQKGHLSPRYIQPLLLKEETCLDPQHPVMPRKVCPNIIKRSAWEARETHCPKMNLPAKYVIIIHTAGTSCTVSTDCQTVVRNIQSFHMDTRNFCDIGYHFLVGQDGGVYEGVGWHIQGSHTYGFNDIALGIAFIGYFVEKPPNAAALEAAQDLIQCAVVEGYLTPNYLLMGHSDVVNILSPGQALYNIISTWPHFKH

SEQ ID NO: 1992 - protein, 298 aa, Homo sapiens
MGIVCAQCSFILLLSIIRARPPPFLFCPLSSQRTESPYKPVHLGLGPTDKVAAIAMARIIDLVPWDDGSTHVYASPAILLPMERQRNQLAGVKQQLYHPALPTLRHMDRDTVKACLPDEHCQSTTYCRKDEFDNAHFTLLGVPNKPLQCLDITATGQKLRNRYHEGKLAPIAPGINRVDWPCFTRAIEDWSHFVSSAGEFKLPCLRKRAEGLSGYAVRYLKPDVTQTWRQEALCGAWAGRPCSPDSPRPYPCCPPQYCLSQNPSLDRYGQKPLPFDSLNTFRSFGSSYSRVNYLTPWH

SEQ ID NO: 1993 - protein, 1932 aa, Homo sapiens
MAPGALRGGCEQRAPGGGARTAALGPWPWPSPGPAPSPGAAPPRSRKMSGALLWPLLPLLLLLLSARDGVRAAQPQAPGYLIAAPSVFRAGVEEVISVTIFNSPREVTVQAQLVAQGEPVVQSQGAILDKGTIKLKVPTGLRGQALLKVWGRGWQAEEGPLFHNQTSVTVDGRGASVFIQTDKPVYRPQHRVLISIFTVSPNLRPVNEKLEAYILDPRGSRMIEWRHLKPFCCGITNMSFPLSDQPVLGEWFIFVEMQGHAYNKSFEVQKYVLPKFELLIDPPRYIQDLDACETGTVRARYTFGKPVAGALMINMTVNGVGYYSHEVGRPVLRTTKILGSRDFDICVRDMIPADVPEHFRGRVSIWAMVTSVDGSQQVAFDDSTPVQRQLVDIRYSKDTRKQFKPGLAYVGKVELSYPDGSPAEGVTVQIKAELTPKDNIYTSEVVSQRGLVGFEIPSIPTSAQHVWLETKVMALNGKPVGAQYLPSYLSLGSWYSPSQCYLQLQPPSHPLQVGEEAYFSVKSTCPCNFTLYYEVAARGNIVLSGQQPAHTTQQRSKRAAPALEKPIRLTHLSETEPPPAPEAEVDVCVTSLHLAVTPSMVPLGRLLVFYVRENGEGVADSLQFAVETFFENQVSVTYSANETQPGEVVDLRIRAARGSCVCVAAVDKSVYLLRSGFRLTPAQVFQELEDYDVSDSFGVSREDGPFWWAGLTAQRRRRSSVFPWPWGITKDSGFAFTETGLVVMTDRVSLNHRQDGGLYTDEAVPAFQPHTGSLVAVAPSRHPPRTEKRKRTFFPETWIWHCLNISDPSGEGTLSVKVPDSITSWVGEAVALSTSQGLGIAEPSLLKTFKPFFVDFMLPALIIRGEQVKIPLSVYNYMGTCAEVYMKLSVPKGIQFVGHPGKRHVTKKMCVAPGEAEPIWVVLSFSDLGLNNITAKALAYGDTNCCRDGRSSKHPEENHADRRVPIGVDHVRRSVMVEAEGVPRAYTYSAFFCPSERVHISTPNKYEFQYVQRPLRLTRFDVAVRAHNDARVALSSGPQDTAGMIEIVLGGHQNTRSWISTSKMGEPVASAHTAKILSWDEFRTFWISWRGGLIQVGHGPEPSNESVIVAWTLPRPPEVQFIGFSTGWGSMGEFRIWRKMEVDESYSEAFTLGVPHGAIPGSERATASIIGDVMGPTLNHLNNLLRLPFGCGEQNMIHFAPNVFVLKYLQKTQQLSPEVERETTDYLVQGYQRQLTYKRQDGSYSAFGERDASGSMWLTAFVLKSFAQARSFIFVDPRELAAAKSWIIQQQQADGSFLAVGRVLNKDIQGGIHGTVPLTAYVVVALLETGTASEEERGSTDKARHFLESAAPLAMDPYSCALTTYALTLLRSPAAPEALRKLRSLAIMRDGVTHWSLSNSWDVDKGTFLSFSDRVSQSVVSAEVEMTAYALLTYTLLGDVAAALPVVKWLSQQRNALGGFSSTQDTCVALQALAEYAILSYAGGINLTVSLASTNLDYQETFELHRTNQKVLQTAAIPSLPTGLFVSAKGDGCCLMQIDVTYNVPDPVAKPAFQLLVSLQEPEAQGRPPPMPASAAEGSRGDWPPADDDDPAADQHHQEYKVMLEVCTRWLHAGSSNMAVLEVPLLSGFRADIESLEQLLLDKHMGMKRYEVAGRRVLFYFDEIPSRCLTCVRFRALRECVVGRTSALPVSVYDYYEPAFEATRFYNVSTHSPLARELCAGPACNEVERAPARGPGWFPGESGPAVAPEEGAAIARCGCDHDCGAQGNPVCGSDGVVYASACRLREAACRQAAPLEPAPPSCCALEQRLPASSSSTYGDDLASVAPGPLQQDVKLNGAGLEVEDSDPEPEGEAEDRVTAGPRPPVSSGNLESSTQSASPFHRWGQTPAPQRHSGRVVGAHRPGLLSPVFVYSPAFQSGGEEGLWMSNTCTLR

SEQ ID NO: 1994 - protein, 402 aa, Homo sapiens
MVCARAALGPGALWAAAWGVLLLTAPAGAQRGRKKVVHVLEGESGSVVVQTAPGQVVSHRGGTIVLPCRYHYEAAAHGHDGVRLKWTKVVDPLAFTDVFVALGPQHRAFGSYRGRAELQGDGPGDASLVLRNVTLQDYGRYECEVTNELEDDAGMVKLDLEGVVFPYHPRGGRYKLTFAEAQRACAEQDGILASAEQLHAAWRDGLDWCNAGWLRDGSVQYPVNRPREPCGGLGGTGSAGGGGDANGGLRNYGYRHNAEERYDAFCFTSNLPGRVFFLKPLRPVPFSGAARACAARGAAVAKVGQLFAAWKLQLLDRCTAGWLADGSARYPIVNPRARCGGRRPGVRSLGFPDATRRLFGVYCYRAPGAPDPAPGGWGWGWAGGGGWAGGARDPAAWTPLHV

SEQ ID NO: 1995 - protein, 579 aa, Homo sapiens
MSALRPLLLLLLPLCPGPGPGPGSEAKVTRSCAETRQVLGARGYSLNLIPPALISGEHLRVCPQEYTCCSSETEQRLIRETEATFRGLVEDSGSFLVHTLAARHRKFDEFFLEMLSVAQHSLTQLFSHSYGRLYAQHALIFNGLFSRLRDFYGESGEGLDDTLADFWAQLLERVFPLLHPQYSFPPDYLLCLSRLASSTDGSLQPFGDSPRRLRLQITRTLVAARAFVQGLETGRNVVSEALKVPVSEGCSQALMRLIGCPLCRGVPSLMPCQGFCLNVVRGCLSSRGLEPDWGNYLDGLLILADKLQGPFSFELTAESIGVKISEGLMYLQENSAKVSAQVFQECGPPDPVPARNRRAPPPREEAGRLWSMVTEEERPTTAAGTNLHRLVWELRERLARMRGFWARLSLTVCGDSRMAADASLEAAPCWTGAGRGRYLPPVVGGSPAEQVNNPELKVDASGPDVPTRRRRLQLRAATARMKTAALGHDLDGQDADEDASGSGGGQQYADDWMAGAVAPPARPPRPPYPPRRDGSGGKGGGGSARYNQGRSRSGGASIGFHTQTILILSLSALALLGPR

SEQ ID NO: 1996 - protein, 165 aa, Homo sapiens
MALLALLLVVALPRVWTDANLTARQRDPEDSQRTDEGDNRVWCHVCERENTFECQNPRRCKWTEPYCVIAAVKIFPRFFMVAKQCSAGCAAMERPKPEEKRFLLEEPMPFFYLKCCKIRYCNLEGPPINSSVFKEYAGSMGESCGGLWLAILLLLASIAAGLSLS

SEQ ID NO: 1997 - protein, 310 aa, Homo sapiens
MNGLSLSELCCLFCCPPCPGRIAAKLAFLPPEATYSLVPEPEPGPGGAGAAPLGTLRASSGAPGRWKLHLTERADFQYSQRELDTIEVFPTKSARGNRVSCMYVRCVPGARYTVLFSHGNAVDLGQMSSFYIGLGSRLHCNIFSYDYSGYGASSGRPSERNLYADIDAAWQALRTRYGISPDSIILYGQSIGTVPTVDLASRYECAAVVLHSPLTSGMRVAFPDTKKTYCFDAFPNIEKVSKITSPVLIIHGTEDEVIDFSHGLALYERCPKAVEPLWVEGAGHNDIELYSQYLERLRRFISQELPSQRA

SEQ ID NO: 1998 - protein, 634 aa, Homo sapiens
MAQGVLWILLGLLLWSDPGTASLPLLMDSVIQALAELEQKVPAAKTRHTASAWLMSAPNSGPHNRLYHFLLGAWSLNATELDPCPLSPELLGLTKEVARHDVREGKEYGVVLAPDGSTVAVEPLLAGLEAGLQGRRVINLPLDSMAAPWETGDTFPDVVAIAPDVRATSSPGLRDGSPDVTTADIGANTPDATKGCPDVQASLPDAKAKSPPTMVDSLLAVTLAGNLGLTFLRGSQTQSHPDLGTEGCWDQLSAPRTFTLLDPKASLLTMAFLNGALDGVILGDYLSRTPEPRPSLSHLLSQYYGAGVARDPGFRSNFRRQNGAALTSASILAQQVWGTLVLLQRLEPVHLQLQCMSQEQLAQVAANATKEFTEAFLGCPAIHPRCRWGAAPYRGRPKLLQLPLGFLYVHHTYVPAPPCTDFTRCAANMRSMQRYHQDTQGWGDIGYSFVVGSDGYVYEGRGWHWVGAHTLGHNSRGFGVAIVGNYTAALPTEAALRTVRDTLPSCAVRAGLLRPDYALLGHRQLVRTDCPGDALFDLLRTWPHFTAVSLRSLHYTARRPSVYTSSTRPLPPACNSCARTASARPPTSRRHVYSGNLGPAFAGHSAGNIPDPVTSAYAASAQPQTQPACPFPSS

SEQ ID NO: 1999 - protein, 258 aa, Homo sapiens
MLVLYGHSTQDLPETNARVVGGTEAGRNSWPSQISLQYRSGGSRYHTCGGTLIRQNWVMTAAHCVDYQKTFRVVAGDHNLSQNDGTEQYVSVQKIVVHPYWNSDNVAAGYDIALLRLAQSVTLNSYVQLGVLPQEGAILANNSPCYITGWGKTKTNGQLAQTLQQAYLPSVDYAICSSSSYWGSTVKNTMVCAGGDGVRSGCQGDSGGPLHCLVNGKYSVHGVTSFVSSRGCNVSRKPTVFTQVSAYISWINNVIASN

SEQ ID NO: 2000 - protein, 330 aa, Homo sapiens
MAARRSQRRRGRRGEPGTALLVPLALGLGLALACLGLLLAVVSLGSRASLSAQEPAQEELVAEEDQDPSELNPQTEESQDPAPFLNRLVRPRRSAPKGRKTRARRAIAAHYEVHPRPGQDGAQAGVDGTVSGWEEARINSSSPLRYNRQIGEFIVTRAGLYYLYCQSSDALEAWENGERSRKRRAVLTQKQKKQHSVLHLVPINATSKDDSDVTEVMWQPALRRGRGLQAQGYGVRIQDAGVYLLYSQVLFQDVTFTMGQVVSREGQGRQETLFRCIRSMPSHPDRAYNSCYSAGVFHLHQGDILSVIIPRARAKLNLSPHGTFLGFVKL

SEQ ID NO: 2001 - protein, 750 aa, Homo sapiens
MAKPRLLVLYFALIVVPAWVSSIVLTGTSEPPDAQTVAPAEDETLQNEADNQENVLSQLLGDYDKVKAMSEGSDCQCKCVVRPLGRDACQRINAGASRKEDFYTVETITSGSSCKCACVAPPSALNPCEGDFRLQKLREADSQDLKLSTIIDMLEGAFYGLDLLKLHSVTTKLVGRVDKLEEEVSKNLTKENEQIKEDMEEIRTEMNKRGKENCSENILDSMPDIRSALQRDAAAAYAHPEYEERFLQEETVSQQINSIELLQTRPLALPEVVKSQRPLQRQVHLRGRPASQPTVIRGITYYKAKVSEEENDIEEQQDEFFSGDNGVDLLIEDQLLRHNGLMTSVTRRPAATRQGHSTAVTSDLNARTAPWSSALPQPSTSDPSIANHASVGPTLQTTSVSPDPTRESVLQPSPQVPATTVAHTATQQPAAPAPPAVSPREALMEAMHTVPVPPTTVRTDSLGKDAPAGWGTTPASPTLSPEEEDDIRNVIGRCKDTLSTITGPTTQNTYGRNEGAWMKDPLAKDERIYVTNYYYGNTLVEFRNLENFKQGRWSNSYKLPYSWIGTGHVVYNGAFYYNRAFTRNIIKYDLKQRYVAAWAMLHDVAYEEATPWRWQGHSDVDFAVDENGLWLIYPALDDEGFSQEVIVLSKLNAADLSTQKETTWRTGLRRNFYGNCFVICGVLYAVDSYNQRNANISYAFDTHTNTQIVPRLLFENEYSYTTQIDYNPKDRLLYAWDNGHQVTYHVIFAY

SEQ ID NO: 2002 - protein, 225 aa, Homo sapiens
MKLGCVLMAWALYLSLGVLWVAQMLLAAGCHAELFPAPILRAVPSAEPQAGSPMTLSCQTKLPLQRSAARLLFSFYKDGRIVQSRGLSSEFQIPTASEDHSGSYWCEAATEDNQVWKQSPQLEIRVQGASSSAAPPTLNPAPQKSAAPGTAPEEAPGPLPPPPTPSSEDPGFSSPLGMPDPHLYHQMGLLLKHMQDVRVLLGHLLMELRELSGHRKPGTTKATAE

SEQ ID NO: 2003 - protein, 296 aa, Homo sapiens
MSRQEPKMFVLLYVTSFAICASGQPRGNQLKGENYSPRYICSIPGLPGPPGPPGANGSPGPHGRIGLPGRDGRDGRKGEKGEKGTAGLRGKTGPLGLAGEKGDQGETGKKGPIGPEGEKGEVGPIGPPGPKGDRGEQGDPGLPGVCRCGSIVLKSAFSVGITTSYPEERLPIIFNKVLFNEGEHYNPATGKFICAFPGIYYFSYDITLANKHLAIGLVHNGQYRIKTFDANTGNHDVASGSTVIYLQPEDEVWLEIFFTDQNGLFSDPGWADSLFSGFLLYVDTDYLDSISEDDEL

SEQ ID NO: 2004 - protein, 424 aa, Homo sapiens
MGSLVLTLCALFCLAAYLVSGSPIMNLEQSPLEEDMSLFGDVFSEQDGVDFNTLLQSMKDEFLKTLNLSDIPTQDSAKVDPPEYMLELYNKFATDRTSMPSANIIRSFKNEDLFSQPVSFNGLRKYPLLFNVSIPHHEEVIMAELRLYTLVQRDRMIYDGVDRKITIFEVLESKGDNEGERNMLVLVSGEIYGTNSEWETFDVTDAIRRWQKSGSSTHQLEVHIESKHDEAEDASSGRLEIDTSAQNKHNPLLIVFSDDQSSDKERKEELNEMISHEQLPELDNLGLDSFSSGPGEEALLQMRSNIIYDSTARIRRNAKGNYCKRTPLYIDFKEIGWDSWIIAPPGYEAYECRGVCNYPLAEHLTPTKHAIIQALVHLKNSQKASKACCVPTKLEPISILYLDKGVVTYKFKYEGMAVSECGCR

SEQ ID NO: 2005 - protein, 126 aa, Homo sapiens
MHLSQLLACALLLTLLSLRPSEAKPGAPPKVPRTPPAEELAEPQAAGGGQKKGDKAPGGGGANLKGDRSRLLRDLRVDTKSRAAWARLLQEHPNARKYKGANKKGLSKGCFGLKLDRIGSMSGLGC

SEQ ID NO: 2006 - protein, 140 aa, Homo sapiens
MRSPRMRVCAKSVLLSHWLFLAYVLMVCCKLMSASSQHLRGHAGHHQIKQGTCEVVAVHRCCNKNRIEERSQTVKCSCFPGQVAGTTRAQPSCVEASIVIQKWWCHMNPCLEGEDCKVLPDYSGWSCSSGNKVKTTKVTR

SEQ ID NO: 2007 - protein, 443 aa, Homo sapiens
MLMLFVFGVLLHEVSLSGQNEAPPNTHSIPGEPLYNYASIRLPEEHIPFFLHNNRHIATVCRKDSLCPYKKHLEKLKYCWGYEKSCKPEFRFGYPVCSYVDMGWTDTLESAEDIFWKQADFGYARERLEEMHVLCQPKETSDSSLVCSRYLQYCRATNLYLDLRNIKRNHDRFKEDFFQSGEIGGHCKLDIRTLTSEGQRKSPLQSWFAELQSYTQLNFRPIEDAKCDIVIEKPTYFMKLDAGVNMYHHFCDFINLYITQHVNNSFSTDVYIVMWDTDGKIRVTILARSTEYRKILNQNELVNALKTVSTFEVQIVDYKYRELGFLDQLRITHNTDIFIGMHGAGLTHLLFLPDWAAVFELYNCEDERCYLDLARLRGVHYITWRRQNKVFPQDKGHHPTLGEHPKFTNYSFDVEEFMYLVLQAADHVLQHPKWPFKKKHDEL

SEQ ID NO: 2008 - protein, 111 aa, Homo sapiens
MGPSSCLLLILIPLLQLINPGSTQCSLDSVMDKKIKDVLNSLEYSPSPISKKLSCASVKSQGRPSSCPAGMAVTGCACGYGCGSWDVQLETTCHCQCSVVDWTTARCCHLT

SEQ ID NO: 2009 - protein, 654 aa, Homo sapiens
MAPKKLSCLRSLLLPLSLTLLLPQADTRSFVVDRGHDRFLLDGAPFRYVSGSLHYFRVPRVLWADRLLKMRWSGLNAIQFYVPWNYHEPQPGVYNFNGSRDLIAFLNEAALANLLVILRPGPYICAEWEMGGLPSWLLRKPEIHLRTSDPDFLAAVDSWFKVLLPKIYPWLYHNGGNIISIQVENEYGSYRACDFSYMRHLAGLFRALLGEKILLFTTDGPEGLKCGSLRGLYTTVDFGPADNMTKIFTLLRKYEPHGPLVNSEYYTGWLDYWGQNHSTRSVSAVTKGLENMLKLGASVNMYMFHGGTNFGYWNGADKKGRFLPITTSYDYDAPISEAGDPTPKLFALRDVISKFQEVPLGPLPPPSPKMMLGPVTLHLVGHLLAFLDLLCPRGPIHSILPMTFEAVKQDHGFMLYRTYMTHTIFEPTPFWVPNNGVHDRAYVMVDGVFQGVVERNMRDKLFLTGKLGSKLDILVENMGRLSFGSNSSDFKGLLKPPILGQTILTQWMMFPLKIDNLVKWWFPLQLPKWPYPQAPSGPTFYSKTFPILGSVGDTFLYLPGWTKGQVWINGFNLGRYWTKQGPQQTLYVPRFLLFPRGALNKITLLELEDVPLQPQVQFLDKPILNSTSTLHRTHINSLSADTLSASEPMELSGH

SEQ ID NO: 2010 - protein, 833 aa, Homo sapiens
MNMEIGHPHEGKDDLGDKRVIMGTKFPMELGIRVGLGKEDSRCGESPVVSNKCEGRMAPPETKFPLSKGLEMGLERQNISRTVMQRGSLGVDSVSASQGTKPSLLPGRMGLENESLLAGYTHERIIQPPLGRVCGSSQAAGSRRAPLASGPEGVEELVGKPAFVMEPRQEMEKESTCVLMKPNTEIKLPVEVDIGLTQAEGPDETKNTEPQMGLVIEPPQCQFAQQHEQRKEAGNIESGVEPPDRIRPIYSGKFFDRTPCWPSAGKVIPVGYRVATCLTEKLPRLITPPEAKKYFNFRYPPAGVERVFYGRANDPQIAPYLTHGIRSKISVLANTLINPQPITTFQQKIKDKKESIYLSNRRAPLGKSHDQAPGLPKGMDTTNTTFGTAVIKEYSAKDVVNPPKSYEEVFKEGNEGHDLYVVSHNDYYAGEAKNRKYNPSSFHRCSVYGVPTPHFNDGRAMAKSLYWLHELQMKRGAKFVSKRADDFKEKFQHKLGRVLDPIAETMNVPPDCTFGACLRPEEYGVGDLIHNRLPDEYLRGKDRQRALIAAVRHHLKKVNYQKFDTLLAAFRHYDKKGDGMIDKDELQEACDQANLSLDDKLLDQLFDYCDVDNDGFINYLEFANFLNWKDKMLLKEYEERVIIKGRKPDCVNPTEANVEEPEQTLLIKPEDIVLKEAGSTEKTLRTLLRPSDKVSNYYKTTSSEINAIVGAIPSTCYPICGVPTIRSDIPAPRIRRISDRTNYGEEGSAYSLLYPTIFARKGVFERDFFKTRSKEEIAEILCNIGVKLSDEEFENVWNLASKKHHRGEVCVENIRNVLDELRHADRIKCKTLM

SEQ ID NO: 2011 - protein, 667 aa, Homo sapiens
MGSSRLAALLLPLLLIVIDLSDSAGIGFRHLPHWNTRCPLASHTDDSFTGSSAYIPCRTWWALFSTKPWCVRVWHCSRCLCQHLLSGGSGLQRGLFHLLVQKSKKSSTFKFYRRHKMPAPAQRKLLPRRHLSEKSHHISIPSPDISHKGLRSKRTQPSDPETWESLPRLDSQRHGGPEFSFDLLPEARAIRVTISSGPEVSVRLCHQWALECEELSSPYDVQKIVSGGHTVELPYEFLLPCLCIEASYLQEDTVRRKKCPFQSWPEAYGSDFWKSVHFTDYSQHTQMVMALTLRCPLKLEAALCQRHDWHTLCKDLPNATARESDGWYVLEKVDLHPQLCFKFSFGNSSHVECPHQTGSLTSWNVSMDTQAQQLILHFSSRMHATFSAAWSLPGLGQDTLVPPVYTVSQARGSSPVSLDLIIPFLRPGCCVLVWRSDVQFAWKHLLCPDVSYRHLGLLILALLALLTLLGVVLALTCRRPQSGPGPARPVLLLHAADSEAQRRLVGALAELLRAALGGGRDVIVDLWEGRHVARVGPLPWLWAARTRVAREQGTVLLLWSGADLRPVSGPDPRAAPLLALLHAAPRPLLLLAYFSRLCAKGDIPPPLRALPRYRLLRDLPRLLRALDARPFAEATSWGRLGARQRRQSRLELCSRLEREAARLADLG

SEQ ID NO: 2012 - protein, 202 aa, Homo sapiens
MELWGAYLLLCLFSLLTQVTTEPPTQKPKKIVNAKKDVVNTKMFEELKSRLDTLAQEVALLKEQQALQTVCLKGTKVHMKCFLAFTQTKTFHEASEDCISRGGTLGTPQTGSENDALYEYLRQSVGNEAEIWLGLNDMAAEGTWVDMTGARIAYKNWETEITAQPDGGKTENCAVLSGAANGKWFDKRCRDQLPYICQFGIV

SEQ ID NO: 2013 - protein, 612 aa, Homo sapiens
MLEGLGSPASPRAAASASVAGSSGPAACSPPSSSAPRSPESPAPRRGGVRASVPQKLAEMLSSQYGLIVFVAGLLLLLAWAVHAAGVSKSDLLCFLTALMLLQLLWMLWYVGRSSAHRRLFRLKDTHAGAGWLRGSITLFAVITVILGCLKIGYFIGFSECLSATEGVFPVTHSVHTLLQVYFLWGHAKDIIQSFKTLERFGVIHSVFTNLLLWANGVLNESKHQLNEHKERLITLGFGNITTVLDDHTPQCNCTPPTLCTAISHGIYYLYPFNIEYQILASTMLYVLWKNIGRKVDSHQHQKMQFKSDGVMVGAVLGLTVLAATIAVVVVYLIHIGRSKTKSESALIMFYLYAITLLMLMGAAGLAGIRIYRIDEKSLDESKNPARKLDSDLLVGTASGSWLISWGSILAILCAEGHPRYTWYNLPYSILAIVEKYIQNLFIFESIHREPEKLSEDIQTLRVVTVCNGNTMPLASSCPKSGGVARDVAPQGKDMPPAANGNVCMRESHDKEEEKQEESSWGGSPSPVRLPRFLQGNAKRKVLRNIAAFLFLCNISLWIPPAFGCRPEYDNGLEEIVFGFEPWIIVVNLAMPFSIFYRMHAAASLFEVYCKI

SEQ ID NO: 2014 - protein, 261 aa, Homo sapiens
MELLQVTILFLLPSICSSNSTGVLEAANNSLVVTTTKPSITTPNTESLQKNVVTPTTGTTPKGTITNELLKMSLMSTATFLTSKDEGLKATTTDVRKNDSIISNVTVTSVTLPNAVSTLQSSKPKTETQSSIKTTEIPGSVLQPDASPSKTGTLTSIPVTIPENTSQSQVIGTEGGKNASTSATSRSYSSIILPVVIALIVITLSVFVLVGLYRMCWKADPGTPENGNDQPQSDKESVKLLTVKTISHESGEHSAQGKTKN

SEQ ID NO: 2015 - protein, 2135 aa, Homo sapiens
MPALGPALLQALWAGWVLTLQPLPPTAFTPNGTYLQHLARDPTSGTLYLGATNFLFQLSPGLQLEATVSTGPVLDSRDCLPPVMPDECPQAQPTNNPNQLLLVSPGALVVCGSVHQGVCEQRRLGQLEQLLLRPERPGDTQYVAANDPAVSTVGLVAQGLAGEPLLFVGRGYTSRGVGGGIPPITTRALWPPDPQAAFSYEETAKLAVGRLSEYSHHFVSAFARGASAYFLFLRRDLQAQSRAFRAYVSRVCLRDQHYYSYVELPLACEGGRYGLIQAAAVATSREVAHGEVLFAAFSSAAPPTVGRPPSAAAGASGASALCAFPLDEVDRLANRTRDACYTREGRAEDGTEVAYIEYDVNSDCAQLPVDTLDAYPCGSDHTPSPMASRVPLEATPILEWPGIQLTAVAVTMEDGHTIAFLGDSQGQLHRVYLGPGSDGHPYSTQSIQQGSAVSRDLTFDGTFEHLYVMTQSTLLKVPVASCAQHLDCASCLAHRDPYCGWCVLLGRCSRRSECSRGQGPEQWLWSFQPELGCLQVAAMSPANISREETREVFLSVPDLPPLWPGESYSCHFGEHQSPALLTGSGVMCPSPDPSEAPVLPRGADYVSVSVELRFGAVVIAKTSLSFYDCVAVTELRPSAQCQACVSSRWGCNWCVWQHLCTHKASCDAGPMVASHQSPLVSPDPPARGGPSPSPPTAPKALATPAPDTLPVEPGAPSTATASDISPGASPSLLSPWGPWAGSGSISSPGSTGSPLHEEPSPPSPQNGPGTAVPAPTDFRPSATPEDLLASPLSPSEVAAVPPADPGPEALHPTVPLDLPPATVPATTFPGAMGSVKPALDWLTREGGELPEADEWTGGDAPAFSTSTLLSGDGDSAELEGPPAPLILPSSLDYQYDTPGLWELEEATLGASSCPCVESVQGSTLMPVHVEREIRLLGRNLHLFQDGPGDNECVMELEGLEVVVEARVECEPPPDTQCHVTCQQHQLSYEALQPELRVGLFLRRAGRLRVDSAEGLHVVLYDCSVGHGDCSRCQTAMPQYGCVWCEGERPRCVTREACGEAEAVATQCPAPLIHSVEPLTGPVDGGTRVTIRGSNLGQHVQDVLGMVTVAGVPCAVDAQEYEVSSSLVCITGASGEEVAGATAVEVPGRGRGVSEHDFAYQDPKVHSIFPARGPRAGGTRLTLNGSKLLTGRLEDIRVVVGDQPCHLLPEQQSEQLRCETSPRPTPATLPVAVWFGATERRLQRGQFKYTLDPNITSAGPTKSFLSGGREICVRGQNLDVVQTPRIRVTVVSRMLQPSQGLGRRRRVVPETACSLGPSCSSQQFEEPCHVNSSQLITCRTPALPGLPEDPWVRVEFILDNLVFDFATLNPTPFSYEADPTLQPLNPEDPTMPFRHKPGSVFSVEGENLDLAMSKEEVVAMIGDGPCVVKTLTRHHLYCEPPVEQPLPRHHALREAPDSLPEFTVQMGNLRFSLGHVQYDGESPGAFPVAAQVGLGVGTSLLALGVIIIVLMYRRKSKQALRDYKKVQIQLENLESSVRDRCKKEFTDLMTEMTDLTSDLLGSGIPFLDYKVYAERIFFPGHRESPLHRDLGVPESRRPTVEQGLGQLSNLLNSKLFLTKFIHTLESQRTFSARDRAYVASLLTVALHGKLEYFTDILRTLLSDLVAQYVAKNPKLMLRRTETVVEKLLTNWMSICLYTFVRDSVGEPLYMLFRGIKHQVDKGPVDSVTGKAKYTLNDNRLLREDVEYRPLTLNALLAVGPGAGEAQGVPVKVLDCDTISQAKEKMLDQLYKGVPLTQRPDPRTLDVEWRSGVAGHLILSDEDVTSEVQGLWRRLNTLQHYKVPDGATVALVPCLTKHVLRENQDYVPGERTPMLEDVDEGGIRPWHLVKPSDEPEPPRPRRGSLRGGERERAKAIPEIYLTRLLSMKGTLQKFVDDLFQVILSTSRPVPLAVKYFFDLLDEQAQQHGISDQDTIHIWKTNSLPLRFWINIIKNPQFVFDVQTSDNMDAVLLVIAQTFMDACTLADHKLGRDSPINKLLYARDIPRYKRMVERYYADIRQTVPASDQEMNSVLAELSWNYSGDLGARVALHELYKYINKYYDQIITALEEDGTAQKMQLGYRLQQIAAAVENKVTDL

SEQ ID NO: 2016 - protein, 98 aa, Homo sapiens
MKLMVLVFTIGLTLLLGVQAMPANRLSCYRKILKDHNCHNLPEGVADLTQIDVNVQDHFWDGKGCEMICYCNFSELLCCPKDVFFGPKISFVIPCNNQ

SEQ ID NO: 2017 - protein, 480 aa, Homo sapiens
MKRSVAVWLLVGLSLGVPQFGKGDICDPNPCENGGICLPGLADGSFSCECPDGFTDPNCSSVVEVASDEEEPTSAGPCTPNPCHNGGTCEISEAYRGDTFIGYVCKCPRGFNGIHCQHNINECEVEPCKNGGICTDLVANYSCECPGEFMGRNCQYKCSGPLGIEGGIISNQQITASSTHRALFGLQKWYPYYARLNKKGLINAWTAAENDRWPWIQINLQRKMRVTGVITQGAKRIGSPEYIKSYKIAYSNDGKTWAMYKVKGTNEDMVFRGNIDNNTPYANSFTPPIKAQYVRLYPQVCRRHCTLRMELLGCELSGCSEPLGMKSGHIQDYQITASSIFRTLNMDMFTWEPRKARLDKQGKVNAWTSGHNDQSQWLQVDLLVPTKVTGIITQGAKDFGHVQFVGSYKLAYSNDGEHWTVYQDEKQRKDKVFQGNFDNDTHRKNVIDPPIYARHIRILPWSWYGRITLRSELLGCTEEE

SEQ ID NO: 2018 - protein, 440 aa, Homo sapiens
MAVKLGTLLLALALGLAQPASARRKLLVFLLDGFRSDYISDEALESLPGFKEIVSRGVKVDYLTPDFPSLSYPNYYTLMTGRHCEVHQMIGNYMWDPTTNKSFDIGVNKDSLMPLWWNGSEPLWVTLTKAKRKVYMYYWPGCEVEILGVRPTYCLEYKNVPTDINFANAVSDALDSFKSGRADLAAIYHERIDVEGHHYGPASPQRKDALKAVDTVLKYMTKWIQERGLQDRLNVIIFSDHGMTDIFWMDKVIELNKYISLNDLQQVKDRGPVVSLWPAPGKHSEIYNKLSTVEHMTVYEKEAIPSRFYYKKGKFVSPLTLVADEGWFITENREMLPFWMNSTGRREGWQRGWHGYDNELMDMRGIFLAFGPDFKSNFRAAPIRSVDVYNVMCNVVGITPLPNNGSWSRVMCMLKGRASTAPPVWPSHCALALILLFLLA

SEQ ID NO: 2019 - protein, 116 aa, Homo sapiens
MESSRVRLLPLLGAALLLMLPLLGTRAQEDAELQPRALDIYSAVDDASHEKELIEALQEVLKKLKSKRVPIYEKKYGQVPMCDAGEQCAVRKGARIGKLCDCPRGTSCNSFLLKCL

SEQ ID NO: 2020 - protein, 454 aa, Homo sapiens
MARPNKFLLWFCCFAWLCFPISLGSQASGGEAQIAASAELESGAMPWSLLQHIDERDRAGLLPALFKVLSVGRGGSPRLQPDSRALHYMKKLYKTYATKEGIPKSNRSHLYNTVRLFTPCTRHKQAPGDQVTGILPSVELLFNLDRITTVEHLLKSVLLYNINNSVSFSSAVKCVCNLMIKEPKSSSRTLGRAPYSFTFNSQFEFGKKHKWIQIDVTSLLQPLVASNKRSIHMSINFTCMKDQLEHPSAQNGLFNMTLVSPSLILYLNDTSAQAYHSWYSLHYKRRPSQGPDQERSLSAYPVGEEAAEDGRSSHHRHRRGQETVSSELKKPLGPASFNLSEYFRQFLLPQNECELHDFRLSFSQLKWDNWIVAPHRYNPRYCKGDCPRAVGHRYGSPVHTMVQNIIYEKLDSSVPRPSCVPAKYSPLSVLTIEPDGSIAYKEYEDMIATKCTCR

SEQ ID NO: 2021 - protein, 77 aa, Homo sapiens
MWHLKLCAVLMIFLLLLGQIDGSPIPEVSSAKRRPRRMTPFWRGVSLRPIGASCRDDSECITRLCRKRRCSLSVAQE

SEQ ID NO: 2022 - protein, 303 aa, Homo sapiens
MSEPQPDLEPPQHGLYMLFLLVLVFFLMGLVGFMICHVLKKKGYRCRTSRGSEPDDAQLQPPEDDDMNEDTVERIVRCIIQNEANAEALKEMLGDSEGEGTVQLSSVDATSSLQDGAPSHHHTVHLGSAAPCLHCSRSKRPPLVRQGRSKEGKSRPRTGETTVFSVGRFRVTHIEKRYGLHEHRDGSPTDRSWGSGGGQDPGGGQGSGGGQPKAGMPAMERLPPERPQPQVLASPPVQNGGLRDSSLTPRALEGNPRASAEPTLRAGGRGPSPGLPTQEANGQPSKPDTSDHQVSLPQGAGSM

SEQ ID NO: 2023 - protein, 264 aa, Homo sapiens
MRTLWMALCALSRLWPGAQAGCAEAGRCCPGRDPACFARGWRLDRVYGTCFCDQACRFTGDCCFDYDRACPARPCFVGEWSPWSGCADQCKPTTRVRRRSVQQEPQNGGAPCPPLEERAGCLEYSTPQGQDCGHTYVPAFITTSAFNKERTRQATSPHWSTHTEDAGYCMEFKTESLTPHCALENWPLTRWMQYLREGYTVCVDCQPPAMNSVSLRCSGDGLDSDGNQTLHWQAIGNPRCQGTWKKVRRVDQCSCPAVHSFIFI

SEQ ID NO: 2024 - protein, 103 aa, Homo sapiens
MRQRLLPSVTSLLLVALLFPGSSQARHVNHSATEALGELRERAPGQGTNGFQLLRHAVKRDLLPPRTPPYQVHISHREARGPSFRICVDFLGPRWARGCSTGN

SEQ ID NO: 2025 - protein, 1288 aa, Homo sapiens
MASVAWAVLKVLLLLPTQTWSPVGAGNPPDCDAPLASALPRSSFSSSSELSSSHGPGFSRLNRRDGAGGWTPLVSNKYQWLQIDLGERMEVTAVATQGGYGSSDWVTSYLLMFSDGGRNWKQYRREESIWGFPGNTNADSVVHYRLQPPFEARFLRFLPLAWNPRGRIGMRIEVYGCAYKSEVVYFDGQSALLYRLDKKPLKPIRDVISLKFKAMQSNGILLHREGQHGNHITLELIKGKLVFFLNSGNAKLPSTIAPVTLTLGSLLDDQHWHSVLIELLDTQVNFTVDKHTHHFQAKGDSSYLDLNFEISFGGIPTPGRSRAFRRKSFHGCLENLYYNGVDVTELAKKHKPQILMMGNVSFSCPQPQTVPVTFLSSRSYLALPGNSGEDKVSVTFQFRTWNRAGHLLFGELRRGSGSFVLFLKDGKLKLSLFQPGQSPRNVTAGAGLNDGQWHSVSFSAKWSHMNVVVDDDTAVQPLVAVLIDSGDTYYFGGCLDNSSGSGCKSPLGGFQGCLRLITIGDKAVDPILVQQGALGSFRDLQIDSCGITDRCLPSYCEHGGECSQSWDTFSCDCLGTGYTGETCHSSLYEQSCEAHKHRGNPSGLYYIDADGSGPLGPFLVYCNMTADAAWTVVQHGGPDAVTLRGAPSGHPRSAVSFAYAAGAGQLRSAVNLAERCEQRLALRCGTARRPDSRDGTPLSWWVGRTNETHTSWGGSLPDAQKCTCGLEGNCIDSQYYCNCDAGRNEWTSDTIVLSQKEHLPVTQIVMTDAGRPHSEAAYTLGPLLCRGDQSFWNSASFNTETSYLHFPAFHGELTADVCFFFKTTVSSGVFMENLGITDFIRIELRAPTEVTFSFDVGNGPCEVTVQSPTPFNDNQWHHVRAERNVKGASLQVDQLPQKMQPAPADGHVRLQLNSQLFIGGTATRQRGFLGCIRSLQLNGVALDLEERATVTPGVEPGCAGHCSTYGHLCRNGGRCREKRRGVTCDCAFSAYDGPFCSNEISAYFATGSSMTYHFQEHYTLSENSSSLVSSLHRDVTLTREMITLSFRTTRTPSLLLYVSSFYEEYLSVILANNGSLQIRYKLDRHQNPDAFTFDFKNMADGQLHQVKINREEAVVMVEVNQSTKKQVILSSGTEFNAVKSLILGKVLEAAGADPDTRRAATSGFTGCLSAVRFGRAAPLKAALRPSGPSRVTVRGHVAPMARCAAGAASGSPARELAPRLAGGAGRSGPADEGEPLVNADRRDSAVIGGVIAVVIFILLCITAIAIRIYQQRKLRKENESKVSKKEEC

SEQ ID NO: 2026 - protein, 122 aa, Homo sapiens
MVPGPPESVVRFFLWFCFLLPPTRKASCDPRDLKSCNRPCVWSRLLKPNSSLSNLETAYFPQILRFLRPWYFSRSHLNYHQKAPARWEWLYSIYRKGTKAQRRNVLRSPCAPPQPSWPCSVI

SEQ ID NO: 2027 - protein, 628 aa, Homo sapiens
MAPSADPGMSRMLPFLLLLWFLPITEGSQRAEPMFTAVTNSVLPPDYDSNPTQLNYGVAVTDVDHDGDFEIVVAGYNGPNLVLKYDRAQKRLVNIAVDERSSPYYALRDRQGNAIGVTACDIDGDGREEIYFLNTNNAFSGVATYTDKLFKFRNNRWEDILSDEVNVARGVASLFAGRSVACVDRKGSGRYSIYIANYAYGNVGPDALIEMDPEASDLSRGILALRDVAAEAGVSKYTGGRGVSVGPILSSSASDIFCDNENGPNFLFHNRGDGTFVDAAASAGVDDPHQHGRGVALADFNRDGKVDIVYGNWNGPHRLYLQMSTHGKVRFRDIASPKFSMPSPVRTVITADFDNDQELEIFFNNIAYRSSSANRLFRVIRREHGDPLIEELNPGDALEPEGRGTGGVVTDFDGDGMLDLILSHGESMAQPLSVFRGNQGFNNNWLRVVPRTRFGAFARGAKVVLYTKKSGAHLRIIDGGSGYLCEMEPVAHFGLGKDEASSVEVTWPDGKMVSRNVASGEMNSVLEILYPRDEDTLQDPAPLETPMNASSSHSCALETSPYVSTPMEATGAGPTRSAVGATSPTRMAQPAWGLSASHRAPAPPPPPLLLPLPLLLPLLELPLLHRSS

SEQ ID NO: 2028 - protein, 335 aa, Homo sapiens
MQGQGRRRGTCKDIFCSKMASYLYGVLFAVGLCAPIYCVSPANAPSAYPRPSSTKSTPASQVYSLNTDFAFRLYRRLVLETPSQNIFFSPARINSHVKKKTQGKVVDIIQGLDLLTAMVLVNHIFFKAKWEKPFHPEYTRKNFPFLVGEQVTVHVPMMHQKEQFAFGVDTELNCFVLQMDYKGDAVAFFVLPSKGKMRQLEQALSARTLRKWSHSLQKRWIEVFIPRFSISASYNLETILPKMGIQNVFDKNADFSGIAKRDSLQVSKATHKAVLDVSEEGTEATAATTTKFIVRSKDGPSYFTVSFNRTFLMMITNKATDGILFLGKVENPTKS

SEQ ID NO: 2029 - protein, 255 aa, Homo sapiens
MVLLLVILIPVLVSSAGTSAHYEMLGTCRMVCDPYGGTKAPSTAATPDRGLMQSLPTFIQGPKGEAGRPGKAGPRGPPGEPGPPGPMGPPGEKGEPGRQGLPGPPGAPGLNAAGAISAATYSTVPKIAFYAGLKRQHEGYEVLKFDDVVTNLGNHYDPTTGKFTCSIPGIYFFTYHVLMRGGDGTSMWADLCKNNQVRASAIAQDADQNYDYASNSVVLHLEPGDEVYIKLDGGKAHGGNNNKYSTFSGFIIYAD

SEQ ID NO: 2030 - protein, 538 aa, Homo sapiens
MSFSATILFSPPSGSEARCCCCACKSETNGGNTGSQGGNPPPSTPITVTGHGLAVQSSEQLLHVIYQRVDKAVGLAEAALGLARANNELLKRLQEEVGDLRQGKVSIPDEDGESRAHSSPPEEPGPLKESPGEAFKALSAVEEECDSVGSGVQVVIEELRQLGAASVGPGPLGFPATQRDMRLPGCTLAASEAAPLLNPLVDDYVASEGAVQRVLVPAYAKQLSPATQLAIQRATPETGPENGTKLPPPRPEDMLNAAAALDSALEESGPGSTGELRHSLGLTVSPCRTRGSGQKNSRRKRDLVLSKLVHNVHNHITNDKRFNGSESIKSSWNISVVKFLLEKLKQELVTSPHNYTDKELKGACVAYFLTKRREYRNSLNPFKGLKEKEEKKLRSRRYRLFANRSSIMRHFGPEDQRLWNDVTEELMSDEEDSLNEPGVWVARPPRFRAQRLTELCYHLDANSKHGTKANRVYGPPSDRLPSAEAQLLPPELYNPNFQEEEDEGGDENAPGSPSFDQPHKTCCPDLNSFIEIKVEKDE

SEQ ID NO: 2031 - protein, 950 aa, Homo sapiens
MLLLGILTLAFAGRTAGGSEPEREVVVPIRLDPDINGRRYYWRGPEDSGDQGLIFQITAFQEDFYLHLTPDAQFLAPAFSTEHLGVPLQGLTGGSSDLRRCFYSGDVNAEPDSFAAVSLCGGLRGAFGYRGAEYVISPLPNASAPAAQRNSQGAHLLQRRGVPGGPSGDPTSRCGVASGWNPAILRALDPYKPRRAGFGESRSRRRSGRAKRFVSIPRYVETLVVADESMVKFHGADLEHYLLTLLATAARLYRHPSILNPINIVVVKVLLLRDRDSGPKVTGNAALTLRNFCAWQKKLNKVSDKHPEYWDTAILFTRQDLCGATTCDTLGMADVGTMCDPKRSCSVIEDDGLPSAFTTAHELGHVFNMPHDNVKVCEEVFGKLRANHMMSPTLIQIDRANPWSACSAAIITDFLDSGHGDCLLDQPSKPISLPEDLPGASYTLSQQCELAFGVGSKPCPYMQYCTKLWCTGKAKGQMVCQTRHFPWADGTSCGEGKLCLKGACVERHNLNKHRVDGSWAKWDPYGPCSRTCGGGVQLARRQCTNPTPANGGKYCEGVRVKYRSCNLEPCPSSASGKSFREEQCEAFNGYNHSTNRLTLAVAWVPKYSGVSPRDKCKLICRANGTGYFYVLAPKVVDGTLCSPDSTSVCVQGKCIKAGCDGNLGSKKRFDKCGVCGGDNKSCKKVTGLFTKPMHGYNFVVAIPAGASSIDIRQRGYKGLIGDDNYLALKNSQGKYLLNGHFVVSAVERDLVVKGSLLRYSGTGTAVESLQASRPILEPLTVEVLSVGKMTPPRVRYSFYLPKEPREDKSSHPKDPRGPSVLHNSVLSLSNQVEQPDDRPPARWVAGSWGPCSASCGSGLQKRAVDCRGSAGQRTVPACDAAHRPVETQACGEPCPTWELSAWSPCSKSCGRGFQRRSLKCVGHGGRLLARDQCNLHRKPQELDFCVLRPC

SEQ ID NO: 2032 - protein, 506 aa, Homo sapiens
MTSKPHSDWIPYSVLDDEGRNLRQQKLDRQRALLEQKQKKKRQEPLMVQANADGRPRSRRARQSEEQAPLVESYLSSSGSTSYQVQEADSLASVQLGATRPTAPASAKRTKAAATAGGQGGAARKEKKGKHKGTSGPAALAEDKSEAQGPVQILTVGQSDHAQDAGETAAGGGERPSGQDLRATMQRKGISSSMSFDEDEEDEEENSSSSSQLNSNTRPSSATSRKSVREAASAPSPTAPEQPVDVEVQDLEEFALRPAPQGITIKCRITRDKKGMDRGMYPTYFLHLDREDGKKVFLLAGRKRKKSKTSNYLISVDPTDLSRGGDSYIGKLRSNLMGTKFTVYDNGVNPQKASSSTLESGTLRQELAAVCYETNVLGFKGPRKMSVIVPGMNMVHERVSIRPRNEHETLLARWQNKNTESIIELQNKTPVWNDDTQSYVLNFHGRVTQASVKNFQIIHGNDPDYIVMQFGRVAEDVFTMDYNYPLCALQAFAIALSSFDSKLACE

SEQ ID NO: 2033 - protein, 197 aa, Homo sapiens
MAKNGLVICILVITLLLDQTTSHTSRLKARKHSKRRVRDKDGDLKTQIEKLWTEVNALKEIQALQTVCLRGTKVHKKCYLASEGLKHFHEANEDCISKGGILVIPRNSDEINALQDYGKRSLPGVNDFWLGINDMVTEGKFVDVNGIAISFLNWDRAQPNGGKRENCVLFSQSAQGKWSDEACRSSKRYICEFTIPQ

SEQ ID NO: 2034 - protein, 807 aa, Homo sapiens
KKKRKISLLPKPPKHDAPLTIEFPNLDKTSAEWLKVNGLKAKKLSLYQVLAPNAFSPVEEFVPILQKTVSSTIHEKAMIQFEWHDGTVKNIHVDPPFLYKYQQQLSRAMRMYERRIEWLSLASRRIWGTVCEKRVVVLLDISATNSMYIIHIQHSLRLLLEEQLSNKDCFNLIAFGSTIESWRPEMVPVSHNNLQSAWRWALNLRCRGSRNVLSALRKAVEVDFKDKDKHQSQGIYLFTGGIPDQDMPTLSAYMAEACGGCDLQLNVCLFYVGEPKMDTTPPARYASHTDTAAAYKEVTRAAGGRFHWFGDTGIYESDDINSIMSEMEKALNYSQKCAFLMASLKNHSGKVLGSSALPKEKPKTLQLRSQPKKLCPPRPTVPLGARMSIKDDPDREKSPPLKSLKWRPLSSRVGISPAAAQPTKEGMMELRRKTKSREAETSLLLFYTEKGNDVGSVYKKYPQGRGLRRTSSSIDLPRKDTVCSSQEWVAKYGLKKLKLEISRCMGPNCTHQKSGQRSASAKHCSIFPSVEIHGVVRHIQWTPREMEVYIRHLEKVLRRYVQRLQWLLSGSRRLFGTVLESKVCILLDTSGSMGPYLQQVKTELVLLIWEQLRKCCDSFNLLSFAESFQSWQDTLVETTDAACHEAMQWVTHLQAQGSTSILQALLKAFSFHDLEGLYLLTDGKPDTSCSLVLNEVQKLREKRDVKVHTISLNCSDRAAVEFLRKLASFTGGRYHCPVGEDTLSKIHSLLTKGFINEKDPTLPPFEGDDLRILAQEITKARSFLWQAQSFRSQLQKKNDAEPKVTLS

SEQ ID NO: 2035 - protein, 212 aa, Homo sapiens
MVSRMVSTMLSGLLFWLASGWTPAFAYSPRTPDRVSEADIQRLLHGVMEQLGIARPRVEYPAHQAMNLVGPQSIEGGAHEGLQHLGPFGNIPNIVAELTGDNIPKDFSEDQGYPDPPNPCPVGKTADDGCLENTPDTAEFSREFQLHQHLFDPEHDYPGLGKWNKKLLYEKMKGGERRKRRSVNPYLQGQRLDNVVAKKSVPHFSDEDKDPE

SEQ ID NO: 2036 - protein, 507 aa, Homo sapiens
MCTKTIPVLWGCFLLWNLYVSSSQTIYPGIKARITQRALDYGVQAGMKMIEQMLKEKKLPDLSGSESLEFLKVDYVNYNFSNIKISAFSFPNTSLAFVPGVGIKALTNHGTANISTDWGFESPLFQDTGGADLFLSGVYFTGIIILTRNDFGHPTLKLQDCYAQLSHAHVSFSGELSVLYNSFAEPMEKPILKNLNEMLCPIIASEVKALNANLSTLEVLTKIDNYTLLDYSLISSPEITENYLDLNLKGVFYPLENLTDPPFSPVPFVLPERSNSMLYIGIAEYFFKSASFAHFTAGVFNVTLSTEEISNHFVQNSQGLGNVLSRIAEIYILSQPFMVRIMATEPPIINLQPGNFTLDIPASIMMLTQPKNSTVETIVSMDFVASTSVGLVILGQRLVCSLSLNRFRLALPESNRSNIEVLRFENILSSILHFGVLPLANAKLQQGFPLSNPHKFLFVNSDIEVLEGFLLISTDLKYETSSKQQPSFHVWEGLNLISRQWRGKSAP

SEQ ID NO: 2037 - protein, 157 aa, Homo sapiens
MHPWLGSALGFPKCRGIHLCACGNGWTPGETLSQNKTEITKNKVTCWRPHGCEPNTGLGYQGSHTSKYTLLPWNLLKTKPLPPSHGKEGGKEAKVPSGDNSGRGEVPRAQEGQAACGRAASGDSQEGMRRGYEERATAQRPAVRSAETTAHGTWIYP

SEQ ID NO: 2038 - protein, 70 aa, Homo sapiens
MSNNMAKIAEARKTVEQLKLEVNIDRMKVSQAAAELLAFCETHAKDDPLVTPVPAAENPFRDKRLFCVLL

SEQ ID NO: 2039 - protein, 214 aa, Homo sapiens
MALLLCLVCLTAALAHGCLHCHSNFSKKFSFYRHHVNFKSWWVGDIPVSGALLTDWSDDTMKELHLAIPAKITREKLDQVATAVYQMMDQLYQGKMYFPGYFPNELRNIFREQVHLIQNAIIESRIDCQHRCGIFQYETISCNNCTDSHVACFGYNCESSAQWKSAVQGLLNYINNWHKQDTSMSLVSPALRCLEPPHLANLTLEDAAECLKQH

SEQ ID NO: 2040 - protein, 152 aa, Homo sapiens
MSPHLTALLGLVLCLAQTIHTQEGALPRPSISAEPGTVISPGSHVTFMCRGPVGVQTFRLEREDRAKYKDSYNVFRLGPSESEARFHIDSVSEGNAGLYRCLYYKPPGWSEHSDFLELLVKESSGGPDSPDTEPGSSAGTVPGTEASGFDAP

SEQ ID NO: 2041 - protein, 299 aa, Homo sapiens
MAPWSHPSAQLQPVGGDAVSPALMVLLCLGLSLGPRTHVQAGNLSKATLWAEPGSVISRGNSVTIRCQGTLEAQEYRLVKEGSPEPWDTQNPLEPKNKARFSIPSMTEHHAGRYRCYYYSPAGWSEPSDPLELVVTGFYNKPTLSALPSPVVTSGENVTLQCGSRLRFDRFILTEEGDHKLSWTLDSQLTPSGQFQALFPVGPVTPSHRWMLRCYGSRRHILQVWSEPSDLLEIPVSGAADNLSPSQNKSDSGTASHLQDYAVENLIRMGMAGLILVVLGILIFQDWHSQRSPQAAAGR

SEQ ID NO: 2042 - protein, 205 aa, Homo sapiens
MKVLLLTGLGALFFAYYWDDNFDPGGLDYLVLNHIGGAPAGTRARSPQATRWLMQVNFVSYVQLTSRALPSLTDSKGSLVVVSSLLGRVPTSFSTPYSAAKFALDGFFGSLRRELDVQDVNVAITMCVLGLRDRASAAEAVRGVTRVKAAPGPKAALAVIRGGATRAAGVFYPWRFRLLCLLRRWLPRPRAWFIRQELNVTAAAA

SEQ ID NO: 2043 - protein, 264 aa, Homo sapiens
MLRCGGRGLLLGLAVAAAAVMAARLMGWWGPRAGFRLFIPEELSRYRGGPGDPGLYLALLGRVYDVSSGRRHYEPGSHYSGFAGRDASRAFVTGDCSEAGLVDDVSDLSAAEMLTLHNWLSFYEKNYVCVGRVTGRFYGEDGLPTPALTQVEAAITRGLEANKLQLQEKQTFPPCNAEWSSARGSRLWCSQKSGGVSRDWIGVPRKLYKPGAKEPRCVCVRTTGPPSGQMPDNPPHRNRGDLDHPNLAEYTGCPPLAITCSFPL

SEQ ID NO: 2044 - protein, 155 aa, Homo sapiens
MSKRLLLLLLLSMGGTWASKEPLRPRCRPINATLAVEKEGCPVCITVNTTICAGYCPTMTRVLQGVLPALPQVVCNYRDVRFESIRLPGCPRGVNPVVSYAVALSCQCALCRRSTTDCGGPKDHPLTCDDPRFQDSSSSKAPPPSLPSPSRLPGP

SEQ ID NO: 2045 - protein, 165 aa, Homo sapiens
MEMFQGLLLLLLLSMGGTWASKEPLRPRCRPINATLAVEKEGCPVCITVNTTICAGYCPTMTRVLQGVLPALPQVVCNYRDVRFESIRLPGCPRGVNPVVSYAVALSCQCALCRRSTTDCGGPKDHPLTCDDPRFQDSSSSKAPPPSLPSPSRLPGPSDTPILPQ

SEQ ID NO: 2046 - protein, 329 aa, Homo sapiens
MLPLLLGLLGPAACWALGPTPGPGSSELRSAFSAARTTPLEGTSEMAVTFDKVYVNIGGDFDVATGQFRCRVPGAYFFSFTAGKAPHKSLSVMLVRNRDEVQALAFDEQRRPGARRAASQSAMLQLDYGDTVWLRLHGAPQYALGAPGATFSGYLVYADADADAPARGPPAPPEPRSAFSAARTRSLVGSDAGPGPRHQPLAFDTEFVNIGGDFDAAAGVFRCRLPGAYFFSFTLGKLPRKTLSVKLMKNRDEVQAMIYDDGASRRREMQSQSVMLALRRGDAVWLLSHDHDGYGAYSNHGKYITFSGFLVYPDLAPAAPPGLGASELL

SEQ ID NO: 2047 - protein, 290 aa, Homo sapiens
MRRPAAVPLLLLLCFGSQRAKAATACGRPRMLNRMVGGQDTQEGEWPWQVSIQRNGSHFCGGSLIAEQWVLTAAHCFRNTSETSLYQVLLGARQLVQPGPHAMYARVRQVESNPLYQGTASSADVALVELEAPVPFTNYILPVCLPDPSVIFETGMNCWVTGWGSPSEEDLLPEPRILQKLAVPIIDTPKCNLLYSKDTEFGYQPKTIKNDMLCAGFEEGKKDACKGDSGGPLVCLVGQSWLQAGVISWGEGCARQNRPGVYIRVTAHHNWIHRIIPKLQFQPARLGGQK

SEQ ID NO: 2048 - protein, 263 aa, Homo sapiens
MAFLWLLSCWALLGTTFGCGVPAIHPVLSGLSRIVNGEDAVPGSWPWQVSLQDKTGFHFCGGSLISEDWVVTAAHCGVRTSDVVVAGEFDQGSDEENIQVLKIAKVFKNPKFSILTVNNDITLLKLATPARFSQTVSAVCLPSADDDFPAGTLCATTGWGKTKYNANKTPDKLQQAALPLLSNAECKKSWGRRITDVMICAGASGVSSCMGDSGGPLVCQKDGAWTLVGIVSWGSRTCSTTTPAVYARVAKLIPWVQKILAAN

SEQ ID NO: 2049 - protein, 75 aa, Homo sapiens
MGAAISQGALIAIVCNGLVGFLLLLLWVILCWACHSRSADVDSLSESRTQESACLELDPAAQSLASLAPIGAQWP

SEQ ID NO: 2050 - protein, 253 aa, Homo sapiens
MARSLLLPLQILLLSLALETAGEEAQGDKIIDGAPCARGSHPWQVALLSGNQLHCGGVLVNERWVLTAAHCKMNEYTVHLGSDTLGDRRAQRIKASKSFRHPGYSTQTHVNDLMLVKLNSQARLSSMVKKVRLPSRCEPPGTTCTVSGWGTTTSPDVTFPSDLMCVDVKLISPQDCTKVYKDLLENSMLCAGIPDSKKNACNGDSGGPLVCRGTLQGLVSWGTFPCGQPNDPGVYTQVCKFTKWINDTMKKHR

SEQ ID NO: 2051 - protein, 159 aa, Homo sapiens
MKAWGTVVVTLATLMVVTVDAKIYERCELAARLERAGLNGYKGYGVGDWLCMAHYESGFDTAFVDHNPDGSSEYGIFQLNSAWWCDNGITPTKNLCHMDCHDLLNRHILDDIRCAKQIVSSQNGLSAWTSWRLHCSGHDLSEWLKGCDMHVKIDPKIHP

SEQ ID NO: 2052 - protein, 166 aa, Homo sapiens
MAQTNSFFMLISSLMFLSLSQGQESQTELPNPRISCPEGTNAYRSYCYYFNEDPETWVDADLYCQNMNSGNLVSVLTQAEGAFVASLIKESSTDDSNVWIGLHDPKKNRRWHWSSGSLVSYKSWDTGSPSSANAGYCASLTSCSGFKKWKDESCEKKFSFVCKFKN

SEQ ID NO: 2053 - protein, 175 aa, Homo sapiens
MLPPMALPSVSWMLLSCLMLLSQVQGEEPQRELPSARIRCPKGSKAYGSHCYALFLSPKSWTDADLACQKRPSGNLVSVLSGAEGSFVSSLVKSIGNSYSYVWIGLHDPTQGTEPNGEGWEWSSSDVMNYFAWERNPSTISSPGHCASLSRSTAFLRWKDYNCNVRLPYVCKFTD

SEQ ID NO: 2054 - protein, 561 aa, Homo sapiens
MGARTPLPSFWVSFFAETGILFPGGTPWPMGSQHSKQHRKPGPLKRGHRRDRRTTRRKYWKEGREIARVLDDEGRNLRQQKLDRQRALLEQKQKKKRQEPLMVQANADGRPRSRRARQSEEQAPLVESYLSSSGSTSYQVQEADSLASVQLGATRPTAPASAKRTKAAATAGGQGGAARKEKKGKHKGTSGPAALAEDKSEAQGPVQILTVGQSDHAQDAGETAAGGGERPSGQDLRATMQRKGISSSMSFDEDEEDEEENSSSSSQLNSNTRPSSATSRKSVREAASAPSPTAPEQPVDVEVQDLEEFALRPAPQGITIKCRITRDKKGMDRGMYPTYFLHLDREDGKKVFLLAGRKRKKSKTSNYLISVDPTDLSRGGDSYIGKLRSNLMGTKFTVYDNGVNPQKASSSTLESGTLRQELAAVCYETNVLGFKGPRKMSVIVPGMNMVHERVSIRPRNEHETLLARWQNKNTESIIELQNKTPVWNDDTQSYVLNFHGRVTQASVKNFQIIHGNDPDYIVMQFGRVAEDVFTMDYNYPLCALQAFAIALSSFDSKLACE

SEQ ID NO: 2055 - protein, 423 aa, Homo sapiens
MMYRPDVVRARKRVCWEPWVIGLVIFISLIVLAVCIGLTVHYVRYNQKKTYNYYSTLSFTTDKLYAEFGREASNNFTEMSQRLESMVKNAFYKSPLREEFVKSQVIKFSQQKHGVLAHMLLICRFHSTEDPETVDKIVQLVLHEKLQDAVGPPKVDPHSVKIKKINKTETDSYLNHCCGTRRSKTLGQSLRIVGGTEVEEGEWPWQASLQWDGSHRCGATLINATWLVSAAHCFTTYKNPARWTASFGVTIKPSKMKRGLRRIIVHEKYKHPSHDYDISLAELSSPVPYTNAVHRVCLPDASYEFQPGDVMFVTGFGALKNDGYSQNHLRQAQVTLIDATTCNEPQAYNDAITPRMLCAGSLEGKTDACQGDSGGPLVSSDARDIWYLAGIVSWGDECAKPNKPGVYTRVTALRDWITSKTGI

SEQ ID NO: 2056 - protein, 93 aa, Homo sapiens
MKPVLPLQFLVVFCLALQLVPGSPKQRVLKYILEPPPCISAPENCTHLCTMQEDCEKGFQCCSSFCGIVCSSETFQKRNRIKHKGSEVIMPAN

SEQ ID NO: 2057 - protein, 509 aa, Homo sapiens
MDFLLALVLVSSLYLQAAAEFDGRWPRQIVSSIGLCRYGGRIDCCWGWARQSWGQCQPVCQPRCKHGECIGPNKCKCHPGYAGKTCNQDLNECGLKPRPCKHRCMNTYGSYKCYCLNGYMLMPDGSCSSALTCSMANCQYGCDVVKGQIRCQCPSPGLQLAPDGRTCVDVDECATGRASCPRFRQCVNTFGSYICKCHKGFDLMYIGGKYQCHDIDECSLGQYQCSSFARCYNIRGSYKCKCKEGYQGDGLTCVYIPKVMIEPSGPIHVPKGNGTILKGDTGNNNWIPDVGSTWWPPKTPYIPPIITNRPTSKPTTRPTPKPTPIPTPPPPPPLPTELRTPLPPTTPERPTTGLTTIAPAASTPPGGITVDNRVQTDPQKPRGDVFSVLVHSCNFDHGLCGWIREKDNDLHWEPIRDPAGGQYLTVSAAKAPGGKAARLVLPLGRLMHSGDLCLSFRHKVTGLHSGTLQVFVRKHGAHGAALWGRNGGHGWRQTQITLRGADIKSESQR

SEQ ID NO: 2058 - protein, 126 aa, Homo sapiens
MDKSLLLELPILLCCFRALSGSLSMRNDAVNEIVAVKNNFPVIEIVQCRMCHLQFPGEKCSRGRGICTATTEEACMVGRMFKRDGNPWLTFMGCLKNCADVKGIRWSVYLVNFRCCRSHDLCNEDL

SEQ ID NO: 2059 - protein, 178 aa, Homo sapiens
MELLQVTILFLLPSICSSNSTGVLEAANNSLVVTTTKPSITTPNTESLQKNVVTPTTGTTPKGTITNELLKMSLMSTATFLTSKDEGLKATTTDVRKNDSIISNVTVTSVTLPNAVSTLQSSKPKTETQSSIKTTEIPGTPENGNDQPQSDKESVKLLTVKTISHESGEHSAQGKTKN

SEQ ID NO: 2060 - protein, 847 aa, Homo sapiens
MFKCWSVVLVLGFIFLESEGRPTKEGGYGLKSYQPLMRLRHKQEKNQESSRVKGFMIQDGPFGSCENKYCGLGRHCVTSRETGQAECACMDLCKRHYKPVCGSDGEFYENHCEVHRAACLKKQKITIVHNEDCFFKGDKCKTTEYSKMKNMLLDLQNQKYIMQENENPNGDDISRKKLLVDQMFKYFDADSNGLVDINELTQVIKQEELGKDLFDCTLYVLLKYDDFNADKHLALEEFYRAFQVIQLSLPEDQKLSITAATVGQSAVLSCAIQGTLRPPIIWKRNNIILNNLDLEDINDFGDDGSLYITKVTTTHVGNYTCYADGYEQVYQTHIFQVNVPPVIRVYPESQAREPGVTASLRCHAEGIPKPQLGWLKNGIDITPKLSKQLTLQANGSEVHISNVRYEDTGAYTCIAKNEAGVDEDISSLFVEDSARKTLANILWREEGLGIGNMFYVFYEDGIKVIQPIECEFQRHIKPSEKLLGFQDEVCPKAEGDEVQRCVWASAVNVKDKFIYVAQPTLDRVLIVDVQSQKVVQAVSTDPVPVKLHYDKSHDQVWVLSWGTLEKTSPTLQVITLASGNVPHHTIHTQPVGKQFDRVDDFFIPTTTLIITHMRFGFILHKDEAALQKIDLETMSYIKTINLKDYKCVPQSLAYTHLGGYYFIGCKPDSTGAVSPQVMVDGVTDSVIGFNSDVTGTPYVSPDGHYLVSINDVKGLVRVQYITIRGEIQEAFDIYTNLHISDLAFQPSFTEAHQYNIYGSSSTQTDVLFVELSSGKVKMIKSLKEPLKAEEWPWNRKNRQIQDSGLFGQYLMTPSKDSLFILDGRLNKLNCEITEVEKGNTVIWVGDA

SEQ ID NO: 2061 - protein, 90 aa, Homo sapiens
MRLSVCLLLLTLALCCYRANAVVCQALGSEITGFLLAGKPVFKFQLAKFKAPLEAVAAKMEVKKCVDTMAYEKRVLITKTLGKIAEKCDR

SEQ ID NO: 2062 - protein, 347 aa, Homo sapiens
MSSWSRQRPKSPGGIQPHVSRTLFLLLLLAASAWGVTLSPKDCQVFRSDHGSSISCQPPAEIPGYLPADTVHLAVEFFNLTHLPANLLQGASKLQELHLSSNGLESLSPEFLRPVPQLRVLDLTRNALTGLPPGLFQASATLDTLVLKENQLEVLEVSWLHGLKALGHLDLSGNRLRKLPPGLLANFTLLRTLDLGENQLETLPPDLLRGPLQLERLHLEGNKLQVLGKDLLLPQPDLRYLFLNGNKLARVAAGAFQGLRQLDMLDLSNNSLASVPEGLWASLGQPNWDMRDGFDISGNPWICDQNLSDLYRWLQAQKDKMFSQNDTRCAGPEAVKGQTLLAVAKSQ

SEQ ID NO: 2063 - protein, 468 aa, Homo sapiens
MPPWGAALALILAVLALLGLLGPRLRGPWGRAVGERTLPGAQDRDDGEEADGGGPADQFSDGREPLPGGCSLVCKPSALAQCLLRALRRSEALEAGPRSWFSGPHLQTLCHFVLPVAPGPELAREYLQLADDGLVALDWVVGPCVRGRRITSAGGLPAVLLVIPNAWGRLTRNVLGLCLLALERGYYPVIFHRRGHHGCPLVSPRLQPFGDPSDLKEAVTYIRFRHPAAPLFAVSEGSGSALLLSYLGECGSSSYVTGAACISPVLRCREWFEAGLPWPYERGFLLHQKIALSRYATALEDTVDTSRLFRSRSLREFEEALFCHTKSFPISWDTYWDRNDPLRDVDEAAVPVLCICSADDPVCGPPDHTLTTELFHSNPYFFLLLSRHGGHCGFLRQEPLPAWSHEVILESFRALTEFFRTEERIKGLSRHRASFLGGRRRGGALQRREVSSSSNLEEIFNWKRSYTR

SEQ ID NO: 2064 - protein, 140 aa, Homo sapiens
MFFTISRKNMSQKLSLLLLVFGLIWGLMLLHYTFQQPRHQSSVKLREQILDLSKRYVKALAEENKNTVDVENGASMAGYADLKRTIAVLLDDILQRLVKLENKVDYIVVNGSAANTTNGTSGNLVPVTTNKRTNVSGSIR

SEQ ID NO: 2065 - protein, 330 aa, Homo sapiens
RGALVGAPRSARASCLRGRRPGRRQPCGRCPDPPRSGPGQAGRARCARDVAAQTALAPRALALGAGAAGPGWRGAVPRRPAARVSRAAQRQEQELVRLHREQECELQPEPAPPRPSGPATAEDPGRRPVLPQRPPEERPPQPPGSTGVIAETGQAGPPAGAGVSGYPKSPPVASPGAPVPSLVSFSAGLTQKPFPSDGGVVLFNKVLVNDGDVYNPSTGVFTAPYDGRYLITATLTPERDAYVEAVLSVSNASVAQLHTAGYRREFLEYHRPPGALHTCGGPGAFHLIVHLKAGDAVNVVVTGGKLAHTDFDEMYSTFSGVFLYPFLSHL

SEQ ID NO: 2066 - protein, 194 aa, Homo sapiens
MSALWLLLGLLALMDLSESSNWGCYGNIQSLDTPGASCGIGRRHGLNYCGVRASERLAEIDMPYLLKYQPMMQTIGQKYCMDPAVIAGVLSRKSPGDKILVNMGDRTSMVQDPGSQAPTSWISESQVSQTTEVLTTRIKEIQRRFPTWTPDQYLRGGLCAYSGGAGYVRSSQDLSCDFCNDVLARAKYLKRHGF

SEQ ID NO: 2067 - protein, 90 aa, Homo sapiens
MKFLAVLVLLGVSIFLVSAQNPTTAAPADTYPATGPADDEAPDAETTAAATTATTAAPTTATTAASTTARKDIPVLPKWVGDLPNGRVCP

SEQ ID NO: 2068 - protein, 637 aa, Homo sapiens
MSRMLPFLLLLWFLPITEGSQRAEPMFTAVTNSVLPPDYDSNPTQLNYGVAVTDVDHDGDFEIVVAGYNGPNLVLKYDRAQKRLVNIAVDERSSPYYALRDRQGNAIGVTACDIDGDGREEIYFLNTNNAFSGVATYTDKLFKFRNNRWEDILSDEVNVARGVASLFAGRSVACVDRKGSGRYSIYIANYAYGNVGPDALIEMDPEASDLSRGILALRDVAAEAGVSKYTGGRGVSVGPILSSSASDIFCDNENGPNFLFHNRGDGTFVDAAASAGVDDPHQHGRGVALADFNRDGKVDIVYGNWNGPHRLYLQMSTHGKVRFRDIASPKFSMPSPVRTVITADFDNDQELEIFFNNIAYRSSSANRLFRVIRREHGDPLIEELNPGDALEPEGRGTGGVVTDFDGDGMLDLILSHGESMAQPLSVFRGNQGFNNNWLRVVPRTRFGAFARGAKVVLYTKKSGAHLRIIDGGSGYLCEMEPVAHFGLGKDEASSVEVTWPDGKMVSRNVASGEMNSVLEILYPRDEDTLQDPAPLECGQGFSQQENGHCMDTNECIQFPFVCPRDKPVCVNTYGSYRCRTNKKCSRGYEPNEDGTACVAQVAFLGGYSSAASRISEPLSRASYLSLGLGLCLQLYAL

SEQ ID NO: 2069 - protein, 199 aa, Homo sapiens
MALNGAEVDDFSWEPPTEAETKVLQARRERQDRISRLMGDYLLRGYRMLGETCADCGTILLQDKQRKIYCVACQELDSDVDKDNPALNAQAALSQAREHQLASASELPLGSRPAPQPPVPRPEHCEGAAAGLKAAQGPPAPAVPPNTDVMACTQTALLQKLTWASAELGSSTSLETSIQLCGLIRACAEALRSLQQLQH

SEQ ID NO: 2070 - protein, 270 aa, Homo sapiens
MKLGCVLMAWALYLSLGVLWVAQMLLAASFETLQCEGPVCTEESSCHTEDDLTDAREAGFQVKAYTFSEPFHLIVSYELFPAPILRAVPSAEPQAGSPMTLSCQTKLPLQRSAARLLFSFYKDGRIVQSRGLSSEFQIPTASEDHSGSYWCEAATEDNQVWKQSPQLEIRVQGASSSAAPPTLNPAPQKSAAPGTAPEEAPGPLPPPPTPSSEDPGFSSPLGMPDPHLYHQMGLLLKHMQDVRVLLGHLLMELRELSGHRKPGTTKATAE

SEQ ID NO: 2071 - protein, 806 aa, Homo sapiens
MRLSPAPLKLSRTPALLALALPLAAALAFSDETLDKVPKSEGYCSRILRAQGTRREGYTEFSLRVEGDPDFYKPGTSYRVTLSAAPPSYFRGFTLIALRENREGDKEEDHAGTFQIIDEEETQFMSNCPVAVTESTPRRRTRIQVFWIAPPAGTGCVILKASIVQKRIIYFQDEGSLTKKLCEQDSTFDGVTDKPILDCCCGTAKYRLTFYGNWSEKTHPKDYPRRANHWSAIIGGSHSKNYVLWEYGGYASEGVKQVAELGSPVKMEEEIRQQSDEVLTVIKAKAQWPAWQPLNVRAAPSAEFSVDRTRHLMSFLTMMGPSPDWNVGLSAEDLCTKECGWVQKVVQDLIPWDAGTDSGVTYESPNKPTIPQEKIRPLTSLDHPQSPFYDPEGGSITQVARVVIERIARKGEQCNIVPDNVDDIVADLAPEEKDEDDTPETCIYSNWSPWSACSSSTCDKGKRMRQRMLKAQLDLSVPCPDTQDFQPCMGPGCSDEDGSTCTMSEWITWSPCSISCGMGMRSRERYVKQFPEDGSVCTLPTEETEKCTVNEECSPSSCLMTEWGEWDECSATCGMGMKKRHRMIKMNPADGSMCKAETSQAEKCMMPECHTIPCLLSPWSEWSDCSVTCGKGMRTRQRMLKSLAELGDCNEDLEQVEKCMLPECPIDCELTEWSQWSECNKSCGKGHVIRTRMIQMEPQFGGAPCPETVQRKKCRIRKCLRNPSIQKLRWREARESRRSEQLKEESEGEQFPGCRMRPWTAWSECTKLCGGGIQERYMTVKKRFKSSQFTSCKDKKEIRACNVHPC

SEQ ID NO: 2072 - protein, 1413 aa, Homo sapiens
MRHGVAWALLVAAALGLGARGVRGAVALADFYPFGAERGDAVTPKQDDGGSGLRPLSVPFPFFGAEHSGLYVNNNGIISFLKEVSQFTPVAFPIAKDRCVVAAFWADVDNRRAGDVYYREATDPAMLRRATEDVRHYFPELLDFNATWVFVATWYRVTFFGGSSSSPVNTFQTVLITDGKLSFTIFNYESIVWTTGTHASSGGNATGLGGIAAQAGFNAGDGQRYFSIPGSRTADMAEVETTTNVGVPGRWAFRIDDAQVRVGGCGHTTSVCLALRPCLNGGKCIDDCVTGNPSYTCSCLSGFTGRRCHLDVNECASQPCQNGGTCTHGINSFRCQCPAGFGGPTCETAQSPCDTKECQHGGQCQVENGSAVCVCQAGYTGAACEMDVDDCSPDPCLNGGSCVDLVGNYTCLCAEPFKGLRCETGDHPVPDACLSAPCHNGGTCVDADQGYVCECPEGFMGLDCRERVPDDCECRNGGRCLGANTTLCQCPLGFFGLLCEFEITAMPCNMNTQCPDGGYCMEHGGSYLCVCHTDHNASHSLPSPCDSDPCFNGGSCDAHDDSYTCECPRGFHGKHCEKARPHLCSSGPCRNGGTCKEAGGEYHCSCPYRFTGRHCEIGKPDSCASGPCHNGGTCFHYIGKYKCDCPPGFSGRHCEIAPSPCFRSPCVNGGTCEDRDTDFFCHCQAGYMGRRCQAEVDCGPPEEVKHATLRFNGTRLGAVALYACDRGYSLSAPSRIRVCQPHGVWSEPPQCLEIDECRSQPCLHGGSCQDRVAGYLCLCSTGYEGAHCELERDECRAHPCRNGGSCRNLPGAYVCRCPAGFVGVHCETEVDACDSSPCQHGGRCESGGGAYLCVCPESFFGYHCETVSDPCFSSPCGGRGYCLASNGSHSCTCKVGYTGEDCAKELFPPTALKMERVEESGVSISWNPPNGPAARQMLDGYAVTYVSSDGSYRRTDFVDRTRSSHQLQALAAGRAYNISVFSVKRNSNNKNDISRPAVLLARTRPRPVEGFEVTNVTASTISVQWALHRIRHATVSGVRVSIRHPEALRDQATDVDRSVDRFTFRALLPGKRYTIQLTTLSGLRGEEHPTESLATAPTHVWTRPLPPANLTAARVTATSAHVVWDAPTPGSLLEAYVINVTTSQSTKSRYVPNGKLASYTVRDLLPGRRYQLSVIAVQSTELGPQHSEPAHLYIITSPRDGADRRWHQGGHHPRVLKNRPPPARLPELRLLNDHSAPETPTQPPRFSELVDGRGRVSARFGGSPSKAATVRSQPTASAQLENMEEAPKRVSLALQLPEHGSKDIGNVPGNCSENPCQNGGTCVPGADAHSCDCGPGFKGRRCELACIKVSRPCTRLFSETKAFPVWEGGVCHHVYKRVYRVHQDICFKESCESTSLKKTPNRKQSKSQTLEKS

SEQ ID NO: 2073 - protein, 335 aa, Homo sapiens
MFLATLSFLLPFAHPFGTVSCEYMLGSPLSSLAQVNLSPFSHPKVHMDPNYCHPSTSLHLCSLAWSFTRLLHPPLSPGISQVVKDHVTKPTAMAQGRVAHLIEWKGWSKPSDSPAALESAFSSYSDLSEGEQEARFAAGVAEQFAIAEAKLRAWSSVDGEDSTDDSYDEDFAGGMDTDMAGQLPLGPHLQDLFTGHRFSRPVRQGSVEPESDCSQTVSPDTLCSSLCSLEDGLLGSPARLASQLLGDELLLAKLPPSRESAFRSLGPLEAQDSLYNSPLTESCLSPAEEEPAPCKDCQPLCPPLTGSWERQRQASDLASSGVVSLDEDEAEPEEQ

SEQ ID NO: 2074 - protein, 275 aa, Homo sapiens
MQPPGPRDPLIRLCFFREEGTNVVQKICFSTQIIRHFESKLSDTIEVYQERIQWLTENSKKAFGLIKGARVSILIDVSAISSGPQKEEFQKDLMSLIDEQLSHKEKLFVLSFGTNAGSLWPDPMEVSASTLQELKLWVKTLQPDGGSNLLQALKKIFTLKGLDSLVAIMRSCPDQPSEILSDYIQQSTMGRDLIIHFITYRCDDQMPPAVLKNLAEAVRGYYHCYSPKMEHYTSRDMDELLAEIQKAQSLLSHVQALQHSSPCEALTCTMEEPRN

SEQ ID NO: 2075 - protein, 145 aa, Homo sapiens
MLTRLVLSAHLSSTTSPPWTHAAISWELDNVLMPSPRIWPQVTPTGRSASVRSEGNTSSLWNFSAGQDVHAIVTRTCESVLSSAVYTHGCGCVRSATNITCQSSGQQRQAARQEEENSICKAHDSREGRLGYPLSAHQPGSGGPN

SEQ ID NO: 2076 - protein, 258 aa, Homo sapiens
MTPPKLRASLSPSLLLLLSGCLLAAARREKGAASNVAEPVPGPTGGSSGRFLSPEQHACSWQLLLPAPEAAAGSELALRCQSPDGARHQCAYRGHPERCAAYAARRAHFWKQVLGGLRKKRRPCHDPAPLQARLCAGKKGHGAELRLVPRASPPARPTVAGFAGESKPRARNRGRTRERASGPAAGTPPPQSAPPKENPSERKTNEGKRKAALVPNEERPMGTGPDPDGLDGNAELTETYCAEKWHSLCNFFVNFWNG

SEQ ID NO: 2077 - protein, 130 aa, Homo sapiens
MARRHCFSYWLLVCWLVVTVAEGQEEVFTPPGDSQNNADATDCQIFTLTPPPAPRSPVTRAQPITKTPRCPFHFFPRRPRIHFRFPNRPFVPSRCNHRFPFQPFYWPHRYLTYRYFPRRRLQRGSSSEES

SEQ ID NO: 2078 - protein, 199 aa, Homo sapiens
MYPATAVPQINITILKGEKGDRGDRGLQGKYGKTGSAGARGHTGPKGQKGSMGAPGERCKSHYAAFSVGRKKPMHSNHYYQTVIFDTEFVNLYDHFNMFTGKFYCYVPGLYFFSLNVHTWNQKETYLHIMKNEEEVVILFAQVGDRSIMQSQSLMLELREQDQVWVRLYKGERENAIFSEELDTYITFSGYLVKHATEP

SEQ ID NO: 2079 - protein, 233 aa, Homo sapiens
MALKNKFSCLWILGLCLVATTSSKIPSITDPHFIDNCIEAHNEWRGKVNPPAADMKYMIWDKGLAKMAKAWANQCKFEHNDCLDKSYKCYAAFEYVGENIWLGGIKSFTPRHAITAWYNETQFYDFDSLSCSRVCGHYTQLVWANSFYVGCAVAMCPNLGGASTAIFVCNYGPAGNFANMPPYVRGESCSLCSKEEKCVKNLCKNPFLKPTGRAPQQTAFNPFSLGFLLLRIF

SEQ ID NO: 2080 - protein, 222 aa, Homo sapiens
MALHIHEACILLLVIPGLVTSAAISHEDYPADEGDQISSNDNLIFDDYRGKGCVDDSGFVYKLGERFFPGHSNCPCVCALDGPVCDQPECPKIHPKCTKVEHNGCCPECKEVKNFCEYHGKNYKILEEFKPSPCEWCRCEPSNEVHCVVADCAVPECVNPVYEPEQCCPVCKNGPNCFAGTTIIPAGIEVKVDECNICHCHNGDWWKPAQCSKRECQGKQTV

SEQ ID NO: 2081 - protein, 318 aa, Homo sapiens
MLPLTMTVLILLLLPTGQAAPKDGVTRPDSEVQHQLLPNPFQPGQEQLGLLQSYLKGLGRTEVQLEHLSREQVLLYLFALHDYDQSGQLDGLELLSMLTAALAPGAANSPTTNPVILIVDKVLETQDLNGDGLMTPAELINFPGVALRHVEPGEPLAPSPQEPQAVGRQSLLAKSPLRQETQEAPGPREEAKGQVEARRESLDPVQEPGGQAEADGDVPGPRGEAEGQAEAKGDAPGPRGEAGGQAEAEGDAPGPRGEAGGQAEAEGDAPGPRGEAGGQAEARENGEEAKELPGETLESKNTQNDFEVHIVQVENDEI

SEQ ID NO: 2082 - protein, 130 aa, Homo sapiens
MLAPLFLCCLRNLFRKLISFQPPQLGRTNMHYSKLPRTAIETEFKQNVGPPPKDLTAEVYFPSIKSRSHLPAVFYNQYFKHPKCVGEYGPKNGAERQIEERKVLPTTMMFSMLADCVLKSTPIPILGVAM

SEQ ID NO: 2083 - protein, 1453 aa, Homo sapiens
MMLPQNSWHIDFGRCCCHQNLFSAVVTCILLLNSCFLISSFNGTDLELRLVNGDGPCSGTVEVKFQGQWGTVCDDGWNTTASTVVCKQLGCPFSFAMFRFGQAVTRHGKIWLDDVSCYGNESALWECQHREWGSHNCYHGEDVGVNCYGEANLGLRLVDGNNSCSGRVEVKFQERWGTICDDGWNLNTAAVVCRQLGCPSSFISSGVVNSPAVLRPIWLDDILCQGNELALWNCRHRGWGNHDCSHNEDVTLTCYDSSDLELRLVGGTNRCMGRVELKIQGRWGTVCHHKWNNAAADVVCKQLGCGTALHFAGLPHLQSGSDVVWLDGVSCSGNESFLWDCRHSGTVNFDCLHQNDVSVICSDGADLELRLADGSNNCSGRVEVRIHEQWWTICDQNWKNEQALVVCKQLGCPFSVFGSRRAKPSNEARDIWINSISCTGNESALWDCTYDGKAKRTCFRRSDAGVICSDKADLDLRLVGAHSPCYGRLEVKYQGEWGTVCHDRWSTRNAAVVCKQLGCGKPLHVFGMTYFKEASGPIWLDDVSCIGNESNIWDCEHSGWGKHNCVHREDVIVTCSGDATWGLRLVGGSNRCSGRLEVYFQGRWGTVCDDGWNSKAAAVVCSQLDCPSSIIGMGLGNASTGYGKIWLDDVSCDGDESDLWSCRNSGWGNNDCSHSEDVGVICSDASDMELRLVGGSSRCAGKVEVNVQGAVGILCANGWGMNIAEVVCRQLECGSAIRVSREPHFTERTLHILMSNSGCTGGEASLWDCIRWEWKQTACHLNMEASLICSAHRQPRLVGADMPCSGRVEVKHADTWRSVCDSDFSLHAANVLCRELNCGDAISLSVGDHFGKGNGLTWAEKFQCEGSETHLALCPIVQHPEDTCIHSREVGVVCSRYTDVRLVNGKSQCDGQVEINVLGHWGSLCDTHWDPEDARVLCRQLSCGTALSTTGGKYIGERSVRVWGHRFHCLGNESLLDNCQMTVLGAPPCIHGNTVSVICTGSLTQPLFPCLANVSDPYLSAVPEGSALICLEDKRLRLVDGDSRCAGRVEIYHDGFWGTICDDGWDLSDAHVVCQKLGCGVAFNATVSAHFGEGSGPIWLDDLNCTGMESHLWQCPSRGWGQHDCRHKEDAGVICSEFTALRLYSETETESCAGRLEVFYNGTWGSVGRRNITTAIAGIVCRQLGCGENGVVSLAPLSKTGSGFMWVDDIQCPKTHISIWQCLSAPWERRISSPAEETWITCEDRIRVRGGDTECSGRVEIWHAGSWGTVCDDSWDLAEAEVVCQQLGCGSALAALRDASFGQGTGTIWLDDMRCKGNESFLWDCHAKPWGQSDCGHKEDAGVRCSGQSLKSLNASSGHLALILSSIFGLLLLVLFILFLTWCRVQKQKHLPLRVSTRRRGSLEENLFHEMETCLKREDPHGTRTSDDTPNHGCEDASDTSLLGVLPASEATK

SEQ ID NO: 2084 - protein, 252 aa, Homo sapiens
MLPPPRPAAALALPVLLLLLVVLTPPPTGARPSPGPDYLRRGWMRLLAEGEGCAPCRPEECAAPRGCLAGRVRDACGCCWECANLEGQLCDLDPSAHFYGHCGEQLECRLDTGGDLSRGEVPEPLCACRSQSPLCGSDGHTYSQICRLQEAARARPDANLTVAHPGPCESGPQIVSHPYDTWRGPRLQTLGTEDTLTTLVGAGGMARAVACGEAPGEHLALQVLCLSGKRRHLWQVGSTGSSEGVPSGGSFW

SEQ ID NO: 2085 - protein, 440 aa, Homo sapiens
MKLALLLPWACCCLCGSALATGFLYPFSAAALQQHGYPEPGAGSPGSGYASRRHWCHHTVTRTVSCQVQNGSETVVQRVYQSCRWPGPCANLVSYRTLIRPTYRVSYRTVTVLEWRCCPGFTGSNCDEECMNCTRLSDMSERLTTLEAKVLLLEAAERPSSPDNDLPAPESTPPTWNEDFLPDAIPLAHPVPRQRRPTGPAGPPGQTGPPGPAGPPGSKGDRGQTGEKGPAGPPGLLGPPGPRGLPGEMGRPGPPGPPGPAGNPGPSPNSPQGALYSLQPPTDKDNGDSRLASAIVDTVLAGVPGPRGPPGPPGPPGPRGPPGPPGTPGSQGLAGERGTVGPSGEPGVKGEEGEKAATAEGEGVQQLREALKILAERVLILEHMIGIHDPLASPEGSGQDAALRANLKMKRGGAQPDGVLAALLGPDPGQKSVDQASSRK

SEQ ID NO: 2086 - protein, 446 aa, Homo sapiens
MLHPETSPGRGHLLAVLLALLGTAWAEVWPPQLQEQAPMAGALNRKESFLLLSLHNRLRSWVQPPAADMRRLDWSDSLAQLAQARAALCGIPTPSLASGLWRTLQVGWNMQLLPAGLASFVEVVSLWFAEGQRYSHAAGECARNATCTHYTQLVWATSSQLGCGRHLCSAGQAAIEAFVCAYSPRGNWEVNGKTIVPYKKGAWCSLCTASVSGCFKAWDHAGGLCEVPRNPCRMSCQNHGRLNISTCHCHCPPGYTGRYCQVRCSLQCVHGRFREEECSCVCDIGYGGAQCATKVHFPFHTCDLRIDGDCFMVSSEADTYYRARMKCQRKGGVLAQIKSQKVQDILAFYLGRLETTNEVIDSDFETRNFWIGLTYKTAKDSFRWATGEHQAFTSFAFGQPDNHGFGNCVELQASAAFNWNNQRCKTRNRYICQFAQEHISRWGPGS

SEQ ID NO: 2087 - protein, 72 aa, Homo sapiens
MQRLVLLLAISLLLYQDLPVRSEFELDRICGYGTARCRKKCRSQEYRIGRCPNTYACCLRKWDESLLNRTKP

SEQ ID NO: 2088 - protein, 782 aa, Homo sapiens [sequence omitted]

SEQ ID NO: 2089 - protein, 136 aa, Homo sapiens
MSNVPHKSSLPEGIRPGTVLRIRGLVPPNASRFHVNLLCGEEQGSDAALHFNPRLDTSEVVFNSKEQGSWGREERGPGVPFQRGQPFEVLIIASDDGFKAVVGDAQYHHFRHRLPLARVRLVEVGGDVQLDSVRIF

SEQ ID NO: 2090 - protein, 641 aa, Homo sapiens
MPPPLPLLLLTVLVVAAARPGCEFERNPAATCVDLQLRTCSDAAYNHTTFPNLLQHRSWEVVEASSEYILLSVLHQLLEGQCNPDLRLLGCAVLAPRCEGGWVRRPCRHICEGLREVCQPAFDAIDMAWPYFLDCHRYFTREDEGCYDPLEKLRGGLEADEALPSGLPPTFIRFSHHSYAQMVRVLRRTASRCAHVARTYSIGRSFDGRELLVIEFSSRPGQHELMEPEVKLIGNIHGNEVAGREMLIYLAQYLCSEYLLGNPRIQRLLNTTRIHLLPSMNPDGYEVAAAEGAGYNGWTSGRQNAQNLDLNRNFPDLTSEYYRLAETRGARSDHIPIPQHYWWGKVAPETKAIMKWMQTIPFVLSASLHGGDLVVSYPFDFSKHPQEEKMFSPTPDEKMFKLLSRAYADVHPMMMDRSENRCGGNFLKRGSIINGADWYSFTGGMSDFNYLHTNCFEITVELGCVKFPPEEALYILWQHNKESLLNFVETVHRGIKGVVTDKFGKPVKNARISVKGIRHDITTAPDGDYWRLLPPGIHIVIAQAPGYAKVIKKVIIPARMKRAGRVDFILQPLGMGPKNFIHGLRRTGPHDPLGGASSLGEATEPDPLRARRQPSADGSKPWWWSYFTSLSTHRPRWLLKY

SEQ ID NO: 2091 - protein, 434 aa, Homo sapiens
MASLGLLLLLLLTALPPLWSSSLPGLDTAESKATIADLILSALERATVFLEQRLPEINLDGMVGVRVLEEQLKSVREKWAQEPLLQPLSLRVGMLGEKLEAAIQRSLHYLKLSDPKYLREFQLTLQPGFWKLPHAWIHTDASLVYPTFGPQDSFSEERSDVCLVQLLGTGTDSSEPCGLSDLCRSLMTKPGCSGYCLSHQLLFFLWARMRGCTQGPLQQSQDYINLFCANMMDLNRRAEAIGYAYPTRDIFMENNVTGHPVFYLPLCDSFLPPKAAPVTELYTDGPVMFCGMGGFSDFYKLRWLEAILSWQKQQEGCFGEPDAEDEELSKAIQYQQHFSRRVKRREKQFPDSRSVAQAGVQWRNLGSLQPLPPGFKQFSCLILPSSWDYRSVPPYLANFYIFLVETGFHHVAHAGLELLISRDPPTSGSQSVGL

SEQ ID NO: 2092 - protein, 184 aa, Homo sapiens
MMSFLLGAILTLLWAPTAQAEVLLQPDFNAEKFSGLWYVVSMASDCRVFLGKKDHLSMSTRAIRPTEEGGLHVHMEFPGADGCNQVDAEYLKVGSEGHFRVPALGYLDVRIVDTDYSSFAVLYIYKELEGALSTMVQLYSRTQDVSPQALKSFQDFYPTLGLPKDMMVMLPQSDACNPESKEAP

SEQ ID NO: 2093 - protein, 72 aa, Homo sapiens; identical to SEQ ID NO: 2087

SEQ ID NO: 2094 - protein, 748 aa, Homo sapiens
MGRAGAAAVIPGLALLWAVGLGSAAPPPRLRLSFQELQAWHGLQTFSLERTCCYQALLVDEERGRLFVGAENHVASLNLDNISKRAKKLAWPAPVEWREECNWAGKDIGTECMNFVKLLHAYNRTHLLACGTGAFHPTCAFVEVGHRAEEPVLRLDPGRIEDGKGKSPYDPRHRAASVLVGEELYSGVAADLMGRDFTIFRSLGQRPSLRTEPHDSRWLNEPKFVKVFWIPESENPDDDKIYFFFRETAVEAAPALGRLSVSRVGQICRNDVGGQRSLVNKWTTFLKARLVCSVPGVEGDTHFDQLQDVFLLSSRDHRTPLLYAVFSTSSSIFQGSAVCVYSMNDVRRAFLGPFAHKEGPMHQWVSYQGRVPYPRPGMCPSKTFGTFSSTKDFPDDVIQFARNHPLMYNSVLPTGGRPLFLQVGANYTFTQIAADRVAAADGHYDVLFIGTDVGTVLKVISVPKGSRPSAEGLLLEELHVFEDSAAVTSMQISSKRHQLYVASRSAVAQIALHRCAAHGRVCTECCLARDPYCAWDGVACTRFQPSAKRRFRRQDVRNGDPSTLCSGDSSRPALLEHKVFGVEGSSAFLECEPRSLQARVEWTFQRAGVTAHTQVLAEERTERTARGLLLRRLRRRDSGVYLCAAVEQGFTQPLRRLSLHVLSATQAERLARAEEAAPAAPPGPKLWYRDFLQLVEPGGGGSANSLRMCRPQPALQSLPLESRRKGRNRRTHAPEPRAERGPRSATHW

SEQ ID NO: 2095 - protein, 122 aa, Homo sapiens
MVLLCLFLASLAATPRAGVTGAWPTSGLSILAQLQPSCELRWTQLSRSSWRDLVMTTSLWSLAYFQHFSQETTTQEQLDEMEEIPRESQCGRQDFHALSCPTASPRDRVLLCCPGWRAMVPS

SEQ ID NO: 2096 - protein, 189 aa, Homo sapiens
MLLGQLSTLLCLLSGALPTGSGRPEPQSPRPQSWAAANQTWALGPGALPPLVPASALGSWKAFLGLQKARQLGMGRLQRGQDEVAAVTLPLNPQEVIQGMCKAVPFVQVFSRPGCSAIRLRNHLCFGHCSSLYIPGSDPTPLVLCNSCMPARKRWAPVVLWCLTGSSASRRRVKISTMLIEGCHCSPKA

SEQ ID NO: 2097 - protein, 834 aa, Homo sapiens
MKHTLALLAPLLGLGLGLALSQLAAGATDCKFLGPAEHLTFTPAARARWLAPRVRAPGLLDSLYGTVRRFLSVVQLNPFPSELVKALLNELASVKVNEVVRYEAGYVVCAVIAGLYLLLVPTAGLCFCCCRCHRRCGGRVKTEHKALACERAALMVFLLLTTLLLLIGVVCAFVTNQRTHEQMGPSIEAMPETLLSLWGLVSDVPQELQAVAQQFSLPQEQVSEELDGVGVSIGSAIHTQLRSSVYPLLAAVGSLGQVLQVSVHHLQTLNATVVELQAGQQDLEPAIREHRDRLLELLQEARCQGDCAGALSWARTLELGADFSQVPSVDHVLHQLKGVPEANFSSMVQEENSTFNALPALAAMQTSSVVQELKKAVAQQPEGVRTLAEGFPGLEAASRWAQALQEVEESSRPYLQEVQRYETYRWIVGCVLCSVVLFVVLCNLLGLNLGIWGLSARDDPSHPEAKGEAGARFLMAGVGLSFLFAAPLILLVFATFLVGGNVQTLVCQSWENGELFEFADTPGNLPPSMNLSQLLGLRKNISIHQAYQQCKEGAALWTVLQLNDSYDLEEHLDINQYTNKLRQELQSLKVDTQSLDLLSSAARRDLEALQSSGLQRIHYPDFLVQIQRPVVKTSMEQLAQELQGLAQAQDNSVLGQRLQEEAQGLRNLHQEKVVPQQSLVAKLNLSVRALESSAPNLQLETSDVLANVTYLKGELPAWAARILRNVSECFLAREMGYFSQYVAWVREEVTQRIATCQPLSGALDNSRVILCDMMADPWNAFWFCLAWCTFFLIPSIIFAVKTSKYFRPIRKRLSSTSSEETQLFHIPRVTSLKL

SEQ ID NO: 2098 - protein, 834 aa, Homo sapiens; identical to SEQ ID NO: 2097

SEQ ID NO: 2099 - protein, 71 aa, Homo sapiens
MTQLLLFLVALLVLGHVPSGRSEFKRCWKGQGACQTYCTRQETYMHLCPDASLCCLSYALKPPPVPKHEYE

SEQ ID NO: 2100 - protein, 458 aa, Homo sapiens
MEATGTDEVDKLKTKFISAWNNMKYSWVLKTKTYFSRNSPVLLLGKCYHFKYEDEDKTLPAESGCTIEDHVIAGNVEEFRKDFISRIWLTYREEFPQIEGSALTTDCGWGCTLRTGQMLLAQGLILHFLGRAWTWPDALNIENSDSESWTSHTVKKFTASFEASLSGEREFKTPTISLKETIGKYSDDHEMRNEVYHRKIISWFGDSPLALFGLHQLIEYGKKSGKKAGDWYGPAVVAHILRKAVEEARHPDLQGITIYVAQDCTVYNSDVIDKQSASMTSDNADDKAVIILVPVRLGGERTNTDYLEFVKGILSLEYCVGIIGGKPKQSYYFAGFQDDSLIYMDPHYCQSFVDVSIKDFPLETFHCPSPKKMSFRKMDPSCTIGFYCRNVQDFKRASEEITKMLKFSSKEKYPLFTFVNGHSRDYDFTSTTTNEEDLFSEDEKKQLKRFSTEEFVLL

SEQ ID NO: 2101 - protein, 113 aa, Homo sapiens
MRQRLLPSVTSLLLVALLFPGSSQARHVNHSATEALGELRERAPGQGTNGFQLLRHAVKRDLLPPRTPPYQEPASDLKVVDCRRSEGFCQEYCNYMETQVGYCSKKKDACCLH

SEQ ID NO: 2102 - protein, 85 aa, Homo sapiens
MKKVLLLITAILAVAVGFPVSQDQEREKRSISDSDELASGFFVFPYPYPFRPLPPIPFPRFPWFRRNFPIPIPESAPTTPLPSEK

SEQ ID NO: 2103 - protein, 87 aa, Homo sapiens
MAVSVLRLTVVLGLLVLFLTCYADDKPDKPDDKPDDSGKDPKPDFPKFLSLLGTEIIENAVEFILRSMSRSTGFMEFDDNEGKHSSK

SEQ ID NO: 2104 - protein, 314 aa, Homo sapiens
MSSEAETQQPPAAPPAAPALSAADTKPGTTGAQGAVARAHIGGAGGDKKVIATKVLGTVKWFNVRNGYGFINRNDTKEDVFVHQTAIKKNNPRKYLRSVGDGETVEFDVVEGEKGAEAANVTGPGGVPVQGSKYAADRNHYRRYPRRRGPPRNYQQNYQNSESGEKNEGSESAPERPNNAGPQAKVPTLLHAEYGRRPQYSNPPVQGEVMEGADNQGAGEQGRPVRQCIGDIDHDSAGALLARQPREDGNEEDKENQGDETQGQQPPQRRYRRNFNYRRRRPENPKPQDGKETKAADPPAENSSAPEAEQGGAE

SEQ ID NO: 2105 - protein, 211 aa, Homo sapiens
MVFLKFFCMSFFCHLCQGYFDGPLYPEMSNGTLHHYFVPDGDYEENDDPEKCQLLFRVSDHRRCSQGEGSQVGSLLSLTLREEFTVLGRQVEDAGRVLEGISKSISYDLDGEESYGKYLRRESHQIGDAYSNSDKSLTELESKFKQGQEQDSRQESRLNEDFLGMLVHTRSLLKETLDISVGLRDKYELLALTIRSHGTRLGRLKNDYLKV

SEQ ID NO: 2106 - protein, 521 aa, Homo sapiens
MLCALLLLPSLLGATRASPTSGPQECAKGSTVWCQDLQTAARCGAVGYCQGAVWNKPTAKSLPCDVCQDIAAAAGNGLNPDATESDILALVMKTCEWLPSQESSAGCKWMVDAHSSAILSMLRGAPDSAPAQVCTALSLCEPLQRHLATLRPLSKEDTFEAVAPFMANGPLTFHPRQAPEGALCQDCVRQVSRLQEAVRSNLTLADLNIQEQCESLGPGLAVLCKNYLFQFFVPADQALRLLPPQELCRKGGFCEELGAPARLTQVVAMDGVPSLELGLPRKQSEMQMKAGVTCEVCMNVVQKLDHWLMSNSSELMITHALERVCSVMPASITKECIILVDTYSPSLVQLVAKITPEKVCKFIRLCGNRRRARAVHDAYAIVPSPEWDAENQGSFCNGCKRLLTVSSHNLESKSTKRDILVAFKGGCSILPLPYMIQCKHFVTQYEPVLIESLKDMMDPVAVCKKVGACHGPRTPLLGTDQCALGPSFWCRSQEAAKLCNAVQHCQKHVWKEMHLHAGEHA

SEQ ID NO: 2107 - protein, 708 aa, Homo sapiens
MAAAAVAAAAAAAAAASLQVLEMESMETAAAGSAGLAAEVRGSGTVDFGPGPGISAMEASGGDPGPEAEDFECSSHCSELSWRQNEQRRQGLFCDITLCFGGAGGREFRAHRSVLAAATEYFTPLLSGQFSESRSGRVEMRKWSSEPGPEPDTVEAVIEYMYTGRIRVSTGSVHEVLELADRFLLIRLKEFCGEFLKKKLHLSNCVAIHSLAHMYTLSQLALKAADMIRRNFHKVIQDEEFYTLPFHLIRDWLSDLEITVDSEEVLFETVLKWVQRNAEERERYFEELFKLLRLSQMKPTYLTRHVKPERLVANNEVCVKLVADAVERHALRAENIQSGTCQHPTSHVSLLPRYGQNMDVIMVIGGVSEGGDYLSECVGYFVDEDRWVNLPHIHNHLDGHAVAVTESYVYVAGSMEPGFAKTVERYNPNLNTWEHVCSLMTRKHSFGLTEVKGKLYSIGGHGNFSPGFKDVTVYNPELDKWHNLESAPKILRDVKALAIEDRFVYIAARTPVDRDTEDGLKAVITCYDTETRQWQDVESLPLIDNYCFFQMSVVNSNFYQTASCCPKSYCLENEEAVRKIASQVSDEILESLPPEVLSIEGAAICYYKDDVFIIGGWKNSDDIDKQYRKEAYRYCAERKRWMLLPPMPQPRCRATACHVRIPYRYLHGTQRYPMPQNLMWQKDRIRQMQEIHRHALNMRRVPSSQIEC

SEQ ID NO: 2108 - protein, 525 aa, Homo sapiens
MSGNWVHPGQILIWAIWVLAAPTKGPSAEGPQRNTRLGWIQGKQVTVLGSPVPVNVFLGVPFAAPPLGSLRFTNPQPASPWDNLREATSYPNLCLQNSEWLLLDQHMLKVHYPKFGVSEDCLYLNIYAPAHADTGSKLPVLVWFPGGAFKTGSASIFDGSALAAYEDVLVVVVQYRLGIFGFFTTWDQHAPGNWAFKDQVAALSWVQKNIEFFGGDPSSVTIFGESAGAISVSSLILSPMAKGLFHKAIMESGVAIIPYLEAHDYEKSEDLQVVAHFCGNNASDSEALLRCLRTKPSKELLTLSQKTKSFTRVVDGAFFPNEPLDLLSQKAFKAIPSIIGVNNHECGFLLPMKEAPEILSGSNKSLALHLIQNILHIPPQYLHLVANEYFHDKHSLTEIRDSLLDLLGDVFFVVPALITARYHREGATEEEKLLSRKMMKYWATFARTGNPNGNDLSLWPAYNLTEQYLQLDLNMSLGQRLKEPRVDFWTSTIPLILSASDMLHSPLSSLTFLSLLQPFFFFCAP

SEQ ID NO: 2109 - protein, 299 aa, Homo sapiens
MVRCLGPALLLLLLLGSASSVGGNRCVDAAEACTADARCQRLRSEYVAQCLGRAAQGGCPRARCRRALRRFFARGPPALTHALLFCPCAGPACAERRRQTFVPSCAFSGPGPAPPSCLEPLNFCERSRVCRCARAAAGPWRGWGRGLSPAHRPPAAQASPPGLSGLVHPSAQRPRRLPAGPGRPLPARLRGPRGVPAGTAVTPNYVDNVSARVAPWCDCGASGNRREDCEAFRGLFTRNRCLDGAIQAFASGWPPVLLDQLNPQGDPEHSLLQVSSTGRALERRSLLSILPVLALPALL

SEQ ID NO: 2110 - protein, 89 aa, Homo sapiens
MQACMVPGLALCLLLGPLAGAKPVQEEGDPYAELPAMPYWPFSTSDFWNYVQHFQALGAYPQIEDMARTFFAHFPLGSTLGFHVPYQED

SEQ ID NO: 2111 - protein, 220 aa, Homo sapiens
MASERLPNRPACLLVASGAAEGVSAQSFLHCFTMASTAFNLQVATPGGKAMEFVDVTESNARWVQDFRLKAYASPAKLESIDGARYHALLIPSCPGALTDLASSGSLARILQHFHSESKPICAVGHGVAALCCATNEDRSWVFDSYSLTGPSVCELVRAPGFARLPLVVEDFVKDSGACFSASEPDAVHVVLDRHLVTGQNASSTVPAVQNLLFLCGSRK

SEQ ID NO: 2112 - protein, 385 aa, Homo sapiens
MWGFRLLRSPPLLLLLPQLGIGNASSCSQARTMNPGGSGGARCSLSAEVRRRQCLQLSTVPGADPQRSNELLLLAAAGEGLERQDLPGDPAKEEPQPPPQHHVLYFPGDVQNYHEIMTRHPENYQWENWSLENVATILAHRFPNSYIWVIKCSRMHLHKFSCYDNFVKSNMFGAPEHNTDFGAFKHLYMLLVNAFNLSQNSLSKKSLNVWNKDSIASNCRSSPSHTTNGCQGEKVRTCEKSDESAMSFYPPSLNDASFTLIGFSKGCVVLNQLLFELKEAKKDKNIDAFIKSIRTMYWLDGGHSGGSNTWVTYPEVLKEFAQTGIIVHTHVTPYQVRDPMRSWIGKEHKKFVQILGDLGMQVTSQIHFTKEAPSIENHFRVHEVF

SEQ ID NO: 2113 - protein, 311 aa, Homo sapiens
MRGAARAAWGRAGQPWPRPPAPGPPPPPLPLLLLLLAGLLGGAGAQYSSDRCSWKGSGLTHEAHRKEVEQVYLRCAAGAVEWMYPTGALIVNLRPNTFSPARHLTVCIRSFTDSSGANIYLEKTGELRLLVPDGDGRPGRVQCFGLEQGGLFVEATPQQDIGRRTTGFQYELVRRHRASDLHELSAPCRPCSDTEVLLAVCTSDFAVRGSIQQVTHEPERQDSAIHLRVSRLYRQKSRVFEPVPEGDGHWQGRVRTLLECGVRPGHGDFLFTGHMHFGEARLGCAPRFKDFQRMYRDAQERGLNPCEVGTD

SEQ ID NO: 2114 - protein, 406 aa, Homo sapiens
MGPSTPLLILFLLSWSGPLQGQQHHLVEYMERRLAALEERLAQCQDQSSRHAAELRDFKNKMLPLLEVAEKEREALRTEADTISGRVDRLEREVDYLETQNPALPCVEFDEKVTGGPGTKGKGRRNEKYDMVTDCGYTISQVRSMKILKRFGGPAGLWTKDPLGQTEKIYVLDGTQNDTAFVFPRLRDFTLAMAARKASRVRVPFPWVGTGQLVYGGFLYFARRPPGRPGGGGEMENTLQLIKFHLANRTVVDSSVFPAEGLIPPYGLTADTYIDLAADEEGLWAVYATREDDRHLCLAKLDPQTLDTEQQWDTPCPRENAEAAFVICGTLYVVYNTRPASRARIQCSFDASGTLTPERAALPYFPRRYGAHASLRYNPRERQLYAWDDGYQIVYKLEMRKKEEEV

SEQ ID NO: 2115 - protein, 299 aa, Homo sapiens
MGGPRALLAALWALEAAGTAALRIGAFNIQSFGDSKVSDPACGSIIAKILAGYDLALVQEVRDPDLSAVSALMEQINSVSEHEYSFVSSQPLGRDQYKEMYLFVYRKDAVSVVDTYLYPDPEDVFSREPFVVKFSAPGTGERAPPLPSRRALTPPPLPAAAQNLVLIPLHAAPHQAVAEIDALYDVYLDVIDKWGTDDMLFLGDFNADCSYVRAQDWAAIRLRSSEVFKWLIPDSADTTVGNSDCAYDRIVACGARLRRSLKPQSATVHDFQEEFGLDQTQALAISDHFPVEVTLKFHR

SEQ ID NO: 2116 - protein, 538 aa, Homo sapiens
MGCLWGLALPLFFFCWEVGVSGSSAGPSTRRADTAMTTDDTEVPAMTLAPGHAALETQTLSAETSSRASTPAGPIPEAETRGAKRISPARETRSFTKTSPNFMVLIATSVETSAASGSPEGAGMTTVQTITGSDPREAIFDTLCTDDSSEEAKTLTMDILTLAHTSTEAKGLSSESSASSDSPHPVITPSRASESSASSDGPHPVITPSRASESSASSDGPHPVITPSWSPGSDVTLLAEALVTVTNIEVINCSITEIETTTSSIPGASDTDLIPTEGVKASSTSDPPALPDSTEAKPHITEVTASAETLSTAGTTESAAPDATVGTPLPTNSATEREVTAPGATTLSGALVTVSRNPLEETSALSVETPSYVKVSGAAPVSIEAGSAVGKTTSFAGSSASSYSPSEAALKNFTPSETPTMDIATKGPFPTSRDPLPSVPPTTTNSSRGTNSTLAKITTSAKTTMKPPTATPTTARTRPTTDVSAGENGGFLLLRLSVASPEDLTDPRVAERLMQQLHRELHAHAPHFQVSLLRVRRG

SEQ ID NO: 2117 - protein, 324 aa, Homo sapiens
MSSEAETQQPPAAPPAAPALSAADTKPGTTGSGAGSGGPGGLTSAAPAGGDKKVIATKVLGTVKWFNVRNGYGFINRNDTKEDVFVHQTAIKKNNPRKYLRSVGDGETVEFDVVEGEKGAEAANVTGPGGVPVQGSKYAADRNHYRRYPRRRGPPRNYQQNYQNSESGEKNEGSESAPEGQAQQRRPYRRRRFPPYYMRRPYGRRPQYSNPPVQGEVMEGADNQGAGEQGRPVRQNMYRGYRPRFRRGPPRQRQPREDGNEEDKENQGDETQGQQPPQRRYRRNFNYRRRRPENPKPQDGKETKAADPPAENSSAPEAEQGGAE

SEQ ID NO: 2118 - protein, 69 aa, Homo sapiens
MRIFYYLHFLCYVTFILPATCTLVNADRCTKRYGRCKRDCLESEKQIDICSLPRKICCTEKLYEEDDMF

SEQ ID NO: 2119 - protein, 113 aa, Homo sapiens
MKLLTTICRLKLEKMYSKTNTSSTIFEKARHGTEKISTARSEGHHITFSRWKSCTAIGGRCKNQCDDSEFRISYCARPTTHCCVTECDPTDPNNWIPKDSVGTQEWYPKDSRH

SEQ ID NO: 2120 - protein, 1009 aa, Homo sapiens
MDLIRGVLLRLLLLASSLGPGAVSLRAAIRKPGKVGPPLDIKLGALNCTAFSIQWKMPRHPGSPILGYTVFYSEVGADKSLQEQLHSVPLSRDIPTTEEVIGDLKPGTEYRVSIAAYSQAGKGRLSSPRHVTTLSQDSCLPPAAPQQPHVIVVSDSEVALSWKPGASEGSAPIQYYSVEFIRPDFDKKWTSIHERIQMDSMVIKGLDPDTNYQFAVRAMNSHGPSPRSWPSDIIRTLCPEEAGSGRYGPRYITDMGAGEDDEGFEDDLDLDISFEEVKPLPATKGGNKKFLVESKKMSISNPKTISRLIPPTSASLPVTTVAPQPIPIQRKGKNGVAIMSRLFDMPCDETLCSADSFCVNDYTWGGSRCQCTLGKGGESCSEDIVIQYPQFFGHSYVTFEPLKNSYQAFQITLEFRAEAEDGLLLYCGENEHGRGDFMSLAIIRRSLQFRFNCGTGVAIIVSETKIKLGGWHTVMLYRDGLNGLLQLNNGTPVTGQSQGQYSKITFRTPLYLGGAPSAYWLVRATGTNRGFQGCVQSLAVNGRRIDMRPWPLGKALSGADVGECSSGICDEASCIHGGTCTAIKADSYICLCPLGFKGRHCEDAFTLTIPQFRESLRSYAATPWPLEPQHYLSFMEFEITFRPDSGDGVLLYSYDTGSKDFLSINLAGGHVEFRFDCGSGTGVLRSEDPLTLGNWHELRVSRTAKNGILQVDKQKIVEGMAEGGFTQIKCNTDIFIGGVPNYDDVKKNSGVLKPFSGSIQKIILNDRTIHVKHDFTSGVNVENAAHPCVRAPCAHGGSCRPRKEGYDCDCPLGFEGLHCQKAIIEAIEIPQFIGRSYLTYDNPDILKRVSGSRSNVFMRFKTTAKDGLLLWRGDSPMRPNSDFISLGLRDGALVFSYNLGSGVASIMVNGSFNDGRWHRVKAVRDGQSGKITVDDYGARTGKSPGMMRQLNINGALYVGGMKEIALHTNRQYMRGLVGCISHFTLSTDYHISLVEDAVDGKNINTCGAK

SEQ ID NO: 2121 - protein, 423 aa, Homo sapiens
MSVRGILRLGTQEYPSPLDPEVGPYCDTPTMRTLFNLLWLALACSPVHTTLSKSDAKKAASKTLLEKSQFSDKPVQDRGLVVTDLKAESVVLEHRSYCSAKARDRHFAGDVLGYVTPWNSHGYDVTKVFGSKFTQISPVWLQLKRRGREMFEVTGLHDVDQGWMRAVRKHAKGLHIVPRLLFEDWTYDDFRNVLDSEDEIEELSKTVVQVAKNQHFDGFVVEVWNQLLSQKRVGLIHMLTHLAEALHQARLLALLVIPPAITPGTDQLGMFTHKEFEQLAPVLDGFSLMTYDYSTAHQPGPNAPLSWVRACVQVLDPKSKWRSKILLGLNFYGMDYATSKDAREPVVGARYIQTLKDHRPRMVWDSQASEHFFEYKKSRSGRHVVFYPTLKSLQVRLELARELGVGVSIWELGQGLDYFYDLL

SEQ ID NO: 2122 - protein, 393 aa, Homo sapiens
MRTLFNLLWLALACSPVHTTLSKSDAKKAASKTLLEKSQFSDKPVQDRGLVVTDLKAESVVLEHRSYCSAKARDRHFAGDVLGYVTPWNSHGYDVTKVFGSKFTQISPVWLQLKRRGREMFEVTGLHDVDQGWMRAVRKHAKGLHIVPRLLFEDWTYDDFRNVLDSEDEIEELSKTVVQVAKNQHFDGFVVEVWNQLLSQKRVGLIHMLTHLAEALHQARLLALLVIPPAITPGTDQLGMFTHKEFEQLAPVLDGFSLMTYDYSTAHQPGPNAPLSWVRACVQVLDPKSKWRSKILLGLNFYGMDYATSKDAREPVVGARYIQTLKDHRPRMVWDSQASEHFFEYKKSRSGRHVVFYPTLKSLQVRLELARELGVGVSIWELGQGLDYFYDLL

SEQ ID NO: 2123 - protein, 652 aa, Homo sapiens
MASVAWAVLKVLLLLPTQTWSPVGAGNPPDCDAPLASALPRSSFSSSSELSSSHGPGFSRLNRRDGAGGWTPLVSNKYQWLQIDLGERMEVTAVATQGGYGSSDWVTSYLLMFSDGGRNWKQYRREESIWGFPGNTNADSVVHYRLQPPFEARFLRFLPLAWNPRGRIGMRIEVYGCAYKSEVVYFDGQSALLYRLDKKPLKPIRDVISLKFKAMQSNGILLHREGQHGNHITLELIKGKLVFFLNSGNAKLPSTIAPVTLTLGSLLDDQHWHSVLIELLDTQVNFTVDKHTHHFQAKGDSSYLDLNFEISFGGIPTPGRSRAFRRKSFHGCLENLYYNGVDVTELAKKHKPQILMMGNVSFSCPQPQTVPVTFLSSRSYLALPGNSGEDKVSVTFQFRTWNRAGHLLFGELRRGSGSFVLFLKDGKLKLSLFQPGQSPRNVTAGAGLNDGQWHSVSFSAKWSHMNVVVDDDTAVQPLVAVLIDSGDTYYFGALYEQSCEAHKHRGNPSGLYYIDADGSGPLGPFLVYCNMTDAAWTVVQHGGPDAVTLRGAPSGHPRSAVSFAYAAGAGQLRSAVNLAERCEQRLALRCGTARRPDSRDGTPLSWWVGRTNETHTSWGGSLPDAQKCTCGLEGNCIDSQYYCNCDAGRNEW

SEQ ID NO: 2124 - protein, 484 aa, Homo sapiens
MWYVSTRGVAPRVNFEGALFSGYAPDGGLFMPEELPQLDRGTLCQWSTLSYPGLVKELCALFIGSELLPKDELNDLIDRAFSRFRHREVVHLSRLRNGLNVLELWHGVTYAFKDLSLSCTTQFLQYFLEKREKHVTVVVGTSGDTGSAAIESVQGAKNMDIIVLLPKGHCTKIQELQMTTVLKQNVHVFGVEGNSDELDEPIKTVFADVAFVKKHNLMSLNSINWSRVLVQMAHHFFAYFQCTPSLDTHPLPLVEVVVPTGAAGNLAAGYIAQKIGLPIRLVVAVNRNDIIHRTVQQGDFSLSEAVKSTLASAMDIQVPYNMERVFWLLSGSDSQVTRALMEQFERTQSVNLPKELHSKLSEAVTSVSVSDEAITQTMGRCWDENQYLLCPHSAVAVNYHYQQIDRQQPSTPRCCLAPASAAKFPEAVLAAGLTPETPAEIVALEHKETRCTLMRRGDNWMLMLRDTIEDLSRQWRSHALNTSQ

SEQ ID NO: 2125 - protein, 87 aa, Homo sapiens
MVSLMKLWIPMLMTFFCTVLLSVLGEMRKKRYDRKELLLEECWGKPNVKECTNKCSKAFRCKDKNYTCCWTYCGNICWINVETSGDY

SEQ ID NO: 2126 - protein, 150 aa, Homo sapiens
MRFMAGPAGSQSLGPLCFHSSPQALYTVLLIVLVMMSLVFGKFVPVNWEPPQPLPFPKYLRCYRCLLETKELGCLLGSDICLTPAGSSCITLHKKNSSGSDVMVSDCRSKEQMSDCSNTRTSPVSGFWIFSQYCFLDFCNDPQNRGLYTP

SEQ ID NO: 2127 - protein, 290 aa, Homo sapiens
MSVRRGRRPARPGTRLSWLLCCSALLSPAAGYVIVSSVSWAVTNEVDEELDSASTEEAMPALLEDSGSIWQQSFPASAHKEDAHLRPRAGAARARPPPAPPGMFSYRREGGQTASAPPGPRLRAATARSLAHASVWGCLATVSTHKKIQGLPFGNCLPVSDGPFNNSTGIPFFYMTAKDPVVADLMKNPMASLMLPESEGEFCRKNIVDPEDPRCVQLTLTGQMIAVSPEEVEFAKQAMFSRHPGMRKWPRQYEWFFMKMRIEHIWLQKWYGGASSISREEYFKAVPRKA

SEQ ID NO: 2128 - protein, 913 aa, Homo sapiens
MGPEALSSLLLLLLVASGDADMKGHFDPAKCRYALGMQDRTIPDSDISASSSWSDSTAARHSRLESSDGDGAWCPAGSVFPKEEEYLQVDLQRLHLVALVGTQGRHAGGLGKEFSRSYRLRYSRDGRRWMGWKDRWGQEVISGNEDPEGVVLKDLGPPMVARLVRFYPRADRVMSVCLRVELYGCLWRDGLLSYTAPVGQTMYLSEAVYLNDSTYDGHTVGGLQYGGLGQLADGVVGLDDFRKSQELRVWPGYDYVGWSNHSFSSGYVEMEFEFDRLRAFQAMQVHCNNMHTLGARLPGGVECRFRRGPAMAWEGEPMRHNLGGNLGDPRARAVSVPLGGRVARFLQCRFLFAGPWLLFSEISFISDVVNNSSPALGGTFPPAPWWPPGPPPTNFSSLELEPRGQQPVAKAEGSPTAILIGCLVAIILLLLLIIALMLWRLHWRRLLSKAERRVLEEELTVHLSVPGDTILINNRPGPREPPPYQEPRPRGNPPHSAPCVPNGSALLLSNPAYRLLLATYARPPRGPGPPTPAWAKPTNTQAYSGDYMEPEKPGAPLLPPPPQNSVPHYAEADIVTLQGVTGGNTYAVPALPPGAVGDGPPRVDFPRSRLRFKEKLGEGQFGEVHLCEVDSPQDLVSLDFPLNVRKGHPLLVAVKILRPDATKNARNDFLKEVKIMSRLKDPNIIRLLGVCVQDDPLCMITDYMENGDLNQFLSAHQLEDKAAEGAPGDGQAAQGPTISYPMLLHVAAQIASGMRYLATLNFVHRDLATRNCLVGENFTIKIADFGMSRNLYAGDYYRVQGRAVLPIRWMAWECILMGKFTTASDVWAFGVTLWEVLMLCRAQPFGQLTDEQVIENAGEFFRDQGRQVYLSRPPACPQGLYELMLRCWSRESEQRPPFSQLHRFLAEDALNTV

SEQ ID NO: 2129 - protein, 80 aa, Homo sapiens
MKLSGMFLLLSLALFCFLTGVFSQGGQVDCGEFQDPKVYCTRESNPHCGSDGQTYGNKCAFCKAIVKSGGKISLKHPGKC

SEQ ID NO: 2130 - protein, 89 aa, Homo sapiens
MKPWILLLVMFISGVVMLLPVLGSFWNKDPFLDMIRETEQCWVQPPYKYCEKRCTKIMTCVRPNHTCCWTYCGNICLDNEEPLKSMLNP

SEQ ID NO: 2131 - protein, 87 aa, Homo sapiens
MLPCLALLLLMELSVCTVAGDGGEEQTLSTEAETWEGAGPSIQLQLQEVKTGKASQFFGLMGKRVGGRPLIQPRRKKGREDEAQGSE

SEQ ID NO: 2132 - protein, 94 aa, Homo sapiens
MQHSLVFFFAVILHLSHLLHLDASIHPFRLPFSSKPFLLIPMSNTTLPHTAWPLSFLHQTVSTLKAVAVTHSLWHLQIPVDCQACNRKSKKIYC

SEQ ID NO: 2133 - protein, 108 aa, Homo sapiens
MRQRLLPSVTSLLLVALLFPGSSQARHVNHSATEALGELRERAPGQGTNGFQLLRHAVKRDLLPPRTPPYQGDVPLGIRNTICRMQQGICRLFFCHSGTGQQHRQRCG

SEQ ID NO: 2134 - protein, 268 aa, Homo sapiens
MLLLAAAFLVAFVLLLYMVSPLISPKPLALPGAHVVVTGGSSGIGKCIAIECYKQGAFITLVARNEDKLLQAKKEIEMHSINDKQVVLCISVDVSQDYNQVENVIKQAQEKLGPVDMLVNCAGMAVSGKFEDLEVSTFEVKPYNVYITVAYPPDTDTPGFAEENRTKPLETRLISETTSVCKPEQVAKQIVKDAIQGNFNSSLGSDGYMLSALTCGMAPVTSITEGLQQVVTMGLFRTIALFYLGSFDSIVRRCMMQREKSENADKTA

SEQ ID NO: 2135 - protein, 561 aa, Homo sapiens
MRWILCWSLTLCLMAQTALGALHTKRPQVVTKYGTLQGKQMHVGKTPIQVFLGVPFSRPPLGILRFAPPEPPEPWKGIRDATTYPPGCLQESWGQLASMYVSTRERYKWLRFSEDCLYLNVYAPARAPGDPQLPVMVWFPGGAFIVGAASSYEGSDLAAREKVVLVFLQHRLGIFGFLSTDDSHARGNWGLLDQMAALRWVQENIAAFGGDPGNVTLFGQSAGAMSISGLMMSPLASGLFHRAISQSGTALFRLFITSNPLKVAKKVAHLAGCNHNSTQILVNCLRALSGTKVMRVSNKMRFLQLNFQRDPEEIIWSMSPVVDGVVIPDDPLVLLTQGKVSSVPYLLGVNNLEFNWLLPYIMKFPLNRQAMRKETITKMLWSTRTLLNITKEQVPLVVEEYLDNVNEHDWKMLRNRMMDIVQDATFVYATLQTAHYHRDAGLPVYLYEFEHHARGIIVKPRTDGADHGDEMYFLFGGPFATGLSMGKEKALSLQMMKYWANFARTGNPNDGNLPCWPRYNKDEKYLQLDFTTRVGMKLKEKKMAFWMSLYQSQRPEKQRQF

SEQ ID NO: 2136 - protein, 147 aa, Homo sapiens
MASSLKIWGTLLALLCILCTLLVQSKEVSWREFMKQHYLSPSREFREYKCDVLMRENEALKDKSSHMFIYISWYKIEHICTSDNWMDRFRNAYVWVQNPLKVLKCHQENSKNSYTESRSFNYIEFHCSMDGYVDSIEDLKMVEPIGN

SEQ ID NO: 2137 - protein, 147 aa, Homo sapiens
MTSSLKIWGILLALLCILCRLCVYSNNIYWREFIKLHYLSPSREFKEYKCDVLMREKEALKGKSFHMFIYSLWFKIQRACINEKGSDRYRNAYVWAPGALKVLECHWEKYNNRYTESRSFSYIEFHCGVDGYVDNIEDLRIIEPISN

SEQ ID NO: 2138 - protein, 415 aa, Homo sapiens
MSPFLYLVLLVLGLHATIHCASPEGKVTACHSSQPNATLYKMSSINADFAFNLYRRFTVETPDKNIFFSPVSISAALVMLSFGACCSTQTEIVETLGFNLTDTPMVEIQHGFQHLICSLNFPKKELELQIGNALFIGKHLKPLAKFLNDVKTLYETEVFSTDFSNISAAKQEINSHVEMQTKGKVVGLIQDLKPNTIMVLVNYIHFKAQWANPFDPSKTEDSSSFLIDKTTTVQVPMMHQMEQYYHLVDMELNCTVLQMDYSKNALALFVLPKEGQMESVEAAMSSKTLKKWNRLLQKGWVDLFVPKFSISATYDLGATLLKMGIQHAYSENADFSGLTEDNGLKLSNAAHKAVLHIGEKGTEAAAVPEVELSDQPENTFLHPIIQIDRSFMLLILERSTRSILFLGKVVNPTEA

SEQ ID NO: 2139 - protein, 94 aa, Homo sapiens
MRTLAILAAILLVALQAQAEPLQARADEVAAAPEQIAADIPEVVVSLAWDESLAPKHPGSRKNMDCYCRIPACIAGERRYGTCIYQGRLWAFCC

SEQ ID NO: 2140 - protein, 353 aa, Homo sapiens
MRLPRRAALGLLPLLLLLPPAPEAAKKPTPCHRCRGLVDKFNQGMVDTAKKNFGGGNTAWEEKTLSKYESSEIRLLEILEGLCESSDFECNQMLEAQEEHLEAWWLQLKSEYPDLFEWFCVKTLKVCCSPGTYGPDCLACQGGSQRPCSGNGHCSGDGSRQGDGSCRCHMGYQGPLCTDCMDGYFSSLRNETHSICTACDESCKTCSGLTNRDCGECEVGWVLDEGACVDVDECAAEPPPCSAAQFCKNANGSYTCEECDSSCVGCTGEGPGNCKECISGYAREHGQCADVDECSLAEKTCVRKNENCYNTPGSYVCVCPDGFEETEDACVPPAEAEATEGESPTQLPSREDL

SEQ ID NO: 2141 - protein, 216 aa, Homo sapiens
MKLNLVQIFFMLLMLLLGLGMGLGLGLHMATAVLEESDQPLNEFWSSDSQDKAEATEEGDGTQTTETLVLSNKEVVQPGWPEDPILGEDEVGGNKMLRASALFQSNKDYLRLDQTDRECNDMMAHKMKEPSQSCIAQYAFIHEDLNTVKAVCNSPVIACELKGGKCHKSSRPFDLTLCELSQPDQVTPNCNYLTSVIKKHIIITCNDMKRQLPTGQ

SEQ ID NO: 2142 - protein, 73 aa, Homo sapiens
MRIAVLLFAIFFFMSQVLPARGKFKEICERPNGSCRDFCLETEIHVGRCLNSQPCCLPLGHQPRIESTTPKKD

SEQ ID NO: 2143 - protein, 202 aa, Homo sapiens
MERGAGAKLLPLLLLLRATGFTCAQTDGRNGYTAVIEVTSGGPWGDWAWPEMCPDGFFASGFSLKVEPPQGIPGDDTALNGIRLHCARGNVLGNTHVVESQSGSWGEWSEPLWCRGGAYLVAFSLRVEAPTTLGDNTAANNVRFRCSDGEELQGPGLSWGDFGDWSDHCPKGACGLQTKIQGPRGLGDDTALNDARLFCCRS

SEQ ID NO: 2144 - protein, 252 aa, Homo sapiens
MQLTRCCFVFLVQGSLYLVICGQDDGPPGSEDPERDDHEGQPRPRVPRKRGHISPKSRPMANSTLLGLLAPPGEAWGILGQPPNRPNHSPPPSAKVKKIFGWGDFYSNIKTVALNLLVTGKIVDHGNGTFSVHFQHNATGQGNISISLVPPSKAVEFHQEQQIFIEAKASKIFNCRMEWEKVERGRRTSLCTHDPAKICSRDHAQSSATWSCSQPFKVVCVYIAFYSTDYRLVQKVCPDYNYHSDTPYYPSG

SEQ ID NO: 2145 - protein, 184 aa, Homo sapiens
MKILVAFLVVLTIFGIQSHGYEVFNIISPSNNGGNVQETVTIDNEKNTAIINIHAGSCSSTTIFDYKHGYIASRVLSRRACFILKMDHQNIPPLNNLQWYIYEKQALDNMFSSKYTWVKYNPLESLIKDVDWFLLGSPIEKLCKHIPLYKGEVVENTHNVGAGGCAKAGLLGILGISICADIHV

SEQ ID NO: 2146 - protein, 216 aa, Homo sapiens
MGAVMGTFSSLQTKQRRPSKDKIEDELEMTMVCHRPEGLEQLEAQTNFTKRELQVLYRGFKNECPSGVVNEDTFKQIYAQFFPHGDASTYAHYLFNAFDTTQTGSVKFEDFVTALSILLRGTVHEKLRWTFNLYDINKDGYINKEEMMDIVKAIYDMMGKYTYPVLKEDTPRQHVDVFFQKMDKNKDGIVTLDEFLESCQEDDNIMRSLQLFQNVM

SEQ ID NO: 2147 - protein, 911 aa, Homo sapiens
MAQLFLPLLAALVLAQAPAALADVLEGDSSEDRAFRVRIAGDAPLQGVLGGALTIPCHVHYLRPPPSRRAVLGSPRVKWTFLSRGREAEVLVARGVRVKVNEAYRFRVALPAYPASLTDVSLALSELRPNDSGIYRCEVQHGIDDSSDAVEVKVKGVVFLYREGSARYAFSFSGAQEACARIGAHIATPEQLYAAYLGGYEQCDAGWLSDQTVRYPIQTPREACYGDMDGFPGVRNYGVVDPDDLYDVYCYAEDLNGELFLGDPPEKLTLEEARAYCQERGAEIATTGQLYAAWDGGLDHCSPGWLADGSVRYPIVTPSQRCGGGLPGVKTLFLFPNQTGFPNKHSRFNVYCFRDSAQPSAIPEASNPASNPASDGLEAIVTVTETLEELQLPQEATESESRGAIYSIPIMEDGGGGSSTPEDPAEAPRTLLEFETQSMVPPTGFSEEEGKALEEEEKYEDEEEKEEEEEEEEVEDEALWAWPSELSSPGPEASLPTEPAAQEESLSQAPARAVLQPGASPLPDGESEASRPPRVHGPPTETLPTPRERNLASPSPSTLVEAREVGEATGGPELSGVPRGESEETGSSEGAPSLLPATRAPEGTRELEAPSEDNSGRTAPAGTSVQAQPVLPTDSASRGGVAVVPASGDCVPSPCHNGGTCLEEEEGVRCLCLPGYGGDLCDVGLRFCNPGWDAFQGACYKHFSTRRSWEEAETQCRMYGAHLASISTPEEQDFINNRYREYQWIGLNDRTIEGDFLWSDGVPLLYENWNPGQPDSYFLSGENCVVMVWHDQGQWSDVPCNYHLSYTCKMGLVSCGPPPELPLAQVFGRPRLRYEVDTVLRYRCREGLAQRNLPLIRCQENGRWEAPQISCVPRRPARALHPEEDPEGRQGRLLGRWKALLIPPSSPMPGP

SEQ ID NO: 2148 - protein, 283 aa, Homo sapiens
MGLGLRGWGRPLLTVATALMLPVKPPAGSWGAQIIGGHEVTPHSRPYMASVRFGGQHHCGGFLLRARWVVSAAHCFSHRDLRTGLVVLGAHVLSTAEPTQQVFGIDALTTHPDYHPMTHANDICLLRLNGSAVLGPAVGLLRPPGRRARPPTAGTRCRVAGWGFVSDFEELPPGLMEAKVRVLDPDVCNSSWKGHLTLTMLCTRSGDSHRRGFCSADSGGPLVCRNRAHGLVSFSGLWCGDPKTPDVYTQVSAFVAWIWDVVRRSSPQPGPLPGTTRPPGEAA

SEQ ID NO: 2149 - protein, 402 aa, Homo sapiens
MMVALRGASALLVLFLAAFLPPPQCTQDPAMVHYIYQRFRVLEQGLEKCTQATRAYIQEFQEFSKNISVMLGRCQTYTSEYKSAVGNLALRVERAQREIDYIQYLREADECIESEDKTLAEMLLQEAEEEKKIRTLLNASCDNMLMGIKSLKIVKKMMDTHGSWMKDAVYNSPKVYLLIGSRNNTVWEFANIRAFMEDNTKPAPRKQILTLSWQGTGQVIYKGFLFFHNQATSNEIIKYNLQKRTVEDRMLLPGGVGRALVYQHSPSTYIDLAVDEHGLWAIHSGPGTHSHLVLTKIEPGTLGVEHSWDTPCRSQDAEASFLLCGVLYVVYSTGGQGPHRITCIYDPLGTISEEDLPNLFFPKRPRSHSMIHYNPRDKQLYAWNEGNQIIYKLQTKRKLPLK

SEQ ID NO: 2150 - protein, 406 aa, Homo sapiens
MQLFLLLCLVLLSPQGASLHRHHPREMKKRVEDLHVGATVAPSSRRDFTFDLYRALASAAPSQSIFFSPVSISMSLAMLSLGAGSSTKMQILEGLGLNLQKSSEKELHRGFQQLLQELNQPRDGFQLSLGNALFTDLVVDLQDTFVSAMKTLYLADTFPTNFRDSAGAMKQINDYVAKQTKGKIVDLLKNLDSNAVVIMVNYIFFKAKWETSFNHKGTQEQDFYVTSETVVRVPMMSREDQYHYLLDRNLSCRVVGVPYQGNATALFILPSEGKMQQVENGLSEKTLRKWLKMFKKRQLELYLPKFSIEGSYQLEKVLPSLGISNVFTSHADLSGISNHSNIQVSEMVHKAVVEVDESGTRAAAATGTIFTFRSARLNSQRLVFNRPFLMFIVDNNILFLGKVNRP

SEQ ID NO: 2151 - protein, 541 aa, Homo sapiens
MRLSPFHLQLEFHMKEKREDLQISWSFISVPEMAVNIQPKALGEDQVAETSAMSDVLKDILKHLAGSASPSVVLITKPTTVKEAQNLQCAASTAQESCPPKPPRAHELKLLVRNIHVLLLSEPGASGHINAVCVVQLNDPVQRFSSTLTKNTPDLMWEEEFTFELNAKSKELHLQISEAGRSSEGLLATATVPLDLFKKQPSGPQSFTLTSGSACGSSVLGSVTAEFSYMEPGELKSWPIPPPVPAAKIEKDRTVMPCGTVVTTVTAVKTKPRVDVGRASPLSSDSPVKTPIKVKVIEKDISVQAIACRSAPVSKTLSSSDTELLVLNGSDPVAEVAIRQLSESSKLKLKSPRKKSTIIISGISKTSLSQDHDAALMQGYTASVDSTHQEDAPSHPERAAASAPPEEAESAQASLAPKPQEDELDSWDLEKEPQAAAWSSQVLLDPDGDELSESSMSVLEPGTAKKHKGGILRKGAKLFFRRRHQQKDPGMSQSHNDLVFLEQPEGSRRKGITLTRILNKKLLSRHRNKNTMNGAPVEPCT

SEQ ID NO: 2152 - protein, 330 aa, Homo sapiens
MAFLPSWVCVLVGSFSASLAGTSNLSETEPPLWKESPGQLSDYRVENSMYIINPWVYLERMGMYKIILNQTARYFAKFAPDNEQNILWGLPLQYGWQYRTGRLADPTRRTNCGYESGDHMCISVDSWWADLNYFLSSLPFLAAVDSGVMGISSDQVRLLPPPKNERKFCYDVSSCRSSFPETMNKWNTFYQYLQSPFSKFDDLLKYLWAAHTSTLADNIKSFEDRYDYYSKAEAHFERSWVLAVDHLAAVLFPTTLIRSYKFQKGMPPRILLNTDVAPFISDFTAFQNVVLVLLNMLDNVDKSIGYLCTEKSNVYRDHSESSSRSYGNNS

SEQ ID NO: 2153 - protein, 270 aa, Homo sapiens
MDSLEWNWALVYELSGEHHDEEWSVKTYQEVAQKFVETHPEFIGIKIIYSDHRSKDVAVIAESIRMAMGLRIKFPTVVAGFDLVGHEDTGHSLHDYKEALMIPAKDGVKLPYFFHAGETDWQGTSIDRNILDALMLNTTRIGHGFALSKHPAVRTYSWKKDIPIEVCPISNQVLKLVSDLRNHPVATLMATGHPMVISSDDPAMFGAKGLSYDFYEVFMGIGGMKADLRTLKQLAMNSIKYSTLLESEKNTFMEIWKKRWDKFIADVATK

SEQ ID NO: 2154 - protein, 312 aa, Homo sapiens
MGVMAMLMLPLLLLGISGLLFIYQEVSRLWSKSAVQNKVVVITDAISGLGKECARVFHTGGARLVLCGKNWERLENLYDALISVADPSKQTFTPKLVLLDLSDISCVPDVAKEVLDCYGCVDILINNASVKVKGPAHKISLELDKKIMDANYFGPITLTKALLPNMISRRTGQIVLVNNIQGKFGIPFRTTYAASKHAALGFFDCLRAEVEEYDVVISTVSPTFIRSYHVYPEQGNWEASIWKFFFRKLTYGVHPVEVAEEVMRTVRRKKQEVFMANPIPKAAVYVRTFFPEFFFAVVACGVKEKLNVPEEG

SEQ ID NO: 2155 - protein, 245 aa, Homo sapiens
MASTALLALCSTGAFSGLAVEAGAGVCHATPIYAGHSWHQATFRLNVAGSTLSRYLRDLLVAANPDLLQQALPRKAITHLKKRSCYVSLDFEGDLRDPARHHPASFSVGNGCCVCLSSERFRCPEPIFQPGLLGQAEQGLPALAFRALQKMPKTLRTRLADTVVLAGGSTLFPGFAERLDKELEAQCRRHGYAALRPHLVAKHGRGMAVWTGGSMVASLHSFQRRWITRAMYQECGSRLLYDVFN

SEQ ID NO: 2156 - protein, 302 aa, Homo sapiens
MRRWAWAAVVVLLGPQLVLLGGVGARREAQRTQQPGQRADPPNATASASSREGLPEAPKPSQASGPEFSDAHMTWLNFVRRPDDGALRKRCGSRDKKPRDLFGPPGPPGAEVTAETLLHEFQELLKEATERRFSGLLDPLLPQGAGLRLVGEAFHCRLQGPRRVDKRTLVELHGFQAPAAQGAFLRGSGLSLASGRFTAPVSGIFQFSASLHVDHSELQGKARLRARDVVCVLICIESLCQRHTCLEAVSGLESNSRVFTLQVQGLLQLQAGQYASVFVDNGSGAVLTIQAGSSFSGLLLGT

SEQ ID NO: 2157 - protein, 471 aa, Homo sapiens
MDSAPLFPRPHLFQNLLLFLWALLNCGLGVSAQGPGEWTPWVSWTRCSSSCGRGVSVRSRRCLRLPGEEPCWGDSHEYRLCQLPDCPPGAVPFRDLQCALYNGRPVLGTQKTYQWVPFHGAPNQCDLNCLAEGHAFYHSFGRVLDGTACSPGAQGVCVAGRCLSAGCDGLLGSGALEDRCGRCGGANDSCLFVQRVFRDAGAFAGYWNVTLIPEGARHIRVEHRSRNHLALMGGDGRYVLNGHWVVSPPGTYEAAGTHVVYTRDTGPQETLQAAGPTSHDLLLQVLLQEPNPGIEFEFWLPRERYSPFQARVQALGWPLRQPQPRGVEPQPPAAPAVTPAQTPTLAPDPCPPCPDTRGRAHRLLHYCGSDFVFQARVLGHHHQAQETRYEVRIQLVYKNRSPLRAREYVWAPGHCPCPMLAPHRDYLMAVQRLVSPDGTQDQLLLPHAGYARPWSPAEDSRIRLTARRCPG

SEQ ID NO: 2158 - protein, 73 aa, Homo sapiens
MAPQTLLLVLVLCVLLLQAQGGYRDKMRMQRIKVCEKRPSIDLCIHHCSYFQKCETNKICCSAFCGNICMSIL

SEQ ID NO: 2159 - protein, 782 aa, Homo sapiens
MARARAGALLALWVLGAAAHPQCLDFRPPFRPTQPLRLCAQYSDFGCCDEGRDAELTRRFWALASRVDAAEWAACAGYARDLLCQECSPYAAHLYDAEDPFTPLRTVPGLCQDYCLDMWHKCRGLFRHLSTDQELWALEGNLARFCRYLSLDDTDYCFPYLLVNKNLNSNLGHVVADAKGCLQLCLEEVANGLRNPVAMVHARDGTHRFFVAEQVGLVWAYLPDRSRLGKPFLNISRVVLTSPWEGDERGFLGIAFHPSFQHNRRLYVYYSVGIRSSEWIRISEFRVSEDDENAVDHSSERIILEVKEPASNHNGGQLLFGDDGYLYIFTGDGGMAGDPFGTFGNAQNKSALLGKVLRIDVDRKERGLPYGIPPDNPFVGDPAAQPEVYALGVRNMWRCSFDRGDPSSGTGRGRLFCGDVGQNKFEEVDVVERGGNYGWRAREGFECYDRSLCANTSLNDLLPIFAYPHTVGKSVTGGYVYRGCEYPNLNGLYIFGDFMSGRLMSLQENPGTGQWQYSEICMGHGQTCEFPGLINNYYPYIISFGEDEAGELYFMSTGEPSATAPRGVVYKIIDASRRAPPGKCQIQPAQVKIRSRLIPFVPKEKFIPKTRSTPRPTARAPTRAPRRGRPTAAPPAPTPRPARPTQQPGSRRGGGRRRGRLNSASRAFRDGEVRLVRPAGLSSGSGRVEVFVGGRWGTVCDDSWNISGAAVVCRQLGFAYAVRAVKRAEFGQGGSLPILLDDVRCAGWERNLLECQHNGVGTHNCEHDEDAGVVCSHQNPDL

SEQ ID NO: 2160 - protein, 438 aa, Homo sapiens
MHPLPGYWSCYCLLLLFSLGVQGSLGAPSAAPEQVHLSYPGEPGSMTVTWTTWVPTRSEVQFGLQPSGPLPLRAQGTFVPFVDGGILRRKLYIHRVTLRKLLPGVQYVYRCGSAQGWSRRFRFRALKNGAHWSPRLAVFGDLGADNPKAVPRLRRDTQQGMYDAVLHVGDFAYNLDQDNARVGDRFMRLIEPVAASLPYMTCPGNHEERYNFSNYKARFSMPGDNEGLWYSWDLGPAHIISFSTEVYFFLHYGRHLVQRQFRWLESDLQKANKNRAARPWIITMGHRPMYCSNADLDDCTRHESKVRKGLQGKLYGLEDLFYKYGVDLQLWAHEHSYERLWPIYNYQVFNGSREMPYTNPRGPVHIITGSAGCEERLTPFAVFPRPWSAVRVKEYGYTRLHILNGTHIHIQQVSDDQDGKIVDDVWVVRPLFGRRMYL

SEQ ID NO: 2161 - protein, 136 aa, Homo sapiens [sequence omitted]

SEQ ID NO: 2162 - protein, 402 aa, Homo sapiens
MAARPGPLWLLGLTLCALGGGGPGLRPPPGCPQRRLGARERRDVQREILAVLGLPGRPRPRAPPAASRLPASAPLFMLDLYHAMAGDDDEDGAPAEQRLGRADLVMSFVNMVERDRALGHQEPHWKEFRFDLTQIPAGEAVTAAEFRIYKVPSIHLLNRTLHVSMFQVVQEQSNRESDLFFLDLQTLRAGDEGWLVLDVTAASDCWLLKRHKDLGLRLYVETEDGHSVDPGLAGLLGQRAPRSQQPFVVTFFRASPSPIRTPRAVRPLRRRQPKKSNELPQANRLPGIFDDVRGSHGRQVCRRHELYVSFQDLGWLDWVIAPQGYSAYYCEGECSFPLDSCMNATNHAILQSLVHLMKPNAVPKACCAPTKLSATSVLYYDSSNNVILRKHRNMVVKACGCH

SEQ ID NO: 2163 - protein, 318 aa, Homo sapiens
MAAAALPPRPLLLLPLVLLLSGRPTRADSKVFGDLDQVRMTSEGSDCRCKCIMRPLSKDACSRVRSGRARVEDFYTVETVSSGTDCRCSCTAPPSSLNPCENEWKMEKLKKQAPELLKSIKANLSRENEVVKDSVRHLSEQLRHYENHSAIMLGIKKELSRLGLQLLQKDAAAAPATPATGTGSKAQDTARGKGKDISKYGSVQKSFADRGLPKPPKEKLLQVEKLRKESGKGSFLQPTAKPRALAQQQAVIRGFTYYKAGKQEVTEAVADNTLQGTSWLEQLPPKVEGRSNSAEPNSAEQDEAEPRSSERVDLASGT

SEQ ID NO: 2164 - protein, 133 aa, Homo sapiens
MALGVPISVYLLFNAMTALTEEAAVTVTPPITAQQADNIEGPIALKFSHLCLEDHNSYCINGACAFHHELEKAICRCFTGYTGERCEHLTLTSYAVDSYEKYIAIGIGVGLLLSGFLVIFYCYIRKRYEKDKI

SEQ ID NO: 2165 - protein, 216 aa, Homo sapiens
MSSEAETQQPPAAPPAAPALSAADTKPGTTGSGAGSGGPGGLTSAAPAGGDKKVIATKVLGTVKWFNVRNGYGFINRNDTKEDVFVHQGAEAANVTGPGGVPVQGSKYAADRNHYRRYPRRRGPPRNYQQNYQNSESGEKNEGSESAPEGQAQQRRPYRRRRFPPYYMRRPYGRRPQYSNPPVQGEVMEGADNQGAGEQGRPVRQNMYRGYRPRFR

SEQ ID NO: 2166 - protein, 251 aa, Homo sapiens
NDWSADQLYLETTGKSRTLQSGLALLYGFLPDFDWKKIYFRHQPSALFCSGSCYCPVRNQYLEKEQRRQYLLRLKNSQLEKTYGEMAKIVDVPTKQLRAANPIDSMLCHFCHNVSFPCTRNGCVDMEHFKVIKTHQIEDERERREKKLYFGYSLLGAHPILNQTIGRMQRATEGRKEELFALYSAHDVTLSPVLSALGLSEARFPRFAARVNIPSGFFTMASMSHSTPLSAKTTTSVLPSPCARLKTWSAL

SEQ ID NO: 2167 - protein, 191 aa, Homo sapiens
MAAPRGRAAPWTTALLLLLASQVLSPGSCADEEEVPEEWVLLHVVQGQIGAGNYSYLRLNHEGKIVLRMRSLKGDADLYVSASSLHPSFDDYELQSATCGPDAVSIPAHFRRPVGIGVYGHPSHLESEFEMKVYYDGTVEQHPFGEAAYPADGADAGQKHAGAPEDASQEEESVLWTILISILKLVLEILF

SEQ ID NO: 2168 - protein, 766 aa, Homo sapiens
MGRRRLLVWLCAVAALLSGAQARGTPLLARPAPPGASRYSLYTTGWRPRLRPGPHKALCAYVVHRNVTCILQEGAESYVKAEYRQCRWGPKCPGTVTYRTVLRPKYKVGYKTVTDLAWRCCPGFTGKRCPEHLTDHGAASPQLEPEPQIPSGQLDPGPRPPSYSRAAPSPHGRKGPGLFGERLERLEGDVQRLAQTYGTLSGLVASHEDPNRMTGGPRAPAVPVGFGVIPEGLVGPGDRARGPLTPPLDEILSKVTEVSNTLQTKVQLLDKVHGLALGHEAHLQRLREAPPSPLTSLALLEEYVDRRLHRLWGSLLDGFEQKLQGVQSECDLRVQEVRRQCEEGQAASRRLHQSLDGRELALRQELSQLGSQLQGLSVSGRGSCCGQLALINARMDGLERALQAVTETQRGPGAPAGDELTRLSAAMLEGGVDGLLEGLETLNGTEGGARGCCLRLDMGGWGVGGFGTMLEERVQSLEERLATLAGELSHDSASPGRSARPLVQTELAVLEQRLVSLETSCTPSTTSAILDSLVAEVKAWQSRSEALLRQVASHAALLQQLNGTVAEVQGQLAEGTGSSLQGEITLLKVNLNSVSKSLTGLSDSVSQYSDAFLAANTSLDERERKVEAEVQAIQEQVSSQGSRLQAGHRQVLNLRGELEQLKAGVAKVASGLSRCQDTAQKLQHTVGHFDQRVAQVEGACRRLGLLAAGLDSLPTEPLRPREGLWSHVDQLNRTLAQHTQDIARLRDDLLDCQAQLAEQVRPGQAN

SEQ ID NO: 2169 - protein, 416 aa, Homo sapiens
MYRHGISSQRSWPLWTTIFIFLGVAAILGVTIGLLVHFLAVEKTYYYQGDFHISGVTYNDNCENAASQASTNLSKDIETKMLNAFQNSSIYKEYVKSEVIKLLPNANGSNVQLQLKFKFPPAEGVSMRTKIKAKLHQMLKNNMASWNAVPASIKLMEISKAASEMLTNNCCGRQVANSIITGNKIVNGKSSLEGAWPWQASMQWKGRHYCGASLISSRWLLSAAHCFAKKNNSKDWTVNFGIVVNKPYMTRKVQNIIFHENYSSPGLHDDIALVQLAEEVSFTEYIRKICLPEAKMKLSENDNVVVTGWGTLYMNGSFPVILQEDFLKIIDNKICNASYAYSGFVTDTMLCAGFMSGEADACQNDSGGPLAYPDSRNIWHLVGIVSWGDGCGKKNKPGVYTRVTSYRNWITSKTGL

SEQ ID NO: 2170 - protein, 212 aa, Homo sapiens
MLSSVVFWGLIALIGTSRGSYPFSHSMKPHLHPRLYHGCYGDIMTMKTSGATCDANSVMNCGIRGSEMFAEMDLRAIKPYQTLIKEVGQRHCVDPAVIAAIISRESHGGSVLQDGWDHRGLKFGLMQLDKQTYHPVGAWDSKEHLSQATGILTERIKAIQKKFPTWSVAQHLKGGLSAFKSGIEAIATPSDIDNDFVNDIIARAKFYKRQSF

SEQ ID NO: 2171 - protein, 125 aa, Homo sapiens
MARSATLAAAALALCLLLAPPGLAWYKPAAGHSSYSVGRAAGLLSGLRRSPYARRSQPYRGAEPPGGAGASPELQLHPRLRSLAVCVQDVAPNLQRCERLPDGRGTYQCKANVFLSLRAADCLAA

SEQ ID NO: 2172 - protein, 288 aa, Homo sapiens
MNNLSFSELCCLFCCPPCPGKIASKLAFLPPDPTYTLMCDESGSRWTLHLSERADWQYSSREKDAIECFMTRTSKGNRIACMFVRCSPNAKYTLLFSHGNAVDLGQMSSFYIGLGSRINCNIFSYDYSGYGASSGKPTEKNLYADIEAAWLALRTRYGIRPENVIIYGQSIGTVPSVDLAARYESAAVILHSPLTSGMRVAFPDTKKTYCFDAFPNIDKISKITSPVLIIHGTEDEVIDFSHGLALFERCQRPVEPLWVEGAGHNDVELYGQYLERLKQFVSQELVNL

SEQ ID NO: 2173 - protein, 138 aa, Homo sapiens
MVAPAARVFLRAVRAALTSTVPDLLCLLARGSPRGLASGRLPLAVHSAQHGPGSGAPWLRIARRALRFVLSKHWGDDCYLTNRLWQDLKPPSHVENGQELRLAPPVQWALQVQGNQLQTAVLCLRMAPPEPAGSRQRI

SEQ ID NO: 2174 - protein, 443 aa, Homo sapiens
MGGPRAWALLCLGLLLPGGGAAWSIGAAPFSGRRNWCSYVVTRTISCHVQNGTYLQRVLQNCPWPMSCPGSSYRTVVRPTYKVMYKIVTAREWRCCPGHSGVSCEEVAASSASLEPMWSGSTMRRMALRPTAFSGCLNCSKVSELTERLKVLEAKMTMLTVIEQPVPPTPATPEDPAPLWGPPPAQGSPGDGGLQDQVGAWGLPGPTGPKGDAGSRGPMGMRGPPGPQGPPGSPGRAGAVGTPGERGPPGPPGPPGPPGPPAPVGPPHARISQHGDPLLSNTFTETNNHWPQGPTGPPGPPGPMGPPGPPGPTGVPGSPGHIGPPGPTGPKGISGHPGEKGERGLRGEPGPQGSAGQRGEPGPKGDPGEKSHWGEGLHQLREALKILAERVLILETMIGLYEPELGSGAGPAGTGTPSLLRGKRGGHATNYRIVAPRSRDERG

SEQ ID NO: 2175 - protein, 238 aa, Homo sapiens
MVLLLLVAIPLLVHSSRGPAHYEMLGRCRMVCDPHGPRGPGPDGAPASVPPFPPGAKGEVGRRGKAGLRGPPGPPGPRGPPGEPGRPGPPGPPGPGPGGVAPAAGYVPRIAFYAGLRRPHEGYEVLRFDDVVTNVGNAYEAASGKFTCPMPGVYFFAYHVLMRGGDGTSMWADLMKNGQVRASAIAQDADQNYDYASNSVILHLDVGDEVFIKLDGGKVHGGNTNKYSTFSGFIIYPD

SEQ ID NO: 2176 - protein, 93 aa, Homo sapiens
MKLFLVLIILLFEVLTDGARLKKCFNKVTGYCRKKCKVGERYEIGCLSGKLCCANDEEEKKHVSFKKPHQHSGEKLSVLQDYIILPTITIFTV

SEQ ID NO: 2177 - protein, 202 aa, Homo sapiens
MVRIWTTIMIVLILLLRIGPNKPSLSGRQAPAQAQTSDLVPSLFPLGLWAPGFCTWSSPDEDKVWRPAWEQGPKGEPDPRGLRPRKPVPGTGNRDSGTRRRLQDATEQDPRPGNDVASAETAGPPSPSGIRAQDRAPRHRRAPPARMPVAPAPSADGEPLQEQGGGLFHRTRSVYNGLELNTWMKVERLFVEKFHQSFSLDN

SEQ ID NO: 2178 - protein, 113 aa, Homo sapiens
MLPCLALLLLMELSVCTVAGDGGEEQTLSTEAETWVIVALEEGAGPSIQLQLQEVKTGKASQFFGLMGKRVGGRPLIQPRRKKAYQLEHTFQGLLGKRSLFTEGREDEAQGSE

SEQ ID NO: 2179 - protein, 422 aa, Homo sapiens
MGPAWLWLLGTGILASVHCQPLLAHGDKSLQGPQPPRHQLSEPAPAYHRITPTITNFALRLYKELAADAPGNIFFSPVSISTTLALLSLGAQANTSALILEGLGFNLTETPEADIHQGFRSLLHTLALPSPKLELKVGNSLFLDKRLKPRQHYLDSIKELYGAFAFSANFTDSVTTGRQINDYLRRQTYGQVVDCLPEFSQDTFMVLANYIFFKAKWKHPFSRYQTQKQESFFVDERTSLQVPMMHQKEMHRFLYDQDLACTVLQIEYRGNALALLVLPDPGKMKQVEAALQPQTLRKWGQLLLPSLLDLHLPRFSISGTYNLEDILPQIGLTNILNLEADFSGVTGQLNKTISKVSHKAMVDMSEKGTEAGAASGLLSQPPSLNTMSDPHAHFNRPFLLLLWEVTTQSLLFLGKVVNPVAG

SEQ ID NO: 2180 - protein, 78 aa, Homo sapiens
MALIRKTFYFLFAMFFILVQLPSGCQAGLDFSQPFPSGEFAVCESCKLGRGKCRKECLENEKPDGNCRLNFLCCRQRI

SEQ ID NO: 2181 - protein, 712 aa, Homo sapiens
MAAAGLVAVAAAAEYSGTVASGGNLPGVHCGPSSGAGPGFGPGSWSRSLDRALEEAAVTGVLSLSGRKLREFPRGAANHDLTDTTRADLSRNRLSEIPIEACHFVSLENLNLYQNCIRYIPEAILNLQALTFLNISRNQLSTLPVHLCNLPLKVLIASNNKLVSLPEEIGHLRHLMELDVSCNEIQTIPSQIGNLEALRDLNVRRNHLVHLPEELAELPLIRLDFSCNKITTIPVCYRNLRHLQTITLDNNPLQSPPAQICIKGKVHIFKYLNIQACKIAPDLPDYDRRPLGFGSCHEELYSSRPYGALDSGFNSVDSGDKRWSGNEPTDEFSDLPLRVAEITKEQRLRRESQYQENRGSLVVTNGGVEHDLDQIDYIDSCTAEEEEAEVRQPKGPDPDSLSSQFMAYIEQRRISHEGSPVKPVAIREFQKTEDMRRYLHQNRVPAEPSSLLSLSASHNQLSHTDLELHQRREQLVERTRREAQLAALQYEEEKIRTKQIQRDAVLDFVKQKASQSPQKQHPLLDGVDGECPFPSRRSQHTDDSALCMSLSGLNQVGCAATLPHSSAFTPLKSDDRPNALLSSPATETVHHSPAYSFPAAIQRNQPQRPESFLFRAGVRAETNKGHASPLPPSAAPTTDSTDSITGQNSRQREEELELIDQLRKHIEYRLKVSLPCDLGAALTDGVVLCHLANHVRPRSVPSIHVPSPAVVS

SEQ ID NO: 2182 - protein, 70 aa, Homo sapiens
MRVLFFVFGVLSLMFTVPPARSFISNDECPSEYYHCRLKCNADEHAIRYCADFSICCKLKIIEIDGQKKW

SEQ ID NO: 2183 - protein, 262 aa, Homo sapiens
MAAASAGATRLLLLLLMAVAAPSRARGSGCRAGTGARGAGAEGREGEACGTVGLLLEHSFEIDDSANFRKRGSLLWNQQDGTLSLSQRQLSEEERGRLRDVAALNGLYRVRIPRRPGALDGLEAGGYVSSFVPACSLVESHLSDQLTLHVDVAGNVVGVSVVTHPGGCRGHEVEDVDLELFNTSVQLQPPTTAPGPETAAFIERLEMEQAQKAKNPQEQKSFFAKYWMYIIPVVLFLMMSGAPDTGGQGGGGGGGGGGGSGR

SEQ ID NO: 2184 - protein, 49 aa, Homo sapiens
MDSSREPTLGRLDAAGFWQVWQRFDADGHGHESKFAQGETAVYDYPRCL

SEQ ID NO: 2185 - protein, 70 aa, Homo sapiens
MPGAMKIFVFILAALILLAQIFQARTAIHRALISKRMEGHCEAECLTFEVKIGGCRAELAPFCCKNRKKH

SEQ ID NO: 2186 - protein, 236 aa, Homo sapiens
MMPAERRLPLSFVLDVLEGRAQHPGVLYVQKQCSNLPSELPQLLPDLESHVPWASEALGKMPDAVNFWLGEAAAVTSLHKDHYENLYCVVSGEKHFLFHPPSDRPFIPYGLRVPGCLQFPHTLLPWAPELYTPATYQLTEEGTFKVVDEEAMEKVPWIPLDPLAPDLARYPSYSQAQALRCTVRAGEMLYLPALWFHHVQQSQGCIAVNFWYDMEYDLKYSYFQLLDSLTKASGLD

SEQ ID NO: 2187 - protein, 365 aa, Homo sapiens
MAPKLITVLCLGFCLNQKICPHAGAQDKFSLSAWPSPVVPLGGRVTLSCHSHLRFVIWTIFQTTGTRSHELHTGLSNNITISPVTPEHAGTYRCVGIYKHASKWSAESNSLKIIVTGLFTKPSISAHPSSLVHAGARVSLRCHSELAFDEFILYKEGHIQHSQQLDQGMEAGIHYVEAVFSMGPVTPAHAGAYRCCGCFSHSRYEWSAPSDPLDIVITGKYKKPSLSTQVDPMMRLGEKLTLFCSSEISFDQYHLFRHGVAHGQWLSGGQRHREAFQANFSVGRATPVPGGTYRCYGSFNDSPYKPPVTRCNFTPQETLRVLLCHSQNPPLNLTPPWQTQSPRKANGRMKRSLQQKRHRRSYMPS

SEQ ID NO: 2188 - protein, 65 aa, Homo sapiens
MRTFLFLFAVLFFLTPAKNAFFDEKCNKLKGTCKNNCGKNEELIALCQKSLKCCRTIQPCGSIID

SEQ ID NO: 2189 - protein, 65 aa, Homo sapiens; identical to SEQ ID NO: 2188

SEQ ID NO: 2190 - protein, 78 aa, Homo sapiens; identical to SEQ ID NO: 2180

SEQ ID NO: 2191 - protein, 955 aa, Homo sapiens
MWAGLLLRAACVALLLPGAPARGYTGRKPPGHFAAERRRLGPHVCLSGFGSGCCPGWAPSMGGGHCTLPLCSFGCGSGICIAPNVCSCQDGEQGATCPETHGPCGEYGCDLTCNHGGCQEVARVCPVGFSMTETAVGIRCTDIDECVTSSCEGHCVNTEGGFVCECGPGMQLSADRHSCQDTDECLGTPCQQRCKNSIGSYKCSCRTGFHLHGNRHSCVDVNECRRPLERRVCHHSCHNTVGSFLCTCRPGFRLRADRVSCEAFPKAVLAPSAILQPRQHPSKMLLLLPEAGRPALSPGHSPPSGAPGPPAGVRTTRLPSPTPRLPTSSPSAPVWLLSTLLATPVPTASLLGNLRPPSLLQGEVMGTPSSPRGPESPRLAAGPSPCWHLGAMHESRSRWTEPGCSQCWCEDGKVTCEKVRCEAACSHPIPSRDGGCCPSCTGCFHSGVVRAEGDVFSPPNENCTVCVCLAGNVSCISPECPSGPCQTPPQTDCCTCVPVRCYFHGRWYADGAVFSGGGDECTTCVCQNGEVECSFMPCPELACPREEWRLGPGQCCFTCQEPTPSTGCSLDDNGVEFPIGQIWSPGDPCELCICQADGSVSCKRTDCVDSCPHPIRIPGQCCPDCSAGCTYTGRIFYNNETFPSVLDPCLSCICLLGSVACSPVDCPITCTYPFHPDGECCPVCRDCNYEGRKVANGQVFTLDDEPCTRCTCQLGEVSCEKVPCQRACADPALLPGDCCSSCPDSLSPLEEKQGLSPHGNVAFSKAGRSLHGDTEAPVNCSSCPGPPTASPSRPVLHLLQLLLRTNLMKTQTLPTSPAGAHGPHSLALGLTATFPGEPGASPRLSPGPSTPPGAPTLPLASPGAPQPPPVTPERSFSASGAQIVSRWPPLPGTLLTEASALSMMDPSPSKTPITLLGPRVLSPTTSRLSTALAATTHPGPQQPPVGASRGEESTM

SEQ ID NO: 2192 - protein, 89 aa, Homo sapiens
MVSCERRASKSVGQILLWDFGYTCRLSHRRRNSTEILSRNLPALYTGIKVCEKRPSIDLCIHHCSYFQKCETNKICCSAFCGNICMSIL

SEQ ID NO: 2193 - protein, 199 aa, Homo sapiens
METFPLLLLSLGLVLAEASESTMKIIKEEFTDEEMQYDMAKSGQEKQTIEILMNPILLVKNTSLSMSKDDMSSTLLTFRSLHYNDPKGNSSGNDKECCNDMTVWRKVSEANGSCKWSNNFIRSSTEVMRRVHRAPSCKFVQNPGISCCESLELENTVCQFTTGKQFPRCQYHSVTSLEKILTVLTGHSLMSWLVCGSKL

SEQ ID NO: 2194 - protein, 242 aa, Homo sapiens
MAAATRGCRPWGSLLGLLGLVSAAAAAWDLASLRCTLGAFCECDFRPDLPGLECDLAQHLAGQHLAKALVVKALKAFVRDPAPTKPLVLSLHGWTGTGKSYVSSLLAHYLFQGGLRSPRVHHFSPVLHFPHPSHIERYKKDLKSWVQGNLTACGRSLFLFDEMDKMPPGLMEVLRPFLGSSWVVYGTNYRKAIFIFIRWLLKLGHHGRAPPRRSGALPPAPAAPRPALRAQRAGPAGPGAKG

SEQ ID NO: 2195 - protein, 208 aa, Homo sapiens
MLGLLVALLALGLAVFALLDVWYLVRLPCAVLRARLLQPRVRDLLAEQRFPGRVLPSDLDLLLHMNNARYLREADFARVAHLTRCGVLGALRELRAHTVLAASCARHRRSLRLLEPFEVRTRLLGWDDRAFYLEARFVSLRDGFVCALLRFRQHLLGTSPERVVQHLCQRRVEPPELPADLQHWISYNEASSQLLRMESGLSDVTKDQ

SEQ ID NO: 2196 - protein, 140 aa, Homo sapiens
MLVKLNSQARLSSMVKKVRLPSRCEPPGTTCTVSGWGTTTSPDVTFPSDLMCVDVKLISPQDCTKVYKDLLENSMLCAGIPDSKKNACNGDSGGPLVCRGTLQGLVSWGTFPCGQPNDPGVYTQVCKFTKWINDTMKKHR

SEQ ID NO: 2197 - protein, 117 aa, Homo sapiens
MLSKAHGCKTALSLGRCPKIREECEFQERDVCTKDRQCQDNKKCCVFSCGKKCLDLKQDVCEMPKETGPCLAYFLHWWYDKKDNTCSMFVYGGCQGNNNNFQSKANCLNTCKNKRFP

SEQ ID NO: 2198 - protein, 775 aa, Homo sapiens
MHPGPEEAGSGRYGPRYITDMGAGEDDEGFEDDLDLDISFEEVKPLPATKGGNKKFLVESKKMSISNPKTISRLIPPTSASLPVTTVAPQPIPIQRKGKNGVAIMSRLFDMPCDETLCSADSFCVNDYTWGGSRCQCTLGKGGESCSEDIVIQYPQFFGHSYVTFEPLKNSYQAFQITLEFRAEAEDGLLLYCGENEHGRGDFMSLAIIRRSLQFRFNCGTGVAIIVSETKIKLGGWHTVMLYRDGLNGLLQLNNGTPVTGQSQGQYSKITFRTPLYLGGAPSAYWLVRATGTNRGFQGCVQSLAVNGRRIDMRPWPLGKALSGADVGECSSGICDEASCIHGGTCTAIKADSYICLCPLGFKGRHCEDAFTLTIPQFRESLRSYAATPWPLEPQHYLSFMEFEITFRPDSGDGVLLYSYDTGSKDFLSINLAGGHVEFRFDCGSGTGVLRSEDPLTLGNWHELRVSRTAKNGILQVDKQKIVEGMAEGGFTQIKCNTDIFIGGVPNYDDVKKNSGVLKPFSGSIQKIILNDRTIHVKHDFTSGVNVENAAHPCVRAPCAHGGSCRPRKEGYDCDCPLGFEGLHCQKAIIEAIEIPQFIGRSYLTYDNPDILKRVSGSRSNVFMRFKTTAKDGLLLWRGDSPMRPNSDFISLGLRDGALVFSYNLGSGVASIMVNGSFNDGRWHRVKAVRDGQSGKITVDDYGARTGKSPGMMRQLNINGALYVGGMKEIALHTNRQYMRGLVGCISHFTLSTDYHISLVEDAVDGKNINTCGAK

SEQ ID NO: 2199 - protein, 418 aa, Homo sapiens
MRTLFNLLWLALACSPVHTTLSKSDAKKAASKTLLEKVKFCSCCPGWSAMARSWLTATSATQSQFSDKPVQDRGLVVTDLKAESVVLEHRSYCSAKARDRHFAGDVLGYVTPWNSHGYDVTKVFGSKFTQISPVWLQLKRRGREMFEVTGLHDVDQGWMRAVRKHAKGLHIVPRLLFEDWTYDDFRNVLDSEDEIEELSKTVVQVAKNQHFDGFVVEVWNQLLSQKRVGLIHMLTHLAEALHQARLLALLVIPPAITPGTDQLGMFTHKEFEQLAPVLDGFSLMTYDYSTAHQPGPNAPLSWVRACVQVLDPKSKWRSKILLGLNFYGMDYATSKDAREPVVGARYIQTLKDHRPRMVWDSQASEHFFEYKKSRSGRHVVFYPTLKSLQVRLELARELGVGVSIWELGQGLDYFYDLL

SEQ ID NO: 2200 - protein, 270 aa, Homo sapiens
MMLRLLSSLLLVAVASGYGPPSSRPSSRVVNGEDAVPYSWPWQVSLQYEKSGSFYHTCGGSLIAPDWVVTAGHCISSSRTYQVVLGEYDRAVKEGPEQVIPINSGDLFVHPLWNRSCVACGNDIALIKLSRSAQLGDAVQLASLPPAGDILPNETPCYITGWGRLYTNGPLPDKLQEALLPVVDYEHCSRWNWWGSSVKKTMVCAGGDIRSGCNGDSGGPLNCPTEDGGWQVHGVTSFVSAFGCNTRRKPTVFTRVSAFIDWIEETIASH

SEQ ID NO: 2201 - protein, 194 aa, Homo sapiens; identical to SEQ ID NO: 1914

SEQ ID NO: 2202 - protein, 435 aa, Homo sapiens
MQGQGRRRGTCKDIFCSKMASYLYGVLFAVGLCAPIYCVSPANAPSAYPRPSSTKSTPASQVYSLNTDFAFRLYRRLVLETPSQNIFFSPVSVSTSLAMLSLGAHSVTKTQILQGLGFNLTHTPESAIHQGFQHLVHSLTVPSKDLTLKMGSALFVKKELQLQANFLGNVKRLYEAEVFSTDFSNPSIAQARINSHVKKKTQGKVVDIIQGLDLLTAMVLVNHIFFKAKWEKPFHPEYTRKNFPFLVGEQVTVHVPMMHQKEQFAFGVDTELNCFVLQMDYKGDAVAFFVLPSKGKMRQLEQALSARTLRKWSHSLQKRWIEVFIPRFSISASYNLETILPKMGIQNVFDKNADFSGIAKRDSLQVSKATHKAVLDVSEEGTEATAATTTKFIVRSKDGPSYFTVSFNRTFLMMITNKATDGILFLGKVENPTKS

SEQ ID NO: 2203 - protein, 130 aa, Homo sapiens
MASDLIRTILAVALISKLGTAVDAELMPSGAILQNKRENLPRVCHALAFLGMARCQDLFLVRLQGWKLGTRFQDGPRSTPQEEGGSPQRKRGMPVQIHFLLKSFLSSPITFAFISLARTVSLATAICKIV

SEQ ID NO: 2204 - protein, 278 aa, Homo sapiens
MQWLRVRESPGEATGHRVTMGTAALGPVWAALLLFLLMCEIPMVELTFDRAVASGCQRCCDSEDPLDPAHVSSASSSGRPHALPEIRPYINITILKGDKGDPGPMGLPGYMGREGPQGEPGPQGSKGDKGEMGSPGAPCQKRFFAFSVGRKTALHSGEDFQTLLFERVFVNLDGCFDMATGQFAAPLRGIYFFSLNVHSWNYKETYVHIMHNQKEAVILYAQPSERSIMQSQSVMLDLAYGDRVWVRLFKRQRENAIYSNDFDTYITFSGHLIKAEDD

SEQ ID NO: 2205 - protein, 544 aa, Homo sapiens
MCTVVDPRIVRRYLLRRQLGQGAYGIVWKAVDRRTGEVVAIKKIFDAFRDKTDAQRTFREITLLQEFGDHPNIISLLDVIRAENDRDIYLVFEFMDTDLNAVIRKGGLLQDVHVRSIFYQLLRATRFLHSGHVVHRDQKPSNVLLDANCTVKLCDFGLARSLGDLPEGPEDQAVTEYVATRWYRAPEVLLSSHRYTLGVDMWSLGCILGEMLRGRPLFPGTSTLHQLELILETIPPPSEEDLLALGSGCRASVLHQLGSRPRQTLDALLPPDTSPEALDLLRRLLVFAPDKRLSATQALQHPYVQRFHCPSDEWAREADVRPRAHEGVQLSVPEYRSRVYQMILECGGSSGTSREKGPEGVSPSQAHLHKPRADPQLPSRTPVQGPRPRPQSSPGHDPAEHESPRAAKNVPRQNSAPLLQTALLGNGERPPGAKEAPPLTLSLVKPSGRGAAPSLTSQAAAQVANQALIRGDWNRGGGVRVASVQQVPPRLPPEARPGRRMFSTSALQGAQGGARALLGGYSQAYGTVCHSALGHLPLLEGHHV

SEQ ID NO: 2206 - protein, 132 aa, Homo sapiens
MKSSGLFPFLVLLALGTLAPWAVEGSGKSFKAGVCPPKKSAQCLRYKKPECQSDWQCPGKKRCCPDTCGIKCLDPVDTPNPTRRKPGKCPVTYGQCLMLNPPNFCEMDGQCKRDLKCCMGMCGKSCVSPVKA

SEQ ID NO: 2207 - protein, 466 aa, Homo sapiens
MKPPLLVFIVCLLWLKDSHCAPTWKDKTAISENLKSFSEVGEIDADEEVKKALTGIKQMKIMMERKEKEHTNLMSTLKKCREEKQEALKLLNEVQEHLEEEERLCRESLADSWGECRSCLENNCMRIYTTCQPSWSSVKNKIERFFRKIYQFLFPFHEDNEKDLPISEKLIEEDAQLTQMEDVFSQLTVDVNSLFNRSFNVFRQMQQEFDQTFQSHFISDTDLTEPYFFPAFSKEPMTKADLEQCWDIPNFFQLFCNFSVSIYESVSETITKMLKAIEDLPKQDKAPDHGGLISKMLPGQDRGLCGELDQNLSRCFKFHEKCQKCQAHLSEDCPDVPALHTELDEAIRLVNVSNQQYGQILQMTRKHLEDTAYLVEKMRGQFGWVSELANQAPETEIIFNSIQVVPRIHEGNISKQDETMMTDLSILPSSNFTLKIPLEESAESSNFIGYVVAKALQHFKEHFKTW

SEQ ID NO: 2208 - protein, 173 aa, Homo sapiens
MHWKMLLLLLLYYNAEASMCHRWSRAVLFPAAHRPKRSSSLPLNPVLQTSLEEVELLYEFLLAELEISPDLQISIKDEELASLRKASDFRTVCNNVIPKSIPDIRRLSASLSSHPGILKKEDFERTVLTLAYTAYRTALSHGHQKDIWAQSLVSLFQALRHDLMRSSQPGVPP

SEQ ID NO: 2209 - protein, 490 aa, Homo sapiens
MEDSDSAAKQLGLAEAAAVAAAAAVAAAAAAAAGGEAEEPVLSRDEDSEEDADSEAERETPRVTAVAVMAAEPGHMDMGAEALPGPDEAAAAAAFAEVTTVTVANVGAAADNVFTTSVANAASISGHVLSGRTALQIGDSLNTEKATLIVVHTDGSIVETTGLKGPAAPLTPGPQSPPTPLAPGQEKGGTKYNWDPSVYDSELPVRCRNISGTLYKNRLGSGWDLKPSRCLLHLCCLLRRHDLITVTPSGQITTSGALTFDRASTVEATAVISESPAQGDVFAGATVQEASVQPPCRASHPEPHYPGYQDSCQIAPFPEAALPTSHPKIVLTSLPALAVPPPTPTKAAPPALVNGLELSEPRSWLYLEEMVNSLLNTAQQLKTLFEQAKHASTYREAATNQAKIHADAERKEVIHPPRLPKVLGLQQSCVNCGREAMSECTGCHKVNYCSTFCQRKDWKDHQHICGQSAAVTVQADEVHVAESVMEKVTV

SEQ ID NO: 2210 - protein, 491 aa, Homo sapiens
MPSTVLPSTVLPSLLPTAGAGWSMRWILCWSLTLCLMAQTALGALHTKRPQVVTKYGTLQGKQMHVGKTPIQVFLGVPFSRPPLGILRFAPPEPPEPWKGIRDATTYPPGCLQESWGQLASMYVSTRERYKWLRFSEDCLYLNVYAPARAPGDPQLPVMVWFPGGAFIVGAASSYEGSDLAAREKVVLVFLQHRLGIFGFLSTDDSHARGNWGLLDQMAALRWVQENIAAFGGDPGNVTLFGQSAGAMSISGLMMSPLASGLFHRAISQSGTALFRLFITSNPLKVAKKVAHLAGCNHNSTQILVNCLRALSGTKVMRVSNKMRFLQLNFQRDPEEIIWSMSPVVDGVVIPDDPLVLLTQGKVSSVPYLLGVNNLEFNWLLPYIMKFPLNRQAMRKETITKMLWSTRTLLNITKEQVPLVVEEYLDNVNEHDWKMLRNRMMDIVQDATFVYATLQTAHYHRETPMMGICPAGHATTRMKSTCSWILPQEWA

SEQ ID NO: 2211 - protein, 250 aa, Homo sapiens [sequence omitted]

SEQ ID NO: 2212 - protein, 478 aa, Homo sapiens
MSPPLLKLGAVLSTMAMISNWMSQTLPSLVGLNTTRLSTPDTLTQISPKEGWQVYSSAQDPDGRCICTVVAPEQNLCSRDAKSRQLRQLLEKVQNMSQSIEVLNLRTQRDFQYVLKMETQMKGLKAKFRQIEDDRKTLMTKHFQELKEKMDELLPLIPVLEQYKTDAKLITQFKEEIRNLSAVLTGIQEEIGAYDYEELHQRVLSLETRLRDCMKKLTCGKLMKITGPVTVKTSGTRFGAWMTDPLASEKNNRVWYMDSYTNNKIVREYKSIADFVSGAESRTYNLPFKWAGTNHVVYNGSLYFNKYQSNIIIKYSFDMGRVLAQRSLEYAGFHNVYPYTWGGFSDIDLMADEIGLWAVYATNQNAGNIVISQLNQDTLEVMKSWSTGYPKRSAGESFMICGTLYVTNSHLTGAKVYYSYSTKTSTYEYTDIPFHNQYFHISMLDYNARDRALYAWNNGHQVLFNVTLFHIIKTEDDT

SEQ ID NO: 2213 - protein, 366 aa, Homo sapiens
MARERPPGRGCGVLRRCLLGAVLLFGLRLCAELRRAGPGSPTRSAPPGPAWRPPGPHLPPAPGQPRGASRRQVTYVRSGRRAPPGGGGSGTPEPGCCAPRGRPRRKGPRWHIDLQPWAGSAQSLDEEAWRFLRYISTTQIACNHMNTDSLATDSSPTHKPWSVCLDDRFNLAHQIRNKQCRLYSLGLGSDDTHFEVSMANNGCEVHRFDPSVKSAHILESQHLWYHRLSIDWRDPHPAVAAQKPHSNTRKLGSILNEFGHHKIDVLKADLESAEWKVLENLILEDVLEQIGQLIFEIHLHWPGFEVSGSDSSVVRFWYSLLKELEQKDFRLFHSYKDLSKPQLFLKKDIFNASSCYTLSWVNTRWK

SEQ ID NO: 2214 - protein, 99 aa, Homo sapiens
MKIPVLPAVVLLSLLVLHSAQGATLGGPEEESTIENYASRPEAFNTPFLNIDKLRSAFKADEFLNWHALFESIKRKLPFLNWDAFPKLKGLRSATPDAQ

SEQ ID NO: 2215 - protein, 205 aa, Homo sapiens
MMRTLITTHPLPLLLLPQQLLQLVQFQEVDTDFDFPEEDKKEEFEECLEKFFSTGPARPPTKEKVKRRVLIEPGMPLNHIEYCNHEIMGKNVYYKHRWVAEHYFLLMQYDELQKICYNRFVPCKNGIRKCNRSKGLVEGVYCNLTEAFEIPACKYESLYRKGYVLITCSWQNEMQKRIPHTINDLVEPPEHRSFLSEDGVFVISP

SEQ ID NO: 2216 - protein, 133 aa, Homo sapiens
MLDWRLASAHFILAVTLTLWSSGKVLSVDVTTTEAFDSGVIDVQSTPTVREEKSATDLTAKLLLLDELVSLENDVIETKKKRSFSGFGSPLDRLSAGSVDHKGKQRKVVDHPKRRFGIPMDRIGRNRLSNSRG

SEQ ID NO: 2217 - protein, 281 aa, Homo sapiens
MGSRGQGLLLAYCLLLAFASGLVLSRVPHVQGEQQEWEGTEELPSPPDHAERAEEQHEKYRPSQDQGLPASRCLRCCDPGTSMYPATAVPQINITILKGEKGDRGDRGLQGKYGKTGSAGARGHTGPKGQKGSMGAPGERCKSHYAAFSVGRKKPMHSNHYYQTVIFDTEFVNLYDHFNMFTGKFYCYVPGLYFFSLNVHTWNQKETYLHIMKNEEEVVILFAQVGDRSIMQSQSLMLELREQDQVWVRLYKGERENAIFSEELDTYITFSGYLVKHATEP

SEQ ID NO: 2218 - protein, 43 aa, Homo sapiens
MKLLYLFLAILLAIEEPVISALVRTVGCCLDTARQTPHPSMHG

SEQ ID NO: 2219 - protein, 286 aa, Homo sapiens
MKVLLLTGLGALFFAYYWDDNFDPASLQGARVLLTGANAGVGEELAYHYARLGSHLVLTAHTEALLQKVVGNCRKLGAPKVFYIAADMASPEAPESVVQFALDKLGGLDYLVLNHIGGAPAGTRARSPQATRWLMQVNFVSYVQLTSRALPSLTDSKGSLVVVSSLLGRVPTSFSTPYSAAKFALDGFFGSLRRELDVQDVNVAITMCVLGLRDRASAAEAVRGVTRVKAAPGPKAALAVIRGGATRAAGVFYPWRFRLLCLLRRWLPRPRAWFIRQELNVTAAAA

SEQ ID NO: 2220 - protein, 441 aa, Homo sapiens
MRVVTIVILLCFCKAAELRKASPGSVRSRVNHGRAGGGRRGSNPVKRYAPGLPCDVYTYLHEKYLDCQERKLVYVLPGWPQDLLHMLLARNKIRTLKNNMFSKFKKLKSLDLQQNEISKIESEAFFGLNKLTTLLLQHNQIKVLTEEVFIYTPLLSYLRLYDNPWHCTCEIETLISMLQIPRNRNLGNYAKCESPQEQKNKKLRQIKSEQLCNEEEKEQLDPKPQVSGRPPVIKPEVDSTFCHNYVFPIQTLDCKRKELKKVPNNIPPDIVKLDLSYNKINQLRPKEFEDVHELKKLNLSSNGIEFIDPAAFLGLTHLEELDLSNNSLQNFDYGVLEDLYFLKLLWLRDNPWRCDYNIHYLYYWLKHHYNVHFNGLECKTPEEYKGWSVGKYIRSYYEECPKDKLPAYPESFDQDTEDDEWEKKHRDHTAKKQSVIITIVG

SEQ ID NO: 2221 - protein, 512 aa, Homo sapiens
MAESGLAMWPSLLLLLLLPGPPPVAGLEDAAFPHLGESLQPLPRACPLRCSCPRVDTVDCDGLDLRVFPDNITRAAQHLSLQNNQLQELPYNELSRLSGLRTLNLHNNLISSEGLPDEAFESLTQLQHLCVAHNKLSVAPQFLPRSLRVADLAANQVMEIFPLTFGEKPALRSVYLHNNQLSNAGLPPDAFRGSEAIATLSLSNNQLSYLPPSLPPSLERLHLQNNLISKVPRGALSRQTQLRELYLQHNQLTDSGLDATTFSKLHSLEYLDLSHNQLTTVPAGLPRTLAILHLGRNRIRQVEAARLHGARGLRYLLLQHNQLGSSGLPAGALRPLRGLHTLHLYGNGLDRVPPALPRRLRALVLPHNHVAALGARDLVATPGLTELNLAYNRLASARVHHRAFRRLRALRSLDLAGNQLTRLPMGLPTGLRTLQLQRNQLRMLEPEPLAGLDQLRELSLAHNRLRVGDIGPGTWHELQALQVRHRLVSHTVPRAPPSPCLPCHVPNILVSW

SEQ ID NO: 2222 - protein, 775 aa, Homo sapiens
MKEGPEEAGSGRYGPRYITDMGAGEDDEGFEDDLDLDISFEEVKPLPATKGGNKKFLVESKKMSISNPKTISRLIPPTSASLPVTTVAPQPIPIQRKGKNGVAIMSRLFDMPCDETLCSADSFCVNDYTWGGSRCQCTLGKGGESCSEDIVIQYPQFFGHSYVTFEPLKNSYQAFQITLEFRAEAEDGLLLYCGENEHGRGDFMSLAIIRRSLQFRFNCGTGVAIIVSETKIKLGGWHTVMLYRDGLNGLLQLNNGTPVTGQSQGQYSKITFRTPLYLGGAPSAYWLVRATGTNRGFQGCVQSLAVNGRRIDMRPWPLGKALSGADVGECSSGICDEASCIHGGTCTAIKADSYICLCPLGFKGRHCEDAFTLTIPQFRESLRSYAATPWPLEPQHYLSFMEFEITFRPDSGDGVLLYSYDTGSKDFLSINLAGGHVEFRFDCGSGTGVLRSEDPLTLGNWHELRVSRTAKNGILQVDKQKIVEGMAEGGFTQIKCNTDIFIGGVPNYDDVKKNSGVLKPFSGSIQKIILNDRTIHVKHDFTSGVNVENAAHPCVRAPCAHGGSCRPRKEGYDCDCPLGFEGLHCQKAIIEAIEIPQFIGRSYLTYDNPDILKRVSGSRSNVFMRFKTTAKDGLLLWRGDSPMRPNSDFISLGLRDGALVFSYNLGSGVASIMVNGSFNDGRWHRVKAVRDGQSGKITVDDYGARTGKSPGMMRQLNINGALYVGGMKEIALHTNRQYMRGLVGCISHFTLSTDYHISLVEDAVDGKNINTCGAK

SEQ ID NO: 2223 - protein, 476 aa, Homo sapiens
MKFQGPLACLLLALCLGSGEAGPLQSGEESTGTNIGEALGHGLGDALSEGVGKAIGKEAGGAAGSKVSEALGQGTREAVGTGVRQVPGFGVADALGNRVGEAAHALGNTGHEIGRQAEDVIRHGADAVRGSWQGVPGHNGAWETSGGHGIFGSQGGLGGQGQGNPGGLGTPWVHGYPGNSAGSFGMNPQGAPWGQGGNGGPPNFGTNTQGAVAQPGYGSVRASNQNEGCTNPPPSGSGGGSSNSGGGSGSQSGSSGSGSNGDNNNGSSSGGSSSGSSSGGSSGGSSGGSSGNSGGSRGDSGSESSWGSSTGSSSGNHGGSGGGNGHKPGCEKPGNEARGSGESGIQNSETSPGMFNFDTFWKNFKSKLGFINWDAINKNQVPPPSTRALLYFSRLWEDFKQNTPFLNWKAIIEGADASSLQKRAGRDDQNYNYNQHAYPTAYGGKYSVKTPAKGGVSPSSSASRVQPGLLQWVKFW

SEQ ID NO: 2224 - protein, 636 aa, Homo sapiens
MTTWSLRRRPARTLGLLLLVVLGFLVLRRLDWSTLVPLRLRHRQLGLQAKGWNFMLEDSTFWIFGGSIHYFRVPREYWRDRLLKMKACGLNTLTTYVPWNLHEPERGKFDFSGNLDLEAFVLMAAEIGLWVILRPGPYICSEMDLGGLPSWLLQDPGMRLRTTYKGFTEAVDLYFDHLMSRVVPLQYKRGGPIIAVQVENEYGSYNKDPAYMPYVKKALEDRGIVELLLTSDNKDGLSKGIVQGVLATINLQSTHELQLLTTFLFNVQGTQPKMVMEYWTGWFDSWGGPHNILDSSEVLKTVSAIVDAGSSINLYMFHGGTNFGFMNGAMHFHDYKSDVTSYDYDAVLTEAGDYTAKYMKLRDFFGSISGIPLPPPPDLLPKMPYEPLTPVLYLSLWDALKYLGEPIKSEKPINMENLPVNGGNGQSFGYILYETSITSSGILSGHVHDRGQVFVNTVSIGFLDYKTTKIAVPLIQGYTVLRILVENRGRVNYGENIDDQRKGLIGNLYLNDSPLKNFRIYSLDMKKSFFQRFGLDKWSSLPETPTLPAFFLGSLSISSTPCDTFLKLEGWEKGVVFINGQNLGRYWNIGPQKTLYLPGPWLSSGINQVIVFEETMAGPALQFTETPHLGRNQYIK

SEQ ID NO: 2225 - protein, 223 aa, Homo sapiens [sequence omitted]

SEQ ID NO: 2226 - protein, 455 aa, Homo sapiens
MLHPETSPGRGHLLAVLLALLGTTWAEVWPPQLQEQAPMAGALNRKESFLLLSLHNRLRSWVQPPAADMRRLDWSDSLAQLAQARAALCGIPTPSLASGLWRTLQVGWNMQLLPAGLASFVEVVSLWFAEGQRYSHAAGECARNATCTHYTQLVWATSSQLGCGRHLCSAGQTAIEAFVCAYSPGGNWEVNGKTIIPYKKGAWCSLCTASVSGCFKAWDHAGGLCEVPRNPCRMSCQNHGRLNISTCHCHCPPGYTGRYCQVRCSLQCVHGRFREEECSCVCDIGYGGAQCATKVHFPFHTCDLRIDGDCFMVSSEADTYYRARMKCQRKGGVLAQIKSQKVQDILAFYLGRLETTNEVIDSDFETRNFWIGLTYKTAKDSFRWATGEHQAFTSFAFGQPDNHGLVWLSAAMGFGNCVELQASAAFNWNDQRCKTRNRYICQFAQEHISRWGPGS

SEQ ID NO: 2227 - protein, 474 aa, Homo sapiens
MADMQNLVERLERAVGRLEAVSHTSDMHRGYADSPSKGAAPYVQAFDSLLAGPVAEYLKISKEIGGDVQKHAEMVHTGLKLERALLVTASQCQQPAENKLSDLLAPISEQIKEVITFREKNRGSKLFNHLSAVSESIQALGWVAMAPKPGPYVKEMNDAAMFYTNRVLKEYKDVDKKHVDWVKAYLSIWTELQAYIKEFHTTGLAWSKTGPVAKELSGLPSGPSAGSCPPPPPPCPPPPPVSTISCSYESASRSSLFAQINQGESITHALKHVSDDMKTHKNPALKAQSGPVRSGPKPFSAPKPQTSPSPKRATKKEPAVLELEGKKWRVENQENVSNLVIEDTELKQVAYIYKCVNTTLQIKGKINSITVDNCKKLGLVFDDVVGIVEIINSKDVKVQVMGKVPTISINKTDGCHAYLSKNSLDCEIVSAKSSEMNVLIPTEGGDFNEFPVPEQFKTLWNGQKLVTTVTEIAG

SEQ ID NO: 2228 - protein, 119 aa, Homo sapiens
MNKILSSTVCFGLLTLLSVLSFLQSVHGRPYLTQGNEIFPDKKYTNREELLLALLNKNFDFQRPFNTDLALPNKLEELNQLEKLKEQLVEEKDSETSYAVDGLFSSHPSKRACFWKYCV

SEQ ID NO: 2229 - protein, 1251 aa, Homo sapiens
MRLLLLVPLLLAPAPGSSAPKVRRQSDTWGPWSQWSPCSRTCGGGVSFRERPCYSQRRDGGSSCVGPARSHRSCRTESCPDGARDFRAEQCAEFDGAEFQGRRYRWLPYYSAPNKCELNCIPKGENFYYKHREAVVDGTPCEPGKRDVCVDGSCRVVGCDHELDSSKQEDKCLRCGGDGTTCYPVAGTFDANDLSRAVKNVRGEYYLNGHWTIEAARALPAASTILHYERGAEGDLAPERLHARGPTSEPLVIELISQEPNPGVHYEYHLPLRRPSPGFSWSHGSWSDCSAECGGGHQSRLVFCTIDHEAYPDHMCQRQPRPADRRSCNLHPCPETKRWKAGPWAPCSASCGGGSQSRSVYCISSDGAGIQEAVEEAECAGLPGKPPAIQACNLQRCAAWSPEPWGECSVSCGVGVRKRSVTCRGERGSLLHTAACSLEDRPPLTEPCVHEDCPLLSDQAWHVGTWGLCSKSCSSGTRRRQVICAIGPPSHCGSLQHSKPVDVEPCNTQPCHLPQEVPSMQDVHTPASNPWMPLGPQESPASDSRGQWWAAQEHPSARGDHRGERGDPRGDQGTHLSALGPAPSLQQPPYQQPLRSGSGPHDCRHSPHGCCPDGHTASLGPQWQGCPGAPCQQSRYGCCPDRVSVAEGPHHAGCTKSYGGDSTGGMPRSRAVASTVHNTHQPQAQQNEPSECRGSQFGCCYDNVATAAGPLGEGCVGQPSHAYPVRCLLPSAHGSCADWAARWYFVASVGQCNRFWYGGCHGNANNFASEQECMSSCQGSLHGPRRPQPGASGRSTHTDGGGSSPAGEQEPSQHRTGAAVQRKPWPSGGLWRQDQQPGPGEAPHTQAFGEWPWGQELGSRAPGLGGDAGSPAPPFHSSSYRISLAGVEPSLVQAALGQLVRLSCSDDTAPESQAAWQKDGQPISSDRHRLQFDGSLIIHPLQAEDAGTYSCGSTRPGRDSQKIQLRIIGGDMAVLSEAELSRFPQPRDPAQDFGQAGAAGPLGAIPSSHPQPANRLRLDQNQPRVVDASPGQRIRMTCRAEGFPPPAIEWQRDGQPVSSPRHQLQPDGSLVISRVAVEDGGFYTCVAFNGQDRDQRWVQLRVLGELTISGLPPTVTVPEGDTARLLCVVAGESVNIRWSRNGLPVQADGHRVHQSPDGTLLIYNLRARDEGSYTCSAYQGSQAVSRSTEVKVVSPAPTAQPRDPGRDCVDQPELANCDLILQAQLCGNEYYSSFCCASCSRFQPHAQPIWQ

SEQ ID NO: 2230 - protein, 576 aa, Homo sapiens
MAQGVLWILLGLLLWSDPGTASLPLLMDSVIQALAELEQKVPAAKTRHTASAWLMSAPNSGPHNRLYHFLLGAWSLNATELDPCPLSPELLGLTKEVARHDVREGKEYGVVLAPDGSTVAVEPLLAGLEAGLQGRRVINLPLDSMAAPWETGDTFPDVVAIAPDVRATSSPGLRDGSPDVTTADIGANTPDATKGCPDVQASLPDAKAKSPPTMVDSLLAVTLAGNLGLTFLRGSQTQSHPDLGTEGCWDQLSAPRTFTLLDPKASLLTMAFLNGALDGVILGDYLSRTPEPRPSLSHLLSQYYGAGVARDPGFRSNFRRQNGAALTSASILAQQVWGTLVLLQRLEPVHLQLQCMSQEQLAQVAANATKEFTEAFLGCPAIHPRCRWGAAPYRGRPKLLQLPLGFLYVHHTYVPAPPCTDFTRCAANMRSMQRYHQDTQGWGDIGYSFVVGSDGYVYEGRGWHWVGAHTLGHNSRGFGVAIVGNYTAALPTEAALRTVRDTLPSCAVRAGLLRPDYALLGHRQLVRTDCPGDALFDLLRTWPHFTATVKPRPARSVSKRSRREPPPRTLPATDLQ

SEQ ID NO: 2231 - protein, 281 aa, Homo sapiens
MLPKSRRALTIQEIAALARSSLHGISQVVKDHVTKPTAMAQGRVAHLIEWKGWSKPSDSPAALESAFSSYSDLSEGEQEARFAAGVAEQFAIAEAKLRAWSSVDGEDSTDDSYDEDFAGGMDTDMAGQLPLGPHLQDLFTGHRFSRPVRQGSVEPESDCSQTVSPDTLCSSLCSLEDGLLGSPARLASQLLGDELLLAKLPPSRESAFRSLGPLEAQDSLYNSPLTESCLSPAEEEPAPCKDCQPLCPPLTGSWERQRQASDLASSGVVSLDEDEAEPEEQ

SEQ ID NO: 2232 - protein, 872 aa, Homo sapiens
MGIVWILMSVLPWWGRCADLAIASTQLVPSTASARMALSSQLMGRTVWTPMSASALQEPAYPALARTSRAPSAASVPLASRCRVTTALISTSAQRSPTSASLAPVPTALGASSASAHLALSSLTMGTVALTHGRVSASPVLRLGSARCPKLSTPPRPAAAAVRGLGRAGETPANCVPRRAVPGPDDSREDVNECAENPGVCTNGVCVNTDGSFRCECPFGYSLDFTGINCVDTDECSVGHPCGQGTCTNVIGGFECACADGFEPGLMMTCEDIDECSLNPLLCAFRCHNTEGSYLCTCPAGYTLREDGAMCRDVDECADGQQDCHARGMECKNLIGTFACVCPPGMRPLPGSGEGCTDDNECHAQPDLCVNGRCVNTAGSFRCDCDEGFQPSPTLTECHDIRQGPCFAEVLQTMCRSLSSSSEAVTRAECCCGGGRGWGPRCELCPLPGTSAYRKLCPHGSGYTAEGRDVDECRMLAHLCAHGECINSLGSFRCHCQAGYTPDATATTCLDMDECSQVPKPCTFLCKNTKGSFLCSCPRGYLLEEDGRTCKDLDECTSRQHNCQFLCVNTVGAFTCRCPPGFTQHHQACFDVNECDGPHRCQHGCQNQLGGYRCSCPQGFTQHSQWAQCVDENECALSPPTCGSASCRNTLGGFRCVCPSGFDFDQALGGCQEVDECAGRRGPCSYSCANTPGGFLCGCPQGYFRAGQGHCVSGLGFSPGPQDTPDKEELLSSEACYECKINGLSPRDRPRRSAHRDHQVNLATLDSEALLTLGLNLSHLGRAERILELRPALEGLEGRIRYVIVRGNEQGFFRMHHLRGVSSLQLGRRRPGPGTYRLEVVSHMAGPWGVQPEGQPGPWGQALRLKVQLQLL

SEQ ID NO: 2233 - protein, 455 aa, Homo sapiens
MARKALKLASWTSMALAASGIYFYSNKYLDPNDFGAVRVGRAVATTAVISYDYLTSLKSVPYGSEEYLQLRSKIHDLFQSFDDTPLGTASLAQVHKAVLHDGRTVAVKVQHPKVRAQSSKDILLMEVLVLAVKQLFPEFEFMWLVDEAKKNLPLELDFLNEGRNAEKVSQMLRHFDFLKVPRIHWDLSTERVLLMEFVDGGQVNDRDYMERNKIDVNEISRHLGKMYSEMIFVNGFVHCDPHPGNVLVRKHPGTGKAEIVLLDHGLYQMLTEEFRLNYCHLWQSLIWTDMKRVKEYSQRLGAGDLYPLFACMLTARSWDSVNRGISQAPVTATEDLEIRNNAANYLPQISHLLNHVPRQMLLILKTNDLLRGIEAALGTRASASSFLNMSRCCIRALAEHKKKNTCSFFRRTQISFSEAFNLWQINLHELILRVKGLKLADRVLALICWLFPAPL

SEQ ID NO: 2234 - protein, 414 aa, Homo sapiens
MNPTLGLAIFLAVLLTVKGLLKPSFSPRNYKALSEVQGWKQRMAAKELARQNMDLGFKLLKKLAFYNPGRNIFLSPLSISTAFSMLCLGAQDSTLDEIKQGFNFRKMPEKDLHEGFHYIIHELTQKTQDLKLSIGNTLFIDQRLQPQRKFLEDAKNFYSAETILTNFQNLEMAQKQINDFISQKTHGKINNLIENIDPGTVMLLANYIFFRARWKHEFDPNVTKEEDFFLEKNSSVKVPMMFRSGIYQVGYDDKLSCTILEIPYQKNITAIFILPDEGKLKHLEKGLQVDTFSRWKTLLSRRVVDVSVPRLHMTGTFDLKKTLSYIGVSKIFEEHGDLTKIAPHRSLKVGEAVHKAELKMDERGTEGAAGTGAQTLPMETPLVVKIDKPYLLLIYSEKIPSVLFLGKIVNPIGK

SEQ ID NO: 2235 - protein, 313 aa, Homo sapiens
MSDLLLLGLIGGLTLLLLLTLLAFAGYSGLLAGVEVSAGSPPIRNVTVAYKFHMGLYGETGRLFTESCSISPKLRSIAVYYDNPHMVPPDKCRCAVGSILSEGEESPSPELIDLYQKFGFKVFSFPAPSHVVTATFPYTTILSIWLATRRVHPALDTYIKERKLCAYPRLEIYQEDQIHFMCPLARQGDFYVPEMKETEWKWRGLVEAIDTQVDGTGADTMSDTSSVSLEVSPGSRETSAATLSPGASSRGWDDGDTRSEHSYSESGASGSSFEELDLEGEGPLGESRLDPGTEPLGTTKWLWEPTAPEKGKE

SEQ ID NO: 2236 - protein, 200 aa, Homo sapiens
MAWGGVHTCCFHLCCCCSWPQGAVPEELHKHPGQTLLLQCQYSPKRGPYQPKSWCQQTSPSRCTLLVTSSKPWTAVQKSHYTIWDKPNAGFFNITMIQLTQNDSGFYWCGIYNASENIITVLRNISLVVSPAPTTSPMWTLPWLPTSTVLITSPEGTSGHPSINGSETRKSRAPACLGSGGPRFLVLVLCGLLLAKGLML

SEQ ID NO: 2237 - protein, 344 aa, Homo sapiens
TTPSRALPGWSNCRPRWRAGPTPQSPTPQSRMRLSPGPPSEWTWLLPHFNPCHHHHRHHHPNPTTSLLPTEPPSGPEVSSQGREASCEGTLRAVDPPVRHHSYGRHEGAWMKDPAARDDRIYVTNYYYGNSLVEFRNLENFKQGRWSNMYKLPYNWIGTGHVVYQGAFYYNRAFTKNIIKYDLRQRFVASWALLPDVVYEDTTPWKWRGHSDIDFAVDESGLWVIYPAVDDRDEAQPEVIVLSRLDPGDLSVHRETTWKTRLRRNSYGNCFLVCGILYAVDTYNQQEGQVAYAFDTHTGTDARPQLPFLNEHAYTTQIDYNPKERVLYAWDNGHQLTYTLHFVV

SEQ ID NO: 2238 - protein, 893 aa, Homo sapiens
MAEAALEAVRSELREFPAAARELCVPLAVPYLDKPPTPLHFYRDWVCPNRPCIIRNALQHWPALQKWSLPYFRATVGSTEVSVAVTPDGYADAVRGDRFMMPAERRLPLSFVLDVLEGRAQHPGVLYVQKQCSNLPSELPQLLPDLESHVPWASEALGKMPDAVNFWLGEAAAVTSLHKDHYENLYCVVSGEKHFLFHPPSDRPFIPYELYTPATYQLTEEGTFKVVDEEAMEKAEVSRTCLLTVRVLQAHRLPSKDLVTPSDCYVTLWLPTACSHRLQTRTVKNSSSPVWNQSFHFRIHRQLKNVMELKVFDQDLVTGDDPVLSVLFDAGTLRAGEFRRESFSLSPQGEGRLEVEFRLQSLADRGEWLVSNGVLVARELSCLHVQLEETGDQKSSEHRVQLVVPGSCEGPQEASVGTGTFRFHCPACWEQELSIRLQDAPEEQLKAPLSALPSGQVVRLVFPTSQEPLMRVELKKEAGLRELAVRLGFGPCAEEQAFLSRRKQVVAAALRQALQLDGDLQEDEIPVVAIMATGGGIRAMTSLYGQLAGLKELGLLDCVSYITGASGSTWALANLYEDPEWSQKDLAGPTELLKTQVTKNKLGVLAPSQLQRYRQELAERARLGYPSCFTNLWALINEALLHDEPHDHKLSDQREALSHGQNPLPIYCALNTKGQSLTTFEFGEWCEFSPYEVGFPKYGAFIPSELFGSEFFMGQLMKRLPESRICFLEGIWSNLYAANLQDSLYWASEPSQFWDRWVRNQANLDKEQVPLLKIEEPPSTAGRIAEFFTDLLTWRPLAQATHNFLRGLHFHKDYFQHPHFSTWKATTLDGLPNQLTPSEPHLCLLDVGYLINTSCLPLLQPTRDVDLILSLDYNLHGAFQGSGGHPRRRQLGR

SEQ ID NO: 2239 - protein, 117 aa, Homo sapiens
MIIDSSRIPSFTQLHSTMTRAPLLLLCVALVLLGHVNGATVRNEDKWKPLNNPRNRDLFFRRLQAYFKGRGLDLGTFPNPFPTNENPRPLSFQSELTASASADYEEQKNSFHNYLKG

SEQ ID NO: 2240 - protein, 1380 aa, Homo sapiens
MRHGVAWALLVAAALGLGARGVRGAVALADFYPFGAERGDAVTPKQDDGGSGLRPLSVPFPFFGAEHSGLYVNNNGIISFLKEVSQFTPVAFPIAKDRCVVAAFWADVDNRRAGDVYYREATDPAMLRRATEDVRHYFPELLDFNATWVFVATWYRVTFFGGSSSSPVNTFQTVLITDGKLSFTIFNYESIVWTTGTHASSGGNATGLGGIAAQAGFNAGDGQRYFSIPGSRTADMAEVETTTNVGVPGRWAFRIDDAQVRVGGCGHTTSVCLALRPCLNGGKCIDDCVTGNPSYTCSCLSGFTGRRCHLDVNECASQPCQNGGTCTHGINSFRCQCPAGFGGPTCETAQSPCDTKECQHGGQCQVENGSAVCVCQAGYTGAACEMDVDDCSPDPCLNGGSCVDLVGNYTCLCAEPFKGLRCETGDHPVPDACLSAPCHNGGTCVDADQGYVCECPEGFMGLDCRERVPDDCECRNGGRCLGANTTLCQCPLGFFGLLCEFEITAMPCNMNTQCPDGGYCMEHGGSYLCVCHTDHNASHSLPSPCDSDPCFNGGSCDAHDDSYTCECPRGFHGKHCEKARPHLCSSGPCRNGGTCKEAGGEYHCSCPYRFTGRHCEIGKPDSCASGPCHNGGTCFHYIGKYKCDCPPGFSGRHCEIAPSPCFRSPCVNGGTCEDRDTDFFCHCQAGYMGRRCQAEVDCGPPEEVKHATLRFNGTRLGAVALYACDRGYSLSAPSRIRVCQPHGVWSEPPQCLEIDECRSQPCLHGGSCQDRVAGYLCLCSTGYEGAHCELERDECRAHPCRNGGSCRNLPGAYVCRCPAGFVGVHCETEVDACDSSPCQHGGRCESGGGAYLCVCPESFFGYHCETVSDPCFSSPCGGRGYCLASNGSHSCTCKVGYTGEDCAKELFPPTALKMERVEESGVSISWNPPNGPAARQMLDGYAVTYVSSDGSYRRTDFVDRTRSSHQLQALAAGRAYNISVFSVKRNSNNKNDISRPAVLLARTRPRPVEGFEVTNVTASTISVQWALHRIRHATVSGVRVSIRHPEALRDQATDVDRSVDRFTFRALLPGKRYTIQLTTLSGLRGEEHPTESLATAPTHVWTRPLPPANLTAARVTATSAHVVWDAPTPGSLLEAYVINVTTSQSTKSRYVPNGKLASYTVRDLLPGRRYQLSVIAVQSTELGPQHSEPAHLYIITSPRDGADRRWHQGGHHPRVLKNRPPPARLPELRLLNDHSAPETPTQPPRFSELVDGRGRVSARFGGSPSKAATVRSHVPGNCSENPCQNGGTCVPGADAHSCDCGPGFKGRRCELACIKVSRPCTRLFSETKAFPVWEGGVCHHVYKRVYRVHQDICFKESCESTSLKKTPNRKQSKSQTLEKS

SEQ ID NO: 2241 - protein, 157 aa, Homo sapiens
MEALRRAHEVALRLLLCRPWASRAAARPKPSASEVLTRHLLQRRLPHWTSFCVPYSAVRNDQFGLSHFNWPVQGANYHVLRTGCFPFIKYHCSKAPWQDLARQNRFFTALKVVNLGIPTLLYGLGSWLFARVTETVHTSYGPITVYFLNKEDEGAMY

SEQ ID NO: 2242 - protein, 95 aa, Homo sapiens
MKGSRALLLVALTLFCICRMATGEDNDEFFMDFLQTLLVGTPEELYEGTLGKYNVNEDAKAAMTELKSCIDGLQPMHKAELVKLLVQVLGSQDGA

SEQ ID NO: 2243 - protein, 350 aa, Homo sapiens
MKCSLRVWFLSVAFLLVFIMSLLFTYSHHSMATLPYLDSGALDGTHRVKLVPGYAGLQRLSKERLSGKSCACRRCMGDAGASDWFDSHFDGNISPVWTRENMDLPPDVQRWWMMLQPQFKSHNTNEVLEKLFQIVPGENPYRFRDPHQCRRCAVVGNSGNLRGSGYGQDVDGHNFIMRMNQAPTVGFEQDVGSRTTHHFMYPESAKNLPANVSFVLVPFKVLDLLWIASALSTGQIRFTYAPVKSFLRVDKEKVQIYNPAFFKYIHDRWTEHHGRYPSTGMLVLFFALHVCDEVNVYGFGADSRGNWHHYWENNRYAGEFRKTGVHDADFEAHIIDMLAKASKIEVYRGN

SEQ ID NO: 2244 - protein, 199 aa, Homo sapiens
MASPEAPESVVQFALDKLGGLDYLVLNHIGGAPAGTRARSPQATRWLMQVNFVSYVQLTSRALPSLTDSKGSLVVVSSLLGRVPTSFSTPYSAAKFALDGFFGSLRRELDVQDVNVAITMCVLGLRDRASAAEAVRGVTRVKAAPGPKAALAVIRGGATRAAGVFYPWRFRLLCLLRRWLPRPRAWFIRQELNVTAAAA

SEQ ID NO: 2245 - protein, 136 aa, Homo sapiens
MVRPYPLIYFLFLPLGACFPLLDRREPTDAMGGLGAGERWADLAMGPRPHSVWGSSRWLRASQPQALLVIARGLQTSGREHAGCRFRFGRQDEGSEATGFLPAAGEKTSGPLGNLAEELNGYSRKKGGFSFRFGRR

SEQ ID NO: 2246 - protein, 220 aa, Homo sapiens
MRGQGRKESLSDSRDLDGSYDQLTDSVDDEFELSTVCHRPEGLEQLQEQTKFTRKELQVLYRGFKNECPSGIVNEENFKQIYSQFFPQGDSSTYATFLFNAFDTNHDGSVSFEDFVAGLSVILRGTVDDRLNWAFNLYDLNKDGCITKEEMLDIMKSIYDMMGKYTYPALREEAPREHVESFFQKMDRNKDGVVTIEEFIESCQKDENIMRSMQLFDNVI

SEQ ID NO: 2247 - protein, 724 aa, Homo sapiens
MLRTSTPNLCGGLHCRAPWLSSGILCLCLIFLLGQVGLLQGHPQCLDYGPPFQPPLHLEFCSDYESFGCCDQHKDRRIAARYWDIMEYFDLKRHELCGDYIKDILCQECSPYAAHLYDAENTQTPLRNLPGLCSDYCSAFHSNCHSAISLLTNDRGLQESHGRDGTRFCHLLDLPDKDYCFPNVLRNDYLNRHLGMVAQDPQGCLQLCLSEVANGLRNPVSMVHAGDGTHRFFVAEQVGVVWVYLPDGSRLEQPFLDLKNIVLTTPWIGDERGFLGLAFHPKFRHNRKFYIYYSCLDKKKVEKIRISEMKVSRADPNKADLKSERVILEIEEPASNHNGGQLLFGLDGYMYIFTGDGGQAGDPFGLFGNAQNKSSLLGKVLRIDVNRAGSHGKRYRVPSDNPFVSEPGAHPAIYAYGIRNMWRCAVDRGDPITRQGRGRIFCGDVGQNRFEEVDLILKGGNYGWRAKEGFACYDKKLCHNASLDDVLPIYAYGHAVGKSVTGGYVYRGCESPNLNGLYIFGDFMSGRLMALQEDRKNKKWKKQDLCLGSTTSCAFPGLISTHSKFIISFAEDEAGELYFLATSYPSAYAPRGSIYKFVDPSRRAPPGKCKYKPVPVRTKSKRIPFRPLAKTVLDLLKEQSEKAARKSSSATLASGPAQGLSEKGSSKKLASPTSSKNTLRGPGTKKKARVGPHVRQGKRRKSLKSHSGRMRPSAEQKRAGRSLP

SEQ ID NO: 2248 - protein, 405 aa, Homo sapiens
MWYVSTRGVAPRVNFEGALFSGYAPDGGLFMPEELPQLDRGTLCQWSTLSYPGLVKELCALFIGSELLPKDELNDLIDRAFSRFRHREVVHLSRLRNGLNVLELWHGVTYAFKDLSLSCTTQFLQYFLEKREKHVTVVVGTSGDTGSAAIESVQGAKNMDIIVLLPKGHCTKIQELQMTTVLKQNVHVFGVEGNSDELDEPIKTVFADVAFVKKHNLMSLNSINWSRVLVQMAHHFFAYFQCTPSLDTHPLPLVEVVVPTGAAGNLAAGYIAQKIGLPIRLVVAVNRNDIIHRTVQQGDFSLSEAVKSTLASAMDIQVPYNMERVFWLLSGSDSQVTRALMEQFERTQSVNLPKELHSKWERQDYEKMAVMECDGCCVELCLGNCGPRRGSVTDIPGTAMVRGGG

SEQ ID NO: 2249 - protein, 163 aa, Homo sapiens
MTMRHNWTPDLSPLWVLLLCAHVVTLLVRATPVSQTTTAATASVRSTKDPCPSQPPVFPAAKQCPALEVTWPEVEVPLNGTLSLSCVACSRFPNFSILYWLGNGSFIEHLPGRLWEGSTSRERGSTGWAEGNLAPHPRSPALQPQQSTAAGLRLSTGPAAAQP

SEQ ID NO: 2250 - protein, 529 aa, Homo sapiens
MAPARTMARARLAPAGIPAVALWLLCTLGLQGTQAGPPPAPPGLPAGADCLNSFTAGVPGFVLDTNASVSNGATFLESPTVRRGWDCVRACCTTQNCNLALVELQPDRGEDAIAACFLINCLYEQNFVCKFAPREGFINYLTREVYRSYRQLRTQGFGGSGIPKAWAGIDLKVQPQEPLVLKDVENTDWRLLRGDTDVRVERKDPNQVELWGLKEGTYLFQLTVTSSDHPEDTANVTVTVLSTKQTEDYCLASNKVGRCRGSFPRWYYDPTEQICKSFVYGGCLGNKNNYLREEECILACRGVQGGPLRGSSGAQATFPQGPSMERRHPVCSGTCQPTQFRCSNGCCIDSFLECDDTPNCPDASDEAACEKYTSGFDELQRIHFPSDKGHCVDLPDTGLCKESIPRWYYNPFSEHCARFTYGGCYGNKNNFEEEQQCLESCRGISKKDVFGLRREIPIPSTGSVEMAVAVFLVICIVVVVAILGYCFFKNQRKDFHGHHHHPPPTPASSTVSTTEDTEHLVYNHTTRPL

SEQ ID NO: 2251 - protein, 600 aa, Homo sapiens
MQGPLLLPGLCFLLSLFGAVTQKTKTSCAKCPPNASCVNNTHCTCNHGYTSGSGQKLFTFPLETCNDTTSSKTTEGRKELQKIVDKFESLLTNQTLWRTEGRQEISSTATTILRDVESKVLETALKDPEQKVLKIQNDSVAIETQAITDNCSEERKTFNLNVQMNSMDIRCSDIIQGDTQGPSAIAFISYSSLGNIINATFFEEMDKKDQVYLNSQVVSAAIGPKRNVSLSKSVTLTFQHVKMTPSTKKVFCVYWKSTGQGSQWSRDGCFLIHVNKSHTMCNCSHLSSFAVLMALTSQEEDPVLTVITYVGLSVSLLCLLLAALTFLLCKAIRNTSTSLHLQLSLCLFLAHLLFLVGIDRTEPKVLCSIIAGALHYLYLAAFTWMLLEGVHLFLTARNLTVVNYSSINRLMKWIMFPVGYGVPAVTVAISAASWPHLYGTADRCWLHLDQGFMWSFLGPVCAIFSANLVLFILVFWILKRKLSSLNSEVSTIQNTRMLAFKATAQLFILGCTWCLGLLQVGPAAQVMAYLFTIINSLQGFFIFLVYCLLSQQVQKQYQKWFREIVKSKSESETYTLSSKMGPDSKPSEGDVFPGQVKRKY

SEQ ID NO: 2252 - protein, 219 aa, Homo sapiens
MKLLLWACIVCVAFARKRRFPFIGEDDNDDGHPLHPSLNIPYGIRNLPPPLYYRPVNTVPSYPGNTYTDTGLPSYPWILTSPGFPYVYHIRGFPLATQLNVPPLPPRGFPFVPPSRFFSAAAAPAAPPIAAEPAAAAPLTATPVAAEPAAGAPVAAEPAAEAPVGAEPAAEAPVAAEPAAEAPVGVEPAAEEPSPAEPATAKPAAPEPHPSPSLEQANQ

SEQ ID NO: 2253 - protein, 580 aa, Homo sapiens
MHLSAVFNALLVSVLAAVLWKHVRLREHAATLEEELALSRQATEPAPALRIDYPKALQILMEGGTHMVCTGRTHTDRICRFKWLCYSNEAEEFIFFHGNTSVMLPNLGSRRFQPALLDLSTVEDHNTQYFNFVELPAAALRFMPKPVFVPDVALIANRFNPDNLMHVFHDDLLPLFYTLRQFPGLAHEARLFFMEGWGEGAHFDLYKLLSPKQPLLRAQLKTLGRLLCFSHAFVGLSKITTWYQYGFVQPQGPKANILVSGNEIRQFARFMTEKLNVSHTGVPLGEEYILVFSRTQNRLILNEAELLLALAQEFQMKTVTVSLEDHTFADVVRLVSNASMLVSMHGAQLVTTLFLPRGATVVELFPYAVNPDHYTPYKTLAMLPGMDLQYVAWRNMMPENTVTHPERPWDQGGITHLDRAEQARILQSREVPRHLCCRNPEWLFRIYQDTKVDIPSLIQTIRRVVKGRPGPRKQKWTVGLYPGKVREARCQASVHGASEARLTVSWQIPWNLKYLKVREVKYEVWLQEQGENTYVPYILALQNHTFTENIKPFTTYLVWVRCIFNKILLGPFADVLVCNT

SEQ ID NO: 2254 - protein, 1709 aa, Homo sapiens
MGFLPKLLLLASFFPAGQASWGVSSPQDVQGVKGSCLLIPCIFSFPADVEVPDGITAIWYYDYSGQRQVVSHSADPKLVEARFRGRTEFMGNPEHRVCNLLLKDLQPEDSGSYNFRFEISEVNRWSDVKGTLVTVTEEPRVPTIASPVELLEGTEVDFNCSTPYVCLQEQVRLQWQGQDPARSVTFNSQKFEPTGVGHLETLHMAMSWQDHGRILRCQLSVANHRAQSEIHLQVKYAPKGVKILLSPSGRNILPGELVTLTCQVNSSYPAVSSIKWLKDGVRLQTKTGVLHLPQAAWSDAGVYTCQAENGVGSLVSPPISLHIFMAEVQVSPAGPILENQTVTLVCNTPNEAPSDLRYSWYKNHVLLEDAHSHTLRLHLATRADTGFYFCEVQNVHGSERSGPVSVVVNHPPLTPVLTAFLETQAGLVGILHCSVVSEPLATLVLSHGGHILASTSGDSDHSPRFSGTSGPNSLRLEIRDLEETDSGEYKCSATNSLGNATSTLDFHANAARLLISPAAEVVEGQAVTLSCRSGLSPTPDARFSWYLNGALLHEGPGSSLLLPAASSTDAGSYHCRARDGHSASGPSSPAVLTVLYPPRQPTFTTRLDLDAAGAGAGRRGLLLCRVDSDPPARLQLLHKDRVVATSLPSGGGCSTCGGCSPRMKVTKAPNLLRVEIHNPLLEEEGLYLCEASNALGNASTSATFNGQATVLAIAPSHTLQEGTEANLTCNVSREAAGSPANFSWFRNGVLWAQGPLETVTLLPVARTDAALYACRILTEAGAQLSTPVLLSVLYPPDRPKLSALLDMGQGHMALFICTVDSRPLALLALFHGEHLLATSLGPQVPSHGRFQAKAEANSLKLEVRELGLGDSGSYRCEATNVLGSSNTSLFFQVRGAWVQVSPSPELQEGQAVVLSCQVHTGVPEGTSYRWYRDGQPLQESTSATLRFAAITLTQAGAYHCQAQAPGSATTSLAAPISLHVSYAPRHVTLTTLMDTGPGRLGLLLCRVDSDPPAQLRLLHGDRLVASTLQGVGGPEGSSPRLHVAVAPNTLRLEIHGAMLEDEGVYICEASNTLGQASASADFDAQAVNVQVWPGATVREGQLVNLTCLVWTTHPAQLTYTWYQDGQQRLDAHSIPLPNVTVRDATSYRCGVGPPGRAPRLSRPITLDVLYAPRNLRLTYLLESHGGQLALVLCTVDSRPPAQLALSHAGRLLASSTAASVPNTLRLELRGPQPRDEGFYSCSARSPLGQANTSLELRLEGVRVILAPEAAVPEGAPITVTCADPAAHAPTLYTWYHNGRWLQEGPAASLSFLVATRAHAGAYSCQAQDAQGTRSSRPAALQVLYAPQDAVLSSFRDSRARSMAVIQCTVDSEPPAELALSHDGKVLATSSGVHSLASGTGHVQVARNALRLQVQDVPAGDDTYVCTAQNLLGSISTIGRLQVEGARVVAEPGLDVPEGAALNLSCRLLGGPGPVGNSTFAWFWNDRRLHAEPVPTLAFTHVARAQAGMYHCLAELPTGAAASAPVMLRVLYPPKTPTMMVFVEPEGGLRGILDCRVDSEPLASLTLHLGSRLVASSQPQGAPAEPHIHVLASPNALRVDIEALRPSDQGEYICSASNVLGSASTSTYFGVRALHRLHQFQQLLWVLGLLVGLLLLLLGLGACYTWRRRRVCKQSMGENSVEMAFQKETTQLIDPDAATCETSTCAPPLG

SEQ ID NO: 2255 - protein, 230 aa, Homo sapiens
MCVTYHNGTGYCKCPEGFLGEYCQHRDPCEKNRCQNGGTCVAQAMLGKATCRCASGFTGEDCQYSTSHPCFVSRPCLNGGTCHMLSRDTYECTCQVGFTGKECQWTDACLSHPCANGSTCTTVANQFSCKCLTGFTGQKCETDVNECDIPGHCQHGGTCLNLPGSYQCQCLQGFTGQYCDSLYVPCAPSPCVNGGTCRQTGDFTFECNCLPATWPIFPKLLSLQEKESYC

SEQ ID NO: 2256 - protein, 219 aa, Homo sapiens
MFVSYLILTLLHVQTAVLARPGGESIGCDDYLGSDKVVDKCGVCGGDNTGCQVVSGVFKHALTSLGYHRVVEIPEGATKINITEMYKSNKKKSHLKPATRGSQFSSVKVCSVPAACKLLGTPGRARQPVPAPRELEHDKNSPHCAYLSLYLTSLAQSSWRVFSLFSYVLIYLFSKYLAFNTLFALKRMALQRDRKEKTRAWCIFIKLCGREIQILPGPV

SEQ ID NO: 2257 - protein, 120 aa, Homo sapiens
MDNVQPKIKHRPFCFSVKGHVKMLRLALTVTSMTFFIIAQAPEPYIVITGFEVTVILFFILLYVLRLDRLMKWLFWPLLVFALVTAVCCLADGALIYRKLLFNPSGPYQKKPVHEKKEVL

SEQ ID NO: 2258 - protein, 287 aa, Homo sapiens
MAPWSHPSAQLQPVGGDAVSPALMVLLCLGNLSKATLWAEPGSVISRGNSVTIRCQGTLEAQEYRLVKEGSPEPWDTQNPLEPKNKARFSIPSMTEHHAGRYRCYYYSPAGWSEPSDPLELVVTGFYNKPTLSALPSPVVTSGENVTLQCGSRLRFDRFILTEEGDHKLSWTLDSQLTPSGQFQALFPVGPVTPSHRWMLRCYGSRRHILQVWSEPSDLLEIPVSGAADNLSPSQNKSDSGTASHLQDYAVENLIRMGMAGLILVVLGILIFQDWHSQRSPQAAAGR

SEQ ID NO: 2259 - protein, 145 aa, Homo sapiens; identical to SEQ ID NO: 1880

SEQ ID NO: 2260 - protein, 591 aa, Homo sapiens
MQQDGLGVGTRNGSGKGRSVHPSWPWCAPRPLRYFGRDARARRAQTAAMALAIQVTVSNPYHVVILFQPVTLPCTYQMTSTPTQPIVIWKYKSFCRDRIADAFSPASVDNQLNAQLAAGNPGYNPYVECQDSVRTVRVVATKQGNAVTLGDYYQGRRITITGNADLTFDQTAWGDSGVYYCSVVSAQDLQGNNEAYAELIVLGRTSGVAELLPGFQAGPIEDWLFVVVVCLAAFLIFLLLGICWCQCCPHTCCCYVRCPCCPDKCCCPEALYAAGKAATSGVPSIYAPSTYAHLSPAKTPPPPAMIPMGPAYNGYPGGYPGDVDRSSSVRSGYRIQASQQDDSMRVLYYMEKELANFDPSRPGPPSGRVERAMSEVTSLHEDDWRSRPSRGPALTPIRDEEWGGHSPRSPRGWDQEPAREQAGGGWRARRPRARSVDALDDLTPPSTAESGSRSPTSNGGRSRAYMPPRSRSRDDLYDQDDSRDFPRSRDPHYDDFRSRERPPADPRSHHHRTRDPRDNGSRSGDLPYDGRLLEEAVRKKGSEERRRPHKEEEEEAYYPPAPPPYSETDSQASRERRLKKNLALSRESLVV

SEQ ID NO: 2261 - protein, 225 aa, Homo sapiens
MNRCPRRCRSPLGQAARSLYQLVTGSLSPDSVDDEFELSTVCHRPEGLEQLQEQTKFTRKELQVLYRGFKNECPSGIVNEENFKQIYSQFFPQGDSSTYATFLFNAFDTNHDGSVSFEDFVAGLSVILRGTVDDRLNWAFNLYDLNKDGCITKEEMLDIMKSIYDMMGKYTYPALREEAPREHVESFFQKMDRNKDGVVTIEEFIESCQKDENIMRSMQLFDNVI

SEQ ID NO: 2262 - protein, 234 aa, Homo sapiens
MPASSPFLLAPKGPPGNMGGPVREPALSVALWLSWGAALGAVACAMALLTQQTELQSLRREVSRLQGTGGPSQNGEGYPWQSLPEQSSDALEAWENGERSRKRRAVLTQKQKNDSDVTEVMWQPALRRGRGLQAQGYGVRIQDAGVYLLYSQVLFQDVTFTMGQVVSREGQGRQETLFRCIRSMPSHPDRAYNSCYSAGVFHLHQGDILSVIIPRARAKLNLSPHGTFLGFVKL

SEQ ID NO: 2263 - protein, 799 aa, Homo sapiens
MKPMLKDFSNLLLVVLCDYVLGEAEYLLLREPGHVALSNDTVYVDFQYFDGANGTLRNVSVLLLEANTNQTVTTKYLLTNQSQGTLKFECFYFKEAGDYWFTMTPEATDNSTPFPWWEKSAFLKVEWPVFHVDLNRSAKAAEGTFQVGLFTSQPLCPFPVDKPNIVVDVIFTNSLPEARRNSRQPLEIRTSKRTELAQGQWVEFGCAPLGPEAYVTVVLKLLGRDSVITSTGPIDLAQKFGYKLVMVPELTCESGVEVTVLPPPCTFVQGVVTVFKEAPRYPGKRTIHLAENSLPLGERRTIFNCTLFDMGKNKYCFDFGISSRSHFSAKEECMLIQRNTAFQPSSPSPLQPQGPVKSNNIVTVTGISLCLFIIIATVLITLWRRFGRPAKCSTPARHNSIHSPSFRKNSDEENICELSEQRGSFSDGGDGPTGSPGDTGIPLTYRRSGPVPPEDDASGSESFQSNAQKIIPPLFSYRLAQQQLKEMKKKGLTETTKVYHVSQSPLTDTAIDAAPSAPLDLESPEEAAANKFRIKSPFPEQPAVSAGERPPSRLDLNVTQASCAISPSQTLIRKSQARHVGSRGGPSERSHARNAHFRRTASFHEARQARPFRERSMSTLTPRQAPAYSSRTRTCEQAEDRFRPQSRGAHLFPEKLEHFQEASGTRGPLNPLPKSYTLGQPLRKPDLGDHQAGLVAGIERTEPHRARRGPSPSHKSVSRKQSSPISPKDNYQRVSSLSPSQCRKDKCQSFPTHPEFAFYDNTSFGLTEAEQRMLDLPGYFGSNEEDETTSTLSVEKLVI

SEQ ID NO: 2264 - protein, 308 aa, Homo sapiens
MRLLPEWFLLLFGPWLLRKAVSAQIPESGRPQYLGLRPAAAGAGAPGQQLPEPRSSDGLGVGRAWSWAWPTNHTGALARAGAAGALPAQRTKRKPSIKAARAKKIFGWGDFYFRVHTLKFSLLVTGKIVDHVNGTFSVYFRHNSSSLGNLSVSIVPPSKRVEFGGVWLPGPVPHPLQSTLALEGVLPGLGPPLGMAAAAAGPGLGGSLGGALAGPLGGALGVPGAKESRAFNCHVEYEKTNRARKHRPCLYDPSQVCFTEHTQSQAAWLCAKPFKVICIFVSFLSFDYKLVQKVCPDYNFQSEHPYFG

SEQ ID NO: 2265 - protein, 264 aa, Homo sapiens
MKLGCVLMAWALYLSLGVLWVAQMLLAASFETLQCEGPVCTEESSCHTEDDLTDAREAGFQVKAYTFSEPFHLIVSYDWLILQGPAKPVFEGDLLVLRCQAWQDWPLTQVTFYRDGSALGPPGPNREFSITVVQKADSGHYHCSGIFQSPGPGIPETASVVAITVQGASSSAAPPTLNPAPQKSAAPGTAPEEAPGPLPPPPTPSSEDPGFSSPLGMPDPHLYHQMGLLLKHMQDVRVLLGHLLMELRELSGHRKPGTTKATAE

SEQ ID NO: 2266 - protein, 453 aa, Homo sapiens
MLRILCLALCSLLTGTRADPGALLRLGMDIMNQVQSAMDESHILEKMAAEAGKKQPGMKPIKGITNLKVKDVQLPVITLNFVPGVGIFQCVSTGMTVTGKSFMGGNMEIIVALNITATNRLLRDEETGLPVFKSEGCEVILVNVKTNLPSNMLPKMVNKFLDSTLHKVLPGLMCPAIDAVLVYVNRKWTNLSDPMPVGQMGTVKYVLMSAPATTASYIQLDFSPVVQQQKGKTIKLADAGEALTFPEGYAKGSSQLLLPATFLSAELALLQKSFHVNIQDTMIGELPPQTTKTLARFIPEVAVAYPKSKPLTTQIKIKKPPKVTMKTGKSLLHLHSTLEMFAARWRSKAPMSLFLLEVHFNLKVQYSVHENQLQMATSLDRLLSLSRKSSSIGNFNERELTGFITSYLEEAYIPVVNDVLQVGLPLPDFLAMNYNLAELDIVENALMLDLKLG

SEQ ID NO: 2267 - protein, 440 aa, Homo sapiens
MSARGRWEGGGRRACRGSLGLARAQGAERVTSSEQRPAMASLGLLLLLLLTALPPLWSSSLPGLDTAESKATIADLILSALERATVFLEQRLPEINLDGMVGVRVLEEQLKSVREKWAQEPLLQPLSLRVGMLGEKLEAAIQRSLHYLKLSDPKYLREFQLTLQPGFWKLPHAWIHTDASLVYPTFGPQDSFSEERSDVCLVQLLGTGTDSSEPCGLSDLCRSLMTKPGCSGYCLSHQLLFFLWARMRGCTQGPLQQSQDYINLFCANMMDLNRRAEAIGYAYPTRDIFMENIMFCGMGGFSDFYKLRWLEAILSWQKQQEGCFGEPDAEDEELSKAIQYQQHFSRRVKRREKQFPDSRSVAQAGVQWRNLGSLQPLPPGFKQFSCLILPSSWDYRSVPPYLANFYIFLVETGFHHVAHAGLELLISRDPPTSGSQSVGL

SEQ ID NO: 2268 - protein, 235 aa, Homo sapiens
MKYVFYLGVLAGTFFFADSSVQKEDPAPYLVYLKSHFNPCVGVLIKPSWVLAPAHCYLPNLKVMLGNFKSRVRDGTEQTINPIQIVRYWNYSHSAPQDDLMLIKLAKPAMLNPKVQPLTLATTNVRPGTVCLLSGLDWSQENSGRHPDLRQNLEAPVMSDRECQKTEQGKSHRNSLCVKFVKVFSRIFGEVAVATVICKDKLQGIEVGHFMGGDVGIYTNVYKYVSWIENTAKDK

SEQ ID NO: 2269 - protein, 141 aa, Homo sapiens
MLKKISVGVAGDLNTVTMKLGCVLMAWALYLSLGVLWVAQMLLGASSSAAPPTLNPAPQKSAAPGTAPEEAPGPLPPPPTPSSEDPGFSSPLGMPDPHLYHQMGLLLKHMQDVRVLLGHLLMELRELSGHRKPGTTKATAE

SEQ ID NO: 2270 - protein, 961 aa, Homo sapiens
MLAPRGAAVLLLHLVLQRWLAAGAQATPQVFDLLPSSSQRLNPGALLPVLTDPALNDLYVISTFKLQTKSSATIFGLYSSTDNSKYFEFTVMGRLNKAILRYLKNDGKVHLVVFNNLQLADGRRHRILLRLSNLQRGAGSLELYLDCIQVDSVHNLPRAFAGPSQKPETIELRTFQRKPQDFLEELKLVVRGSLFQVASLQDCFLQQSEPLAATGTGDFNRQFLGQMTQLNQLLGEVKDLLRQQVKETSFLRNTIAECQACGPLKFQSPTPSTVVPPAPPAPPTRPPRRCDSNPCFRGVQCTDSRDGFQCGPCPEGYTGNGITCIDVDECKYHPCYPGVHCINLSPGFRCDACPVGFTGPMVQGVGISFAKSNKQVCTDIDECRNGACVPNSICVNTLGSYRCGPCKPGYTGDQIRGCKAERNCRNPELNPCSVNAQCIEERQGDVTCVCGVGWAGDGYICGKDVDIDSYPDEELPCSARNCKKDNCKYVPNSGQEDADRDGIGDACDEDADGDGILNEQDNCVLIHNVDQRNSDKDIFGDACDNCLSVLNNDQKDTDGDGRGDACDDDMDGDGIKNILDNCPKFPNRDQRDKDGDGVGDACDSCPDVSNPNQSDVDNDLVGDSCDTNQDSDGDGHQDSTDNCPTVINSAQLDTDKDGIGDECDDDDDNDGIPDLVPPGPDNCRLVPNPAQEDSNSDGVGDICESDFDQDQVIDRIDVCPENAEVTLTDFRAYQTVVLDPEGDAQIDPNWVVLNQGMEIVQTMNSDPGLAVGYTAFNGVDFEGTFHVNTQTDDDYAGFIFGYQDSSSFYVVMWKQTEQTYWQATPFRAVAEPGIQLKAVKSKTGPGEHLRNSLWHTGDTSDQVRLLWKDSRNVGWKDKVSYRWFLQHRPQVGYIRVRFYEGSELVADSGVTIDTTMRGGRLGVFCFSQENIIWSNLKYRCNDTIPEDFQEFQTQNFDRFDN

SEQ ID NO: 2271 - protein, 99 aa, Homo sapiens
MDNVQPKIKHRPFCFSVKGHVKMLRLDIINSLVTTVFMLIVSVLALIPETTTLTVGGGVFALVTAVCCLADGALIYRKLLFNPSGPYQKKPVHEKKEVL

SEQ ID NO: 2272 - protein, 135 aa, Homo sapiens
MSPHLTALLGLVLCLAQTIHTQEGALPRPSISAEPGTVISPGSHVTFMCRGPVGVQTFRLEREDRAKYKDSYNVFRLGPSESEARFHIDSVSEGNAGLYRCLYYKPPGWSEHSDFLELLVKGTVPGTEASGFDAP

SEQ ID NO: 2273 - protein, 76 aa, Homo sapiens
MLPCLALLLLMELSVCTVAGDGGEEQTLSTEAETWEGAGPSIQLQLQEVKTGKASQFFGLMGKRVGGREDEAQGSE

SEQ ID NO: 2274 - protein, 227 aa, Homo sapiens
MRGQGRKESLSDSRDLDGSYDQLTDSVDDEFELSTVCHRPEGLEQLQEQTKFTRKELQVLYRGFKNPGALSFQECPSGIVNEENFKQIYSQFFPQGDSSTYATFLFNAFDTNHDGSVSFEDFVAGLSVILRGTVDDRLNWAFNLYDLNKDGCITKEEMLDIMKSIYDMMGKYTYPALREEAPREHVESFFQKMDRNKDGVVTIEEFIESCQKDENIMRSMQLFDNVI

SEQ ID NO: 2275 - protein, 291 aa, Homo sapiens
MMSATGPGRKMGSRGQGLLLAYCLLLAFASGLVLSRVPHVQGEQQEWEGTEELPSPPDHAERAEEQHEKYRPSQDQGLPASRCLRCCDPGTSMYPATAVPQINITILKGEKGDRGDRGLQGKYGKTGSAGARGHTGPKGQKGSMGAPGERCKSHYAAFSVGRKKPMHSNHYYQTVIFDTEFVNLYDHFNMFTGKFYCYVPGLYFFSLNVHTWNQKETYLHIMKNEEEVVILFAQVGDRSIMQSQSLMLELREQDQVWVRLYKGERENAIFSEELDTYITFSGYLVKHATEP

SEQ ID NO: 2276 - protein, 70 aa, Homo sapiens
MERGAGAKLLPLLLLLRATGFTCAQTDGRNGYTAVIEVTSGGPWGDWAWPEMCPDGFFASGFSLKLGRME

SEQ ID NO: 2277 - protein, 133 aa, Homo sapiens
MGSSGLLSLLVLFVLLANVQGPGLTDWLFPRRCPKIREECEFQERDVCTKDRQCQDNKKCCVFSCGKKCLDLKQDVCEMPKETGPCLAYFLHWWYDKKDNTCSMFVYGGCQGNNNNFQSKANCLNTCKNKRFP

SEQ ID NO: 2278 - protein, 256 aa, Homo sapiens
MFQTGGLIVFYGLLAQTMAQFGGLPVPLDQTLPLNVNPALPLSPTGLAGSLTNALSNGLLSGGLLGILENLPLLDILKPGGGTSGGLLGGLLGKVTSVIPGLNNIIDIKVTDPQLLELGLVQSPDGHRLYVTIPLGIKLQVNTPLVGASLLRLAVKLDITAEILAVRDKQERIHLVLGDCTHSPGSLQISLLDGLGPLPIQGLLDSLTGILNKVLPELVQGNVCPLVNEVLRGLDITLVHDIVNMLIHGLQFVIKV

SEQ ID NO: 2279 - protein, 461 aa, Homo sapiens [sequence omitted]

SEQ ID NO: 2280 - protein, 177 aa, Homo sapiens
MRLLILTCLVAVALARPKLPLRYPERLQNPSESSEPIPLESREEYMNGMNRQRNILREKQTDEIKNCVVAEPEKMESSISSSSEEMSLSKCAEQFCRLNEYNQLQLQKMSKQEQIRRMNENSHVQVPFQQLNQLAAYPYAVWYYPQIMQYVPFPPFSDISNPTAHENYEKNNVMLQW

SEQ ID NO: 2281 - protein, 1017 aa, Homo sapiens
MDLIRGVLLRLLLLASSLGPGAVSLRAAIRKPGKVGPPLDIKLGALNCTAFSIQWKMPRHPGSPILGYTVFYSEVGADKSLQEQLHSVPLSRDIPTTEEVIGDLKPGTEYRVSIAAYSQAGKGRLSSPRHVTTLSQDSCLPPAAPQQPHVIVVSDSEVALSWKPGASEGSAPIQYYSVEFIRPDFDKKWTSIHERIQMDSMVIKGLDPDTNYQFAVRAMNSHGPSPRSWPSDIIRTLCPEEAGSGRYGPRYITDMGAGEDDEGFEDDLDLDISFEEVKPLPATKGGNKKFLVESKKMSISNPKTISRLIPPTSASLPVTTVAPQPIPIQRKGKNGVAIMSRLFDMPCDETLCSADSFCVNDYTWGGSRCQCTLGKGGESCSEDIVIQYPQFFGHSYVTFEPLKNSYQAFQITLEFRAEAEDGLLLYCGENEHGRGDFMSLAIIRRSLQFRFNCGTGVAIIVSETKIKLGGWHTVMLYRDGLNGLLQLNNGTPVTGQSQGQYSKITFRTPLYLGGAPSAYWLVRATGTNRGFQGCVQSLAVNGRRIDMRPWPLGKALSGADVGECSSGICDEASCIHGGTCTAIKADSYICLCPLGFKGRHCEDAFTLTIPQFRESLRSYAATPWPLEPQHYLSFMEFEITFRPDSGDGVLLYSYDTGSKDFLSINLAGGHVEFRFDCGSGTGVLRSEDPLTLGNWHELRVSRTAKNGILQVDKQKIVEGMAEGGFTQIKCNTDIFIGGVPNYDDVKKNSGVLKPFSGSIQKIILNDRTIHVKHDFTSGVNVENAAHPCVRAPCAHGGSCRPRKEGYDCDCPLGFEGLHCQKECGNYCLNTIIEAIEIPQFIGRSYLTYDNPDILKRVSGSRSNVFMRFKTTAKDGLLLWRGDSPMRPNSDFISLGLRDGALVFSYNLGSGVASIMVNGSFNDGRWHRVKAVRDGQSGKITVDDYGARTGKSPGMMRQLNINGALYVGGMKEIALHTNRQYMRGLVGCISHFTLSTDYHISLVEDAVDGKNINTCGAK

SEQ ID NO: 2282 - protein, 630 aa, Homo sapiens
MQQDGLGVGTRNGSGKGRSVHPSWPWCAPRPLRYFGRDARARRAQTAAMALLAGGLSRGLGSHPAAAGRDAVVFVWLLLSTWCTAPARAIQVTVSNPYHVVILFQPVTLPCTYQMTSTPTQPIVIWKYKSFCRDRIADAFSPASVDNQLNAQLAAGNPGYNPYVECQDSVRTVRVVATKQGNAVTLGDYYQGRRITITGNADLTFDQTAWGDSGVYYCSVVSAQDLQGNNEAYAELIVLDWLFVVVVCLAAFLIFLLLGICWCQCCPHTCCCYVRCPCCPDKCCCPEALYAAGKAATSGVPSIYAPSTYAHLSPAKTPPPPAMIPMGPAYNGYPGGYPGDVDRSSSAGGQGSYVPLLRDTDSSVASEVRSGYRIQASQQDDSMRVLYYMEKELANFDPSRPGPPSGRVERAMSEVTSLHEDDWRSRPSRGPALTPIRDEEWGGHSPRSPRGWDQEPAREQAGGGWRARRPRARSVDALDDLTPPSTAESGSRSPTSNGGRSRAYMPPRSRSRDDLYDQDDSRDFPRSRDPHYDDFRSRERPPADPRSHHHRTRDPRDNGSRSGDLPYDGRLLEEAVRKKGSEERRRPHKEEEEEAYYPPAPPPYSETDSQASRERRLKKNLALSRESLVV

SEQ ID NO: 2283 - protein, 249 aa, Homo sapiens; identical to SEQ ID NO: 1895

SEQ ID NO: 2284 - protein, 1018 aa, Homo sapiens; identical to SEQ ID NO: 1919

SEQ ID NO: 2285 - protein, 436 aa, Homo sapiens
MQGTPGGGTRPGPSPVDRRTLLVFSFILAAALGQMNFTGDQVLRVLAKDEKQLSLLGDLEGLKPQKVDFWRGPARPSLPVDMRVPFSELKDIKAYLESHGLAYSIMIKDIQVLLDEERQAMAKSRRLERSTNSFSYSSYHTLEEIYSWIDNFVMEHSDIVSKIQIGNSFENQSILVLKFSTGGSRHPAIWIDTGIHSREWITHATGIWTANKIVSDYGKDRVLTDILNAMDIFIELVTNPDGFAFTHSMNRLWRKNKSIRPGIFCIGVDLNRNWKSGFGGNGSNSNPCSETYHGPSPQSEPEVAAIVNFITAHGNFKALISIHSYSQMLMYPYGRLLEPVSNQRELYDLAKDAVEALYKVHGIEYIFGSISTTLYVASGITVDWAYDSGIKYAFSFELRDTGQYGFLLPATQIIPTAQETWMALRTIMEHTLNHPY

SEQ ID NO: 2286 - protein, 163 aa, Homo sapiens [sequence omitted]

SEQ ID NO: 2287 - protein, 70 aa, Homo sapiens; identical to SEQ ID NO: 2185

SEQ ID NO: 2288 - protein, 365 aa, Homo sapiens
MWLLLTMASLISVLGTTHGLFGKLHPGSPEVTMNISQMITYWGYPNEEYEVVTEDGYILEVNRIPYGKKNSGNTDAGYDVWLGNSRGNTWARRNLYYSPDSVEFWAFSFDEMAKYDLPATIDFIVKKTGQKQLHYVGHSQGTTIGFIAFSTNPSLAKRIKTFYALAPVATVKYTKSLINKLRFVPQSLFKFIFGDKIFYPHNFFDQFLATEVCSREMLNLLCSNALFIICGFDSKNFNTSRLDVYLSHNPAGTSVQNMFHWTQAVKSGKFQAYDWGSPVQNRMHYDQSQPPYYNVTAMNVPIAVWNGGKDLLADPQDVGLLLPKLPNLIYHKEIPFYNHLDFIWAMDAPQEVYNDIVSMISEDKK

SEQ ID NO: 2289 - protein, 844 aa, Homo sapiens
MGPGAPFARVGWPLPLLVVMAAGVAPVWASHSPHLPRPHSRVPPHPSSERRAVYIGALFPMSGGWPGGQACQPAVEMALEDVNSRRDILPDYELKLIHHDSKCDPGQATKYLYELLYNDPIKIILMPGCSSVSTLVAEAARMWNLIVLSYGSSSPALSNRQRFPTFFRTHPSATLHNPTRVKLFEKWGWKKIATIQQTTEVFTSTLDDLEERVKEAGIEITFRQSFFSDPAVPVKNLKRQDARIIVGLFYETEARKVFCEVYKERLFGKKYVWFLIGWYADNWFKIYDPSINCTVDEMTEAVEGHITTEIVMLNPANTRSISNMTSQEFVEKLTKRLKRHPEETGGFQEAPLAYDAIWALALALNKTSGGGGRSGVRLEDFNYNNQTITDQIYRAMNSSSFEGVSGHVVFDASGSRMAWTLIEQLQGGSYKKIGYYDSTKDDLSWSKTDKWIGGSPPADQTLVIKTFRFLSQKLFISVSVLSSLGIVLAVVCLSFNIYNSHVRYIQNSQPNLNNLTAVGCSLALAAVFPLGLDGYHIGRNQFPFVCQARLWLLGLGFSLGYGSMFTKIWWVHTVFTKKEEKKEWRKTLEPWKLYATVGLLVGMDVLTLAIWQIVDPLHRTIETFAKEEPKEDIDVSILPQLEHCSSRKMNTWLGIFYGYKGLLLLLGIFLAYETKSVSTEKINDHRAVGMAIYNVAVLCLITAPVTMILSSQQDAAFAFASLAIVFSSYITLVVLFVPKMRRLITRGEWQSEAQDTMKTGSSTNNNEEEKSRLLEKENRELEKIIAEKEERVSELRHQLQSRQQLRSRRHPPTPPEPSGGLPRGPPEPPDRLSCDGSRVHLLYK

SEQ ID NO: 2290 - protein, 339 aa, Homo sapiens
MVSKSRWKLLAMLALVLVVMVWYSISREDRYIELFYFPIPEKKEPCLQGEAESKASKLFGKLSPLCSYSRDQPIFLRLEDYFWVKTPSAYELPYGTKGSEDLLLRVLAITSSSIPKNIQSLRCRRCVVVGNGHRLRNSSLGDAINKYDVVIRLNNAPVAGYEGDVGSKTTMRLFYPESAHFDPKVENNPDTLLVLVAFKAMDFHWIETILSDKKRVRKGFWKQPPLIWDVNPKQIRILNPFFMEIAADKLLSLPMQQPRKIKQKPTTGLLAITLALHLCDLVHIAGFGYPDAYNKKQTIHYYEQITLKSMAGSGHNVSQEALAIKRMLEMGAIKNLTSF

SEQ ID NO: 2291 - protein, 461 aa, Homo sapiens [sequence omitted]

SEQ ID NO: 2292 - protein, 564 aa, Homo sapiens
MAPKKLSCLRSLLLPLSLTLLLPQADTRSFVVDRGHDRFLLDGAPFRYVSGSLHYFRVPRVLWADRLLKMRWSGLNAIQFYVPWNYHEPQPGVYNFNGSRDLIAFLNEAALANLLVILRPGPYICAEWEMGGLPSWLLRKPEIHLRTSDPADNMTKIFTLLRKYEPHGPLVNSEYYTGWLDYWGQNHSTRSVSAVTKGLENMLKLGASVNMYMFHGGTNFGYWNGADKKGRFLPITTSYDYDAPISEAGDPTPKLFALRDVISKFQEVPLGPLPPPSPKMMLGPVTLHLVGHLLAFLDLLCPRGPIHSILPMTFEAVKQDHGFMLYRTYMTHTIFEPTPFWVPNNGVHDRAYVMVDGVFQGVVERNMRDKLFLTGKLGSKLDILVENMGRLSFGSNSSDFKGLLKPPILGQTILTQWMMFPLKIDNLVKWWFPLQLPKWPYPQAPSGPTFYSKTFPILGSVGDTFLYLPGWTKGQVWINGFNLGRYWTKQGPQQTLYVPRFLLFPRGALNKITLLELEDVPLQPQVQFLDKPILNSTSTLHRTHINSLSADTLSASEPMELSGH

SEQ ID NO: 2293 - protein, 438 aa, Homo sapiens
MMYAPVEFSEAEFSRAEYQRKQQFWDSVRLALFTLAIVAIIGIAIGIVTHFVVEDDKSFYYLASFKVTNIKYKENYGIRSSREFIERSHQIERMMSRIFRHSSVGGRFIKSHVIKLSPDEQGVDILIVLIFRYPSTDSAEQIKKKIEKALYQSLKTKQLSLTINKPSFRLTPIDSKKMRNLLNSRCGIRMTSSNMPLPASSSTQRIVQGRETAMEGEWPWQASLQLIGSGHQCGASLISNTWLLTAAHCFWKNKDPTQWIATFGATITPPAVKRNVRKIILHENYHRETNENDIALVQLSTGVEFSNIVQRVCLPDSSIKLPPKTSVFVTGFGSIVDDGPIQNTLRQARVETISTDVCNRKDVYDGLITPGMLCAGFMEGKIDACKGDSGGPLVYDNHDIWYIVGIVSWGQSCALPKKPGVYTRVTKYRDWIASKTGM

SEQ ID NO: 2294 - protein, 1463 aa, Homo sapiens
MEPRLFCWTTLFLLAGWCLPGLPCPSRCLCFKSTVRCMHLMLDHIPQVPQQTTVLDLRFNRIREIPGSAFKKLKNLNTLLLNNNHIRKISRNAFEGLENLLYLYLYKNEIHALDKQTFKGLISLEHLYIHFNQLEMLQPETFGDLLRLERLFLHNNKLSKIPAGSFSNLDSLKRLRLDSNALVCDCDLMWLGELLQGFAQHGHTQAAATCEYPRRLHGRAVASVTVEEFNCQSPRITFEPQDVEVPSGNTVYFTCRAEGNPKPEIIWIHNNHSLDLEDDTRLNVFDDGTLMIRNTRESDQGVYQCMARNSAGEAKTQSAMLRYSSLPAKPSFVIQPQDTEVLIGTSTTLECMATGHPHPLITWTRDNGLELDGSRHVATSSGLYLQNITQRDHGRFTCHANNSHGTVQAAANIIVQAPPQFTVTPKDQVVLEEHAVEWLCEADGNPPPVIVWTKTGGQLPVEGQHTVLSSGTLRIDRAAQHDQGQYECQAVSSLGVKKVSVQLTVKPKALAVFTQLPQDTSVEVGKNINISCHAQGEPQPIITWNKEGVQITESGKFHVDDEGTLTIYDAGFPDQGRYECVARNSFGLAVTNMFLTVTAIQGRQAGDDFVESSILDAVQRVDSAINSTRRHLFSQKPHTSSDLLAQFHYPRDPLIVEMARAGEIFEHTLQLIRERVKQGLTVDLEGKEFRYNDLVSPRSLSLIANLSGCTARRPLPNCSNRCFHAKYRAHDGTCNNLQQPTWGAALTAFARLLQPAYRDGIRAPRGLGLPVGSRQPLPPPRLVATVWARAAAVTPDHSYTRMLMHWGWFLEHDLDHTVPALSTARFSDGRPCSSVCTNDPPCFPMNTRHADPRGTHAPCMLFARSSPACASGRPSATVDSVYAREQINQQTAYIDGSNVYGSSERESQALRDPSVPRGLLKTGFPWPPSGKPLLPFSTGPPTECARQEQESPCFLAGDHRANEHLALAAMHTLWFREHNRMATELSALNPHWEGNTVYQEARKIVGAELQHITYSHWLPKVLGDPGTRMLRGYRGYNPNVNAGIINSFATAAFRFGHTLINPILYRLNATLGEISEGHLPFHKALFSPSRIIKEGGIDPVLRGLFGVAAKWRAPSYLLSPELTQRLFSAAYSAAVDSAATIIQRGRDHGIPPYVDFRVFCNLTSVKNFEDLQNEIKDSEIRQKLRKLYGSPGDIDLWPALMVEDLIPGTRVGPTLMCLFVTQFQRLRDGDRFWYENPGVFTPAQLTQLKQASLSRVLCDNGDSIQQVQADVFVKAEYPQDYLNCSEIPKVDLRVWQDCCADCRSRGQFRAVTQESQKKRSAQYSYPVDKDMELSHLRSRQQDKIYVGEDARNVTVLAKTKFSQDFSTFAAEIQETITALREQINKLEARLRQAGCTDVRGVPRKAEERWMKEDCTHCICESGQVTCVVEICPPAPCPSPELVKGTCCPVCRDRGMPSDSPEKR

SEQ ID NO: 2295 - protein, 401 aa, Homo sapiens
MGLKALCLGLLCVLFVSHFYTPMPDNIEESWKIMALDAIAKTCTFTAMCFENMRIMRYEEFISMIFRLDYTQPLSDEYITVTDTTFVDIPVRLYLPKRKSETRRRAVIYFHGGGFCFGSSKQRAFDFLNRWTANTLDAVVVGVDYRLAPQHHFPAQFEDGLAAVKFFLLEKILTKYGVDPTRICIAGDSSGGNLATAVTQQVQNDAEIKHKIKMQVLLYPGLQITDSYLPSHRENEHGIVLTRDVAIKLVSLYFTKDEALPWAMRRNQHMPLESRHLFKFVNWSILLPEKYRKDYVYTEPILGGLSYSLPGLTDSRALPLLANDSQLQNLPLTYILTCQHDLLRDDGLMYVTRLRNVGVQVVHEHIEDGIHGALSFMTSPFYLRLGLRIRDMYVSWLDKNL

SEQ ID NO: 2296 - protein, 87 aa, Homo sapiens; identical to SEQ ID NO: 2125

SEQ ID NO: 2297 - protein, 270 aa, Homo sapiens
MRGQGRKESLSDSRDLDGSYDQLTGHPPGPTKKALKQRFLKLLPCCGPQALPSVSETLAAPASLRPHRPRLLDPDSVDDEFELSTVCHRPEGLEQLQEQTKFTRKELQVLYRGFKNECPSGIVNEENFKQIYSQFFPQGDSSTYATFLFNAFDTNHDGSVSFEDFVAGLSVILRGTVDDRLNWAFNLYDLNKDGCITKEEMLDIMKSIYDMMGKYTYPALREEAPREHVESFFQKMDRNKDGVVTIEEFIESCQKDENIMRSMQLFDNVI

SEQ ID NO: 2298 - protein, 272 aa, Homo sapiens
MHLRLISWLFIILNFMEYIGSQNASRGRRQRRMHPNVSQGCQGGCATCSDYNGCLSCKPRLFFALERIGMKQIGVCLSSCPSGYYGTRYPDINKCTKCKADCDTCFNKNFCTKCKSGFYLHLGKCLDNCPEGLEANNHTMECVSIVHCEVSEWNPWSPCTKKGKTCGFKRGTETRVREIIQHPSAKGNLCPPTNETRKCTVQRKKCQKGERGKKGRERKRKKPNKGESKEAIPDSKSLESSKEIPEQRENKQQQKKRKVQDKQKSVSVSTVH

SEQ ID NO: 2299 - protein, 97 aa, Homo sapiens
MAKSFPVFSLLSFILIHLVLSSVSGPRHWWPPRGIIKVKCPYEKVNLSWYNGTVNPCPGLYQPICGTNFITYDNPCILCVESLKSHGRIRFYHDGKC

SEQ ID NO: 2300 - protein, 241 aa, Homo sapiens; identical to SEQ ID NO: 1987

SEQ ID NO: 2301 - protein, 608 aa, Homo sapiens
MARARAGALLALWVLGAAAHPQCLDFRPPFRPTQPLRLCAQYSDFGCCDEGRDAELTRRFWALASRVDAAEWAACAGYARDLLCQECSPYAAHLYDAEDPFTPLRTVPGLCQDYCLDMWHKCRGLFRHLSTDQELWALEGNLARFCRYLSLDDTDYCFPYLLVNKNLNSNLGHVVADAKGCLQLCLEEVANGLRNPVAMVHARDGTHRFFVAEQVGLVWAYLPDRSRLGKPFLNISRVVLTSPWEGDERGFLGIAFHPSFQHNRRLYVYYSVGIRSSEWIRISEFRVSEDDENAVDHSSERIILEVKEPASNHNGGQLLFGDDGYLYIFTGDGGMAGDPFGTFGNAQNKSALLGKVLRIDVDRKERGLPYGIPPDNPFVGDPAAQPEVYALGVRNMWRCSFDRGDPSSGTGRGRLFCGDVGQNKFEEVDVVERGGNYGWRAREGFECYDRSLCANTSLNDLLPIFAYPHTVGKSVTGGYVYRGCEYPNLNGLYIFGDFMSGRLMSLQENPGTGQWQYSEICMGHGQTCEFPGLINNYYPYIISFGEDEAGELYFMSTGEPSATAPRGVVYKIIDASSCKARSAMPGYVPAPSVCSSLTSQPFILQWWK

SEQ ID NO: 2302 - protein, 116 aa, Homo sapiens
MAPPSVPLVLLLVLLLSLAETPASAPAHRGRGGWTLNSAGYLLGPVLHLPQMGDQDGKRETALEILDLWKAIDGLPYSHPPQPSKRNVMETFAKPEIGDLGMLSMKIPKEEDVLKS

SEQ ID NO: 2303 - protein, 1205 aa, Homo sapiens
MRKPRRKSRQNAEGRRSPSPYSLKCSPTRETLTYAQAQRIVEVDIDGRLHRISIYDPLKIITEDELTAQDITECNSNKENSEQPQFPGKSKKPSSKGKKKESCSKHASGTSFHLPQPSFRMVDSGIQPEAPPLPAAYYRYIEKPPEDLDAEVEYDMDEEDLAWLDMVNEKRRVDGHSLVSADTFELLVDRLEKESYLESRSSGAQQSLIDEDAFCCVCLDDECHNSNVILFCDICNLAVHQECYGVPYIPEGQWLCRCCLQSPSRPVDCILCPNKGGAFKQTSDGHWAHVVCAIWIPEVCFANTVFLEPIEGIDNIPPARWKLTCYICKQKGLGAAIQCHKVNCYTAFHVTCAQRAGLFMKIEPMRETSLNGTIFTVRKTAYCEAHSPPGAATARRKGDSPRSISETGDEEGLKEGDGEEEEEEEVEEEEQEAQGGVSGSLKGVPKKSKMSLKQKIKKEPEEAGQDTPSTLPMLAVPQIPSYRLNKICSGLSFQRKNQFMQRLHNYWLLKRQARNGVPLIRRLHSHLQSQRNAEQREQDEKTSAVKEELKYWQKLRHDLERARLLIELIRKREKLKREQVKVQQAAMELELMPFNVLLRTTLDLLQEKDPAHIFAEPVNLSEVPDYLEFISKPMDFSTMRRKLESHLYRTLEEFEEDFNLIVTNCMKYNAKDTIFHRAAVRLRDLGGAILRHARRQAENIGYDPERGTHLPESPKLEDFYRFSWEDVDNILIPENRAHLSPEVQLKELLEKLDLVSAMRSSGARTRRVRLLRREINALRQKLAQPPPPQPPSLNKTVSNGELPAGPQGDAAVLEQALQEEPEDDGDRDDSKLPPPPTLEPTGPAPSLSEQESPPEPPTLKPINDSKPPSRFLKPRKVEEDELLEKSPLQLGNEPLQRLLSDNGINRLSLMAPDTPAGTPLSGVGRRTSVLFKKAKNGVKLQRSPDRVLENGEDHGVAGSPASPASIEEERHSRKRPRSRSCSESEGERSPQQEEETGMTNGFGKHTESGSDSECSLGLSGGLAFEACSGLTPPKRSRGKPALSRVPFLEGVNGDSDYNGSGRSLLLPFEDRGDLEPLELVWAKCRGYPSYPALIIDPKMPREGLLHNGVPIPVPPLDVLKLGEQKQAEAGEKLFLVLFFDNKRTWQWLPRDKVLPLGVEDTVDKLKMLEGRKTSIRKSVQVAYDRAMIHLSRVRGPHSFVTSSYL

SEQ ID NO: 2304 - protein, 658 aa, Homo sapiens
MFVSYLILTLLHVQTAVLARPGGESIGCDDYLGSDKVVDKCGVCGGDNTGCQVVSGVFKHALTSLGYHRVVEIPEGATKINITEMYKSNNYLALRSRSGRSIINGNWAIDRPGKYEGGGTMFTYKRPNEISSTAGESFLAEGPTNEILDVYMIHQQPNPGVHYEYVIMGTNAISPQVPPHRRPGEPFNGQMVTEGRSQEEGEQKGRNEEKEDLRGEAPEMFTSESAQTFPVRHPDRFSPHRPDNLVPPAPQPPRRSRDHNWKQLGTTECSTTCGKGSQYPIFRCVHRSTHEEAPESYCDSSMKPTPEEEPCNIFPCPAFWDIGEWSECSKTCGLGMQHRQVLCRQVYANRSLTVQPYRCQHLEKPETTSTCQLKICSEWQIRTDWTSCSVPCGVGQRTRDVKCVSNIGDVVDDEECNMKLRPNDIENCDMGPCAKSWFLTEWSERCSAECGAGVRTRSVVCMTNHVSSLPLEGCGNNRPAEATPCDNGPCTGKVEWFAGSWSQCSIECGSGTQQREVICVRKNADTFEVLDPSECSFLEKPPSQQSCHLKPCGAKWFSTEWSMCSKSCQGGFRVREVRCLSDDMTLSNLCDPQLKPEERESCNPQDCVPEVDENCKDKYYNCNVVVQARLCVYNYYKTACCASCTRVANRQTGFLGSR

SEQ ID NO: 2305 - protein, 235 aa, Homo sapiens
MRPLAGGLLKVVFVVFASLCAWYSGYLLAELIPDAPLSSAAYSIRSIGERPVLKAPVPKRQKCDHWTPCPSDTYAYRLLSGGGRSKYAKICFEDNLLMGEQLGNVARGINIAIVNYVTGNVTATRCFDMYEGDNSGPMTKFIQSAAPKSLLFMVTYDDGSTRLNNDAKNAIEALGSKEIRNMKFRSSWVFIAAKGLELPSEIQREKINHSDAKNNRYSGWPAEIQIEGCIPKERS

SEQ ID NO: 2306 - protein, 252 aa, Homo sapiens
MRGQGRKESLSDSRDLDGSYDQLTGHPPGPTKKALKQRFLKLLPCCGPQALPSVSENSVDDEFELSTVCHRPEGLEQLQEQTKFTRKELQVLYRGFKNECPSGIVNEENFKQIYSQFFPQGDSSTYATFLFNAFDTNHDGSVSFEDFVAGLSVILRGTVDDRLNWAFNLYDLNKDGCITKEEMLDIMKSIYDMMGKYTYPALREEAPREHVESFFQKMDRNKDGVVTIEEFIESCQKDENIMRSMQLFDNVI

SEQ ID NO: 2307 - protein, 103 aa, Homo sapiens [sequence omitted]

SEQ ID NO: 2308 - protein, 1039 aa, Homo sapiens
MEVTAVATQGGYGSSDWVTSYLLMFSDGGRNWKQYRREESIWGFPGNTNADSVVHYRLQPPFEARFLRFLPLAWNPRGRIGMRIEVYGCAYKSEVVYFDGQSALLYRLDKKPLKPIRDVISLKFKAMQSNGILLHREGQHGNHITLELIKGKLVFFLNSGNAKLPSTIAPVTLTLGSLLDDQHWHSVLIELLDTQVNFTVDKHTHHFQAKGDSSYLDLNFEISFGGIPTPGRSRAFRRKSFHGCLENLYYNGVDVTELAKKHKPQILMMGNVSFSCPQPQTVPVTFLSSRSYLALPGNSGEDKVSVTFQFRTWNRAGHLLFGELRRGSGSFVLFLKDGKLKLSLFQPGQSPRNVTAGAGLNDGQWHSVSFSAKWSHMNVVVDDDTAVQPLVAVLIDSGDTYYFGGCLDNSSGSGCKSPLGGFQGCLRLITIGDKAVDPILVQQGALGSFRDLQIDSCGITDRCLPSYCEHGGECSQSWDTFSCDCLGTGYTGETCHSSLYEQSCEAHKHRGNPSGLYYIDADGSGPLGPFLVYCNMTADAAWTVVQHGGPDAVTLRGAPSGHPRSAVSFAYAAGAGQLRSAVNLAERCEQRLALRCGTARRPDSRDGTPLSWWVGRTNETHTSWGGSLPDAQKCTCGLEGNCIDSQYYCNCDAGRNEWTSDTIVLSQKEHLPVTQIVMTDAGRPHSEAAYTLGPLLCRGDQSFWNSASFNTETSYLHFPAFHGELTADVCFFFKTTVSSGVFMENLGITDFIRIELRAPTEVTFSFDVGNGPCEVTVQSPTPFNDNQWHHVRAERNVKGASLQVDQLPQKMQPAPADGHVRLQLNSQLFIGGTATRQRGFLGCIRSLQLNGVALDLEERATVTPGVEPGCAGHCSTYGHLCRNGGRCREKRRGVTCDCAFSAYDGPFCSNEISAYFATGSSMTYHFQEHYTLSENSSSLVSSLHRDVTLTREMITLSFRTTRTPSLLLYVSSFYEEYLSVILANNGSLQIRYKLDRHQNPDAFTFDFKNMADGQLHQVKINREEAVVMVEVIPQMQKSN

SEQ ID NO: 2309 - protein, 418 aa, Homo sapiens
MRSLLLLSAFCLLEAALAAEVKKPAAAAAPGTAEKLSPKAATLAERSAGLAFSLYQAMAKDQAVENILVSPVVVASSLGLVSLGGKATTASQAKAVLSAEQLRDEEVHAGLGELLRSLSNSTARNVTWKLGSRLYGPSSVSFADDFVRSSKQHYNCEHSKINFRDKRSALQSINEWAAQTTDGKLPEVTKDVERTDGALLVNAMFFKPHWDEKFHHKMVDNRGFMVTRSYTVGVMMMHRTGLYNYYDDEKEKLQIVEMPLAHKLSSLIILMPHHVEPLERLEKLLTKEQLKIWMGKMQKKAVAISLPKGVVEVTHDLQKHLAGLGLTEAIDKNKADLSRMSGKKDLYLASVFHATAFELDTDGNPFDQDIYGREELRSPKLFYADHPFIFLVRDTQSGSLLFIGRLVRPKGDKMRDEL

SEQ ID NO: 2310 - protein, 125 aa, Homo sapiens
MQLLKALWALAGAALCCFLVLVIHAQFLKEGQLAAGTCEIVTLDRDSSQPRRTIARQTARCACRKGQIAGTTRARPACVDARIIKTKQWCDMLPCLEGEGCDLLINRSGWTCTQPGGRIKTTTVS

SEQ ID NO: 2311 - protein, 1952 aa, Homo sapiens
MPALGPALLQALWAGWVLTLQPLPPTAFTPNGTYLQHLARDPTSGTLYLGATNFLFQLSPGLQLEATVSTGPVLDSRDCLPPVMPDECPQAQPTNNPNQLLLVSPGALVVCGSVHQGVCEQRRLGQLEQLLLRPERPGDTQYVAANDPAVSTVGLVAQGLAGEPLLFVGRGYTSRGVGGGIPPITTRALWPPDPQAAFSYEETAKLAVGRLSEYSHHFVSAFARGASAYFLFLRRDLQAQSRAFRAYVSRVCLRDQHYYSYVELPLACEGGRYGLIQAAAVATSREVAHGEVLFAAFSSAAPPTVGRPPSAAAGASGASALCAFPLDEVDRLANRTRDACYTREGRAEDGTEVAYIEYDVNSDCAQLPVDTLDAYPCGSDHTPSPMASRVPLEATPILEWPGIQLTAVAVTMEDGHTIAFLGDSQGQLHRVYLGPGSDGHPYSTQSIQQGSAVSRDLTFDGTFEHLYVMTQSTLLKVPVASCAQHLDCASCLAHRDPYCGWCVLLGRCSRRSECSRGQGPEQWLWSFQPELGCLQVAAMSPANISREETREVFLSVPDLPPLWPGESYSCHFGEHQSPALLTGSGVMCPSPDPSEAPVLPRGADYVSVSVELRFGAVVIAKTSLSFYDCVAVTELRPSAQCQACVSSRWGCNWCVWQHLCTHKASCDAGPMVASHQSPLVSPDPPARGDGDSAELEGPPAPLILPSSLDYQYDTPGLWELEEATLGASSCPCVESVQGSTLMPVHVEREIRLLGRNLHLFQDGPGDNECVMELEGLEVVVEARVECEPPPDTQCHVTCQQHQLSYEALQPELRVGLFLRRAGRLRVDSAEGLHVVLYDCSVGHGDCSRCQTAMPQYGCVWCEGERPRCVTREACGEAEAVATQCPAPLIHSVEPLTGPVDGGTRVTIRGSNLGQHVQDVLGMVTVAGVPCAVDAQEYEVSSSLVCITGASGEEVAGATAVEVPGRGRGVSEHDFAYQDPKVHSIFPARGPRAGGTRLTLNGSKLLTGRLEDIRVVVGDQPCHLLPEQQSEQLRCETSPRPTPATLPVAVWFGATERRLQRGQFKYTLDPNITSAGPTKSFLSGGREICVRGQNLDVVQTPRIRVTVVSRMLQPSQGLGRRRRVVPETACSLGPSCSSQQFEEPCHVNSSQLITCRTPALPGLPEDPWVRVEFILDNLVFDFATLNPTPFSYEADPTLQPLNPEDPTMPFRHKPGSVFSVEGENLDLAMSKEEVVAMIGDGPCVVKTLTRHHLYCEPPVEQPLPRHHALREAPDSLPEFTVQMGNLRFSLGHVQYDGESPGAFPVAAQVGLGVGTSLLALGVIIIVLMYRRKSKQALRDYKKVQIQLENLESSVRDRCKKEFTDLMTEMTDLTSDLLGSGIPFLDYKVYAERIFFPGHRESPLHRDLGVPESRRPTVEQGLGQLSNLLNSKLFLTKFIHTLESQRTFSARDRAYVASLLTVALHGKLEYFTDILRTLLSDLVAQYVAKNPKLMLRRTETVVEKLLTNWMSICLYTFVRDSVGEPLYMLFRGIKHQVDKGPVDSVTGKAKYTLNDNRLLREDVEYRPLTLNALLAVGPGAGEAQGVPVKVLDCDTISQAKEKMLDQLYKGVPLTQRPDPRTLDVEWRSGVAGHLILSDEDVTSEVQGLWRRLNTLQHYKVPDGATVALVPCLTKHVLRENQDYVPGERTPMLEDVDEGGIRPWHLVKPSDEPEPPRPRRGSLRGGERERAKAIPEIYLTRLLSMKGTLQKFVDDLFQVILSTSRPVPLAVKYFFDLLDEQAQQHGISDQDTIHIWKTNSLPLRFWINIIKNPQFVFDVQTSDNMDAVLLVIAQTFMDACTLADHKLGRDSPINKLLYARDIPRYKRMVERYYADIRQTVPASDQEMNSVLAELSWNYSGDLGARVALHELYKYINKYYDQIITALEEDGTAQKMQLGYRLQQIAAAVENKVTDL

SEQ ID NO: 2312 - protein, 113 aa, Homo sapiens
MLVLFLLGTVFLLCPYWGELHDPIKATEIMCYECKKYHLGLCYGVMTSCSLKHKQSCAVENFYILTRKGQSMYHYSKLSCMTSCEDINFLGFTKRVELICCDHSNYCNLPEGV

SEQ ID NO: 2313 - protein, 2135 aa, Homo sapiens; identical to SEQ ID NO: 2015

SEQ ID NO: 2314 - protein, 129 aa, Homo sapiens
MRPLKPGAPLPALFLLALALSPHGAHGRPRGRRGARVTDKEPKPLLFLPAAGAGRTPSGSRSAEIFPRDSNLKDKFIKHFTGPVTFSPECSKHFHRLYYNTRECSTPAYYKRCARLLTRLAVSPLCSQT

SEQ ID NO: 2315 - protein, 83 aa, Homo sapiens
MRLSVCLLMVSLALCCYQAHALVCPAVASEITVFLFLSDAAVNLQVAKLNPPPEALAAKLEVKHCTDQISFKKRLSLKKSWWK

SEQ ID NO: 2316 - protein, 484 aa, Homo sapiens; identical to SEQ ID NO: 2124

SEQ ID NO: 2317 - protein, 52 aa, Homo sapiens
MKLCVTVLSLLVLVAAFCSLALSAPSNKPLEASKSALTPVSPGSRSTCMTWN

SEQ ID NO: 2318 - protein, 224 aa, Homo sapiens
MRVSGVLRLLALIFAIVTTWMFIRSYMSFSMKTIRLPRWLAASPTKEIQVKKYKCGLIKPCPANYFAFKICSGAANVVGPTMCFEDRMIMSPVKNNVGRGLNIALVNGTTGAVLGQKAFDMYSGDVMHLVKFLKEIPGGALVLVASYDDPGTKMNDESRKLFSDLGSSYAKQLGFRDSWVFIGAKDLRGKSPFEQFLKNSPDTNKYEGWPELLEMEGCMPPKPF

SEQ ID NO: 2319 - protein, 467 aa, Homo sapiens
MLIFWTITLFLLGAAKGKEVCYEDLGCFSDTEPWGGTAIRPLKILPWSPEKIGTRFLLYTNENPNNFQILLLSDPSTIEASNFQMDRKTRFIIHGFIDKGDESWVTDMCKKLFEVEEVNCICVDWKKGSQATYTQAANNVRVVGAQVAQMLDILLTEYSYPPSKVHLIGHSLGAHVAGEAGSKTPGLSRITGLDPVEASFESTPEEVRLDPSDADFVDVIHTDAAPLIPFLGFGTNQQMGHLDFFPNGGESMPGCKKNALSQIVDLDGIWAGTRDFVACNHLRSYKYYLESILNPDGFAAYPCTSYKSFESDKCFPCPDQGCPQMGHYADKFAGRTSEEQQKFFLNTGEASNFARWRYGVSITLSGRTATGQIKVALFGNKGNTHQYSIFRGILKPGSTHSYEFDAKLDVGTIEKVKFLWNNNVINPTLPKVGATKITVQKGEEKTVYNFCSEDTVREDTLLTLTPC

SEQ ID NO: 2320 - protein, 78 aa, Homo sapiens
MGSGLPLVLLLTLLGSSHGTGPGMTLQLKLKESFLTNSSYESSFLELLEKLCLLLHLPSGTSVTLHHARSQHHVVCNT

SEQ ID NO: 2321 - protein, 96 aa, Homo sapiens
MEHKEVVLLLLLFLKSGQGEPLDDYVNTQGPSLFSVTKKQLGAGSREECAAKCEEDKEFTCRAFQYHSKEQQCVIMAENRKSSIIIRMRDAVLFEK

SEQ ID NO: 2322 - protein, 360 aa, Homo sapiens
MGLLLLVPLLLLPGSYGLPFYNGFYYSNSANDQNLGNGHGKDLLNGVKLVVETPEETLFTYQGASVILPCRYRYEPALVSPRRVRVKWWKLSENGAPEKDVLVAIGLRHRSFGDYQGRVHLRQDKEHDVSLEIQDLRLEDYGRYRCEVIDGLEDESGLVELELRGVVFPYQSPNGRYQFNFHEGQQVCAEQAAVVASFEQLFRAWEEGLDWCNAGWLQDATVQYPIMLPRQPCGGPGLAPGVRSYGPRHRRLHRYDVFCFATALKGRVYYLEHPEKLTLTEAREACQEDDATIAKVGQLFAAWKFHGLDRCDAGWLADGSVRYPVVHPHPNCGPPEPGVRSFGFPDPQSRLYGVYCYRQH

SEQ ID NO: 2323 - protein, 269 aa, Homo sapiens
MIRTLLLSTLVAGALSCGDPTYPPYVTRVVGGEEARPNSWPWQVSLQYSSNGKWYHTCGGSLIANSWVLTAAHCISSSRTYRVGLGRHNLYVAESGSLAVSVSKIVVHKDWNSNQISKGNDIALLKLANPVSLTDKIQLACLPPAGTILPNNYPCYVTGWGRLQTNGAVPDVLQQGRLLVVDYATCSSSAWWGSSVKTSMICAGGDGVISSCNGDSGGPLNCQASDGRWQVHGIVSFGSRLGCNYYHKPSVFTRVSNYIDWINSVIANN

SEQ ID NO: 2324 - protein, 373 aa, Homo sapiens
MLPWLLVFSALGIQAWGDSSWNKTQAKQVSEGLQYLFENISQLTEKGLPTDVSTTVSRKAWGAEAVGCSIQLTTPVNVLVIHHVPGLECHDQTVCSQRLRELQAHHVHNNSGCDVAYNFLVGDDGRVYEGVGWNIQGVHTQGYNNISLGFAFFGTKKGHSPSPAALSAMENLITYAVQKGHLSSSYVQPLLGKGENCLAPRQKTSLKKACPGVVPRSVWGARETHCPRMTLPAKYGIIIHTAGRTCNISDECRLLVRDIQSFYIDRLKSCDIGYNFLVGQDGAIYEGVGWNVQGSSTPGYDDIALGITFMGTFTGIPPNAAALEAAQDLIQCAMVKGYLTPNYLLVGHSDVARTLSPGQALYNIISTWPHFKH

SEQ ID NO: 2325 - protein, 108 aa, Homo sapiens
MRQRLLPSVTSLLLVALLFPGSSQARHVNHSATEALGELRERAPGQGTNGFQLLRHAVKRDLLPPRTPPYQGDVPPGIRNTICHMQQGICRLFFCHSGTGQQHRQRCG

SEQ ID NO: 2326 - protein, 235 aa, Homo sapiens
MSPPLLKLGAVLSTMAMISNWMSQTLPSLVGLNTTRLSTPDTLTQISPKEGWQVYSSAQDPDGRCICTVVAPEQNLCSRDAKSRQLRQLLEKVQNMSQSIEVLNLRTQRDFQYVLKMETQMKGLKAKFRQIEDDRKTLMTKHFQELKEKMDELLPLIPVLEQYKTDAKLITQFKEEIRNLSAVLTGIQEEIGAYDYEELHQRVLSLETRLRDCMKKLIDLKKRKEEEKRQQKGEA

SEQ ID NO: 2327 - protein, 201 aa, Homo sapiens
MNLNCPPCVTGLRVWSSCRSKPNSRARSCRSCTGASRTLPSHHMSHVECPSGIVNEENFKQIYSQFFPQGDSSTYATFLFNAFDTNHDGSVSFEDFVAGLSVILRGTVDDRLNWAFNLYDLNKDGCITKEEMLDIMKSIYDMMGKYTYPALREEAPREHVESFFQKMDRNKDGVVTIEEFIESCQKDENIMRSMQLFDNVI

SEQ ID NO: 2328 - protein, 230 aa, Homo sapiens
MRLAGPLRIVVLVVSVGVTWIVVSILLGGPGSGFPRIQQLFTSPESSVTAAPRARKYKCGLPQPCPEEHLAFRVVSGAANVIGPKICLEDKMLMSSVKDNVGRGLNIALVNGVSGELIEARAFDMWAGDVNDLLKFIRPLHEGTLVFVASYDDPATKMNEETRKLFSELGSRNAKELAFRDSWVFVGAKGVQNKSPFEQHVKNSKHSNKYEGWPEALEMEGCIPRRSTAS

SEQ ID NO: 2329 - protein, 227 aa, Homo sapiens
MRVAGAAKLVVAVAVFLLTFYVISQVFEIKMDASLGNLFARSALDTAARSTKPPRYKCGISKACPEKHFAFKMASGAANVVGPKICLEDNVLMSGVKNNVGRGINVALANGKTGEVLDTKYFDMWGGDVAPFIEFLKAIQDGTIVLMGTYDDGATKLNDEARRLIADLGSTSITNLGFRDNWVFCGGKGIKTKSPFEQHIKNNKDTNKYEGWPEVVEMEGCIPQKQD

SEQ ID NO: 2330 - protein, 551 aa, Homo sapiens [sequence omitted]

SEQ ID NO: 2331 - protein, 673 aa, Homo sapiens
MKPGGFWLHLTLLGASLPAALGWMDPGTSRGPDVGVGESQAEEPRSFEVTRREGLSSHNELLASCGKKFCSRGSRCVLSLAPEDRVSVTTVTVGLSTVLTCAVHGDLRPPIIWKRNGLTLNFLDLEDINDFGEDDSLYITKVTTIHMGNYTCHASGHEQLFQTHVLQVNVPPVIRVYPESQAQEPGVAASLRCHAEGIPMPRITWLKNGVDVSTQMSKQLSLLANGSELHISSVRYEDTGAYTCIAKNEVGVDEDISSLFIEDSARKTLANILWREEGLSVGNMFYVFSDDGIIVIHPVDCEIQRHLKPTEKIFMSYEEICPQREKNATQPCQWVSAVNVRNRYIYVAQPALSRVLVVDIQAQKVLQSIGVDPLPAKLSYDKSHDQVWVLSWGDVHKSRPSLQVITEASTGQSQHLIRTPFAGVDDFFIPPTNLIINHIRFGFIFNKSDPAVHKVDLETMMPLKTIGLHHHGCVPQAMAHTHLGGYFFIQCRQDSPASAARQLLVDSVTDSVLGPNGDVTGTPHTSPDGRFIVSAAADSPWLHVQEITVRGEIQTLYDLQINSGISDLAFQRSFTESNQYNIYAALHTEPDLLFLELSTGKVGMLKNLKEPPAGPAQPWGGTHRIMRDSGLFGQYLLTPARESLFLINGRQNTLRCEVSGIKGGTTVVWVGEV

SEQ ID NO: 2332 - protein, 668 aa, Homo sapiens
MDLVLKRCLLHLAVIGALLAVGATKVPRNQDWLGVSRQLRTKAWNRQLYPEWTEAQRLDCWRGGQVSLKVSNDGPTLIGANASFSIALNFPGSQKVLPDGQVIWVNNTIINGDQVWGGQPVYPQETDDACIFPDGGPCPSGSWSQKRSFVYVWKTWGQYWQVLGGPVSGLSIGTGRAMLGTHTMEVTVYHRRGSRSYVPLAHSSSAFTITDQVPFSVSVSQLRALDGGNKHFLRNQPLTFALQLHDPSGYLAEADLSYTWDFGDSSGTLISRALVVTHTYLEPGPVTAQVVLQAAIPLTSCGSSPVPGTTDGHRPTAEAPNTTAGQVPTTEVVGTTPGQAPTAEPSGTTSVQVPTTEVISTAPVQMPTAESTGMTPEKVPVSEVMGTTLAEMSTPEATGMTPAEVSIVVLSGTTAAQVTTTEWVETTARELPIPEPEGPDASSIMSTESITGSLGPLLDGTATLRLVKRQVPLDCVLYRYGSFSVTLDIVQGIESAEILQAVPSGEGDAFELTVSCQGGLPKEACMEISSPGCQPPAQRLCQPVLPSPACQLVLHQILKGGSGTYCLNVSLADTNSLAVVSTQLIMPVPGILLTGQEAGLGQVPLIVGILLVLMAVVLASLIYRRRLMKQDFSVPQLPHSSSHWLRLPRIFCSCPIGENSPLLSGQQV

SEQ ID NO: 2333 - protein, 581 aa, Homo sapiens
MQQDGLGVGTRNGSGKGRSVHPSWPWCAPRPLRYFGRDARARRAQTAAMALLAGGLSRGLGSHPAAAGRDAVVFVWLLLSTWCTAPARAIQVTVSNPYHVVILFQPVTLPCTYQMTSTPTQPIVIWKYKSFCRDRIADAFSPASVDNQLNAQLAAGNPGYNPYVECQDSVRTVRVVATKQGNAVTLGDYYQGRRITITGNADLTFDQTAWGDSGVYYCSVVSAQDLQGNNEAYAELIVLVYAAGKAATSGVPSIYAPSTYAHLSPAKTPPPPAMIPMGPAYNGYPGGYPGDVDRSSSAGGQGSYVPLLRDTDSSVASEVRSGYRIQASQQDDSMRVLYYMEKELANFDPSRPGPPSGRVERAMSEVTSLHEDDWRSRPSRGPALTPIRDEEWGGHSPRSPRGWDQEPAREQAGGGWRARRPRARSVDALDDLTPPSTAESGSRSPTSNGGRSRAYMPPRSRSRDDLYDQDDSRDFPRSRDPHYDDFRSRERPPADPRSHHHRTRDPRDNGSRSGDLPYDGRLLEEAVRKKGSEERRRPHKEEEEEAYYPPAPPPYSETDSQASRERRLKKNLALSRESLVV

SEQ ID NO: 2334 - protein, 652 aa, Homo sapiens
MPPPLPLLLLTVLVVAAARPGCEFERNPAGECHRPPAADSATCVDLQLRTCSDAAYNHTTFPNLLQHRSWEVVEASSEYILLSVLHQLLEGQCNPDLRLLGCAVLAPRCEGGWVRRPCRHICEGLREVCQPAFDAIDMAWPYFLDCHRYFTREDEGCYDPLEKLRGGLEADEALPSGLPPTFIRFSHHSYAQMVRVLRRTASRCAHVARTYSIGRSFDGRELLVIEFSSRPGQHELMEPEVKLIGNIHGNEVAGREMLIYLAQYLCSEYLLGNPRIQRLLNTTRIHLLPSMNPDGYEVAAAEGAGYNGWTSGRQNAQNLDLNRNFPDLTSEYYRLAETRGARSDHIPIPQHYWWGKVAPETKAIMKWMQTIPFVLSASLHGGDLVVSYPFDFSKHPQEEKMFSPTPDEKMFKLLSRAYADVHPMMMDRSENRCGGNFLKRGSIINGADWYSFTGGMSDFNYLHTNCFEITVELGCVKFPPEEALYILWQHNKESLLNFVETVHRGIKGVVTDKFGKPVKNARISVKGIRHDITTAPDGDYWRLLPPGIHIVIAQAPGYAKVIKKVIIPARMKRAGRVDFILQPLGMGPKNFIHGLRRTGPHDPLGGASSLGEATEPDPLRARRQPSADGSKPWWWSYFTSLSTHRPRWLLKY

SEQ ID NO: 2335 - protein, 92 aa, Homo sapiens
MKLCVTVLSLLVLVAAFCSLALSAPMGSDPPTACCFSYTARKLPRNFVVDYYETSSLCSQPAVVGFLGRKGKQVCADPSESWVQEYVYDLEL

SEQ ID NO: 2336 - protein, 82 aa, Homo sapiens
MRQRLLPSVTSLLLVALLFPGSSQARHVNHSATEALGELRERAPGQGTNGFQLLRHAVKRDLLPPRTPPYQGTGQQHRQRCG

SEQ ID NO: 2337 - protein, 136 aa, Homo sapiens [sequence omitted]

SEQ ID NO: 2338 - protein, 355 aa, Homo sapiens
MQLTTCLRETLFTGASQKTSLWWLGIASFGVPEKLGCANLPLNSRQKELCKRKPYLLPSIREGARLGIQECGSQFRHERWNCMITAAATTAPMGASPLFGYELSSGTKETAFIYAVMAAGLVHSVTRSCSAGNMTECSCDTTLQNGGSASEGWHWGGCSDDVQYGMWFSRKFLDFPIGNTTGKENKVLLAMNLHNNEAGRQAVAKLMSVDCRCHGVSGSCAVKTCWKTMSSFEKIGHLLKDKYENSIQISDKTKRKMRRREKDQRKIPIHKDDLLYVNKSPNYCVEDKKLGIPGTQGRECNRTSEGADGCNLLCCGRGYNTHVVRHVERCECKFIWCCYVRCRRCESMTDVHTCK

SEQ ID NO: 2339 - protein, 971 aa, Homo sapiens
MLRRPAPALAPAARLLLAGLLCGGGVWAARVNKHKPWLEPTYHGIVTENDNTVLLDPPLIALDKDAPLRFAGEICGFKIHGQNVPFDAVVVDKSTGEGVIRSKEKLDCELQKDYSFTIQAYDCGKGPDGTNVKKSHKATVHIQVNDVNEYAPVFKEKSYKATVIEGKQYDSILRVEAVDADCSPQFSQICSYEIITPDVPFTVDKDGYIKNTEKLNYGKEHQYKLTVTAYDCGKKRATEDVLVKISIKPTCTPGWQGWNNRIEYEPGTGALAVFPNIHLETCDEPVASVQATVELETSHIGKGCDRDTYSEKSLHRLCGAAAGTAELLPSPSGSLNWTMGLPTDNGHDSDQVFEFNGTQAVRIPDGVVSVSPKEPFTISVWMRHGPFGRKKETILCSSDKTDMNRHHYSLYVHGCRLIFLFRQDPSEEKKYRPAEFHWKLNQVCDEEWHHYVLNVEFPSVTLYVDGTSHEPFSVTEDYPLHPSKIETQLVVGACWQEFSGVENDNETEPVTVASAGGDLHMTQFFRGNLAGLTLRSGKLADKKVIDCLYTCKEGLDLQVLEDSGRGVQIQAHPSQLVLTLEGEDLGELDKAMQHISYLNSRQFPTPGIRRLKITSTIKCFNEATCISVPPVDGYVMVLQPEEPKISLSGVHHFARAASEFESSEGVFLFPELRIISTITREVEPEGDGAEDPTVQESLVSEEIVHDLDTCEVTVEGEELNHEQESLEVDMARLQQKGIEVSSSELGMTFTGVDTMASYEEVLHLLRYRNWHARSLLDRKFKLICSELNGRYISNEFKVEVNVIHTANPMEHANHMAAQPQFVHPEHRSFVDLSGHNLANPHPFAVVPSTATVVIVVCVSFLVFMIILGVFRIRAAHRRTMRDQDTGKENEMDWDDSALTITVNPMETYEDQHSSEEEEEEEEEEESEDGEEEDDITSAESESSEEEEGEQGDPQNATRQQQLEWDDSTLSY

SEQ ID NO: 2340 - protein, 187 aa, Homo sapiens
MVAATVAAAWLLLWAAACAQQEQDFYDFKAVNIRGKLVSLEKYRGSVSLVVNVASECGFTDQHYRALQQLQRDLGPHHFNVLAFPCNQFGQQEPDSNKEIESFARRTYSVSFPMFSKIAVTGTGAHPAFKYLAQTSGKEPTWNFWKYLVAPDGKVVGAWDPTVSVEEVRPQITALVRKLILLKREDL

SEQ ID NO: 2341 - protein, 100 aa, Homo sapiens
MWGFLVLKARWLVTPVRTLATEAGQKPSLRGLLDVGNIQHRAARARGLTRGVIRVSPQERSQQNQSAPKGPTPSTRPKPRTLGPQAHSLALQSVDLLFRP

SEQ ID NO: 2342 - protein, 783 aa, Homo sapiens
MRWQCGTRFRGLRPAVAPWTALLALGLPGWVLAVSATAAAVVPEQHASVAGQHPLDWLLTDRGPFHRAQEYADFMERYRQGFTTRYRIYREFARWKVNNLALERKDFFSLPLPLAPEFIRNIRLLGRRPNLQQVTENLIKKYGTHFLLSATLGGEESLTIFVDKQKLGRKTETTGGASIIGGSGNSTAVSLETLHQLAASYFIDRESTLRRLHHIQIATGAIKVTETRTGPLGCSNYDNLDSVSSVLVQSPENKVQLLGLQVLLPEYLRERFVAAALSYITCSSEGELVCKENDCWCKCSPTFPECNCPDADIQAMEDSLLQIQDSWATHNRQFEESEEFQALLKRLPDDRFLNSTAISQFWAMDTSLQHRYQQLGAGLKVLFKKTHRILRRLFNLCKRCHRQPRFRLPKERSLSYWWNRIQSLLYCGESTFPGTFLEQSHSCTCPYDQSSCQGPIPCALGEGPACAHCAPDNSTRCGSCNPGYVLAQGLCRPEVAESLENFLGLETDLQDLELKYLLQKQDSRIEVHSIFISNDMRLGSWFDPSWRKRMLLTLKSNKYKPGLVHVMLALSLQICLTKNSTLEPVMAIYVNPFGGSHSESWFMPVNEGSFPDWERTNVDAAAQCQNWTITLGNRWKTFFETVHVYLRSRIKSLDDSSNETIYYEPLEMTDPSKNLGYMKINTLQVFGYSLPFDPDAIRDLILQLDYPYTQGSQDSALLQLIELRDRVNQLSPPGKVRLDLFSCLLRHRLKLANNEVGRIQSSLRAFNSKLPNPVEYETGKLCS

SEQ ID NO: 2343 - protein, 671 aa, Homo sapiens
MAQLFLPLLAALVLAQAPAALADVLEGDSSEDRAFRVRIAGDAPLQGVLGGALTIPCHVHYLRPPPSRRAVLGSPRVKWTFLSRGREAEVLVARGVRVKVNEAYRFRVALPAYPASLTDVSLALSELRPNDSGIYRCEVQHGIDDSSDAVEVKVKGVVFLYREGSARYAFSFSGAQEACARIGAHIATPEQLYAAYLGGYEQCDAGWLSDQTVRYPIQTPREACYGDMDGFPGVRNYGVVDPDDLYDVYCYAEDLNGELFLGDPPEKLTLEEARAYCQERGAEIATTGQLYAAWDGGLDHCSPGWLADGSVRYPIVTPSQRCGGGLPGVKTLFLFPNQTGFPNKHSRFNVYCFRDSAQPSAIPEASNPASNPASDGLEAIVTVTETLEELQLPQEATESESRGAIYSIPIMEDGGGGSSTPEDPAEAPRTLLEFETQSMVPPTGFSEEEGKALEEEEKYEDEEEKEEEEEEEEVEDEALWAWPSELSSPGPEASLPTEPAAQEESLSQAPARAVLQPGASPLPDGESEASRPPRVHGPPTETLPTPRERNLASPSPSTLVEAREVGEATGGPELSGVPRGESEETGSSEGAPSLLPATRAPEGTRELEAPSEDNSGRTAPAGTSVQAQPVLPTDSASRGGVAVVPASGNSAQGSTALSILLLFFPLQLWVT

SEQ ID NO: 2344 - protein, 124 aa, Homo sapiens
MYKLASCCLLFIGFLNPLLSLPLLDSREISFQLSAPHEDARLTPEELERASLLQILPEMLGAERGDILRKADSSTNIFNPRGNLRKFQDFSGQDPNILLSHLLARIWKPYKKRETPDCFWKYCV

SEQ ID NO: 2345 - protein, 441 aa, Homo sapiens
MEFEFDRLRAFQAMQVHCNNMHTLGARLPGGVECRFRRGPAMAWEGEPMRHNLGGNLGDPRARAVSVPLGGRVARFLQCRFLFAGPWLLFSEISFISDVVNNSSPALGGTFPPAPWWPPGPPPTNFSSLELEPRGQQPVAKAEGSPTAILIGCLVAIILLLLLIIALMLWRLHWRRLLSKVLESHPRTRSPGLVGIRPTPLPVSPMALRCCSPIQPTASFWPLTPVPLEARAPPHPPGPNPPTPRGVTGGNTYAVPALPPGAVGDGPPRVDFPRSRLRFKEKLGEGQFGEVHLCEVDSPQDLVSLDFPLNVRKGHPLLVAVKILRPDATKNARNDFLKEVKIMSRLKDPNIIRLLGVCVQDDPLCMITDYMENGDLNQFLSAHQLEDKAAEGAPGDGQAAQGPTISYPMLLHVAAQIASGMRYLATLNFVHFWGERHRFLH

SEQ ID NO: 2346 - protein, 649 aa, Homo sapiens
MQQDGLGVGTRNGSGKGRSVHPSWPWCAPRPLRYFGRDARARRAQTAAMALLAGGLSRGLGSHPAAAGRDAVVFVWLLLSTWCTAPARAIQVTVSNPYHVVILFQPVTLPCTYQMTSTPTQPIVIWKYKSFCRDRIADAFSPASVDNQLNAQLAAGNPGYNPYVECQDSVRTVRVVATKQGNAVTLGDYYQGRRITITGNADLTFDQTAWGDSGVYYCSVVSAQDLQGNNEAYAELIVLGRTSGVAELLPGFQAGPIEDWLFVVVVCLAAFLIFLLLGICWCQCCPHTCCCYVRCPCCPDKCCCPEALYAAGKAATSGVPSIYAPSTYAHLSPAKTPPPPAMIPMGPAYNGYPGGYPGDVDRSSSAGGQGSYVPLLRDTDSSVASEVRSGYRIQASQQDDSMRVLYYMEKELANFDPSRPGPPSGRVERAMSEVTSLHEDDWRSRPSRGPALTPIRDEEWGGHSPRSPRGWDQEPAREQAGGGWRARRPRARSVDALDDLTPPSTAESGSRSPTSNGGRSRAYMPPRSRSRDDLYDQDDSRDFPRSRDPHYDDFRSRERPPADPRSHHHRTRDPRDNGSRSGDLPYDGRLLEEAVRKKGSEERRRPHKEEEEEAYYPPAPPPYSETDSQASRERRLKKNLALSRESLVV

SEQ ID NO: 2347 - protein, 133 aa, Homo sapiens
MSERVERNWSTGGWLLALCLAWLWTHLTLAALQPPTATVLVQQGTCEVIAAHRCCNRNRIEERSQTVKCSCFSGQVAGTTRAKPSCVDASIVLQRWWCQMEPCLPGEECKVLPDLSGWSCSSGHKVKTTKVTR

SEQ ID NO: 2348 - protein, 232 aa, Homo sapiens
MVAANTRAPEDTRAPAGPKPSSCEWAVCWAPARCRISATACGNSWDRPAGRTQLLWTPAAPTAMAEVGPGHTPAHPSQGAVPPSRAAAEPHLKPSPSELQTAGPAATIPARLCTRKPRLVYTQCWYVKEPKHPEIVTPWGTAARHSWRQHQMLSASERRCLPRDVEQKLGPEHTGPCLDEQGREAELARSGPSAAGPVRLKPGLVPGLFLLSCTTSPSTCLPVGQEGERGML

SEQ ID NO: 2349 - protein, 236 aa, Homo sapiens
MCVTYHNGTGYCKCPEGFLGEYCQHRDPCEKNRCQNGGTCVAQAMLGKATCRCASGFTGEDCQYSTSHPCFVSRPCLNGGTCHMLSRDTYECTCQVGFTGKECQWTDACLSHPCANGSTCTTVANQFSCKCLTGFTGQKCETDVNECDIPGHCQHGGTCLNLPGSYQCQCLQGFTGQYCDSLYVPCAPSPCVNGGTCRQTGDFTFECNCLPETVRRGTELWERDREVWNGKEHDEN

SEQ ID NO: 2350 - protein, 67 aa, Homo sapiens
MDNVQPKIKHRPFCFSVKGHVKMLRLVFALVTAVCCLADGALIYRKLLFNPSGPYQKKPVHEKKEVL

SEQ ID NO: 2351 - protein, 24 aa, Homo sapiens
MLVDGPSERPALCFLLLAVAMSFF

SEQ ID NO: 2352 - protein, 1114 aa, Homo sapiens
MLASSSRIRAAWTRALLLPLLLAGPVGCLSRQELFPFGPGQGDLELEDGDDFVSPALELSGALRFYDRSDIDAVYVTTNGIIATSEPPAKESHPGLFPPTFGAVAPFLADLDTTDGLGKVYYREDLSPSITQRAAECVHRGFPEISFQPSSAVVVTWESVAPYQGPSRDPDQKGKRNTFQAVLASSDSSSYAIFLYPEDGLQFHTTFSKKENNQVPAVVAFSQGSVGFLWKSNGAYNIFANDRESVENLAKSSNSGQQGVWVFEIGSPATTNGVVPADVILGTEDGAEYDDEDEDYDLATTRLGLEDVGTTPFSYKALRRGGADTYSVPSVLSPRRAATERPLGPPTERTRSFQLAVETFHQQHPQVIDVDEVEETGVVFSYNTDSRQTCANNRHQCSVHAECRDYATGFCCSCVAGYTGNGRQCVAEGSPQRVNGKVKGRIFVGSSQVPIVFENTDLHSYVVMNHGRSYTAISTIPETVGYSLLPLAPVGGIIGWMFAVEQDGFKNGFSITGGEFTRQAEVTFVGHPGNLVIKQRFSGIDEHGHLTIDTELEGRVPQIPFGSSVHIEPYTELYHYSTSVITSSSTREYTVTEPERDGASPSRIYTYQWRQTITFQECVHDDSRPALPSTQQLSVDSVFVLYNQEEKILRYALSNSIGPVREGSPDALQNPCYIGTHGCDTNAACRPGPRTQFTCECSIGFRGDGRTCYEVEKTRCQHEREHILGAAGATDPQRPIPPGLFVPECDAHGHYAPTQCHGSTGYCWCVDRDGREVEGTRTRPGMTPPCLSTVAPPIHQGPAVPTAVIPLPPGTHLLFAQTGKIERLPLEGNTMRKTEAKAFLHVPAKVIIGLAFDCVDKMVYWTDITEPSIGRASLHGGEPTTIIRQDLGSPEGIAVDHLGRNIFWTDSNLDRIEVAKLDGTQRRVLFETDLVNPRGIVTDSVRGNLYWTDWNRDNPKIETSYMDGTNRRILVQDDLGLPNGLTFDAFSSQLCWVDAGTNRAECLNPSQPSRRKALEGLQYPFAVTSYGKNLYFTDWKMNSVVALDLAISKETDAFQPHKQTRLYGITTALSQCPQGHNYCSVNNGGCTHLCLATPGSRTCRCPDNTLGVDCIEQK

SEQ ID NO: 2353 - protein, 723 aa, Homo sapiens
MGSRCALALAVLSALLCQVWSSGVFELKLQEFVNKKGLLGNRNCCRGGAGPPPCACRTFFRVCLKHYQASVSPEPPCTYGSAVTPVLGVDSFSLPDGGGADSAFSNPIRFPFGFTWPGTFSLIIEALHTDSPDDLATENPERLISRLATQRHLTVGEEWSQDLHSSGRTDLKYSYRFVCDEHYYGEGCSVFCRPRDDAFGHFTCGERGEKVCNPGWKGPYCTEPICLPGCDEQHGFCDKPGECKCRVGWQGRYCDECIRYPGCLHGTCQQPWQCNCQEGWGGLFCNQDLNYCTHHKPCKNGATCTNTGQGSYTCSCRPGYTGATCELGIDECDPSPCKNGGSCTDLENSYSCTCPPGFYGKICELSAMTCADGPCFNGGRCSDSPDGGYSCRCPVGYSGFNCEKKIDYCSSSPCSNGAKCVDLGDAYLCRCQAGFSGRHCDDNVDDCASSPCANGGTCRDGVNDFSCTCPPGYTGRNCSAPVSRCEHAPCHNGATCHERGHRYVCECARGYGGPNCQFLLPELPPGPAVVDLTEKLEGQGGPFPWVAVCAGVILVLMLLLGCAAVVVCVRLRLQKHRPPADPCRGETETMNNLANCQREKDISVSIIGATQIKNTNKKADFHGDHSADKNGFKARYPAVDYNLVQDLKGDDTAVRDAHSKRDTKCQPQGSSGEEKGTPTTLRGGEASERKRPDSGCSTSKDTKYQSVYVISEEKDECVIATEV

SEQ ID NO: 2354 - protein, 326 aa, Homo sapiens
MAAPASVMGPLGPSALGLLLLLLVVAPPRVAALVHRQPENQGISLTGSVACGRPSMEGKILGGVPAPERKWPWQVSVHYAGLHVCGGSILNEYWVLSAAHCFHRDKNIKIYDMYVGLVNLRVAGNHTQWYEVNRVILHPTYEMYHPIGGDVALVQLKTRIVFSESVLPVCLATPEVNLTSANCWATGWGLVSKQGETSDELQEMQLPLILEPWCHLLYGHMSYIMPDMLCAGDILNAKTVCEGDSGGPLVCEFNRSWLQIGIVSWGRGCSNPLYPGVYASVSYFSKWICDNIEITPTPAQPAPALSPALGPTLSVLMAMLAGWSVL

SEQ ID NO: 2355 - protein, 531 aa, Homo sapiens
MSLAAYCVICCRRIGTSTSPPKSGTHWRDIRNIIKFTGSLILGGSLFLTYEVLALKKAVTLDTQVVEREKMKSYIYVHTVSLDKGENHGIAWQARKELHKAVRKVLATSAKILRNPFADPFSTVDIEDHECAVWLLLRKSKSDDKTTRLEAVREMSETHHWHDYQYRIIAQACDPKTLIGLARSEESDLRFFLLPPPLPSLKEDSSTEEELRQLLASLPQTELDECIQYFTSLALSESSQSLAAQKGGLWCFGGNGLPYAESFGEVPSATVEMFCLEAIVKHSEISTHCDKIEANGGLQLLQRLYRLHKDCPKVQRNIMRVIGNMALNEHLHSSIVRSGWVSIMAEAMKSPHIMESSHAARILANLDRETVQEKYQDGVYVLHPQYRTSQPIKADVLFIHGLMGAAFKTWRQQDSEQAVIEKPMEDEDRYTTCWPKTWLAKDCPALRIISVEYDTSLSDWRARCPMERRSLLSISSGIVEGLESPLHSEATNFLGSSELLVLGIGQWFGYHIAWEVFLSKRCCWKPLRSQK

SEQ ID NO: 2356 - protein, 531 aa, Homo sapiens; identical to SEQ ID NO: 2355

SEQ ID NO: 2357 - protein, 654 aa, Homo sapiens
MSLAAYCVICCRRIGTSTSPPKSGTHWRDIRNIIKFTGSLILGGSLFLTYEVLALKKAVTLDTQVVEREKMKSYIYVHTVSLDKGENHGIAWQARKELHKAVRKVLATSAKILRNPFADPFSTVDIEDHECAVWLLLRKSKSDDKTTRLEAVREMSETHHWHDYQYRIIAQACDPKTLIGLARSEESDLRFFLLPPPLPSLKEDSSTEEELRQLLASLPQTELDECIQYFTSLALSESSQSLAAQKGGLWCFGGNGLPYAESFGEVPSATVEMFCLEAIVKHSEISTHCDKIEANGGLQLLQRLYRLHKDCPKVQRNIMRVIGNMALNEHLHSSIVRSGWVSIMAEAMKSPHIMESSHAARILANLDRETVQEKYQDGVYVLHPQYRTSQPIKADVLFIHGLMGAAFKTWRQQDSEQAVIEKPMEDEDRYTTCWPKTWLAKDCPALRIISVEYDTSLSDWRARCPMERKSIAFRSNELLRKLRAAGVGDRPVVWISHSMGGLLVKKMLLEASTKPEMSTVINNTRGIIFYSVPHHGSRLAEYSVNIRYLLFPSLEVKELSKDSPALKTLQDDFLEFAKDKNFQVLNFVETLPTYIGSMIKLHVVPVESADLGIGDLIPVDVNHLNICKPKKKDAFLYQRTLQFIREALAKDLEN

SEQ ID NO: 2358 - protein, 502 aa, Homo sapiens
MAQRCVCVLALVAMLLLVFPTVSRSMGPRSGEHQRASRIPSQFSKEERVAMKEALKGAIQIPTVTFSSEKSNTTALAEFGKYIHKVFPTVVSTSFIQHEVVEEYSHLFTIQGSDPSLQPYLLMAHFDVVPAPEEGWEVPPFSGLERDGIIYGRGTLDDKNSVMALLQALELLLIRKYIPRRSFFISLGHDEESSGTGAQRISALLQSRGVQLAFIVDEGGFILDDFIPNFKKPIALIAVSEKGSMNLMLQVNMTSGHSSAPPKETSIGILAAAVSRLEQTPMPIIFGSGTVVTVLQQLANEFPFPVNIILSNPWLFEPLISRFMERNPLTNAIIRTTTALTIFKAGVKFNVIPPVAQATVNFRIHPGQTVQEVLELTKNIVADNRVQFHVLSAFDPLPVSPSDDKALGYQLLRQTVQSVFPEVNITAPVTSIGNTDSRFFTNLTTGIYRFYPIYIQPEDFKRIHGVNEKISVQAYETQVKFIFELIQNADTDQEPVSHLHKL

SEQ ID NO: 2359 - protein, 332 aa, Homo sapiens
MRLLAFLSLLALVLQETGTASLPRKERKRREEQMPREGDSFEVLPLRNDVLNPDNYGEVIDLSNYEELTDYGDQLPEVKVTSLAPATSISPAKSTTAPGTPSSNPTMTRPTTAGLLLSSQPNHGLPTCLVCVCLGSSVYCDDIDLEDIPPLPRRTAYLYARFNRISRIRAEDFKGLTKLKRIDLSNNLISSIDNDAFRLLHALQDLILPENQLEALPVLPSGIEFLDVRLNRLQSSGIQPAAFRAMEKLQFLYLSDNLLDSIPGPLPLSLRSVHLQNNLIETMQRDVFCDPEEHKHTRRQLEDIRLDGNPINLSLFPSAYFCLPRLPIGRFT

SEQ ID NO: 2360 - protein, 466 aa, Homo sapiens
MVRSVAWAGFMVLLMIPWGSAAKLVCYFTNWAQYRQGEARFLPKDLDPSLCTHLIYAFAGMTNHQLSTTEWNDETLYQEFNGLKKMNPKLKTLLAIGGWNFGTQKFTDMVATANNRQTFVNSAIRFLRKYSFDGLDLDWEYPGSQGSPAVDKERFTTLVQDLANAFQQEAQTSGKERLLLSAAVPAGQTYVDAGYEVDKIAQNLDFVNLMAYDFHGSWEKVTGHNSPLYKRQEESGAAASLNVDAAVQQWLQKGTPASKLILGMPTYGRSFTLASSSDTRVGAPATGSGTPGPFTKEGGMLAYYEVCSWKGATKQRIQDQKVPYIFRDNQWVGFDDVESFKTKVSYLKQKGLGGAMVWALDLDDFAGFSCNQGRYPLIQTLRQELSLPYLPSGTPELEVPKPGQPSEPEHGPSPGQDTFCQGKADGLYPNPRERSSFYSCAAGRLFQQSCPTGLVFSNSCKCCTWN

SEQ ID NO: 2361 - protein, 531 aa, Homo sapiens
MRLCLGRPHPRGHSRVGKSERGRGARGLARQRTLEDEEEQERERRRRHRNLSSTTDDEAPRLSQNGDRQASASERLPSVEEAEVPKPLPPASKDEDEDIQSILRTRQERRQRRQVVEAAQAPIQERLEAEEGRNSLSPVQATQKPLVSKKELEIPPRRRLSREQRGPWALEEESLVGREPEERKKGVPEKSPVLEKSSMPKKTAPEKSLVSDKTSISEKVLASEKTSLSEKIAVSEKRNSSEKKSVLEKTSVSEKSLAPGMALGSGRRLVSEKASIFEKALASEKSPTADAKPAPKRATASEQPLAQEPPASGGSPATTKEQRGRALPGKNLPSLAKQGASDPPTVASRLPPVTLQVKIPSKEEEADMSSPTQRTYSSSLKRSSPRTISFRMKPKKENSETTLTRSASMKLPDNTVKLGEKLERYHTAIRRSESVKSRGLPCTELFVAPVGVASKRHLFEKELAGQSRAEPASSRKENLRLSGVVTSRLNLWISRTQESGDQDPQEAQKASSATERTQWGQKSDSSLDAEV

SEQ ID NO: 2362 - protein, 593 aa, Homo sapiens
MKADLKQHHHHWSIFSYIRLRLPSMLLLFSVILISWVSTVGGEGTLCDFPKIHHGFLYDEEDYNPFSQVPTGEVFYYSCEYNFVSPSKSFWTRITCTEEGWSPTPKCLRMCSFPFVKNGHSESSGLIHLEGDTVQIICNTGYSLQNNEKNISCVERGWSTPPICSFTKGECHVPILEANVDAQPKKESYKVGDVLKFSCRKNLIRVGSDSVQCYQFGWSPNFPTCKGQVRSCGPPPQLSNGEVKEIRKEEYGHNEVVEYDCNPNFIINGPKKIQCVDGEWTTLPTCVEQVKTCGYIPELEYGYVQPSVPPYQHGVSVEVNCRNEYAMIGNNMITCINGIWTELPMCVATHQLKRCKIAGVNIKTLLKLSGKEFNHNSRIRYRCSDIFRYRHSVCINGKWNPEVDCTEKREQFCPPPPQIPNAQNMTTTVNYQDGEKVAVLCKENYLLPEAKEIVCKDGRWQSLPRCVESTAYCGPPPSINNGDTTSFPLSVYPPGSTVTYRCQSFYKLQGSVTVTCRNKQWSEPPRCLDPCVVSEENMNKNNIQLKWRNDGKLYAKTGDAVEFQCKFPHKAMISSPPFRAICQEGKFEYPICE

SEQ ID NO: 2363 - protein, 766 aa, Homo sapiens
MIWRSRAGAELFSLMALWEWIALSLHCWVLAVAAVSDQHATSPFDWLLSDKGPFHRSQEYTDFVDRSRQGFSTRYKIYREFGRWKVNNLAVERRNFLGSPLPLAPEFFRNIRLLGRRPTLQQITENLIKKYGTHFLLSATLGGEESLTIFVDKRKLSKRAEGSDSTTNSSSVTLETLHQLAASYFIDRDSTLRRLHHIQIASTAIKVTETRTGPLGCSNYDNLDSVSSVLVQSPENKIQLQGLQVLLPDYLQERFVQAALSYIACNSEGEFICKENDCWCHCGPKFPECNCPSMDIQAMEENLLRITETWKAYNSDFEESDEFKLFMKRLPMNYFLNTSTIMHLWTMDSNFQRRYEQLENSMKQLFLKAQKIVHKLFSLSKRCHKQPLISLPRQRTSTYWLTRIQSFLYCNENGLLGSFSEETHSCTCPNDQVVCTAFLPCTVGDASACLTCAPDNRTRCGTCNTGYMLSQGLCKPEVAESTDHYIGFETDLQDLEMKYLLQKTDRRIEVHAIFISNDMRLNSWFDPSWRKRMLLTLKSNKYKSSLVHMILGLSLQICLTKNSTLEPVLAVYVNPFGGSHSESWFMPVNENSFPDWERTKLDLPLQCYNWTLTLGNKWKTFFETVHIYLRSRIKSNGPNGNESIYYEPLEFIDPSRNLGYMKINNIQVFGYSMHFDPEAIRDLILQLDYPYTQGSQDSALLQLLEIRDRVNKLSPPGQRRLDLFSCLLRHRLKLSTSEVVRIQSALQAFNAKLPNTMDYDTTKLCS

SEQ ID NO: 2364 - protein, 604 aa, Homo sapiens
MRRCNSGSGPPPSLLLLLLWLLAVPGANAAPRSALYSPSDPLTLLQADTVRGAVLGSRSAWAVEFFASWCGHCIAFAPTWKALAEDVKAWRPALYLAALDCAEETNSAVCRDFNIPGFPTVRFFKAFTKNGSGAVFPVAGADVQTLRERLIDALESHHDTWPPACPPLEPAKLEEIDGFFARNNEEYLALIFEKGGSYLGREVALDLSQHKGVAVRRVLNTEANVVRKFGVTDFPSCYLLFRNGSVSRVPVLMESRSFYTAYLQRLSGLTREAAQTTVAPTTANKIAPTVWKLADRSKIYMADLESALHYILRIEVGRFPVLEGQRLVALKKFVAVLAKYFPGRPLVQNFLHSVNEWLKRQKRNKIPYSFFKTALDDRKEGAVLAKKVNWIGCQGSEPHFRGFPCSLWVLFHFLTVQAARQNVDHSQEAAKAKEVLPAIRGYVHYFFGCRDCASHFEQMAAASMHRVGSPNAAVLWLWSSHNRVNARLAGAPSEDPQFPKVQWPPRELCSACHNERLDVPVWDVEATLNFLKAHFSPSNIILDFPAAGSAARRDVQNVAAAPELAMGALELESRNSTLDPGKPEMMKSPTNTTPHVPAEGPELI

SEQ ID NO: 2365 - protein, 747 aa, Homo sapiens
MRRCNSGSGPPPSLLLLLLWLLAVPGANAAPRSALYSPSDPLTLLQADTVRGAVLGSRSAWAVEFFASWCGHCIAFAPTWKALAEDVKAWRPALYLAALDCAEETNSAVCRDFNIPGFPTVRFFKAFTKNGSGAVFPVAGADVQTLRERLIDALESHHDTWPPACPPLEPAKLEEIDGFFARNNEEYLALIFEKGGSYLGREVALDLSQHKGVAVRRVLNTEANVVRKFGVTDFPSCYLLFRNGSVSRVPVLMESRSFYTAYLQRLSGLTREAAQTTVAPTTANKIAPTVWKLADRSKIYMADLESALHYILRIEVGRFPVLEGQRLVALKKFVAVLAKYFPGRPLVQNFLHSVNEWLKRQKRNKIPYSFFKTALDDRKEGAVLAKKVNWIGCQGSEPHFRGFPCSLWVLFHFLTVQAARQNVDHSQEAAKAKEVLPAIRGYVHYFFGCRDCASHFEQMAAASMHRVGSPNAAVLWLWSSHNRVNARLAGAPSEDPQFPKVQWPPRELCSACHNERLDVPVWDVEATLNFLKAHFSPSNIILDFPAAGSAARRDVQNVAAAPELAMGALELESRNSTLDPGKPEMMKSPTNTTPHVPAEGPEASRPPKLHPGLRAAPGQEPPEHMAELQRNEQEQPLGQWHLSKRDTGAALLAESRAEKNRLWGPLEVRRVGRSSKQLVDIPEGQLEARAGRGRGQWLQVLGGGFSYLDISLCVGLYSLSFMGLLAMYTYFQAKIRALKGHAGHPAA

SEQ ID NO: 2366 - protein, 491 aa, Homo sapiens; identical to SEQ ID NO: 1866

SEQ ID NO: 2367 - protein, 827 aa, Homo sapiens
MMCLKILRISLAILAGWALCSANSELGWTRKKSLVEREHLNQVLLEGERCWLGAKVRRPRASPQHHLFGVYPSRAGNYLRPYPVGEQEIHHTGRSKPDTEGNAVSLVPPDLTENPAGLRGAVEEPAAPWVGDSPIGQSELLGDDDAYLGNQRSKESLGEAGIQKGSAMAATTTTAIFTTLNEPKPETQRRGWAKSRQRRQVWKRRAEDGQGDSGISSHFQPWPKHSLKHRVKKSPPEESNQNGGEGSYREAETFNSQVGLPILYFSGRRERLLLRPEVLAEIPREAFTVEAWVKPEGGQNNPAIIAGVFDNCSHTVSDKGWALGIRSGKDKGKRDARFFFSLCTDRVKKATILISHSRYQPGTWTHVAATYDGRHMALYVDGTQVASSLDQSGPLNSPFMASCRSLLLGGDSSEDGHYFRGHLGTLVFWSTALPQSHFQHSSQHSSGEEEATDLVLTASFEPVNTEWVPFRDEKYPRLEVLQGFEPEPEILSPLQPPLCGQTVCDNVELISQYNGYWPLRGEKVIRYQVVNICDDEGLNPIVSEEQIRLQHEALNEAFSRYNISWQLSVHQVHNSTLRHRVVLVNCEPSKIGNDHCDPECEHPLTGYDGGDCRLQGRCYSWNRRDGLCHVECNNMLNDFDDGDCCDPQVADVRKTCFDPDSPKRAYMSVKELKEALQLNSTHFLNIYFASSVREDLAGAATWPWDKDAVTHLGGIVLSPAYYGMPGHTDTMIHEVGHVLGLYHVFKGVSERESCNDPCKETVPSMETGDLCADTAPTPKSELCREPEPTSDTCGFTRFPGAPFTNYMSYTGITTVLFCFLLRIHGGL

SEQ ID NO: 2368 - protein, 1791 aa, Homo sapiens
MMCLKILRISLAILAGWALCSANSELGWTRKKSLVEREHLNQVLLEGERCWLGAKVRRPRASPQHHLFGVYPSRAGNYLRPYPVGEQEIHHTGRSKPDTEGNAVSLVPPDLTENPAGLRGAVEEPAAPWVGDSPIGQSELLGDDDAYLGNQRSKESLGEAGIQKGSAMAATTTTAIFTTLNEPKPETQRRGWAKSRQRRQVWKRRAEDGQGDSGISSHFQPWPKHSLKHRVKKSPPEESNQNGGEGSYREAETFNSQVGLPILYFSGRRERLLLRPEVLAEIPREAFTVEAWVKPEGGQNNPAIIAGVFDNCSHTVSDKGWALGIRSGKDKGKRDARFFFSLCTDRVKKATILISHSRYQPGTWTHVAATYDGRHMALYVDGTQVASSLDQSGPLNSPFMASCRSLLLGGDSSEDGHYFRGHLGTLVFWSTALPQSHFQHSSQHSSGEEEATDLVLTASFEPVNTEWVPFRDEKYPRLEVLQGFEPEPEILSPLQPPLCGQTVCDNVELISQYNGYWPLRGEKVIRYQVVNICDDEGLNPIVSEEQIRLQHEALNEAFSRYNISWQLSVHQVHNSTLRHRVVLVNCEPSKIGNDHCDPECEHPLTGYDGGDCRLQGRCYSWNRRDGLCHVECNNMLNDFDDGDCCDPQVADVRKTCFDPDSPKRAYMSVKELKEALQLNSTHFLNIYFASSVREDLAGAATWPWDKDAVTHLGGIVLSPAYYGMPGHTDTMIHEVGHVLGLYHVFKGVSERESCNDPCKETVPSMETGDLCADTAPTPKSELCREPEPTSDTCGFTRFPGAPFTNYMSYTDDNCTDNFTPNQVARMHCYLDLVYQQWTESRKPTPIPIPPMVIGQTNKSLTIHWLPPISGVVYDRASGSLCGACTEDGTFRQYVHTASSRRVCDSSGYWTPEEAVGPPDVDQPCEPSLQAWSPEVHLYHMNMTVPCPTEGCSLELLFQHPVQADTLTLWVTSFFMESSQVLFDTEILLENKESVHLGPLDTFCDIPLTIKLHVDGKVSGVKVYTFDERIEIDAALLTSQPHSPLCSGCRPVRYQVLRDPPFASGLPVVVTHSHRKFTDVEVTPGQMYQYQVLAEAGGELGEASPPLNHIHGAPYCGDGKVSERLGEECDDGDLVSGDGCSKVCELEEGFNCVGEPSLCYMYEGDGICEPFERKTSIVDCGIYTPKGYLDQWATRAYSSHEDKKKCPVSLVTGEPHSLICTSYHPDLPNHRPLTGWFPCVASENETQDDRSEQPEGSLKKEDEVWLKVCFNRPGEARAIFIFLTTDGLVPGEHQQPTVTLYLTDVRGSNHSLGTYGLSCQHNPLIINVTHHQNVLFHHTTSVLLNFSSPRVGISAVALRTSSRIGLSAPSNCISEDEGQNHQGQSCIHRPCGKQDSCPSLLLDHADVVNCTSIGPGLMKCAITCQRGFALQASSGQYIRPMQKEILLTCSSGHWDQNVSCLPVDCGVPDPSLVNYANFSCSEGTKFLKRCSISCVPPAKLQGLSPWLTCLEDGLWSLPEVYCKLECDAPPIILNANLLLPHCLQDNHDVGTICKYECKPGYYVAESAEGKVRNKLLKIQCLEGGIWEQGSCIPVVCEPPPPVFEGMYECTNGFSLDSQCVLNCNQEREKLPILCTKEGLWTQEFKLCENLQGECPPPPSELNSVEYKCEQGYGIGAVCSPLCVIPPSDPVMLPENITADTLEHWMEPVKVQSIVCTGRRQWHPDPVLVHCIQSCEPFQADGWCDTINNRAYCHYDGGDCCSSTLSSKKVIPFAADCDLDECTCRDPKAEENQ

SEQ ID NO: 2369 - protein, 233 aa, Homo sapiens
MKDPLAKDERIYVTNYYYGNTLVEFRNLENFKQGRWSNSYKLPYSWIGTGHVVYNGAFYYNRAFTRNIIKYDLKQRYVAAWAMLHDVAYEEATPWRWQGHSDVDFAVDENGLWLIYPALDDEGFSQEVIVLSKLNAADLSTQKETTWRTGLRRNFYGNCFVICGVLYAVDSYNQRNANISYAFDTHTNTQIVPRLLFENEYSYTTQIDYNPKDRLLYAWDNGHQVTYHVIFAY

SEQ ID NO: 2370 - protein, 192 aa, Homo sapiens
MLKKISVGVAGDLNTVTMKLGCVLMAWALYLSLGVLWVAQMLLAASFETLQCEGPVCTEESSCHTEDDLTDAREAGFQVKAYTFSEPFHLIVSYGASSSAAPPTLNPAPQKSAAPGTAPEEAPGPLPPPPTPSSEDPGFSSPLGMPDPHLYHQMGLLLKHMQDVRVLLGHLLMELRELSGHRKPGTTKATAE

SEQ ID NO: 2371 - protein, 152 aa, Homo sapiens
MLLAASFETLQCEGPVCTEESSCHTEDDLTDAREAGFQVKAYTFSEPFHLIVSYGASSSAAPPTLNPAPQKSAAPGTAPEEAPGPLPPPPTPSSEDPGFSSPLGMPDPHLYHQMGLLLKHMQDVRVLLGHLLMELRELSGHRKPGTTKATAE

SEQ ID NO: 2372 - protein, 365 aa, Homo sapiens
MKLGCVLMAWALYLSLGVLWVAQMLLAAGCHAAASFETLQCEGPVCTEESSCHTEDDLTDAREAGFQVKAYTFSEPFHLIVSYDWLILQGPAKPVFEGDLLVLRCQAWQDWPLTQVTFYRDGSALGPPGPNREFSITVVQKADSGHYHCSGIFQSPGPGIPETASVVAITVQELFPAPILRAVPSAEPQAGSPMTLSCQTKLPLQRSAARLLFSFYKDGRIVQSRGLSSEFQIPTASEDHSGSYWCEAATEDNQVWKQSPQLEIRVQGASSSAAPPTLNPAPQKSAAPGTAPEEAPGPLPPPPTPSSEDPGFSSPLGMPDPHLYHQMGLLLKHMQDVRVLLGHLLMELRELSGHRKPGTTKATAE

SEQ ID NO: 2373 - protein, 236 aa, Homo sapiens
MLKKISVGVAGDLNTVTMKLGCVLMAWALYLSLGVLWVAQMLLELFPAPILRAVPSAEPQAGSPMTLSCQTKLPLQRSAARLLFSFYKDGRIVQSRGLSSEFQIPTASEDHSGSYWCEAATEDNQVWKQSPQLEIRVQGASSSAAPPTLNPAPQKSAAPGTAPEEAPGPLPPPPTPSSEDPGFSSPLGMPDPHLYHQMGLLLKHMQDVRVLLGHLLMELRELSGHRKPGTTKATAE

SEQ ID NO: 2374 - protein, 382 aa, Homo sapiens
MLKKISVGVAGDLNTVTMKLGCVLMAWALYLSLGVLWVAQMLLAAGCHAAASFETLQCEGPVCTEESSCHTEDDLTDAREAGFQVKAYTFSEPFHLIVSYDWLILQGPAKPVFEGDLLVLRCQAWQDWPLTQVTFYRDGSALGPPGPNREFSITVVQKADSGHYHCSGIFQSPGPGIPETASVVAITVQELFPAPILRAVPSAEPQAGSPMTLSCQTKLPLQRSAARLLFSFYKDGRIVQSRGLSSEFQIPTASEDHSGSYWCEAATEDNQVWKQSPQLEIRVQGASSSAAPPTLNPAPQKSAAPGTAPEEAPGPLPPPPTPSSEDPGFSSPLGMPDPHLYHQMGLLLKHMQDVRVLLGHLLMELRELSGHRKPGTTKATAE

SEQ ID NO: 2375 - protein, 245 aa, Homo sapiens
MSRLRALLGLGLLVAGSRVPRIKSQTIACRSGPTWWGPQRLNSGGRWDSEVMASTVVKYLSQEEAQAVDQELFNEYQFSVDQLMELAGLSCATAIAKAYPPTSMSRSPPTVLVICGPGNNGGDGLVCARHLKLFGYEPTIYYPKRPNKPLFTALVTQCQKMDIPFLGEMPAEPMTIDELYELVVDAIFGFSFKGDVREPFHSILSVLKGLTVPIASIDIPSGAGIQKVGWGRLGPYPPDSCPHQV

SEQ ID NO: 2376 - protein, 260 aa, Homo sapiens
MSRLRALLGLGLLVAGSRVPRIKSQTIACRSGPTWWGPQRLNSGGRWDSEVMASTVVKYLSQEEAQAVDQELFNEYQFSVDQLMELAGLSCATAIAKAYPPTSMSRSPPTVLVICGPGNNGGDGLVCARHLKLFGYEPTIYYPKRPNKPLFTALVTQCQKMDIPFLGEMPAELQGRCSGTVPQHPECPEGTHCAHCQHRHSLRMGRGEGKCWRDPARLAHIPHSPQKICNPVYRSLPLPGGSFCATCSGEEVPAEPATLP

SEQ ID NO: 2377 - protein, 288 aa, Homo sapiens
MSRLRALLGLGLLVAGSRVPRIKSQTIACRSGPTWWGPQRLNSGGRWDSEVMASTVVKYLSQEEAQAVDQELFNEYQFSVDQLMELAGLSCATAIAKAYPPTSMSRSPPTVLVICGPGNNGGDGLVCARHLKLFGYEPTIYYPKRPNKPLFTALVTQCQKMDIPFLGEMPAEPMTIDELYELVVDAIFGFSFKGDVREPFHSILSVLKGLTVPIASIDIPSGWDVEKGNAGGIQPDLLISLTAPKKSATQFTGRYHYLGGRFVPPALEKKYQLNLPPYPDTECVYRLQ

SEQ ID NO: 2378 - protein, 292 aa, Homo sapiens
MHLRLISWLFIILNFMEYIGSQNASRGRRQRRMHPNVSQGCQGGCATCSDYNGCLSCKPRLFFALERIGMKQIGVCLSSCPSGYYGTRYPDINKCTKCKADCDTCFNKNFCTKCKSGFYLHLGKCLDNCPEGLEANNHTMECVSIVHCEVSEWNPWSPCTKKGKTCGFKRGTETRVREIIQHPSAKGNLCPPTNETRKCTVQRKKCQKGERGKKGRERKRKKPNKGESKEAIPDSKSLESSKEIPEQRENKQQQKKRKVQDKQKSGIEVTLAEGLTSVSQRTQPTPCRRRYL

SEQ ID NO: 2379 - protein, 956 aa, Homo sapiens
METQELRGALALLLLCFFTSASQDLQVIDLLTVGESRQMVAVAEKIRTALLTAGDIYLLSTFRLPPKQGGVLFGLYSRQDNTRWLEASVVGKINKVLVRYQREDGKVHAVNLQQAGLADGRTHTVLLRLRGPSRPSPALHLYVDCKLGDQHAGLPALAPIPPAEVDGLEIRTGQKAYLRMQGFVESMKIILGGSMARVGALSECPFQGDESIHSAVTNALHSILGEQTKALVTQLTLFNQILVELRDDIRDQVKEMSLIRNTIMECQVCGFHEQRSHCSPNPCFRGVDCMEVYEYPGYRCGPCPPGLQGNGTHCSDINECAHADPCFPGSSCINTMPGFHCEACPRGYKGTQVSGVGIDYARASKQVCNDIDECNDGNNGGCDPNSICTNTVGSFKCGPCRLGFLGNQSQGCLPARTCHSPAHSPCHIHAHCLFERNGAVSCQCNVGWAGNGNVCGTDTDIDGYPDQALPCMDNNKHCKQDNCLLTPNSGQEDADNDGVGDQCDDDADGDGIKNVEDNCRLFPNKDQQNSDTDSFGDACDNCPNVPNNDQKDTDGNGEGDACDNDVDGDGIPNGLDNCPKVPNPLQTDRDEDGVGDACDSCPEMSNPTQTDADSDLVGDVCDTNEDSDGDGHQDTKDNCPQLPNSSQLDSDNDGLGDECDGDDDNDGIPDYVPPGPDNCRLVPNPNQKDSDGNGVGDVCEDDFDNDAVVDPLDVCPESAEVTLTDFRAYQTVVLDPEGDAQIDPNWVVLNQGMEIVQTMNSDPGLAVGYTAFNGVDFEGTFHVNTVTDDDYAGFLFSYQDSGRFYVVMWKQTEQTYWQATPFRAVAQPGLQLKAVTSVSGPGEHLRNALWHTGHTPDQVRLLWTDPRNVGWRDKTSYRWQLLHRPQVGYIRVKLYEGPQLVADSGVIIDTSMRGGRLGVFCFSQENIIWSNLQYRCNDTVPEDFEPFRRQLLQGRV

SEQ ID NO: 2380 - protein, 369 aa, Homo sapiens
MLPWLLVFSALGIQAWGDSSWNKTQAKQVSEGLQYLFENISQLTEKDVSTTVSRKAWGAEAVGCSIQLTTPVNVLVIHHVPGLECHDQTVCSQRLRELQAHHVHNNSGCDVAYNFLVGDDGRVYEGVGWNIQGVHTQGYNNISLGFAFFGTKKGHSPSPAALSAMENLITYAVQKGHLSSSYVQPLLGKGENCLAPRQKTSLKKACPGVVPRSVWGARETHCPRMTLPAKYGIIIHTAGRTCNISDECRLLVRDIQSFYIDRLKSCDIGYNFLVGQDGAIYEGVGWNVQGSSTPGYDDIALGITFMGTFTGIPPNAAALEAAQDLIQCAMVKGYLTPNYLLVGHSDVARTLSPGQALYNIISTWPHFKH

SEQ ID NO: 2381 - protein, 224 aa, Homo sapiens
MEKIPFVLGGNLQGGELVVAYPYDLVRSPWKTQEHTPTPDDHVFRWLAYSYASTHRLMTDARRRVCHTEDFQKEEGTVNGASWHTVAGSLNDFSYLHTNCFELSIYVGCDKYPHESQLPEEWENNRESLIVFMEQVHRGIKGLVRDSHGKGIPNAIISVEGINHDIRTGRVSLQKLSLACRRVRCAFALSSSSTMIVRPPQPYGTVPHSSPDPVTTKISPLRNF

SEQ ID NO: 2382 - protein, 94 aa, Homo sapiens
MPVIAGGILAALLLLIVVVLCLYFKIHNALKAAKEPEAVAVKNHNPDKVWWAKNSQAKTIATESCPALQCCEGYRMCASFDSLPPCCCDINEGL

SEQ ID NO: 2383 - protein, 94 aa, Homo sapiens; identical to SEQ ID NO: 2382

SEQ ID NO: 2384 - protein, 341 aa, Homo sapiens
MVPAAGALLWVLLLNLGPRAAGAQGLTQTPTEMQRVSLRFGGPMTRSYRSTARTGLPRKTRIILEDENDAMADADRLAGPAAAELLAATVSTGFSRSSAINEEDGSSEEGVVINAGKDSTSRELPSATPNTAGSSSTRFIANSQEPEIRLTSSLPRSPGRSTEDLPGSQATLSQWSTPGSTPSRWPSPSPTAMPSPEDLRLVLMPWGPWHCHCKSGTMSRSRSGKLHGLSGRLRVGALSQLRTEHKPCTYQQCPCNRLREECPLDTSLCTDTNCASQSTTSTRTTTTPFPTIHLRSSPSLPPASPCPALAFWKRVRIGLEDIWNSLSSVFTEMQPIDRNQR

SEQ ID NO: 2385 - protein, 121 aa, Homo sapiens
MDVLFVAIFAVPLILGQEYEDEERLGEDEYYQVVYYYTVTPSYDDFSADFTIDYSIFESEDRLNRLDKDITEAIETTISLETARADHPKPVTVKPVTTEPVEEGCYDSLDGSLARGNWKIK

SEQ ID NO: 2386 - protein, 131 aa, Homo sapiens
MDVLFVAIFAVPLILGQEYEDEERLGEDEYYQVVYYYTVTPSYDDFSADFTIDYSIFESEDRLNRLDKDITEAIETTISLETARADHPKPVTVKPVTTEPSPDLNDAVSSLRSPIPLLLSCAFVQVGMYFM

SEQ ID NO: 2387 - protein, 131 aa, Homo sapiens; identical to SEQ ID NO: 2386

SEQ ID NO: 2388 - protein, 103 aa, Homo sapiens [sequence omitted]

SEQ ID NO: 2389 - protein, 103 aa, Homo sapiens [sequence omitted]

SEQ ID NO: 2390 - protein, 467 aa, Homo sapiens
MLGIWIVAFLFFGTSRGKEVCYERLGCFKDGLPWTRTFSTELVGLPWSPEKINTRFLLYTIHNPNAYQEISAVNSSTIQASYFGTDKITRINIAGWKTDGKWQRDMCNVLLQLEDINCINLDWINGSREYIHAVNNLRVVGAEVAYFIDVLMKKFEYSPSKVHLIGHSLGAHLAGEAGSRIPGLGRITGLDPAGPFFHNTPKEVRLDPSDANFVDVIHTNAARILFELGVGTIDACGHLDFYPNGGKHMPGCEDLITPLLKFNFNAYKKEMASFFDCNHARSYQFYAESILNPDAFIAYPCRSYTSFKAGNCFFCSKEGCPTMGHFADRFHFKNMKTNGSHYFLNTGSLSPFARWRHKLSVKLSGSEVTQGTVFLRVGGAVRKTGEFAIVSGKLEPGMTYTKLIDADVNVGNITSVQFIWKKHLFEDSQNKLGAEMVINTSGKYGYKSTFCSQDIMGPNILQNLKPC

SEQ ID NO: 2391 - protein, 428 aa, Homo sapiens
MITGVFSMRLWTPVGVLTSLAYCLHQRRVALAELQEADGQCPVDRSLLKLKMVQVVFRHGARSPLKPLPLEEQVEWNPQLLEVPPQTQFDYTVTNLAGGPKPYSPYDSQYHETTLKGGMFAGQLTKVGMQQMFALGERLRKNYVEDIPFLSPTFNPQEVFIRSTNIFRNLESTRCLLAGLFQCQKEGPIIIHTDEADSEVLYPNYQSCWSLRQRTRGRRQTASLQPGISEDLKKVKDRMGIDSSDKVDFFILLDNVAAEQAHNLPSCPMLKRFARMIEQRAVDTSLYILPKEDRESLQMAVGPFLHILESNLLKAVDSATAPDKIRKLYLYAAHDVTFIPLLMTLGIFDHKWPPFAVDLTMELYQHLESKEWFVQLYYHGKEQVPRGCPDGLCPLDMFLNAMSVYTLSPEKYHALCSQTQVMEVGNEE

SEQ ID NO: 2392 - protein, 236 aa, Homo sapiens; identical to SEQ ID NO: 2349

SEQ ID NO: 2393 - protein, 329 aa, Homo sapiens
MVTKAFVLLAIFAEASAKSCAPNKADVILVFCYPKTIITKIPECPYGWEVHQLALGGLCYNGVHEGGYYQFVIPDLSPKNKSYCGTQSEYKPPIYHFYSHIVSNDTTVIVKNQPVNYSFSCTYHSTYLVNQAAFDQRVATVHVKNGSMGTFESQLSLNFYTNAKFSIKKEAPFVLEASEIGSDLFAGVEAKGLSIRFKVVLNSCWATPSADFMYPLQWQLINKGCPTDETVLVHENGRDHRATFQFNAFRFQNIPKLSKVWLHCETFICDSEKLSCPVTCDKRKRLLRDQTGGVLVVELSLRSRGFSSLYSFSDVLHHLIMMLGICAVL

SEQ ID NO: 2394 - protein, 386 aa, Homo sapiens
MAQWHCSQRTQAGGHGVGERLAQCQDQSSRHAAELRDFKNKMLPLLEVAEKEREALRTEADTISGRVDRLEREVDYLETQNPALPCVEFDEKVTGGPGTKGKGRRNEKYDMVTDCGYTISQVRSMKILKRFGGPAGLWTKDPLGQTEKIYVLDGTQNDTAFVFPRLRDFTLAMAARKASRVRVPFPWVGTGQLVYGGFLYFARRPPGRPGGGGEMENTLQLIKFHLANRTVVDSSVFPAEGLIPPYGLTADTYIDLAADEEGLWAVYATREDDRHLCLAKLDPQTLDTEQQWDTPCPRENAEAAFVICGTLYVVYNTRPASRARIQCSFDASGTLTPERAALPYFPRRYGAHASLRYNPRERQLYAWDDGYQIVYKLEMRKKEEEV

SEQ ID NO: 2395 - protein, 169 aa, Homo sapiens
MSERVERNWSTGGWLLALCLAWLWTHLTLAALQPPTATVLVQQGTCEVIAAHRCCNRNRIEERSQTVKCSCFSGQVAGTTRAKPSCVDDLLLAAHCARRDPRAALRLLLPQPPSSCRDGGVRWSPACRGRSVRCSRTCRDGAAAVDTKSKPPRSHDSSWGSRPGQERLD

SEQ ID NO: 2396 - protein, 230 aa, Homo sapiens; identical to SEQ ID NO: 2328

SEQ ID NO: 2397 - protein, 391 aa, Homo sapiens
MLRPGGAEEAAQLPLRRASAPVPVPSPAAPDGSRASARLGLACLLLLLLLTLPARVDTSWWYIGALGARVICDNIPGLVSRQRQLCQRYPDIMRSVGEGAREWIRECQHQFRHHRWNCTTLDRDHTVFGRVMLRSSREAAFVYAISSAGVVHAITRACSQGELSVCSCDPYTRGRHHDQRGDFDWGGCSDNIHYGVRFAKAFVDAKEKRLKDARALMNLHNNRCGRTAVRRFLKLECKCHGVSGSCTLRTCWRALSDFRRTGDYLRRRYDGAVQVMATQDGANFTAARQGYRRATRTDLVYFDNSPDYCVLDKAAGSLGTAGRVCSKTSKGTDGCEIMCCGRGYDTTRVTRVTQCECKFHWCCAVRCKECRNTVDVHTCKAPKKAEWLDQT

SEQ ID NO: 2398 - protein, 372 aa, Homo sapiens
MLDGLGVVAISIFGIQLKTEGSLRTAVPGIPTQSAFNKCLQRYIGALGARVICDNIPGLVSRQRQLCQRYPDIMRSVGEGAREWIRECQHQFRHHRWNCTTLDRDHTVFGRVMLRSSREAAFVYAISSAGVVHAITRACSQGELSVCSCDPYTRGRHHDQRGDFDWGGCSDNIHYGVRFAKAFVDAKEKRLKDARALMNLHNNRCGRTAVRRFLKLECKCHGVSGSCTLRTCWRALSDFRRTGDYLRRRYDGAVQVMATQDGANFTAARQGYRRATRTDLVYFDNSPDYCVLDKAAGSLGTAGRVCSKTSKGTDGCEIMCCGRGYDTTRVTRVTQCECKFHWCCAVRCKECRNTVDVHTCKAPKKAEWLDQT

SEQ ID NO: 2399 - protein, 413 aa, Homo sapiens
MENMLLWLIFFTPGWTLIDGSEMEWDFMWHLRKVPRIVSERTFHLTSPAFEADAKMMVNTVCGIECQKELPTPSLSELEDYLSYETVFENGTRTLTRVKVQDLVLEPTQNITTKGVSVRRKRQVYGTDSRFSILDKRFLTNFPFSTAVKLSTGCSGILISPQHVLTAAHCVHDGKDYVKGSKKLRVGLLKMRNKSGGKKRRGSKRSRREASGGDQREGTREHLRERAKGGRRRKKSGRGQRIAEGRPSFQWTRVKNTHIPKGWARGGMGDATLDYDYALLELKRAHKKKYMELGISPTIKKMPGGMIHFSGFDNDRADQLVYRFCSVSDESNDLLYQYCDAESGSTGSGVYLRLKDPDKKNWKRKIIAVYSGHQWVDVHGVQKDYNVAVRITPLKYAQICLWIHGNDANCAYG

SEQ ID NO: 2400 - protein, 380 aa, Homo sapiens
MGATTMDQKSLWAGSAYKLVCYFTNWSQDRQEPGKFTPENIDPFLCSHLIYSFASIENNKVIIKDKSEVMLYQTINSLKTKNPKLKILLSIGGYLFGSKGFHPMVDSSTSRLEFINSIILFLRNHNFDGLDVSWIYPDQKENTHFTVLIHELAEAFQKDFTKSTKERLLLTAGVSAGRQMIDNSYQVEKLAKDLDFINLLSFDFHGSWEKPLITGHNSPLSKGWQDRGPSSYYNVEYAVGYWIHKGMPSEKVVMGIPTYGHSFTLASAETTVGAPASGPGAAGPITESSGFLAYYEICQFLKGAKITRLQDQQVPYAVKGNQWVGYDDVKSMETKVQFLKNLNLGGAMIWSIDMDDFTGKSCNQGPYPLVQAVKRSLGSL

SEQ ID NO: 2401 - protein, 390 aa, Homo sapiens
MGATTMDQKSLWAGVVVLLLLQGGSAYKLVCYFTNWSQDRQEPGKFTPENIDPFLCSHLIYSFASIENNKVIIKDKSEVMLYQTINSLKTKNPKLKILLSIGGYLFGSKGFHPMVDSSTSRLEFINSIILFLRNHNFDGLDVSWIYPDQKENTHFTVLIHELAEAFQKDFTKSTKERLLLTAGVSAGRQMIDNSYQVEKLAKDLDFINLLSFDFHGSWEKPLITGHNSPLSKGWQDRGPSSYYNVEYAVGYWIHKGMPSEKVVMGIPTYGHSFTLASAETTVGAPASGPGAAGPITESSGFLAYYEICQFLKGAKITRLQDQQVPYAVKGNQWVGYDDVKSMETKVQFLKNLNLGGAMIWSIDMDDFTGKSCNQGPYPLVQAVKRSLGSL

SEQ ID NO: 2402 - protein, 733 aa, Homo sapiens
MAGGRETCLPLIGFILICLKMVASAKSAPEIPTIDQAYSKLSNSITVEWATVPGATSYLLTAEDGDTVIETTVANSPGTVTGLKAATWYEITIRSISAAGRSQASPPKQAKTVLAAPILEVSSPSSDSILVQWEAVYMAIAFSVSIMRANGLGSIWKENTTNTSLTFTSLEAGTLYTIKAYAWNANRIPGDDSTCNQRTSPRAPANIQVSFDSGALKASFSWARAEGAFNYTVMALSDSSELTCSTTFSSCTISSLQCGTEYLISVLASNDAGSSKSSSAMTLKTVACAPGRVTIQEDPPGHLSVAWSSVDLGDYYVVFVKSDDGLEVHCNTSLTQCNFLSECGFTYFISVFVYNKAGQSPLGDIFNYTTAPCCPSDINPVLVSSDRVEIVWSPVRGAELYETKAVDGYNMVECNDTTPACTLSALECDTKYNITVYSFNEVRGSNMSCTPQFITTAPCSPEIKNVSRDAFSMINVHWRSTNDDATYTVTAQGEKGLYQCSSTGESCTMRGLPCGSVFSVTAVAETQAGRSLPSYSVPLETVPCCPTGLTVTQITQSVINVSWTIGRVAQTHVAVLESHTGQSKCHTHQNHCLLGCITCGINYTVTLKAISATGLTADCSYQSYFSGACCPLGVKLYRLGPNGIRIYWQASRGSANYSTDLYGSKGIFTCTPSAGLSFCDVTEIPCGDVYTVMVSPVAKTGLKLTFCPKKIYSVTCSGSTLGMVIYRGKRNEE

SEQ ID NO: 2403 - protein, 184 aa, Homo sapiens
MRGQGRKESLSDSRDLDGSYDQLTDSVDDEFELSTVCHRPEGLEQLQEQTKFTRKELQVLYRGFKNECPSGIVNEENFKQIYSQFFPQGDSSTYATFLFNAFDTNHDGSVSFEEMLDIMKSIYDMMGKYTYPALREEAPREHVESFFQKMDRNKDGVVTIEEFIESCQKDENIMRSMQLFDNVI

SEQ ID NO: 2404 - protein, 252 aa, Homo sapiens [sequence omitted]

SEQ ID NO: 2405 - protein, 458 aa, Homo sapiens
MQATSNLLNLLLLSLFAGLDPSKTQISPKEGWQVYSSAQDPDGRCICTVVAPEQNLCSRDAKSRQLRQLLEKVQNMSQSIEVLNLRTQRDFQYVLKMETQMKGLKAKFRQIEDDRKTLMTKHFQELKEKMDELLPLIPVLEQYKTDAKLITQFKEEIRNLSAVLTGIQEEIGAYDYEELHQRVLSLETRLRDCMKKLTCGKLMKITGPVTVKTSGTRFGAWMTDPLASEKNNRVWYMDSYTNNKIVREYKSIADFVSGAESRTYNLPFKWAGTNHVVYNGSLYFNKYQSNIIIKYSFDMGRVLAQRSLEYAGFHNVYPYTWGGFSDIDLMADEIGLWAVYATNQNAGNIVISQLNQDTLEVMKSWSTGYPKRSAGESFMICGTLYVTNSHLTGAKVYYSYSTKTSTYEYTDIPFHNQYFHISMLDYNARDRALYAWNNGHQVLFNVTLFHIIKTEDDT

SEQ ID NO: 2406 - protein, 304 aa, Homo sapiens
MLPPPRPAAALALPVLLLLLVVLTPPPTGARPSPGPDYLRRGWMRLLAEGEGCAPCRPEECAAPRGCLAGRVRDACGCCWECANLEGQLCDLDPSAHFYGHCGEQLECRLDTGGDLSRGEVPEPLCACRSQSPLCGSDGHTYSQICRLQEAARARPDANLTVAHPGPCESGPQIVSHPYDTWNVTGQDVIFGCEVFAYPMASIEWRKDGLDIQLPGDDPHISVQFRGGPQRFEVTGWLQIQAVRPSDEGTYRCLGRNALGQVEAPASLTVLTPDQLNSTGIPQLRSLNLVPEEEAESEENDDYY

SEQ ID NO: 2407 - protein, 108 aa, Homo sapiens
MTPSRLPWLLSWVSATAWRAARSPLLCHSLRKTSSSQGGKSELVKQSLKKPKLPEGRFDAPEDSHLEKEPLEKFPDDVNPVTKEKGGPRGPEPTRYGDWERKGRCIDF

SEQ ID NO: 2408 - protein, 220 aa, Homo sapiens
MAGLSRGSARALLAALLASTLLALLVSPARGRGGRDHGDWDEASRLPPLPPREDAARVARFVTHVSDWGALATISTLEAVRGRPFADVLSLSDGPPGAGSGVPYFYLSPLQLSVSNLQENPYATLTMTLAQTNFCKKHGFDPQSPLCVHIMLSGTVTKVNETEMDIAKHSLFIRHPEMKTWPSSHNWFFAKLNITNIWVLDYFGGPKIVTPEEYYNVTVQ

SEQ ID NO: 2409 - protein, 919 aa, Homo sapiens
MGLFRGFVFLLVLCLLHQSNTSFIKLNNNGFEDIVIVIDPSVPEDEKIIEQIEDMVTTASTYLFEATEKRFFFKNVSILIPENWKENPQYKRPKHENHKHADVIVAPPTLPGRDEPYTKQFTECGEKGEYIHFTPDLLLGKKQNEYGPPGKLFVHEWAHLRWGVFDEYNEDQPFYRAKSKKIEATRCSAGISGRNRVYKCQGGSCLSRACRIDSTTKLYGKDCQFFPDKVQTEKASIMFMQSIDSVVEFCNEKTHNQEAPSLQNIKCNFRSTWEVISNSEDFKNTIPMVTPPPPPVFSLLKISQRIVCLVLDKSGSMGGKDRLNRMNQAAKHFLLQTVENGSWVGMVHFDSTATIVNKLIQIKSSDERNTLMAGLPTYPLGGTSICSGIKYAFQVIGELHSQLDGSEVLLLTDGEDNTASSCIDEVKQSGAIVHFIALGRAADEAVIEMSKITGGSHFYVSDEAQNNGLIDAFGALTSGNTDLSQKSLQLESKGLTLNSNAWMNDTVIIDSTVGKDTFFLITWNSLPPSISLWDPSGTIMENFTVDATSKMAYLSIPGTAKVGTWAYNLQAKANPETLTITVTSRAANSSVPPITVNAKMNKDVNSFPSPMIVYAEILQGYVPVLGANVTAFIESQNGHTEVLELLDNGAGADSFKNDGVYSRYFTAYTENGRYSLKVRAHGGANTARLKLRPPLNRAAYIPGWVVNGEIEANPPRPEIDEDTQTTLEDFSRTASGGAFVVSQVPSLPLPDQYPPSQITDLDATVHEDKIILTWTAPGDNFDVGKVQRYIIRISASILDLRDSFDDALQVNTTDLSPKEANSKESFAFKPENISEENATHIFIAIKSIDKSNLTSKVSNIAQVTLFIPQANPDDIDPTPTPTPTPTPDKSHNSGVNISTLVLSVIGSVVIVNFILSTTI

SEQ ID NO: 2410 - protein, 645 aa, Homo sapiens
MAPSADPGMSRMLPFLLLLWFLPITEGSQRAEPMFTAVTNSVLPPDYDSNPTQLNYGVAVTDVDHDGDFEIVVAGYNGPNLVLKYDRAQKRLVNIAVDERSSPYYALRDRQGNAIGVTACDIDGDGREEIYFLNTNNAFSGVATYTDKLFKFRNNRWEDILSDEVNVARGVASLFAGRSVACVDRKGSGRYSIYIANYAYGNVGPDALIEMDPEASDLSRGILALRDVAAEAGVSKYTGGRGVSVGPILSSSASDIFCDNENGPNFLFHNRGDGTFVDAAASAGVDDPHQHGRGVALADFNRDGKVDIVYGNWNGPHRLYLQMSTHGKVRFRDIASPKFSMPSPVRTVITADFDNDQELEIFFNNIAYRSSSANRLFRVIRREHGDPLIEELNPGDALEPEGRGTGGVVTDFDGDGMLDLILSHGESMAQPLSVFRGNQGFNNNWLRVVPRTRFGAFARGAKVVLYTKKSGAHLRIIDGGSGYLCEMEPVAHFGLGKDEASSVEVTWPDGKMVSRNVASGEMNSVLEILYPRDEDTLQDPAPLECGQGFSQQENGHCMDTNECIQFPFVCPRDKPVCVNTYGSYRCRTNKKCSRGYEPNEDGTACVAQVAFLGGYSSAASRISEPLSRASYLSLGLGLCLQLYAL

SEQ ID NO: 2411 - protein, 661 aa, Homo sapiens
MAPSADPGMSRMLPFLLLLWFLPITEGSQRAEPMFTAVTNSVLPPDYDSNPTQLNYGVAVTDVDHDGDFEIVVAGYNGPNLVLKYDRAQKRLVNIAVDERSSPYYALRDRQGNAIGVTACDIDGDGREEIYFLNTNNAFSGVATYTDKLFKFRNNRWEDILSDEVNVARGVASLFAGRSVACVDRKGSGRYSIYIANYAYGNVGPDALIEMDPEASDLSRGILALRDVAAEAGVSKYTGGRGVSVGPILSSSASDIFCDNENGPNFLFHNRGDGTFVDAAASAGVDDPHQHGRGVALADFNRDGKVDIVYGNWNGPHRLYLQMSTHGKVRFRDIASPKFSMPSPVRTVITADFDNDQELEIFFNNIAYRSSSANRLFRVIRREHGDPLIEELNPGDALEPEGRGTGGVVTDFDGDGMLDLILSHGESMAQPLSVFRGNQGFNNNWLRVVPRTRFGAFARGAKVVLYTKKSGAHLRIIDGGSGYLCEMEPVAHFGLGKDEASSVEVTWPDGKMVSRNVASGEMNSVLEILYPRDEDTLQDPAPLECGQGFSQQENGHCMDTNECIQFPFVCPRDKPVCVNTYGSYRCRTNKKCSRGYEPNEDGTACVGTLGQSPGPRPTTPTAAAATAAAAAAAGAATAAPVLVDGDLNLGSVVKESCEPSC

SEQ ID NO: 2412 - protein, 409 aa, Homo sapiens
MALTPGWGSSAGPVRPELWLLLWAAAWRLGASACPALCTCTGTTVDCHGTGLQAIPKNIPRNTERLELNGNNITRIHKNDFAGLKQLRVLQLMENQIGAVERGAFDDMKELERLRLNRNQLHMLPELLFQNNQALSRLDLSENAIQAIPRKAFRGATDLKNLQLDKNQISCIEEGAFRALRGLEVLTLNNNNITTIPVSSFNHMPKLRTFRLHSNHLFCDCHLAWLSQWLRQRPTIGLFTQCSGPASLRGLNVAEVQKSEFSCSGQGEAGRVPTCTLSSGSCPAMCTCSNGIVDCRGKGLTAIPANLPETMTEIRLELNGIKSIPPGAFSPYRKLRRIDLSNNQIAEIAPDAFQGLRSLNSLHTGPVTCPHTTGTHSSHCRAFAVAVPHSRNDLEAMFEEEVPRIFYSA

SEQ ID NO: 2413 - protein, 380 aa, Homo sapiens
MALTPGWGSSAGPVRPELWLLLWAAAWRLGASACPALCTCTGTTVDCHGTGLQAIPKNIPRNTERLELNGNNITRIHKNDFAGLKQLRVLQLMENQIGAVERGAFDDMKELERLDLSENAIQAIPRKAFRGATDLKNLQLDKNQISCIEEGAFRALRGLEVLTLNNNNITTIPVSSFNHMPKLRTFRLHSNHLFCDCHLAWLSQWLRQRPTIGLFTQCSGPASLRGLNVAEVQKSEFSCSGQGEAGRVPTCTLSSGSCPAMCTCSNGIVDCRGKGLTAIPANLPETMTEIRLELNGIKSIPPGAFSPYRKLRRIDLSNNQIAEIAPDAFQGLRSLNSLVLYGNKITDLPRGVFGGLYTLQLLLLNANKINCIRPDAFQDL

SEQ ID NO: 2414 - protein, 815 aa, Homo sapiens
MALTPGWGSSAGPVRPELWLLLWAAAWRLGASACPALCTCTGTTVDCHGTGLQAIPKNIPRNTERLELNGNNITRIHKNDFAGLKQLRVLQLMENQIGAVERGAFDDMKELERLRLNRNQLHMLPELLFQNNQALSRLDLSENAIQAIPRKAFRGATDLKNLQLDKNQISCIEEGAFRALRGLEVLTLNNNNITTIPVSSFNHMPKLRTFRLHSNHLFCDCHLAWLSQWLRQRPTIGLFTQCSGPASLRGLNVAEVQKSEFSCSGQGEAGRVPTCTLSSGSCPAMCTCSNGIVDCRGKGLTAIPANLPETMTEIRLELNGIKSIPPGAFSPYRKLRRICPLSFCSPCRDLSNNQIAEIAPDAFQGLRSLNSLVLYGNKITDLPRGVFGGLYTLQLLLLNANKINCIRPDAFQDLQNLSLLSLYDNKIQSLAKGTFTSLRAIQTLHLAQNPFICDCNLKWLADFLRTNPIETSGARCASPRRLANKRIGQIKSKKFRCSAKEQYFIPGTEDYQLNSECNSDVVCPHKCRCEANVVECSSLKLTKIPERIPQSTAELRLNNNEISILEATGMFKKLTHLKKINLSNNKVSEIEDGAFEGAASVSELHLTANQLESIRSGMFRGLDGLRTLMLRNNRISCIHNDSFTGLRNVRLLSLYDNQITTVSPGAFDTLQSLSTLNLLANPFNCNCQLAWLGGWLRKRKIVTGNPRCQNPDFLRQIPLQDVAFPDFRCEEGQEEGGCLPRPQCPQECACLDTVVRCSNKHLRALPKGIPKNVTELYLDGNQFTLVPGQLSTFKYLQLVILSYNALQCIPPLAFQ

SEQ ID NO: 2415 - protein, 1461 aa, Homo sapiens
MALTPGWGSSAGPVRPELWLLLWAAAWRLGASACPALCTCTGTTVDCHGTGLQAIPKNIPRNTERLELNGNNITRIHKNDFAGLKQLRVLQLMENQIGAVERGAFDDMKELERLRLNRNQLHMLPELLFQNNQALSRLDLSENAIQAIPRKAFRGATDLKNLQLDKNQISCIEEGAFRALRGLEVLTLNNNNITTIPVSSFNHMPKLRTFRLHSNHLFCDCHLAWLSQWLRQRPTIGLFTQCSGPASLRGLNVAEVQKSEFSCSGQGEAGRVPTCTLSSGSCPAMCTCSNGIVDCRGKGLTAIPANLPETMTEIRLELNGIKSIPPGAFSPYRKLRRIDLSNNQIAEIAPDAFQGLRSLNSLVLYGNKITDLPRGVFGGLYTLQLLLLNANKINCIRPDAFQDLQNLSLLSLYDNKIQSLAKGTFTSLRAIQTLHLAQNPFICDCNLKWLADFLRTNPIETSGARCASPRRLANKRIGQIKSKKFRCSAKEQYFIPGTEDYQLNSECNSDVVCPHKCRCEANVVECSSLKLTKIPERIPQSTAELRLNNNEISILEATGMFKKLTHLKKINLSNNKVSEIEDGAFEGAASVSELHLTANQLESIRSGMFRGLDGLRTLMLRNNRISCIHNDSFTGLRNVRLLSLYDNQITTVSPGAFDTLQSLSTLNLLANPFNCNCQLAWLGGWLRKRKIVTGNPRCQNPDFLRQIPLQDVAFPDFRCEEGQEEGGCLPRPQCPQECACLDTVVRCSNKHLRALPKGIPKNVTELYLDGNQFTLVPGQLSTFKYLQLVDLSNNKISSLSNSSFTNMSQLTTLILSYNALQCIPPLAFQGLRSLRLLSLHGNDISTLQEGIFADVTSLSHLAIGANPLYCDCHLRWLSSWVKTGYKEPGIARCAGPQDMEGKLLLTTPAKKFECQGPPTLAVQAKCDLCLSSPCQNQGTCHNDPLEVYRCACPSGYKGRDCEVSLDSCSSGPCENGGTCHAQEGEDAPFTCSCPTGFEGPTCGVNTDDCVDHACANGGVCVDGVGNYTCQCPLQYEGKACEQLVDLCSPDLNPCQHEAQCVGTPDGPRCECMPGYAGDNCSENQDDCRDHRCQNGAQCMDEVNSYSCLCAEGYSGQLCEIPPHLPAPKSPCEGTECQNGANCVDQGNRPVCQCLPGFGGPECEKLLSVNFVDRDTYLQFTDLQNWPRANITLQVSTAEDNGILLYNGDNDHIAVELYQGHVRVSYDPGSYPSSAIYSAETINDGQFHTVELVAFDQMVNLSIDGGSPMTMDNFGKHYTLNSEAPLYVGGMPVDVNSAAFRLWQILNGTGFHGCIRNLYINNELQDFTKTQMKPGVVPGCEPCRKLYCLHGICQPNATPGPMCHCEAGWVGLHCDQPADGPCHGHKCVHGQCVPLDALSYSCQCQDGYSGALCNQSPSAGGTLSGTFTRSRGAMPSARPRAPCHGWSAGARAQARAAARAFG

SEQ ID NO: 2416 - protein, 189 aa, Homo sapiens
MEATGTDEVDKLKTKFISAWNNMKYSWVLKTKTYFSRNSPVLLLGKCYHFKYEDEDKTLPAESGCTIEDHVIAGNVEEFRKDFISRIWLTYREEFPQIEGSALTTDCGWGCTLRTGQMLLAQGLILHFLGRAWTWPDALNIENSDSESWTSHTVKKFTASFEASLSGEREFKTPTISLKETIGKYSDDH

SEQ ID NO: 2417 - protein, 458 aa, Homo sapiens; identical to SEQ ID NO: 2100

SEQ ID NO: 2418 - protein, 2725 aa, Homo sapiens
MEQTDCKPYQPLPKVKHEMDLAYTSSSDESEDGRKPRQSYNSRETLHEYNQELRMNYNSQSRKRKEVEKSTQEMEFCETSHTLCSGYQTDMHSVSRHGYQLEMGSDVDTETEGAASPDHALRMWIRGMKSEHSSCLSSRANSALSLTDTDHERKSDGENGFKFSPVCCDMEAQAGSTQDVQSSPHNQFTFRPLPPPPPPPHACTCARKPPPAADSLQRRSMTTRSQPSPAAPAPPTSTQDSVHLHNSWVLNSNIPLETRHFLFKHGSGSSAIFSAASQNYPLTSNTVYSPPPRPLPRSTFSRPAFTFNKPYRCCNWKCTALSATAITVTLALLLAYVIAVHLFGLTWQLQPVEGELYANGVSKGNRGTESMDTTYSPIGGKVSDKSEKKVFQKGRAIDTGEVDIGAQVMQTIPPGLFWRFQITIHHPIYLKFNISLAKDSLLGIYGRRNIPPTHTQFDFVKLMDGKQLVKQDSKGSDDTQHSPRNLILTSLQETGFIEYMDQGPWYLAFYNDGKKMEQVFVLTTAIEIMDDCSTNCNGNGECISGHCHCFPGFLGPDCARDSCPVLCGGNGEYEKGHCVCRHGWKGPECDVPEEQCIDPTCFGHGTCIMGVCICVPGYKGEICEEEDCLDPMCSNHGICVKGECHCSTGWGGVNCETPLPVCQEQCSGHGTFLLDAGVCSCDPKWTGSDCSTELCTMECGSHGVCSRGICQCEEGWVGPTCEERSCHSHCTEHGQCKDGKCECSPGWEGDHCTIAHYLDAVRDGCPGLCFGNGRCTLDQNGWHCVCQVGWSGTGCNVVMEMLCGDNLDNDGDGLTDCVDPDCCQQSNCYISPLCQGSPDPLDLIQQSQTLFSQHTSRLFYDRIKFLIGKDSTHVIPPEVSFDSRRACVIRGQVVAIDGTPLVGVNVSFLHHSDYGFTISRQDGSFDLVAIGGISVILIFDRSPFLPEKRTLWLPWNQFIVVEKVTMQRVVSDPPSCDISNFISPNPIVLPSPLTSFGGSCPERGTIVPELQVVQEEIPIPSSFVRLSYLSSRTPGYKTLLRILLTHSTIPVGMIKVHLTVAVEGRLTQKWFPAAINLVYTFAWNKTDIYGQKVWGLAEALVSVGYEYETCPDFILWEQRTVVLQGFEMDASNLGGWSLNKHHILNPQSGIIHKGNGENMFISQQPPVISTIMGNGHQRSVACTNCNGPAHNNKLFAPVALASGPDGSVYVGDFNFVRRIFPSGNSVSILELSTSPAHKYYLAMDPVSESLYLSDTNTRKVYKLKSLVETKDLSKNFEVVAGTGDQCLPFDQSHCGDGGRASEASLNSPRGITVDRHGFIYFVDGTMIRKIDENAVITTVIGSNGLTSTQPLSCDSGMDITQVRLEWPTDLAVNPMDNSLYVLDNNIVLQISENRRVRIIAGRPIHCQVPGIDHFLVSKVAIHSTLESARAISVSHSGLLFIAETDERKVNRIQQVTTNGEIYIIAGAPTDCDCKIDPNCDCFSGDGGYAKDAKMKAPSSLAVSPDGTLYVADLGNVRIRTISRNQAHLNDMNIYEIASPADQELYQFTVNGTHLHTLNLITRDYVYNFTYNSEGDLGAITSSNGNSVHIRRDAGGMPLWLVVPGGQVYWLTISSNGVLKRVSAQGYNLALMTYPGNTGLLATKSNENGWTTVYEYDPEGHLTNATFPTGEVSSFHSDLEKLTKVELDTSNRENVLMSTNLTATSTIYILKQENTQSTYRVNPDGSLRVTFASGMEIGLSSEPHILAGAVNPTLGKCNISLPGEHNANLIEWRQRKEQNKGNVSAFERRLRAHNRNLLSIDFDHITRTGKIYDDHRKFTLRILYDQTGRPILWSPVSRYNEVNITYSPSGLVTFIQRGTWNEKMEYDQSGKIISRTWADGKIWSYTYLEKSVMLLLHSQRRYIFEYDQPDCLLSVTMPSMVRHSLQTMLSVGYYRNIYTPPDSSTSFIQDYSRDGRLLQTLHLGTGRRVLYKYTKQARLSEVLYDTTQVTLTYEESSGVIKTIHLMHDGFICTIRYRQTGPLIGRQIFRFSEEGLVNARFDYSYNNFRVTSMQAVINETPLPIDLYRYVDVSGRTEQFGKFSVINYDLNQVITTTVMKHTKIFSANGQVIEVQYEILKAIAYWMTIQYDNVGRMVICDIRVGVDANITRYFYEYDADGQLQTVSVNDKTQWRYSYDLNGNINLLSHGKSARLTPLRYDLRDRITRLGEIQYKMDEDGFLRQRGNDIFEYNSNGLLQKAYNKASGWTVQYYYDGLGRRVASKSSLGQHLQFFYADLTNPIRVTHLYNHTSSEITSLYYDLQGHLIAMELSSGEEYYVACDNTGTPLAVFSSRGQVIKEILYTPYGDIYHDTYPDFQVIIGFHGGLYDFLTKLVHLGQRDYDVVAGRWTTPNHHIWKQLNLLPKPFNLYSFENNYPVGKIQDVAKYTTDIRSWLELFGFQLHNVLPGFPKPELENLELTYELLRLQTKTQEWDPGKTILGIQCELQKQLRNFISLDQLPMTPRYNDGRCLEGGKQPRFAAVPSVFGKGIKFAIKDGIVTADIIGVANEDSRRLAAILNNAHYLENLHFTIEGRDTHYFIKLGSLEEDLVLIGNTGGRRILENGVNVTVSQMTSVLNGRTRRFADIQLQHGALCFNIRYGTTVEEEKNHVLEIARQRAVAQAWTKEQRRLQEGEEGIRAWTEGEKQQLLSTGRVQGYDGYFVLSVEQYLELSDSANNIHFMRQSEIGRR

SEQ ID NO: 2419 - protein, 67 aa, Homo sapiens
MKIQLFFFILHFWVTILPAKKKYPEYGSLDLRRECRIGNGQCKNQCHENEIRIAYCIRPGTHCCLQQ

SEQ ID NO: 2420 - protein, 276 aa, Homo sapiens
MKQILHPALETTACTNHFNADPCSTGFVFPAMTLFPVLLFLVAGLLPSFPANEDKDPAFTALLTTQTQVQREIVNKHNELRRAVSPPARNMLKMEWNKEAAANAQKWANQCNYRHSNPKDRMTSLKCGENLYMSSASSSWSQAIQSWFDEYNDFDFGVGPKTPNAVVGHYTQVVWYSSYLVGCGNAYCPNQKVLKYYYVCQYCPAGNWANRLYVPYEQGAPCASCPDNCDDGLCTNGCKYEDLYSNCKSLKLTLTCKHQLVRDSCKASCNCSNSIY

SEQ ID NO: 2421 - protein, 449 aa, Homo sapiens
MLAEWGACLLLAVALLGPGLQAQAMEGVKCGGVLSAPSGNFSSPNFPRLYPYNTECSWLIVVAEGSSVLLTFHAFDLEYHDTCSFDFLEIYNGASPDKGNLLGRFCGKVPPPPFTSSWHVMSVIFHSDKHVASHGFSAGYQKDVCGGVLTGLSGVLTSPEYPNNYPNSMECHWVIRAAGPAHVKLVFVDFQVEGNEECTYDYVAVLGGPGPTRGHHYCGSTRPPTLVSLGHELQVVFKSDFNIGGRGFKAYYFSGECQEVYMAMRGNFSSPQYPSSYPNNIRCHWTIRLPPGYQVKVFFLDLDLEEPNSLTKTCDFDHLAAFDGASEEAPLLGNWCGHHLPPPVTSSHNQLLLLLHTDRSTTRRGFSVAYIGGQLGCGSGSTEGEGEALQPQSLQSPSSIPPVCPAPPMNGLLQLLLHWLHPCPLSGPLRLDGTAPACFHYCRASFPSF

SEQ ID NO: 2422 - protein, 477 aa, Homo sapiens; identical to SEQ ID NO: 1860

SEQ ID NO: 2423 - protein, 492 aa, Homo sapiens [sequence omitted]

SEQ ID NO: 2424 - protein, 949 aa, Homo sapiens
MILSLLFSLGGPLGWGLLGAWAQASSTSLSDLQSSRTPGVWKAEAEDTGKDPVGRNWCPYPMSKLVTLLALCKTEKFLIHSQQPCPQGAPDCQKVKVMYRMAHKPVYQVKQKVLTSLAWRCCPGYTGPNCEHHDSMAIPEPADPGDSHQEPQDGPVSFKPGHLAAVINEVEVQQEQQEHLLGDLQNDVHRVADSLPGLWKALPGNLTAAVMEANQTGHEFPDRSLEQVLLPHVDTFLQVHFSPIWRSFNQSLHSLTQAIRNLSLDVEANRQAISRVQDSAVARADFQELGAKFEAKVQENTQRVGQLRQDVEDRLHAQHFTLHRSISELQADVDTKLKRLHKAQEAPGTNGSLVLATPGAGARPEPDSLQARLGQLQRNLSELHMTTARREEELQYTLEDMRATLTRHVDEIKELYSESDETFDQISKVERQVEELQVNHTALRELRVILMEKSLIMEENKEEVERQLLELNLTLQHLQGGHADLIKYVKDCNCQKLYLDLDVIREGQRDATRALEETQVSLDERRQLDGSSLQALQNAVDAVSLAVDAHKAEGERARAATSRLRSQVQALDDEVGALKAAAAEARHEVRQLHSAFAALLEDALRHEAVLAALFGEEVLEEMSEQTPGPLPLSYEQIRVALQDAASGLQEQALGWDELAARVTALEQASEPPRPAEHLEPSHDAGREEAATTALAGLARELQSLSNDVKNVGRCCEAEAGAGAASLNASLHGLHNALFATQRSLEQHQRLFHSLFGNFQGLMEANVSLDLGKLQTMLSRKGKKQQKDLEAPRKRDKKEAEPLVDIRVTGPVPGALGAALWEAGSPVAFYASFSEGTAALQTVKFNTTYINIGSSYFPEHGYFRAPERGVYLFAVSVEFGPGPGTGQLVFGGHHRTPVCTTGQGSGSTATVFAMAELQKGERVWFELTQGSITKRSLSGTAFGGFLMFKT

SEQ ID NO: 2425 - protein, 81 aa, Homo sapiens
MRLLVLSSLLCILLLCFSIFSTEGKRRPAKAWSGRRTRLCCHRVPSPNSTNLKGHHVRLCKPCKLEPEPRLWVVPGALPQV

SEQ ID NO: 2426 - protein, 229 aa, Homo sapiens
MSFLQDPSFFTMGMWSIGAGALGAAALALLLANTDVFLSKPQKAALEYLEDIDLKTLEKEPRTFKAKELWEKNGAVIMAVRRPGCFLCREEAADLSSLKSMLDQLGVPLYAVVKEHIRTEVKDFQPYFKGEIFLDEKKKFYGPQRRKMMFMGFIRLGVWYNFFRAWNGGFSGNLEGEGFILGGVFVVGSGKQGILLEHREKEFGDKVNLLSVLEAAKMIKPQTLASEKK

SEQ ID NO: 2427 - protein, 218 aa, Homo sapiens
MGMWSIGAGALGAAALALLLANTDVFLSKPQKAALEYLEDIDLKTLEKEPRTFKAKELWEKNGAVIMAVRRPGCFLCREEAADLSSLKSMLDQLGVPLYAVVKEHIRTEVKDFQPYFKGEIFLDEKKKFYGPQRRKMMFMGFIRLGVWYNFFRAWNGGFSGNLEGEGFILGGVFVVGSGKQGILLEHREKEFGDKVNLLSVLEAAKMIKPQTLASEKK

SEQ ID NO: 2428 - protein, 229 aa, Homo sapiens; identical to SEQ ID NO: 2426

SEQ ID NO: 2429 - protein, 229 aa, Homo sapiens; identical to SEQ ID NO: 2426

SEQ ID NO: 2430 - protein, 415 aa, Homo sapiens; identical to SEQ ID NO: 2138

SEQ ID NO: 2431 - protein, 79 aa, Homo sapiens
MAPQTLLPVLVLCVLLLQAQGGYRDKKRMQKTQLSPEIKVCQQQPKLYLCKHLCESHRDCQANNICCSTYCGNVCMSIL

SEQ ID NO: 2432 - protein, 161 aa, Homo sapiens
MGLSGLLPILVPFILLGDIQEPGHAEGILGKPCPKIKVECEVEEIDQCTKPRDCPENMKCCPFSRGKKCLDFRKIYAVCHRRLAPAWPPYHTGGTIKKTKICSEFIYGGSQGNNNNFQTEAICLVTCKKYHKSALLYTIRRSLNNLQDLAHNPGLSPRVPD

SEQ ID NO: 2433 - protein, 86 aa, Homo sapiens
MGLSGLLPILVPFILLGDIQEPGHAEGILGKPCPKIKVECEVEEIDQCTKPRDCPENMKCCPFSRGKKCLDFRKVSLTLYHKEELE

SEQ ID NO: 2434 - protein, 124 aa, Homo sapiens
MPACRLGPLAAALLLSLLLFGFTLVSGTGAEKTGVCPELQADQNCTQECVSDSECADNLKCCSAGCATFCSLPNDKEGSCPQVNINFPQLGLCRDQCQVDSQCPGQMKCCRNGCGKVSCVTPNF

SEQ ID NO: 2435 - protein, 475 aa, Homo sapiens
MADMQNLVERLERAVGRLEAVSHTSDMHRGYADSPSKAGAAPYVQAFDSLLAGPVAEYLKISKEIGGDVQKHAEMVHTGLKLERALLVTASQCQQPAENKLSDLLAPISEQIKEVITFREKNRGSKLFNHLSAVSESIQALGWVAMAPKPGPYVKEMNDAAMFYTNRVLKEYKDVDKKHVDWVKAYLSIWTELQAYIKEFHTTGLAWSKTGPVAKELSGLPSGPSAGSCPPPPPPCPPPPPVSTISCSYESASRSSLFAQINQGESITHALKHVSDDMKTHKNPALKAQSGPVRSGPKPFSAPKPQTSPSPKRATKKEPAVLELEGKKWRVENQENVSNLVIEDTELKQVAYIYKCVNTTLQIKGKINSITVDNCKKLGLVFDDVVGIVEIINSKDVKVQVMGKVPTISINKTDGCHAYLSKNSLDCEIVSAKSSEMNVLIPTEGGDFNEFPVPEQFKTLWNGQKLVTTVTEIAG

SEQ ID NO: 2436 - protein, 145 aa, Homo sapiens
MADMQNLVERLERAVGRLEAVSHTSDMHRGYADSPSKAGAAPYVQAYIKEFHTTGLAWSKTGPVAKELSGLPSGPSAGSCPPPPPPCPPPPPVSTISCSYESASRSSLFAQINQGESITHALKHVSDDMKTHKNPALKAQSGPVR

SEQ ID NO: 2437 - protein, 475 aa, Homo sapiens; identical to SEQ ID NO: 2435

SEQ ID NO: 2438 - protein, 474 aa, Homo sapiens; identical to SEQ ID NO: 2227

SEQ ID NO: 2439 - protein, 474 aa, Homo sapiens; identical to SEQ ID NO: 2227

SEQ ID NO: 2440 - protein, 475 aa, Homo sapiens; identical to SEQ ID NO: 2435

SEQ ID NO: 2441 - protein, 402 aa, Homo sapiens
MTALPGPLWLLGLALCALGGGGPGLRPPPGCPQRRLGARERRDVQREILAVLGLPGRPRPRAPPAASRLPASAPLFMLDLYHAMAGDDDEDGAPAERRLGRADLVMSFVNMVERDRALGHQEPHWKEFRFDLTQIPAGEAVTAAEFRIYKVPSIHLLNRTLHVSMFQVVQEQSNRESDLFFLDLQTLRAGDEGWLVLDVTAASDCWLLKRHKDLGLRLYVETEDGHSVDPGLAGLLGQRAPRSQQPFVVTFFRASPSPIRTPRAVRPLRRRQPKKSNELPQANRLPGIFDDVHGSHGRQVCRRHELYVSFQDLGWLDWVIAPQGYSAYYCEGECSFPLDSCMNATNHAILQSLVHLMMPDAVPKACCAPTKLSATSVLYYDSSNNVILRKHRNMVVKACGCH

SEQ ID NO: 2442 - protein, 267 aa, Homo sapiens
MAAIRMGKLTTMPAGLIYASVSVHAAKQEESKKQLVKPEQLPIYTAPPLQSKYVEEQPGHLQMGFASIRTATGCYIGWCKGVYVFVKNGIMDTVQFGKDAYVYLKNPPRDFLPKMGVITVSGLAGLVSARKGSKFKKITYPLGLATLGATVCYPVQSVIIAKVTAKRYMLQASKFLEQLNHCGQKAAKKSHSLNLKKTKLGSSSEIEVPAKTTHVLKHSVPLPTELSSEAKTKSESTSGATQFMPDPKLMDHGQSHPEDIDMYSTRS

SEQ ID NO: 2443 - protein, 268 aa, Homo sapiens
MAAIRMGKLTTMPAGLIYASVSVHAAKQEESKKQLVKPEQLPIYTAPPLQSKYVEEQPGHLQMGFASIRTATGCYIGWCKGVYVFVKNGIMDTVQFGKDAYVYLKNPPRDFLPKMGVITVSGLAGLVSARKGSKFKKITYPLGLATLGATVCYPVQSVIIAKVTAKKVYATSQQIFGAVKSLWTKSSKEESLPKPKEKTKLGSSSEIEVPAKTTHVLKHSVPLPTELSSEAKTKSESTSGATQFMPDPKLMDHGQSHPEDIDMYSTRS

SEQ ID NO: 2444 - protein, 1223 aa, Homo sapiens
MAPLRALLSYLLPLHCALCAAAGSRTPELHLSGKLSDYGVTVPCSTDFRGRFLSHVVSGPAAASAGSMVVDTPPTLPRHSSHLRVARSPLHPGGTLWPGRVGRHSLYFNVTVFGKELHLRLRPNRRLVVPGSSVEWQEDFRELFRQPLRQECVYTGGVTGMPGAAVAISNCDGLAGLIRTDSTDFFIEPLERGQQEKEASGRTHVVYRREAVQQEWAEPDGDLHNEAFGLGDLPNLLGLVGDQLGDTERKRRHAKPGSYSIEVLLVVDDSVVRFHGKEHVQNYVLTLMNIVDEIYHDESLGVHINIALVRLIMVGYRQSLSLIERGNPSRSLEQVCRWAHSQQRQDPSHAEHHDHVVFLTRQDFGPSGYAPVTGMCHPLRSCALNHEDGFSSAFVIAHETGHVLGMEHDGQGNGCADETSLGSVMAPLVQAAFHRFHWSRCSKLELSRYLPSYDCLLDDPFDPAWPQPPELPGINYSMDEQCRFDFGSGYQTCLAFRTFEPCKQLWCSHPDNPYFCKTKKGPPLDGTECAPGKWCFKGHCIWKSPEQTYGQDGGWSSWTKFGSCSRSCGGGVRSRSRSCNNPSPAYGGRLCLGPMFEYQVCNSEECPGTYEDFRAQQCAKRNSYYVHQNAKHSWVPYEPDDDAQKCELICQSADTGDVVFMNQVVHDGTRCSYRDPYSVCARGECVPVGCDKEVGSMKADDKCGVCGGDNSHCRTVKGTLGKASKQAGALKLVQIPAGARHIQIEALEKSPHRIVVKNQVTGSFILNPKGKEATSRTFTAMGLEWEDAVEDAKESLKTSGPLPEAIAILALPPTEGGPRSSLAYKYVIHEDLLPLIGSNNVLLEEMDTYEWALKSWAPCSKACGGGIQFTKYGCRRRRDHHMVQRHLCDHKKRPKPIRRRCNQHPCSQPVWVTEEWGACSRSCGKLGVQTRGIQCLLPLSNGTHKVMPAKACAGDRPEARRPCLRVPCPAQWRLGAWSQCSATCGEGIQQRQVVCRTNANSLGHCEGDRPDTVQVCSLPACGGNHQNSTVRADVWELGTPEGQWVPQSEPLHPINKISSTEPCTGDRSVFCQMEVLDRYCSIPGYHRLCCVSCIKKASGPNPGPDPGPTSLPPFSTPGSPLPGPQDPADAAEPPGKPTGSEDHQHGRATQLPGALDTSSPGTQHPFAPETPIPGASWSISPTTPGGLPWGWTQTPTPVPEDKGQPGEDLRHPGTSLPAASPVT

SEQ ID NO: 2445 - protein, 1226 aa, Homo sapiens
MAPLRALLSYLLPLHCALCAAAGSRTPELHLSGKLSDYGVTVPCSTDFRGRFLSHVVSGPAAASAGSMVVDTPPTLPRHSSHLRVARSPLHPGGTLWPGRVGRHSLYFNVTVFGKELHLRLRPNRRLVVPGSSVEWQEDFRELFRQPLRQECVYTGGVTGMPGAAVAISNCDGLAGLIRTDSTDFFIEPLERGQQEKEASGRTHVVYRREAVQQEWAEPDGDLHNEAFGLGDLPNLLGLVGDQLGDTERKRRHAKPGSYSIEVLLVVDDSVVRFHGKEHVQNYVLTLMNIVDEIYHDESLGVHINIALVRLIMVGYRQSLSLIERGNPSRSLEQVCRWAHSQQRQDPSHAEHHDHVVFLTRQDFGPSGMQGYAPVTGMCHPLRSCALNHEDGFSSAFVIAHETGHVLGMEHDGQGNGCADETSLGSVMAPLVQAAFHRFHWSRCSKLELSRYLPSYDCLLDDPFDPAWPQPPELPGINYSMDEQCRFDFGSGYQTCLAFRTFEPCKQLWCSHPDNPYFCKTKKGPPLDGTECAPGKWCFKGHCIWKSPEQTYGQDGGWSSWTKFGSCSRSCGGGVRSRSRSCNNPSPAYGGRLCLGPMFEYQVCNSEECPGTYEDFRAQQCAKRNSYYVHQNAKHSWVPYEPDDDAQKCELICQSADTGDVVFMNQVVHDGTRCSYRDPYSVCARGECVPVGCDKEVGSMKADDKCGVCGGDNSHCRTVKGTLGKASKQAGALKLVQIPAGARHIQIEALEKSPHRIVVKNQVTGSFILNPKGKEATSRTFTAMGLEWEDAVEDAKESLKTSGPLPEAIAILALPPTEGGPRSSLAYKYVIHEDLLPLIGSNNVLLEEMDTYEWALKSWAPCSKACGGGIQFTKYGCRRRRDHHMVQRHLCDHKKRPKPIRRRCNQHPCSQPVWVTEEWGACSRSCGKLGVQTRGIQCLLPLSNGTHKVMPAKACAGDRPEARRPCLRVPCPAQWRLGAWSQCSATCGEGIQQRQVVCRTNANSLGHCEGDRPDTVQVCSLPACGGNHQNSTVRADVWELGTPEGQWVPQSEPLHPINKISSTEPCTGDRSVFCQMEVLDRYCSIPGYHRLCCVSCIKKASGPNPGPDPGPTSLPPFSTPGSPLPGPQDPADAAEPPGKPTGSEDHQHGRATQLPGALDTSSPGTQHPFAPETPIPGASWSISPTTPGGLPWGWTQTPTPVPEDKGQPGEDLRHPGTSLPAASPVT

SEQ ID NO: 2446 - protein, 253 aa, Homo sapiens
MAAATRGCRPWGSLLGLLGLVSAAAAAWDLASLRCTLGAFCECDFRPDLPGLECDLAQHLAGQHLAKALVVKALKAFVRDPAPTKPLVLSLHGWTGTGKSYVSSLLAHYLFQGGLRSPRVHHFSPVLHFPHPSHIERYKKDLKSWVQGNLTACGRSLFLFDEMDKMPPGLMEVLRPFLGSSWVVYGTNYRKAIFIFIRWGPALQWAQWGGHFSEVQLYSLSLCSQQNPVPHGLSWAFPVPSATLRDDIVIPPG

SEQ ID NO: 2447 - protein, 321 aa, Homo sapiens
MAAATRGCRPWGSLLGLLGLVSAAAAAWDLASLRCTLGAFCECDFRPDLPGLECDLAQHLAGQHLAKALVVKALKAFVRDPAPTKPLVLSLHGWTGTGKSYVSSLLAHYLFQGGLRSPRVHHFSPVLHFPHPSHIERYKKDLKSWVQGNLTACGRSLFLFDEMDKMPPGLMEVLRPFLGSSWVVYGTNYRKAIFIFISNTGGKQINQVALEAWRSRRDREEILLQELEPVISRAVLDNPHHGFSNSGIMEERLLDAVVPFLPLQRHHVRHCVLNELAQLGLEPRDEVVQAVLDSTTFFPEDEQLFSSNGCKTVASRIAFFL

SEQ ID NO: 2448 - protein, 191 aa, Homo sapiens
MQVWCDQRHDPGGWTVIQRRLDGSVNFFRNWETYKQGFGNIDGEYWLGLENIYWLTNQGNYKLLVTMEDWSGRKVFAEYASFRLEPESEYYKLRLGRYHGNAGDSFTWHNGKQFTTLDRDHDVYTGNCAHYQKGGWWYNACAHSNLNGVWYRGGHYRSRYQDGVYWAEFRGGSYSLKKVVMMIRPNPNTFH

SEQ ID NO: 2449 - protein, 493 aa, Homo sapiens
MRPLCVTCWWLGLLAAMGAVAGQEDGFEGTEEGSPREFIYLNRYKRAGESQDKCTYTFIVPQQRVTGAICVNSKEPEVLLENRVHKQELELLNNELLKQKRQIETLQQLVEVDGGIVSEVKLLRKESRNMNSRVTQLYMQLLHEIIRKRDNALELSQLENRILNQTADMLQLASKYKDLEHKYQHLATLAHNQSEIIAQLEEHCQRVPSARPVPQPPPAAPPRVYQPPTYNRIINQISTNEIQSDQNLKVLPPPLPTMPTLTSLPSSTDKPSGPWRDCLQALEDGHDTSSIYLVKPENTNRLMQVWCDQRHDPGGWTVIQRRLDGSVNFFRNWETYKQGFGNIDGEYWLGLENIYWLTNQGNYKLLVTMEDWSGRKVFAEYASFRLEPESEYYKLRLGRYHGNAGDSFTWHNGKQFTTLDRDHDVYTGNCAHYQKGGWWYNACAHSNLNGVWYRGGHYRSRYQDGVYWAEFRGGSYSLKKVVMMIRPNPNTFH

SEQ ID NO: 2450 - protein, 652 aa, Homo sapiens
MAAAALPPRPLLLLPLVLLLSGRPTRADSKVFGDLDQVRMTSEGSDCRCKCIMRPLSKDACSRVRSGRARVEDFYTVETVSSGTDCRCSCTAPPSSLNPCENEWKMEKLKKQAPELLKLQSMVDLLEGTLYSMDLMKVHAYVHKVASQMNTLEESIKANLSRENEVVKDSVRHLSEQLRHYENHSAIMLGIKKELSRLGLQLLQKDAAAAPATPATGTGSKAQDTARGKGKDISKYGSVQKSFADRGLPKPPKEKLLQVEKLRKESGKGSFLQPTAKPRALAQQQAVIRGFTYYKAGKQEVTEAVADNTLQGTSWLEQLPPKVEGRSNSAEPNSAEQDEAEPRSSERVDLASGTPTSIPATTTTATTTPTPTTSLLPTEPPSGPEVSSQGREASCEGTLRAVDPPVRHHSYGRHEGAWMKDPAARDDRIYVTNYYYGNSLVEFRNLENFKQGRWSNMYKLPYNWIGTGHVVYQGAFYYNRAFTKNIIKYDLRQRFVASWALLPDVVYEDTTPWKWRGHSDIDFAVDESGLWVIYPAVDDRDEAQPEVIVLSRLDPGDLSVHRETTWKTRLRRNSYGNCFLVCGILYAVDTYNQQEGQVAYAFDTHTGTDARPQLPFLNEHAYTTQIDYNPKERVLYAWDNGHQLTYTLHFVV

SEQ ID NO: 2451 - protein, 546 aa, Homo sapiens
MKNQDKKNGAAKQSNPKSSPGQPEAGPEGAQERPSQAAPAVEAEGPGSSQAPRKPEGAQARTAQSGALRDVSEELSRQLEDILSTYCVDNNQGGPGEDGAQGEPAEPEDAEKSRTYVARNGEPEPTPVVNGEKEPSKGDPNTEEIRQSDEVGDRDHRRPQEKKKAKGLGKEITLLMQTLNTLSTPEEKLAALCKKYAELLEEHRNSQKQMKLLQKKQSQLVQEKDHLRGEHSKAVLARSKLESLCRELQRHNRSLKEEGVQRAREEEEKRKEVTSHFQVTLNDIQLQMEQHNERNSKLRQENMELAERLKKLIEQYELREEHIDKVFKHKDLQQQLVDAKLQQAQEMLKEAEERHQREKDFLLKEAVESQRMCELMKQQETHLKQQLALYTEKFEEFQNTLSKSSEVFTTFKQEMEKMTKKIKKLEKETTMYRSRWESSNKALLEMAEEKTVRDKELEGLQVKIQRLEKLCRALQTERNDLNKRVQDLSAGGQGSLTDSGPERRPEGPGAQAPSSPRVTEAPCYPGAPSTEASGQTGPQEPTSARA

SEQ ID NO: 2452 - protein, 546 aa, Homo sapiens; identical to SEQ ID NO: 2451

SEQ ID NO: 2453 - protein, 463 aa, Homo sapiens
MHGSCSFLMLLLPLLLLLVATTGPVGALTDEEKRLMVELHNLYRAQVSPTASDMLHMRWDEELAAFAKAYARQCVWGHNKERGRRGENLFAITDEGMDVPLAMEEWHHEREHYNLSAATCSPGQMCGHYTQVVWAKTERIGCGSHFCEKLQGVEETNIELLVCNYEPPGNVKGKRPYQEGTPCSQCPSGYHCKNSLCEPIGSPEDAQDLPYLVTEAPSFRATEASDSRKMGTPSSLATGIPAFLVTEVSGSLATKALPAVETQAPTSLATKDPPSMATEAPPCVTTEVPSILAAHSLPSLDEEPVTFPKSTHVPIPKSADKVTDKTKVPSRSPENSLDPKMSLTGARELLPHAQEEAEAEAELPPSSEVLASVFPAQDKPGELQATLDHTGHTSSKSLPNFPNTSATANATGGRALALQSSLPGAEGPDKPSVVSGLNSGPGHVWGPLLGLLLLPPLVLAGIF

SEQ ID NO: 2454 - protein, 152 aa, Homo sapiens
MMLPQWLLLLFLLFFFLFLLTRGSLSPTKYNLLELKESCIRNQDCETGCCQRAPDNCESHCAEKGSEGSLCQTQVFFGQYRACPCLRNLTCIYSKNEKWLSIAYGRCQKIGRQKLAKKMFLVLPPSCCLLLLHLLSSLPRALCSPCSPEPPP

SEQ ID NO: 2455 - protein, 121 aa, Homo sapiens
MMLPQWLLLLFLLFFFLFLLTRGSLSPTKYNLLELKESCIRNQDCETGCCQRAPDNCESHCAEKGSEGSLCQTQVFFGQYRACPCLRNLTCIYSKNEKWLSIAYGRCQKIGRQKLAKKMFF

SEQ ID NO: 2456 - protein, 373 aa, Homo sapiens
MRLLAWLIFLANWGGARAEPGKFWHIADLHLDPDYKVSKDPFQVCPSAGSQPVPDAGPWGDYLCDSPWALINSSIYAMKEIEPEPDFILWTGDDTPHVPDEKLGEAAVLEIVERLTKLIREVFPDTKVYAALGNHDFHPKNQFPAGSNNIYNQIAELWKPWLSNESIALFKKGAFYCEKLPGPSGAGRIVVLNTNLYYTSNALTADMADPGQQFQWLEDVLTDASKAGDMVYIVGHVPPGFFEKTQNKAWFREGFNEKYLKVVRKHHRVIAGQFFGHHHTDSFRMLYDDAGVPISAMFITPGVTPWKTTLPGVVNGANNPAIRVFEYDRATLSLKVRSPAEARGGGWEGLKCITTFPHSQLIHLPLTTEPQEG

SEQ ID NO: 2457 - protein, 269 aa, Homo sapiens
MRLLAWLIFLANWGGARAEPEEAQGPCAQEKGKGPPPTSILASLAPGLEAGKFWHIADLHLDPDYKVSKDPFQVCPSAGSQPVPDAGPWGDYLCDSPWALINSSIYAMKEIEPEPDFILWTGDDTPHVPDEKLGEAAVLEIVERLTKLIREVFPDTKVYAALGNHDFHPKNQFPAGSNNIYNQIAELWKPWLSNESIALFKKGAFYCEKLPGPSGAGRIVVLNTNLYYTSNALTADMADPGQQFQWLEDVLTDASKAGDMVYIVGHVPP

SEQ ID NO: 2458 - protein, 455 aa, Homo sapiens
MRLLAWLIFLANWGGARAEPGKFWHIADLHLDPDYKVSKDPFQVCPSAGSQPVPDAGPWGDYLCDSPWALINSSIYAMKEIEPEPDFILWTGDDTPHVPDEKLGEAAVLEIVERLTKLIREVFPDTKVYAALGNHDFHPKNQFPAGSNNIYNQIAELWKPWLSNESIALFKKGAFYCEKLPGPSGAGRIVVLNTNLYYTSNALTADMADPGQQFQWLEDVLTDASKAGDMVYIVGHVPPGFFEKTQNKAWFREGFNEKYLKVVRKHHRVIAGQFFGHHHTDSFRMLYDDAGVPISAMFITPGVTPWKTTLPGVVNGANNPAIRVFEYDRATLSLKDMVTYFMNLSQANAQGTPRWELEYQLTEAYGVPDASAHSMHTVLDRIAGDQSTLQRYYVYNSVSYSAGVCDEACSMQHVCAMRQVDIDAYTTCLYASGTTPVPQLPLLLMALLGLCTLVL

SEQ ID NO: 2459 - protein, 288 aa, Homo sapiens
MALAPPPRGLWQAKDISPIVKAARRDGELLLSAQLDSEERDPGVPRPSPYAPYILVYANDLAISEPNSVAVTLQRYDPFPAGDPEPRAAPNNSADPRVRRAAQATGPLQDNELPGLDERPPRAHAQHFHKHQLWPSPFRALKPRPGRKDRRKKGQEVFMAASQVLDFDEKTMQKARRKQWDEPRVCSRRYLKVDFADIGWNEWIISPKSFDAYYCAGACEFPMPKIVRPSNHATIQSIVRAVGIIPGIPEPCCVPDKMNSLGVLFLDENRNVVLKVYPNMSVDTCACR

SEQ ID NO: 2460 - protein, 541 aa, Homo sapiens
MPFRLLIPLGLLCALLPQHHGAPGPDGSAPDPAHYSFSLTLIDALDTLLILGNVSEFQRVVEVLQDSVDFDIDVNASVFETNIRVVGGLLSAHLLSKKAGVEVEAGWPCSGPLLRMAEEAARKLLPAFQTPTGMPYGTVNLLHGVNPGETPVTCTAGIGTFIVEFATLSSLTGDPVFEDVARVALMRLWESRSDIGLVGNHIDVLTGKWVAQDAGIGAGVDSYFEYLVKGAILLQDKKLMAMFLEYNKAIRNYTRFDDWYLWVQMYKGTVSMPVFQSLEAYWPGLQSLIGDIDNAMRTFLNYYTVWKQFGGLPEFYNIPQGYTVEKREGYPLRPELIESAMYLYRATGDPTLLELGRDAVESIEKISKVECGFATIKDLRDHKLDNRMESFFLAETVKYLYLLFDPTNFIHNNGSTFDAVITPYGECILGAGGYIFNTEAHPIDPAALHCCQRLKEEQWEVEDLMREFYSLKRSRSKFQKNTVSSGPWEPPARPGTLFSPENHDQARERKPAKQKVPLLSCPSQPFTSKLALLGQVFLDSS

SEQ ID NO: 2461 - protein, 578 aa, Homo sapiens
MPFRLLIPLGLLCALLPQHHGAPGPDGSAPDPAHYRERVKAMFYHAYDSYLENAFPFDELRPLTCDGHDTWGSFSLTLIDALDTLLILGNVSEFQRVVEVLQDSVDFDIDVNASVFETNIRVVGGLLSAHLLSKKAGVEVEAGWPCSGPLLRMAEEAARKLLPAFQTPTGMPYGTVNLLHGVNPGETPVTCTAGIGTFIVEFATLSSLTGDPVFEDVARVALMRLWESRSDIGLVGNHIDVLTGKWVAQDAGIGAGVDSYFEYLVKGAILLQDKKLMAMFLEYNKAIRNYTRFDDWYLWVQMYKGTVSMPVFQSLEAYWPGLQSLIGDIDNAMRTFLNYYTVWKQFGGLPEFYNIPQGYTVEKREGYPLRPELIESAMYLYRATGDPTLLELGRDAVESIEKISKVECGFATIKDLRDHKLDNRMESFFLAETVKYLYLLFDPTNFIHNNGSTFDAVITPYGECILGAGGYIFNTEAHPIDPAALHCCQRLKEEQWEVEDLMREFYSLKRSRSKFQKNTVSSGPWEPPARPGTLFSPENHDQARERKPAKQKVPLLSCPSQPFTSKLALLGQVFLDSS

SEQ ID NO: 2462 - protein, 164 aa, Homo sapiens
MRSCYVAQAGLKLPGSSDPPASASQSTRITASGYGPPSSRPSSRVVNGEDAVPYSWPWQVSLQYEKSGSFYHTCGGSLIAPDWVVTAGHCISSSRTYQVVLGEYDRAVKEGPEQVIPINSGDLFVHPLWNRSCVACGNDIALIKLSRSAQLGDAVQLASLPPAG

SEQ ID NO: 2463 - protein, 1220 aa, Homo sapiens
MPGLLNWITGAALPLTASDVTSCVSGYALGLTASLTYGNLEAQPFQGLFVYPLDECTTVIGFEAVIADRVVTVQIKDKAKLESGHFDASHVRSPTVTGNILQDGVSIAPHSCTPGKVTLDEDLERILFVANLGTIAPMENVTIFISTSSELPTLPSGAVRVLLPAVCAPTVPQFCTKSTGTSNQQAQGKDRHCFGAWAPGSWNKLCLATLLNTEVSNPMEYEFNFQLEIRGPCLLAGVESPTHEIRADAAPSARSAKSIIITLANKHTFDRPVEILIHPSEPHMPHVLIEKGDMTLGEFDQHLKGRTDFIKGMKKKSRAERKTEIIRKRLHKDIPHHSVIMLNFCPDLQSVQPCLRKAHGEFIFLIDRSSSMSGISMHRVKDAMLVALKSLMPACLFNIIGFGSTFKSLFPSSQTYSEDSLAMACDDIQRMKADMGGTNILSPLKWVIRQPVHRGHPRLLFVITDGAVNNTGKVLELVRNHAFSTRCYSFGIGPNVCHRLVKGLASVSEGSAELLMEGERLQPKMVKSLKKAMAPVLSDVTVEWIFPETTEVLVSPVSASSLFPGERLVGYGIVCDASLHISNPRSDKRRRYSMLHSQESGSSVFYHSQDDGPGLEGGDCAKNSGAPFILGQAKNARLASGDSTTKHDLNLSQRRRAYSTNQITNHKPLPRATMASDPMPAAKRYPLRKARLQDLTNQTSLDVQRWQIDLQPLLNSGQDLNQGPKLRGPGARRPSLLPQGCQPFLPWGQETQAWSPVRERTSDSRSPGDLEPSHHPSAFETETSSDWDPPAESQERASPSRPATPAPVLGKALVKGLHDSQRLQWEVSFELGTPGPERGGAQDADLWSETFHHLAARAIIRDFEQLAEREGEIEQGSNRRYQVSALHTSKACNIISKYTAFVPVDVSKSRYLPTVVEYPNSAALRMLGSRALAQQWRGTSSGFGRPQTMLGEDSAPGNGKFQALNMEASPTALFSEARSPGREKHGASEGPQRSLATNTLSSMKASENLFGSWLNLNKSRLLTRAAKGFLSKPLIKAVESTSGNQSFDYIPLVSLQLASGAFLLNEAFCEATHIPMEKLKWTSPFTCHRVSLTTRPSESKTPSPQLCTSSPPRHPSCDSFSLEPLAKGKLGLEPRAVVEHTGKLWATVVGLAWLEHSSASYFTEWELVAAKANSWLEQQEVPEGRTQGTLKAAARQLFVLLRHWDENLEFNMLCYNPNYV

SEQ ID NO: 2464 - protein, 1016 aa, Homo sapiens
MPGLLNWITGAALPLTASDVTSCVSGYALGLTASLTYGNLEAQPFQGLFVYPLDECTTVIGFEAVIADRVVTVQIKDKAKLESGHFDASHVRSPTVTGNILQDGVSIAPHSCTPGKVTLDEDLERILFVANLGTIAPMENVTIFISTSSELPTLPSGAVRVLLPAVCAPTVPQFCTKSTGTSNQQAQGKDRHCFGAWAPGSWNKLCLATLLNTEVSNPMEYEFNFQLEIRGPCLLAGVESPTHEIRADAAPSARSAKSIIITLANKHTFDRPVEILIHPSEPHMPHVLIEKGDMTLGEFDQHLKGRTDFIKGMKKKSRAERKTEIIRKRLHKDIPHHSVIMLNFCPDLQSVQPCLRKAHGEFIFLIDRSSSMSGISMHRVKDAMLVALKSLMPACLFNIIGFGSTFKSLFPSSQTYSEDSLAMACDDIQRMKADMGGTNILSPLKWVIRQPVHRGHPRLLFVITDGAVNNTGKVLELVRNHAFSTRCYSFGIGPNVCHRLVKGLASVSEGSAELLMEGERLQPKMVKSLKKAMAPVLSDVTVEWIFPETTEVLVSPVSASSLFPGERLVGYGIVCDASLHISNPRSDKRRRYSMLHSQESGSSVFYHSQDDGPGLEGGDCAKNSGAPFILGQAKNARLASGDSTTKHDLNLSQRRRAYSTNQITNHKPLPRATMASDPMPAAKRYPLRKARLQDLTNQTSLDVQRWQIDLQPLLNSGQDLNQGPKLRGPGARRPSLLPQGCQPFLPWGQETQAWSPVRERTSDSRSPGDLEPSHHPSAFETETSSDWDPPAESQERASPSRPATPAPVLGKALVKGLHDSQRLQWEVSFELGTPGPERGGAQDADLWSETFHHLAARAIIRDFEQLAEREGEIEQGSNRRYQVSALHTSKACNIISKYTAFVPVDVSKSRYLPTVVEYPNSAALRMLGSRALAQQWRGTSSGFGRPQTMLGEDSAPGNGPRKCSQTLMGFKTKTETEHSVRGWKPRGALQNQSVLSTSWSHWPPKPRRTSSTPEPS

SEQ ID NO: 2465 - protein, 1220 aa, Homo sapiens; identical to SEQ ID NO: 2463

SEQ ID NO: 2466 - protein, 1744 aa, Homo sapiens
MRLLWGLIWASSFFTLSLQKPRLLLFSPSVVHLGVPLSVGVQLQDVPRGQVVKGSVFLRNPSRNNVPCSPKVDFTLSSERDFALLSLQVPLKDAKSCGLHQLLRGPEVQLVAHSPWLKDSLSRTTNIQGINLLFSSRRGHLFLQTDQPIYNPGQRVRYRVFALDQKMRPSTDTITVMVENSHGLRVRKKEVYMPSSIFQDDFVIPDISEPGTWKISARFSDGLESNSSTQFEVKKYVLPNFEVKITPGKPYILTVPGHLDEMQLDIQARYIYGKPVQGVAYVRFGLLDEDGKKTFFRGLESQTKLVNGQSHISLSKAEFQDALEKLNMGITDLQGLRLYVAAAIIEYPGGEMEEAELTSWYFVSSPFSLDLSKTKRHLVPGAPFLLQALVREMSGSPASGIPVKVSATVSSPGSVPEVQDIQQNTDGSGQVSIPIIIPQTISELQLSVSAGSPHPAIARLTVAAPPSGGPGFLSIERPDSRPPRVGDTLNLNLRAVGSGATFSHYYYMILSRGQIVFMNREPKRTLTSVSVFVDHHLAPSFYFVAFYYHGDHPVANSLRVDVQAGACEGKLELSVDGAKQYRNGESVKLHLETDSLALVALGALDTALYAAGSKSHKPLNMGKVFEAMNSYDLGCGPGGGDSALQVFQAAGLAFSDGDQWTLSRKRLSCPKEKTTRKKRNVNFQKAINEKLGQYASPTAKRCCQDGVTRLPMMRSCEQRAARVQQPDCREPFLSCCQFAESLRKKSRDKGQAGLQRALEILQEEDLIDEDDIPVRSFFPENWLWRVETVDRFQILTLWLPDSLTTWEIHGLSLSKTKGLCVATPVQLRVFREFHLHLRLPMSVRRFEQLELRPVLYNYLDKNLTVSVHVSPVEGLCLAGGGGLAQQVLVPAGSARPVAFSVVPTAAAAVSLKVVARGSFEFPVGDAVSKVLQIEKEGAIHREELVYELNPLDHRGRTLEIPGNSDPNMIPDGDFNSYVRVTASDPLDTLGSEGALSPGGVASLLRLPRGCGEQTMIYLAPTLAASRYLDKTEQWSTLPPETKDHAVDLIQKGYMRIQQFRKADGSYAAWLSRGSSTWLTAFVLKVLSLAQEQVGGSPEKLQETSNWLLSQQQADGSFQDLSPVIHRSMQGGLVGNDETVALTAFVTIALHHGLAVFQDEGAEPLKQRVEASISKASSFLGEKASAGLLGAHAAAITAYALTLTKAPADLRGVAHNNLMAMAQETGDNLYWGSVTGSQSNAVSPTPAPRNPSDPMPQAPALWIETTAYALLHLLLHEGKAEMADQAAAWLTRQGSFQGGFRSTQDTVIALDALSAYWIASHTTEERGLNVTLSSTGRNGFKSHALQLNNRQIRGLEEELQFSLGSKINVKVGGNSKGTLKVLRTYNVLDMKNTTCQDLQIEVTVKGHVEYTMEANEDYEDYEYDELPAKDDPDAPLQPVTPLQLFEGRRNRRRREAPKVVEEQESRVHYTVCIWRNGKVGLSGMAIADVTLLSGFHALRADLEKLTSLSDRYVSHFETEGPHVLLYFDSVPTSRECVGFEAVQEVPVGLVQPASATLYDYYNPERRCSVFYGAPSKSRLLATLCSAEVCQCAEGKCPRQRRALERGLQDEDGYRMKFACYYPRVEYGFQVKVLREDSRAAFRLFETKITQVLHFTKDVKAAANQMRNFLVRASCRLRLEPGKEYLIMGLDGATYDLEGHPQYLLDSNSWIEEMPSERLCRSTRQRAACAQLNDFLQEYGTQGCQV

SEQ ID NO: 2467 - protein, 413 aa, Homo sapiens
MKGALGSPVAAAGAAMQESFGCVVANRFHQLLDDESDPFDILREAERRRQQQLQRKRRDEAAAAAGAGPRGGRSPAGASGHRAGAGGRRESQKERKSLPAPVAQRPDSPGGGLQAPGQKRTPRRGEQQGWNDSRGPEGMLERAERRSYREYRPYETERQADFTAEKFPDEKPGDRFDRDRPLRGRGGPRGGMRGRGRGGPGNRVFDAFDQRGKREFERYGGNDKIAVRTEDNMGGCGVRTWGSGKDTSDVEPTAPMEEPTVVEESQGTPEEESPAKVPELEVEEETQVQEMTLDEWKNLQEQTRPKPEFNIRKPESTVPSKAVVIHKSKYRDDMVKDDYEDDSHVFRKPANDITSQLEINFGNLPRPGRGARGGTRGGRGRIRRAENYGPRAEVVMQDVAPNPDDPEDFPALS

SEQ ID NO: 2468 - protein, 308 aa, Homo sapiens
MKGALGSPVAAAGAAMQESFGCVVANRFHQLLDDESDPFDILREAERRRQQQLQRKRRDEAAAAAGAGPRGGRSPAGASGHRAGAGGRRESQKERKSLPAPVAQRPDSPGGGLQAPGQKRTPRRGEQQGWNDSRGPEGMLERAERRSYREYRPYETERQADFTAEKFPDEKVPELEVEEETQVQEMTLDEWKNLQEQTRPKPEFNIRKPESTVPSKAVVIHKSKYRDDMVKDDYEDDSHVFRKPANDITSQLEINFGNLPRPGRGARGGTRGGRGRIRRAENYGPRAEVVMQDVAPNPDDPEDFPALS

SEQ ID NO: 2469 - protein, 478 aa, Homo sapiens
MPRRGYSKPGSWGSFWAMLTLVGLVTHAAQRADVGGEAAGTSINHSQAVLQRLQELLRQGNASDVVLRVQAAGTDEVRVFHAHRLLLGLHSELFLELLSNQSEAVLQEPQDCAAVFDKFIRYLYCGELTVLLTQAIPLHRLATKYGVSSLQRGVADYMRAHLAGGAGPAVGWYHYAVGTGDEALRESCLQFLAWNLSAVAASTEWGAVSPELLWQLLQRSDLVLQDELELFHALEAWLGRARPPPAVAERALRAIRYPMIPPAQLFQLQARSAALARHGPAVADLLLQAYQFHAASPLHYAKFFDVNGSAFLPRNYLAPAWGAPWVINNPARDDRSTSFQTQLGPSGHDAGRRVTWNVLFSPRWLPVSLRPVYADAAGTALPAARPEDGRPRLVVTPASSGGDAAGVSFQKTVLVGARQQGRLLVRHAYSFHQSSEEAGDFLAHADLQRRNSEYLVENALHLHLIVKPVYHTLIRTPK

SEQ ID NO: 2470 - protein, 158 aa, Homo sapiens
MCCPGGHYTLILRRGNRFRREKRPAKVTGAQTEVQLAPPLPRGRARRSPWSVPISLSIDRLEFDLLYPAIKGDTIQLYLGAKLLDSQGKVTKWFNNSAASLTMPTLDNIPFSLIVSQDVVKAAVAAVLSPEEFMVLLDSVLPESAHRLKSSIGLINEK

SEQ ID NO: 2471 - protein, 256 aa, Homo sapiens; identical to SEQ ID NO: 2278

SEQ ID NO: 2472 - protein, 256 aa, Homo sapiens; identical to SEQ ID NO: 2278

SEQ ID NO: 2473 - protein, 218 aa, Homo sapiens
MMCPLWRLLIFLGLLALPLAPHKQPWPGLAQAHRDNKSTLARIIAQGLIKHNAESRIQNIHFGDRLNASAQVAPGLVGWLISGRKHQQQQESRSFDNNIVKMCAHMSIVVEFWLEKDEFGRRDLVIGKCDAEPSSVHVAILTEAIPPKMNQFLYNLKENLQKVLPHMVESQVCPLIGEILGQLDVKLLKSLIEQEAAHEPTHHETSQPSACQAGESPS

SEQ ID NO: 2474 - protein, 254 aa, Homo sapiens
MMCPLWRLLIFLGLLALPLAPHKQPWPGLAQAHRDNKSTLARIIAQGLIKHNAESRIQNIHFGDRLNASAQVAPGLVGWLISGRKHQQQQESSINITNIQLDCGGIQISFHKEWFSANISLEFDLELRPSFDNNIVKMCAHMSIVVEFWLEKDEFGRRDLVIGKCDAEPSSVHVAILTEAIPPKMNQFLYNLKENLQKVLPHMVESQVCPLIGEILGQLDVKLLKSLIEQEAAHEPTHHETSQPSACQAGESPS

SEQ ID NO: 2475 - protein, 544 aa, Homo sapiens
MKISMINYKSLLALLFILASWIIFTVFQNSTKVWSALNLSISLHYWNNSTKSLFPKTPLISLKPLTETELRIKEIIEKLDQQIPPRPFTHVNTTTSATHSTATILNPRDTYCRGDQLHILLEVRDHLGRRKQYGGDFLRARMSSPALMAGASGKVTDFNNGTYLVSFTLFWEGQVSLSLLLIHPSEGVSALWSARNQGYDRVIFTGQFVNGTSQVHSECGLILNTNAELCQYLDNRDQEGFYCVRPQHMPCAALTHMYSKNKKVSYLSKQEKSLFERSNVGVEIMEKFNTISVSKCNKETVAMKEKCKFGMTSTIPSGHVWRNTWNPVSCSLATVKMKECLRGKLIYLMGDSTIRQWMEYFKASINTLKSVDLHESGKLQHQLAVDLDRNINIQWQKYCYPLIGSMTYSVKEMEYLTRAIDRTGGEKNTVIVISLGQHFRPFPIDVFIRRALNVHKAIQHLLLRSPDTMVIIKTENIREMYNDAERFSDFHGYIQYLIIKDIFQDLSVSIIDAWDITIAYGTNNVHPPQHVVGNQINILLNYIC

SEQ ID NO: 2476 - protein, 614 aa, Homo sapiens
MWMAWCVAALSVVAVCGTSHETNTVLRVTKDVLSNAISGMLQQSDALHSALREVPLGVGDIPYNDFHVRGPPPVYTNGKKLDGIYQYGHIETNDNTAQLGGKYRYGEILESEGSIRDLRNSGYRSAENAYGGHRGLGRYRAAPVGRLHRRELQPGEIPPGVATGAVGPGGLLGTGGMLAADGILAGQGGLLGGGGLLGDGGLLGGGGVLGVLGEGGILSTVQGITGLRIVELTLPRVSVRLLPGVGVYLSLYTRVAINGKSLIGFLDIAVEVNITAKVRLTMDRTGYPRLVIERCDTLLGGIKVKLLRGLLPNLVDNLVNRVLADVLPDLLCPIVDVVLGLVNDQLGLVDSLIPLGILGSVQYTFSSLPLVTGEFLELDLNTLVGEAGGGLIDYPLGWPAVSPKPMPELPPMGDNTKSQLAMSANFLGSVLTLLQKQHALDLDITNGMFEELPPLTTATLGALIPKVFQQYPESCPLIIRIQVLNPPSVMLQKDKALVKVLATAEVMVSQPKDLETTICLIDVDTEFLASFSTEGDKLMIDAKLEKTSLNLRTSNVGNFDIGLMEVLVEKIFDLAFMPAMNAVLGSGVPLPKILNIDFSNADIDVLEDLLVLSA

SEQ ID NO: 2477 - protein, 476 aa, Homo sapiens
MQPVMLALWSLLLLWGLATPCQELLETVGTLARIDKDELGKAIQNSLVGEPILQNVLGSVTAVNRGLLGSGGLLGGGGLLGHGGVFGVVEELSGLKIEELTLPKVLLKLLPGFGVQLSLHTKVGMHCSGPLGGLLQLAAEVNVTSRVALAVSSRGTPILILKRCSTLLGHISLFSGLLPTPLFGVVEQMLFKVLPGLLCPVVDSVLGVVNELLGAVLGLVSLGALGSVEFSLATLPLISNQYIELDINPIVKSVAGDIIDFPKSRAPAKVPPKKDHTSQVMVPLYLFNTTFGLLQTNGALDMDITPELVPSDVPLTTTDLAALLPEALGKLPLHQQLLLFLRVREAPTVTLHNKKALVSLPANIHVLFYVPKGTPESLFELNSVMTVRAQLAPSATKLHISLSLERLSVKVASSFTHAFDGSRLEEWLSHVVGAVYAPKLNVALDVGIPLPKVLNINFSNSVLEIVENAVVLTVAS

SEQ ID NO: 2478 - protein, 194 aa, Homo sapiens
MQDAPLSCLSPTKWSSVSSADSTEKSASGAGTRNLPFQFCLRQALRMKAAGILTLIGCLVTGAESKIYTRCKLAKIFSRAGLDNYWGFSLGNWICMAYYESGYNTTAQTVLDDGSIDYGIFQINSFAWCRRGKLKENNHCHVACSALITDDLTDAIICARKIVKETQGMNYWQGWKKHCEGRDLSEWKKGCEVS

SEQ ID NO: 2479 - protein, 421 aa, Homo sapiens
MGFLSPIYVIFFFFGVKVHCQYETYQWDEDYDQEPDDDYQTGFPFRQNVDYGVPFHQYTLGCVSECFCPTNFPSSMYCDNRKLKTIPNIPMHIQQLYLQFNEIEAVTANSFINATHLKEINLSHNKIKSQKIDYGVFAKLPNLLQLHLEHNNLEEFPFPLPKSLERLLLGYNEISKLQTNAMDGLVNLTMLDLCYNYLHDSLLKDKIFAKMEKLMQLNLCSNRLESMPPGLPSSLMYLSLENNSISSIPEKYFDKLPKLHTLRMSHNKLQDIPYNIFNLPNIVELSVGHNKLKQAFYIPRNLEHLYLQNNEIEKMNLTVMCPSIDPLHYHHLTYIRVDQNKLKEPISSYIFFCFPHIHTIYYGEQRSTNGQTIQLKTQVFRRFPDDDDESEDHDDPDNAHESPEQEGAEGHFDLHYYENQE

SEQ ID NO: 2480 - protein, 83 aa, Homo sapiens
MLCCCPLADALLIFLETGSCFQPGQQSETLSQKQNKTNNKKWAGGAGCRPFRLWWVGRSRGAGVQLYSTKKGWILRGKGGTEA

SEQ ID NO: 2481 - protein, 852 aa, Homo sapiens
MLPTEVPQSHPGPSALLLLQLLLPPTSAFFPNIWSLLAAPGSITHQDLTEEAALNVTLQLFLEQPPPGRPPLRLEDFLGRTLLADDLFAAYFGPGSSRRFRAALGEVSRANAAQDFLPTSRNDPDLHFDAERLGQGRARLVGALRETVVAARALDHTLARQRLGAALHALQDFYSHSNWVELGEQQPHPHLLWPRQELQNLAQVADPTCSDCEELSCPRNWLGFTLLTSGYFGTHPPKPPGKCSHGGHFDRSSSQPPRGGINKDSTSPGFSPHHMLHLQAAKLALLASIQAFSLLRSRLGDRDFSRLLDITPASSLSFVLDTTGSMGEEINAAKIQARHLVEQRRGSPMEPVHYVLVPFHDPGFGPVFTTSDPDSFWQQLNEIHALGGGDEPEMCLSALQLALLHTPPLSDIFVFTDASPKDAFLTNQVESLTQERRCRVTFLVTEDTSRVQGRARREILSPLRFEPYKAVALASGGEVIFTKDQHIRDVAAIVGESMAALVTLPLDPPVVVPGQPLVFSVDGLLQKITVRIHGDISSFWIKNPAGVSQGQEEGGGPLGHTRRFGQFWMVTMDDPPQTGTWEIQVTAEDTPGVRVQAQTSLDFLFHFGIPMEDGPHPGLYPLTQPVAGLQTQLLVEVTGLGSRANPGDPQPHFSHVILRGVPEGAELGQVPLEPVGPPERGLLAASLSPTLLSTPRPFSLELIGQDAAGRRLHRAAPQPSTVVPVLLELSGPSGFLAPGSKVPLSLRIASFSGPQDLDLRTFVNPSFSLTSNLSRAHLELNESAWGRLWLEVPDSAAPDSVVMVTVTAGGREANPVPPTHAFLRLLVSAPAPQVRNHYFPSQGPAHHPYRLI

SEQ ID NO: 2482 - protein, 891 aa, Homo sapiens
MLPTEVPQSHPGPSALLLLQLLLPPTSAFFPNIWSLLAAPGSITHQDLTEEAALNVTLQLFLEQPPPGRPPLRLEDFLGRTLLADDLFAAYFGPGSSRRFRAALGEVSRANAAQDFLPTSRNDPDLHFDAERLGQGRARLVGALRETVVAARALDHTLARQRLGAALHALQDFYSHSNWVELGEQQPHPHLLWPRQELQNLAQVADPTCSDCEELSCPRNWLGFTLLTSGYFGTHPPKPPGKCSHGGHFDRSSSQPPRGGINKDSTSPGFSPHHMLHLQAAKLALLASIQAFSLLRSRLGDRDFSRLLDITPASSLSFVLDTTGSMGEEINAAKIQARHLVEQRRGSPMEPVHYVLVPFHDPGFGPVFTTSDPDSFWQQLNEIHALGGGDEPEMCLSALQLALLHTPPLSDIFVFTDASPKDAFLTNQVESLTQERRCRVTFLVTEDTSRVQGRARREILSPLRFEPYKAVALASGGEVIFTKDQHIRDVAAIVGESMAALVTLPLDPPVVVPGQPLVFSVDGLLQKITVRIHGDISSFWIKNPAGVSQGQEEGGGPLGHTRRFGQFWMVTMDDPPQTGTWEIQVTAEDTPGVRVQAQTSLDFLFHFGIPMEDGPHPGLYPLTQPVAGLQTQLLVEVTGLGSRANPGDPQPHFSHVILRGVPEGAELGQVPLEPVGPPERGLLAASLSPTLLSTPRPFSLELIGQDAAGRRLHRAAPQPSTVVPVLLELSGPSGFLAPGSKVPLSLRIASFSGPQDLDLRTFVNPSFSLTSNLSRAHLELNESAWGRLWLEVPDSAAPDSVVMVTVTAGGREANPVPPTHAFLRLLVSAPAPQDRHTTPTGSSDPILTTATPAFSPFTLVTQGRAGAGLAAGSPWWGTVGGVLLLLGLASW

SEQ ID NO: 2483 - protein, 183 aa, Homo sapiens
MVRIWTTIMIVLILLLRIGPNKPSLSGRQAPAQAQTSDLVPSLFPLGLWAPGFCTWSSPDEDKRPRKPVPGTGNRDSGTRRRLQDATEQDPRPGNDVASAETAGPPSPSGIRAQDRAPRHRRAPPARMPVAPAPSADGEPLQEQGGGLFHRTRSVYNGLELNTWMKVERLFVEKFHQSFSLDN

SEQ ID NO: 2484 - protein, 147 aa, Homo sapiens
MAGPAGSQSLGPLCFHSSPQALYTVLLIVLVMMSLVFGKFVPVNWEPPQPLPFPKYLRCYRCLLETKELGCLLGSDICLTPAGSSCITLHKKNSSGSDVMVSDCRSKEQMSDCSNTRTSPVSGFWIFSQYCFLDFCNDPQNRGLYTP

SEQ ID NO: 2485 - protein, 148 aa, Homo sapiens
MQTFPVAGALDPAILDTSSPQALYTVLLIVLVMMSLVFGKFVPVNWEPPQPLPFPKYLRCYRCLLETKELGCLLGSDICLTPAGSSCITLHKKNSSGSDVMVSDCRSKEQMSDCSNTRTSPVSGFWIFSQYCFLDFCNDPQNRGLYTP

SEQ ID NO: 2486 - protein, 201 aa, Homo sapiens
MKVHMLVGVLVMVGFTVGKVPVPDIRTCHFCLVEDPSVGCISGSEKCTISSSSLCMVITIYYDVKVRFIVRGCGQYISYRCQEKRNTYFAEYWYQAQCCQYDYCNSWSSPQLQSSLPEPHDRPLALPLSDSQIQWFYQALNLSLPLPNFHAGTEPDGLDPMVTLSLNLGLSFAELRRMYLFLNSSGLLVLPQAGLLTPHPS

SEQ ID NO: 2487 - protein, 114 aa, Homo sapiens
MLGGEEARPNSWPWQVSLQYSSNGQWYHTCGGSLIANSWVLTAAHCIRQIIKAHKVLQRCSLILFFVRDLCSSQLELTGVSAGSSGIYRVMLGQHNLYVAESGSLAVSVSKIVV

SEQ ID NO: 2488 - protein, 269 aa, Homo sapiens
MIRTLLLSTLVAGALSCGVSTYAPDMSRMLGGEEARPNSWPWQVSLQYSSNGQWYHTCGGSLIANSWVLTAAHCISSSGIYRVMLGQHNLYVAESGSLAVSVSKIVVHKDWNSDQVSKGNDIALLKLANPVSLTDKIQLACLPPAGTILPNNYPCYVTGWGRLQTNGALPDDLKQGQLLVVDYATCSSSGWWGSTVKTNMICAGGDGVICTCNGDSGGPLNCQASDGRWEVHGIGSLTSVLGCNYYYKPSIFTRVSNYNDWINSVIANN

SEQ ID NO: 2489 - protein, 188 aa, Homo sapiens
MFHQIWAALLYFYGIILNSIYQCPEHSQLTTLGVDGKEFPEVHLGQWYFIAGAAPTKEELATFDPVDNIVFNMAAGSAPMQLHLRATIRMKDGLCVPRKWIYHLTEGSTDLRTEGRPDMKTELFSSSCPGGIMLNETGQGYQRFLLYNRSPHPPEKCVEEFKSLTSCLDSKAFLLTPRNQEACELSNN

SEQ ID NO: 2490 - protein, 129 aa, Homo sapiens
MAAGSAPMQLHLRATIRMKDGLCVPRKWIYHLTEGSTDLRTEGRPDMKTELFSSSCPGGIMLNETGQGYQRFLLYNRSPHPPEKCVEEFKSLTSCLDSKAFLLTPRNQGKGLKSHKTGLGLTKSSGVTG

SEQ ID NO: 2491 - protein, 116 aa, Homo sapiens
MAAGSAPMQLHLRATIRMKDGLCVPRKWIYHLTEGSTDLRTEGRPDMKTELFSSSCPGGIMLNETGQGYQRFLLYNRSPHPPEKCVEEFKSLTSCLDSKAFLLTPRNQEACELSNN

SEQ ID NO: 2492 - protein, 144 aa, Homo sapiens
MIRTLLLSTLVAGALSCGDPTYPPYVTRVVGGEEARPNSWPWQVSLQYSSNGKWYHTCGGSLIANSWVLTAAHCISQSMVQCAHKVLQRCSLILFFVRDLCSSQLELTGVSAGSSRTYRVGLGRHNLYVAESGSLAVSVSKIVV

SEQ ID NO: 2493 - protein, 67 aa, Homo sapiens
MKLLLLTLTVLLLLSQLTPGGTQRCWNLYGKCRYRCSKKERVYVYCINNKMCCVKPKYQPKERWWPF

SEQ ID NO: 2494 - protein, 76 aa, Homo sapiens
MKLLLLLLTVTLLLAQVTPVMKCWGKSGRCRTTCKESEVYYILCKTEAKCCVDPKYVPVKPKLTDTNTSLESTSAV

SEQ ID NO: 2495 - protein, 88 aa, Homo sapiens
MKLLYLFLAILLAIEEPVISVECWMDGHCRLLCKDGEDSIIRCRNRKRCCVPSRYLTIQPVTIHGILGWTTPQMSTTAPKMKTNITNR

SEQ ID NO: 2496 - protein, 84 aa, Homo sapiens
MKLLYLFLAILLAIEEPVISGKRHILRCMGNSGICRASCKKNEQPYLYCRNCQSCCLQSYMRISISGKEENTDWSYEKQWPRLP

SEQ ID NO: 2497 - protein, 876 aa, Homo sapiens; identical to SEQ ID NO: 1912

SEQ ID NO: 2498 - protein, 913 aa, Homo sapiens; identical to SEQ ID NO: 2128

SEQ ID NO: 2499 - protein, 876 aa, Homo sapiens; identical to SEQ ID NO: 1912

SEQ ID NO: 2500 - protein, 876 aa, Homo sapiens; identical to SEQ ID NO: 1912

SEQ ID NO: 2501 - protein, 919 aa, Homo sapiens
MGPEALSSLLLLLLVASGDADMKGHFDPAKCRYALGMQDRTIPDSDISASSSWSDSTAARHSRLESSDGDGAWCPAGSVFPKEEEYLQVDLQRLHLVALVGTQGRHAGGLGKEFSRSYRLRYSRDGRRWMGWKDRWGQEVISGNEDPEGVVLKDLGPPMVARLVRFYPRADRVMSVCLRVELYGCLWRDGLLSYTAPVGQTMYLSEAVYLNDSTYDGHTVGGLQYGGLGQLADGVVGLDDFRKSQELRVWPGYDYVGWSNHSFSSGYVEMEFEFDRLRAFQAMQVHCNNMHTLGARLPGGVECRFRRGPAMAWEGEPMRHNLGGNLGDPRARAVSVPLGGRVARFLQCRFLFAGPWLLFSEISFISDVVNNSSPALGGTFPPAPWWPPGPPPTNFSSLELEPRGQQPVAKAEGSPTAILIGCLVAIILLLLLIIALMLWRLHWRRLLSKAERRVLEEELTVHLSVPGDTILINNRPGPREPPPYQEPRPRGNPPHSAPCVPNGSALLLSNPAYRLLLATYARPPRGPGPPTPAWAKPTNTQAYSGDYMEPEKPGAPLLPPPPQNSVPHYAEADIVTLQGVTGGNTYAVPALPPGAVGDGPPRVDFPRSRLRFKEKLGEGQFGEVHLCEVDSPQDLVSLDFPLNVRKGHPLLVAVKILRPDATKNASFSLFSRNDFLKEVKIMSRLKDPNIIRLLGVCVQDDPLCMITDYMENGDLNQFLSAHQLEDKAAEGAPGDGQAAQGPTISYPMLLHVAAQIASGMRYLATLNFVHRDLATRNCLVGENFTIKIADFGMSRNLYAGDYYRVQGRAVLPIRWMAWECILMGKFTTASDVWAFGVTLWEVLMLCRAQPFGQLTDEQVIENAGEFFRDQGRQVYLSRPPACPQGLYELMLRCWSRESEQRPPFSQLHRFLAEDALNTV

SEQ ID NO: 2502 - protein, 346 aa, Homo sapiens
MLKKPLSAVTWLCIFIVAFVSHPAWLQKLSKHKTPAQPQLKAANCCEEVKELKAQVANLSSLLSELNKKQERDWVSVVMQVMELESNSKRMESRLTDAESKYSEMNNQIDIMQLQAAQTVTQTSADAIYDCSSLYQKNYRISGVYKLPPDDFLGSPELEVFCDMETSGGGWTIIQRRKSGLVSFYRDWKQYKQGFGSIRGDFWLGNEHIHRLSRQPTRLRVEMEDWEGNLRYAEYSHFVLGNELNSYRLFLGNYTGNVGNDALQYHNNTAFSTKDKDNDNCLDKCAQLRKGGYWYNCCTDSNLNGVYYRLGEHNKHLDGITWYGWHGSTYSLKRVEMKIRPEDFKP

SEQ ID NO: 2503 - protein, 351 aa, Homo sapiens
MKGRAVSFDPLACQGLNASPGSLTSPLRRIRSLTGREVLTPFPGLGTAAAPAQGGAHLKPHSLVLPITALPPPPLALRGRQATSKLPPFLSSPFPPSLCPWVPDPGFKETAFLYAVSSAALTHTLARACSAGRMERCTCDDSPGLESRQAWQWGVCGDNLKYSTKFLSNFLGSKRGNKDLRARADAHNTHVGIKAVKSGLRTTCKCHGVSGSCAVRTCWKQLSPFRETGQVLKLRYDSAVKVSSATNEALGRLELWAPARQGSLTKGLAPRSGDLVYMEDSPSFCRPSKYSPGTAGRVCSREASCSSLCCGRGYDTQSRLVAFSCHCQVQWCCYVECQQCVQEELVYTCKH

SEQ ID NO: 2504 - protein, 153 aa, Homo sapiens
MKHLRPQFPLILAIYCFCMLQIPSSGFPQPLADPSDGLDIVQLEQLAYCLSQWAPLSRQPKDNQDIYKRFLFHYSRTQEATHPVKTGFPPVHPLMHLAAKLANRRMKRILQRGSGTAAVDFTKKDHTATWGRPFFLFRPRNGRNIEDEAQIQW

SEQ ID NO: 2505 - protein, 254 aa, Homo sapiens
MAAASAGATRLLLLLLMAVAAPSRARGSGCRAGTGARGAGAEGREGEACGTVGLLLEHSFEIDDSANFRKRGSLLWNQQDGTLSLSQRQLSEEERGRLRDVAALNGLYRVRIPRRPGALDGLEAGGYVSSFVPACSLVESHLSDQLTLHVDVAGNVVGVSVVTHPGGCRGHEVEDVDLELFNTSVQLQPPTTAPGPETAAFIERLEMEQAQKAKNPQEQKSFFAKYWHIILGGAVLLTALRPAAPGPAPPPQEA

SEQ ID NO: 2506 - protein, 269 aa, Homo sapiens
MAAASAGATRLLLLLLMAVAAPSRARGSGCRAGTGARGAGAEGREGEACGTVGLLLEHSFEIDDSANFRKRGSLLWNQQDGTLSLSQRQLSEEERGRLRDVAALNGLYRVRIPRRPGALDGLEAGGYVSSFVPACSLVESHLSDQLTLHVDVAGNVVGVSVVTHPGGCRGHEVEDVDLELFNTSVQLQPPTTAPGPETAAFIERLEMEQAQKAKNPQEQKSFFAKYWMYIIPVVLFLMMSGAPDTGGQGGGGGGGGGGGSGRCCVPPSL

SEQ ID NO: 2507 - protein, 159 aa, Homo sapiens
MSSPQRRKAMPWALSLLLMGFQLLVTYAWCSEEEMGGNNKIVQDPMFLATVEFALNTFNVQSKEEHAYRLLRVLSSWREDSMDRKWRGKMVFSMNLQLRQTVCRKFEDDIDNCPFQESLELNNVRQGISFPQVHSCGCCMGCGVGTGAADKAIPRDKGK

SEQ ID NO: 2508 - protein, 578 aa, Homo sapiens
MLLLLLLAPLFLRPPGAGGAQTPNATSEGCQIIHPPWEGGIRYRGLTRDQVKAINFLPVDYEIEYVCRGEREVVGPKVRKCLANGSWTDMDTPSRCVRICSKSYLTLENGKVFLTGGDLPALDGARVDFRCDPDFHLVGSSRSICSQGQWSTPKPHCQVNRTPHSERRAVYIGALFPMSGGWPGGQACQPAVEMALEDVNSRRDILPDYELKLIHHDSKCDPGQATKYLYELLYNDPIKIILMPGCSSVSTLVAEAARMWNLIVLSYGSSSPALSNRQRFPTFFRTHPSATLHNPTRVKLFEKWGWKKIATIQQTTEVFTSTLDDLEERVKEAGIEITFRQSFFSDPAVPVKNLKRQDARIIVGLFYETEARKVFCEVYKERLFGKKYVWFLIGWYADNWFKIYDPSINCTVDEMTEAVEGHITTEIVMLNPANTRSISNMTSQEFVEKLTKRLKRHPEETGGFQEAPLAYDAIWALALALNKTSGGGGRSGVRLEDFNYNNQTITDQIYRAMNSSSFEGVSGHVVFDASGSRMAWTLIEQLQGGSYKKIGYYDSTKDDLSWSKTDKWIVISRTHSPT

SEQ ID NO: 2509 - protein, 147 aa, Homo sapiens
MLGLPWKGGLSWALLLLLLGSQILLIYAWHFHEQRDCDEHNVMARYLPATVEFAVHTFNQQSKDYYAYRLGHILNSWKEQVESKTVFSMELLLGRTRCGKFEDDIDNCHFQESTELNNTFTCFFTISTRPWMTQFSLLNKTCLEGFH

SEQ ID NO: 2510 - protein, 147 aa, Homo sapiens
MWSLPPSRALSCAPLLLLFSFQFLVTYAWRFQEEEEWNDQKQIAVYLPPTLEFAVYTFNKQSKDWYAYKLVPVLASWKEQGYDKMTFSMNLQLGRTMCGKFEDDIDNCPFQESPELNNTCTCFFTIGIEPWRTRFDLWNKTCSGGHS

SEQ ID NO: 2511 - protein, 844 aa, Homo sapiens; identical to SEQ ID NO: 2289

SEQ ID NO: 2512 - protein, 899 aa, Homo sapiens
MLLLLLLAPLFLRPPGAGGAQTPNATSEGCQIIHPPWEGGIRYRGLTRDQVKAINFLPVDYEIEYVCRGEREVVGPKVRKCLANGSWTDMDTPSRCVNRTPHSERRAVYIGALFPMSGGWPGGQACQPAVEMALEDVNSRRDILPDYELKLIHHDSKCDPGQATKYLYELLYNDPIKIILMPGCSSVSTLVAEAARMWNLIVLSYGSSSPALSNRQRFPTFFRTHPSATLHNPTRVKLFEKWGWKKIATIQQTTEVFTSTLDDLEERVKEAGIEITFRQSFFSDPAVPVKNLKRQDARIIVGLFYETEARKVFCEVYKERLFGKKYVWFLIGWYADNWFKIYDPSINCTVDEMTEAVEGHITTEIVMLNPANTRSISNMTSQEFVEKLTKRLKRHPEETGGFQEAPLAYDAIWALALALNKTSGGGGRSGVRLEDFNYNNQTITDQIYRAMNSSSFEGVSGHVVFDASGSRMAWTLIEQLQGGSYKKIGYYDSTKDDLSWSKTDKWIGGSPPADQTLVIKTFRFLSQKLFISVSVLSSLGIVLAVVCLSFNIYNSHVRYIQNSQPNLNNLTAVGCSLALAAVFPLGLDGYHIGRNQFPFVCQARLWLLGLGFSLGYGSMFTKIWWVHTVFTKKEEKKEWRKTLEPWKLYATVGLLVGMDVLTLAIWQIVDPLHRTIETFAKEEPKEDIDVSILPQLEHCSSRKMNTWLGIFYGYKGLLLLLGIFLAYETKSVSTEKINDHRAVGMAIYNVAVLCLITAPVTMILSSQQDAAFAFASLAIVFSSYITLVVLFVPKMRRLITRGEWQSEAQDTMKTGSSTNNNEEEKSRLLEKENRELEKIIAEKEERVSELRHQLQSRQQLRSRRHPPTPPEPSGGLPRGPPEPPDRLSCDGSRVHLLYK

SEQ ID NO: 2513 - protein, 961 aa, Homo sapiens
MLLLLLLAPLFLRPPGAGGAQTPNATSEGCQIIHPPWEGGIRYRGLTRDQVKAINFLPVDYEIEYVCRGEREVVGPKVRKCLANGSWTDMDTPSRCVRICSKSYLTLENGKVFLTGGDLPALDGARVDFRCDPDFHLVGSSRSICSQGQWSTPKPHCQVNRTPHSERRAVYIGALFPMSGGWPGGQACQPAVEMALEDVNSRRDILPDYELKLIHHDSKCDPGQATKYLYELLYNDPIKIILMPGCSSVSTLVAEAARMWNLIVLSYGSSSPALSNRQRFPTFFRTHPSATLHNPTRVKLFEKWGWKKIATIQQTTEVFTSTLDDLEERVKEAGIEITFRQSFFSDPAVPVKNLKRQDARIIVGLFYETEARKVFCEVYKERLFGKKYVWFLIGWYADNWFKIYDPSINCTVDEMTEAVEGHITTEIVMLNPANTRSISNMTSQEFVEKLTKRLKRHPEETGGFQEAPLAYDAIWALALALNKTSGGGGRSGVRLEDFNYNNQTITDQIYRAMNSSSFEGVSGHVVFDASGSRMAWTLIEQLQGGSYKKIGYYDSTKDDLSWSKTDKWIGGSPPADQTLVIKTFRFLSQKLFISVSVLSSLGIVLAVVCLSFNIYNSHVRYIQNSQPNLNNLTAVGCSLALAAVFPLGLDGYHIGRNQFPFVCQARLWLLGLGFSLGYGSMFTKIWWVHTVFTKKEEKKEWRKTLEPWKLYATVGLLVGMDVLTLAIWQIVDPLHRTIETFAKEEPKEDIDVSILPQLEHCSSRKMNTWLGIFYGYKGLLLLLGIFLAYETKSVSTEKINDHRAVGMAIYNVAVLCLITAPVTMILSSQQDAAFAFASLAIVFSSYITLVVLFVPKMRRLITRGEWQSEAQDTMKTGSSTNNNEEEKSRLLEKENRELEKIIAEKEERVSELRHQLQSRQQLRSRRHPPTPPEPSGGLPRGPPEPPDRLSCDGSRVHLLYK

SEQ ID NO: 2514 - protein, 293 aa, Homo sapiens
MNNLSFSELCCLFCCPPCPGKIASKLAFLPPDPTYTLMCDESGSRWTLHLSERADWQYSSREKDAIECFMTRTSKGNRIACMFVRCSPNAKYTLLFSHGNAVDLGQMSSFYIGLGSRINCNIFSYDYSGYGASSGKPTEKNLYADIEAAWLALRTRYGIRPENVIIYGQSIGTVPSVDLAARYESAAVILHSPLTSGMRVAFPDTKKTYCFDAFPNIDKISKITSPVLIIHGTEDEVIDFSHGLALFERCQRPVEPLWVEGAGHNDVELYGQYLERLKQFVSQELVQKHKEGK

SEQ ID NO: 2515 - protein, 384 aa, Homo sapiens
MWYVSTRGVAPRVNFEGALFSGYAPDGGLFMPEELPQLDRGTLCQWSTLSYPGLVKELCALFIGSELLPKDELNDLIDRAFSRFRHREVVHLSRLRNGLNVLELWHGVTYAFKDLSLSCTTQFLQYFLEKREKHVTVVVGTSGDTGSAAIESVQGAKNMDIIVLLPKGHCTKIQELQMTTVLKQNVHVFGVEGNSDELDEPIKTVFADVAFVKKHNLMSLNSINWSRVLVQMAHHFFAYFQCTPSLDTHPLPLVEVVVPTGAAGNLAAGYIAQKIGLPIRLVVAVNRNDIIHRTVQQGDFSLSEAVKSTLASAMDIQVPYNMERVFWLLSGSDSQVTRALMEQFERTQSVNLPKELHSKHSPVLPRPCLCSQVPGSCPGCWPDP

SEQ ID NO: 2516 - protein, 962 aa, Homo sapiens
MLRRPAPALAPAARLLLAGLLCGGGVWAARVNKHKPWLEPTYHGIVTENDNTVLLDPPLIALDKDAPLRFAESFEVTVTKEGEICGFKIHGQNVPFDAVVVDKSTGEGVIRSKEKLDCELQKDYSFTIQAYDCGKGPDGTNVKKSHKATVHIQVNDVNEYAPVFKEKSYKATVIEGKQYDSILRVEAVDADCSPQFSQICSYEIITPDVPFTVDKDGYIKNTEKLNYGKEHQYKLTVTAYDCGKKRATEDVLVKISIKPTCTPGWQGWNNRIEYEPGTGALAVFPNIHLETCDEPVASVQATVELETSHIGKGCDRDTYSEKSLHRLCGAAAGTAELLPSPSGSLNWTMGLPTDNGHDSDQVFEFNGTQAVRIPDGVVSVSPKEPFTISVWMRHGPFGRKKETILCSSDKTDMNRHHYSLYVHGCRLIFLFRQDPSEEKKYRPAEFHWKLNQVCDEEWHHYVLNVEFPSVTLYVDGTSHEPFSVTEDYPLHPSKIETQLVVGACWQGGDLHMTQFFRGNLAGLTLRSGKLADKKVIDCLYTCKEGLDLQVLEDSGRGVQIQAHPSQLVLTLEGEDLGELDKAMQHISYLNSRQFPTPGIRRLKITSTIKCFNEATCISVPPVDGYVMVLQPEEPKISLSGVHHFARAASEFESSEGVFLFPELRIISTITREVEPEGDGAEDPTVQESLVSEEIVHDLDTCEVTVEGEELNHEQESLEVDMARLQQKGIEVSSSELGMTFTGVDTMASYEEVLHLLRYRNWHARSLLDRKFKLICSELNGRYISNEFKVEVNVIHTANPMEHANHMAAQPQFVHPEHRSFVDLSGHNLANPHPFAVVPSTATVVIVVCVSFLVFMIILGVFRIRAAHRRTMRDQDTGKENEMDWDDSALTITVNPMETYEDQHSSEEEEEEEEEEESEDGEEEDDITSAESESSEEEEGEQGDPQNATRQQQLEWDDSTLSY

SEQ ID NO: 2517 - protein, 981 aa, Homo sapiens
MLRRPAPALAPAARLLLAGLLCGGGVWAARVNKHKPWLEPTYHGIVTENDNTVLLDPPLIALDKDAPLRFAESFEVTVTKEGEICGFKIHGQNVPFDAVVVDKSTGEGVIRSKEKLDCELQKDYSFTIQAYDCGKGPDGTNVKKSHKATVHIQVNDVNEYAPVFKEKSYKATVIEGKQYDSILRVEAVDADCSPQFSQICSYEIITPDVPFTVDKDGYIKNTEKLNYGKEHQYKLTVTAYDCGKKRATEDVLVKISIKPTCTPGWQGWNNRIEYEPGTGALAVFPNIHLETCDEPVASVQATVELETSHIGKGCDRDTYSEKSLHRLCGAAAGTAELLPSPSGSLNWTMGLPTDNGHDSDQVFEFNGTQAVRIPDGVVSVSPKEPFTISVWMRHGPFGRKKETILCSSDKTDMNRHHYSLYVHGCRLIFLFRQDPSEEKKYRPAEFHWKLNQVCDEEWHHYVLNVEFPSVTLYVDGTSHEPFSVTEDYPLHPSKIETQLVVGACWQEFSGVENDNETEPVTVASAGGDLHMTQFFRGNLAGLTLRSGKLADKKVIDCLYTCKEGLDLQVLEDSGRGVQIQAHPSQLVLTLEGEDLGELDKAMQHISYLNSRQFPTPGIRRLKITSTIKCFNEATCISVPPVDGYVMVLQPEEPKISLSGVHHFARAASEFESSEGVFLFPELRIISTITREVEPEGDGAEDPTVQESLVSEEIVHDLDTCEVTVEGEELNHEQESLEVDMARLQQKGIEVSSSELGMTFTGVDTMASYEEVLHLLRYRNWHARSLLDRKFKLICSELNGRYISNEFKVEVNVIHTANPMEHANHMAAQPQFVHPEHRSFVDLSGHNLANPHPFAVVPSTATVVIVVCVSFLVFMIILGVFRIRAAHRRTMRDQDTGKENEMDWDDSALTITVNPMETYEDQHSSEEEEEEEEEEESEDGEEEDDITSAESESSEEEEGEQGDPQNATRQQQLEWDDSTLSY

SEQ ID NO: 2518 - protein, 225 aa, Homo sapiens
MSGCSKRCKLGFVKFAQTIFKLITGTLSKDKIEDELEMTMVCHRPEGLEQLEAQTNFTKRELQVLYRGFKNECPSGVVNEDTFKQIYAQFFPHGDASTYAHYLFNAFDTTQTGSVKFEDFVTALSILLRGTVHEKLRWTFNLYDINKDGYINKEEMMDIVKAIYDMMGKYTYPVLKEDTPRQHVDVFFQKMDKNKDGIVTLDEFLESCQEDDNIMRSLQLFQNVM

SEQ ID NO: 2519 - protein, 139 aa, Homo sapiens
MYKLASCCLLFIGFLNPLLSLPLLDSREISFQLSAPHEDARLTPEELERASLLQILPEMLGAERGDILRKADSSTNIFNPRGNLRKFQDFSGQDPNILLSHLLARIWKPYKKQRRKLRQDLRLWKKEPGLRIFKNYVWV

SEQ ID NO: 2520 - protein, 292 aa, Homo sapiens
MEVTAVATQGGYGSSDWVTSYLLMFSDGGRNWKQYRREESIWGFPGNTNADSVVHYRLQPPFEARFLRFLPLAWNPRGRIGMRIEVYGCAYKSEVVYFDGQSALLYRLDKKPLKPIRDVISLKFKAMQSNGILLHREGQHGNHITLELIKGKLVFFLNSGNAKLPSTIAPVTLTLGSLLDDQHWHSVLIELLDTQVNFTVDKHTHHFQAKGDSSYLDLNFEISFGGIPTPGRSRAFRRKSFHGCLENLYYNGVDVTELAKKHKPQILMMELAHGLQDQNLKISLTVCHQTTQ

SEQ ID NO: 2521 - protein, 260 aa, Homo sapiens
MKTSDGFTLNAESYVSFTTKLDIPTAAKYEYGVPLQTSDSFLRFPSSLTSSLCTDNNPAAFLVNQAVKCTRKINLEQCEEIEALSMAFYSSPEILRVPDSRKKVPITVQSIVIQSLNKTLTRREDTDVLQPTLVNAGHFSLCVNVVLEVKYSLTYTDAGEVTKADLSFVLGTVSSVVVPLQQKFEIHFLQTDWSSPVSARSTEGEEPAVGPGLPRLRGPFWKFPGPGHAGLGAHPLHHPVIQQEGFLPAPRGFGYRSEVD

SEQ ID NO: 2522 - protein, 1207 aa, Homo sapiens
MASVAWAVLKVLLLLPTQTWSPVGAGNPPDCDAPLASALPRSSFSSSSELSSSHGPGFSRLNRRDGAGGWTPLVSNKYQWLQIDLGERMEVTAVATQGGYGSSDWVTSYLLMFSDGGRNWKQYRREESIWGFPGNTNADSVVHYRLQPPFEARFLRFLPLAWNPRGRIGMRIEVYGCAYKSEVVYFDGQSALLYRLDKKPLKPIRDVISLKFKAMQSNGILLHREGQHGNHITLELIKGKLVFFLNSGNAKLPSTIAPVTLTLGSLLDDQHWHSVLIELLDTQVNFTVDKHTHHFQAKGDSSYLDLNFEISFGGIPTPGRSRAFRRKSFHGCLENLYYNGVDVTELAKKHKPQILMMGNVSFSCPQPQTVPVTFLSSRSYLALPGNSGEDKVSVTFQFRTWNRAGHLLFGELRRGSGSFVLFLKDGKLKLSLFQPGQSPRNVTAGAGLNDGQWHSVSFSAKWSHMNVVVDDDTAVQPLVAVLIDSGDTYYFGGCLDNSSGSGCKSPLGGFQGCLRLITIGDKAVDPILVQQGALGSFRDLQIDSCGITDRCLPSYCEHGGECSQSWDTFSCDCLGTGYTGETCHSSLYEQSCEAHKHRGNPSGLYYIDADGSGPLGPFLVYCNMTDAAWTVVQHGGPDAVTLRGAPSGHPRSAVSFAYAAGAGQLRSAVNLAERCEQRLALRCGTARRPDSRDGTPLSWWVGRTNETHTSWGGSLPDAQKCTCGLEGNCIDSQYYCNCDAGRNEWTSDTIVLSQKEHLPVTQIVMTDAGRPHSEAAYTLGPLLCRGDQSFWNSASFNTETSYLHFPAFHGELTADVCFFFKTTVSSGVFMENLGITDFIRIELRAPTEVTFSFDVGNGPCEVTVQSPTPFNDNQWHHVRAERNVKGASLQVDQLPQKMQPAPADGHVRLQLNSQLFIEISAYFATGSSMTYHFQEHYTLSENSSSLVSSLHRDVTLTREMITLSFRTTRTPSLLLYVSSFYEEYLSVILANNGSLQIRYKLDRHQNPDAFTFDFKNMADGQLHQVKINREEAVVMVEVNQSTKKQVILSSGTEFNAVKSLILGKVLEAAGADPDTRRAATSGFTGCLSAVRFGRAAPLKAALRPSGPSRVTVRGHVAPMARCAAGAASGSPARELAPRLAGGAGRSGPADEGEPLVNADRRDSAVIGGVIAVVIFILLCITAIAIRIYQQRKLRKENESKVSKKEEC

SEQ ID NO: 2523 - protein, 745 aa, Homo sapiens
MASVAWAVLKVLLLLPTQTWSPVGAGNPPDCDAPLASALPRSSFSSSSELSSSHGPGFSRLNRRDGAGGWTPLVSNKYQWLQIDLGERMEVTAVATQGGYGSSDWVTSYLLMFSDGGRNWKQYRREESIWGFPGNTNADSVVHYRLQPPFEARFLRFLPLAWNPRGRIGMRIEVYGCAYKSEVVYFDGQSALLYRLDKKPLKPIRDVISLKFKAMQSNGILLHREGQHGNHITLELIKGKLVFFLNSGNAKLPSTIAPVTLTLGSLLDDQHWHSVLIELLDTQVNFTVDKHTHHFQAKGDSSYLDLNFEISFGGIPTPGRSRAFRRKSFHGCLENLYYNGVDVTELAKKHKPQILMMGNVSFSCPQPQTVPVTFLSSRSYLALPGNSGEDKVSVTFQFRTWNRAGHLLFGELRRGSGSFVLFLKDGKLKLSLFQPGQSPRNVTAGAGLNDGQWHSVSFSAKWSHMNVVVDDDTAVQPLVAVLIDSGDTYYFGGCLDNSSGSGCKSPLGGFQGCLRLITIGDKAVDPILVQQGALGSFRDLQIDSCGITDRCLPSYCEHGGECSQSWDTFSCDCLGTGYTGETCHSSLYEQSCEAHKHRGNPSGLYYIDADGSGPLGPFLVYCNMTDAAWTVVQHGGPDAVTLRGAPSGHPRSAVSFAYAAGAGQLRSAVNLAERCEQRLALRCGTARRPDSRDGTPLSWWVGRTNETHTSWGGSLPDAQKCTCGLEGNCIDSQYYCNCDAGRNEW

SEQ ID NO: 2524 - protein, 182 aa, Homo sapiens
MEPQLGPEAAALRPGWLALLLWVSALSCSFSLPASSLSSLVPQVRTSYNFGRTFLGLDKCNACIGTSICKKFFKEEIRSDNWLASHLGLPPDSLLSYPANYSDDSKIWRPVEIFRLVSKYQNEISDRRICASASAPKTCSIERVLRKTERFQKWLQAKRLTPDLVQDCHQGQRELKFLCMLR

SEQ ID NO: 2525 - protein, 93 aa, Homo sapiens
MDSLRKMLISVAMLGAGAGVGYALLVIVTPGERRKQEMLKEMPLQDPRSREEAARTQQLLLATLQEAATTQENVAWRKNWMVGGEGGAGGRSP

SEQ ID NO: 2526 - protein, 128 aa, Homo sapiens
MGKSASKQFHNEVLKAHNEYRQKHGVPPLKLCKNLNREAQQYSEALASTRILKHSPESSRGQCGENLAWASYDQTGHFTAMVWKNTKKMGVGKASASDGSSFVVARYFPAGNVVNEGFFEENVLPPKK

SEQ ID NO: 2527 - protein, 154 aa, Homo sapiens
MGKSASKQFHNEVLKAHNEYRQKHGVPPLKLCKNLNREAQQYSEALASTRILKHSPESSRGQCGENLAWASYDQTGKEVADRWYSEIKNYNFQQPGFTSGTGHFTAMVWKNTKKMGVGKASASDGSSFVVARYFPAGNVVNEGFFEENVLPPKK

SEQ ID NO: 2528 - protein, 276 aa, Homo sapiens
MDSSREPTLGRLDAAGFWQVWQRFDADEKGYIEEKELDAFFLHMLMKLGTDDTVMKANLHKVKQQFMTTQDASKDGRIRMKELAGMFLSEDENFLLLFRRENPLDSSVEFMQIWRKYDADSSGFISAAELRNFLRDLFLHHKKAISEAKLEEYTGTMMKIFDRNKDGRLDLNDLARILALQENFLLQFKMDACSTEERKRDFEKIFAYYDVSKTGALEGPEVDGFVKDMMELVQPSISGVDLDKFREILLRHCDVNKDGKIQKSELALCLGLKINP

SEQ ID NO: 2529 - protein, 71 aa, Homo sapiens
MPAGVPMSTYLKMFAASLLAMCAGAEVVHRYYRPDLTIPEIPPKRGELKTELLGLKERKHKPQVSQQEELK

SEQ ID NO: 2530 - protein, 428 aa, Homo sapiens
MKPMLKDFSNLLLVVLCDYVLGEAEYLLLREPGHVALSNDTVYVDFQYFDGANGTLRNVSVLLLEANTNQTVTTKYLLTNQSQGTLKFECFYFKEAGDYWFTMTPEATDNSTPFPWWEKSAFLKVEWPVFHVDLNRSAKAAEGTFQVGLFTSQPLCPFPVDKPNIVVDVIFTNSLPEARRNSRQPLEIRTSKRTELAQGQWVEFGCAPLGPEAYVTVVLKLLGRDSVITSTGPIDLAQKFGYKLVMVPELTCESGVEVTVLPPPCTFVQGVVTVFKEAPRYPGKRTIHLAENSLPLGERRTIFNCTLFDMGKNKYCFDFGISSRSHFSAKEECMLIQRNTETWGLWQPWSQCSATCGDGVRERRRVCLTSFPSSPVCPGMSLEASLCSLEECAGRFRSCCPGWSAMVRSRLTNSASRVQAILLPQPLA

SEQ ID NO: 2531 - protein, 103 aa, Homo sapiens
MKLCVTVLSLLVLVAAFCSLALSAPMGSDPPTACCFSYTARKLPRNFVVDYYETSSLCSQPAVVYRESASSAAPGRIPSTRAAPHGPWSGRGRCLPQARDKAR

SEQ ID NO: 2532 - protein, 92 aa, Homo sapiens
MKLCVTVLSLLVLVAAFCSLALSAPMGSDPPTACCFSYTARKLPRNFVVDYYETSSLCSQPAVPWDSNLGKQVCADPSESWVQEYVYDLELN

SEQ ID NO: 2533 - protein, 93 aa, Homo sapiens
MQVSTAALAVLLCTMALCNQVLSAPLAADTPTACCFSYTSRQIPQNFIADYFETSSQCSKPSVIFLTKRGRQVCADPSEEWVQKYVSDLELSA

SEQ ID NO: 2534 - protein, 622 aa, Homo sapiens
MGKSEGPVGMVESAGRAGQKRPGFLEGGLLLLLLLVTAALVALGVLYADRRGKQLPRLASRLCFLQEERTFVKRKPRGIPEAQEVSEVCTTPGCVIAAARILQNMDPTTEPCDDFYQFACGGWLRRHVIPETNSRYSIFDVLRDELEVILKVELETQLAKATVPQEERHDVIALYHRMGLEELQSQFGLKGFNWTLFIQTVLSSVKIKLLPDEEVVVYGIPYLQNLENIIDTYSARTIQNYLVWRLVLDRIGSLSQRFKDTRVNYRKALFGTMVEEVRWRECVGYVNSNMENAVGSLYVREAFPGDSKSMVRELIDKVRTVFVETLDELGWMDEESKKKAQEKAMSIREQIGHPDYILEEMNRRLDEEYSNLNFSEDLYFENSLQNLKVGAQRSLRKLREKVDPNLWIIGAAVVNAFYSPNRNQIVFPAGILQPPFFSKEQPQALNFGGIGMVIGHEITHGFDDNGRNFDKNGNMMDWWSNFSTQHFREQSECMIYQYGNYSWDLADEQNVNGFNTLGENIADNGGVRQAYKAYLKWMAEGGKDQQLPGLDLTHEQLFFINYAQVWCGSYRPEFAIQSIKTDVHSPLKYRVLGSLQNLAAFADTFHCARGTPMHPKERCRVW

SEQ ID NO: 2535 - protein, 779 aa, Homo sapiens
MGKSEGPVGMVESAGRAGQKRPGFLEGGLLLLLLLVTAALVALGVLYADRRGKQLPRLASRLCFLQEERTFVKRKPRGIPEAQEVSEVCTTPGCVIAAARILQNMDPTTEPCDDFYQFACGGWLRRHVIPETNSRYSIFDVLRDELEVILKAVLENSTAKDRPAVEKARTLYRSCMNQSVIEKRGSQPLLDILEVVGGWPVAMDRWNETVGLEWELERQLALMNSQFNRRVLIDLFIWNDDQNSSRHIIYIDQPTLGMPSREYYFNGGSNRKVREAYLQFMVSVATLLREDANLPRDSCLVQEDMVQVLELETQLAKATVPQEERHDVIALYHRMGLEELQSQFGLKGFNWTLFIQTVLSSVKIKLLPDEEVVVYGIPYLQNLENIIDTYSARTIQNYLVWRLVLDRIGSLSQRFKDTRVNYRKALFGTMVEEVRWRECVGYVNSNMENAVGSLYVREAFPGDSKSMVRELIDKVRTVFVETLDELGWMDEESKKKAQEKAMSIREQIGHPDYILEEMNRRLDEEYSNLNFSEDLYFENSLQNLKVGAQRSLRKLREKVDPNLWIIGAAVVNAFYSPNRNQIVFPAGILQPPFFSKEQPQALNFGGIGMVIGHEITHGFDDNGRNFDKNGNMMDWWSNFSTQHFREQSECMIYQYGNYSWDLADEQNVNGFNTLGENIADNGGVRQAYKAYLKWMAEGGKDQQLPGLDLTHEQLFFINYAQVWCGSYRPEFAIQSIKTDVHSPLKYRVLGSLQNLAAFADTFHCARGTPMHPKERCRVW

SEQ ID NO: 2536 - protein, 85 aa, Homo sapiens
MSVHMPAMKICEKLKKLDSQICELKYEKTLDLASVDLRKMRVAELKQILHSWGEECRACAEKTDYVNLIQELAPKYAATHPKTEL

SEQ ID NO: 2537 - protein, 218 aa, Homo sapiens
MGRVFLTGEKANSILKRYPRANGFFEEIRQGNIERECKEEFCTFEEAREAFENNEKTKEFWSTYTKAQQGESNRGSDWFQFYLTFPLIFGLFIILLVIFLIWRCFLRNKTRRQTVTEGHIPFPQHLNIITPPPPPDEVFDSSGLSPGFLGYVVGRSDSVSTRLSNCDPPPTYEEATGQVNLQRSETEPHLDPPPEYEDIVNSNSASAIPMVPVVTTIK

SEQ ID NO: 2538 - protein, 454 aa, Homo sapiens; identical to SEQ ID NO: 2020

SEQ ID NO: 2539 - protein, 138 aa, Homo sapiens
MTWRQAVLLSCFSAVVLLSMLREGTSVSVGTMQMAGEEASEDAKQKIFMQESDASNFLKRRGKRSPKSRDEVNVENRQKLRVDELRREYYEEQRNEFENFVEEQNDEQEERSREAVEQWRQWHYDGLHPSYLYNRHHT

SEQ ID NO: 2540 - protein, 242 aa, Homo sapiens
MALKNKFSCLWILGLCLVATTSSKIPSITDPHFIDNCIEAHNEWRGKVNPPAADMKYMIWDKGLAKMAKAWANQCKFEHNDCLDKSYKCYAAFEYVGENIWLGGIKSFTPRHAITAWYNETQFYDFDSLSCSRVCGHYTQLVWANSFYVGCAVAMCPNLGGASTAIFVCNYGPAGNFANMPPYVRGESCSLCSKEEKCVKNLCRTPQLIIPNQNPFLKPTGRAPQQTAFNPFSLGFLLLRIF

SEQ ID NO: 2541 - protein, 270 aa, Homo sapiens
MLRQLLLAALCLAGPPAPARACQLPSEWRPLSEGCRAELAETIVYARVLALHPEAPGLYNHLPWQYHAGQGGLFYSAEVEMLCDQAWGSMLEVPAGSRLNLTGLGYFSCHSHTVVQDYSYFFFLRMDENYNLLPHGVNFQDAIFPDTQENRRMFSSLFQFSNCSQGQQLATFSSDWEIQEDSRLMCSSVQKALFEEEDHVKKLQQKVATLEKRNRQLRERVKKVKRSLRQARKKGRHLELANQKLSEKLAAGALPHINARGPVRPPYLRG

SEQ ID NO: 2542 - protein, 145 aa, Homo sapiens
MDENYNLLPHGVNFQDAIFPDTQENRRMFSSLFQFSNCSQGQQLATFSSDWEIQEDSRLMCSSVQKALFEEEDHVKKLQQKVATLEKRNRQLRERVKKVKRSLRQARKKGRHLELANQKLSEKLAAGALPHINARGPVRPPYLRG

SEQ ID NO: 2543 - protein, 609 aa, Homo sapiens
MELGCWTQLGLTFLQLLLISSLPREYTVINEACPGAEWNIMCRECCEYDQIECVCPGKREVVGYTIPCCRNEENECDSCLIHPGCTIFENCKSCRNGSWGGTLDDFYVKGFYCAECRAGWYGGDCMPCSSSPCFHDGTCVLDKAGSYKCACLAGYTGQRCENLLEERNCSDPGGPVNGYQKITGGPGLINGRHAKIGTVVSFFCNNSYVLSGNEKRTCQQNGEWSGKQPICIKACREPKISDLVRRRVLPMQVQSRETPLHQLYSAAFSKQKLQSAPTKKPALPFGDLPMGYQHLHTQLQYECISPFYRRLGSSRRTCLRTGKWSGRAPSCIPICGKIENITAPKTQGLRWPWQAAIYRRTSGVHDGSLHKGAWFLVCSGALVNERTVVVAAHCVTDLGKVTMIKTADLKVVLGKFYRDDDRDEKTIQSLQISAIILHPNYDPILLDADIAILKLLDKARISTRVQPICLAASRDLSTSFQESHITVAGWNVLADVRSPGFKNDTLRSGVVSVVDSLLCEEQHEDHGIPVSVTDNMFCASWEPTAPSDICTAETGGIAAVSFPGRASPEPRWHLMGLVSWSYDKTCSHRLSTAFTKVLPFKDWIERNMK

SEQ ID NO: 2544 - protein, 720 aa, Homo sapiens
MELGCWTQLGLTFLQLLLISSLPREYTVINEACPGAEWNIMCRECCEYDQIECVCPGKREVVGYTIPCCRNEENECDSCLIHPGCTIFENCKSCRNGSWGGTLDDFYVKGFYCAECRAGWYGGDCMRCGQVLRAPKGQILLESYPLNAHCEWTIHAKPGFVIQLRFVMLSLEFDYMCQYDYVEVRDGDNRDGQIIKRVCGNERPAPIQSIGSSLHVLFHSDGSKNFDGFHAIYEEITACSSSPCFHDGTCVLDKAGSYKCACLAGYTGQRCENLLEERNCSDPGGPVNGYQKITGGPGLINGRHAKIGTVVSFFCNNSYVLSGNEKRTCQQNGEWSGKQPICIKACREPKISDLVRRRVLPMQVQSRETPLHQLYSAAFSKQKLQSAPTKKPALPFGDLPMGYQHLHTQLQYECISPFYRRLGSSRRTCLRTGKWSGRAPSCIPICGKIENITAPKTQGLRWPWQAAIYRRTSGVHDGSLHKGAWFLVCSGALVNERTVVVAAHCVTDLGKVTMIKTADLKVVLGKFYRDDDRDEKTIQSLQISAIILHPNYDPILLDADIAILKLLDKARISTRVQPICLAASRDLSTSFQESHITVAGWNVLADVRSPGFKNDTLRSGVVSVVDSLLCEEQHEDHGIPVSVTDNMFCASWEPTAPSDICTAETGGIAAVSFPGRASPEPRWHLMGLVSWSYDKTCSHRLSTAFTKVLPFKDWIERNMK

SEQ ID NO: 2545 - protein, 377 aa, Homo sapiens
MEALLLGAGLLLGAYVLVYYNLVKAPPCGGMGNLRGRTAVVTGANSGIGKMTALELARRGARVVLACRSQERGEAAAFDLRQESGNNEVIFMALDLASLASVRAFATAFLSSEPRLDILIHNAGISSCGRTREAFNLLLRVNHIGPFLLTHLLLPCLKACAPSRVVVVASAAHCRGRLDFKRLDRPVVGWRQELRAYADTKLANVLFARELANQLEATGVTCYAAHPGPVNSELFLRHVPGWLRPLLRPLAWLVLRAPRGGAQTPLYCALQEGIEPLSGRYFANCHVEEVPPAARDDRAAHRLWEASKRLAGLGPGEDAEPDEDPQSEDSEAPSSLSTPHPEEPTVSQPYPSPQSSPDLSKMTHRIQAKVEPEIQLS

SEQ ID NO: 2546 - protein, 126 aa, Homo sapiens
MISFHVIFLSLGRGKLFLPVNFCFLKLKNSQVRIPKDFTCNLHVLFRTVQGEDRNTMFRGHWSIYSRNFPLAVVPAYVTEDGKNTSHRASGQFCNALSQGEIPSSLQLVNSYALEPRTDMPCNFLT

SEQ ID NO: 2547 - protein, 291 aa, Homo sapiens
MAVTLSLLLGGRVCAAVTRCGFATRGVAGPGPIGREPDPDSDWEPEERELQEVESTLKRQKQAIRFQKIRRQMEAPGAPPRTLTWEAMEQIRYLHEEFPESWSVPRLAEGFDVSTDVIRRVLKSKFLPTLEQKLKQDQKVLKKAGLAHSLQHLRGSGNTSKLLPAGHSVSGSLLMPGHEASSKDPNHSTALKVIESDTHRTNTPRRRKGRNKEIQDLEESFVPVAAPLGHPRELQKYSSDSESPRGTGSGALPSGQKLEELKAEEPDNFSSKVVQRGREFFDSNGNFLYRI

SEQ ID NO: 2548 - protein, 846 aa, Homo sapiens
MFKCWSVVLVLGFIFLESEGRPTKEGGYGLKSYQPLMRLRHKEKNQESSRVKGFMIQDGPFGSCENKYCGLGRHCVTSRETGQAECACMDLCKRHYKPVCGSDGEFYENHCEVHRAACLKKQKITIVHNEDCFFKGDKCKTTEYSKMKNMLLDLQNQKYIMQENENPNGDDISRKKLLVDQMFKYFDADSNGLVDINELTQVIKQEELGKDLFDCTLYVLLKYDDFNADKHLALEEFYRAFQVIQLSLPEDQKLSITAATVGQSAVLSCAIQGTLRPPIIWKRNNIILNNLDLEDINDFGDDGSLYITKVTTTHVGNYTCYADGYEQVYQTHIFQVNVPPVIRVYPESQAREPGVTASLRCHAEGIPKPQLGWLKNGIDITPKLSKQLTLQANGSEVHISNVRYEDTGAYTCIAKNEAGVDEDISSLFVEDSARKTLANILWREEGLGIGNMFYVFYEDGIKVIQPIECEFQRHIKPSEKLLGFQDEVCPKAEGDEVQRCVWASAVNVKDKFIYVAQPTLDRVLIVDVQSQKVVQAVSTDPVPVKLHYDKSHDQVWVLSWGTLEKTSPTLQVITLASGNVPHHTIHTQPVGKQFDRVDDFFIPTTTLIITHMRFGFILHKDEAALQKIDLETMSYIKTINLKDYKCVPQSLAYTHLGGYYFIGCKPDSTGAVSPQVMVDGVTDSVIGFNSDVTGTPYVSPDGHYLVSINDVKGLVRVQYITIRGEIQEAFDIYTNLHISDLAFQPSFTEAHQYNIYGSSSTQTDVLFVELSSGKVKMIKSLKEPLKAEEWPWNRKNRQIQDSGLFGQYLMTPSKDSLFILDGRLNKLNCEITEVEKGNTVIWVGDA

SEQ ID NO: 2549 - protein, 96 aa, Homo sapiens
MRVTSATCALLLALICSVQLGDACLDIDKLLANVVFDVSQDLLKEELARYNPSPLTEESFLNVQQCFANVSVTERFAHSVVIKKILQSNDCIEAAF

SEQ ID NO: 2550 - protein, 656 aa, Homo sapiens
MRTVVLTMKASVIEMFLVLLVTGVHSNKETAKKIKRPKFTVPQINCDVKAGKIIDPEFIVKCPAGCQDPKYHVYGTDVYASYSSVCGAAVHSGVLDNSGGKILVRKVAGQSGYKGSYSNGVQSLSLPRWRESFIVLESKPKKGVTYPSALTYSSSKSPAAQAGETTKAYQRPPIPGTTAQPVTLMQLLAVTVAVATPTTLPRPSPSAASTTSIPRPQSVGHRSQEMDLWSTATYTSSQNRPRADPGLVPKEELSTQSLEPVSLGDPNCKIDLSFLIDGSTSIGKRRFRIQKQLLADVAQALDIGPAGPLMGVVQYGDNPATHFNLKTHTNSRDLKTAIEKITQRGGLSNVGRAISFVTKNFFSKANGNRSGAPNVVVVMVDGWPTDKVEEASRLARESGINIFFITIEGAAENEKQYVVEPNFANKAVCRTNGFYSLHVQSWFGLHKTLQPLVKRVCDTDRLACSKTCLNSADIGFVIDGSSSVGTGNFRTVLQFVTNLTKEFEISDTDTRIGAVQYTYEQRLEFGFDKYSSKPDILNAIKRVGYWSGGTSTGAAINFALEQLFKKSKPNKRKLMILITDGRSYDDVRIPAMAAHLKGVITYAIGVAWAAQEELEVIATHPARDHSFFVDEFDNLHQYVPRIIQNICTEFNSQPRN

SEQ ID NO: 2551 - protein, 693 aa, Homo sapiens
MRTVVLTMKASVIEMFLVLLVTGVHSNKETAKKIKRPKFTVPQINCDVKAGKIIDPEFIVKCPAGCQDPKYHVYGTDVYASYSSVCGAAVHSGVLDNSGGKILVRKVAGQSGYKGSYSNGVQSLSLPRWRESFIVLESKPKKGVTYPSALTYSSSKSPAAQAGETTKAYQRPPIPGTTAQPVTLMQLLAVTVAVATPTTLPRPSPSAASTTSIPRPQSVGHRSQEMDLWSTATYTSSQNRPRADPGIQRQDPSGAAFQKPVGADVSLGEMDSWKPGSVLLDEGLVPKEELSTQSLEPVSLGDPNCKIDLSFLIDGSTSIGKRRFRIQKQLLADVAQALDIGPAGPLMGVVQYGDNPATHFNLKTHTNSRDLKTAIEKITQRGGLSNVGRAISFVTKNFFSKANGNRSGAPNVVVVMVDGWPTDKVEEASRLARESGINIFFITIEGAAENEKQYVVEPNFANKAVCRTNGFYSLHVQSWFGLHKTLQPLVKRVCDTDRLACSKTCLNSADIGFVIDGSSSVGTGNFRTVLQFVTNLTKEFEISDTDTRIGAVQYTYEQRLEFGFDKYSSKPDILNAIKRVGYWSGGTSTGAAINFALEQLFKKSKPNKRKLMILITDGRSYDDVRIPAMAAHLKGVITYAIGVAWAAQEELEVIATHPARDHSFFVDEFDNLHQYVPRIIQNICTEFNSQPRN

SEQ ID NO: 2552 - protein, 184 aa, Homo sapiens
MFCLLHLCFYLANFASSIKRTHAVNGCCGLQMIALWAQSSGNADARVEEILAGEERRLAALLGSQGMRFWVCLAACRAMWGLAARRGRAEDSSSSPVDASKFPWRGGQHRTTMMPCLLRVGVFRPCHVRPTGDPSCDVQPPRLGFSRVPDTQVAFYGSGHWDPTPFSVHSCFFNFQVRKIIFLL

SEQ ID NO: 2553 - protein, 287 aa, Homo sapiens
MTSAAHYYPKLMSIMGNVLRFLPAFVRMKQLIEEGYVGEPLVCEVQVHGGSLLGKKYNWSCDDLMGGGGLHSVGTYIIDLLTFLTGQKAVKVHGLLKTFVKQTDHIKGIRQITSDDFCTFQMVLEGGVCCTVTLNFNVPGEFKQDVTVVGSAGRLLAVGTDLYGQRNSAPEQELLVQDATPVSNSLLPEKAFSDIPSPYLRGTIKMMQAVRQAFQDQDDRRTWDGRPLTMAATFDDCLYALCVVDTIKRSSQTGEWQNIAIMTEEPELSPAYLISEAMRRSRMSLYC

SEQ ID NO: 2554 - protein, 390 aa, Homo sapiens
MLPGVGVFGTSLTARVIIPLLKDEGFAVKALWGRTQEEAEELAKEMSVPFYTSRIDEVLLHQDVDLVCINLPPPLTRQIAVKTLGIGKNVICDRTATPLDAFRMTSAAHYYPKLMSIMGNVLRFLPAFVRMKQLIEEGYVGEPLVCEVQVHGGSLLGKKYNWSCDDLMGGGGLHSVGTYIIDLLTFLTGQKAVKVHGLLKTFVKQTDHIKGIRQITSDDFCTFQMVLEGGVCCTVTLNFNVPGEFKQDVTVVGSAGRLLAVGTDLYGQRNSAPEQELLVQDATPVSNSLLPEKAFSDIPSPYLRGTIKMMQAVRQAFQDQDDRRTWDGRPLTMAATFDDCLYALCVVDTIKRSSQTGEWQNIAIMTEEPELSPAYLISEAMRRSRMSLYC

SEQ ID NO: 2555 - protein, 1905 aa, Homo sapiens
MQSRLLLLGAPGGHGGPASRRMRLLLRQVVQRRPGGDRQRPEVRLLHAGSGADTGDTVNIGDVSYKLKIPKNPELVPQNYISDSLAQSVVQHLRWIMQKDLLGQDVFLIGPPGPLRRSIAMQYLELTKREVEYIALSRDTTETDLKQRREIRAGTAFYIDQCAVRAATEGRTLILEGLEKAERNVLPVLNNLLENREMQLEDGRFLMSAERYDKLLRDHTKKELDSWKIVRVSENFRVIALGLPVPRYSGNPLDPPLRSRFQARDIYYLPFKDQLKLLYSIGANVSAEKVSQLLSFATTLCSQESSTLGLPDFPLDSLAAAVQILDSFPMMPIKHAIQWLYPYSILLGHEGKMAVEGVLKRFELQDSGSSLLPKEIVKVEKMMENHVSQASVTIRIADKEVTIKVPAGTRLLSQPCASDRFIQTLSHKQLQAEMMQSHMVKDICLIGGKGCGKTVIAKNFADTLGYNIEPIMLYQDMTARDLLQQRYTLPNGDTAWRSSPLVNAALEGKLVLLDGIHRVNAGTLAVLQRLIHDRELSLYDGSRLLREDRYMRLKEELQLSDEQLQKRSIFPIHPSFRIIALAEPPVIGSTAHQWLGPEFLTMFFFHYMKPLVKSEEIQVIKEKVPNVPQEALDKLLSFTHKLRETQDPTAQSLAASLSTRQLLRISRRLSQYPNENLHSAVTKACLSRFLPSLARSALEKNLADATIEINTDDNLEPELKDYKCEVTSGTLRIGAVSAPIYNAHEKMKVPDVLFYDNIQHVIVMEDMLKDFLLGEHLLLVGNQGVGKNKIVDRFLHLLNRPREYIQLHRDTTVQTLTLQPSVKDGLIVYEDSPLVKAVKLGHILVVDEADKAPTNVTCILKTLVENGEMILADGRRIVANSANVNGRENVVVIHPDFRMIVLANRPGFPFLGNDFFGTLGDIFSCHAVDNPKPHSELEMLRQYGPNVPEPILQKLVAAFGELRSLADQGIINYPYSTREVVNIVKHLQKFPTEGLSSVVRNVFDFDSYNNDMREILINTLHKYGIPIGAKPTSVQLAKELTLPEQTFMGYWTIGQARSGMQKLLCPVETHHIDIKGPALINIQEYPIERHEERSLNFTEECASWRIPLDEINIICDIATSHENEQNTLYVVTCNPASLYFMNMTGKSGFFVDFFDIFPRTANGVWHPFVTVAPLGSPLKGQVVLHEQQSNVILLLDTTGRALHRLILPSEKFTSKKPFWWNKEEAETYKMCKEFSHKNWLVFYKEKGNSLTVLDVLEGRTHTISLPINLKTVFLVAEDKWLLVESKTNQKYLLTKPAHIESEGSGVCQLYVLKEEPPSTGFGVTQETEFSIPHKISSDQLSSEHLSSAVEQKIASPNRILSDEKNYATIVVGFPDLMSPSEVYSWKRPSSLHKRSGTDTSFYRGKKKRGTPKQSNCVTLLDTNQVVRILPPGEVPLKDIYPKDVTPPQTSGYIEVTDLQSKKLRYIPIPRSESLSPYTTWLSTISDTDALLAEWDKSGVVTVDMGGHIRLWETGLERLQRSLMEWRNMIGQDDRNMQITINRDSGEDVSSPKHGKEDPDNMPHVGGNTWAGGTGGRDTAGLGGKGGPYRLDAGHTVYQVSQAEKDAVPEEVKRAAREMGQRAFQQRLKEIQMSEYDAATYERFSGAVRRQVHSLRIILDNLQAKGKERQWLRHQATGELDDAKIIDGLTGEKAIYKRRGELEPQLGSPQQKPKRLRLVVDVSGSMYRFNRMDGRLERTMEAVCMVMEAFENYEEKFQYDIVGHSGDGYNIGLVPMNKIPKDNKQRLEILKTMHAHSQFCMSGDHTLEGTEHAIKEIVKEEADEYFVIVLSDANLSRYGIHPAKFAQILTRDPQVNAFAIFIGSLGDQATRLQRTLPAGRSFVAMDTKDIPQILQQIFTSTMLSSV

SEQ ID NO: 2556 - protein, 186 aa, Homo sapiens
MEALPLLAATTPDHGRHRRLLLLPLLLFLLPAGAVQGWETEERPRTREEECHFYAGGQVYPGEASRVSVADHSLHLSKAKISKPAPYWEGTAVIDGEFKELKLTDYRGKYLVFFFYPLDFTFVCPTEIIAFGDRLEEFRSINTEVVACSVDSQFTHLAWSVSYTYIRRKKRMDLLLKHGQITLDMI

SEQ ID NO: 2557 - protein, 271 aa, Homo sapiens
MEALPLLAATTPDHGRHRRLLLLPLLLFLLPAGAVQGWETEERPRTREEECHFYAGGQVYPGEASRVSVADHSLHLSKAKISKPAPYWEGTAVIDGEFKELKLTDYRGKYLVFFFYPLDFTFVCPTEIIAFGDRLEEFRSINTEVVACSVDSQFTHLAWINTPRRQGGLGPIRIPLLSDLTHQISKDYGVYLEDSGHTLRGLFIIDDKGILRQITLNDLPVGRSVDETLRLVQAFQYTDKHGEVCPAGWKPGSETIIPDPAGKLKYFDKLN

SEQ ID NO: 2558 - protein, 185 aa, Homo sapiens
MDHRSRLRGTGLNRIPGTQSRAPRVPLPFHVQQEAREGEDWEREPPRQRPPIYEPPESEELPDNVMVSKPAPYWEGTAVIDGEFKELKLTDYRGKYLVFFFYPLDFTFVCPTEIIAFGDRLEEFRSINTEVVACSVDSQFTHLAWINTPRRQGGLGPIRIPLLSDLTHQISKDYGVYLEDSGHTL

SEQ ID NO: 2559 - protein, 280 aa, Homo sapiens
MARFWVCVAGAGFFLAFLVLHSRFCGSPVLRNFTFAVSWRTEKILYRLDVGWPKHPEYFTGTTFCVAVDSLNGLVYIGQRGDNIPKILVFTEDGYFLRAWNYTVDTPHGIFAASTLYEQSVWITDVGSDFMILWLHGENGTGPAKFNIPHSVTLDSAGRVWVADRGNKRIQVFDKDTGEWLGAWNNCFTEEGPSSVRFTPDGKYLIVAQLNLSRLSVVAAPPVGSIGECSVISTIQLADQVLPHLLEVDRKTGAVYVAEIGAKQVQKYVPLNSYVPSFGS

SEQ ID NO: 2560 - protein, 347 aa, Homo sapiens
MARFWVCVAGAGFFLAFLVLHSRFCGSPVLRNFTFAVSWRTEKILYRLDVGWPKHPEYFTGTTFCVAVDSLNGLVYIGQRGDNIPKILVFTEDGYFLRAWNYTVDTPHGIFAASTLYEQSVWITDVGSGFFGHTVKKYSSFGDLVQVLGTPGKKGTSLNPLQFDNPAELYVEDTGDIYIVDGDGGLNNRLIKLSQDFMILWLHGENGTGPAKFNIPHSVTLDSAGRVWVADRGNKRIQVFDKDTGEWLGAWNNCFTEEGPSSVRFTPDGKYLIVAQLNLSRLSVVAAPPVGSIGECSVISTIQLADQVLPHLLEVDRKTGAVYVAEIGAKQVQKYVPLNSYVPSFGS

SEQ ID NO: 2561 - protein, 568 aa, Homo sapiens
MVLLHWCLLWLLFPLSSRTQKLPTRDEELFQMQIRDKAFFHDSSVIPDGAEISSYLFRDTPKRYFFVVEEDNTPLSVTVTPCDAPLEWKLSLQELPEDRSGEGSGDLEPLEQQKQQIINEEGTELFSYKGNDVEYFISSSSPSGLYQLDLLSTEKDTHFKVYATTTPESDQPYPELPYDPRVDVTSLGRTTVTLAWKPSPTASLLKQPIQYCVVINKEHNFKSLCAVEAKLSADDAFMMAPKPGLDFSPFDFAHFGFPSDNSGKERSFQAKPSPKLGRHVYSRPKVDIQKICIGNKNIFTVSDLKPDTQYYFDVFVVNINSNMSTAYVGTFARTKEEAKQKTVELKDGKITDVFVKRKGAKFLRFAPVSSHQKVTFFIHSCLDAVQIQVRRDGKLLLSQNVEGIQQFQLRGKPKAKYLVRLKGNKKGASMLKILATTRPTKQSFPSLPEDTRIKAFDKLRTCSSATVAWLGTQERNKFCIYKKEVDDNYNEDQKKREQNQCLGPDIRKKSEKVLCKYFHSQNLQKAVTTETIKGLQPGKSYLLDVYVIGHGGHSVKYQSKVVKTRKFC

SEQ ID NO: 2562 - protein, 162 aa, Homo sapiens; identical to SEQ ID NO: 1861

SEQ ID NO: 2563 - protein, 565 aa, Homo sapiens
MDFLLALVLVSSLYLQAAAEFDGRWPRQIVSSIGLCRYGGRIDCCWGWARQSWGQCQPVCQPRCKHGECIGPNKCKCHPGYAGKTCNQDLNECGLKPRPCKHRCMNTYGSYKCYCLNGYMLMPDGSCSSALTCSMANCQYGCDVVKGQIRCQCPSPGLQLAPDGRTCVDVDECATGRASCPRFRQCVNTFGSYICKCHKGFDLMYIGGKYQCHDIDECSLGQYQCSSFARCYNIRGSYKCKCKEGYQGDGLTCVYIPKVMIEPSGPIHVPKGNGTILKGDTGNNNWIPDVGSTWWPPKTPYIPPIITNRPTSKPTTRPTPKPTPIPTPPPPPPLPTELRTPLPPTTPERPTTGLTTIAPAASTPPGGITVDNRVQTDPQKPRGDVFIPRQPSNDLFEIFEIERGVSADDEAKDDPGVLVHSCNFDHGLCGWIREKDNDLHWEPIRDPAGGQYLTVSAAKAPGGKAARLVLPLGRLMHSGDLCLSFRHKVTGLHSGTLQVFVRKHGAHGAALWGRNGGHGWRQTQITLRGADIKSVVFKGEKRRGHTGEIGLDDVSLKKGHCSEER

SEQ ID NO: 2564 - protein, 470 aa, Homo sapiens
MKRSVAVWLLVGLSLGVPQFGKGDICDPNPCENGGICLPGLADGSFSCECPDGFTDPNCSSVVEVGPCTPNPCHNGGTCEISEAYRGDTFIGYVCKCPRGFNGIHCQHNINECEVEPCKNGGICTDLVANYSCECPGEFMGRNCQYKCSGPLGIEGGIISNQQITASSTHRALFGLQKWYPYYARLNKKGLINAWTAAENDRWPWIQINLQRKMRVTGVITQGAKRIGSPEYIKSYKIAYSNDGKTWAMYKVKGTNEDMVFRGNIDNNTPYANSFTPPIKAQYVRLYPQVCRRHCTLRMELLGCELSGCSEPLGMKSGHIQDYQITASSIFRTLNMDMFTWEPRKARLDKQGKVNAWTSGHNDQSQWLQVDLLVPTKVTGIITQGAKDFGHVQFVGSYKLAYSNDGEHWTVYQDEKQRKDKVFQGNFDNDTHRKNVIDPPIYARHIRILPWSWYGRITLRSELLGCTEEE

SEQ ID NO: 2565 - protein, 417 aa, Homo sapiens
MASYLYGVLFAVGLCAPIYCVSPANAPSAYPRPSSTKSTPASQVYSLNTDFAFRLYRRLVLETPSQNIFFSPVSVSTSLAMLSLGAHSVTKTQILQGLGFNLTHTPESAIHQGFQHLVHSLTVPSKDLTLKMGSALFVKKELQLQANFLGNVKRLYEAEVFSTDFSNPSIAQARINSHVKKKTQGKVVDIIQGLDLLTAMVLVNHIFFKAKWEKPFHPEYTRKNFPFLVGEQVTVHVPMMHQKEQFAFGVDTELNCFVLQMDYKGDAVAFFVLPSKGKMRQLEQALSARTLRKWSHSLQKRWIEVFIPRFSISASYNLETILPKMGIQNVFDKNADFSGIAKRDSLQVSKATHKAVLDVSEEGTEATAATTTKFIVRSKDGPSYFTVSFNRTFLMMITNKATDGILFLGKVENPTKS

SEQ ID NO: 2566 - protein, 161 aa, Homo sapiens
MLMPVHFLLLLLLLLGGPRTGLPHKFYKAKPIFSCLNTALSEAEKGQWEDASLLSKRSFHYLRSRDASSGEEEEGKEKKTFPISGARGGARGTRYRYVSQAQPRGKPRQDTAKSPHRTKFTLSLDVPTNIMNLLFNIAKAKNLRAQAAANAHLMAQIGRKK

SEQ ID NO: 2567 - protein, 696 aa, Homo sapiens
MAMARLGSWLGEAQWLALVSLFVAALATVGLYLAQWALARARPQPQRRAVEPGEGPRPGSDALLSWILTLGSWRSQWQAAWVTALNEEAERKGGPPFLSFEEDPRQQALELVVQEVSSVLRSAEEKVVVCHVVGQAIQFLVSETPALGAGCRLYDMRLSPFHLQLEFHMKEKREDLQISWSFISVPEMAVNIQPKALGEDQVAETSAMSDVLKDILKHLAGSASPSVVLITKPTTVKEAQNLQCAASTAQESCPPKPPRAHELKLLVRNIHVLLLSEPGASGHINAVCVVQLNDPVQRFSSTLTKNTPDLMWEEEFTFELNAKSKELHLQISEAGRSSEGLLATATVPLDLFKKQPSGPQSFTLTSGSACGSSVLGSVTAEFSYMEPGELKSWPIPPPVPAAKIEKDRTVMPCGTVVTTVTAVKTKPRVDVGRASPLSSDSPVKTPIKVKVIEKDISVQAIACRSAPVSKTLSSSDTELLVLNGSDPVAEVAIRQLSESSKLKLKSPRKKSTIIISGISKTSLSQDHDAALMQGYTASVDSTHQEDAPSHPERAAASAPPEEAESAQASLAPKPQEDELDSWDLEKEPQAAAWSSQVLLDPDGDELSESSMSVLEPGTAKKHKGGILRKGAKLFFRRRHQQKDPGMSQSHNDLVFLEQPEGSRRKGITLTRILNKKLLSRHRNKNTMNGAPVEPCT

SEQ ID NO: 2568 - protein, 222 aa, Homo sapiens
MPASSPFLLAPKGPPGNMGGPVREPALSVALWLSWGAALGAVACAMALLTQQTELQSLRREVSRLQGTGGPSQNGEGYPWQSLPEQHSVLHLVPINATSKDDSDVTEVMWQPALRRGRGLQAQGYGVRIQDAGVYLLYSQVLFQDVTFTMGQVVSREGQGRQETLFRCIRSMPSHPDRAYNSCYSAGVFHLHQGDILSVIIPRARAKLNLSPHGTFLGFVKL

SEQ ID NO: 2569 - protein, 734 aa, Homo sapiens
MWGLLLALAAFAPAVGPALGAPRNSVLGLAQPGTTKVPGSTPALHSSPAQPPAETANGTSEQHVRIRVIKKKKVIMKKRKKLTLTRPTPLVTAGPLVTPTPAGTLDPAEKQETGCPPLGLESLRVSDSRLEASSSQSFGLGPHRGRLNIQSGLEDGDLYDGAWCAEEQDADPWFQVDAGHPTRFSGVITQGRNSVWRYDWVTSYKVQFSNDSRTWWGSRNHSSGMDAVFPANSDPETPVLNLLPEPQVARFIRLLPQTWLQGGAPCLRAEILACPVSDPNDLFLEAPASGSSDPLDFQHHNYKAMRKLMKQVQEQCPNITRIYSIGKSYQGLKLYVMEMSDKPGEHELGEPEVRYVAGMHGNEALGRELLLLLMQFLCHEFLRGNPRVTRLLSEMRIHLLPSMNPDGYEIAYHRGSELVGWAEGRWNNQSIDLNHNFADLNTPLWEAQDDGKVPHIVPNHHLPLPTYYTLPNATVAPETRAVIKWMKRIPFVLSANLHGGELVVSYPFDMTRTPWAARELTPTPDDAVFRWLSTVYAGSNLAMQDTSRRPCHSQDFSVHGNIINGADWHTVPGSMNDFSYLHTNCFEVTVELSCDKFPHENELPQEWENNKDALLTYLEQVRMGIAGVVRDKDTELGIADAVIAVDGINHDVTTAWGGDYWRLLTPGDYMVTASAEGYHSVTRNCRVTFEEGPFPCNFVLTKTPKQRLRELLAAGAKVPPDLRRRLERLRGQKD

SEQ ID NO: 2570 - protein, 252 aa, Homo sapiens
MRAPLLPPAPVVLSLLILGSGHYAAGLDLNDTYSGKREPFSGDHSADGFEVTSRSEMSSGSEISPVSEMPSSSEPSSGADYDYSEEYDNEPQIPGYIVDDSVRVEQVVKPPQNKTESENTSDKPKRKKKGGKNGKNRRNRKKKNPCNAEFQNFCIHGECKYIEHLEAVTCKCQQEYFGERCGEKSMKTHSMIDSSLSKIALAAIAAFMSAVILTAVAVITVQLRRQYVRKYEGEAEERKKLRQENGNVHAIA

SEQ ID NO: 2571 - protein, 2828 aa, Homo sapiens; identical to SEQ ID NO: 1842

SEQ ID NO: 2572 - protein, 1109 aa, Homo sapiens
MRLLLLVPLLLAPAPGSSAPKVRRQSDTWGPWSQWSPCSRTCGGGVSFRERPCYSQRRDGGSSCVGPARSHRSCRTESCPDGARDFRAEQCAEFDGAEFQGRRYRWLPYYSAPNKCELNCIPKGENFYYKHREAVVDGTPCEPGKRDVCVDGSCRVVGCDHELDSSKQEDKCLRCGGDGTTCYPVAGTFDANDLSRGYNQILIVPMGATSILIDEAAASRNFLAVKNVRGEYYLNGHWTIEAARALPAASTILHYERGAEGDLAPERLHARGPTSEPLVIELISQEPNPGVHYEYHLPLRRPSPGFSWSHGSWSDCSAECGGGHQSRLVFCTIDHEAYPDHMCQRQPRPADRRSCNLHPCPETKRWKAGPWAPCSASCGGGSQSRSVYCISSDGAGIQEAVEEAECAGLPGKPPAIQACNLQRCAAWSPEPWGECSVSCGVGVRKRSVTCRGERGSLLHTAACSLEDRPPLTEPCVHEDCPLLSDQAWHVGTWGLCSKSCSSGTRRRQVICAIGPPSHCGSLQHSKPVDVEPCNTQPCHLPQEVPSMQDVHTPASNPWMPLGPQESPASDSRGQWWAAQEHPSARGDHRGERGDPRGDQGTHLSALGPAPSLQQPPYQQPLRSGSGPHDCRHSPHGCCPDGHTASLGPQWQGCPGAPCQQSRYGCCPDRVSVAEGPHHAGCTKSYGGDSTGGMPRSRAVASTVHNTHQPQAQQNEPSECRGSQFGCCYDNVATAAGPLGEGCVGQPSHAYPVRCLLPSAHGSCADWAARWYFVASVGQCNRFWYGGCHGNANNFASEQECMSSCQGSLHGPRRPQPGASGRSTHTDGGGSSPAGEQEPSQHRTGAAVQRKPWPSGGLWRQDQQPGPGEAPHTQAFGEWPWGQELGSRAPGLGGDAGSPAPPFHSSSYRISLAGVEPSLVQAALGQLVRLSCSDDTAPESQAAWQKDGQPISSDRHRLQFDGSLIIHPLQAEDAGTYSCGSTRPGRDSQKIQLRIIGGDMAVLSEAELSRFPQPRDPAQDFGQAGAAGPLGAIPSSHPQPANRLRLDQNQPRVVDASPGQRIRMTCRAEGFPPPAIEWQRDGQPVSSPSTHRPAQGPWQGLRRPARAGQL

SEQ ID NO: 2573 - protein, 134 aa, Homo sapiens
MKSVLLLTTLLVPAHLVAAWSNNYAVDCPQHCDSSECKSSPRCKRTVLDDCGCCRVCAAGRGETCYRTVSGMDGMKCGPGLRCQPSNGEDPFGEEFGICKEHDMASGDGNIVREEVVKENAAGSPVMRKWLNPR

SEQ ID NO: 2574 - protein, 184 aa, Homo sapiens
MKSVLLLTTLLVPAHLVAAWSNNYAVDCPQHCDSSECKSSPRCKRTVLDDCGCCRVCAAGRGETCYRTVSGMDGMKCGPGLRCQPSNGEDPFGEEFGICKDCPYGTFGMDCRETCNCQSGICDRGTGKCLKFPFFQYSVTKSSNRFVSLTEHDMASGDGNIVREEVVKENAAGSPVMRKWLNPR

SEQ ID NO: 2575 - protein, 198 aa, Homo sapiens
MPIPASPLHPPLPSLLLYLLLELAGVTHVFHVQQTEMSQTVSTGESIILSCSVPNTLPNGPVLWFKGTGPNRKLIYNFKQGNFPRVKEIGDTTKPGNTDFSTRIREISLADAGTYYCVKFIKGRAIKEYQSGRGTQVFVTAEQNPRPPKNRPAGRAGSRAHHDAHTCLSALPERNSTNYFVQPCCCLRLLGLTGLLSK

SEQ ID NO: 2576 - protein, 197 aa, Homo sapiens
MPIPASPLHPPLPSLLLYLLLELAGVTHVFHVQQTEMSQTVSTGESIILSCSVPNTLPNGPVLWFKGTGPNRKLIYNFKQGNFPRVKEIGDTTKPGNTDFSTRIREISLADAGTYYCVKFIKGRAIKEYQSGRGTQVFVTEQNPRPPKNRPAGRAGSRAHHDAHTCLSALPERNSTNYFVQPCCCLRLLGLTGLLSK

SEQ ID NO: 2577 - protein, 520 aa, Homo sapiens
MTTDDTEVPAMTLAPGHAALETQTLSAETSSRASTPAGPIPEAETRGAKRISPARETRSFTKTSPNFMVLIATSVETSAASGSPEGAGMTTVQTITGSDPREAIFDTLCTDDISEEAKTLTMDILTLAHTSTEAKGLSSESSASSDGPHPVITPSRASESSASSDGPHPVITPSRASESSASSDGPHPVITPSRASESSASSDGPHPVITPSWSPGSDVTLLAEALVTVTNIEVINCSITEIETTTSSIPGASDTDLIPTEGVKASSTSDPPALPDSTNTKPHITEVTASAETLSTAGTTESAAPDATIGTPLPTNSTIEREVTAPGATTLSGALATGNPLEETSALSVETPSYVKVSGAAPVSIEAGSAVGKTTSFAGSSASSYSPLEAALKNFTPSETLTTDIATKGPFPTSRDPLPSVPPTTTNSSRGTNSTLAKITTSAKTTMKPPTATPTTARTRPTTDVSAGENGGFLLLRLSVASPEDLTDPRVAERLMQQLHRELHAHAPHFQVSLLRVRRG

SEQ ID NO: 2578 - protein, 199 aa, Homo sapiens
MLWRQLIYWQLLALFFLPFCLCQDEYMESPQTGGLPPDCSKCCHHGNNGNNGATGHKGEKGYPGIPPELQIAFMASLATHFSNQNSGIIFSSVETNIGNFFDVMTGRFGAPVSGVYFFTFSMMKHEDVEEVYVYLMHNGNTVFSMYSYEMKGKSDTSSNHAVLKLAKGDEVWLRMGNGALHGDHQRFSTFAGFLLFETK

SEQ ID NO: 2579 - protein, 319 aa, Homo sapiens
MLWRQLIYWQLLALFFLPFCLCQDEYMEVSGRTNKVVARIVQSHQQTGRSGSRREKVRERSHPKTGTVDNNTSTDLKSLRPDELPHPEVDDLAQITTFWGQSPQTGGLPPDCSKCCHGDYSFRGYQGPPGPPGPPGIPGNHGNNGNNGATGHEGAKGEKGDKGDLGPRGERGQHGPKGEKGYPGIPPELQIAFMASLATHFSNQNSGIIFSSVETNIGNFFDVMTGRFGAPVSGVYFFTFSMMKHEDVEEVYVYLMHNGNTVFSMYSYEMKGKSDTSSNHAVLKLAKGDEVWLRMGNGALHGDHQRFSTFAGFLLFETK

SEQ ID NO: 2580 - protein, 284 aa, Homo sapiens
MTKSSLRPLQKQSPQTGGLPPDCSKCCHGDYSFRGYQGPPGPPGPPGIPGNHGNNGNNGATGHEGAKGEKGDKGDLGPRGERGQHGPKGEKGYPGIPPELQIAFMASLATHFSNQNSGIIFSSVETNIGNFFDVMTGRFGAPVSGVYFFTFSMMKHEDVEEVYVYLMHNGNTVFSMYSYEMKGKSDTSSNHAVLKLAKGDEVWLRMGNGALHGDHQRFSTFAGFLLFETKCHGETPAGPRDSAAGKSKAYLCQAEWIWPVRKLLPVSWPRYQLFGFVRWKEQHI

SEQ ID NO: 2581 - protein, 77 aa, Homo sapiens
MATRSVLLALVVLNLLFYVPPGRSGPNVYIQKIFASCWRLQGTCRPKCLKNEQYRILCDTIHLCCVNPKYLPILTGK

SEQ ID NO: 2582 - protein, 78 aa, Homo sapiens
MNLCLSALLFFLVILLPSGKGMFGNDGVKVRTCTSQKAVCFFGCPPGYRWIAFCHNILSCCKNMTRFQPPQAKDPWVH

SEQ ID NO: 2583 - protein, 208 aa, Homo sapiens
MGAQGAQESIKAMWRVPGTTRRPVTGESPGMHRPEAMLLLLTLALLGGPTWAGKMYGPGGGKYFSTTEDYDHEITGLRVSVGLLLVKSVQVKLGDSWDVKLGALGGNTQEVTLQPGEYITKVFVAFQAFLRGMVMYTSKDRYFYFGKLDGQISSAYPSQEGQVLVGIYGQYQLLGIKSIGFEWNYPLEEPTTEPPVNLTYSANSPVGR

SEQ ID NO: 2584 - protein, 95 aa, Homo sapiens
MKFLLLVLAALGFLTQVIPASAGGSKCVSNTPGYCRTCCHWGETALFMCNASRKCCISYSFLPKPDLPQLIGNHWQSRRRNTQRKDKKQQTTVTS

SEQ ID NO: 2585 - protein, 112 aa, Homo sapiens
MFVLLYVTSFAICASGQPRGNQLKGENYSPRYICSIPGLPGPPGPPGANGSPGPHGRIGLPGRDGRDGRKGEKGEKGTAGLRGKTGPLGLAGEKGDQGETGKKGPIGPEGEK

SEQ ID NO: 2586 - protein, 99 aa, Homo sapiens
MGLFMIIAILLFQKPTVTEQLKKCWNNYVQGHCRKICRVNEVPEALCENGRYCCLNIKELEACKKITKPPRPKPATLALTLQDYVTIIENFPSLKTQST

SEQ ID NO: 2587 - protein, 111 aa, Homo sapiens
MKSLLFTLAVFMLLAQLVSGNWYVKKCLNDVGICKKKCKPEEMHVKNGWAMCGKQRDCCVPADRRANYPVFCVQTKTTRISTVTATTATTTLMMTTASMSSMAPTPVSPTG

SEQ ID NO: 2588 - protein, 565 aa, Homo sapiens
MEDSDSAAKQLGLAEAAAVAAAAAVAAAAAAAAGGEAEEPVLSRDEDSEEDADSEAERETPRVTAVAVMAAEPGHMDMGAEALPGPDEAAAAAAFAEVTTVTVANVGAAADNVFTTSVANAASISGHVLSGRTALQIGDSLNTEKATLIVVHTDGSIVETTGLKGPAAPLTPGPQSPPTPLAPGQEKGGTKYNWDPSVYDSELPVRCRNISGTLYKNRLGSGGRGRCIKQGENWYSPTEFEAMAGRASSKDWKRSIRYAGRPLQCLIQDGILNPHAASCTCAACCDDMTLSGPVRLFVPYKRRKKENELPTTPVKKDSPKNITLLPATAATTFTVTPSGQITTSGALTFDRASTVEATAVISESPAQGDVFAGATVQEASVQPPCRASHPEPHYPGYQDSCQIAPFPEAALPTSHPKIVLTSLPALAVPPPTPTKAAPPALVNGLELSEPRSWLYLEEMVNSLLNTAQQLKTLFEQAKHASTYREAATNQAKIHADAERKEQSCVNCGREAMSECTGCHKVNYCSTFCQRKDWKDHQHICGQSAAVTVQADEVHVAESVMEKVTV

SEQ ID NO: 2589 - protein, 156 aa, Homo sapiens
MNILMLTFIICGLLTRVTKGSFEPQKCWKNNVGHCRRRCLDTERYILLCRNKLSCCISIISHEYTRRPAFPVIHLEDITLDYSDVDSFTGSPVSMLNDLITFDTTKFGETMTPETNTPETTMPPSEATTPETTMPPSETATSETMPPPSQTALTHN

SEQ ID NO: 2590 - protein, 278 aa, Homo sapiens
MGGPRALLAALWALEAAGTAALRIGAFNIQSFGDSKVSDPACGSIIAKILAGYDLALVQEVRDPDLSAVSALMEQINSVSEHEYSFVSSQPLGRDQYKEMYLFVYRKDAVSVVDTYLYPDPEDVFSREPFVVKFSAPGTAQNLVLIPLHAAPHQAVAEIDALYDVYLDVIDKWGTDDMLFLGDFNADCSYVRAQDWAAIRLRSSEVFKWLIPDSADTTVGNSDCAYDRIVACGARLRRSLKPQSATVHDFQEEFGLDQTQALAISDHFPVEVTLKFHR

SEQ ID NO: 2591 - protein, 1012 aa, Homo sapiens
MAEAALEAVRSELREFPAAARELCVPLAVPYLDKPPTPLHFYRDWVCPNRPCIIRNALQHWPALQKWSLPYFRATVGSTEVSVAVTPDGYADAVRGDRFMMPAERRLPLSFVLDVLEGRAQHPGVLYVQKQCSNLPSELPQLLPDLESHVPWASEALGKMPDAVNFWLGEAAAVTSLHKDHYENLYCVVSGEKHFLFHPPSDRPFIPYELYTPATYQLTEEGTFKVVDEEAMEKAEVSRTCLLTVRVLQAHRLPSKDLVTPSDCYVTLWLPTACSHRLQTRTVKNSSSPVWNQSFHFRIHRQLKNVMELKVFDQDLVTGDDPVLSVLFDAGTLRAGEFRRESFSLSPQGEGRLEVEFRLQSLADRGEWLVSNGVLVARELSCLHVQLEETGDQKSSEHRVQLVVPGSCEGPQEASVGTGTFRFHCPACWEQELSIRLQDAPEEQLKAPLSALPSGQVVRLVFPTSQEPLMRVELKKEAGLRELAVRLGFGPCAEEQAFLSRRKQVVAAALRQALQLDGDLQEDEIPVVAIMATGGGIRAMTSLYGQLAGLKELGLLDCVSYITGASGSTWALANLYEDPEWSQKDLAGPTELLKTQVTKNKLGVLAPSQLQRYRQELAERARLGYPSCFTNLWALINEALLHDEPHDHKLSDQREALSHGQNPLPIYCALNTKGQSLTTFEFGEWCEFSPYEVGFPKYGAFIPSELFGSEFFMGQLMKRLPESRICFLEGIWSNLYAANLQDSLYWASEPSQFWDRWVRNQANLDKEQVPLLKIEEPPSTAGRIAEFFTDLLTWRPLAQATHNFLRGLHFHKDYFQHPHFSTWKATTLDGLPNQLTPSEPHLCLLDVGYLINTSCLPLLQPTRDVDLILSLDYNLHGAFQQLQLLGRFCQEQGIPFPPISPSPEEQLQPRECHTFSDPTCPGAPAVLHFPLVSDSFREYSAPGVRRTPEEAAAGEVNLSSSDSPYHYTKVTYSQEDVDKLLHLTHYNVCNNQEQLLEALRQAVQRRRQRRPH

SEQ ID NO: 2592 - protein, 515 aa, Homo sapiens
MAWPYFLDCHRYFTREDEGCYDPLEKLRGGLEADEALPSGLPPTFIRFSHHSYAQMVRVLRRTASRCAHVARTYSIGRSFDGRELLVIEFSSRPGQHELMEPEVKLIGNIHGNEVAGREMLIYLAQYLCSEYLLGNPRIQRLLNTTRIHLLPSMNPDGYEVAAAEGAGYNGWTSGRQNAQNLDLNRNFPDLTSEYYRLAETRGARSDHIPIPQHYWWGKVAPETKAIMKWMQTIPFVLSASLHGGDLVVSYPFDFSKHPQEEKMFSPTPDEKMFKLLSRAYADVHPMMMDRSENRCGGNFLKRGSIINGADWYSFTGGMSDFNYLHTNCFEITVELGCVKFPPEEALYILWQHNKESLLNFVETVHRGIKGVVTDKFGKPVKNARISVKGIRHDITTAPDGDYWRLLPPGIHIVIAQAPGYAKVIKKVIIPARMKRAGRVDFILQPLGMGPKNFIHGLRRTGPHDPLGGASSLGEATEPDPLRARRQPSADGSKPWWWSYFTSLSTHRPRWLLKY

SEQ ID NO: 2593 - protein, 94 aa, Homo sapiens
MRTLAILAAILLVALQAQAEPLQARADEVAAAPEQIAADIPEVVVSLAWDESLAPKHPGSRKNMACYCRIPACIAGERRYGTCIYQGRLWAFCC

SEQ ID NO: 2594 - protein, 139 aa, Homo sapiens
MGNPGGVGSERMRVARRTRNVCRCPRAAGPGVPEPRAAPLPLLAMAPPPACRSPMSPPPPPLLLLLLSLALLGARARAEPAGSAVPAQSRPCVDCHAFEFMQRALQDLRKTACSLDARTETLLLQAERRALCACWPAGH

SEQ ID NO: 2595 - protein, 156 aa, Homo sapiens
MAPAVTRLLFLQLVLGPTLVMDIKMQIGSRNFYTLSIDYPRVNYPKGFRGYCNGLMSYMRGKMQNSDCPKIHYVIHAPWKAIQKFCKYSDSFCENYNEYCTLTQDSLPITVCSLSHQQPPTSCYYNSTLTNQKLYLLCSRKYEADPIGIAGLYSGI

SEQ ID NO: 2596 - protein, 147 aa, Homo sapiens
MIIMVIIFLVLLFWENEVNDEAVMSTLEHLHVDYPQNDVPVPARYCNHMIIQRVIREPDHTCKKEHVFIHERPRKINGICISPKKVACQNLSAIFCFQSETKFKMTVCQLIEGTRYPACRYHYSPTEGFVLVTCDDLRPDSFLGYVK

SEQ ID NO: 2597 - protein, 150 aa, Homo sapiens; identical to SEQ ID NO: 2126

SEQ ID NO: 2598 - protein, 913 aa, Homo sapiens; identical to SEQ ID NO: 2128

SEQ ID NO: 2599 - protein, 150 aa, Homo sapiens; identical to SEQ ID NO: 2126

SEQ ID NO: 2600 - protein, 188 aa, Homo sapiens; identical to SEQ ID NO: 2489

SEQ ID NO: 2601 - protein, 844 aa, Homo sapiens; identical to SEQ ID NO: 2289

SEQ ID NO: 2602 - protein, 78 aa, Homo sapiens; identical to SEQ ID NO: 2320

SEQ ID NO: 2603 - protein, 899 aa, Homo sapiens; identical to SEQ ID NO: 2512

SEQ ID NO: 2604 - protein, 961 aa, Homo sapiens; identical to SEQ ID NO: 2513

SEQ ID NO: 2605 - protein, 844 aa, Homo sapiens; identical to SEQ ID NO: 2289

SEQ ID NO: 2606 - protein, 844 aa, Homo sapiens; identical to SEQ ID NO: 2289

SEQ ID NO: 2607 - protein, 899 aa, Homo sapiens; identical to SEQ ID NO: 2512

SEQ ID NO: 2608 - protein, 961 aa, Homo sapiens; identical to SEQ ID NO: 2513

SEQ ID NO: 2609 - protein, 844 aa, Homo sapiens; identical to SEQ ID NO: 2289

SEQ ID NO: 2610 - protein, 1029 aa, Homo sapiens
MPPTKSVSEPVPFETEAPSMTIVPTTDIEPVTVRTEATVTTLAPKTSQRTRTRRPRPKHKTTPRPETLQTKLDFGPITPGTSSAPTTTTKRTRRPHPKPKTTPHPEVPQTKLVPATILEPVLRTEASGTTAVPATIFEPVSPIKEAPGTTFVPVTDLEPVTFRTEIPATTLATKTSKRTRPPRPRPKTTPSPQAPETKPVPATVLEPVTLRPEASTTLASKTSQRTRRPRLRTKTTPRPEAPESKPVPTAELKPVTLRTETWVTTQAPKTSQRTRRPRPKTKTTPSPEVPQTKLVPSTDLEPGTLRTEAPKTMVVTTVLEPDTFRTKFPETTLAPKTQRTRRPRPRPKTTSSPEVPQNKSVSVTGFEPVVHSTDAPGTTFALTELQTLILKPVTSPSLEMTESQPVSDVLESVTLSTESPKETIAPAKTDYVYPTAKAPLWPEEPKTEVVESITYVSEPPETTLETSPLPSQSITLPSPDEPQTEPAPKQTPRAPPKPKTSPRPRIPQTQPVPKVPQRVTAKPKTSPSPEVSYTTPAPKDVLLPHKPYPEVSQSEPAPLETRGIPFIPMISPSPSQEELQTTLEETDQSTQEPFTTKIPRTTELAKTTQAPHRFYTTVRPRTSDKPHIRPGVKQAPRPSGADRNVSVDSTHPTKKPGTRRPPLPPRPTHPRRKPLPPNNVTGKPGSAGIISSGPITTPPLRSTPRPTGTPLERIETDIKQPTVPASGEELENITDFSSSPTRETDPLGKPRFKGPHVRYIQKPDNSPCSITDSVKRFPKEEATEGNATSPPQNPPTNLTVVTVEGCPSFVILDWEKPLNDTVTEYEVISRENGSFSGKNKSIQMTNQTFSTVENLKPNTSYEFQVKPKNPLGEGPVSNTVAFSTESADPRVSEPVSAGRDAIWTERPFNSDSYSECKGKQYVKRTWYKKFVGVQLCNSLRYKIYLSDSLTGKFYNIGDQRGHGEDHCQFVDSFLDGRTGQQLTSDQLPIKEGYFRAVRQEPVQFGEIGGHTQINYVQWYECGTTIPGKW

SEQ ID NO: 2611 - protein, 784 aa, Homo sapiens
MTIVPTTDIEPVTVRTEATVTTLAPKTSQRTRTRRPRPKHKTTPRPETLQTKLDFGPITPGTSSAPTTTTKRTRRPHPKPKTTPHPEVPQTKLAPKVPQRTHRPHPKPKTTLSPEELQTELVPVTDLEPVTFRTEIPATTLATKTSKRTRPPRPRPKTTPSPQAPETKPVPATVLEPVTLRPEASTTLASKTSQRTRRPRLRTKTTPRPEAPESKPAPKQTPRAPPKPKTSPRPRIPQTQPVPKVPQRVTAKPKTSPSPEVSYTTPAPKDVLLPHKPYPEVSQSEPAPLETRGIPFIPMISPSPSQEELQTTLEETDQSTQEPFTTKIPRTTELAKTTQAPHRFYTTVRPRTSDKPHIRPVLNRTTTRPTRPKPSGMPSGNGVGTGVKQAPRPSGADRNVSVDSTHPTKKPGTRRPPLPPRPTHPRRKPLPPNNVTGKPGSAGIISSGPITTPPLRSTPRPTGTPLERIETDIKQPTVPASGEELENITDFSSSPTRETDPLGKPRFKGPHVRYIQKPDNSPCSITDSVKRFPKEEATEGNATSPPQNPPTNLTVVTVEGCPSFVILDWEKPLNDTVTEYEVISRENGSFSGKNKSIQMTNQTFSTVENLKPNTSYEFQVKPKNPLGEGPVSNTVAFSTESADPRVSEPVSAGRDAIWTERPFNSDSYSECKGKQYVKRTWYKKFVGVQLCNSLRYKIYLSDSLTGKFYNIGDQRGHGEDHCQFVDSFLDGRTGQQLTSDQLPIKEGYFRAVRQEPVQFGEIGGHTQINYVQWYECGTTIPGKW

SEQ ID NO: 2612 - protein, 527 aa, Homo sapiens
MLMLFVFGVLLHEVSLSGQNEAPPNTHSIPGEPLYNYASIRLPEEHIPFFLHNNRHIATVCRKDSLCPYKKHLEKLKYCWGYEKSCKPEFRFGYPVCSYVDMGWTDTLESAEDIFWKQADFGYARERLEEMHVLCQPKETSDSSLVCSRYLQYCRATNLYLDLRNIKRNHDRFKEDFFQSGEIGGHCKLDIRTLTSEGQRKSPLQSWFAELQSYTQLNFRPIEDAKCDIVIEKPTYFMKLDAGVNMYHHFCDFINLYITQHVNNSFSTDVYIVMWDTSSYGYGDLFSDTWNAFTDYDVIHLKTYDSKRVCFKEAVFSLLPRMRYGLFYNTPLISGCQNTGLFRAFAQHVLHRLNITQEGPKDGKIRVTILARSTEYRKILNQNELVNALKTVSTFEVQIVDYKYRELGFLDQLRITHNTDIFIGMHGAGLTHLLFLPDWAAVFELYNCEDERCYLDLARLRGVHYITWRRQNKVFPQDKGHHPTLGEHPKFTNYSFDVEEFMYLVLQAADHVLQHPKWPFKKKHDEL

SEQ ID NO: 2613 - protein, 667 aa, Homo sapiens; identical to SEQ ID NO: 2011

SEQ ID NO: 2614 - protein, 366 aa, Homo sapiens
MPMISVLGKMFLWQREGPGGRWTCQTSRRVSSDPAWAVEWIELPRGLSLSSLGSARTLRGWSRSSRPSSVDSQDLPEVNVGDTVAMLPKSRRALTIQEIAALARSSLHGISQVVKDHVTKPTAMAQGRVAHLIEWKGWSKPSDSPAALESAFSSYSDLSEGEQEARFAAGVAEQFAIAEAKLRAWSSVDGEDSTDDSYDEDFAGGMDTDMAGQLPLGPHLQDLFTGHRFSRPVRQGSVEPESDCSQTVSPDTLCSSLCSLEDGLLGSPARLASQLLGDELLLAKLPPSRESAFRSLGPLEAQDSLYNSPLTESCLSPAEEEPAPCKDCQPLCPPLTGSWERQRQASDLASSGVVSLDEDEAEPEEQ

SEQ ID NO: 2615 - protein, 1723 aa, Homo sapiens
MQFQLTLFLHLGWLSYSKAQDDCNRGACHPTTGDLLVGRNTQLMASSTCGLSRAQKYCILSYLEGEQKCFICDSRFPYDPYDQPNSHTIENVIVSFEPDREKKWWQSENGLDHVSIRLDLEALFRFSHLILTFKTFRPAAMLVERSTDYGHNWKVFKYFAKDCATSFPNITSGQAQGVGDIVCDSKYSDIEPSTGGEVVLKVLDPSFEIENPYSPYIQDLVTLTNLRINFTKLHTLGDALLGRRQNDSLDKYYYALYEMIVRGSCFCNGHASECRPMQKMRGDVFSPPGMVHGQCVCQHNTDGPNCERCKDFFQDAPWRPAADLQDNACRSCSCNSHSSRCHFDMTTYLASGGLSGGVCEDCQHNTEGQHCDRCRPLFYRDPLKTISDPYACIPCECDPDGTISGGICVSHSDPALGSVAGQCLCKENVEGAKCDQCKPNHYGLSATDPLGCQPCDCNPLGSLPFLTCDVDTGQCLCLSYVTGAHCEECTVGYWGLGNHLHGCSPCDCDIGGAYSNVCSPKNGQCECRPHVTGRSCSEPAPGYFFAPLNFYLYEAEEATTLQGLAPLGSETFGQSPAVHVVLGEPVPGNPVTWTGPGFARVLPGAGLRFAVNNIPFPVDFTIAIHYETQSAADWTVQIVVNPPGGSEHCIPKTLQSKPQSFALPAATRIMLLPTPICLEPDVQYSIDVYFSQPLQGESHAHSHVLVDSLGLIPQINSLENFCSKQDLDEYQLHNCVEIASAMGPQVLPGACERLIISMSAKLHDGAVACKCHPQGSVGSSCSRLGGQCQCKPLVVGRCCDRCSTGSYDLGHHGCHPCHCHPQGSKDTVCDQVTGQCPCHGEVSGRRCDRCLAGYFGFPSCHPCPCNRFAELCDPETGSCFNCGGFTTGRNCERCIDGYYGNPSSGQPCRPCLCPDDPSSNQYFAHSCYQNLWSSDVICNCLQGYTGTQCGECSTGFYGNPRISGAPCQPCACNNNIDVTDPESCSRVTGECLRCLHNTQGANCQLCKPGHYGSALNQTCRRCSCHASGVSPMECPPGGGACLCDPVTGACPCLPNVTGLACDRCADGYWNLVPGRGCQSCDCDPRTSQSSHCDQLTGQCPCKLGYGGKRCSECQENYYGDPPGRCIPCDCNRAGTQKPICDPDTGMCRCREGVSGQRCDRCARGHSQEFPTCLQCHLCFDQWDHTISSLSKAVQGLMRLAANMEDKRETLPVCEADFKDLRGNVSEIERILKHPVFPSGKFLKVKDYHDSVRRQIMQLNEQLKAVYEFQDLKDTIERAKNEADLLLEDLQEEIDLQSSVLNASIADSSENIKKYYHISSSAEKKINETSSTINTSANTRNDLLTILDTLTSKGNLSLERLKQIKIPDIQILNEKVCGDPGNVPCVPLPCGGALCTGRKGHRKCRGPGCHGSLTLSTNALQKAQEAKSIIRNLDKQVRGLKNQIESISEQAEVSKNNALQLREKLGNIRNQSDSEEENINLFIKKVKNFLLEENVPPEDIEKVANGVLDIHLPIPSQNLTDELVKIQKHMQLCEDYRTDENRLNEEADGAQKLLVKAKAAEKAANILLNLDKTLNQLQQAQITQGRANSTITQLTANITKIKKNVLQAENQTREMKSELELAKQRSGLEDGLSLLQTKLQRHQDHAVNAKVQAESAQHQAGSLEKEFVELKKQYAILQRKTSTTGLTKETLGKVKQLKDAAEKLAGDTEAKIRRITGCFQNSAR

SEQ ID NO: 2616 - protein, 1761 aa, Homo sapiens; identical to SEQ ID NO: 1838

SEQ ID NO: 2617 - protein, 484 aa, Homo sapiens
MGAEALPGPDEAAAAAAFAEVTTVTVANVGAAADNVFTTSVANAASISGHVLSGRTALQIGDSLNTEKATLIVVHTDGSIVETTGLKGPAAPLTPGPQSPPTPLAPGQEKGGTKYNWDPSVYDSELPVRCRNISGTLYKNRLGSGGRGRCIKQGENWYSPTEFEAMAGRASSKDWKRSIRYAGRPLQCLIQDGILNPHAASCTCAACCDDMTLSGPVRLFVPYKRRKKENELPTTPVKKDSPKNITLLPATAATTFTVTPSGQITTSGALTFDRASTVEATAVISESPAQGDVFAGATVQEASVQPPCRASHPEPHYPGYQDSCQIAPFPEAALPTSHPKIVLTSLPALAVPPPTPTKAAPPALVNGLELSEPRSWLYLEEMVNSLLNTAQQLKTLFEQAKHASTYREAATNQAKIHADAERKEQSCVNCGREAMSECTGCHKVNYCSTFCQRKRWSLTMLTSLVSISWLRAILPCQPPKVLGL

SEQ ID NO: 2618 - protein, 503 aa, Homo sapiens
MSGALLWPLLPLLLLLLSARDGVRAAQPQAPGYLIAAPSVFRAGVEEVISVTIFNSPREVTVQAQLVAQGEPVVQSQGAILDKGTIKLKVPTGLRGQALLKVWGRGWQAEEGPLFHNQTSVTVDGRGASVFIQTDKPVYRPQHRVLISIFTVSPNLRPVNEKLEAYILDPRGSRMIEWRHLKPFCCGITNMSFPLSDQPVLGEWFIFVEMQGHAYNKSFEVQKYVLPKFELLIDPPRYIQDLDACETGTVRARYTFGKPVAGALMINMTVNGVGYYSHEVGRPVLRTTKILGSRDFDICVRDMIPADVPEHFRGRVSIWAMVTSVDGSQQVAFDDSTPVQRQLVDIRYSKDTRKQFKPGLAYVGKVELSYPDGSPAEGVTVQIKAELTPKDNIYTSEVVSQRGLVGFEIPSIPTSAQHVWLEVFQELEDYDVSDSFGVSREDGPFWWAGLTAQRRRRSSVFPWPWGITKDSGFAFTVRRGNGTGGDDRPSEPEPPAGRWPLHR

SEQ ID NO: 2619 - protein, 47 aa, Homo sapiens
MKLCVTVLSLLVLVAAFCSLALSAPKASKSALTPVSPGSRSTCMTWN

SEQ ID NO: 2620 - protein, 286 aa, Homo sapiens
MEVYIRHLEKVLRRYVQRLQWLLSGPVLCSRTWYRQSMDRGVMMTAASGSRRLFGTVLESKVCILLDTSGSMGPYLQQVKTELVLLIWEQLRKCCDSFNLLSFAESFQSWQDTLVETTDAACHEAMQWVTHLQAQGSTSILQALLKAFSFHDLEGLYLLTDGKPDTSCSLVLNEVQKLREKRDVKVHTISLNCSDRAAVEFLRKLASFTGGRYHCPVGEDTLSKIHSLLTKGFINEKDPTLPPFEGDDLRILAQEITKARSFLWQAQSFRSQLQKKNDAEPKVTLS

SEQ ID NO: 2621 - protein, 1184 aa, Homo sapiens
MKKYRKISIGCFAMATQTSHVFHGQENMFLENHCIRRNTGRDSKKPLKQKNMNGLGQNSDNGLLVTHVNQTQDLLRLQGSETQSSDWEDSEDWLSAHSLKCQKLTLADLISQGTEVLEEGTNVVQKICFSTQIIRHFESKLSDTIEVYQERIQWLTENSKKAFGLIKGARVSILIDVSAISSGPQKEEFQKDLMSLIDEQLSHKEKLFVLSFGTNAGSLWPDPMEVSASTLQELKLWVKTLQPDGGSNLLQALKKIFTLKGLDSLVAIMRSCPDQPSEILSDYIQQSTMGRDLIIHFITYRCDDQMPPAVLKNLAEAVRGYYHCYSPKMEHYTSRDMDELLAEIQKAQSLLSHVQALQHSSPCEALTCTMEEISTEITNGPLISLLPKPPKHDAPLTIEFPNLDKTSAEWLKVNGLKAKKLSLYQVLAPNAFSPVEEFVPILQKTVSSTIHEKAMIQFEWHDGTVKNIHVDPPFLYKYQQQLSRAMRMYERRIEWLSLASRRIWGTVCEKRVVVLLDISATNSMYIIHIQHSLRLLLEEQLSNKDCFNLIAFGSTIESWRPEMVPVSHNNLQSAWRWALNLRCRGSRNVLSALRKAVEVDFKDKDKHQSQGIYLFTGGIPDQDMPTLSAYMAEACGGCDLQLNVCLFYVGEPKMDTTPPARYASHTDTAAAYKEVTRAAGGRFHWFGDTGIYESDDINSIMSEMEKALNYSQKCAFLMASLKNHSGKVLGSSALPKEKPKTLQLRSQPKKLCPPRPTVPLGARMSIKDDPDREKSPPLKSLKWRPLSSRVGISPAAAQPTKEGMMELRRKTKSREAETSLLLFYTEKGNDVGSVYKKYPQGRGLRRTSSSIDLPRKDTVCSSQEWVAKYGLKKLKLEISRCMGPNCTHQKSGQRSASAKHCSIFPSVEIHGVVRHIQWTPREMEVYIRHLEKVLRRYVQRLQWLLSGSRRLFGTVLESKVCILLDTSGSMGPYLQQVKTELVLLIWEQLRKCCDSFNLLSFAESFQSWQDTLVETTDAACHEAMQWVTHLQAQGSTSILQALLKAFSFHDLEGLYLLTDGKPDTSCSLVLNEVQKLREKRDVKVHTISLNCSDRAAVEFLRKLASFTGGRYHCPVGEDTLSKIHSLLTKGFINEKDPTLPPFEGDDLRILAQEITKARSFLWQAQSFRSQLQKKNDAEPKVTLS

SEQ ID NO: 2622 - protein, 301 aa, Homo sapiens; identical to SEQ ID NO: 1916

SEQ ID NO: 2623 - protein, 1573 aa, Homo sapiens
MRVLACLLAALVGIQAVERLRLADGPHGCAGRLEVWHGGRWGTVCDDGWDLRDAAVACRQLGCGGALAAPGGAFFGEGAGPVWLSELACRGNEGQLGLCHHRGWKAHICSHEEDAGVVCAGQRVANSRDDSTSPLDGAPWPGLLLELSPSTEEPLVTHAPRPAGNPQNASRKKSPRPKQAKSTRAPLLTTGAPRQERLRLVSGPHRCAGRLEVWHGGRWGTVCDDGWDLRDAAVACRELGCGGALAAPGGARFGPGAGPVWMDDVGCGGGEQALRDCPRSPWGRSNCDHSEDAGLVCTGPAPRLRLADGPHGCAGRLEVWHGGRWGSVCDDAWDLRDAAVACRELGCGGALAAPGGAFFGEGSGPIILDDLRCRGNETALRFCPARPWGQHDCHHREDAGAVCDGMPLGYVPPTAPTDSNNSTPREAASRPPSTMTSQAPGTAGVSPPPASPTVLWEPGPEAGSPQLRLVAGPSKCSGRLEVWHDQRWGTVCDDSWDMRDSAVVCRELGCGGPQQPDPAAGRFGWGAGPIWLDDVGCVGTEASLSDCPAAPWGKHNCAHNEDVGVTCTGPPGLDSISDPFSWSWIPGLGRDRDAWLPGELATKPSASVTASVLEKTTTKAPGKMPKSTKKWVTKNAKRPTTQPPVMPTTKHSRAQSPPDLTSQTTAALTTEASRRPTSEFTRRPTTEAPQRWTSHTTATLTPQAPRERTTKTMAMLTTQGPQEMTSESTIKSIPQASLEPSAEIPEGSPESPKDPAPSPSVSTTGESGLFRVRLADGPNRCAGRLEVWHAGRWGTVCDDNWDLRDATVACWELGCGKVRPRVGKTHYGPGTGPIWLDDMGCKGSEASLSDCPSGAWGKHNCDHEEDVGLTCTGYTDYDDYPPWTWDPTSREDLAKGTTTAGVPGHTLPWRTTRRPGSSSPAIRRLPDTGSKDGYKLPWTWDTPSGRGLAEGTPTAGKLGPTLGAGTTRSPGSPPTLRVHGDTGSPRKPWPERRPPRPAATRTAPPTPSPGPSASPGPPGPALTSDSSRELTPHSALTSEATSDAPDTSPPTPDPASRTNPDLILTSPDFALSTPDSSVVPALTPEPSPTPLPTLPKELTSDPSTPSEVTSLSPTSEQVPESDTTPDLDTTPYSSTVSEYSRSPDPSPSPHPTTTPDPTMAPDPITTLNPTVTPHFPTTPHPTTTPHPTTITHSTMIPDPTTTPQPFTTITHSTMIPDPTTTPQPFTTMQPTTTPHSTTPHPTTTPHPTTITHSTMIPDPTTTPQPFTTMQPTTMPHPTTTPHPTTTPHPTTTPHPTTTPHPTMTPDPTTTPYPTTTPDPTTTPHPTTPDPSSTPVITTVSLPTSLGTELSSPTLAPTVKPSLHPQLTFTAPAPHTSTSQIPTLEPSPALESSPSRSSTATSMDPLSTEDFKPPRSQSPNLTPPPTHTPHSASDLTVSPDPLLSPTAHPLDHPPLDPLTLGPTPGQSPGPHGPCVAPTPPVRVMACEPPALVELVAAVRDVGGQLQRLTQVVEQERQERQALLLGLTQLVEAARGLGQLGEAVKRLAEMAWTTSMPAPTTTTPEEEERPLRGDV

SEQ ID NO: 2624 - protein, 636 aa, Homo sapiens; identical to SEQ ID NO: 2224

SEQ ID NO: 2625 - protein, 678 aa, Homo sapiens
MRTVVLTMKASVIEMFLVLLVTGVHSNKETAKKIKRPKFTVPQINCDVKAGKIIDPEFIVKCPAGCQDPKYHVYGTDVYASYSSVCGAAVHSGVLDNSGGKILVRKVAGQSGYKGSYSNGVQSLSLPRWRESFIVLESKPKKGVTYPSALTYSSSKSPAAQAGETTKAYQRPPIPGTTAQPVTLMQLLAVTVAVATPTTLPRPSPSAASTTSIPRPQSVGHRSQEMDLWSTATYTSSQNRPRADPGIQRQDPSGAAFQKPVGADVSLGLVPKEELSTQSLEPVSLGDPNCKIDLSFLIDGSTSIGKRRFRIQKQLLADVAQALDIGPAGPLMGVVQYGDNPATHFNLKTHTNSRDLKTAIEKITQRGGLSNVGRAISFVTKNFFSKANGNRSGAPNVVVVMVDGWPTDKVEEASRLARESGINIFFITIEGAAENEKQYVVEPNFANKAVCRTNGFYSLHVQSWFGLHKTLQPLVKRVCDTDRLACSKTCLNSADIGFVIDGSSSVGTGNFRTVLQFVTNLTKEFEISDTDTRIGAVQYTYEQRLEFGFDKYSSKPDILNAIKRVGYWSGGTSTGAAINFALEQLFKKSKPNKRKLMILITDGRSYDDVRIPAMAAHLKGVITYAIGVAWAAQEELEVIATHPARDHSFFVDEFDNLHQYVPRIIQNICTEFNSQPRN

SEQ ID NO: 2626 - protein, 107 aa, Homo sapiens
  VARIANT 1: note = MOD_RES - Any amino acid
XTVAAPSVFIFPPSDEQLKSGTASVVCLLNNFYPREAKVQWKVDNALQSGNSQESVTEQDSKDSTYSLSSTLTLSKADYEKHKVYACEVTHQGLSSPVTKSFNRGEC

SEQ ID NO: 2627 - protein, 121 aa, Homo sapiens
MVLQTQVFISLLLWISGAYGDIVMTQSPDSLAVSLGERATINCKSSQSVLYSSNNKNYLAWYQQKPGQPPKLLIYWASTRESGVPDRFSGSGSGTDFTLTISSLQAEDVAVYYCQQYYSTP

SEQ ID NO: 2628 - protein, 327 aa, Homo sapiens
ASTKGPSVFPLAPCSRSTSESTAALGCLVKDYFPEPVTVSWNSGALTSGVHTFPAVLQSSGLYSLSSVVTVPSSSLGTKTYTCNVDHKPSNTKVDKRVESKYGPPCPSCPAPEFLGGPSVFLFPPKPKDTLMISRTPEVTCVVVDVSQEDPEVQFNWYVDGVEVHNAKTKPREEQFNSTYRVVSVLTVLHQDWLNGKEYKCKVSNKGLPSSIEKTISKAKGQPREPQVYTLPPSQEEMTKNQVSLTCLVKGFYPSDIAVEWESNGQPENNYKTTPPVLDSDGSFFLYSRLTVDKSRWQEGNVFSCSVMHEALHNHYTQKSLSLSLGK

SEQ ID NO: 2629 - protein, 326 aa, Homo sapiens
ASTKGPSVFPLAPCSRSTSESTAALGCLVKDYFPEPVTVSWNSGALTSGVHTFPAVLQSSGLYSLSSVVTVPSSNFGTQTYTCNVDHKPSNTKVDKTVERKCCVECPPCPAPPVAGPSVFLFPPKPKDTLMISRTPEVTCVVVDVSHEDPEVQFNWYVDGVEVHNAKTKPREEQFNSTFRVVSVLTVVHQDWLNGKEYKCKVSNKGLPAPIEKTISKTKGQPREPQVYTLPPSREEMTKNQVSLTCLVKGFYPSDISVEWESNGQPENNYKTTPPMLDSDGSFFLYSKLTVDKSRWQQGNVFSCSVMHEALHNHYTQKSLSLSPGK

SEQ ID NO: 2630 - protein, 330 aa, Homo sapiens [sequence omitted]

SEQ ID NO: 2631 - protein, 216 aa, Homo sapiens; identical to SEQ ID NO: 2146

SEQ ID NO: 2632 - protein, 253 aa, Homo sapiens; identical to SEQ ID NO: 2050

SEQ ID NO: 2633 - protein, 155 aa, Homo sapiens
MFQRLLLLLLLSMGGTWASKEPLRPRCRPINATLAVEKEGCPVCITVNTTICAGYCPTMTRVLQGVLPALPQVVCNYRDVRFESIRLPGCPRGVNPVVSYAVALSCQCALCRRSTTDCGGPKDHPLTCDDPRFQDSSSSKAPPPSLPSPSRLPGP

SEQ ID NO: 2634 - protein, 517 aa, Homo sapiens
MAVSRKDWSALSSLARQRTLEDEEEQERERRRRHRNLSSTTDDEAPRLSQNGDRQASASERLPSVEEAEVPKPLPPASKDEDEDIQSILRTRQERRQRRQVVEAAQAPIQERLEAEEGRNSLSPVQATQKPLVSKKELEIPPRRRLSREQRGPWALEEESLVGREPEERKKGVPEKSPVLEKSSMPKKTAPEKSLVSDKTSISEKVLASEKTSLSEKIAVSEKRNSSEKKSVLEKTSVSEKSLAPGMALGSGRRLVSEKASIFEKALASEKSPTADAKPAPKRATASEQPLAQEPPASGGSPATTKEQRGRALPGKNLPSLAKQGASDPPTVASRLPPVTLQVKIPSKEEEADMSSPTQRTYSSSLKRSSPRTISFRMKPKKENSETTLTRSASMKLPDNTVKLGEKLERYHTAIRRSESVKSRGLPCTELFVAPVGVASKRHLFEKELAGQSRAEPASSRKENLRLSGVVTSRLNLWISRTQESGDQDPQEAQKASSATERTQWGQKSDSSLDAEV

SEQ ID NO: 2635 - protein, 89 aa, Homo sapiens; identical to SEQ ID NO: 2110

SEQ ID NO: 2636 - protein, 433 aa, Homo sapiens
MGNACWELYCLEHGIQPDGQMPSDKTIGGGDDSFTTFFCETGAGKHVPRAVFVDLEPTVIDEIRNGPYRQLFHPEQLITGKEDAANNYARGHYTIGKEIIDPVLDRIRKLSDQCTGLQGFLVFHSFGGGTGSGFTSLLMERLSVDYGKKSKLEFSIYPAPQVSTAVVEPYNSILTTHTTLEHSDCAFMVDNEAIYDICRRNLDIERPTYTNLNRLISQIVSSITASLRFDGALNVDLTEFQTNLVPYPRIHFPLATYAPVISAEKAYHEQLSVAEITNACFEPANQMVKCDPRHGKYMACCLLYRGDVVPKDVNAAIAAIKTKRSIQFVDWCPTGFKVGINYQPPTVVPGGDLAKVQRAVCMLSNTTAIAEAWARLDHKFDLMYAKRAFVHWYVGEGMEEGEFSEAREDMAALEKDYEEVGIDSYEDEDEGEE

SEQ ID NO: 2637 - protein, 654 aa, Homo sapiens; identical to SEQ ID NO: 2009

SEQ ID NO: 2638 - protein, 390 aa, Homo sapiens
MKFQGPLACLLLALCLGSGEAGPLQSGEESTGTNIGEALGHGLGDALSEGVGKAIGKEAGGAAGSKVSEALGQGTREAVGTGVRQVPGFGVADALGNRVGEAAHALGNTGHEIGRQAEDVIRHGADAVRGSWQGVPGHNGAWETSGGHGIFGSQGGLGGQGQGNPGGLGTPWVHGYPGNSAGSFGMNPQGAPWGQGGNGGPPNFGTNTQGAVAQPGYGSVRASNQNEGCTNPPPSGSGGGSSNSGGGSGSQSGSSGSGSNGDNNNGSSSGGSSSGSSSGGSSGGSSGGSSGNSGGSRGDSGSESSWGSSTGSSSGNHGGSGGGNGHKPGCEKPGNEARGSGESGIQGFRGQGVSSNMRNSETSPGMFNFDTFWKNFKSKLGFINWDAINK

SEQ ID NO: 2639 - protein, 281 aa, Homo sapiens; identical to SEQ ID NO: 2217

SEQ ID NO: 2640 - protein, 291 aa, Homo sapiens
VLSASGPGRKMGSRGQGLLLAYCLLLAFASGLVLSRVPHVQGEQQEWEGTEELPSPPDHAERAEEQHEKYRPSQDQGLPASRCLRCCDPGTSMYPATAVPQINITILKGEKGDRGDRGLQGKYGKTGSAGARGHTGPKGQKGSMGAPGERCKSHYAAFSVGRKKPMHSNHYYQTVIFDTEFVNLYDHFNMFTGKFYCYVPGLYFFSLNVHTWNQKETYLHIMKNEEEVVILFAQVGDRSIMQSQSLMLELREQDQVWVRLYKGERENAIFSEELDTYITFSGYLVKHATEP

SEQ ID NO: 2641 - protein, 333 aa, Homo sapiens
MVSKSRWKLLAMLALVLVVMVWYSISREDRYIELFYFPIPEKKEPCLQGEAESKASKLFGNYSRDQPIFLRLEDYFWVKTPSAYELPYGTKGSEDLLLRVLAITSSSIPKNIQSLRCRRCVVVGNGHRLRNSSLGDAINKYDVVIRLNNAPVAGYEGDVGSKTTMRLFYPESAHFDPKVENNPDTLLVLVAFKAMDFHWIETILSDKKRVRKGFWKQPPLIWDVNPKQIRILNPFFMEIAADKLLSLPMQQPRKIKQKPTTGLLAITLALHLCDLVHIAGFGYPDAYNKKQTIHYYEQITLKSMAGSGHNVSQEALAIKRMLEMGAIKNLTSF

SEQ ID NO: 2642 - protein, 103 aa, Homo sapiens [sequence omitted]

SEQ ID NO: 2643 - protein, 103 aa, Homo sapiens [sequence omitted]

SEQ ID NO: 2644 - protein, 103 aa, Homo sapiens [sequence omitted]

SEQ ID NO: 2645 - protein, 103 aa, Homo sapiens [sequence omitted]

SEQ ID NO: 2646 - protein, 755 aa, Homo sapiens
MPPFLLLEAVCVFLFSRVPPSLPLQEVHVSKETIGKISAASKMMWCSAAVDIMFLLDGSNSVGKGSFERSKHFAITVCDGLDISPERVRVGAFQFSSTPHLEFPLDSFSTQQEVKARIKRMVFKGGRTETELALKYLLHRGLPGGRNASVPQILIIVTDGKSQGDVALPSKQLKERGVTVFAVGVRFPRWEELHALASEPRGQHVLLAEQVEDATNGLFSTLSSSAICSSATPDCRVEAHPCEHRTLEMVREFAGNAPCWRGSRRTLAVLAAHCPFYSWKRVFLTHPATCYRTTCPGPCDSQPCQNGGTCVPEGLDGYQCLCPLAFGGEANCALKLSLECRVDLLFLLDSSAGTTLDGFLRAKVFVKRFVRAVLSEDSRARVGVATYSRELLVAVPVGEYQDVPDLVWSLDGIPFRGGPTLTGSALRQAAERGFGSATRTGQDRPRRVVVLLTESHSEDEVAGPARHARARELLLLGVGSEAVRAELEEITGSPKHVMVYSDPQDLFNQIPELQGKLCSRQRPGCRTQALDLVFMLDTSASVGPENFAQMQSFVRSCALQFEVNPDVTQVGLVVYGSQVQTAFGLDTKPTRAAMLRAISQAPYLGGVGSAGTALLHIYDKVMTVQRGARPGVPKAVVVLTGGRGAEDAAVPAQKLRNNGISVLVVGVGPVLSEGLRRLAGPRDSLIHVAAYADLRYHQDVLIEWLCGEAKQPVNLCKPSPCMNEGSCVLQNGSYRCKCRDGWEGPHCENRFLRRP

SEQ ID NO: 2647 - protein, 271 aa, Homo sapiens
MITGVFSMRLWTPVGVLTSLAYCLHQRRVALAELQEADGQCPVDRSLLKLKMVQVVFRHGARSPLKPLPLEEQVEWNPQLLEVPPQTQFDYTVTNLAGGPKPYSPYDSQYHETTLKGGMFAGQLTKVGMQQMFALGERLRKNYVEDIPFLSPTFNPQEVFIRSTNIFRNLESTRCLLAGLFQCQKEGPIIIHTDEADSEVLYPNYQSCWSLRQRTRGRRQTASLQPGISEDLKKVKDRMGIDSSDKVDFFILLDNVAAEQEKMGSCRFHGS

SEQ ID NO: 2648 - protein, 464 aa, Homo sapiens
MEHSVCPSSAVHLIPVSTPKNGMSSKSRKRIMPDPVTEPPVTDPVYEALLYCNIPSVAERSMEGHAPHHFKLVSVHVFIRHGDRYPLYVIPKTKRPEIDCTLVANRKPYHPKLEAFISHMSKGSGASFESPLNSLPLYPNHPLCEMGELTQTGVVQHLQNGQLLRDIYLKKHKLLPNDWSADQLYLETTGKSRTLQSGLALLYGFLPDFDWKKIYFRHQPSALFCSGSCYCPVRNQYLEKEQRRQYLLRLKNSQLEKTYGEMAKIVDVPTKQLRAANPIDSMLCHFCHNVSFPCTRNGCVDMEHFKVIKTHQIEDERERREKKLYFGYSLLGAHPILNQTIGRMQRATEGRKEELFALYSAHDVTLSPVLSALGLSEARFPRFAARLIFELWQDREKPSEHSVRILYNGVDVTFHTSFCQDHHKRSPKPMCPLENLVRFVKRDMFVALGGSGTNYYDACHREGF

SEQ ID NO: 2649 - protein, 480 aa, Homo sapiens; identical to SEQ ID NO: 1981

SEQ ID NO: 2650 - protein, 436 aa, Homo sapiens; identical to SEQ ID NO: 2285

SEQ ID NO: 2651 - protein, 386 aa, Homo sapiens; identical to SEQ ID NO: 2394

SEQ ID NO: 2652 - protein, 329 aa, Homo sapiens
MRPPPALALAGLCLLALPAAAASYFGLTGREVLTPFPGLGTAAAPAQGGAHLKQCDLLKLSRRQKQLCRREPGLAETLRDAAHLGLLECQFQFRHERWNCSLEGRMGLLKRGFKETAFLYAVSSAALTHTLARACSAGRMERCTCDDSPGLESRQAWQWGVCGDNLKYSTKFLSNFLGSKRGNKDLRARADAHNTHVGIKAVKSGLRTTCKCHGVSGSCAVRTCWKQLSPFRETGQVLKLRYDSAVKVSSATNEALGRLELWAPARQGSLTKGLAPRSGDLVYMEDSPSFCRPSKYSPGTAGWSAVARSQLITTSTSRIQAILPSQLPE

SEQ ID NO: 2653 - protein, 192 aa, Homo sapiens
MRLAGPESSVTAAPRARKYKCGLPQPCPEEHLAFRVVSGAANVIGPKICLEDKMLMSSVKDNVGRGLNIALVNGVSGELIEARAFDMWAGDVNDLLKFIRPLHEGTLVFVASYDDPATKMNEETRKLFSELGSRNAKELAFRDSWVFVGAKGVQNKSPFEQHVKNSKHSNKYEGWPEALEMEGCIPRRSTAS

SEQ ID NO: 2654 - protein, 350 aa, Homo sapiens; identical to SEQ ID NO: 2243

SEQ ID NO: 2655 - protein, 62 aa, Homo sapiens
MKIQLFFFILHFWVTILPARSNFEPKYRFERCEKVRGICKTFCDDVEYDYGYCIKWRSQCCV

SEQ ID NO: 2656 - protein, 245 aa, Homo sapiens
MTLFPVLLFLVAGLLPSFPANEDKDPAFTALLTTQTQVQREIVNKHNELRRAVSPPARNMLKMEWNKEAAANAQKWANQCNYRHSNPKDRMTSLKCGENLYMSSASSSWSQAIQSWFDEYNDFDFGVGPKTPNAVVGHYTQVVWYSSYLVGCGNAYCPNQKVLKYYYVCQYCPAGNWANRLYVPYEQGAPCASCPDNCDDGLCTNGCKYEDLYSNCKSLKLTLTCKHQLVRDSCKASCNCSNSIY

SEQ ID NO: 2657 - protein, 446 aa, Homo sapiens; identical to SEQ ID NO: 1982

SEQ ID NO: 2658 - protein, 194 aa, Homo sapiens; identical to SEQ ID NO: 1914

SEQ ID NO: 2659 - protein, 194 aa, Homo sapiens; identical to SEQ ID NO: 1914

SEQ ID NO: 2660 - protein, 115 aa, Homo sapiens
MTMRHNWTPDLSPLWVLLLCAHVVTLLVRATPVSQTTTAATASVRSTKDPCPSQPPVFPAAKQCPALEVTWPEVEVPLSWAEGNLAPHPRSPALQPQQSTAAGLRLSTGPAAAQP

SEQ ID NO: 2661 - protein, 175 aa, Homo sapiens; identical to SEQ ID NO: 2053

SEQ ID NO: 2662 - protein, 330 aa, Homo sapiens
MGKLCLGPTLCPAAAAEESRDAEPRRELLCSGRPWTWRAAARVTTMIPWVLLACALPCAADPLLGAFARRDFRKGSPQLVCSLPGPQGPPGPPGAPGPSGMMGRMGFPGKDGQDGHDGDRGDSGEEGPPGRTGNRGKPGPKGKAGAIGRAGPRGPKGVNGTPGKHGTPGKKGPKGKKGEPGLPGPCSCGSGHTKSAFSVAVTKSYPRERLPIKFDKILMNEGGHYNASSGKFVCGVPGIYYFTYDITLANKHLAIGLVHNGQYRIRTFDANTGNHDVASGSTILALKQGDEVWLQIFYSEQNGLFYDPYWTDSLFTGFLIYADQDDPNEV

SEQ ID NO: 2663 - protein, 129 aa, Homo sapiens
MRLLLLVPLLLAPAPGSSAPKVRRQSDTWGPWSQWSPCSRTCGGGVSFRERPCYSQRRDGGSSCVGPARSHRSCRTESCPDGARDFRAEQCAEFDGAEFQGRRYRWLPYYSAPNKCELNCIPKGLGLQG

SEQ ID NO: 2664 - protein, 408 aa, Homo sapiens
MFSNANSRSKMWLLLTMASLISVLGTTHGLFGKLHPGSPEVTMNISQMITYWGYPNEEYEVVTEDGYILEVNRIPYGKKNSGNTGQRPVVFLQHGLLASATNWISNLPNNSLAFILADAGYDVWLGNSRGNTWARRNLYYSPDSVEFWAFSFDEMAKYDLPATIDFIVKKTGQKQLHYVGHSQGTTIGFIAFSTNPSLAKRIKTFYALAPVATVKYTKSLINKLRFVPQSLFKFIFGDKIFYPHNFFDQFLATEVCSREMLNLLCSNALFIICGFDSKNFNTSRLDVYLSHNPAGTSVQNMFHWTQAVKSGKFQAYDWGSPVQNRMHYDQSQPPYYNVTAMNVPIAVWNGGKDLLADPQDVGLLLPKLPNLIYHKEIPFYNHLDFIWAMDAPQEVYNDIVSMISEDKK

SEQ ID NO: 2665 - protein, 130 aa, Homo sapiens; identical to SEQ ID NO: 2203

SEQ ID NO: 2666 - protein, 130 aa, Homo sapiens; identical to SEQ ID NO: 2203

SEQ ID NO: 2667 - protein, 576 aa, Homo sapiens
MIVFGWAVFLASRSLGQGLLLTLEEHIAHFLGTGGAATTMGNSCICRDDSGTDDSVDTQQQQAENSAVPTADTRSQPRDPVRPPRRGRGPHEPRRKKQNVDGLVLDTLAVIRTLVDNDQEPPYSMITLHEMAETDEGWLDVVQSLIRVIPLEDPLGPAVITLLLDECPLPTKDALQKLTEILNLNGEVACQDSSHPAKHRNTSAVLGCLAEKLAGPASIGLLSPGILEYLLQCLKLQSHPTVMLFALIALEKFAQTSENKLTISESSISDRLVTLESWANDPDYLKRQVGFCAQWSLDNLFLKEGRQLTYEKVNLSSIRAMLNSNDVSEYLKISPHGLEARCDASSFESVRCTFCVDAGVWYYEVTVVTSGVMQIGWATRDSKFLNHEGYGIGDDEYSCAYDGCRQLIWYNARSKPHIHPCWKEGDTVGFLLDLNEKQMIFFLNGNQLPPEKQVFSSTVSGFFAAASFMSYQQCEFNFGAKPFKYPPSMKFSTFNDYAFLTAEEKIILPRHRRLALLKQVSIRENCCSLCCDEVADTQLKPCGHSDLCMDCALQLETCPLCRKEIVSRIRQISHIS

SEQ ID NO: 2668 - protein, 119 aa, Homo sapiens
MARPGMERWRDRLALVTGASGGIGAAVARALVQQGLKVVGCARTVGNIEELAAECKSAGYPGTLIPYRCDLSNEEDILSMFSAIRSQHSGVDICINNAGLARPDTLLSGSTSGWKDMFN

SEQ ID NO: 2669 - protein, 47 aa, Homo sapiens
MQVSTAALAVLLCTMALCNQVLSAPQAGRSVLTPVRSGSRNTSVTWS

SEQ ID NO: 2670 - protein, 52 aa, Homo sapiens
MQVSTAALAVLLCTMALCNQVLSAPLSRPREAGRSVLTPVRSGSRNTSVTWS

SEQ ID NO: 2671 - protein, 423 aa, Homo sapiens
MELELMPFNVLLRTTLDLLQEKDPAHIFAEPVNLSEVPDYLEFISKPMDFSTMRRKLESHLYRTLEEFEEDFNLIVTNCMKYNAKDTIFHRAAVRLRDLGGAILRHARRQAENIGYDPERGTHLPESPKLEDFYRFSWEDVDNILIPENRAHLSPEVQLKELLEKLDLVSAMRSSGARTRRVRLLRREINALRQKLAQPPPPQPPSLNKTVSNGELPAGPQGDAAVLEQALQEEPEDDGDRDDSKLPPPPTLEPTGPAPSLSEQESPPEPPTLKPINDSKPPSRFLKPRKVEEDELLEKSPLQLGNEPLQRLLSDNGINRLSLMAPDTPAGTPLSGVGRRTSVLFKKAKNGVKLQRSPDRVLENGEDHGVAGSPASPASIEEERHSRKRPRSRSCSESEGERSPQQEEETGMTNGFGKHRKRV

SEQ ID NO: 2672 - protein, 1009 aa, Homo sapiens
MGSGRVPGLCLLVLLVHARAAQYSKAAQDVDECVEGTDNCHIDAICQNTPRSYKCICKSGYTGDGKHCKDVDECEREDNAGCVHDCVNIPGNYRCTCYDGFHLAHDGHNCLDVDECAEGNGGCQQSCVNMMGSYECHCREGFFLSDNQHTCIQRPEEGMNCMNKNHGCAHICRETPKGGIACECRPGFELTKNQRDCKLTCNYGNGGCQHTCDDTEQGPRCGCHIKFVLHTDGKTCIGERRLEQHIPTQAVSNETCAVNNGGCDSKCHDAATGVHCTCPVGFMLQPDRKTCKDIDECRLNNGGCDHICRNTVGSFECSCKKGYKLLINERNCQDIDECSFDRTCDHICVNTPGSFQCLCHRGYLLYGITHCGDVDECSINRGGCRFGCINTPGSYQCTCPAGQGRLHWNGKDCTEPLKCQGSPGASKAMLSCNRSGKKDTCALTCPSRARFLPESENGFTVSCGTPSPRAAPARAGHNGNSTNSNHCHEAAVLSIKQRASFKIKDAKCRLHLRNKGKTEEAGRITGPGGAPCSECQVTFIHLKCDSSRKGKGRRARTPPGKEVTRLTLELEAEVRAEETTASCGLPCLRQRMERRLKGSLKMLRKSINQDRFLLRLAGLDYELAHKPGLVAGERAEPMESCRPGQHRAGTKCVSCPQGTYYHGQTEQCVPCPAGTFQEREGQLSCDLCPGSDAHGPLGATNVTTCAGQCPPGQHSVDGFKPCQPCPRGTYQPEAGRTLCFPCGGGLTTKHEGAISFQDCDTKVQCSPGHYYNTSIHRCIRCAMGSYQPDFRQNFCSRCPGNTSTDFDGSTSVAQCKNRQCGGELGEFTGYIESPNYPGNYPAGVECIWNINPPPKRKILIVVPEIFLPSEDECGDVLVMRKNSSPSSITTYETCQTYERPIAFTARSRKLWINFKTSEANSARGFQIPYVTYDEDYEQLVEDIVRDGRLYASENHQEILKDKKLIKAFFEVLAHPQNYFKYTEKHKEMLPKSFIKLLRSKVSSFLRPYK

SEQ ID NO: 2673 - protein, 327 aa, Homo sapiens
MTALELARRGARVVLACRSQERGEAAAFDLRQESGNNEVIFMALDLASLASVRAFATAFLSSEPRLDILIHNAGISSCGRTREAFNLLLRVNHIGPFLLTHLLLPCLKACAPSRVVVVASAAHCRGRLDFKRLDRPVVGWRQELRAYADTKLANVLFARELANQLEATGVTCYAAHPGPVNSELFLRHVPGWLRPLLRPLAWLVLRAPRGGAQTPLYCALQEGIEPLSGRYFANCHVEEVPPAARDDRAAHRLWEASKRLAGLGPGEDAEPDEDPQSEDSEAPSSLSTPHPEEPTVSQPYPSPQSSPDLSKMTHRIQAKVEPEIQLS

SEQ ID NO: 2674 - protein, 439 aa, Homo sapiens; identical to SEQ ID NO: 1970

SEQ ID NO: 2675 - protein, 1228 aa, Homo sapiens; identical to SEQ ID NO: 1931

SEQ ID NO: 2676 - protein, 531 aa, Homo sapiens
MKGARLFVLLSSLWSGGIGLNNSKHSWTIPEDGNSQKTMPSASVPPNKIQSLQILPTTRVMSAEIATTPEKAEGVVKLQNLTLPTNASIKFNPGAESVVLSNSTLKFLQSFARKSNEQATSLNTVGGTGGIGGVGGTGGVGNRAPRETYLSRGDSSSSQRTDYQKSNFETTRGKNWCAYVHTRLSPTVILDNQVTYVPGGKGPCGWTGGSCPQRSQKISNPVYRMQHKIVTSLDWRCCPGYSGPKCQLRAQEQQSLIHTNQAESHTAVGRGVAEQQQQQGCGDPEVMQKMTDQVNYQAMKLTLLQKKIDNISLTVNDVRNTYSSLEGKVSEDKSREFQSLLKEEYSSCSRHPCQNGGTCINGRTSFTCACRHPFTGDNCTIKLVEENALAPDFSKGSYRYAPMVAFFASHTYGMTIPGPILFNNLDVNYGASYTPRTGKFRIPYLGVYVFKYTIESFSAHISGFLVVDGIDKLAFESENINSEIHCDRVLTGDALLELNYGQEVWLRLAKGTIPAKFPPVTTFSGYLLYRT

SEQ ID NO: 2677 - protein, 313 aa, Homo sapiens; identical to SEQ ID NO: 2235

SEQ ID NO: 2678 - protein, 277 aa, Homo sapiens
MCTVVDPRIVRRYLLRRQLGQGAYGIVWKAVDRRTGEVVAIKKIFDAFRDKTDAQRTFREITLLQEFGDHPNIISLLDVIRAENDRDIYLVFEFMGCPPSPPPPTAVRTLSADTDLNAVIRKGGLLQDVHVRSIFYQLLRATRFLHSGHVVHRDQKPSNVLLDANCTVKLCDFGLARSLGDLPEGPEDQAVTEYVATRWYRAPEVLLSSHRYTLGVDMWSLGCILGEMLRGRPLFPGTSTLHQLELILETIPPPSEEDLLALGSGCRASVLHQLGSR

SEQ ID NO: 2679 - protein, 254 aa, Homo sapiens
MCTVVDPRIVRRYLLRRQLGQGAYGIVWKAVDRRTGEVVAIKKIFDAFRDKTDAQRTFREITLLQEFGDHPNIISLLDVIRAENDRDIYLVFEFMDTDLNAVIRKGGLLQDVHVRSIFYQLLRATRFLHSGHVVHRDQKPSNVLLDANCTVKLCDFGLARSLGDLPEGPEDQAVTEYVATRWYRAPEVLLSSHRYTLGVDMWSLGCILGEMLRGRPLFPGTSTLHQLELILETIPPPSEEGAQTACRSGTGAST

SEQ ID NO: 2680 - protein, 157 aa, Homo sapiens
MALLLCLVCLTAALAHGCLHCHSNFSKKFSFYRHHVNFKSWWVGDIPVSGALLTDWSDDTMKELHLAIPAKITREKLDQVATAVYQMMDQLYQGKMYFPGYFPNELRNIFREQVHLIQNAIIERHLAPGSWGGGQLSREGPSLAPEGSMPSPRGDLP

SEQ ID NO: 2681 - protein, 232 aa, Homo sapiens
MALLLCLVCLTAALAHGCLHCHSNFSKKFSFYRHHVNFKSWWVGDIPVSGALLTDWSDDTMKELHLAIPAKITREKLDQVATAVYQMMDQLYQGKMYFPGYFPNELRNIFREQVHLIQNAIIESRIDCQHRCGIFQYETISCNNCTDSHVACFGYNCESSAQWKSAVQGLLNYINNWHKQDTSMRPRSSAFSWPGTHRATPAFLVSPALRCLEPPHLANLTLEDAAECLKQH

SEQ ID NO: 2682 - protein, 131 aa, Homo sapiens
MGGDGRYVLNGHWVVSPPGTYEAAGTHVVYTRDTGPQETLQAAGPTSHDLLLQVLLQEPNPGIEFEFWLPRERYSPFQARVQALGWPLRQPQPRGVEPQPPAAPAVTPAQTPTLAPGPSAGPPPPGPGDPL

SEQ ID NO: 2683 - protein, 148 aa, Homo sapiens
MARIPTAALGCISLLCLQLPGSLSRSLGGDPRPVKPREPPARSPSSSLQPRHPAPRPVVWKLHRALQAQRGAGLAPVMGQPLRDGGRQHSGPRRHSGPRRTQAQLLRVGCVLGTCQVQNLSHRLWQLMGPAGRQDSAPVDPSSPHSYG

SEQ ID NO: 2684 - protein, 148 aa, Homo sapiens; identical to SEQ ID NO: 2683

SEQ ID NO: 2685 - protein, 178 aa, Homo sapiens
MDRAARCSGASSLPLLLALALGLVILHCVVADGNSTRSPETNGLLCGDPEENCAATTTQSKRKGHFSRCPKQYKHYCIKGRCRFVVAEQTPSCVCDEGYIGARCERVDLFYLRGDRGQILVICLIAVMVVFIILVIGVCTCCHPLRKRRKRKKKEEEMETLGKDITPINEDIEETNIA

SEQ ID NO: 2686 - protein, 416 aa, Homo sapiens
MSISLSSLILLPIWINMAQIQQGGPDEKEKTTALKDLLSRIDLDELMKKDEPPLDFPDTLEGFEYAFNEKGQLRHIKTGEPFVFNYREDLHRWNQKRYEALGEIITKYVYELLEKDCNLKKVSIPVDATESEPKSFIFMSEDALTNPQKLMVLIHGSGVVRAGQWARRLIINEDLDSGTQIPFIKRAVAEGYGVIVLNPNENYIEVEKPKIHVQSSSDSSDEPAEKRERKDKVSKETKKRRDFYEKYRNPQREKEMMQLYIRENGSPEEHAIYVWDHFIAQAAAENVFFVAHSYGGLAFVELMIQREADVKNKVTAVALTDSVHNVWHQEAGKTIREWMRENCCNWVSSSEPLDTSVESMLPDCPRVSAGTDRHELTSWKSFPSIFKFFTEASEAKTSSLKPAVTRRSHRIKHEEL

SEQ ID NO: 2687 - protein, 279 aa, Homo sapiens
MKIIILLGFLGATLSAPLIPQRLMSASNSNELLLNLNNGQLLPLQLQGPLNSWIPPFSGILQQQQQAQIPGLSQFSLSALDQFAGLLPNQIPLTGEASFAQGAQAGQVDPLQLQTPPQTQPGPSHVMPYVFSFKMPQEQGQMFQYYPVYMVLPWEQPQQTVPRSPQQTRQQQYEEQIPFYAQFGYIPQLAEPAISGGQQQLAFDPQLGTAPEIAVMSTGEEIPYLQKEAINFRHDSAGVFMPSTSPKPSTTNVFTSAVDQTITPELPEEKDKTDSLREP

SEQ ID NO: 2688 - protein, 147 aa, Homo sapiens
MGPEALSSLLLLLLVASGDADMKGHFDPAKCRYALGMQDRTIPDSDISASSSWSDSTAARHSRLESSDGDGAWCPAGSVFPKEEEYLQVDLQRLHLVALVGTQGRHAGGLGKEFSRSYRLRYSRDGRRWMGWKDRWGQEVISGNEDP

SEQ ID NO: 2689 - protein, 205 aa, Homo sapiens
MGGPVREPALSVALWLSWGAALGAVACAMALLTQQTELQSLRREVSRLQGTGGPSQNGEGYPWQSLPEQHSVLHLVPINATSKDDSDVTEVMWQPALRRGRGLQAQGYGVRIQDAGVYLLYSQVLFQDVTFTMGQVVSREGQGRQETLFRCIRSMPSHPDRAYNSCYSAGVFHLHQGDILSVIIPRARAKLNLSPHGTFLGFVKL

SEQ ID NO: 2690 - protein, 247 aa, Homo sapiens
MPASSPFLLAPKGPPGNMGGPVREPALSVALWLSWGAALGAVACAMALLTQQTELQSLRREVSRLQGTGGPSQNGEGYPWQSLPEQSSDALEAWENGERSRKRRAVLTQKQKKQHSVLHLVPINATSKDDSDVTEVMWQPALRRGRGLQAQGYGVRIQDAGVYLLYSQVLFQDVTFTMGQVVSREGQGRQETLFRCIRSMPSHPDRAYNSCYSAGVFHLHQGDILSVIIPRARAKLNLSPHGTFLGL

SEQ ID NO: 2691 - protein, 12 aa, Homo sapiens
MGKSESLQSLQR

SEQ ID NO: 2692 - protein, 1421 aa, Homo sapiens
MMLPQNSWHIDFGRCCCHQNLFSAVVTCILLLNSCFLISSFNGTDLELRLVNGDGPCSGTVEVKFQGQWGTVCDDGWNTTASTVVCKQLGCPFSFAMFRFGQAVTRHGKIWLDDVSCYGNESALWECQHREWGSHNCYHGEDVGVNCYGEANLGLRLVDGNNSCSGRVEVKFQERWGTICDDGWNLNTAAVVCRQLGCPSSFISSGVVNSPAVLRPIWLDDILCQGNELALWNCRHRGWGNHDCSHNEDVTLTCYDSSDLELRLVGGTNRCMGRVELKIQGRWGTVCHHKWNNAAADVVCKQLGCGTALHFAGLPHLQSGSDVVWLDGVSCSGNESFLWDCRHSGTVNFDCLHQNDVSVICSDGADLELRLADGSNNCSGRVEVRIHEQWWTICDQNWKNEQALVVCKQLGCPFSVFGSRRAKPSNEARDIWINSISCTGNESALWDCTYDGKAKRTCFRRSDAGVICSDKADLDLRLVGAHSPCYGRLEVKYQGEWGTVCHDRWSTRNAAVVCKQLGCGKPLHVFGMTYFKEASGPIWLDDVSCIGNESNIWDCEHSGWGKHNCVHREDVIVTCSGDATWGLRLVGGSNRCSGRLEVYFQGRWGTVCDDGWNSKAAAVVCSQLDCPSSIIGMGLGNASTGYGKIWLDDVSCDGDESDLWSCRNSGWGNNDCSHSEDVGVICSDASDMELRLVGGSSRCAGKVEVNVQGAVGILCANGWGMNIAEVVCRQLECGSAIRVSREPHFTERTLHILMSNSGCTGGEASLWDCIRWEWKQTACHLNMEASLICSAHRQPRLVGADMPCSGRVEVKHADTWRSVCDSDFSLHAANVLCRELNCGDAISLSVGDHFGKGNGLTWAEKFQCEGSETHLALCPIVQHPEDTCIHSREVGVVCSRYTDVRLVNGKSQCDGQVEINVLGHWGSLCDTHWDPEDARVLCRQLSCGTALSTTGGKYIGERSVRVWGHRFHCLGNESLLDNCQMTVLGAPPCIHGNTVSVICTGSLTQPLFPCLANVSDPYLSAVPEGSALICLEDKRLRLVDGDSRCAGRVEIYHDGFWGTICDDGWDLSDAHVVCQKLGCGVAFNATVSAHFGEGSGPIWLDDLNCTGMESHLWQCPSRGWGQHDCRHKEDAGVICSEFTALRLYSETETESCAGRLEVFYNGTWGSVGRRNITTAIAGIVCRQLGCGENGVVSLAPLSKTGSGFMWVDDIQCPKTHISIWQCLSAPWERRISSPAEETWITCEDRIRVRGGDTECSGRVEIWHAGSWGTVCDDSWDLAEAEVVCQQLGCGSALAALRDASFGQGTGTIWLDDMRCKGNESFLWDCHAKPWGQSDCGHKEDAGVRCSGQSLKSLNASSGHLALILSSIFGLLLLVLFILFLTWCRVQKQKHLPLRDDTPNHGCEDASDTSLLGVLPASEATK

SEQ ID NO: 2693 - protein, 469 aa, Homo sapiens; identical to SEQ ID NO: 1884

SEQ ID NO: 2694 - protein, 278 aa, Homo sapiens; identical to SEQ ID NO: 2204

SEQ ID NO: 2695 - protein, 375 aa, Homo sapiens
MEFEITFRPDSGDGVLLYSYDTGSKDFLSINLAGGHVEFRFDCGSGTGVLRSEDPLTLGNWHELRVSRTAKNGILQVDKQKIVEGMAEGGFTQIKCNTDIFIGGVPNYDDVKKNSGVLKPFSGSIQKIILNDRTIHVKHDFTSGVNVENAAHPCVRAPCAHGGSCRPRKEGYDCDCPLGFEGLHCQKAIIEAIEIPQFIGRSYLTYDNPDILKRVSGSRSNVFMRFKTTAKDGLLLWRGDSPMRPNSDFISLGLRDGALVFSYNLGSGVASIMVNGSFNDGRWHRVKAVRDGQSGKITVDDYGARTGKSPGMMRQLNINGALYVGGMKEIALHTNRQYMRGLVGCISHFTLSTDYHISLVEDAVDGKNINTCGAK

SEQ ID NO: 2696 - protein, 152 aa, Homo sapiens
MRFKTTAKDGLLLWRGDSPMRPNSDFISLGLRDGALVFSYNLGSGVASIMVNGSFNDGRWHRVKAVRDGQSGKITVDDYGARTGKSPGMMRQLNINGALYVGGMKEIALHTNRQYMRGLVGCISHFTLSTDYHISLVEDAVDGKNINTCGAK

SEQ ID NO: 2697 - protein, 349 aa, Homo sapiens
MTALPGPLWLLGLALCALGGGGPGLRPPPGCPQRRLGARERRDVQREILAVLGLPGRPRPRAPPAASRLPASAPLFMLDLYHAMAGDDDEDGAPAERRLGRADLVMSFVNMVERDRALGHQEPHWKEFRFDLTQIPAGEAVTAAEFRIYKVPSIHLLNRTLHVSMFQVVQEQSNRESDLFFLDLQTLRAGDEGWLVLDVTAASDCWLLKRHKDLGLRLYVETEDGETWTGWGWTKDSRLQMWKLRLSRTPWVLSLHAPGPAQAPAERPLLCLLQGHCPASPSPIRTPRAVRPLRRRQPKKSNELPQANRLPGIFDDVHGSHGRQVCRRHELYVSFQDLGWLVIADSSCF

SEQ ID NO: 2698 - protein, 538 aa, Homo sapiens; identical to SEQ ID NO: 2030

SEQ ID NO: 2699 - protein, 209 aa, Homo sapiens
MSFSATILFSPPSGSEARCCCCACKSETNGGNTGSQGGNPPPSTPITVTGHGLAVQSSEQLLHVIYQRVDKAVGLAEAALGLARANNELLKRLQEEVGDLRQGKVSIPDEDGESRAHSSPPEEPGPLKESPGEAFKALSAVEEECDSVGSGVQVVIEELRQLGAASVGPGPLGFPATQRDMRLPGCTLAASEAAPLLNPLVDDYVASEG

SEQ ID NO: 2700 - protein, 538 aa, Homo sapiens; identical to SEQ ID NO: 2030

SEQ ID NO: 2701 - protein, 507 aa, Homo sapiens; identical to SEQ ID NO: 2036

SEQ ID NO: 2702 - protein, 250 aa, Homo sapiens
MASERLPNRPACLLVASGAAEGVSAQSFLHCFTMASTAFNLQVATPGGKAMEFVDVTESNARWVQDFRLKAYASPAKLESIDGARYHALLIPSCPGALTDLASSGSLARILQHFHSESKPICAVGHGVAALCCATNEDRSWVFDSYSLTGPSVCELVRAPGFARLPLVVEDFVKDSGACFSGAAASCPKADRHWQHFPVEEIFLACGFKVAGLGAAPGWGRGGKQEDRPPEEQRRAGEDFPIYQCVFIYP

SEQ ID NO: 2703 - protein, 461 aa, Homo sapiens [sequence omitted]

SEQ ID NO: 2704 - protein, 461 aa, Homo sapiens [sequence omitted]

SEQ ID NO: 2705 - protein, 461 aa, Homo sapiens [sequence omitted]

SEQ ID NO: 2706 - protein, 483 aa, Homo sapiens [sequence omitted]

SEQ ID NO: 2707 - protein, 531 aa, Homo sapiens
MCQLLESTVIQPQGDSPVAVLCVCDLSPAQCDINCCCDPDCSSVDFSVFSACSVPVVTGDSQFCSQKAVIYSLNFTANPPQRVFELVDQINPSIFCIHITNYKPALSFINPEVPDENNFDTLMKTSDGFTLNAESYVSFTTKLDIPTAAKYEYGVPLQTSDSFLRFPSSLTSSLCTDNNPAAFLVNQAVKCTRKINLEQCEEIEALSMAFYSSPEILRVPDSRKKVPITVQSIVIQSLNKTLTRREDTDVLQPTLVNAGHFSLCVNVVLEVKYSLTYTDAGEVTKADLSFVLGTVSSVVVPLQQKFEIHFLQENTQPVPLSGNPGYVVGLPLAAGFQPHKMSGIIQTTNRYGQLTILHSTTEQDCLALEGVRTPVLFGYTMQSGCKLRLTGALPCQLVAQKVKSLLWGQGFPDYVAPFGNSQAQDMLDWVPIHFITQSFNRKDSCQLPGALVIEVKWTKYGSLLNPQAKIVNVTANLISSSFPEANSGNERTILISTAVTFVDVSAPAEAGFRAPPAINARLPFNFFFPFV

SEQ ID NO: 2708 - protein, 573 aa, Homo sapiens
MRPRGLPPLLVVLLGCWASVSAQTDATPAVTTEGLNSTEAALATFGTFPSTRPPGTPRAPGPSSGPRPTPVTDVAVLCVCDLSPAQCDINCCCDPDCSSVDFSVFSACSVPVVTGDSQFCSQKAVIYSLNFTANPPQRVFELVDQINPSIFCIHITNYKPALSFINPEVPDENNFDTLMKTSDGFTLNAESYVSFTTKLDIPTAAKYEYGVPLQTSDSFLRFPSSLTSSLCTDNNPAGQAYWFTPVIPALWEAEARGSLEVPDSRKKVPITVQSIVIQSLNKTLTRREDTDVLQPTLVNAGHFSLCVNVVLEVKYSLTYTDAGEVTKADLSFVLGTVSSVVVPLQQKFEIHFLQENTQPVPLSGNPGYVVGLPLAAGFQPHKGSGIIQTTNRYGQLTILHSTTEQDCLALEGVRTPVLFGYTMQSGCKLRLTGALPCQLVAQKVKSLLWGQGFPDYVAPFGNSQAQDMLDWVPIHFITQSFNRKDSCQLPGALVIEVKWTKYGSLLNPQAKIVNVTANLISSSFPEANSGNERTILISTAVTFVDVSAPAEAGFRAPPAINARLPFNFFFPFV

SEQ ID NO: 2709 - protein, 409 aa, Homo sapiens
MKTSDGFTLNAESYVSFTTKLDIPTAAKYEYGVPLQTSDSFLRFPSSLTSSLCTDNNPAAFLVNQAVKCTRKINLEQCEEIEALSMAFYSSPEILRVPDSRKKVPITVQSIVIQSLNKTLTRREDTDVLQPTLVNAGHFSLCVNVVLEVKYSLTYTDAGEVTKADLSFVLGTVSSVVVPLQQKFEIHFLQENTQPVPLSGNPGYVVGLPLAAGFQPHKGSGIIQTTNRYGQLTILHSTTEQDCLALEGVRTPVLFGYTMQSGCKLRLTGALPCQLVAQKVKSLLWGQGFPDYVAPFGNSQAQDMLDWVPIHFITQSFNRKDSCQLPGALVIEVKWTKYGSLLNPQAKIVNVTANLISSSFPEANSGNERTILISTAVTFVDVSAPAEAGFRAPPAINARLPFNFFFPFV

SEQ ID NO: 2710 - protein, 592 aa, Homo sapiens
MRPRGLPPLLVVLLGCWASVSAQTDATPAVTTEGLNSTEAALATFGTFPSTRPPGTPRAPGPSSGPRPTPVTDVAVLCVCDLSPAQCDINCCCDPDCSSVDFSVFSACSVPVVTGDSQFCSQKAVIYSLNFTANPPQRVFELVDQINPSIFCIHITNYKPALSFINPEVPDENNFDTLMKTSDGFTLNAESYVSFTTKLDIPTAAKYEYGVPLQTSDSFLRFPSSLTSSLCTDNNPAAFLVNQAVKCTRKINLEQCEEIEALSMAFYSSPEILRVPDSRKKVPITVQSIVIQSLNKTLTRREDTDVLQPTLVNAGHFSLCVNVVLEVKYSLTYTDAGEVTKADLSFVLGTVSSVVVPLQQKFEIHFLQENTQPVPLSGNPGYVVGLPLAAGFQPHKGSGIIQTTNRYGQLTILHSTTEQDCLALEGVRTPVLFGYTMQSGCKLRLTGALPCQLVAQKVKSLLWGQGFPDYVAPFGNSQAQDMLDWVPIHFITQSFNRKHFVLQDSCQLPGALVIEVKWTKYGSLLNPQAKIVNVTANLISSSFPEANSGNERTILISTAVTFVDVSAPAEAGFRAPPAINARLPFNFFFPFV

SEQ ID NO: 2711 - protein, 183 aa, Homo sapiens
MIFLLLMLSLELQLHQIAALFTVTVPKELYIIEHGSNVTLECNFDTGSHVNLGAITASLQKVENDTSPHRERATLLEEQLPLGKASFHIPQVQVRDEGQYQCIIIYGVAWDYKYLTLKVKGQMEPRTHPTWLLHIFIPFCIIAFIFIATVIALRKQLCQKLYSSKDTTKRPVTTTKREVNSAI

SEQ ID NO: 2712 - protein, 273 aa, Homo sapiens
MIFLLLMLSLELQLHQIAALFTVTVPKELYIIEHGSNVTLECNFDTGSHVNLGAITASLQKVENDTSPHRERATLLEEQLPLGKASFHIPQVQVRDEGQYQCIIIYGVAWDYKYLTLKVKASYRKINTHILKVPETDEVELTCQATGYPLAEVSWPNVSVPANTSHSRTPEGLYQVTSVLRLKPPPGRNFSCVFWNTHVRELTLASIDLQSQMEPRTHPTWLLHIFIPFCIIAFIFIATVIALRKQLCQKLYSSKDTTKRPVTTTKREVNSAI

SEQ ID NO: 2713 - protein, 123 aa, Homo sapiens
LGDRRGRSSGARAAAVGSTGERLEMEEDILQLQAEATAEVLGEVAQAQKVLRDSVQRLEVQLRSAWLGPAYREFEVLKAHADKQSHILWALTGHVQRQRREMVAQQHRLRQIQERLHTAALPA

SEQ ID NO: 2714 - protein, 114 aa, Homo sapiens
MASFKLADSVWEDSLSKRQRNQGRMKTLPVLVLSLTLLTVFSETSPILTEKQAKQLLRSRRQDRPSKPGFPDEPMREYMHHLLALEHRAEEQFLEHWLNPHCKPHCDRNRIHPV

SEQ ID NO: 2715 - protein, 114 aa, Homo sapiens; identical to SEQ ID NO: 2714

SEQ ID NO: 2716 - protein, 147 aa, Homo sapiens
MALQRTHSLLLLLLLTLLGLGLVQPSYGQDGMYQRFLRQHVHPEETGGSDRYCNLMMQRRKMTLYHCKRFNTFIHEDIWNIRSICSTTNIQCKNGKMNCHEGVVKVTDCRDTGSSRAPNCRYRAIASTRRVVIACEGNPQVPVHFDG

SEQ ID NO: 2717 - protein, 433 aa, Homo sapiens
MEPQLGPEAAALRPGWLALLLWVSALSCSFSLPASSLSSLVPQVRTSYNFGRTFLGLDKCNACIGTSICKKFFKEEIRSDNWLASHLGLPPDSLLSYPANYSDDSKIWRPVEIFRLVSKYQNEISDRRICASASAPKTCSIERVLRKTERFQKWLQAKRLTPDLVQGLASPLLRCPSQRLLDRVVRRYAEVADAGSIFMDHFTDRDKLRLLYTLAVNSHPILLQIFPGAEGWPLPKYLGSCGRFLVSTSTRPLQEFYDAPPDQAADLAYQLLGVLESLRSNDLNYFFYFTHIDAGMFGVFNNGHLFIRDASAVGVIDKQEGSQEANRAGENKDIFSCLVSGCQAQLPSCESISEKQSLVLVCQKLLPRLLQGRFPSPVQDDIDSILVQCGDSIRPDPEVLGAASQLKDILRPLRTCDSRFAYRYPDCKYNDKF

SEQ ID NO: 2718 - protein, 199 aa, Homo sapiens; identical to SEQ ID NO: 2193

SEQ ID NO: 2719 - protein, 199 aa, Homo sapiens; identical to SEQ ID NO: 2193

SEQ ID NO: 2720 - protein, 96 aa, Homo sapiens
MLPCLALLLLMELSVCTVAGDGGEEQTLSTEAETWEGAGPSIQLQLQEVKTGKASQFFGLMGKRVGAYQLEHTFQGLLGKRSLFTEGREDEAQGSE

SEQ ID NO: 2721 - protein, 326 aa, Homo sapiens
MTGLCGYSAPDMRGLRLIMIPVELLLCYLLLHPVDATSYGKQTNVLMHFPLSLESQTPSSDPLSCQFLHPKSLPGFSHMAPLPKFLVSLALRNALEEAGCQADVWALQLQLYRQGGVNATQVLIQHLRGLQKGRSTERNVSVEALASALQLLAREQQSTGRVGRSLPTEDCENEKEQAVHNVVQLLPGVGTFYNLGTALYYATQNCLGKARERGRDGAIDLGYDLLMTMAGMSGGPMGLAISAALKPALRSGVQQLIQYYQDQKDANISQPETTKEGLRAISDVSDLEETTTLASFISEVVSSAPYWGWAIIKSYDLDPGAGSLEI

SEQ ID NO: 2722 - protein, 491 aa, Homo sapiens
MRWILCWSLTLCLMAQTALGALHTKRPQVVTKYGTLQGKQMHVGKTPIQVFLGVPFSRPPLGILRFAPPEPPEPWKGIRDATTYPPGCLQESWGQLASMYVSTRERYKWLRFSEDCLYLNVYAPARAPGDPQLPVMVWFPGGAFIVGAASSYEGSDLAAREKVVLVFLQHRLGIFGFLSTDDSHARGNWGLLDQMAALRWVQENIAAFGGDPGNVTLFGQSAGAMSISGLMMSPLASGLFHRAISQSGTALFRLFITSNPLKVAKKVAHLAGCNHNSTQILVNCLRALSGTKVMRVSNKMRFLQLNFQRDPEEIIWSMSPVVDGVVIPDDPLVLLTQGKVSSVPYLLGVNNLEFNWLLPYNITKEQVPLVVEEYLDNVNEHDWKMLRNRMMDIVQDATFVYATLQTAHYHRGLSMGKEKALSLQMMKYWANFARTGNPNDGNLPCWPRYNKDEKYLQLDFTTRVGMKLKEKKMAFWMSLYQSQRPEKQRQF

SEQ ID NO: 2723 - protein, 94 aa, Homo sapiens
MAAFPHKIIFFLVCSTLTHVAFSGIFNKRDFTRWPKPRCKMYIPLDPDYNADCPNVTAPVCASNGHTFQNECFFCVEQREFHYRIKFEKYGKCD

SEQ ID NO: 2724 - protein, 133 aa, Homo sapiens
MRQRLLPSVTSLLLVALLFPGSSQARHVNHSATEALGELRERAPGQGTNGFQLLRHAVKRDLLPPRTPPYQGDVPPGIRNTICHMQQGICRLFFCHSGEKKRDICSDPWNRCCVSNTDEEGKEKPEMDGRSGI

SEQ ID NO: 2725 - protein, 187 aa, Homo sapiens
MGCCGCSGGCGSGCGGCGSGCGGCGSSCCVPICCCKPVCCCVPACSCSSCGSCGGSKGGRGSCGGSKGDCGSCGGSKGGCGSCGCSQCSCYKPCCCSSGCGSSCCQSSCCKPCCSQSSCCKPCSCSSGCGSSCCQSSCCKPCCSQSSCCKPCCCSSGCGSSCCQSSCCKPCCSQSSCCVPICCQCKI

SEQ ID NO: 2726 - protein, 187 aa, Homo sapiens
MRPLAGAPVPKRQKCDHWTPCPSDTYAYRLLSGGGRSKYAKICFEDNLLMGEQLGNVARGINIAIVNYVTGNVTATRCFDMYEGDNSGPMTKFIQSAAPKSLLFMVTYDDGSTRLNNDAKNAIEALGSKEIRNMKFRSSWVFIAAKGLELPSEIQREKINHSDAKNNRYSGWPAEIQIEGCIPKERS

SEQ ID NO: 2727 - protein, 82 aa, Homo sapiens
MKILCIFLTFVFTVSCGPSVPQKKTREVAERKRECQLVRGACKPECNSWEYVYYYCNVNPCCAVWEYQKPIINKITSKLHQK

SEQ ID NO: 2728 - protein, 61 aa, Homo sapiens
MKIHVFLFVLFFFLVPIATRVKCAVKDTYSCFIMRGKCRHECHDFEKPIGFCTKLNANCYM

SEQ ID NO: 2729 - protein, 351 aa, Homo sapiens
MGNLFMLWAALGICCAAFSASAWSVNNFLITGPKAYLTYTTSVALGAQSGIEECKFQFAWERWNCPENALQLSTHNRLRSATRETSFIHAISSAGVMYIITKNCSMGDFENCGCDGSNNGKTGGHGWIWGGCSDNVEFGERISKLFVDSLEKGKDARALMNLHNNRAGRLAVRATMKRTCKCHGISGSCSIQTCWLQLAEFREMGDYLKAKYDQALKIEMDKRQLRAGNSAEGHWVPAEAFLPSAEAELIFLEESPDYCTCNSSLGIYGTEGRECLQNSHNTSRWERRSCGRLCTECGLQVEERKTEVISSCNCKFQWCCTVKCDQCRHVVSKYYCARSPGSAQSLGKGSA

SEQ ID NO: 2730 - protein, 481 aa, Homo sapiens
MQSRLLLLGAPGGHGGPASRRMRLLLRQVVQRRPGGDRQRPEVRLLHAGSGADTGDTVNIGDVSYKLKIPKNPELVPQNYISDSLAQSVVQHLRWIMQKDLLGQDVFLIGPPGPLRRSIAMQYLELTKREVEYIALSRDTTETDLKQRREIRAGTAFYIDQCAVRAATEGRTLILEGLEKAERNVLPVLNNLLENREMQLEDGRFLMSAERYDKLLRDHTKKELDSWKIVRVSENFRVIALGLPVPRYSGNPLDPPLRSRFQARDIYYLPFKDQLKLLYSIGANVSAEKVSQLLSFATTLCSQESSTLGLPDFPLDSLAAAVQILDSFPMMPIKHAIQWLYPYSILLGHEGKMAVEGVLKRFELQDSGSSLLPKEIVKVEKMMENHVSQASVTIRIADKEVTIKVPAGTRLLSQPCASDRFIQTLSHKQLQAEMMQSHMVKDICLIGGKGCGKTVIAKNFADTLGYNIEPIMLYQHKVPHI

SEQ ID NO: 2731 - protein, 261 aa, Homo sapiens
MASLAVSNWPKPMPLIPCLSWSTASGVFTTGVLSKSINWRELEKQYYTQTVYEEEIIHMLEYCGTDSFKMGQEFVKHFTSSADKLTNLNLVSRTLNLDISNQVVSQKPADCHNSSKTSVSATSEGLLLQDTSKMKRFNQTLSTNKSGYTSRNPQSYHLLSKEQSRNSLRKESLIFMKGVMDECTHVANFSVPVDPSLIIVVQAKEDAYIPRTGVRSLQEIWPGCEIRYLEGGHISAYLFKQGLFRQAIYDAFDRFLHKYAN

SEQ ID NO: 2732 - protein, 414 aa, Homo sapiens
MGVSKLDILYRRLLLTKLFIRGWGRPEDLKRLFEFRKMIGNRERCQNLVSSDYPVHIDKIEEQSDCKILDGHFVSPMAHYVPDIMPIESVIARFQFIVPKEWNSKYRPVCIHLAGTGDHHYWRRRTLMARPMIKEARMASLLLENPYYGCRKPKDQVRSSLKNVSDLFVMGGALVLESAALLHWLEREGYGPLGMTGISMGGHMASLAVSNWPKPMPLIPCLSWSTASGVFTTTDSFKMGQEFVKHFTSSADKLTNLNLVSRTLNLDISNQVVSQKPADCHNSSKTSVSATSEGLLLQDTSKMKRFNQTLSTNKSGYTSRNPQSYHLLSKEQSRNSLRKESLIFMKGVMDECTHVANFSVPVDPSLIIVVQAKEDAYIPRTGVRSLQEIWPGCEIRYLEGGHISAYLFKQGLFR

SEQ ID NO: 2733 - protein, 248 aa, Homo sapiens
MKLTFFLGLLALISCFTPSESQRFSRRPYLPGQLPPPPLYRPRWVPPSPPPPYDSRLNSPLSLPFVPGRVPPSSFSRFSQAVILSQLFPLESIRQPRLFPGYPNLHFPLRPYYVGPIRILKPPFPPIPFFLAIYLPISNPEPQINITTADTTITTNPPTTATATTSTSTKPTMTISSSTVPISSTPEPATSISAATPAASTENTTQILANRPHTVLLNATVQVTTSNQTILSSPAFKSFWQKLFAIFG

SEQ ID NO: 2734 - protein, 76 aa, Homo sapiens
MGAAISQGALIAIVCNGLVGFLLLLLWVILCWACHSRSADVDSLSESSPNSSPGPCPEKAPPPQKPSHEGSYLLQP

SEQ ID NO: 2735 - protein, 511 aa, Homo sapiens; identical to SEQ ID NO: 1924

SEQ ID NO: 2736 - protein, 511 aa, Homo sapiens; identical to SEQ ID NO: 1924

SEQ ID NO: 2737 - protein, 79 aa, Homo sapiens
MKLHSLISVLLLFVTLIPKGKTGVIPGQKQCIALKGVCRDKLCSTLDDTIGICNEGKKCCRRWWILEPYPTPVPKGKSP

SEQ ID NO: 2738 - protein, 116 aa, Homo sapiens; identical to SEQ ID NO: 2491

SEQ ID NO: 2739 - protein, 180 aa, Homo sapiens
QVIPINSGDLFVHPLWNRSCVACGNDIALIKLSRSAQLGDAVQLASLPPAGDILPNETPCYITGWGRLYTNGPLPDKLQEALLPVVDYEHCSRWNWWGSSVKKTMVCAGGDIRSGCNGDSGGPLNCPTEDGGWQVHGVTSFVSAFGCNTRRKPTVFTRVSAFIDWIEEKLQGNKAPESRT

SEQ ID NO: 2740 - protein, 404 aa, Homo sapiens
MPPFLITLFLFHSCCLRANGHLREGMTLLKTEFALHLYQSVAACRNETNFVISPAGVSLPLEILQFGAEGSTGQQLADALGYTVHDKRVKDFLHAVYATLPTSSQGTEMELACSLFVQVGTPLSPCFVEHVSWWANSSLEPADLSEPNSTAIQTSEGASRETAGGGPSEGPGGWPWEQVSAAFAQLVLVSTMSFQGTWRKRFSSTDTQILPFTCAYGLVLQVPMMHQTTEVNYGQFQDTAGHQVGVLELPYLGSAVSLFLVLPRDKDTPLSHIEPHLTASTIHLWTTSLRRARMDVFLPRFRIQNQFNLKSILNSWGVTDLFDPLKANLKGISGQDGFYVSEAIHKAKIEVLEEGTKASGATALLLLKRSRIPIFKADRPFIYFLREPNTGFVFSIGRVSNPLD

SEQ ID NO: 2741 - protein, 147 aa, Homo sapiens; identical to SEQ ID NO: 2688

SEQ ID NO: 2742 - protein, 876 aa, Homo sapiens; identical to SEQ ID NO: 1912

SEQ ID NO: 2743 - protein, 876 aa, Homo sapiens; identical to SEQ ID NO: 1912

SEQ ID NO: 2744 - protein, 913 aa, Homo sapiens; identical to SEQ ID NO: 2128

SEQ ID NO: 2745 - protein, 147 aa, Homo sapiens; identical to SEQ ID NO: 2688

SEQ ID NO: 2746 - protein, 876 aa, Homo sapiens; identical to SEQ ID NO: 1912

SEQ ID NO: 2747 - protein, 876 aa, Homo sapiens; identical to SEQ ID NO: 1912

SEQ ID NO: 2748 - protein, 876 aa, Homo sapiens; identical to SEQ ID NO: 1912

SEQ ID NO: 2749 - protein, 913 aa, Homo sapiens; identical to SEQ ID NO: 2128

SEQ ID NO: 2750 - protein, 913 aa, Homo sapiens; identical to SEQ ID NO: 2128

SEQ ID NO: 2751 - protein, 102 aa, Homo sapiens
MSVMKPCLMTIAILMILAQKTPGGLFRSHNGKSREPWNPCELYQGMCRNACREYEIQYLTCPNDQKCCLKLSVKITSSKNVKEDYDSNSNLSVTNSSSYSHI

SEQ ID NO: 2752 - protein, 88 aa, Homo sapiens
MLPDHFSPLSGDIKLSVLALVVLVVLAQTAPDGWIRRCYYGTGRCRKSCKEIERKKEKCGEKHICCVPKEKDKLSHIHDQKETSELYI

SEQ ID NO: 2753 - protein, 466 aa, Homo sapiens; identical to SEQ ID NO: 2207

SEQ ID NO: 2754 - protein, 68 aa, Homo sapiens
MKLCVTVLSLLVLVAAFCSLALSAPTKSSEWKLQGVCFQCCSGKDPIHQSCPTWTMVRQRKMPTTGKG

SEQ ID NO: 2755 - protein, 139 aa, Homo sapiens
MYKLASCCLLFIGFLNPLLSLPLLDSREISFQLSAPHEDARLTPEELERASLLQILPEMLGAERGDILRKADSSTNIFNPRGNLRKFQDFSGQDPNILLSHLLARIWKPYKKQRRKLRQDLRLWKKEPGLRIFKNYVYI

SEQ ID NO: 2756 - protein, 657 aa, Homo sapiens
MRTVVLTMKASVIEMFLVLLVTGVHSNKETAKKIKRPKFTVPQINCDVKAGKIIDPEFIVKCPAGCQDPKYHVYGTDVYASYSSVCGAAVHSGVLDNSGGKILVRKVAGQSGYKGSYSNGVQSLSLPRWRESFIVLESKPKKGVTYPSALTYSSSKSPAAQAGETTKAYQRPPIPGTTAQPVTLMQLLAVTVAVATPTTLPRPSPSAASTTSIPRPQSVGHRSQEMDLWSTATYTSSQNRPRADPGIQRQDPSGAAFQKPVGADVSLDCKIDLSFLIDGSTSIGKRRFRIQKQLLADVAQALDIGPAGPLMGVVQYGDNPATHFNLKTHTNSRDLKTAIEKITQRGGLSNVGRAISFVTKNFFSKANGNRSGAPNVVVVMVDGWPTDKVEEASRLARESGINIFFITIEGAAENEKQYVVEPNFANKAVCRTNGFYSLHVQSWFGLHKTLQPLVKRVCDTDRLACSKTCLNSADIGFVIDGSSSVGTGNFRTVLQFVTNLTKEFEISDTDTRIGAVQYTYEQRLEFGFDKYSSKPDILNAIKRVGYWSGGTSTGAAINFALEQLFKKSKPNKRKLMILITDGRSYDDVRIPAMAAHLKGVITYAIGVAWAAQEELEVIATHPARDHSFFVDEFDNLHQYVPRIIQNICTEFNSQPRN

SEQ ID NO: 2757 - protein, 1324 aa, Homo sapiens
MRHGVAWALLVAAALGLGARGVRGAVALADFYPFGAERGDAVTPKQDDGGSGLRPLSVPFPFFGAEHSGLYVNNNGIISFLKEVSQFTPVAFPIAKDRCVVAAFWADVDNRRAGDVYYREATDPAMLRRATEDVRHYFPELLDFNATWVFVATWYRVTFFGGSSSSPVNTFQTVLITDGKLSFTIFNYESIVWTTGTHASSGGNATGLGGIAAQAGFNAGDGQRYFSIPGSRTADMAEVETTTNVGVPGRWAFRIDDAQVRVGGCGHTTSVCLALRPCLNGGKCIDDCVTGNPSYTCSCLSGFTGRRCHLDVNECASQPCQNGGTCTHGINSFRCQCPAGFGGPTCETAQSPCDTKECQHGGQCQVENGSAVCVCQAGYTGAACEMDVDDCSPDPCLNGGSCVDLVGNYTCLCAEPFKGLRCETGDHPVPDACLSAPCHNGGTCVDADQGYVCECPEGFMGLDCRERVPDDCECRNGGRCLGANTTLCQCPLGFFGLLCEFEITAMPCNMNTQCPDGGYCMEHGGSYLCVCHTDHNASHSLPSPCDSDPCFNGGSCDAHDDSYTCECPRGFHGKHCEKARPHLCSSGPCRNGGTCKEAGGEYHCSCPYRFTGRHCEIGKPDSCASGPCHNGGTCFHYIGKYKCDCPPGFSGRHCEIAPSPCFRSPCVNGGTCEDRDTDFFCHCQAGYMGRRCQAEVDCGPPEEVKHATLRFNGTRLGAVALYACDRGYSLSAPSRIRVCQPHGVWSEPPQCLEIDECRSQPCLHGGSCQDRVAGYLCLCSTGYEGAHCELERDECRAHPCRNGGSCRNLPGAYVCRCPAGFVGVHCETEVDACDSSPCQHGGRCESGGGAYLCVCPESFFGYHCETVSDPCFSSPCGGRGYCLASNGSHSCTCKVGYTGEDCAKELFPPTALKMERVEESGVSISWNPPNGPAARQMLDGYAVTYVSSDGSYRRTDFVDRTRSSHQLQALAAGRAYNISVFSVKRNSNNKNDISRPAVLLARTRPRPVEGFEVTNVTASTISVQWALHRIRHATVSGVRVSIRHPEALRDQATDVDRSVDRFTFRALLPGKRYTIQLTTLSGLRGEEHPTESLATAPTHVWTRPLPPANLTAARVTATSAHVVWDAPTPGSLLEAYVINVTTSQSTKSRYVPNGKLASYTVRDLLPGRRYQLSVIAVQSTELGPQHSEPAHLYIITSPRDGADRRWHQGGHHPRVLKNRPPPARLPELRLLNDHSAPETPTQPPRFSELVDGRGRVSARFGGSPSKAATVRSQPTASAQLENMEEAPKRVSLALQLPEHGSKDIGSESAALVGTLGLTDCSQGP

SEQ ID NO: 2758 - protein, 243 aa, Homo sapiens
MGIFLVYVGFVFFSVLYVQQGLSSQAKFTEFPRNVTATEGQNVEMSCAFQSGSASVYLEIQWWFLRGPEDLDPGAEGAGAQVELLPDRDPDSDGTKISTVKVQGNDISHKLQISKVRKKDEGLYECRVTDANYGELQEHKAQAYLKVNANSHARRMQAFEASPMWLQDMKPRKNVSAAIPSSIHGSANQRTHSTSSPQVVAKIPKQSPQSGMETHFEPFILPLTNAPQKGQSYRVDRFMNGDF

SEQ ID NO: 2759 - protein, 405 aa, Homo sapiens; identical to SEQ ID NO: 2248

SEQ ID NO: 2760 - protein, 190 aa, Homo sapiens
MRTVVLTMKASVIEMFLVLLVTGVHSNKETAKKIKRPKFTVPQINCDVKAGKIIDPEFIVKCPAGCQDPKYHVYGTDVYASYSSVCGAAVHSGVLDNSGGKILVRKVAGQSGYKGSYSNGVQSLSLPRWRESFIVLESKPKKGVTYPSALTYSSSKSPAAQADLWSTATYTSSQNRPRADPVQRQPCYSL

SEQ ID NO: 2761 - protein, 132 aa, Homo sapiens
MAPSPRTGSRQDATALPSMSSTFWAFMILASLLIAYCSQLAAGTCEIVTLDRDSSQPRRTIARQTARCACRKGQIAGTTRARPACVDARIIKTKQWCDMLPCLEGEGCDLLINRSGWTCTQPGGRIKTTTVS

SEQ ID NO: 2762 - protein, 318 aa, Homo sapiens; identical to SEQ ID NO: 2081

SEQ ID NO: 2763 - protein, 132 aa, Homo sapiens
MLPLTMTVLILLLLPTGQAAPKDGVTRPDSEVQHQLLPNPFQPGQEQLGLLQSYLKGLGRTEVQLEHLSREQVLLYLFALHDYDQSGQLDGLELLSMLTAALAPGAANSPTTNPGNLDARLDGGEKAMQPQW

SEQ ID NO: 2764 - protein, 243 aa, Homo sapiens
MLLSLLGACAVVGPFHGPEWEPVQGLLSQNHSCRDPQCCGNLLVLCLFLVWQVRHCWHQVTRTRFSTRNVIKVPLQKRAVPSMRCETVFKLTPEFFSPGKSRGLDSQQCAQRQRWGYRRSLQESWAQNLLSPQHPCPGPPSGVHTHSEPIFCTTSISNTCLLPQNSSWKAWQVPWCLHDGQTRPALDMCQEMEQLLLHSQERLVSLEPVISVRSRPTSMTLTTSLPNLLSAERLQFCPQRAPA

SEQ ID NO: 2765 - protein, 834 aa, Homo sapiens; identical to SEQ ID NO: 2097

SEQ ID NO: 2766 - protein, 394 aa, Homo sapiens
MWRCPLGLLLLLPLAGHLALGAQQGRGRRELAPGLHLRGIRDAGGRYCQEQDLCCRGRADDCALPYLGAICYCDLFCNRTVSDCCPFPPIQGCMHGGRIYPVLGTYWDNCNRCTCQENRQWQCDQEPCLVDPDMIKAINQGNYGWQAGNHSAFWGMTLDEGIRYRLGTIRPSSSVMNMHEIYTVLNPGEVLPTAFEASEKWPNLIHEPLDQGNCAGSWAFSTAAVASDRVSIHSLGHMTPVLSPQNLLSCDTHQQQGCRGGRLDGAWWFLRRRGVVSDHCYPFSGRERDEAGPAPPCMMHSRAMGRGKRQATAHCPNSYVNNNDIYQVTPVYRLGSNDKEIMKELMENGPVQALMEVHEDFFLYKGGIYSHTPVSLGRPERYRRHGTHSVKITG

SEQ ID NO: 2767 - protein, 100 aa, Homo sapiens
MAAALALVAGVLSGAVLPLWSALPQYKKKITDRCFHHSECYSGCCLMDLDSGGAFCAPRARITMICLPQTKGATNIICPCRMGLTCISKDLMCSRRCHMI

SEQ ID NO: 2768 - protein, 325 aa, Homo sapiens
MRLPRRAALGLLPLLLLLPPAPEAAKKPTPCHRCRGLVDKFNQGMVDTAKKNFGGGNTAWEEKTLSKYESSEIRLLEILEGLCESSDFECNQMLEAQEEHLEAWWLQLKSEYPDLFEWFCVKTLKVCCSPGTYGPDCLACQGGSQRPCSGNGHCSGDGSRQGDGSCRCHMGYQGPLCTDCMDGYFSSLRNETHSICTACDESCKTCSGLTNRDCGECEVGWVLDEGACVECDSSCVGCTGEGPGNCKECISGYAREHGQCADVDECSLAEKTCVRKNENCYNTPGSYVCVCPDGFEETEDACVPPAEAEATEGESPTQLPSREDL

SEQ ID NO: 2769 - protein, 152 aa, Homo sapiens
MRGPGHPLLLGLLLVLGAAGRGRGGAEPREPADGQALLRLVVELVQELRKHHSAEHKGLQLLGRDCALGRAEAAGLGPSPEQRVEIVPRDLRMKDKFLKHLTGPLYFSPKCSKHFHRLYHNTRDCTIPAYYKRCARLLTRLAVSPVCMEDKQ

SEQ ID NO: 2770 - protein, 136 aa, Homo sapiens [sequence omitted]

SEQ ID NO: 2771 - protein, 402 aa, Homo sapiens
MRLPRRAALGLLPLLLLLPPAPEAAKKPTPCHRCRGLVDKFNQGMVDTAKKNFGGGNTAWEEKTLSKYESSEIRLLEILEGLCESSDFECNQMLEAQEEHLEAWWLQLKSEYPDLFEWFCVKTLKVCCSPGTYGPDCLACQGGSQRPCSGNGHCSGDGSRQGDGSCRCHMGYQGPLCTDCMDGYFSSLRNETHSICTVRTGLSDSYPPCCLSLGCWRGVGHAWIRGRNTHTQPGYSSRVWIAAFSPACDESCKTCSGLTNRDCGECEVGWVLDEGACVDVDECAAEPPPCSAAQFCKNANGSYTCEECDSSCVGCTGEGPGNCKECISGYAREHGQCADVDECSLAEKTCVRKNENCYNTPGSYVCVCPDGFEETEDACVPPAEAEATEGESPTQLPSREDL

SEQ ID NO: 2772 - protein, 210 aa, Homo sapiens
MSAGKMMRTLITTHPLPLLLLPQQLLQLVQFQEVDTDFDFPEEDKKEEFEECLEKFFSTGPARPPTKEKVKRRVLIEPGMPLNHIEYCNHEIMGKNVYYKHRWVAEHYFLLMQYDELQKICYNRFVPCKNGIRKCNRSKGLVEGVYCNLTEAFEIPACKYESLYRKGYVLITCSWQNEMQKRIPHTINDLVEPPEHRSFLSEDGVFVISP

SEQ ID NO: 2773 - protein, 194 aa, Homo sapiens; identical to SEQ ID NO: 1914

SEQ ID NO: 2774 - protein, 1352 aa, Homo sapiens
MRHGVAWALLVAAALGLGARGVRGAVALADFYPFGAERGDAVTPKQDDGGSGLRPLSVPFPFFGAEHSGLYVNNNGIISFLKEVSQFTPVAFPIAKDRCVVAAFWADVDNRRAGDVYYREATDPAMLRRATEDVRHYFPELLDFNATWVFVATWYRVTFFGGSSSSPVNTFQTVLITDGKLSFTIFNYESIVWTTGTHASSGGNATGLGGIAAQAGFNAGDGQRYFSIPGSRTADMAEVETTTNVGVPGRWAFRIDDAQVRVGGCGHTTSVCLALRPCLNGGKCIDDCVTGNPSYTCSCLSGFTGRRCHLDVNECASQPCQNGGTCTHGINSFRCQCPAGFGGPTCETAQSPCDTKECQHGGQCQVENGSAVCVCQAGYTGAACEMDVDDCSPDPCLNGGSCVDLVGNYTCLCAEPFKGLRCETGDHPVPDACLSAPCHNGGTCVDADQGYVCECPEGFMGLDCRERVPDDCECRNGGRCLGANTTLCQCPLGFFGLLCEFEITAMPCNMNTQCPDGGYCMEHGGSYLCVCHTDHNASHSLPSPCDSDPCFNGGSCDAHDDSYTCECPRGFHGKHCEKARPHLCSSGPCRNGGTCKEAGGEYHCSCPYRFTGRHCEIGKPDSCASGPCHNGGTCFHYIGKYKCDCPPGFSGRHCEIAPSPCFRSPCVNGGTCEDRDTDFFCHCQAGYMGRRCQAEVDCGPPEEVKHATLRFNGTRLGAVALYACDRGYSLSAPSRIRVCQPHGVWSEPPQCLEIDECRSQPCLHGGSCQDRVAGYLCLCSTGYEGAHCELERDECRAHPCRNGGSCRNLPGAYVCRCPAGFVGVHCETEVDACDSSPCQHGGRCESGGGAYLCVCPESFFGYHCETVSDPCFSSPCGGRGYCLASNGSHSCTCKVGYTGEDCAKELFPPTALKMERVEESGVSISWNPPNGPAARQMLDGYAVTYVSSDGSYRRTDFVDRTRSSHQLQALAAGRAYNISVFSVKRNSNNKNDISRPAVLLARTRPRPVEGFEVTNVTASTISVQWALHRIRHATVSGVRVSIRHPEALRDQATDVDRSVDRFTFRALLPGKRYTIQLTTLSGLRGEEHPTESLATAPTHVWTRPLPPANLTAARVTATSAHVVWDAPTPGSLLEAYVINVTTSQSTKSRYVPNGKLASYTVRDLLPGRRYQLSVIAVQSTELGPQHSEPAHLYIITSPRDGADRRWHQGGHHPRVLKNRPPPARLPELRLLNDHSAPETPTQPPRFSELVDGRGRVSARFGGSPSKAATVRSHVPGNCSENPCQNGGTCVPGADAHSCDCGPGFKGRRCELACIKVSRPCTRLFSETKAFPVWEGGVCHHVKQSKSQTLEKS

SEQ ID NO: 2775 - protein, 318 aa, Homo sapiens; identical to SEQ ID NO: 2081

SEQ ID NO: 2776 - protein, 271 aa, Homo sapiens
MQAACWYVLFLLQPTVYLVTCANLTNGGKSELLKSGSSKSTLKHIWTESSKDLSISRLLSQTFRGKENDTDLDLRYDTPEPYSEQDLWDWLRNSTDLQEPRPRAKRRPIVKTGKFKKMFGWGDFHSNIKTVKLNLLITGKIVDHGNGTFSVYFRHNSTGQGNVSVSLVPPTKIVEFDLAQQTVIDAKDSKSFNCRIEYEKVDKATKNTLCNYDPSKTCYQEQTQSHVSWLCSKPFKVICIYISFYSTDYKLVQKVCPDYNYHSDTPYFPSG

SEQ ID NO: 2777 - protein, 332 aa, Homo sapiens
MLLLAAAFLVAFVLLLYMVSPLISPKPLALPGAHVVVTGGSSGIGKCIAIECYKQGAFITLVARNEDKLLQAKKEIEMHSINDKQVVLCISVDVSQDYNQVENVIKQAQEKLGPVDMLVNCAGMAVSGKFEDLEVSTFERLMSINYLGSVYPSRAVITTMKERRVGRIVFVSSQAGQLGLFGFTAYSASKFAIRGLAEALQMEVKPYNVYITVAYPPDTDTPGFAEENRTKPLETRLISETTSVCKPEQVAKQIVKDAIQGNFNSSLGSDGYMLSALTCGMAPVTSITEGLQQVVTMGLFRTIALFYLGSFDSIVRRCMMQREKSENADKTA

SEQ ID NO: 2778 - protein, 498 aa, Homo sapiens
MSFSATILFSPPSGSEARCCCCACKSETNGGNTGSQGGNPPPSTPITVTGHGLAVQSSEQLLHVIYQRVDKAVGLAEAALGLARANNELLKRLQEEVGDLRQGKVSIPDEDGESRAHSSPPEEPGPLKESPGEAFKALSAVEEECDSVGSGVQVVIEELRQLGAASVGPGPLGFPATQRDMRLPGCTLAASEAAPLLNPLVDDYVASEGAVQRVLVPAYAKQLSPATQLAIQRATPETGPENGTKLPPPRPEDMLNAAAALDSALEESGPGSTGELRHSLGLTVSPCRTRGSGQKNSRRKRDLVLSKLVHNVHNHITNDKRFNGSESIKSSWNISVVKFLLEKLKQELVTSPHNYTDKELKGACVAYFLTKRREYRNSLNPFKGLKEKEEKKLRSRRYRLFANRSSIMRHFGPEDQRLWNDVTEELMSDEEDSLNEPDRLPSAEAQLLPPELYNPNFQEEEDEGGDENAPGSPSFDQPHKTCCPDLNSFIEIKVEKDE

SEQ ID NO: 2779 - protein, 321 aa, Homo sapiens
MRLPRRAALGLLPLLLLLPPAPEAAKKPTPCHRCRGLVDKFNQGMVDTAKKNFGGGNTAWEEKTLSKYESSEIRLLEILEGLCESSDFECNQMLEAQEEHLEAWWLQLKSEYPDLFEWFCVKTLKVCCSPGTYGPDCLACQGGSQRPCSGNGHCSGDGSRQGDGSCRCHMGYQGPLCTDCMDGYFSSLRNETHSICTACDESCKTCSGLTNRDCGECEVGWVLDEGACVDVDECAAEPPPCSAAQFCKNANGSYTCEDVDECSLAEKTCVRKNENCYNTPGSYVCVCPDGFEETEDACVPPAEAEATEGESPTQLPSREDL

SEQ ID NO: 2780 - protein, 236 aa, Homo sapiens
MMGIFLVYVGFVFFSVLYVQQGLSSQAKFTEFPRNVTATEGQNVEMSCAFQSGSASVYLEIQWWFLRGPEDLDPGAEGAGAQVELLPDRDPDSDGTKISTVKVQGNDISHKLQISKVRKKDEGLYECRVTDANYGELQEHKAQAYLKVNANSHARRMQAFEASPMWLQDMKPRKNVSAAIPSSIHGSANQRTHSTSSPQVVAKIPKQSPQSGARIATSHGLSVLLLVCGFVKGALL

SEQ ID NO: 2781 - protein, 90 aa, Homo sapiens
MNMKPATASALLLLLLGLAWTQGSHGWGADASSLQKRAGRDDQNYNYNQHAYPTAYGGKYSVKTPAKGGVSPSSSASRVQPGLLQWVKFW

SEQ ID NO: 2782 - protein, 119 aa, Homo sapiens
MPAVFMLASSSALQCGRGVPRFPRTEVGAGHSVNEETKAEKVGNQTSVIPATSRQAALGTSWTQRRTQPLQERSHWHPRGNNASGMGGHRMFPGPLRGPAAQVLENECGSLGRAAEGRS

SEQ ID NO: 2783 - protein, 212 aa, Homo sapiens; identical to SEQ ID NO: 2170

SEQ ID NO: 2784 - protein, 128 aa, Homo sapiens
MRVARRTRNVCRCPRAAGPGVPEPRAAPLPLLAMAPPPACRSPMSPPPPPLLLLLLSLALLGARARAEPAGSAVPAQSRPCVDCHAFEFMQRALQDLRKTACSLDARTETLLLQAERRALCACWPAGH

SEQ ID NO: 2785 - protein, 132 aa, Homo sapiens
MGPRVLQPPLLLLLLALLLAALPCGAEEASPLRPAQVTLSPPPAVTNGSQPGAPHNSTHTRPPGASGSALTRSFYVILGFCGLTALYFLIRAFRLKKPQRRRYGLLANTEDPTEMASLDSDEETVFESRNLR

SEQ ID NO: 2786 - protein, 194 aa, Homo sapiens; identical to SEQ ID NO: 2066

SEQ ID NO: 2787 - protein, 146 aa, Homo sapiens
MVITIYYDVKVRFIVRGCGQYISYRCQEKRNTYFAEYWYQAQCCQYDYCNSWSSPQLQSSLPEPHDRPLALPLSDSQIQWFYQALNLSLPLPNFHAGTEPDGLDPMVTLSLNLGLSFAELRRMYLFLNSSGLLVLPQAGLLTPHPS

SEQ ID NO: 2788 - protein, 77 aa, Homo sapiens
MGSSGLLSLLVLFVLLANVQGPGLTDWLFPRRCPKIREECEFQERDVCTKDRQCQDNKKCCVFSCGKKCLDLKQGKQ

SEQ ID NO: 2789 - protein, 147 aa, Homo sapiens
MGQEVHGSCWALGAGGGQRQWVGRSMPPLAPQLCRAVFLVPILLLLQVKPLNGSPGPKDGSQTEKTPSADQNQEQFEEHFVASSVGEMWQVVDMAQQEEDQSSKTAAVHKHSFHLSFCFSLASVMVFSGGPLRRTFPNIQLCFMLTH

SEQ ID NO: 2790 - protein, 564 aa, Homo sapiens; identical to SEQ ID NO: 2292

SEQ ID NO: 2791 - protein, 140 aa, Homo sapiens; identical to SEQ ID NO: 2064

SEQ ID NO: 2792 - protein, 175 aa, Homo sapiens; identical to SEQ ID NO: 2053

SEQ ID NO: 2793 - protein, 126 aa, Homo sapiens; identical to SEQ ID NO: 2005

SEQ ID NO: 2794 - protein, 95 aa, Homo sapiens
MAPPPACRSPMSPPPPPLLLLLLSLALLGARARAEPAGSAVPAQSRPCVDCHAFEFMQRALQDLRKTACSLDARTETLLLQAERRALCACWPAGH

SEQ ID NO: 2795 - protein, 140 aa, Homo sapiens; identical to SEQ ID NO: 2064

SEQ ID NO: 2796 - protein, 96 aa, Homo sapiens; identical to SEQ ID NO: 2321

SEQ ID NO: 2797 - protein, 225 aa, Homo sapiens
  VARIANT 1: note = MOD_RES - Any amino acid
XADLPSCWGAGPCYTGHKVGALRRDTVICCCRHGDYSTPCLFTPGKPSRNPSPWKRTLWTLSAPWAGPAGWTGEEQNATKTGLITRRPRPLRRRPHPAPASPLPEIIRGNIPRMLGKFVPVNWEPPQPLPFPKYLRCYRCLLETKELGCLLGSDICLTPAGSSCITLHKKNSSGSDVMVSDCRSKEQMSDCSNTRTSPVSGFWIFSQYCFLDFCNDPQNRGLYTP

SEQ ID NO: 2798 - protein, 227 aa, Homo sapiens
MGAVMGTFSSLQTKQRRPSKDIAWWYYQYQRDKIEDELEMTMVCHRPEGLEQLEAQTNFTKRELQVLYRGFKNECPSGVVNEDTFKQIYAQFFPHGDASTYAHYLFNAFDTTQTGSVKFEDFVTALSILLRGTVHEKLRWTFNLYDINKDGYINKEEMMDIVKAIYDMMGKYTYPVLKEDTPRQHVDVFFQKMDKNKDGIVTLDEFLESCQEDDNIMRSLQLFQNVM

SEQ ID NO: 2799 - protein, 181 aa, Homo sapiens
MQVNFVSYVQLTSRALPSLTDSKGSLVVVSSLLGRVPTSFSTPYSAAKFALDGFFGSLRRELDVQDVNVAITMCVLGLRDRASAAEAVRSSTSRPRQPEHRGVPLQSQTAMFLPPTVPGARTLTETPLRGWPQPKMKSSRQKSKTEKNDGHLEPVTAWEVQVPRVRRLCRGLARPHLFGHD

SEQ ID NO: 2800 - protein, 140 aa, Homo sapiens
MSDLLLLGLIGGLTLLLLLTLLAFAGYSGLLAGVEVSAGSPPIRNVTVAYKFHMGLYGETGRLFTESCSISPKLRSIAVYYDNPHMVPPDKCRCAVGSILSEGEESPSPELIDLYQKFGFKVFSFPAPSHVVTATFPYTT

SEQ ID NO: 2801 - protein, 58 aa, Homo sapiens
MGPEALSSLLLLLLVASGDADMKGHFDPAKCRYALGMQDRTIPDSDISASSSWSDSTA

SEQ ID NO: 2802 - protein, 913 aa, Homo sapiens; identical to SEQ ID NO: 2128

SEQ ID NO: 2803 - protein, 381 aa, Homo sapiens
MRLLAWLIFLANWGGARAEPGKFWHIADLHLDPDYKVSKDPFQVCPSAGSQPVPDAGPWGDYLCDSPWALINSSIYAMKEIEPEPDFILWTGDDTPHVPDEKLGEAAVLEIVERLTKLIREVFPGAFYCEKLPGPSGAGRIVVLNTNLYYTSNALTADMADPGQQFQWLEDVLTDASKAGDMVYIVGHVPPGFFEKTQNKAWFREGFNEKYLKVVRKHHRVIAGQFFGHHHTDSFRMLYDDAGVPISAMFITPGVTPWKTTLPGVVNGANNPAIRVFEYDRATLSLKDMVTYFMNLSQANAQGTPRWELEYQSTLQRYYVYNSVSYSAGVCDEACSMQHVCAMRQVDIDAYTTCLYASGTTPVPQLPLLLMALLGLCTLVL

SEQ ID NO: 2804 - protein, 151 aa, Homo sapiens
MRVAGAAKLVVAVAVFLLTFYVISQVFEIKMDASLGNLFARSALDTAARSTKPPRYKCGISKACPEKHFAFKMASGAANVVGPKICLEDNVLMSGVKNNVGRGINVALANGKTGEVLDTKYFDMWGGDVAPFIEFLKAIQDGTIVLMGTYD

SEQ ID NO: 2805 - protein, 311 aa, Homo sapiens
  VARIANT 1: note = MOD_RES - Any amino acid
XAPSPCSHFNCGSQVTDGGTIKQKIFTFDAMFSTNYSHMENYRKREDLVYQSTVRLPEVRISDNGPYECHVGIYDRATREKVVLASGNIFLNVMAPPTSIEVVAADTPAPFSRYQAQNFTLVCIVSGGKPAPMVYFKRDGEPIDAVPLSEPPAASSGPLQDSRPFRSLLHRDLDDTKMQKSLSLLDAENRGGRPYTERPSRGLTPDPNILLQPTTENIPETVVSREFPRWVHSAEPTYFLRHSRTPSSDGTVEVRALLTWTLNPQIDNEALFSCEVKHPALSMPMQAEVTLVAPKGPKIVMTPSRARVGDT

SEQ ID NO: 2806 - protein, 325 aa, Homo sapiens; identical to SEQ ID NO: 1911

SEQ ID NO: 2807 - protein, 318 aa, Homo sapiens
MGLHLRPYRVGLLPDGLLFLLLLLMLLADPALPAGRHPPVVLGWFTTKHPGPPSFLMVWMYVSLALGRPSHWSSWTPAKAAWVPISTPWWRALWAGATHGVRMSEGLPMTGAEPQRQPQAWKDKYIRAFVSLGAPWGGVAKTLRVLASGDNNRIPVIGPLKIREQQRSAVSTSWLLPYNYTWSPEKVFVQTPTINYTLRDYRKFFQDIGFEDGWLMRQDTEGLVEATMPPGVQLHCLYGTGVPTPDSFYYESFPDRDPKICFGDGDGTVNLKSALQCQAWQSRQEHQVLLQELPGSEHIEMLANATTLAYLKRVLLGP

SEQ ID NO: 2808 - protein, 524 aa, Homo sapiens
YALRDRQGNAIGVTACDIDGDGREEIYFLNTNNAFSGVATYTDKLFKFRNNRWEDILSDEVNVARGVASLFAGRSVACVDRKGSGRYSIYIANYAYGNVGPDALIEMDPEASDLSRGILALRDVAAEAGVSKYTGGRGVSVGPILSSSASDIFCDNENGPNFLFHNRGDGTFVDAAASAGVDDPHQHGRGVALADFNRDGKVDIVYGNWNGPHRLYLQMSTHGKVRFRDIASPKFSMPSPVRTVITADFDNDQELEIFFNNIAYRSSSANRLFRVIRREHGDPLIEELNPGDALEPEGRGTGGVVTDFDGDGMLDLILSHGESMAQPLSVFRGNQGFNNNWLRVVPRTRFGAFARGAKVVLYTKKSGAHLRIIDGGSGYLCEMEPVAHFGLGKDEASSVEVTWPDGKMVSRNVASGEMNSVLEILYPRDEDTLQDPAPLETPMNASSSHSCALETSPYVSTPMEATGAGPTRSAVGATSPTRMAQPAWGLSASHRAPAPPPPPLLLPLPLLLPLLELPLLHRSS

SEQ ID NO: 2809 - protein, 211 aa, Homo sapiens
MVSRMVSTMLSGLLFWLASGWTPAFAYSPRTPDRVSEADIQRLLHGVMEQLGIARPRVEYPAHQAMNLVGPQSIEGGAHEGLQHLGPFGNIPNIVAELTGDNIPKDFSEDQGYPDPPNPCPVGKTDDGCLENTPDTAEFSREFQLHQHLFDPEHDYPGLGKWNKKLLYEKMKGGERRKRRSVNPYLQGQRLDNVVAKKSVPHFSDEDKDPE

SEQ ID NO: 2810 - protein, 154 aa, Homo sapiens
MALGVPISVYLLFNAMTALTEEAAVTVTPPITAQQGNWTVNKTEADNIEGPIALKFSHLCLEDHNSYCINGACAFHHELEKAICRCFTGYTGERCEHLTLTSYAVDSYEKYIAIGIGVGLLLSGFLVIFYCYIRKRCLKLKSPYNVCSGERRPL

SEQ ID NO: 2811 - protein, 481 aa, Homo sapiens
MGKLRPGRVEWLASGHTERPHLFQNLLLFLWALLNCGLGVSAQGPGEWTPWVSWTRCSSSCGRGVSVRSRRCLRLPGEEPCWGDSHEYRLCQLPDCPPGAVPFRDLQCALYNGRPVLGTQKTYQWVPFHGAPNQCDLNCLAEGHAFYHSFGRVLDGTACSPGAQGVCVAGRCLSAGCDGLLGSGALEDRCGRCGGANDSCLFVQRVFRDAGAFAGYWNVTLIPEGARHIRVEHRSRNHLALMGGDGRYVLNGHWVVSPPGTYEAAGTHVVYTRDTGPQETLQAAGPTSHDLLLQVLLQEPNPGIEFEFWLPRERYSPFQARVQALGWPLRQPQPRGVEPQPPAAPAVTPAQTPTLAPDPCPPCPDTRGRAHRLLHYCGSDFVFQARVLGHHHQAQETRYEVRIQLVYKNRSPLRAREYVWAPGHCPCPMLAPHRDYLMAVQRLVSPDGTQDQLLLPHAGYARPWSPAEDSRIRLTARRCPG

SEQ ID NO: 2812 - protein, 208 aa, Homo sapiens
MADMQNLVERLERAVGRLEAVSHTSDMHRGYADSPSKAGAAPYVQAFDSLLAGPVAEYLKISKEIGGDVQKHAEMVHTGLKLERALLVTASQCQQPAENKLSDLLAPISEQIKEVITFREKNRGSKLFNHLSAVSESIQALGWVAMAPKPGPYVKEMNDAAMFYTNRVLKEYKDVDKKHVDWVKAYLSIWTELQAYIKEFHTTGLAWS

SEQ ID NO: 2813 - protein, 493 aa, Homo sapiens
SEAVYLNDSTYDGHTVGGLQYGGLGQLADGVVGLDDFRKSQELRVWPGYDYVGWSNHSFSSGYVEMEFEFDRLRAFQAMQVHCNNMHTLGARLPGGVECRFRRGPAMAWEGEPMRHNLGGNLGDPRARAVSVPLGGRVARFLQCRFLFAGPWLLFSEISFISDVVNNSSPALGGTFPPAPWWPPGPPPTNFSSLELEPRGQQPVAKAEGSPTAILIGCLVAIILLLLLIIALMLWRLHWRRLLSKVLESHPRTRSPGLVGIRPTPLPVSPMALRCCSPIQPTASFWPLTPVPLEARAPPHPPGPNPPTPRGVTGGNTYAVPALPPGAVGDGPPRVDFPRSRLRFKEKLGEGQFGEVHLCEVDSPQDLVSLDFPLNVRKGHPLLVAVKILRPDATKNARNDFLKEVKIMSRLKDPNIIRLLGVCVQDDPLCMITDYMENGDLNQFLSAHQLEDKAAEGAPGDGQAAQGPTISYPMLLHVAAQIASGMRYLATLN

SEQ ID NO: 2814 - protein, 772 aa, Homo sapiens
MQFQLTLFLHLGWLSYSKAQDDCNRGACHPTTGDLLVGRNTQLMASSTCGLSRAQKYCILSYLEGEQKCFICDSRFPYDPYDQPNSHTIENVIVSFEPDREKKWWQSENGLDHVSIRLDLEALFRFSHLILTFKTFRPAAMLVERSTDYGHNWKVFKYFAKDCATSFPNITSGQAQGVGDIVCDSKYSDIEPSTGGEVVLKVLDPSFEIENPYSPYIQDLVTLTNLRINFTKLHTLGDALLGRRQNDSLDKYYYALYEMIVRGSCFCNGHASECRPMQKMRGDVFSPPGMVHGQCVCQHNTDGPNCERCKDFFQDAPWRPAADLQDNACRSCSCNSHSSRCHFDMTTYLASGGLSGGVCEDCQHNTEGQHCDRCRPLFYRDPLKTISDPYACIPCECDPDGTISGGICVSHSDPALGSVAGQCLCKENVEGAKCDQCKPNHYGLSATDPLGCQPCDCNPLGSLPFLTCDVDTGQCLCLSYVTGAHCEECTVGYWGLGNHLHGCSPCDCDIGGAYSNVCSPKNGQCECRPHVTGRSCSEPAPGYFFAPLNFYLYEAEEATTLQGLAPLGSETFGQSPAVHVVLGEPVPGNPVTWTGPGFARVLPGAGLRFAVNNIPFPVDFTIAIHYETQSAADWTVQIVVNPPGGSEHCIPKTLQSKPQSFALPAATRIMLLPTPICLEPDVQYSIDVYFSQPLQGESHAHSHVLVDSAAVQWHNLGSLQPPPPECKQFSCFSFPSSWDYRHPPPHLANFCIFSRDGVSPHWPGWSQTPDLR

SEQ ID NO: 2815 - protein, 456 aa, Homo sapiens
MGRAGAAAVIPGLALLWAVGLGSAAPSPHLRLSFQELQAWHGLQTFSLERTCCYQALLVDEERGRLFVGAENHVASLNLDNISKRAKKLAWPAPVEWREECNWAGKDIGTECMNFVKLLHAYNRTHLLACGTGAFHPTCAFVEVGHRAEEPVLRLDPGRIEDGKGKSPYDPRHRAASVLVGEELYSGVAADLMGRDFTIFRSLGQRPSLRTEPHDSRWLNEPKFVKVFWIPESENPDDDKIYFFFRETAVEAAPALGRLSVSRVGQICRNDVGGQRSLVNKWTTFLKARLVCSVPGVEGDTHFDQLQDVFLLSSRDHRTPLLYAVFSTSSSIFQGSAVCVYSMNDVRRAFLGPFAHKEGPMHQWVSYQGRVPYPRQACAPARPLAPSVPPRTSQTMSSSLRGTTPSCTTLSCPLGGALFSYKLEPITPSLKLPRTGLQPLTDTMTSSSLAQTLARC

SEQ ID NO: 2816 - protein, 110 aa, Homo sapiens
LFMLHKIVQVYNSDVIDKQSASMTSDNADDKAVIILVPVRLGGERTNTDYLEFVKGILSLEYCVGIIGGKPKQSYYFAGFQDDSLIYMDPHYCQSFVDVSIKDFPLEVIL

SEQ ID NO: 2817 - protein, 139 aa, Homo sapiens
MGPEALSSLLLLLLVASGDADMKGHFDPAKCRYALGMQDRTIPDSDISASSSWSDSTAARHSRLESSDGDGAWCPAGSVFPKEEEYLQVDLQRLHLVALVGTQGRHAGGLGKEFSRSYRLRYSRDGRRWMGWKDRWGQE

SEQ ID NO: 2818 - protein, 189 aa, Homo sapiens
MLGITSCSDQQAKEGEGLEGSSTGSSSGNHGGSGGGNGHKPGCEKPGNEARGSGESGIQNSETSPGMFNFDTFWKNFKSKLGFINWDAINKNQVPPPSTRALLYFSRLWEDFKQNTPFLNWKAIIEGADASSLQKRAGRDDQNYNYNQHAYPTAYGGKYSVKTPAKGGVSPSSSASRVQPGLLQWVKFW

SEQ ID NO: 2819 - protein, 145 aa, Homo sapiens; identical to SEQ ID NO: 2436

SEQ ID NO: 2820 - protein, 87 aa, Homo sapiens
CKRKPYLLPSIREGARLGIQECGSQFRHERWNCMITAAATTAPMGASPLFGYELSSGCRQVDVSRLPLPRSFRLLCCENMLENHVFF

SEQ ID NO: 2821 - protein, 844 aa, Homo sapiens; identical to SEQ ID NO: 2289

SEQ ID NO: 2822 - protein, 876 aa, Homo sapiens; identical to SEQ ID NO: 1912

SEQ ID NO: 2823 - protein, 313 aa, Homo sapiens; identical to SEQ ID NO: 2235

SEQ ID NO: 2824 - protein, 280 aa, Homo sapiens
MKTFTWTLGVLFFLLVDTGHCRGGQFKIKKINQRRYPRTIKDMITRMDLENLKDVLSRQKREIDVLQLVVDVDGNIVNEVKLLRKESRNMNSRVTQLYMQLLHEIIRKRDNSLELSQLENKILNVTTEMLKMATRYRELEVKYASLTDLVNNQSVMITLLEEQCLRIFSRQDTHVSPPLVQVVPQHIPNSQQYTPGLLGGNEIQRDPGYPRDLMPPPDLATSPTKSPFKIPPVTFINEGPFKDCQQAKEAGHSVNGIFWAEYRGGSYSLRAVQMMIKPID

SEQ ID NO: 2825 - protein, 173 aa, Homo sapiens; identical to SEQ ID NO: 2208

SEQ ID NO: 2826 - protein, 102 aa, Homo sapiens
MERGAGAKLLPLLLLLRATGFTCAQTDGRNGYTAVIEVTSGGPWGDWAWPEMCPDGFFASGFSLKVEPPQGIPGDDTALNGIRLHCARGNVLGNTHVLGRME

SEQ ID NO: 2827 - protein, 116 aa, Homo sapiens; identical to SEQ ID NO: 2491

SEQ ID NO: 2828 - protein, 378 aa, Homo sapiens
  VARIANT 1: note = MOD_RES - Any amino acid
XYSGDYMEPEKPGAPLLPPPPQNSVPHYAEADIVTLQGVTGGNTYAVPALPPGAVGDGPPRVDFPRSRLRFKEKLGEGQFGEVHLCEVDSPQDLVSLDFPLNVRKGHPLLVAVKILRPDATKNASFSLFSRNDFLKEVKIMSRLKDPNIIRLLGVCVQDDPLCMITDYMENGDLNQFLSAHQLEDKAAEGAPGDGQAAQGPTISYPMLLHVAAQIASGMRYLATLNFVHRDLATRNCLVGENFTIKIADFGMSRNLYAGDYYRVQGRAVLPIRWMAWECILMGKFTTASDVWAFGVTLWEVLMLCRAQPFGQLTDEQVIENAGEFFRDQGRQVYLSRPPACPQGLYELMLRCWSRESEQRPPFSQLHRFLAEDALNTV

SEQ ID NO: 2829 - protein, 313 aa, Homo sapiens; identical to SEQ ID NO: 2235

SEQ ID NO: 2830 - protein, 139 aa, Homo sapiens; identical to SEQ ID NO: 2817

SEQ ID NO: 2831 - protein, 113 aa, Homo sapiens
MDNVQPKIKHRPFCFSVKGHVKMLRLALTVTSMTFFIIAQAPEPYIVITGFEVTVILFFILLYVLRLDRLMKWLFWPLLDIINSLVTTVFMLIVSVLALIPETTTLTVGGGLF

SEQ ID NO: 2832 - protein, 154 aa, Homo sapiens
MFGWGDFHSNIKTVKLNLLITGKIVDHGNGTFSVYFRHNSTGQGNVSVSLVPPTKIVEFDLAQQTVIDAKDSKSFNCRIEYEKVDKATKNTLCNYDPSKTCYQEQTQSHVSWLCSKPFKVICIYISFYSTDYKLVQKVCPDYNYHSDTPYFPSG

SEQ ID NO: 2833 - protein, 176 aa, Homo sapiens
MADMQNLVERLERAVGRLEAVSHTSDMHRGYADSPSKAGAAPYVQAFDSLLAGPVAEYLKISKEIGGDVQKHAEMVHTGLKLERALLVTASQCQQPAENKLSDLLAPISEQIKEVITFREKNRGSKLFNHLSAVSESIQALGWVAMAPKPGPYVKEMNDAAMFYTNRVLKEYKDVD

SEQ ID NO: 2834 - protein, 844 aa, Homo sapiens; identical to SEQ ID NO: 2289

SEQ ID NO: 2835 - protein, 684 aa, Homo sapiens
  VARIANT 1: note = MOD_RES - Any amino acid
XPRSSTHVPLVLPLLVLLLLAPARQAAAQRCPQACICDNSRRHVACRYQNLTEVPDAIPELTQRLDLQGNLLKVIPAAAFQGVPHLTHLDLRHCEVELVAEGAFRGLGRLLLLNLASNHLRELPQEALDGLGSLRRLELEGNALEELRPGTFGALGALATLNLAHNALVYLPAMAFQGLLRVRWLRLSHNALSVLAPEALAGLPALRRLSLHHNELQALPGPVLSQARGLARLELGHNPLTYAGEEDGLALPGLRELLLDGGALQALGPRAFAHCPRLHTLDLRGNQLDTLPPLQGPGQLRRLRLQGNPLWCGCQARPLLEWLARARVRSDGACQGPRRLRGEALDALRPWDLRCPGDAAQEEEELEERAVAGPRAPPRGPPRGPGEERAVAPCPRACVCVPESRHSSCEGCGLQAVPRGFPSDTQLLDLRRNHFPSVPRAAFPGLGHLVSLHLQHCGIAELEAGALAGLGRLIYLYLSDNQLAGLSAAALEGAPRLGYLYLERNRFLQVPGAALRALPSLFSLHLQDNAVDRLAPGDLGRTRALRWVYLSGNRITEVSLGALGPARELEKLHLDRNQLREVPTGALEGLPALLELQLSGNPLRALRDGAFQPVGRSLQHLFLNSSGLEQICPGAFSGLGPGLQSLHLQKNQLRALPALPSARRTPIKGRQCGADKVGKEKGRL

SEQ ID NO: 2836 - protein, 752 aa, Homo sapiens
MARHLLLPLVMLVISPIPGAFQDSALSPTQEEPEDLDCGRPEPSARIVGGSNAQPGTWPWQVSLHHGGGHICGGSLIAPSWVLSAAHCFMTNGTLEPAAEWSVLLGVHSQDGPLDGAHTRAVAAIVVPANYSQVELGADLALLRLASPASLGPAVWPVCLPRASHRFVHGTACWATGWGDVQEADPLPLPWVLQEVELRLLGEATCQCLYSQPGPFNLTLQILPGMLCAGYPEGRRDTCQGDSGGPLVCEEGGRWFQAGITSFGFGCGRRNRPGVFTAVATYEAWIREQVMGSEPGPAFPTQPQKTQSDPQEPREENCTIALPECGKAPRPGAWPWEAQVMVPGSRPCHGALVSESWVLAPASCFLDPNSSDSPPRDLDAWRVLLPSRPRAERVARLVQHENASWDNASDLALLQLRTPVNLSAASRPVCLPHPEHYFLPGSRCRLARWGRGEPALGPGALLEAELLGGWWCHCLYGRQGAAVPLPGDPPHALCPAYQEKEEVGSCWNDSRWSLLCQEEGTWFLAGIRDFPSGCLRPRAFFPLQTHGPWISHVTRGAYLEDQLAWDWGPDGEETETQTCPPHTEHGACGLRLEAAPVGVLWPWLAEVHVAGDRVCTGILLAPGWVLAATHCVLRPGSTTVPYIEVYLGRAGASSLPQGHQMTSAPPLLCQMTEGSWILVGMAVQGSRELFAAIGPEEAWISQTVGEANFLPPSGSPHWPTGGSNLCPPELAKASGSPHAVYFLLLLTLLIQS

SEQ ID NO: 2837 - protein, 150 aa, Homo sapiens; identical to SEQ ID NO: 2126

SEQ ID NO: 2838 - protein, 386 aa, Homo sapiens
MKFQGPLACLLLALCLGSGEAGPLQSGEESTGTNIGEALGHGLGDALSEGVGKAIGKEAGGAAGSKVSEALGQGTREAVGTGVRQVPGFGVADALGNRVGEAAHALGNTGHEIGRQAEDVIRHGADAVRGSWQGVPGHNGAWETSGGHGIFGSQGGLGGQGQGNPGGLGTPWVHGYPGNSAGSFGMNPQGAPWGQGGNGGPPNFGTNTQGAVAQPGYGSVRASNQNEGCTNPPPSGSGGGSSNSGGGSGSQSGSSGSGSNGDNNNGSSSGGSSSGSSSGGSSGGSSGGSSGNSGGSRGDSGSESSWGSSTGSSSGNHGGSGGGNGHKPGCEKPGNEARGSGESGIQNSETSPGMFNFDTFWKNFKSKLGFINWDAINKDQRSSRIP

SEQ ID NO: 2839 - protein, 664 aa, Homo sapiens; identical to SEQ ID NO: 1972

SEQ ID NO: 2840 - protein, 139 aa, Homo sapiens; identical to SEQ ID NO: 2817

SEQ ID NO: 2841 - protein, 94 aa, Homo sapiens; identical to SEQ ID NO: 2132

SEQ ID NO: 2842 - protein, 232 aa, Homo sapiens
MLPKSRRALTIQEIAALARSSLHGISQVVKDHVTKPTAMAQGRVAHLIEWKGWSKPSDSPAALESAFSSYSDLSEGEQEARFAAGVAEQFAIAEAKLRAWSSVDGEDSTDDSYDEDFAGGMDTDMAGQLPLGPHLQDLFTGHRFSRPVRQGSVEPESDCSQTVSPDTLCSSLCSLEDGLLGSPARLASQLLGDELLLAKLPPSRESAFRSLGPLEAQDSLYNSPLTESCLSP

SEQ ID NO: 2843 - protein, 876 aa, Homo sapiens; identical to SEQ ID NO: 1912

SEQ ID NO: 2844 - protein, 54 aa, Homo sapiens
MCRETAGYGWLLASTELLSLLEPLSPQLLKEHISCTSQVAAGAKVTPDSAVWAP

SEQ ID NO: 2845 - protein, 751 aa, Homo sapiens; identical to SEQ ID NO: 1935

SEQ ID NO: 2846 - protein, 209 aa, Homo sapiens
MGPEALSSLLLLLLVASGDADMKGHFDPAKCRYALGMQDRTIPDSDISASSSWSDSTAARHSRLESSDGDGAWCPAGSVFPKEEEYLQVDLQRLHLVALVGTQGRHAGGLGKEFSRSYRLRYSRDGRRWMGWKDRWGQEVISGNEDPEGVVLKDLGPPMVARLVRFYPRADRVMSVCLRVELYGCLWRDGLLSYTAPVGQTMYLSEAVY

SEQ ID NO: 2847 - protein, 104 aa, Homo sapiens
MSDLLLLGLIGGLTLLLLLTLLAFAGYSGLLAGVEVSAGSPPIRNVTVAYKFHMGLYGETGRLFTESCSISPKLRSIAVYYDNPHMVPPDKCRCAVGSILSEGE

SEQ ID NO: 2848 - protein, 876 aa, Homo sapiens; identical to SEQ ID NO: 1912

SEQ ID NO: 2849 - protein, 350 aa, Homo sapiens
MEAFALGPARRGRRRTRAAGSLLSRAAILLFISAFLVRVPSSVGHLVRLPRAFRLTKDSVKIVGSTSFPVKAYVMLHQKSPHVLCVTQQLRNAELIDPSFQWYGPKGKVVSENRTAQITSTGSLVFQNFEESMSGIYTCFLEYKPTVEEIVKRLQLKYAIYAYREPHYYYQFTARYHAAPCNSIYNISFEKKLLQILSKLLLDLSCEISLLKSECHRVKMQRAGLQNELFFAFSVSSLDTEKGPKRCTDHNCEPYKRLFKAKNLIERFFNQQVEILGRRAEQLPQIYYIEGTLQMVWINRCFPGYGMNVQQHPKCPECCVICSPGSYNPRDGIHCLQCNSSLVYGAKTCL

SEQ ID NO: 2850 - protein, 463 aa, Homo sapiens
  VARIANT 1: note = MOD_RES - Any amino acid
XLALVLCTVDSRPPAQLALSHAGRLLASSTAASVPNTLRLELRGPQPRDEGFYSCSARSPLGQANTSLELRLEGVRVILAPEAAVPEGAPITVTCADPAAHAPTLYTWYHNGRWLQEGPAASLSFLVATRAHAGAYSCQAQDAQGTRSSRPAALQVLYAPQDAVLSSFRDSRARSMAVIQCTVDSEPPAELALSHDGKVLATSSGVHSLASGTGHVQVARNALRLQVQDVPAGDDTYVCTAQNLLGSISTIGRLQVEGARVVAEPGLDVPEGAALNLSCRLLGGPGPVGNSTFAWFWNDRRLHAEPVPTLAFTHVARAQAGMYHCLAELPTGAAASAPVMLRVLYPPKTPTMMVFVEPEGGLRGILDCRVDSEPLASLTLHLGSRLVASSQPQGAPAEPHIHVLASPNALRVDIEALRPSDQGEYICSASNVLGSASTSTYFGVRGEGRGLHLPGHSAQKPSS

SEQ ID NO: 2851 - protein, 465 aa, Homo sapiens
MKFQGPLACLLLALCLGSGEAGPLQSGEESTGTNIGEALGHGLGDALSEGVGKAIGKEAGGAAGSKVSEALGQGTREAVGTGVRQVPGFGVADALGNRVGEAAHALGNTGHEIGRQAEDVIRHGADAVRGSWQGVPGHNGAWETSGGHGIFGSQGGLGGQGQGNPGGLGTPWVHGYPGNSAGSFGMNPQGAPWGQGGNGGPPNFGTNTQGAVAQPGYGSVRASNQNEGCTNPPPSGSGGGSSNSGGSSTGSSSGNHGGSGGGNGHKPGCEKPGNEARGSGESGIQGFRGQGVSSNMREISKEGNRLLGGSGDNYRGQGSSWGSGGGDAVGGVNTVNSETSPGMFNFDTFWKNFKSKLGFINWDAINKNQVPPPSTRALLYFSRLWEDFKQNTPFLNWKAIIEGADASSLQKRAGRDDQNYNYNQHAYPTAYGGKYSVKTPAKGGVSPSSSASRVQPGLLQWVKFW

SEQ ID NO: 2852 - protein, 899 aa, Homo sapiens; identical to SEQ ID NO: 2512

SEQ ID NO: 2853 - protein, 126 aa, Homo sapiens
MWYVSTRGVAPRVNFEGALFSGYAPDGGLFMPEELPQLDRGTLCQWSTLSYPGLVKELCALFIGSELLPKDELNDLIDRAFSRFRHREVVHLSRLRNGLNVLELWHGVTYAFKDLSLSCTTQFLQY

SEQ ID NO: 2854 - protein, 48 aa, Homo sapiens
MPPFLITLFLFHSCCLRANGHLREGMTLLKTEFALHLYQSVAACRNET

SEQ ID NO: 2855 - protein, 129 aa, Homo sapiens; identical to SEQ ID NO: 2490

SEQ ID NO: 2856 - protein, 153 aa, Homo sapiens
MTIHILILLLLLAFSAQGDLDTAARRGQHQVPQHRGHVCYLGVCRTHRLAEIIYWIRCLHQGALGEGQPRAPGPLQLWAPPVARGGSPARFPGFRPAARGLAQCPARWVTSGTARPLLGFSLPICMLELLLHISSPLTPAPETVFPSPSPGCD

SEQ ID NO: 2857 - protein, 149 aa, Homo sapiens
MGWLTRIVCLFWGVLLTARANYQNGKNNVPRLKLSYKEMLESNNVITFNGLANSSSYHTFLLDEERSRLYVGAKDHIFSFDLVNIKDFQKIVWPVSYTRRDECKWAGKDILKECANFIKVLKAYNQTHLYACGTGAFHPICTYIEIGHH

SEQ ID NO: 2858 - protein, 180 aa, Homo sapiens
MADMQNLVERLERAVGRLEAVSHTSDMHRGYADSPSKAGAAPYVQAFDSLLAGPVAEYLKISKEIGGDVQKHAEMVHTGLKLERALLVTASQCQQPAENKLSDLLAPISEQIKEVITFREKNRGSKLFNHLSAVSESIQALGWVAMAPKPGPYVKEMNDAAMFYTNRVLKEYKDVDKKHV

SEQ ID NO: 2859 - protein, 209 aa, Homo sapiens; identical to SEQ ID NO: 2846

SEQ ID NO: 2860 - protein, 209 aa, Homo sapiens; identical to SEQ ID NO: 2846

SEQ ID NO: 2861 - protein, 876 aa, Homo sapiens; identical to SEQ ID NO: 1912

SEQ ID NO: 2862 - protein, 700 aa, Homo sapiens
MLAPFLLLLTHSRSPLSFRPCSHVPGALIAQKPMGSSRLAALLLPLLLIVIDLSDSAGIGFRHLPHWNTRCPLASHTDDSFTGSSAYIPCRTWWALFSTKPWCVRVWHCSRCLCQHLLSGGSGLQRGLFHLLVQKSKKSSTFKFYRRHKMPAPAQRKLLPRRHLSEKSHHISIPSPDISHKGLRSKRTQPSDPETWESLPRLDSQRHGGPEFSFDLLPEARAIRVTISSGPEVSVRLCHQWALECEELSSPYDVQKIVSGGHTVELPYEFLLPCLCIEASYLQEDTVRRKKCPFQSWPEAYGSDFWKSVHFTDYSQHTQMVMALTLRCPLKLEAALCQRHDWHTLCKDLPNATARESDGWYVLEKVDLHPQLCFKFSFGNSSHVECPHQTGSLTSWNVSMDTQAQQLILHFSSRMHATFSAAWSLPGLGQDTLVPPVYTVSQARGSSPVSLDLIIPFLRPGCCVLVWRSDVQFAWKHLLCPDVSYRHLGLLILALLALLTLLGVVLALTCRRPQSGPGPARPVLLLHAADSEAQRRLVGALAELLRAALGGGRDVIVDLWEGRHVARVGPLPWLWAARTRVAREQGTVLLLWSGADLRPVSGPDPRAAPLLALLHAAPRPLLLLAYFSRLCAKGDIPPPLRALPRYRLLRDLPRLLRALDARPFAEATSWGRLGARQRRQSRLELCSRLEREAARLADLG

SEQ ID NO: 2863 - protein, 397 aa, Homo sapiens
MRSLLLLSAFCLLEAALAAEVKKPAAAAAPGTAEKLSPKAATLAERSAGLAFSLYQAMAKDQAVENILVSPVVVASSLGLVSLGGKATTASQAKAVLSAEQLRNVTWKLGSRLYGPSSVSFADDFVRSSKQHYNCEHSKINFRDKRSALQSINEWAAQTTDGKLPEVTKDVERTDGALLVNAMFFKPHWDEKFHHKMVDNRGFMVTRSYTVGVMMMHRTGLYNYYDDEKEKLQIVEMPLAHKLSSLIILMPHHVEPLERLEKLLTKEQLKIWMGKMQKKAVAISLPKGVVEVTHDLQKHLAGLGLTEAIDKNKADLSRMSGKKDLYLASVFHATAFELDTDGNPFDQDIYGREELRSPKLFYADHPFIFLVRDTQSGSLLFIGRLVRPKGDKMRDEL

SEQ ID NO: 2864 - protein, 203 aa, Homo sapiens
MADMQNLVERLERAVGRLEAVSHTSDMHRGYADSPSKAGAAPYVQAFDSLLAGPVAEYLKISKEIGGDVQKHAEMVHTGLKLERALLVTASQCQQPAENKLSDLLAPISEQIKEVITFREKNRGSKLFNHLSAVSESIQALGWVAMAPKPGPYVKEMNDAAMFYTNRVLKEYKDVDKKHVDWVKAYLSIWTELQAYIKEFHTT

SEQ ID NO: 2865 - protein, 430 aa, Homo sapiens
MRKLMKQVQEQCPNITRIYSIGKSYQGLKLYVMEMSDKPGEHELGEPEVRYVAGMHGNEALGRELLLLLMQFLCHEFLRGNPRVTRLLSEMRIHLLPSMNPDGYEIAYHRGSELVGWAEGRWNNQSIDLNHNFADLNTPLWEAQDDGKVPHIVPNHHLPLPTYYTLPNATVAPETRAVIKWMKRIPFVLSANLHGGELVVSYPFDMTRTPWAARELTPTPDDAVFRWLSTVYAGSNLAMQDTSRRPCHSQDFSVHGNIINGADWHTVPGSMNDFSYLHTNCFEVTVELSCDKFPHENELPQEWENNKDALLTYLEQVRMGIAGVVRDKDTELGIADAVIAVDGINHDVTTAWGGDYWRLLTPGDYMVTASAEGYHSVTRNCRVTFEEGPFPCNFVLTKTPKQRLRELLAAGAKVPPDLRRRLERLRGQKD

SEQ ID NO: 2866 - protein, 559 aa, Homo sapiens; identical to SEQ ID NO: 1951

SEQ ID NO: 2867 - protein, 2732 aa, Homo sapiens
MEQTDCKPYQPLPKVKHEMDLAYTSSSDESEDGRKPRQSYNSRETLHEYNQELRMNYNSQSRKRKEVEKSTQEMEFCETSHTLCSGYQTDMHSVSRHGYQLEMGSDVDTETEGAASPDHALRMWIRGMKSEHSSCLSSRANSALSLTDTDHERKSDGENGFKFSPVCCDMEAQAGSTQDVQSSPHNQFTFRPLPPPPPPPHACTCARKPPPAADSLQRRSMTTRSQPSPAAPAPPTSTQDSVHLHNSWVLNSNIPLETRHFLFKHGSGSSAIFSAASQNYPLTSNTVYSPPPRPLPRSTFSRPAFTFNKPYRCCNWKCTALSATAITVTLALLLAYVIAVHLFGLTWQLQPVEGELYANGVSKGNRGTESMDTTYSPIGGKVSDKSEKKVFQKGRAIDTGEVDIGAQVMQTIPPGLFWRFQITIHHPIYLKFNISLAKDSLLGIYGRRNIPPTHTQFDFVKLMDGKQLVKQDSKGSDDTQHSPRNLILTSLQETGFIEYMDQGPWYLAFYNDGKKMEQVFVLTTAIEIMDDCSTNCNGNGECISGHCHCFPGFLGPDCARDSCPVLCGGNGEYEKGHCVCRHGWKGPECDVPEEQCIDPTCFGHGTCIMGVCICVPGYKGEICEEEDCLDPMCSNHGICVKGECHCSTGWGGVNCETPLPVCQEQCSGHGTFLLDAGVCSCDPKWTGSDCSTELCTMECGSHGVCSRGICQCEEGWVGPTCEERSCHSHCTEHGQCKDGKCECSPGWEGDHCTIAHYLDAVRDGCPGLCFGNGRCTLDQNGWHCVCQVGWSGTGCNVVMEMLCGDNLDNDGDGLTDCVDPDCCQQSNCYISPLCQGSPDPLDLIQQSQTLFSQHTSRLFYDRIKFLIGKDSTHVIPPEVSFDSRRACVIRGQVVAIDGTPLVGVNVSFLHHSDYGFTISRQDGSFDLVAIGGISVILIFDRSPFLPEKRTLWLPWNQFIVVEKVTMQRVVSDPPSCDISNFISPNPIVLPSPLTSFGGSCPERGTIVPELQVVQEEIPIPSSFVRLSYLSSRTPGYKTLLRILLTHSTIPVGMIKVHLTVAVEGRLTQKWFPAAINLVYTFAWNKTDIYGQKVWGLAEALVSVGYEYETCPDFILWEQRTVVLQGFEMDASNLGGWSLNKHHILNPQSGIIHKGNGENMFISQQPPVISTIMGNGHQRSVACTNCNGPAHNNKLFAPVALASGPDGSVYVGDFNFVRRIFPSGNSVSILELRNRDTRHSTSPAHKYYLAMDPVSESLYLSDTNTRKVYKLKSLVETKDLSKNFEVVAGTGDQCLPFDQSHCGDGGRASEASLNSPRGITVDRHGFIYFVDGTMIRKIDENAVITTVIGSNGLTSTQPLSCDSGMDITQVRLEWPTDLAVNPMDNSLYVLDNNIVLQISENRRVRIIAGRPIHCQVPGIDHFLVSKVAIHSTLESARAISVSHSGLLFIAETDERKVNRIQQVTTNGEIYIIAGAPTDCDCKIDPNCDCFSGDGGYAKDAKMKAPSSLAVSPDGTLYVADLGNVRIRTISRNQAHLNDMNIYEIASPADQELYQFTVNGTHLHTLNLITRDYVYNFTYNSEGDLGAITSSNGNSVHIRRDAGGMPLWLVVPGGQVYWLTISSNGVLKRVSAQGYNLALMTYPGNTGLLATKSNENGWTTVYEYDPEGHLTNATFPTGEVSSFHSDLEKLTKVELDTSNRENVLMSTNLTATSTIYILKQENTQSTYRVNPDGSLRVTFASGMEIGLSSEPHILAGAVNPTLGKCNISLPGEHNANLIEWRQRKEQNKGNVSAFERRLRAHNRNLLSIDFDHITRTGKIYDDHRKFTLRILYDQTGRPILWSPVSRYNEVNITYSPSGLVTFIQRGTWNEKMEYDQSGKIISRTWADGKIWSYTYLEKSVMLLLHSQRRYIFEYDQPDCLLSVTMPSMVRHSLQTMLSVGYYRNIYTPPDSSTSFIQDYSRDGRLLQTLHLGTGRRVLYKYTKQARLSEVLYDTTQVTLTYEESSGVIKTIHLMHDGFICTIRYRQTGPLIGRQIFRFSEEGLVNARFDYSYNNFRVTSMQAVINETPLPIDLYRYVDVSGRTEQFGKFSVINYDLNQVITTTVMKHTKIFSANGQVIEVQYEILKAIAYWMTIQYDNVGRMVICDIRVGVDANITRYFYEYDADGQLQTVSVNDKTQWRYSYDLNGNINLLSHGKSARLTPLRYDLRDRITRLGEIQYKMDEDGFLRQRGNDIFEYNSNGLLQKAYNKASGWTVQYYYDGLGRRVASKSSLGQHLQFFYADLTNPIRVTHLYNHTSSEITSLYYDLQGHLIAMELSSGEEYYVACDNTGTPLAVFSSRGQVIKEILYTPYGDIYHDTYPDFQVIIGFHGGLYDFLTKLVHLGQRDYDVVAGRWTTPNHHIWKQLNLLPKPFNLYSFENNYPVGKIQDVAKYTTDIRSWLELFGFQLHNVLPGFPKPELENLELTYELLRLQTKTQEWDPGKTILGIQCELQKQLRNFISLDQLPMTPRYNDGRCLEGGKQPRFAAVPSVFGKGIKFAIKDGIVTADIIGVANEDSRRLAAILNNAHYLENLHFTIEGRDTHYFIKLGSLEEDLVLIGNTGGRRILENGVNVTVSQMTSVLNGRTRRFADIQLQHGALCFNIRYGTTVEEEKNHVLEIARQRAVAQAWTKEQRRLQEGEEGIRAWTEGEKQQLLSTGRVQGYDGYFVLSVEQYLELSDSANNIHFMRQSEIGRR

SEQ ID NO: 2868 - protein, 87 aa, Homo sapiens
MKVLLLTGLGALFFAYYWDDNFDPASLQGARVLLTGANAGVGEELAYHYARLGSHLVLTAHTEALLQKARWLTLVVSTLGGRGKWIT

SEQ ID NO: 2869 - protein, 410 aa, Homo sapiens
MRACISLVLAVLCGLAWAGKIESCASRCNEKFNRDAACQCDRRCLWHGNCCEDYEHLCTEDHKESEPLPQLEEETEEALASNLYSAPTSCQGRCYEAFDKHHQCHCNARCQEFGNCCKDFESLCSDHEVSHSSDAITKEEIQSISEKIYRADTNKAQKEDIVLNSQNCISPSETRNQVDRCPKPLFTYVNEKLFSKPTYAAFINLLNNYQRATGHGEHFSAQELAEQDAFLREIMKTAVMKELYSFLHHQNRYGSEQEFVDDLKNMWFGLYSRGNEEGDSSGFEHVFSGEVKKGKVTGFHNWIRFYLEEKEGLVDYYSHIYDGPWDSYPDVLAMQFNWDGYYKEVGSAFIGSSPEFEFALYSLCFIARPGKVCQLSLGGYPLAVRTYTWDKSTYGNGKKYIATAYIVSST

SEQ ID NO: 2870 - protein, 116 aa, Homo sapiens; identical to SEQ ID NO: 2491

SEQ ID NO: 2871 - protein, 399 aa, Homo sapiens [sequence omitted]

SEQ ID NO: 2872 - protein, 169 aa, Homo sapiens
MLSSVVFWGLIALIGTSRGSYPFSHSMKPHLHPRLYHGCYGDIMTMKTSGATCDANSVMNCGIRGSEMFAEMDLRAIKPYQTLIKEVGQRHCVDPAVIAAIISRESHGGSVLQDGWDHRGLKFGLMQLDKQTYHPVGAWDSKEHLSQATGILTERIKAIQKKFPTWSVA

SEQ ID NO: 2873 - protein, 99 aa, Homo sapiens
MERISAFFSSIWDTILTKHQEGIYNTICLGVLLGLPLLVIITLLFICCHCCWSPPGKRGQQPEKNKKKKKKKKKKDEEDLWISAQPKLLQMEKRPSLPV

SEQ ID NO: 2874 - protein, 155 aa, Homo sapiens
MTSLKCGENLYMSSASSSWSQAIQSWFDEYNDFDFGVGPKTPNAVVGHYTQVVWYSSYLVGCGNAYCPNQKVLKYYYVCQYCPAGNWANRLYVPYEQGAPCASCPDNCDDGLCTNGCKYEDLYSNCKSLKLTLTCKHQLVRDSCKASCNCSNSIY

SEQ ID NO: 2875 - protein, 961 aa, Homo sapiens; identical to SEQ ID NO: 2513

SEQ ID NO: 2876 - protein, 147 aa, Homo sapiens
MAGPWTFTLLCGLLAATLIQATLSPTAVLILGPKVIKEKLTQELKDHNATSILQQLPLLSAMREKPAGGIPVLGSLVNTVLKHIIWLKVITANILQLQVKPSANDQELLVKIPLDMVAGFNTPLVKTIVEFHMTTEAQATIRMDTSA

SEQ ID NO: 2877 - protein, 315 aa, Homo sapiens
MKVLLLTGLGALFFAYYWDDNFDPASLQGARVLLTGANAGVGEELAYHYARLGSHLVLTAHTEALLQKVVGNCRKLGAPKVFYIAADMASPEAPESVVQFALDKLGGLDYLVLNHIGGAPAGTRARSPQATRWLMQVNFVSYVQLTSRALPSLTDSKGSLVVVSSLLGRVPTSFSTPYSAAKFALDGFFGSLRRELDVQDVNVAITMCVLGLRDRASAAEAVRSSTSRPRQPEHRGVPLQSQTAMFLPPTVPGARTLTETPLRGWPQPKMKSSRQKSKTEKNDGHLEPVTAWEVQVPRVRRLCRGLARPHLFGHD

SEQ ID NO: 2878 - protein, 94 aa, Homo sapiens; identical to SEQ ID NO: 2132

SEQ ID NO: 2879 - protein, 260 aa, Homo sapiens
MEKFNTISVSKCNKETVAMKEKCKFGMTSTIPSGHVWRNTWNPVSCSLATVKMKECLRGKLIYLMGDSTIRQWMEYFKASINTLKSVDLHESGKLQHQLAVDLDRNINIQWQKYCYPLIGSMTYSVKEMEYLTRAIDRTGGEKNTVIVISLGQHFRPFPIDVFIRRALNVHKAIQHLLLRSPDTMVIIKTENIREMYNDAERFSDFHGYIQYLIIKDIFQDLSVSIIDAWDITIAYGTNNVHPPQHVVGNQINILLNYIC

SEQ ID NO: 2880 - protein, 547 aa, Homo sapiens
MSSNTMLQKTLLILISFSVVTWMIFIISQNFTKLWSALNLSISVHYWNNSAKSLFPKTSLIPLKPLTETELRIKEIIEKLDQQIPPRPFTHVNTTTSATHSTATILNPRDTYCRGDQLDILLEVRDHLGQRKQYGGDFLRARMSSPALTAGASGKVMDFNNGTYLVSFTLFWEGQVSLSLLLIHPSEGASALWRARNQGYDKIIFKGKFVNGTSHVFTECGLTLNSNAELCEYLDDRDQEAFYCMKPQHMPCEALTYMTTRNREVSYLTDKENSLFHRSKVGVEMMKDRKHIDVTNCNKREKIEETCQVGMKPPVPGGYTLQGKWITTFCNQVQLDTIKINGCLKGKLIYLLGDSTLRQWIYYFPKVVKTLKFFDLHETGIFKKHLLLDAERHTQIQWKKHSYPFVTFQLYSLIDHDYIPREIDRLSGDKNTAIVITFGQHFRPFPIDIFIRRAIGVQKAIERLFLRSPATKVIIKTENIREMHIETERFGDFHGYIHYLIMKDIFKDLNVGIIDAWDMTIAYGTDTIHPPDHVIGNQINMFLNYIC

SEQ ID NO: 2881 - protein, 132 aa, Homo sapiens
MLMLFVFGVLLHEVSLSGQNEAPPNTHSIPGEPLYNYASIRLPEEHIPFFLHNNRHIATVCRKDSLCPYKKHLEKLKYCWGYEKSCKPEFRFGYPVCSYVDMGWTDTLESAEDIFWKQADFGYARERLEEMH

SEQ ID NO: 2882 - protein, 286 aa, Homo sapiens
MGSALFVKKELQLQANFLGNVKRLYEAEVFSTDFSNPSIAQARINSHVKKKTQGKVVDIIQGLDLLTAMVLVNHIFFKAKWEKPFHPEYTRKNFPFLVGEQVTVHVPMMHQKEQFAFGVDTELNCFVLQMDYKGDAVAFFVLPSKGKMRQLEQALSARTLRKWSHSLQKRWIEVFIPRFSISASYNLETILPKMGIQNVFDKNADFSGIAKRDSLQVSKATHKAVLDVSEEGTEATAATTTKFIVRSKDGPSYFTVSFNRTFLMMITNKATDGILFLGKVENPTKS

SEQ ID NO: 2883 - protein, 19 aa, Homo sapiens
MGWLTRIVCLFWGVLLTAR

SEQ ID NO: 2884 - protein, 398 aa, Homo sapiens
MKFQGPLACLLLALCLGSGEAGPLQSGEESTGTNIGEALGHGLGDALSEGVGKAIGKEAGGAAGSKVSEALGQGTREAVGTGVRQVPGFGVADALGNRVGEAAHALGNTGHEIGRQAEDVIRHGADAVRGSWQGVPGHNGAWETSGGHGIFGSQGGLGGQGQGNPGGLGTPWVHGYPGNSAGSFGMNPQGAPWGQGGNGGPPNFGTNTQGAVAQPGYGSVRASNQNEGCTNPPPSGSGGGSSNSGGGSGSQSGSSGSGSNGDNNNGSSSGGSSSGSSSGGSSGGSSGGSSGNSGGSRGDSGSESSWGSSTGSSSGNHGGSGGGNGHKPGCEKPGNEARGSGESGIQGFRGQGVSSNMRNSETSPGMFNFDTFWKNFKSKLGFINWDAINKDQRSSRIP

SEQ ID NO: 2885 - protein, 26 aa, Homo sapiens
MAPKKLSCLRSLLLPLSLTLLLPQAD

SEQ ID NO: 2886 - protein, 231 aa, Homo sapiens
MAQLFLPLLAALVLAQAPAALADVLEGDSSGIYRCEVQHGIDDSSDAVEVKVKGVVFLYREGSARYAFSFSGAQEACARIGAHIATPEQLYAAYLGGYEQCDAGWLSDQTVRYPIQTPREACYGDMDGFPGVRNYGVVDPDDLYDVYCYAEDLNGELFLGDPPEKLTLEEARAYCQERGAEIATTGQLYAAWDGGLDHCSPGWLADGSVRYPIVTPSQRCGGGLPGVKTLF

SEQ ID NO: 2887 - protein, 199 aa, Homo sapiens
MDELLPLIPVLEQYKTDAKLITQFKEEIRNLSAVLTGIQEEIGAYDYEELHQRVLSLETRLRDCMKKLTCGKLMKITGPVTVKTSGTRFGAWMTDPLASEKNNRVWYMDSYTNNKIVREYKSIADFVSGAESRTYNLPFKWAGTNHVVYNGSLYFNKYQSNIIIKYSFDMGRVLAQRSLEYAGFHNVTPTHGVDSLTST

SEQ ID NO: 2888 - protein, 202 aa, Homo sapiens
MADMQNLVERLERAVGRLEAVSHTSDMHRGYADSPSKAGAAPYVQAFDSLLAGPVAEYLKISKEIGGDVQKHAEMVHTGLKLERALLVTASQCQQPAENKLSDLLAPISEQIKEVITFREKNRGSKLFNHLSAVSESIQALGWVAMAPKPGPYVKEMNDAAMFYTNRVLKEYKDVDKKHVDWVKAYLSIWTELQAYIKEFHT

SEQ ID NO: 2889 - protein, 961 aa, Homo sapiens; identical to SEQ ID NO: 2513

SEQ ID NO: 2890 - protein, 116 aa, Homo sapiens; identical to SEQ ID NO: 2491

SEQ ID NO: 2891 - protein, 777 aa, Homo sapiens
MAAAGLVAVAAAAEYSGTVASGGNLPGVHCGPSSGAGPGFGPGSWSRSLDRALEEAAVTGVLSLSGRKLREFPRGAANHDLTDTTRADLSRNRLSEIPIEACHFVSLENLNLYQNCIRYIPEAILNLQALTFLNISRNQLSTLPVHLCNLPLKVLIASNNKLVSLPEEIGHLRHLMELDVSCNEIQTIPSQIGNLEALRDLNVRRNHLVHLPEELAELPLIRLDFSCNKITTIPVCYRNLRHLQTITLDNNPLQSPPAQICIKGKVHIFKYLNIQACKIAPDLPDYDRRPLGFGSCHEELYSSRPYGALDSGFNSVDSGDKRWSGNEPTDEFSDLPLRVAEITKEQRLRRESQYQENRGSLVVTNGGVEHDLDQIDYIDSCTAEEEEAEVRQPKGPDPDSLSSQFMAYIEQRRISHEGSPVKPVAIREFQKTEDMRRYLHQNRVPAEPSSLLSLSASHNQLSHTDLELHQRREQLVERTRREAQLAALQYEEEKIRTKQIQRDAVLDFVKQKASQSPQKQHPLLDGVDGECPFPSRRSQHTDDSALCMSLSGLNQVGCAATLPHSSAFTPLKSDDRPNALLSSPATETVHHSPAYSFPAAIQRNQPQRPESFLFRAGVRAETNKGHASPLPPSAAPTTDSTDSITGQNSRQREEELELIDQLRKHIEYRLKVSLPCDLGAALTDGVVLCHLANHVRPRSVPSIHVPSPAVPKLTMAKCRRNVENFLEACRKIGVPQEQLCLPLHILEEKGLSQVAVTVQALLELAPPKQQQHQLSAV

SEQ ID NO: 2892 - protein, 277 aa, Homo sapiens
MLHPETSPGRGHLLAVLLALLGTTWAEVWPPQLQEQAPMAGALNRKESFLLLSLHNRLRSWVQPPAADMRRLLVWATSSQLGCGRHLCSAGQTAIEAFVCAYSPGGNWEVNGKTIIPYKKGAWCSLCTASVSGCFKAWDHAGGLCEVPRNPCRMSCQNHGRLNISTCHCHCPPGYTGRYCQGHLPNSNMPHSAMGTKPKTPGVPAIGSLVRCSLQCVHGRFREEECSCVCDIGYGGAQCASESCPRAPKEPAPLKTPLQWGISSQEPAVCLSFQLIQ

SEQ ID NO: 2893 - protein, 151 aa, Homo sapiens
MSDLLLLGLIGGLTLLLLLTLLAFAGYSGLLAGVEVSAGSPPIRNVTVAYKFHMGLYGETGRLFTESCSISPKLRSIAVYYDNPHMVPPDKCRCAVGSILSEGEESPSPELIDLYQKFGFKVFSFPAPSHVVTATFPYTTILSIWLATRRV

SEQ ID NO: 2894 - protein, 129 aa, Homo sapiens; identical to SEQ ID NO: 2490

SEQ ID NO: 2895 - protein, 129 aa, Homo sapiens; identical to SEQ ID NO: 2490

SEQ ID NO: 2896 - protein, 296 aa, Homo sapiens
MEALLLGAGLLLGAYVLVYYNLVKAPPCGGMGNLRGRTAVVTGISSCGRTREAFNLLLRVNHIGPFLLTHLLLPCLKACAPSRVVVVASAAHCRGRLDFKRLDRPVVGWRQELRAYADTKLANVLFARELANQLEATGVTCYAAHPGPVNSELFLRHVPGWLRPLLRPLAWLVLRAPRGGAQTPLYCALQEGIEPLSGRYFANCHVEEVPPAARDDRAAHRLWEASKRLAGLGPGEDAEPDEDPQSEDSEAPSSLSTPHPEEPTVSQPYPSPQSSPDLSKMTHRIQAKVEPEIQLS

SEQ ID NO: 2897 - protein, 188 aa, Homo sapiens; identical to SEQ ID NO: 2489

SEQ ID NO: 2898 - protein, 325 aa, Homo sapiens; identical to SEQ ID NO: 1911

SEQ ID NO: 2899 - protein, 876 aa, Homo sapiens; identical to SEQ ID NO: 1912

SEQ ID NO: 2900 - protein, 493 aa, Homo sapiens
MALLAGGLSRGLGSHPAAAGRDAVVFVWLLLSTWCTAPARAIQVTVSNPYHVVILFQPVTLPCTYQMTSTPTQPIVIWKYKSFCRDRIADAFSPASVDNQLNAQLAAGNPGYNPYVECQDSVRTVRVVATKQGNAVTLGDYYQGRRITITGMYAAGKAATSGVPSIYAPSTYAHLSPAKTPPPPAMIPMGPAYNGYPGGYPGDVDRSSSAGGQGSYVPLLRDTDSSVASEVRSGYRIQASQQDDSMRVLYYMEKELANFDPSRPGPPSGRVERAMSEVTSLHEDDWRSRPSRGPALTPIRDEEWGGHSPRSPRGWDQEPAREQAGGGWRARRPRARSVDALDDLTPPSTAESGSRSPTSNGGRSRAYMPPRSRSRDDLYDQDDSRDFPRSRDPHYDDFRSRERPPADPRSHHHRTRDPRDNGSRSGDLPYDGRLLEEAVRKKGSEERRRPHKEEEEEAYYPPAPPPYSETDSQASRERRLKKNLALSRESLVV

SEQ ID NO: 2901 - protein, 595 aa, Homo sapiens
MDFLLALVLVSSLYLQAAAEFDGRWPRQIVSSIGLCRYGGRIDCCWGWARQSWGQCQPVCQPRCKHGECIGPNKCKCHPGYAGKTCNQDEHIPAPLDQGSEQPLFQPLDHQATSLPSRDLNECGLKPRPCKHRCMNTYGSYKCYCLNGYMLMPDGSCSSALTCSMANCQYGCDVVKGQIRCQCPSPGLQLAPDGRTCVDVDECATGRASCPRFRQCVNTFGSYICKCHKGFDLMYIGGKYQCHDIDECSLGQYQCSSFARCYNIRGSYKCKCKEGYQGDGLTCVYIPKVMIEPSGPIHVPKGNGTILKGDTGNNNWIPDVGSTWWPPKTPYIPPIITNRPTSKPTTRPTPKPTPIPTPPPPPPLPTELRTPLPPTTPERPTTGLTTIAPAASTPPGGITVDNRVQTDPQKPRGDVFIPRQPSNDLFEIFEIERGVSADDEAKDDPGVLVHSCNFDHGLCGWIREKDNDLHWEPIRDPAGGQYLTVSAAKAPGGKAARLVLPLGRLMHSGDLCLSFRHKVTGLHSGTLQVFVRKHGAHGAALWGRNGGHGWRQTQITLRGADIKSVVFKGEKRRGHTGEIGLDDVSLKKGHCSEER

SEQ ID NO: 2902 - protein, 69 aa, Homo sapiens
MKNQDKKNGAAKQSNPKSSPGQPEAGSFDSLDLEKVSLGRALAGRSELGISCLEQGTWRMFLRGMMCWS

SEQ ID NO: 2903 - protein, 160 aa, Homo sapiens
MARDYDHLFKLLIIGDSGVGKSSLLLRFADNTFSGSYITTIGVDFKIRTVEINGEKVKLQIWDTAGQERFRTITSTAETALRSLPQPEAHGGSSGDSLSFVPLFKEFSPCFCIGRCHRHFLPRPPRVPRRCWTSPPFPTGAPSSPAKAPGPGEDAARRAD

SEQ ID NO: 2904 - protein, 119 aa, Homo sapiens; identical to SEQ ID NO: 2228

SEQ ID NO: 2905 - protein, 837 aa, Homo sapiens
MFKCWSVVLVLGFIFLESEGRPTKEGGYGLKSYQPLMRLRHKEKNQESSRVKGFMIQDGPFGSCENKYCGLGRHCVTSRETGQAECACMDLCKRHYKPVCGSDGEFYENHCEVHRAACLKKQKITIVHNEDCFFKGDKCKTTEYSKMKNMLLDLQNQKYIMQENENPNGDDISRKKLLVDQMFKYFDADSNGLVDINELTQVIKQEELGKDLFDCTLYVLLKYDDFNADKHLALEEFYRAFQVIQLSLPEDQKLSITAATVGQSAVLSCAIQGTLRPPIIWKRNNIILNNLDLEDINDFGDDGSLYITKVTTTHVGNYTCYADGYEQVYQTHIFQVNVPPVIRVYPESQAREPGVTASLRCHAEGIPKPQLGWLKNGIDITPKLSKQLTLQANGSEVHISNVRYEDTGAYTCIAKNEAGVDEDISSLFVEDSARKTRLGIGNMFYVFYEDGIKVIQPIECEFQRHIKPSEKLLGFQDEVCPKAEGDEVQRCVWASAVNVKDKFIYVAQPTLDRVLIVDVQSQKVVQAVSTDPVPVKLHYDKSHDQVWVLSWGTLEKTSPTLQVITLASGNVPHHTIHTQPVGKQFDRVDDFFIPTTTLIITHMRFGFILHKDEAALQKIDLETMSYIKTINLKDYKCVPQSLAYTHLGGYYFIGCKPDSTGAVSPQVMVDGVTDSVIGFNSDVTGTPYVSPDGHYLVSINDVKGLVRVQYITIRGEIQEAFDIYTNLHISDLAFQPSFTEAHQYNIYGSSSTQTDVLFVELSSGKVKMIKSLKEPLKAEEWPWNRKNRQIQDSGLFGQYLMTPSKDSLFILDGRLNKLNCEITEVEKGNTVIWVGDA

SEQ ID NO: 2906 - protein, 215 aa, Homo sapiens
MADMQNLVERLERAVGRLEAVSHTSDMHRGYADSPSKAGAAPYVQAFDSLLAGPVAEYLKISKEIGGDVQKHAEMVHTGLKLERALLVTASQCQQPAENKLSDLLAPISEQIKEVITFREKNRGSKLFNHLSAVSESIQALGWVAMAPKPGPYVKEMNDAAMFYTNRVLKEYKDVDKKHVDWVKAYLSIWTELQAYIKEFHTTGLAWSKTGPVAK

SEQ ID NO: 2907 - protein, 1278 aa, Homo sapiens
MRLLLLVPLLLAPAPGSSAPKVRRQSDTWGPWSQWSPCSRTCGGGVSFRERPCYSQRRDGGSSCVGPARSHRSCRTESCPDGARDFRAEQCAEFDGAEFQGRRYRWLPYYSAPNKCELNCIPKGENFYYKHREAVVDGTPCEPGKRDVCVDGSCRVVGCDHELDSSKQEDKCLRCGGDGTTCYPVAGTFDANDLSRGYNQILIVPMGATSILIDEAAASRNFLAVKNVRGEYYLNGHWTIEAARALPAASTILHYERGAEGDLAPERLHARGPTSEPLVIELISQEPNPGVHYEYHLPLRRPSPGFSWSHGSWSDCSAECGGGHQSRLVFCTIDHEAYPDHMCQRQPRPADRRSCNLHPCPETKRWKAGPWAPCSASCGGGSQSRSVYCISSDGAGIQEAVEEAECAGLPGKPPAIQACNLQRCAAWSPEPWGECSVSCGVGVRKRSVTCRGERGSLLHTAACSLEDRPPLTEPCVHEDCPLLSDQAWHVGTWGLCSKSCSSGTRRRQVICAIGPPSHCGSLQHSKPVDVEPCNTQPCHLPQEVPSMQDVHTPASNPWMPLGPQESPASDSRGQWWAAQEHPSARGDHRGERGDPRGDQGTHLSALGPAPSLQQPPYQQPLRSGSGPHDCRHSPHGCCPDGHTASLGPQWQGCPGAPCQQSRYGCCPDRVSVAEGPHHAGCTKSYGGDSTGGMPRSRAVASTVHNTHQPQAQQNEPSECRGSQFGCCYDNVATAAGPLGEGCVGQPSHAYPVRCLLPSAHGSCADWAARWYFVASVGQCNRFWYGGCHGNANNFASEQECMSSCQGSLHGPRRPQPGASGRSTHTDGGGSSPAGEQEPSQHRTGAAVQRKPWPSGGLWRQDQQPGPGEAPHTQAFGEWPWGQELGSRAPGLGGDAGSPAPPFHSSSYRISLAGVEPSLVQAALGQLVRLSCSDDTAPESQAAWQKDGQPISSDRHRLQFDGSLIIHPLQAEDAGTYSCGSTRPGRDSQKIQLRIIGGDMAVLSEAELSRFPQPRDPAQDFGQAGAAGPLGAIPSSHPQPANRLRLDQNQPRVVDASPGQRIRMTCRAEGFPPPAIEWQRDGQPVSSPRHQLQPDGSLVISRVAVEDGGFYTCVAFNGQDRDQRWVQLRVLGELTISGLPPTVTVPEGDTARLLCVVAGESVNIRWSRNGLPVQADGHRVHQSPDGTLLIYNLRARDEGSYTCSAYQGSQAVSRSTEVKVVSPAPTAQPRDPGRDCVDQPELANCDLILQAQLCGNEYYSSFCCASCSRFQPHAQPIWQ

SEQ ID NO: 2908 - protein, 181 aa, Homo sapiens
  VARIANT 1: note = MOD_RES - Any amino acid
XKGHASPLPPSAAPTTDSTDSITGQNSRQREEELELIDQLRKHIEYRLKVSLPCDLGAALTDGVVLCHLANHVRPRSVPSIHVPSPAVPKLTMAKCRRNVENFLEACRKIGVPQDNLCSPSDILQLNLSVKRTVETLLSLGAHSEESSFVCLSLQLLGFVAFYCTVMLTLCVLYYWLFPAR

SEQ ID NO: 2909 - protein, 267 aa, Homo sapiens
MGPEALSSLLLLLLVASGDADMKGHFDPAKCRYALGMQDRTIPDSDISASSSWSDSTAARHSRLESSDGDGAWCPAGSVFPKEEEYLQVDLQRLHLVALVGTQGRHAGGLGKEFSRSYRLRYSRDGRRWMGWKDRWGQEVISGNEDPEGVVLKDLGPPMVARLVRFYPRADRVMSVCLRVELYGCLWRDGLLSYTAPVGQTMYLSEAVYLNDSTYDGHTVGGLQYGGLGQLADGVVGLDDFRKSQELRVWPGYDYVGWSNHSFSSGY

SEQ ID NO: 2910 - protein, 114 aa, Homo sapiens
MAPKKLSCLRSLLLPLSLTLLLPQADTRSFVVDRGHDRFLLDGAPFRYVSGSLHYFRVPRVLWADRLLKMRWSGLNAIQFYVPWNYHEPQPGVYNFNGSRDLIAFLNEAALANL

SEQ ID NO: 2911 - protein, 168 aa, Homo sapiens
APRMEMFQGLLLLLLLSMGGTWASKEPLRPRCRPINATLAVEKEGCPVCITVNTTICAGYCPTMTRVLQGVLPALPQVVCNYRDVRFESIRLPGCPRGVNPVVSYAVALSCQCALCRRSTTDCGGPKDHPLTCDDPRFQDSSSSKAPPPSLPSPSRLPGPSDTPILPQ

SEQ ID NO: 2912 - protein, 400 aa, Homo sapiens
METQELRGALALLLLCFFTSASQDLQVIDLLTVGESRQMVAVAEKIRTALLTAGDIYLLSTFRLPPKQGGVLFGLYSRQDNTRWLEASVVGKINKVTNALHSILGEGNVPDPKHHYGVSGFHEQRSHCSPNPCFRGVDCMEVYEYPGYRCGPCPPGLQGNGTHCSDINECAHADPCFPGSSCINTMPGFHCEACPRGYKGTQVSGVGIDYARASKQVCNDIDECNDGNNGGCDPNSICTNTVGSFKCGPCRLGFLGNQSQGCLPARTCHSPAHSPCHIHAHCLFERNGAVSCQCNVGWAGNGNVCGTDTDIDGYPDQALPCMDNNKHCKQDNCLLTPNSGQEDADNDGVGDQCDDDADGDGIKNVEASPMDWTIALKSPTHYRQTGMRTGWEMLATAALK

SEQ ID NO: 2913 - protein, 205 aa, Homo sapiens; identical to SEQ ID NO: 2215

SEQ ID NO: 2914 - protein, 58 aa, Homo sapiens
MDLLQFLAFLFVLLLSGMGATGTLRTSLDPSLEIYKKMFEVKRREQLLALKNLAQLND

SEQ ID NO: 2915 - protein, 149 aa, Homo sapiens
MKVIAILTLLLFCSPTHSSFWQFQRRVKHITGRSAFFSYYGYGCYCGLGDKGIPVDDTDRHSPSSPSPYEKLKEFSCQPVLNSYQFHIVNGAVVCGCTLGPGASCHCRLKACECDKQSVHCFKESLPTYEKNFKQFSSQPRCGRHKPWC

SEQ ID NO: 2916 - protein, 78 aa, Homo sapiens; identical to SEQ ID NO: 2320

SEQ ID NO: 2917 - protein, 486 aa, Homo sapiens
MISPSPSQEELQTTLEETDQSTQEPFTTKIPRTTELAKTTQAPHRFYTTVRPRTSDKPHIRPVLNRTTTRPTRPKPSGMPSGNGVGTGVKQAPRPSGADRNVSVDSTHPTKKPGTRRPPLPPRPTHPRRKPLPPNNVTGKPGSAGIISSGPITTPPLRSTPRPTGTPLERIETDIKQPTVPASGEELENITDFSSSPTRETDPLGKPRFKGPHVRYIQKPDNSPCSITDSVKRFPKEEATEGNATSPPQNPPTNLTVVTVEGCPSFVILDWEKPLNDTVTEYEVISRENGSFSGKNKSIQMTNQTFSTVENLKPNTSYEFQVKPKNPLGEGPVSNTVAFSTESADPRVSEPVSAGRDAIWTERPFNSDSYSECKGKQYVKRTWYKKFVGVQLCNSLRYKIYLSDSLTGKFYNIGDQRGHGEDHCQFVDSFLDGRTGQQLTSDQLPIKEGYFRAVRQEPVQFGEIGGHTQINYVQWYECGTTIPGKW

SEQ ID NO: 2918 - protein, 80 aa, Homo sapiens
  VARIANT 1: note = MOD_RES - Any amino acid
XNGPVLWFKGTGPNRKLIYNFKQEQNPRPPKNRPAGRAGSRAHHDAHTCLSALPERNSTNYFVQPCCCLRLLGLTGLLSK

SEQ ID NO: 2919 - protein, 446 aa, Homo sapiens
MLHPETSPGRGHLLAVLLALLGTTWAEVWPPQLQEQAPMAGALNRKESFLLLSLHNRLRSWVQPPAADMRRLDWSDSLAQLAQARAALCGIPTPSLASGLWRTLQVGWNMQLLPAGLASFVEVVSLWFAEGQRYSHAAGECARNATCTHYTQLVWATSSQLGCGRHLCSAGQTAIEAFVCAYSPRGNWEVNGKTIIPYKKGAWCSLCTASVSGCFKAWDHAGGLCEVPRNPCRMSCQNHGRLNISTCHCHCPPGYTGRYCQVRCSLQCVHGRFREEECSCVCDIGYGGAQCATKVHFPFHTCDLRIDGDCFMVSSEADTYYRARMKCQRKGGVLAQIKSQKVQDILAFYLGRLETTNEVIDSDFETRNFWIGLTYKTAKDSFRWATGEHQAFTSFAFGQPDNHGFGNCVELQASAAFNWNDQRCKTRNRYICQFAQEHISRWGPGS

SEQ ID NO: 2920 - protein, 143 aa, Homo sapiens
MQAACWYVLFLLQPTVYLVTCANLTNGGKSELLKSGSSKSTLKHIWTESSKDLSISRLLSQTFRGKENDTDLDLRYDTPEPYSEQDLWDWLRNSTDLQEPRPRAKRRPIVKTGKFKKMFGWGDFHSNIKTVKLNLLITGKIVD

SEQ ID NO: 2921 - protein, 260 aa, Homo sapiens
MQGEPFACLTHQEPLPKMFKLLSRAYADVHPMMMDRSENRCGGNFLKRGSIINGADWYSFTGGMSDFNYLHTNCFEITVELGCVKFPPEEALYILWQHNKESLLNFVETVHRGIKGVVTDKFGKPVKNARISVKGIRHDITTAPDGDYWRLLPPGIHIVIAQAPGYAKVIKKVIIPARMKRAGRVDFILQPLGMGPKNFIHGLRRTGPHDPLGGASSLGEATEPDPLRARRQPSADGSKPWWWSYFTSLSTHRPRWLLKY

SEQ ID NO: 2922 - protein, 293 aa, Homo sapiens
MSSGGGSRGLLAWLLLLQPWPGQNWAGMAAPRLPSPLLSEEGGENPEASPAPGPEAGPPLNLFTSFPGDSLLCGRTPLRIVGGVDAEEGRWPWQVSVRTKGRHICGGTLVTATWVLTAGHCISSRFHYSVKMGDRSVYNENTSVVVSVQRAFVHPKFSTVTTIRNDLALLQLQHPVNFTSNIQPICIPQENFQVEGRTRCWVTGWGKTPEREKLASEILQDVDQYIMCYEECNKIIQKALSSTKDVIIKGMVCGYKEQGKDSCQGDSGGRLACEYNDTWVQVGIVSWGIGCGR

SEQ ID NO: 2923 - protein, 289 aa, Homo sapiens
MFVLLYVTSFAICASGQPRGNQLKGENYSPRYICSIPGLPGPPGPPGANGSPGPHGRIGLPGRDGRDGRKGEKGEKGTAGLRGKTGPLGLAGEKGDQGETGKKGPIGPEGEKGEVGPIGPPGPKGDRGEQGDPGLPGVCRCGSIVLKSAFSVGITTSYPEERLPIIFNKVLFNEGEHYNPATGKFICAFPGIYYFSYDITLANKHLAIGLVHNGQYRIKTFDANTGNHDVASGSTVIYLQPEDEVWLEIFFTDQNGLFSDPGWADSLFSGFLLYVDTDYLDSISEDDEL

SEQ ID NO: 2924 - protein, 913 aa, Homo sapiens; identical to SEQ ID NO: 2128

SEQ ID NO: 2925 - protein, 362 aa, Homo sapiens
MRTLFNLLWLALACSPVHTTLSKSDAKKAASKTLLEKSQFSDKPVQDRGLVVTDLKAESVVLEHRSYCSAKARDRHFAGDVLGYVTPWNSHGYDVTKVFGSKFTQISPVWLQLKRRGREMFEVTGLHDVDQGWMRAVRKHAKGLHIVPRLLFEDWTYDDFRNVLDSEDEIEELSKTVVQVAKNQHFDGFVVEVWNQLLSQKRVTDQLGMFTHKEFEQLAPVLDGFSLMTYDYSTAHQPGPNAPLSWVRACVQVLDPKSKWRSKILLGLNFYGMDYATSKDAREPVVGARYIQTLKDHRPRMVWDSQASEHFFEYKKSRSGRHVVFYPTLKSLQVRLELARELGVGVSIWELGQGLDYFYDLL

SEQ ID NO: 2926 - protein, 449 aa, Homo sapiens
MKFQGPLACLLLALCLGSGEAGPLQSGEESTGTNIGEALGHGLGDALSEGVGKAIGKEAGGAAGSKVSEALGQGTREAVGTGVRQVPGFGVADALGNRVGEAAHALGNTGHEIGRQAEDVIRHGADAVRGSWQGVPGHNGAWETSGGHGIFGSQGGLGGQGQGNPGGLGTPWVHGYPGNSAGSFGMNPQGAPWGQGGNGGPPNFGTNTQGAVAQPGYGSVRASNQNEGCTNPPPSGSGGGSSNSGGSSTGSSSGNHGGSGGGNGHKPGCEKPGNEARGSGESGIQGQGSSWGSGGGDAVGGVNTVNSETSPGMFNFDTFWKNFKSKLGFINWDAINKNQVPPPSTRALLYFSRLWEDFKQNTPFLNWKAIIEGADASSLQKRAGRDDQPGAGWQEVAAVTSKNYNYNQHAYPTAYGGKYSVKTPAKGGVSPSSSASRVQPGLLQWVKFW

SEQ ID NO: 2927 - protein, 244 aa, Homo sapiens
MWGAPLPRRPVWDVRSASAGPQPCLGGKMKLNLVQIFFMLLMLLLGLGMGLGLGLHMATAVLEESDQPLNEFWSSDSQDKAEATEEGDGTQTTETLVLSNKEVVQPGWPEDPILGEDEVGGNKMLRASALFQSNKDYLRLDQTDRECNDMMAHKMKEPSQSCIAQYAFIHEDLNTVKAVCNSPVIACELKGGKCHKSSRPFDLTLCELSQPDQVTPNCNYLTSVIKKHIIITCNDMKRQLPTGQ

SEQ ID NO: 2928 - protein, 575 aa, Homo sapiens; identical to SEQ ID NO: 1950

SEQ ID NO: 2929 - protein, 129 aa, Homo sapiens; identical to SEQ ID NO: 2490

SEQ ID NO: 2930 - protein, 188 aa, Homo sapiens; identical to SEQ ID NO: 2489

SEQ ID NO: 2931 - protein, 891 aa, Homo sapiens; identical to SEQ ID NO: 2482

SEQ ID NO: 2932 - protein, 913 aa, Homo sapiens; identical to SEQ ID NO: 2128

SEQ ID NO: 2933 - protein, 150 aa, Homo sapiens; identical to SEQ ID NO: 2126

SEQ ID NO: 2934 - protein, 63 aa, Homo sapiens
MGPEALSSLLLLLLVASGDADMKGHFDPAKCRYALGMQDRTIPDSDISASSSWSDSTAARHSR

SEQ ID NO: 2935 - protein, 403 aa, Homo sapiens
MQGTPGGGTRPGPSPVDRRTLLVFSFILAAALGQMNFTGDQVLRVLAKDEKQLSLLGDLEGLKPQKVDFWRGPARPSLPVDMRVPFSELKDIKAYLESHGLAYSIMIKDIQVLLDEERQAMAKSRRLERSTNSFSYSSYHTLEEIYSWIDNFVMEHSDIVSKIQIGNSFENQSILVLKFSTGGSRHPAIWIDTGIHSREWITHATGIWTANKIVSDYGKDRVLTDILNAMDIFIELVTNPDGFAFTHSMNRLWRKNKSIRPGIFCIGVDLNRNWKSGFGGNGSNSNPCSETYHGPSPQSEPEVAAIVNFITAHGNFKALISIHSYSQMLMYPYGRLLEPVSNQRELMWPVGSPSTGPMTVASSTPSALSSGTLGSMASCCRPHRSSPRPRRRGWRFGPSWSTP

SEQ ID NO: 2936 - protein, 513 aa, Homo sapiens
MAPARTMARARLAPAGIPAVALWLLCTLGLQGTQAGPPPAPPGLPAGADCLNSFTAGVPGFVLDTNASVSNGATFLESPTVRRGWDCVRACCTTQNCNLALVELQPDRGEDAIAACFLINCLYEQNFVCKFAPREGFINYLTREVYRSYRQLRTQGFGGSGIPKAWAGIDLKVQPQEPLVLKDVENTDWRLLRGDTDVRVERKDPNQVELWGLKEGTYLFQLTVTSSDHPEDTANVTVTVLSTKQTEDYCLASNKVGRCRGSFPRWYYDPTEQICKSFVYGGCLGNKNNYLREEECILACRGVQGPSMERRHPVCSGTCQPTQFRCSNGCCIDSFLECDDTPNCPDASDEAACEKYTSGFDELQRIHFPSDKGHCVDLPDTGLCKESIPRWYYNPFSEHCARFTYGGCYGNKNNFEEEQQCLESCRGISKKDVFGLRREIPIPSTGSVEMAVAVFLVICIVVVVAILGYCFFKNQRKDFHGHHHHPPPTPASSTVSTTEDTEHLVYNHTTRPL

SEQ ID NO: 2937 - protein, 265 aa, Homo sapiens
MAPWSHPSAQLQPVGGDAVSPALMVLLCLGLSLGPRTHVQAGNLSKATLWAEPGSVISRGNSVTIRCQGTLEAQEYRLVKEGSPEPWDTQNPLEPKNKARFSIPSMTEHHAGRYRCYYYSPAGWSEPSDPLELVVTGFYNKPTLSALPSPVVTSGENVTLQCGSRLRFDRFILTEEGDHKLSWTLDSQLTPSGQFQALFPVGPVTPSHRWMLRCYGSRRHILQVWSEPSDLLEIPVSGEEATVFSSTIQGSQTGCGELYRQGSPC

SEQ ID NO: 2938 - protein, 264 aa, Homo sapiens
MEKPILKNLNEMLCPIIASEVKALNANLSTLEVLTKIDNYTLLDYSLISSPEITENYLDLNLKGVFYPLENLTDPPFSPVPFVLPERSNSMLYIGIAEYFFKSASFAHFTAGVFNVTLSTEEISNHFVQNSQGLGNVLSRVASTSVGLVILGQRLVCSLSLNRFRLALPESNRSNIEVLRFENILSSILHFGVLPLANAKLQQGFPLSNPHKFLFVNSDIEVLEGFLLISTDLKYETSSKQQPSFHVWEGLNLISRQWRGKSAP

SEQ ID NO: 2939 - protein, 38 aa, Homo sapiens
MNKILSSTVCFGLLTLLSVLSFLQSVHGRPYLTQGNEI

SEQ ID NO: 2940 - protein, 188 aa, Homo sapiens; identical to SEQ ID NO: 2489

SEQ ID NO: 2941 - protein, 199 aa, Homo sapiens; identical to SEQ ID NO: 2193

SEQ ID NO: 2942 - protein, 9 aa, Homo sapiens
MAPKKLSCL

SEQ ID NO: 2943 - protein, 276 aa, Homo sapiens
MAPSPLQRLHCGPSPSPRPTEVPRGTVSVSCRYLKNSLHVFVSGGAIGTSSPALLECQEGVGPARPSLLVPPPPRPRRLDLARTLPAERTDSQSLYIVYIALPGRTPRPALAFAFLMPACCNRPSPRPSPAHLTASSVLRRQRHVLAASAASPCQWSGLRVAHSLRQVVSLCPRCTGSCPFSGACASSLPSPLSCPHSHSGSWGTWSQGRPCSSTEVAGLALWPTDFLSCLLDASELQTQGSHGFSFTPTGFSSNRKVGVGSCRDGAGRGAMGGLF

SEQ ID NO: 2944 - protein, 225 aa, Homo sapiens; identical to SEQ ID NO: 2797
  MOD_RES 1: note = Any amino acid

SEQ ID NO: 2945 - protein, 177 aa, Homo sapiens
MVPAAGALLWVLLLNLGPRAAGAQGLTQTPTEMQRVSLRFGGPMTRSYRSTARTGLPRKTRIILEDENDAMADADRLAGPAAAELLAATVSTGFSRSSAINEEDGSSEEGVVINAGKDSTSRELPSATPNTAGSSSTRFIANSQEPEIRLTSSLPRSPGRSTEDLPPCHLLRICGWC

SEQ ID NO: 2946 - protein, 303 aa, Homo sapiens
MLHPETSPGRGHLLAVLLALLGTAWAEVWPPQLQEQAPMAGALNRKESFLLLSLHNRLRSWVQPPAADMRRLDWSDSLAQLAQARAALCGIPTPSLASGLWRTLQVGWNMQLLPAGLASFVEVVSLWFAEGQRYSHAAGECARNATCTHYTQLVWATSSQLGCGRHLCSAGQAAIEAFVCAYSPRGNWEVNGKTIVPYKKGAWCSLCTASVSGCFKAWDHAGGLCEVPRNPCRMSCQNHGRLNISTCHCHCPPGYTGRYCQVRCSLQCVHGRFREEECSCVCDIGYGEPSVPPRCIFPSTPVT

SEQ ID NO: 2947 - protein, 493 aa, Homo sapiens; identical to SEQ ID NO: 2813

SEQ ID NO: 2948 - protein, 268 aa, Homo sapiens
MKQILHPALETTDPCSTGFVFPAMTLFPVLLFLVAGLLPSFPANEDKDPAFTALLTTQTQVQREIVNKHNELRRAVSPPARNMLKMEWNKEAAANAQKWANQCNYRHSNPKDRMTSLKCGENLYMSSASSSWSQAIQSWFDEYNDFDFGVGPKTPNAVVGHYTQVVWYSSYLVGCGNAYCPNQKVLKYYYVCQYCPAGNWANRLYVPYEQGAPCASCPDNCDDGLCTNGCKYEDLYSNCKSLKLTLTCKHQLVRDSCKASCNCSNSIY

SEQ ID NO: 2949 - protein, 123 aa, Homo sapiens
MLPKSRRALTIQEIAALARSSLHGISQVVKDHVTKPTAMAQGRVAHLIEWKGWSKPSDSPAALESAFSSYSDLSEGEQEARFAAGVAEQFAIAEAKLRAWSSVDGEDSTDDSYDEDFAGGMDT

SEQ ID NO: 2950 - protein, 241 aa, Homo sapiens
MGAVMGTFSSLQTKQRRPSKDKIEDELEMTMVCHRPEGLEQLEAQTNFTKRELQVLYRGFKNECPSGVVNEDTFKQIYAQFFPHGALPCLEGSPCVEFLPPSPALLFCLVDASTYAHYLFNAFDTTQTGSVKFEDFVTALSILLRGTVHEKLRWTFNLYDINKDGYINKEEMMDIVKAIYDMMGKYTYPVLKEDTPRQHVDVFFQKMDKNKDGIVTLDEFLESCQEDDNIMRSLQLFQNVM

SEQ ID NO: 2951 - protein, 209 aa, Homo sapiens; identical to SEQ ID NO: 2846

SEQ ID NO: 2952 - protein, 103 aa, Homo sapiens
MRQRLLPSVTSLLLVALLFPGSSQARHVNHSATEALGELRERAPGQGTNGFQLLRHAVKRDLLPPRTPPYQVHISHQEARGPSFKICVGFLGPRWARGCSTGN

SEQ ID NO: 2953 - protein, 141 aa, Homo sapiens
MKTGLFFLCLLGTAAAIPTNARLLSDHSKPTAETVAPDNTAIPSLRAEAEENEKETAVSTEDDSHHKAEKSSVLKSKEESHEQSAEQGKSSSQELGLKDQEDSDGHLSVNLEYAPTEGTLDIKEDMSEPQEKKLSENTDFL

SEQ ID NO: 2954 - protein, 213 aa, Homo sapiens
MRLAGPLRIVVLVVSVGVTWIVVSILLGGPGSGFPRIQQLFTSPESSVTAAPRARKYKCGLPQPCPEEHLAFRVVSGAANVIGPKICLEDKMLMSSVKDNVGRGLNIALVNDVNDLLKFIRPLHEGTLVFVASYDDPATKMNEETRKLFSELGSRNAKELAFRDSWVFVGAKGVQNKSPFEQHVKNSKHSNKYEGWPEALEMEGCIPRRSTAS

SEQ ID NO: 2955 - protein, 899 aa, Homo sapiens; identical to SEQ ID NO: 2512

SEQ ID NO: 2956 - protein, 63 aa, Homo sapiens; identical to SEQ ID NO: 2934

SEQ ID NO: 2957 - protein, 162 aa, Homo sapiens
DEDRYTTCWPKTWLAKDCPALRIISVEYDTSLSDWRARCPMERKSIAFRSNELLRKLRAAGVGDRPVVWISHSMGGLLVKKMLLEASTKPEMSTVINNTRGIIFYSVPHHGSRLAEYSVNIRYLLFPSLEVKELSKGNTFCHKGNWGYINISYTEKKKKFLP

SEQ ID NO: 2958 - protein, 360 aa, Homo sapiens; identical to SEQ ID NO: 1850

SEQ ID NO: 2959 - protein, 225 aa, Homo sapiens; identical to SEQ ID NO: 2797
  VARIANT 1: note = MOD_RES - Any amino acid

SEQ ID NO: 2960 - protein, 63 aa, Homo sapiens; identical to SEQ ID NO: 1907

SEQ ID NO: 2961 - protein, 1744 aa, Homo sapiens; identical to SEQ ID NO: 2466

SEQ ID NO: 2962 - protein, 263 aa, Homo sapiens
MADMQNLVERLERAVGRLEAVSHTSDMHRGYADSPSKGAAPYVQAFDSLLAGPVAEYLKISKEIGGDVQKHAEMVHTGLKLERALLVTASQCQQPAENKLSDLLAPISEQIKEVITFREKNRGSKLFNHLSAVSESIQALGWVAMAPKPGPYVKEMNDAAMFYTNRVLKEYKDVDKKHVDWVKAYLSIWTELQAYIKEFHTTGLAWSKTGPVAKELSGLPSGPSAGSCPPPPPPCPPPPPVSTISCSYESASRSSLFAQINQG

SEQ ID NO: 2963 - protein, 166 aa, Homo sapiens
MGPEALSSLLLLLLVASGDADMKGHFDPAKCRYALGMQDRTIPDSDISASSSWSDSTAARHSRLESSDGDGAWCPAGSVFPKEEEYLQVDLQRLHLVALVGTQGRHAGGLGKEFSRSYRLRYSRDGRRWMGWKDRWGQEVISGNEDPEGVVLKDLGPPMVARLVRF

SEQ ID NO: 2964 - protein, 782 aa, Homo sapiens
SILRVEAVDADCSPQFSQICSYEIITPDVPFTVDKDGYIKNTEKLNYGKEHQYKLTVTAYDCGKKRATEDVLVKISIKPTCTPGWQGWNNRIEYEPGTGALAVFPNIHLETCDEPVASVQATVELETSHIGKGCDRDTYSEKSLHRLCGAAAGTAELLPSPSGSLNWTMGLPTDNGHDSDQVFEFNGTQAVRIPDGVVSVSPKEPFTISVWMRHGPFGRKKETILCSSDKTDMNRHHYSLYVHGCRLIFLFRQDPSEEKKYRPAEFHWKLNQVCDEEWHHYVLNVEFPSVTLYVDGTSHEPFSVTEDYPLHPSKIETQLVVGACWQGGDLHMTQFFRGNLAGLTLRSGKLADKKVIDCLYTCKEGLDLQVLEDSGRGVQIQAHPSQLVLTLEGEDLGELDKAMQHISYLNSRQFPTPGIRRLKITSTIKCFNEATCISVPPVDGYVMVLQPEEPKISLSGVHHFARAASEFESSEGVFLFPELRIISTITREVEPEGDGAEDPTVQESLVSEEIVHDLDTCEVTVEGEELNHEQESLEVDMARLQQKGIEVSSSELGMTFTGVDTMASYEEVLHLLRYRNWHARSLLDRKFKLICSELNGRYISNEFKVEVNVIHTANPMEHANHMAAQPQFVHPEHRSFVDLSGHNLANPHPFAVVPSTATVVIVVCVSFLVFMIILGVFRIRAAHRRTMRDQDTGKENEMDWDDSALTITVNPMETYEDQHSSEEEEEEEEEEESEDGEEEDDITSAESESSEEEEGEQGDPQNATRQQQLEWDDSTLSY

SEQ ID NO: 2965 - protein, 176 aa, Homo sapiens
MARRHCFSYWLLVCWLVVTVAEALSTFYLQQHINLHMDKKRYLRLLEIHKIMRTLPTARSLHSPLHLPRGVRSQGPSPSQRHPGVPSIFFHEGPESILGFQTDLSSLQGVTTVFHSSHFIGHTVTLLIGISPEEDSREEAHLRKAEREEKPKHTEAKKSLSFRKKQQKDFCFIFRN

SEQ ID NO: 2966 - protein, 393 aa, Homo sapiens; identical to SEQ ID NO: 2122

SEQ ID NO: 2967 - protein, 107 aa, Homo sapiens
MLPCLALLLLMELSVCTVAGDGGEEQTLSTEAETWEGAGPSIQLQLQEVKTGKASQFFGLMGKRVGGRPLIQPRRKKAYQLEHTFQGLLGKRSLFTEGREDEAQGSE

SEQ ID NO: 2968 - protein, 361 aa, Homo sapiens
MGIIQSILATSRDCYSFKKKPIPKKPTMLALAKILLISTLFYSLLSGSHGKENQDINTTQNIAEVFKTMENKPISLESEANLNSDKENITTSNLKASHSPPLNLPNNSHGITDFSSNSSAEHSLGSLKPTSTISTSPPLIHSFVSKVPWNAPIADEDLLPISAHPNATPALSSENFTWSLVNDTVKTPDNSSITVSILSSEPTSPSVTPLIVEPSGWLTTNSDSFTGFTPYQEKTTLQPTLKFTNNSKLFPNTSDPQKENRNTGIVFGAILGAILGVSLLTLVGYLLCGKRKTDSFSHRRLYDDRNEPVLRLDNAPEPYDVSFGNSSYYNPTLNDSAMPESEENARDGIPMDDIPPLRTSV

SEQ ID NO: 2969 - protein, 92 aa, Homo sapiens
MRGPGHPLLLGLLLVLGPSPEQRVEIVPRDLRMKDKFLKHLTGPLYFSPKCSKHFHRLYHNTRDCTIPAYYKRCARLLTRLAVSPVCMEDKQ

SEQ ID NO: 2970 - protein, 374 aa, Homo sapiens
  VARIANT 1: note = MOD_RES - Any amino acid
XRVRRGPLPADRPRALGPARRCSRHPHPAPFRVCSEGAAHRLRRPERLPLPSRALRPRPAHTPILGPAPRACPGAPRASDSPTCAAAAATAWPRTRAVERKGCQVAAAAGVRGTGCPSRADLEKDSWNDTKEDVFVHQTAIKKNNPRKYLRSVGDGETVEFDVVEGEKGAEAANVTGPGGVPVQGSKYAADRNHYRRYPRRRGPPRNYQQNYQNSESGEKNEGSESAPEGQAQQRRPYRRRRFPPYYMRRPYGRRPQYSNPPVQGEVMEGADNQGAGEQGRPVRQNMYRGYRPRFRRGPPRQRQPREDGNEEDKENQGDETQGQQPPQRRYRRNFNYRRRRPENPKPQDGKETKAADPPAENSSAPEAEQGGAE

SEQ ID NO: 2971 - protein, 139 aa, Homo sapiens
MALRMLWAGQAKGILGGWGIICLVMSLLLQHPGVYSKCYFQAQAPCHYEGKYFTLGESWLRKDCFHCTCLHPVGVGCCDTSQHPIDFPAGCEVRQEAGTCQFSLVQKSDPRLPCKGGGPDPEWGSANTPVPGAPAPHSS

SEQ ID NO: 2972 - protein, 153 aa, Homo sapiens
HYCKEGYYRDMGKPITHRKACKACDCHPVGAAGKTCNQTTGQCPCKDGVTGITCNRCAKGYQQSRSPIAPCIKIPVAPPTTAASSVEEPEAARQPNTFQAEGLSLLPGAAEKEGARCWGYRRRLGHRVAQAECRGPRSWAWGRITSSFSFASN

SEQ ID NO: 2973 - protein, 70 aa, Homo sapiens
MLVLFLLGTVFLLCPYWGELHDPIKGQSMYHYSKLSCMTSCEDINFLGFTKRVELICCDHSNYCNLPEGV

SEQ ID NO: 2974 - protein, 188 aa, Homo sapiens; identical to SEQ ID NO: 2489

SEQ ID NO: 2975 - protein, 771 aa, Homo sapiens [sequence omitted]

SEQ ID NO: 2976 - protein, 337 aa, Homo sapiens
MARPMIKEARMASLLLENPYYGCRKPKDQVRSSLKNVSDLFVMGGALVLESAALLHWLEREGYGPLGMTGISMGGHMASLAVSNWPKPMPLIPCLSWSTASGVFTTGVLSKSINWRELEKQYYTQTVYEEEIIHMLEYCGTDSFKMGQEFVKHFTSSADKLTNLNLVSRTLNLDISNQVVSQKPADCHNSSKTSVSATSEGLLLQDTSKMKRFNQTLSTNKSGYTSRNPQSYHLLSKEQSRNSLRKESLIFMKGVMDECTHVANFSVPVDPSLIIVVQAKEDAYIPRTGVRSLQEIWPGCEIRYLEGGHISAYLFKQGLFRQAIYDAFDRFLHKYAN

SEQ ID NO: 2977 - protein, 153 aa, Homo sapiens
MGPEALSSLLLLLLVASGDADMKGHFDPAKCRYALGMQDRTIPDSDISASSSWSDSTAARHSRLESSDGDGAWCPAGSVFPKEEEYLQVDLQRLHLVALVGTQGRHAGGLGKEFSRSYRLRYSRDGRRWMGWKDRWGQEVISGNEDPEGVVLK

SEQ ID NO: 2978 - protein, 114 aa, Homo sapiens
MDKSLLLELPILLCCFRALSGSLSMRNDAVIEIVQCRMCHLQFPGEKCSRGRGICTATTEEACMVGRMFKRDGNPWLTFMGCLKNCADVKGIRWSVYLVNFRCCRSHDLCNEDL

SEQ ID NO: 2979 - protein, 209 aa, Homo sapiens; identical to SEQ ID NO: 2846

SEQ ID NO: 2980 - protein, 212 aa, Homo sapiens
DFGYCPRVYCENQPMLPIGVLVMVGFTVGKVPVPDIRTCHFCLVEDPSVGCISGSEKCTISSSSLCMVITIYYDVKVRFIVRGCGQYISYRCQEKRNTYFAEYWYQAQCCQYDYCNSWSSPQLQSSLPEPHDRPLALPLSDSQIQWFYQALNLSLPLPNFHAGTEPDGLDPMVTLSLNLGLSFAELRRMYLFLNSSGLLVLPQAGLLTPHPS

SEQ ID NO: 2981 - protein, 79 aa, Homo sapiens; identical to SEQ ID NO: 2737

SEQ ID NO: 2982 - protein, 539 aa, Homo sapiens
MSEPQEKKLSENTDFLAPGVSSFTDSNQQESITKREENQEQPRNYSHHQLNRSSKHSQGLRDQGNQEQDPNISNGEEEEEKEPGEVGTHNDNQERKTELPREHANSKQEEDNTQSDDILEESDQPTQVSKMQEDEFDQGNQEQEDNSNAEMEEENASNVNKHIQETEWQSQEGKTGLEAISNHKETEEKTVSEALLMEPTDDGNTTPRNHGVDDDGDDDGDDGGTDGPRHSASDDYFIPSQAFLEAERAQSIAYHLKIEEQREKVHENENIGTTEPGEHQEAKKAENSSNEEETSSEGNMRVHAVDSCMSFQCKRGHICKADQQGKPHCVCQDPVTCPPTKPLDQVCGTDNQTYASSCHLFATKCRLEGTKKGHQLQLDYFGACKSIPTCTDFEVIQFPLRMRDWLKNILMQLYEANSEHAGYLNEKQRNKVKKIYLDEKRLLAGDHPIDLLLRDFKKNYHMYVYPVHWQFSELDQHPMDRVLTHSELAPLRASLVPMEHCITRFFEECDPNKDKHITLKEWGHCFGIKEEDIDENLLF

SEQ ID NO: 2983 - protein, 844 aa, Homo sapiens; identical to SEQ ID NO: 2289

SEQ ID NO: 2984 - protein, 330 aa, Homo sapiens
MQLFLLLCLVLLSPQGASLHRHHPREMKKRVEDLHVGATVAPSSRRDFTFDLLGNALFTDLVVDLQDTFVSAMKTLYLADTFPTNFRDSAGAMKQINDYVAKQTKGKIVDLLKNLDSNAVVIMVNYIFFKAKWETSFNHKGTQEQDFYVTSETVVRVPMMSREDQYHYLLDRNLSCRVVGVPYQGNATALFILPSEGKMQQVENGLSEKTLRKWLKMFKKRQLELYLPKFSIEGSYQLEKVLPSLGISNVFTSHADLSGISNHSNIQVSEMVHKAVVEVDESGTRAAAATGTIFTFRSARLNSQRLVFNRPFLMFIVDNNILFLGKVNRP

SEQ ID NO: 2985 - protein, 891 aa, Homo sapiens; identical to SEQ ID NO: 2482

SEQ ID NO: 2986 - protein, 235 aa, Homo sapiens; identical to SEQ ID NO: 2268

SEQ ID NO: 2987 - protein, 461 aa, Homo sapiens [sequence omitted]

SEQ ID NO: 2988 - protein, 891 aa, Homo sapiens; identical to SEQ ID NO: 2482

SEQ ID NO: 2989 - protein, 166 aa, Homo sapiens; identical to SEQ ID NO: 2963

SEQ ID NO: 2990 - protein, 139 aa, Homo sapiens
MQAACWYVLFLLQPTVYLVTCANLTNGGKSELLKSGSSKSTLKHIWTESSKDLSISRLLSQTFRGKENDTDLDLRYDTPEPYSEQDLWDWLRNSTDLQEPRPRAKRRPIVKTGKFKKMFGWGDFHSNIKTVKLNLLITG

SEQ ID NO: 2991 - protein, 803 aa, Homo sapiens
MAAAGLVAVAAAAEYSGTVASGGNLPGVHCGPSSGAGPGFGPGSWSRSLDRALEEAAVTGVLSLSGRKLREFPRGAANHDLTDTTRADLSRNRLSEIPIEACHFVSLENLNLYQNCIRYIPEAILNLQALTFLNISRNQLSTLPVHLCNLPLKVLIASNNKLVSLPEEIGHLRHLMELDVSCNEIQTIPSQIGNLEALRDLNVRRNHLVHLPEELAELPLIRLDFSCNKITTIPVCYRNLRHLQTITLDNNPLQSPPAQICIKGKVHIFKYLNIQACKIAPDLPDYDRRPLGFGSCHEELYSSRPYGALDSGFNSVDSGDKRWSGNEPTDEFSDLPLRVAEITKEQRLRRESQYQENRGSLVVTNGGVEHDLDQIDYIDSCTAEEEEAEVRQPKGPDPDSLSSQFMAYIEQRRISHEGSPVKPVAIREFQKTEDMRRYLHQNRVPAEPSSLLSLSASHNQLSHTDLELHQRREQLVERTRREAQLAALQYEEEKIRTKQIQRDAVLDFVKQKASQSPQKQHPLLDGVDGECPFPSRRSQHTDDSALCMSLSGLNQVGCAATLPHSSAFTPLKSDDRPNALLSSPATETVHHSPAYSFPAAIQRNQPQRPESFLFRAGVRAETNKGHASPLPPSAAPTTDSTDSITGQNSRQREEELELIDQLRKHIEYRLKVSLPCDLGAALTDGVVLCHLANHVRPRSVPSIHVPSPAVPKLTMAKCRRNVENFLEACRKIGVPQDNLCSPSDILQLNLSVKRTVETLLSLGAHSEESSFVCLSLQLLGFVAFYCTVMLTLCVLYYWLFPAR

SEQ ID NO: 2992 - protein, 210 aa, Homo sapiens
MYKARPPAGSGGPGAEPPAMAAPRGRAAPWTTALLLLLASQVLSPGSCADEEEVPEEWVLLHVVQGQIGAGNYSYLRLNHEGKIVLRMRSLKGDADLYVSASSLHPSFDDYELQSATCGPDAVSIPAHFRRPVGIGVYGHPSHLESEFEMKVYYDGTVEQHPFGEAAYPADGADAGQKHAGAPEDASQEEESVLWTILISILKLVLEILF

SEQ ID NO: 2993 - protein, 161 aa, Homo sapiens
  VARIANT 1: note = MOD_RES - Any amino acid
XCPTEIIAFGDRLEEFRSINTEVVACSVDSQFTHLAWINTPRRQGGLGPIRIPLLSDLTHQISKDYGVYLEDSGHTLRGLFIIDDKGILRQITLNDLPVGRSVDETLRLVQAFQYTDKHGEVCPAGWKPGSETIKPEDTMKAWWPRESYNPRSSWKAEVFR

SEQ ID NO: 2994 - protein, 961 aa, Homo sapiens; identical to SEQ ID NO: 2513

SEQ ID NO: 2995 - protein, 950 aa, Homo sapiens; identical to SEQ ID NO: 1839

SEQ ID NO: 2996 - protein, 116 aa, Homo sapiens; identical to SEQ ID NO: 2491

SEQ ID NO: 2997 - protein, 416 aa, Homo sapiens
MKFQGPLACLLLALCLGSGEAGPLQSGEESTGTNIGEALGHGLGDALSEGVGKAIGKEAGGAAGSKVSEALGQGTREAVGTGVRQVPGFGVADALGNRVGEAAHALGNTGHEIGRQAEDVIRHGADAVRGSWQGVPGHNGAWETSGGHGIFGSQGGLGGQGQGNPGGLGTPWVHGYPGNSAGSFGMNPQGAPWGQGGNGGPPNFGTNTQGAVAQPGYGSVRASNQNEGCTNPPPSGSGGGSSNSGGGSGSQSGSSGSGSNGDNNNGSSSGGSSSGSSSGGSSGGSSGGSSGNSGGSRGDSGSESSWGSSTGSSSGNHGGSGGGNGHKPGCEKPGNEARGSGESGIQGFRGQGVSSNMREISKEGNRLLGGSGDNYRNSETSPGMFNFDTFWKNFKSKLGFINWDAINKDQRSSRIP

SEQ ID NO: 2998 - protein, 310 aa, Homo sapiens
MVDKDTERDIEMKRQLRRLRELHLYSTWKKYQEAMKTSLGVPQCERDEGSLGKPLCPPEILSETLPGSVKKRVCFPSEDHLEEFIAEHLPEASNQSLLTVAHADAGTQTNGDLEDLEEHGPGQTVSEEATEVHTMEGDPDTLAEFLIRDVLQELSSYNGEEEDPEEVKTSLGVPQRGDLEDLEEHVPGQTVSEEATGVHMMQVDPATLAKSDLEDLEEHVPEQTVSEEATGVHMMQVDPATLAKQLEDSTITGSHQQMSASPSSAPAEEATEKTKVEEEVKTRKPKKKTRKPSKKSRWNVLKCWDIFNIF

SEQ ID NO: 2999 - protein, 49 aa, Homo sapiens
MAPPSVPLVLLLVLLLSLAETPASAPAHRSSTFPKWVTKTERGRQPLRS

SEQ ID NO: 3000 - protein, 325 aa, Homo sapiens; identical to SEQ ID NO: 1911

SEQ ID NO: 3001 - protein, 129 aa, Homo sapiens; identical to SEQ ID NO: 2490

SEQ ID NO: 3002 - protein, 351 aa, Homo sapiens
MAGIPGLLFLLFFLLCAVGQVSPYSAPWKPTWPAYRLPVVLPQSTLNLAKQYLSYETLYANGSRTETQVGIYILSSSGDGAQHRDSGSSGKSRRKRQIYGYDSRFSIFGKDFLLNYPFSTSVKLSTGCTGTLVAEKHVLTAAHCIHDGKTYVKGTQKLRVGFLKPKFKDGGRGANDSTSAMPEQMKFQWIRVKRTHVPKGWIKGNANDIGMDYDYALLELKKPHKRKFMKIGVSPPAKQLPGGRIHFSGYDNDRPGNLVYRFCDVKDETYDLLYQQCDAQPGASGSGVYVRMWKRQQQKWERKIIGIFSGHQWVDMNGSPQDFNVAVRITPLKYAQICYWIKGNYLDCREG

SEQ ID NO: 3003 - protein, 114 aa, Homo sapiens
MERGAGAKLLPLLLLLRATGFTCAQTDGRNGYTAVIEVTSGGPWGDWAWPEMCPDGFFASGFSLKVEPPQGIPGDDTALNGIRLHCARGNVLGNTHVVESQSGRWGAGVEDPLG

SEQ ID NO: 3004 - protein, 274 aa, Homo sapiens
MWRCPLGLLLLLPLAGHLALGAQQGRGRRELAPGLHLRGIRDAGGRYCQEQDLCCRGRADDCALPYLGAICYCDLFCNRTVSDCCPDFWDFCLGVPPPFPPIQGCMHGGRIYPVLGTYWDNCNRWPPLECWDLLPPALPGPVWAALGAKEEMAGKDRTVYCPLLMKALGARVGECPGCQSPQRMLPESSRVLLPRCAEGEQPGVQRGKGRMRKAFPALQTPLALPSSAPASPGAGKPSHTGSWLPLRLLKRQHWRWEPWTACKEAVQHLVITEL

SEQ ID NO: 3005 - protein, 145 aa, Homo sapiens
MAQLFLPLLAALVLAQAPAALADVLEGDSSEDRAFRVRIAGDAPLQGVLGGALTIPCHVHYLRPPPSRRAVLGSPRVKWTFLSRGREAEVLVARGVRVKVNEAYRFRVALPAYPASLTDVSLALSELRPNDSGIYRCEVQHGIDD

SEQ ID NO: 3006 - protein, 188 aa, Homo sapiens; identical to SEQ ID NO: 2489

SEQ ID NO: 3007 - protein, 185 aa, Homo sapiens
MGPAGCAFTLLLLLGISDRDYHSALQEAEVPIIDRQACEQLYNPIGIFLPALEPVIKEDKICAGDTQNMKDSCKGDSGGPLSCHIDGVWIQTGVVSWGLECGKSLPGVYTNVIYYQKWINATISRANNLDFSDFLFPIVLLSLALLRPSCAFGPNTIHRVGTVAEAVACIQGWEENAWRFSPRGR

SEQ ID NO: 3008 - protein, 550 aa, Homo sapiens
PAPASRKLLPRRHLSEKSHHISIPSPDISHKGLRSKRTQPSDPETWESLPRLDSQRHGGPEFSFDLLPEARAIRVTISSGPEVSVRLCHQWALECEELSSPYDVQKIVSGGHTVELPYEFLLPCLCIEASYLQEDTVRRKKCPFQSWPEAYGSDFWKSVHFTDYSQHTQMVMALTLRCPLKLEAALCQRHDWHTLCKDLPNATARESDGWYVLEKVDLHPQLCFKFSFGNSSHVECPHQTGSLTSWNVSMDTQAQQLILHFSSRMHATFSAAWSLPGLGQDTLVPPVYTVSQARGSSPVSLDLIIPFLRPGCCVLVWRSDVQFAWKHLLCPDVSYRHLGLLILALLALLTLLGVVLALTCRRPQSGPGPARPVLLLHAADSEAQRRLVGALAELLRAALGGGRDVIVDLWEGRHVARVGPLPWLWAARTRVAREQGTVLLLWSGADLRPVSGPDPRAAPLLALLHAAPRPLLLLAYFSRLCAKGDIPPPLRALPRYRLLRDLPRLLRALDARPFAEATSWGRLGARQRRQSRLELCSRLEREAARLADLG

SEQ ID NO: 3009 - protein, 271 aa, Homo sapiens
MGIVCAQCSFILLLSIIRARPPPFLFCPLSSQRTESPYKPVHLGLGPTDKVAAIAMARIIDLVPWDDGSTHVYASPAILLPMERQRNQLAGVKQQLYHPALPTLRHMDRDTVKACLPDEHCQSTTYCRKDEFDNAHFTLLGVPNKPLQCLDITATGQKLRNRYHEGKLAPIAPGINRVDWPCFTRAIEDWSHFVSSAGEFKLPCLRKRAEGLSGYAVRYLKPDVTQTWRYCLSQNPSLDRYGQKPLPFDSLNTFRSFGSSYSRVNYLTPWH

SEQ ID NO: 3010 - protein, 580 aa, Homo sapiens; identical to SEQ ID NO: 2253

SEQ ID NO: 3011 - protein, 170 aa, Homo sapiens
MEFVDVTESNARWVQDFRLKAYASPAKLESIDGARYHALLIPSCPGALTDLASSGSLARILQHFHSESKPICAVGHGVAALCCATNEDRSWVFDSYSLTGPSVCELVRAPGFARLPLVVEDFVKDSGACFSASEPDAVHVVLDRHLVTGQNASSTVPAVQNLLFLCGSRK

SEQ ID NO: 3012 - protein, 346 aa, Homo sapiens
MRLLFLAVLRPHTGNAVTAQRVRAHLEAAGHVCVLKDAFDFESRSEIANLILAENCEAALALHLYRGGRLLQGHRIPFGVIFGGTDVNEDANQAEKNTVMGRVLEEARFAVAFTESMKEMAQAQWPHAKGKVYVQSQGIATTPNAAFNWNTFLQRSEINQSADNLHIFLLICGLRQVKDPLYLVDAFSAWHQEEPNVHLVIVGPEVDPVFTREVKAKVKRAAGVRLIGEMPQEDLHAVVKNCFAVVNSSVSEGMSAAILEAMDLEVPVLARNIPGNAAVVKHEVTGLLFSNPQEFVHLAKRLVSDPALEKEIVVNGREYVRMYHSWQVERDTYQQLIRKLEGSTED

SEQ ID NO: 3013 - protein, 493 aa, Homo sapiens; identical to SEQ ID NO: 2813

SEQ ID NO: 3014 - protein, 117 aa, Homo sapiens
MLIFWTITLFLLGAAKGKEVCYEDLGCFSDTEPWGGTAIRPLKILPWSPEKIGTRFLLYTNENPNNFQILLLSDPSTIEASNFQMDRKTRFIIHGFIDKGDESWVTDMCKPGASPRA

SEQ ID NO: 3015 - protein, 526 aa, Homo sapiens
MQGPLLLPGLCFLLSLFGAVTQKTKTSCAKCPPNASCVNNTHCTCNHGYTSGSGQKLFTFPLETCNAIETQAITDNCSEERKTFNLNVQMNSMDIRCSDIIQGDTQGPSAIAFISYSSLGNIINATFFEEMDKKDQVYLNSQVVSAAIGPKRNVSLSKSVTLTFQHVKMTPSTKKVFCVYWKSTGQGSQWSRDGCFLIHVNKSHTMCNCSHLSSFAVLMALTSQEEDPVLTVITYVGLSVSLLCLLLAALTFLLCKAIRNTSTSLHLQLSLCLFLAHLLFLVGIDRTEPKVLCSIIAGALHYLYLAAFTWMLLEGVHLFLTARNLTVVNYSSINRLMKWIMFPVGYGVPAVTVAISAASWPHLYGTADRCWLHLDQGFMWSFLGPVCAIFSANLVLFILVFWILKRKLSSLNSEVSTIQNTRMLAFKATAQLFILGCTWCLGLLQVGPAAQVMAYLFTIINSLQGFFIFLVYCLLSQQVQKQYQKWFREIVKSKSESETYTLSSKMGPDSKPSEGDVFPGQVKRKY

SEQ ID NO: 3016 - protein, 1943 aa, Homo sapiens
  VARIANT 1: note = MOD_RES - Any amino acid
XPSLAGRGAGRMAPGALRGGCEQRAPGGGARTAALGPWPWPSPGPAPSPGAAPPRSRKMSGALLWPLLPLLLLLLSARDGVRAAQPQAPGYLIAAPSVFRAGVEEVISVTIFNSPREVTVQAQLVAQGEPVVQSQGAILDKGTIKLKVPTGLRGQALLKVWGRGWQAEEGPLFHNQTSVTVDGRGASVFIQTDKPVYRPQHRVLISIFTVSPNLRPVNEKLEAYILDPRGSRMIEWRHLKPFCCGITNMSFPLSDQPVLGEWFIFVEMQGHAYNKSFEVQKYVLPKFELLIDPPRYIQDLDACETGTVRARYTFGKPVAGALMINMTVNGVGYYSHEVGRPVLRTTKILGSRDFDICVRDMIPADVPEHFRGRVSIWAMVTSVDGSQQVAFDDSTPVQRQLVDIRYSKDTRKQFKPGLAYVGKVELSYPDGSPAEGVTVQIKAELTPKDNIYTSEVVSQRGLVGFEIPSIPTSAQHVWLETKVMALNGKPVGAQYLPSYLSLGSWYSPSQCYLQLQPPSHPLQVGEEAYFSVKSTCPCNFTLYYEVAARGNIVLSGQQPAHTTQQRSKRAAPALEKPIRLTHLSETEPPPAPEAEVDVCVTSLHLAVTPSMVPLGRLLVFYVRENGEGVADSLQFAVETFFENQVSVTYSANETQPGEVVDLRIRAARGSCVCVAAVDKSVYLLRSGFRLTPAQVFQELEDYDVSDSFGVSREDGPFWWAGLTAQRRRRSSVFPWPWGITKDSGFAFTETGLVVMTDRVSLNHRQDGGLYTDEAVPAFQPHTGSLVAVAPSRHPPRTEKRKRTFFPETWIWHCLNISDPSGEGTLSVKVPDSITSWVGEAVALSTSQGLGIAEPSLLKTFKPFFVDFMLPALIIRGEQVKIPLSVYNYMGTCAEVYMKLSVPKGIQFVGHPGKRHVTKKMCVAPGEAEPIWVVLSFSDLGLNNITAKALAYGDTNCCRDGRSSKHPEENHADRRVPIGVDHVRRSVMVEAEGVPRAYTYSAFFCPSERVHISTPNKYEFQYVQRPLRLTRFDVAVRAHNDARVALSSGPQDTAGMIEIVLGGHQNTRSWISTSKMGEPVASAHTAKILSWDEFRTFWISWRGGLIQVGHGPEPSNESVIVAWTLPRPPEVQFIGFSTGWGSMGEFRIWRKMEVDESYSEAFTLGVPHGAIPGSERATASIIGDVMGPTLNHLNNLLRLPFGCGEQNMIHFAPNVFVLKYLQKTQQLSPEVERETTDYLVQGYQRQLTYKRQDGSYSAFGERDASGSMWLTAFVLKSFAQARSFIFVDPRELAAAKSWIIQQQQADGSFLAVGRVLNKDIQGGIHGTVPLTAYVVVALLETGTASEEERGSTDKARHFLESAAPLAMDPYSCALTTYALTLLRSPAAPEALRKLRSLAIMRDGVTHWSLSNSWDVDKGTFLSFSDRVSQSVVSAEVEMTAYALLTYTLLGDVAAALPVVKWLSQQRNALGGFSSTQDTCVALQALAEYAILSYAGGINLTVSLASTNLDYQETFELHRTNQKVLQTAAIPSLPTGLFVSAKGDGCCLMQIDVTYNVPDPVAKPAFQLLVSLQEPEAQGRPPPMPASAAEGSRGDWPPADDDDPAADQHHQEYKVMLEVCTRWLHAGSSNMAVLEVPLLSGFRADIESLEQLLLDKHMGMKRYEVAGRRVLFYFDEIPSRCLTCVRFRALRECVVGRTSALPVSVYDYYEPAFEATRFYNVSTHSPLARELCAGPACNEVERAPARGPGWFPGESGPAVAPEEGAAIARCGCDHDCGAQGNPVCGSDGVVYASACRLREAACRQAAPLEPAPPSCCALEQRLPASSSSTYGDDLASVAPGPLQQDVKLNGAGLEVEDSDPEPEGEAEDRVTAGPRPPVSSGNLESSTQSASPFHRWGQTPAPQRHSGRVVGAHRPGLLSPVFVYSPAFQSGGEEGLWMSNTCTLR

SEQ ID NO: 3017 - protein, 151 aa, Homo sapiens
MEATGTDEVDKLKTKFISAWNNMKYSWVLKTKTYFSRNSPVLLLGKCYHFKYEDEDKTLPAESGCTIEDHVIAGNVEEFRKDFISRIWLTYREEFPQIEGSALTTDCGWGCTLRTGQMLLAQGLILHFLGRAWTWPDALNIENSDSESWTS

SEQ ID NO: 3018 - protein, 871 aa, Homo sapiens
MRKPRRKSRQNAEGRRSPSPYSLKCSPTRETLTYAQAQRIVEVDIDGRLHRISIYDPLKIITEDELTAQDITECNSNKENSEQPQFPGKSKKPSSKGKKKESCSKHASGTSFHLPQPSFRMVDSGIQPEAPPLPAAYYRYIEKPPEDLDAEVEYDMDEEDLAWLDMVNEKRRVDGHSLVSADTFELLVDRLEKESYLESRSSGAQQSLIDEDAFCCVCLDDECHNSNVILFCDICNLAVHQECYGVPYIPEGQWLCRCCLQSPSRPVDCILCPNKGGAFKQTSDGHWAHVVCAIWIPEVCFANTVFLEPIEGIDNIPPARWKLTCYICKQKGLGAAIQCHKVNCYTAFHVTCAQRAGLFMKIEPMRETSLNGTIFTVRKTAYCEAHSPPGAATARRKGDSPRSISETGDEEGLKEGDGEEEEEEEVEEEEQEAQGGVSGSLKGVPKKSKMSLKQKIKKEPEEAGQDTPSTLPMLAVPQIPSYRLNKICSGLSFQRKNQFMQRLHNYWLLKRQARNGVPLIRRLHSHLQSQRNAEQREQDEKTSAVKEELKYWQKLRHDLERARLLIELIRKREKLKREQVKVQQAAMELELMPFNVLLRTTLDLLQEKDPAHIFAEPVNLSEVPDYLEFISKPMDFSTMRRKLESHLYRTLEEFEEDFNLIVTNCMKYNAKDTIFHRAAVRLRDLGGAILRHARRQAENIGYDPERGTHLPESPKLEDFYRFSWEDGRSLLLPFEDRGDLEPLELVWAKCRGYPSYPALIIDPKMPREGLLHNGVPIPVPPLDVLKLGEQKQAEAGEKLFLVLFFDNKRTWQWLPRDKVLPLGVEDTVDKLKMLEGRKTSIRKSVQVAYDRAMIHLSRVRGPHSFVTSSYL

SEQ ID NO: 3019 - protein, 899 aa, Homo sapiens; identical to SEQ ID NO: 2512

SEQ ID NO: 3020 - protein, 178 aa, Homo sapiens
METFPLLLLSLGLVLAEASESTMKIIKEEFTDEEMQYDMAKSGQEKQTIEILMNPILLVKNTSLSMSKDDMSSTLLTFRSLHYNDPKGNSSGNDKECCNDMTVWRKVSEANGSCKWSNNFIRSSTEVMRRVHRAPSCKFVQNPGISCCESLELENTVCQFTTGKQFPRCQYHSVTSLE

SEQ ID NO: 3021 - protein, 727 aa, Homo sapiens
MILSLLFSLGGPLGWGLLGAWAQASSTSLSDLQSSRTPGVWKAEAEDTGKDPVGRNWCPYPMSKLVTLLALCKTEKFLIHSQQPCPQGAPDCQKVKVMYRMAHKPVYQVKQKVLTSLAWRCCPGYTGPNCEHHGPMAVWCWPEPDSLQARLGQLQRNLSELHMTTARREEELQYTLEDMRATLTRHVDEIKELYSESDETFDQISKVERQVEELQVNHTALRELRVILMEKSLIMEENKEEVERQLLELNLTLQHLQGGHADLIKYVKDCNCQKLYLDLDVIREGQRDATRALEETQVSLDERRQLDGSSLQALQNAVDAVSLAVDAHKAEGERARAATSRLRSQVQALDDEVGALKAAAAEARHEVRQLHSAFAALLEDALRHEAVLAALFGEEVLEEMSEQTPGPLPLSYEQIRVALQDAASGLQEQALGWDELAARVTALEQASEPPRPAEHLEPSHDAGREEAATTALAGLARELQSLSNDVKNVGRCCEAEAGAGAASLNASLHGLHNALFATQRSLEQHQRLFHSLFGNFQGLMEANVSLDLGKLQTMLSRKGKKQQKDLEAPRKRDKKEAEPLVDIRVTGPVPGALGAALWEAGSPVAFYASFSEGTAALQTVKFNTTYINIGSSYFPEHGYFRAPERGVYLFAVSVEFGPGPGTGQLVFGGHHRTPVCTTGQGSGSTATVFAMAELQKGERVWFELTQGSITKRSLSGTAFGGFLMFKT

SEQ ID NO: 3022 - protein, 275 aa, Homo sapiens
MGSAPWAPVLLLALGLRGLQAGGEWRRPPAHSPVPAPPLRFASPHSPQGPGPRLPGALLPAASGPLQLRALRQQDLPSALPGVGQVLGPGRGAHLLLHWERGRRVGLRQQLGLRRGAGGRAGGSTGLRGAPLLREVAAVRCAVHAARAHGAADGGAGPGRLRRAAPRATTRPRGPGCPRHRLRWKLWGDAQCLPEDEVSPPGGGGAGGQRARSSCGRPRRLQPVLPGRHGGSLRHGPLGVRHLPAAVRREGPDPALHVRPECLHRAGHDGLPLPH

SEQ ID NO: 3023 - protein, 116 aa, Homo sapiens; identical to SEQ ID NO: 2491

SEQ ID NO: 3024 - protein, 173 aa, Homo sapiens; identical to SEQ ID NO: 2208

SEQ ID NO: 3025 - protein, 493 aa, Homo sapiens
SEAVYLNDSTYDGHTVGGLQYGGLGQLADGVVGLDDFRKSQELRVWPGYDYVGWSNHSFSSGYVEMEFEFDRLRAFQAMQVHCNNMHTLGARLPGGVECRFRRGPAMAWEGEPMRHNLGGNLGDPRARAVSVPLGGRVARFLQCRFLFAGPWLLFSEISFISDVVNNSSPALGGTFPPAPWWPPGPPPTNFSSLELEPRGQQPVAKAEGSPTAILIGCLVAIILLLLLIIALMLWRLHWRRLLSKVLESHPRTRSPGLVGIRPTLLPVSPMALRCCSPIQPTASFWPLTPVPLEARAPPHPPGPNPPTPRGVTGGNTYAVPALPPGAVGDGPPRVDFPRSRLRFKEKLGEGQFGEVHLCEVDSPQDLVSLDFPLNVRKGHPLLVAVKILRPDATKNARNDFLKEVKIMSRLKDPNIIRLLGVCVQDDPLCMITDYMENGDLNQFLSAHQLEDKAAEGAPGDGQAAQGPTISYPMLLHVAAQIASGMRYLATLN

SEQ ID NO: 3026 - protein, 212 aa, Homo sapiens
MGLHLRPYRVGLLPDGLLFLLLLLMLLADPALPAGRHPPVVLGDNNRIPVIGPLKIREQQRSAVSTSWLLPYNYTWSPEKVFVQTPTINYTLRDYRKFFQDIGFEDGWLMRQDTEGLVEATMPPGVQLHCLYGTGVPTPDSFYYESFPDRDPKICFGDGDGTVNLKSALQCQAWQSRQEHQVLLQELPGSEHIEMLANATTLAYLKRVLLGP

SEQ ID NO: 3027 - protein, 217 aa, Homo sapiens
MSDLLLLGLIGGLTLLLLLTLLAFAGYSGLLAGVEVSAGSPPIRNVTVAYKFHMGLYGETGRLFTESCSISPKLRSIAVYYDNPHMVPPDKCRCAVGSILSEGEESPSPELIDLYQKFGFKVFSFPAPSHVVTATFPYTTILSIWLATRRVHPALDTYIKERKLCAYPRLEIYQEDQIHFMCPLARQGDFYVPEMKETEWKWRGLVEAIDTQVDGTG

SEQ ID NO: 3028 - protein, 114 aa, Homo sapiens
MKTFTWTLGVLFFLLVDTGHCRGGQFKIKKINQRRYPRATDGKEEAKKCAYTFLVPEQRITGPICVNTKGQDASTIKDMITRMDLENLKDVLSRQKREIDVLQLVVDVDGNIVN

SEQ ID NO: 3029 - protein, 289 aa, Homo sapiens; identical to SEQ ID NO: 2923

SEQ ID NO: 3030 - protein, 333 aa, Homo sapiens; identical to SEQ ID NO: 2641

SEQ ID NO: 3031 - protein, 176 aa, Homo sapiens
MRLLILTCLVAVALARPKLPLRYPERLQNPSESSEPIPLESREEYMNGMNRRNILREKQTDEIKDTRNESTQNCVVAEPEKMESSISSSSEEQFCRLNEYNQLQLQAAHAQEQIRRMNENSHVQVPFQQLNQLAAYPYAVWYYPQIMQYVPFPPFSDISNPTAHENYEKNNVMLQW

SEQ ID NO: 3032 - protein, 92 aa, Homo sapiens
MKLCVTVLSLLVLVAAFCSLALSAPMGSDPPTACCFSYTARKLPRNFVVDYYETSSLCSQPAVVFQTKRGKQVCADPSESWVQEYVYDLELN

SEQ ID NO: 3033 - protein, 551 aa, Homo sapiens
MTWRMGPRFTMLLAMWLVCGSEPHPHATIRGSHGGRKVPLVSPDSSRPARFLRHTGRSRGIERSTLEEPNLQPLQRRRSVPVLRLARPSRFRDNRMDRREHGHRDPNVVPGPPKPAKEKPPKKKAQDKILSNEYEEKYDLSRPTASQLEDELQVGNVPLKKAKESKKHEKLEKPEKEKKKKMKNENADKLLKSEKQMKKSEKKSKQEKEKSKKKKGGKTEQDGYQKPTNKHFTQSPKKSVADLLGSFEGKRRLLLITAPKAENNMYVQQRDEYLESFCKMATRKISVITIFGPVNNSTMKIDHFQLDNEKPMRVVDDEDLVDQRLISELRKEYGMTYNDFFMVLTDVDLRVKQYYEVPITMKSVFDLIDTFQSRIKDMEKQKKEGIVCKEDKKQSLENFLSRFRWRRRLLVISAPNDEDWAYSQQLSALSGQACNFGSSVVEREDVPAHLVKDIRNYFQVSPEYFSMLLVGKDGNVKSWYPSPMWSMVIVYDLIDSMQLRRQEMAIQQSLGMRCPEDEYAGYGYHSYHQGYQDGYQDDYRHHESYHHGYPY

SEQ ID NO: 3034 - protein, 414 aa, Homo sapiens; identical to SEQ ID NO: 2732

SEQ ID NO: 3035 - protein, 99 aa, Homo sapiens; identical to SEQ ID NO: 2873

SEQ ID NO: 3036 - protein, 303 aa, Homo sapiens; identical to SEQ ID NO: 2022

SEQ ID NO: 3037 - protein, 147 aa, Homo sapiens; identical to SEQ ID NO: 2688

SEQ ID NO: 3038 - protein, 390 aa, Homo sapiens; identical to SEQ ID NO: 2401

SEQ ID NO: 3039 - protein, 98 aa, Homo sapiens
MNKHFLFLFLLYCLIVAVTSLQCITCHLRTRTDRCRRGFGVCTAQKGEACMLLRIYQRNTLQISYMVCQKFCRDMTFDLRNRTYVHTCCNYNYCNFKL

SEQ ID NO: 3040 - protein, 199 aa, Homo sapiens
MAWGGVHTCCFHLCCCCSWPQGAVPEELHKHPGQTLLLQCQYSPKRGPYQPKSWCQQTSPSRCTLLVTSSKPWTAVQKSHYTIWDKPNAGFFNITMIQLTQNDSGFYWCGIYNASENIITVLRNISLVVSPAPTTSPMWTLPWLPTSTAWEPQIQEIKFRAPTDSTLWKSRAPACLGSGGPRFLVLVLCGLLLAKGLML

SEQ ID NO: 3041 - protein, 674 aa, Homo sapiens
MTTDDTEVPAMTLAPGHAALETQTLSAETSSRASTPAGPIPEAETRGAKRISPARETRSFTKTSPNFMVLIATSVETSAASGSPEGAGMTTVQTITGSDPREAIFDTLCTDDSSEEAKTLTMDILTLAHTSTEAKGLSSESSASSDSPHPVITPSRASESSASSDGPHPVITPSRASESSASSDGPHPVITPSRASESSASSDGPHPVITPSRASESSASSDGPHPVITPSRASESSASSDGPHPVITPSRASESSASSDGPHPVITPSRASESSASSDGPHPVITPSRASESSASSDGPHPVITPSRASESSASSDGLHPVITPSRASESSASSDGPHPVITPSRASESSASSDGPHPVITPSWSPGSDVTLLAEALVTVTNIEVINCSITEIETTTSSIPGASDTDLIPTEGVKASSTSDPPALPDSTEAKPHITEVTASAETLSTAGTTESAAPDATVGTPLPTNSATEREVTAPGATTLSGALVTVSRNPLEETSALSVETPSYVKVSGAAPVSIEAGSAVGKTTSFAGSSASSYSPSEAALKNFTPSETPTMDIATKGPFPTSRDPLPSVPPTTTNSSRGTNSTLAKITTSAKTTMKPPTATPTTARTRPTTDVSAGENGGFLLLRLSVASPEDLTDPRVAERLMQQLHRELHAHAPHFQVSLLRVRRG

SEQ ID NO: 3042 - protein, 245 aa, Homo sapiens
MQAAWLLGALVVPQLLGFGHGARGAEREWEGGWGGAQEEEREREALMLKHLQEALGLPAGRGDENPAGTVEGKEDWEMEEDQGEEEEEEATPTPSSGPSPSPTPEDIVTYILGRLAGLDAGLHQLHVRLHALDTRVVELTQGLRQLRNAAGDTRDAVQALQEAQGRAEREHGRLEGCLKGLRLGHKCFLLSRDFEAQPSASPHPLSPDQPNGGTLENCVAQASDDGSWWDHDCQRRLYYVCEFPF

SEQ ID NO: 3043 - protein, 92 aa, Homo sapiens
MIWRSRAGAELFSLMALWEWIALSLHCWVLAVAAVSDQHATSPFDWLLSDKGPFHRSQEYTDFVDRSRQGFSTRYKIYRNMGHISCYLLLWE

SEQ ID NO: 3044 - protein, 58 aa, Homo sapiens
MADMQNLVERLERAVGRLEAVSHTSDMHRGYADSPSKAGAAPYVQAFDSLLAGPVAEY

SEQ ID NO: 3045 - protein, 243 aa, Homo sapiens
MGPEALSSLLLLLLVASGDADMKGHFDPAKCRYALGMQDRTIPDSDISASSSWSDSTAARHSRLESSDGDGAWCPAGSVFPKEEEYLQVDLQRLHLVALVGTQGRHAGGLGKEFSRSYRLRYSRDGRRWMGWKDRWGQEVISGNEDPEGVVLKDLGPPMVARLVRFYPRADRVMSVCLRVELYGCLWRDCSMGVWASWQMVWWGWMTLGRVRSCGSGQAMTMWDGATTASPVAMWRWSLSLTG

SEQ ID NO: 3046 - protein, 844 aa, Homo sapiens; identical to SEQ ID NO: 2289

SEQ ID NO: 3047 - protein, 306 aa, Homo sapiens
RRTCAGPGRAGGARSASWMSRLRALLGLGLLVAGSRVPRIKSQTIACRSGPTWWGPQRLNSGGRWDSEVMASTVVKYLSQEEAQAVDQELFNEYQFSVDQLMELAGLSCATAIAKAYPPTSMSRSPPTVLVICGPGNNGGDGLVCARHLKLFGYEPTIYYPKRPNKPLFTALVTQCQKMDIPFLGEMPAEPMTIDELYELVVDAIFGFSFKGDVREPFHSILSVLKGLTVPIASIDIPSGWDVEKGNAGGIQPDLLISLTAPKKSATQFTGRYHYLGGRFVPPALEKKYQLNLPPYPDTECVYRLQ

SEQ ID NO: 3048 - protein, 378 aa, Homo sapiens; identical to SEQ ID NO: 2828
  VARIANT 1: note = MOD_RES - Any amino acid

SEQ ID NO: 3049 - protein, 253 aa, Homo sapiens
MAPWSHPSAQLQPVGGDAVSPALMVLLCLGNLSKATLWAEPGSVISRGNSVTIRCQGTLEAQEYRLVKEGSPEPWDTQNPLEPKNKARFSIPSMTEHHAGRYRCYYYSPAGWSEPSDPLELVVTGFYNKPTLSALPSPVVTSGENVTLQCGSRLRFDRFILTEEGDHKLSWTLDSQLTPSGQFQALFPVGPVTPSHRWMLRCYGSRRHILQVWSEPSDLLEIPVSGEEATVFSSTIQGSQTGCGELYRQGSPC

SEQ ID NO: 3050 - protein, 95 aa, Homo sapiens
MRKPRRKSRQNAEGRRSPSPYSLKCSPTRETLTYAQAQRIVEVDIDGRLHRISIYDPLKIITEDELTAQDITECNSNKENSEQPQFPGKSKKPSS

SEQ ID NO: 3051 - protein, 436 aa, Homo sapiens
MKFQGPLACLLLALCLGSGEAGPLQSGEESTGTNIGEALGHGLGDALSEGVGKAIGKEAGGAAGSKVSEALGQGTREAVGTGVRQVPGFGVADALGNRVGEAAHALGNTGHEIGRQAEDVIRHGADAVRGSWQGVPGHNGAWETSGGHGIFGSQGGLGGQGQGNPGGLGTPWVHGYPGNSAGSFGMNPQGAPWGQGGNGGPPNFGTNTQGAVAQPGYGSVRASNQNEGCTNPPPSGSGGGSSNSGGGSGSQSGSSGSGSNGDNNNGSSSGGSSSGSSSGGSSGGSSGGSSGNSGGSRGDSGSESSWGSSTGSSSGNHGGSGGGNGHKPGCEKPGNEARGSGESGIQGFRGQGVSSNMREISKEGNRLLGGSGDNYRGQGSSWGSGGGDAVGGVNTVNSETSPGMFNFDTFWKNFKSKLGFINWDAINKDQRSSRIP

SEQ ID NO: 3052 - protein, 79 aa, Homo sapiens
MPACRLGPLAAALLLSLLLFGFTLVSGTGAEKTGVCPELQADQNCTQECVSDSECADNLKCCSAGCATFCSLPNGQLAE

SEQ ID NO: 3053 - protein, 709 aa, Homo sapiens
MGCLWGLALPLFFFCWEVGVSGSSAGPSTRRADTAMTTDDTEVPAMTLAPGHAALETQTLSAETSSRASTPAGPIPEAETRGAKRISPARETRSFTKTSPNFMVLIATSVETSAASGSPEGAGMTTVQTITGSDPREAIFDTLCTDDSSEEAKTLTMDILTLAHTSTEAKGLSSESSASSDSPHPVITPSRASESSASSDGPHPVITPSRASESSASSDGPHPVITPSRASESSASSDGPHPVITPSRASESSASSDGPHPVITPSRASESSASSDGPHPVITPSRASESSASSDGPHPVITPSRASESSASSDGPHPVITPSRASESSASSDGPHPVITPSRASESSASSDGLHPVITPSRASESSASSDGPHPVITPSRASESSASSDGPHPVITPSWSPGSDVTLLAEALVTVTNIEVINCSITEIETTTSSIPGASDTDLIPTEGVKASSTSDPPALPDSTEAKPHITEVTASAETLSTAGTTESAAPDATVGTPLPTNSATEREVTAPGATTLSGALVTVSRNPLEETSALSVETPSYVKVSGAAPVSIEAGSAVGKTTSFAGSSASSYSPSEAALKNFTPSETPTMDIATKGPFPTSRDPLPSVPPTTTNSSRGTNSTLAKITTSAKTTMKPPTATPTTARTRPTTDVSAGENGGFLLLRLSVASPEDLTDPRVAERLMQQLHRELHAHAPHFQVSLLRVRRG

SEQ ID NO: 3054 - protein, 688 aa, Homo sapiens [sequence omitted]

SEQ ID NO: 3055 - protein, 418 aa, Homo sapiens
NNLNVGSDTTSETSFSLSKEAPREHLDHQAAHQPFPRPRFRQETGHPSLQRDFPRSFLLDLPNFPDLSKADINGQNPNIQVTIEVVDGPDSEADKDQHPENKPSWSVPSPDWRAWWQRSLSLARANSGDQDYKYDSTSDDSNFLNPPRGWDHTAPGHRTFETKDQPEYDSTDGEGDWSLWSVCSVTCGNGNQKRTRSCGYACTATESRTCDRPNCPGIEDTFRTAATEVSLLAGSEEFNATKLFEVDTDSCERWMSCKSEFLKKYMHKVMNDLPSCPCSYPTEVAYSTADIFDRIKRKDFRWKDASGPKEKLEIYKPTARYCIRSMLSLESTTLAAQHCCYGDNMQLITRGKGAGTPNLISTEFSAELHYKVDVLPWIICKGDWSRYNEARPPNNGQKCTESPSDEDYIKQFQEAREY

SEQ ID NO: 3056 - protein, 230 aa, Homo sapiens; identical to SEQ ID NO: 2328

SEQ ID NO: 3057 - protein, 63 aa, Homo sapiens; identical to SEQ ID NO: 2934

SEQ ID NO: 3058 - protein, 337 aa, Homo sapiens
MLSLGAHSVTKTQILQGLGFNLTHTPESAIHQGFQHLVHSLTVPSKDLTLKMGSALFVKKELQLQANFLGNVKRLYEAEVFSTDFSNPSIAQARINSHVKKKTQGKVVDIIQGLDLLTAMVLVNHIFFKAKWEKPFHPEYTRKNFPFLVGEQVTVHVPMMHQKEQFAFGVDTELNCFVLQMDYKGDAVAFFVLPSKGKMRQLEQALSARTLRKWSHSLQKRWIEVFIPRFSISASYNLETILPKMGIQNVFDKNADFSGIAKRDSLQVSKATHKAVLDVSEEGTEATAATTTKFIVRSKDGPSYFTVSFNRTFLMMITNKATDGILFLGKVENPTKS

SEQ ID NO: 3059 - protein, 111 aa, Homo sapiens
MFFTISRKNMSQKLSLLLLVFGLIWGLMLLHYTFQQPRHQSSVKLREQILDLSKRYVKALAEENKNTVDVENGASMAGYADLKRTIAVLLDDILQRLVKLENKVDYIVVNG

SEQ ID NO: 3060 - protein, 165 aa, Homo sapiens; identical to SEQ ID NO: 2045

SEQ ID NO: 3061 - protein, 232 aa, Homo sapiens
MVLLLVILIPVLVSSAGTSAHYEMLGTCRMVCDPYGGTKAPSTAATPDRGLMQSLPTFIQGPPMGPPGEKGEPGRQGLPGPPGAPGLNAAGAISAATYSTVPKIAFYAGLKRQHEGYEVLKFDDVVTNLGNHYDPTTGKFTCSIPGIYFFTYHVLMRGGDGTSMWADLCKNNQVRASAIAQDADQNYDYASNSVVLHLEPGDEVYIKLDGGKAHGGNNNKYSTFSGFIIYAD

SEQ ID NO: 3062 - protein, 166 aa, Homo sapiens; identical to SEQ ID NO: 2963

SEQ ID NO: 3063 - protein, 208 aa, Homo sapiens
MIIKHFFGTVLVLLASTTIFSLDLKLIIFQQRQVNQESLKLLNKLQTLSIQQCLPHRKNFLLPQKSLSPQQYQKGHTLAILHEMLQQIFSLFRANISLDGWEENHTEKFLIQLHQQLEYLEALMGLEAEKLSGTLGSDNLRLQVKMYFRRIHDYLENQDYSTCAWAIVQVEISRCLFFVFSLTEKLSKQGRPLNDMKQELTTEFRSPR

SEQ ID NO: 3064 - protein, 746 aa, Homo sapiens
MPFRHKPGSVFSVEGENLDLAMSKEEVVAMIGDGPCVVKTLTRHHLYCEPPVEQPLPRHHALREAPDSLPEFTVQMGNLRFSLGHVQYDGESPGAFPVAAQVGLGVGTSLLALGVIIIVLMYRRKSKQALRDYKKVQIQLENLESSVRDRCKKEFTDLMTEMTDLTSDLLGSGIPFLDYKVYAERIFFPGHRESPLHRDLGVPESRRPTVEQGLGQLSNLLNSKLFLTKFIHTLESQRTFSARDRAYVASLLTVALHGKLEYFTDILRTLLSDLVAQYVAKNPKLMLRRTETVVEKLLTNWMSICLYTFVRDSVGEPLYMLFRGIKHQVDKGPVDSVTGKAKYTLNDNRLLREDVEYRPLTLNALLAVGPGAGEAQGVPVKVLDCDTISQAKEKMLDQLYKGVPLTQRPDPRTLDVEWRSGVAGHLILSDEDVTSEVQGLWRRLNTLQHYKVPDGATVALVPCLTKHVLRENQDYVPGERTPMLEDVDEGGIRPWHLVKPSDEPEPPRPRRGSLRGGERERAKAIPEIYLTRLLSMKGTLQKFVDDLFQVILSTSRPVPLAVKYFFDLLDEQAQQHGISDQDTIHIWKTNSLPLRFWINIIKNPQFVFDVQTSDNMDAVLLVIAQTFMDACTLADHKLGRDSPINKLLYARDIPRYKRMVERYYADIRQTVPASDQEMNSVLAELSWNYSGDLGARVALHELYKYINKYYDQIITALEEDGTAQKMQLGYRLQQIAAAVENKVTDL

SEQ ID NO: 3065 - protein, 200 aa, Homo sapiens; identical to SEQ ID NO: 2236

SEQ ID NO: 3066 - protein, 37 aa, Homo sapiens
MGWLTRIVCLFWGVLLTARANYQNGKNNVPRLKLSYK

SEQ ID NO: 3067 - protein, 174 aa, Homo sapiens
MRLLAFLSLLALVLQETGTASLPRKERKRREEQMPREGDSFEVLPLRNDVLNPDNYGEVIDLSNYEELTDYGDQLPEVKVTSLAPATSISPAKSTTAPGTPSSNPTMTRPTTAGLLLSSQPNHEDIPPLPRRTAYLYARFNRISRIRAEDFKGLTKLKRIDLSNNLISSIDNDA

SEQ ID NO: 3068 - protein, 218 aa, Homo sapiens; identical to SEQ ID NO: 2537

SEQ ID NO: 3069 - protein, 844 aa, Homo sapiens; identical to SEQ ID NO: 2289

SEQ ID NO: 3070 - protein, 668 aa, Homo sapiens
MDLVLKRCLLHLAVIGALLAVGATKVPRNQDWLGVSRQLRTKAWNRQLYPEWTEAQRLDCWRGGQVSLKVSNDGPTLIGANASFSIALNFPGSQKVLPDGQVIWVNNTIINGSQVWGGQPVYPQETDDACIFPDGGPCPSGSWSQKRSFVYVWKTWGQYWQVLGGPVSGLSIGTGRAMLGTHTMEVTVYHRRGSRSYVPLAHSSSAFTITDQVPFSVSVSQLRALDGGNKHFLRNQPLTFALQLHDPSGYLAEADLSYTWDFGDSSGTLISRALVVTHTYLEPGPVTAQVVLQAAIPLTSCGSSPVPGTTDGHRPTAEAPNTTAGQVPTTEVVGTTPGQAPTAEPSGTTSVQVPTTEVISTAPVQMPTAESTGMTPEKVPVSEVMGTTLAEMSTPEATGMTPAEVSIVVLSGTTAAQVTTTEWVETTARELPIPEPEGPDASSIMSTESITGSLGPLLDGTATLRLVKRQVPLDCVLYRYGSFSVTLDIVQGIESAEILQAVPSGEGDAFELTVSCQGGLPKEACMEISSPGCQPPAQRLCQPVLPSPACQLVLHQILKGGSGTYCLNVSLADTNSLAVVSTQLIMPVPGILLTGQEAGLGQVPLIVGILLVLMAVVLASLIYRRRLMKQDFSVPQLPHSSSHWLRLPRIFCSCPIGENSPLLSGQQV

SEQ ID NO: 3071 - protein, 174 aa, Homo sapiens
MADMQNLVERLERAVGRLEAVSHTSDMHRGYADSPSKAGAAPYVQAFDSLLAGPVAEYLKISKEIGGDVQKHAEMVHTGLKLERALLVTASQCQQPAENKLSDLLAPISEQIKEVITFREKNRGSKLFNHLSAVSESIQALGWVAMAPKPGPYVKEMNDAAMFYTNRVLKEYKD

SEQ ID NO: 3072 - protein, 455 aa, Homo sapiens
MLHPETSPGRGHLLAVLLALLGTAWAEVWPPQLQEQAPMAGALNRKESFLLLSLHNRLRSWVQPPAADMRRLDWSDSLAQLAQARAALCGTPTPSLASGLWRTLQVGWNMQLLPAGLVSFVEVVSLWFAEGQRYSHAAGECARNATCTHYTQLVWATSSQLGCGRHLCSAGQAAIEAFVCAYSPRGNWEVNGKTIVPYKKGAWCSLCTASVSGCFKAWDHAGGLCEVPRNPCRMSCQNHGRLNISTCHCHCPPGYTGRYCQVRCSLQCVHGRFREEECSCVCDIGYGGAQCATKVHFPFHTCDLRIDGDCFMVSSEADTYYRARMKCQRKGGVLAQIKSQKVQDILAFYLGRLETTNEVIDSDFETRNFWIGLTYKTAKDSFRWATGEHQAFTSFAFGQPDNHGLVWLSAAMGFGNCVELQASAAFNWNDQRCKTRNRYICQFAQEHISRWGPGS

SEQ ID NO: 3073 - protein, 98 aa, Homo sapiens
MVLAMLGALHPRAGLSLFLHLILAVALLRSQPLRSQRSVPEAFSAPLELSQPLSGLVDDYGILPKHPRPRGPRPLLSRAQQRKRDGPDLAEYYYDAHL

SEQ ID NO: 3074 - protein, 913 aa, Homo sapiens; identical to SEQ ID NO: 2128

SEQ ID NO: 3075 - protein, 225 aa, Homo sapiens; identical to SEQ ID NO: 2797
  VARIANT 1: note = MOD_RES - Any amino acid

SEQ ID NO: 3076 - protein, 134 aa, Homo sapiens
MPRCRWLSLILLTIPLALVARKDPKKNETGVLRKLKPVNASNANVKQCLWFAMQEYNKESEDKYVFLVVKTLQAQLQVTNLLEYLIDVEIARSDCRKPLSTNEICAIQENSKLKRKLSCSFLVGALPWNGEFTV

SEQ ID NO: 3077 - protein, 393 aa, Homo sapiens; identical to SEQ ID NO: 2122

SEQ ID NO: 3078 - protein, 225 aa, Homo sapiens; identical to SEQ ID NO: 2797
  MOD_RES 1: note = Any amino acid

SEQ ID NO: 3079 - protein, 469 aa, Homo sapiens
MMRLGGRLVLNTKEELANERLMTLKIAEMKEAMRTLIFPPSMHFFQAKHLIERSQVFNILRMMPKGAALHLHDIGIVTMDWLVRNVTYRPHCHICFTPRGIMQFRFAHPTPRPSEKCSKWILLEDYRKRVQNVTEFDDSLLRNFTLVTQHPEVIYTNQNVVWSKFETIFFTISGLIHYAPVFRDYVFRSMQEFYEDNVLYMEIRARLLPVYELSGEHHDEEWSVKTYQEVAQKFVETHPEFIGIKIIYSDHRSKDVAVIAESIRMAMGLRIKFPTVVAGFDLVGHEDTGHSLHDYKEALMIPAKDGVKLPYFFHAGETDWQGTSIDRNILDALMLNTTRIGHGFALSKHPAVRTYSWKKDIPIEVCPISNQVLKLVSDLRNHPVATLMATGHPMVISSDDPAMFGAKGLSYDFYEVFMGIGGMKADLRTLKQLAMNSIKYSTLLESEKNTFMEIWKKRWDKFIADVATK

SEQ ID NO: 3080 - protein, 378 aa, Homo sapiens; identical to SEQ ID NO: 2828
  VARIANT 1: note = MOD_RES - Any amino acid

SEQ ID NO: 3081 - protein, 225 aa, Homo sapiens; identical to SEQ ID NO: 2797
  VARIANT 1: note = MOD_RES - Any amino acid

SEQ ID NO: 3082 - protein, 281 aa, Homo sapiens; identical to SEQ ID NO: 2231

SEQ ID NO: 3083 - protein, 369 aa, Homo sapiens
MKFQGPLACLLLALCLGSGEAGPLQSGEESTGTNIGEALGHGLGDALSEGVGKAIGKEAGGAAGSKVSEALGQGTREAVGTGVRQVPGFGVADALGNRVGEAAHALGNTGHEIGRQAEDVIRHGADAVRGSWQGVPGHNGAWETSGGHGIFGSQGGLGGQGQGNPGGLGTPWVHGYPGNSAGSFGMNPQGAPWGQGGNGGPPNFGTNTQGAVAQPGYGSVRASNQNEGCTNPPPSGSGGGSSNSGGGSGSQSGSSGSGSNGDNNNGSSSGGSSSGSSSGGSSGGSSGGSSGNSGGSRGDSGSESSWGSSTGSSSGNHGGSGGGNGHKPGNSETSPGMFNFDTFWKNFKSKLGFINWDAINKDQRSSRIP

SEQ ID NO: 3084 - protein, 139 aa, Homo sapiens; identical to SEQ ID NO: 2817

SEQ ID NO: 3085 - protein, 171 aa, Homo sapiens
MRHNLGGNLGDPRARAVSVPLGGRVARFLQCRFLFAGPWLLFSEISFISDVVNNSSPALGGTFPPAPWWPPGPPPTNFSSLELEPRGQQPVAKAEGSPTAILIGCLVAIILLLLLIIALMLWRLHWRRLLSKVLESHPRTRSPGLVGIRPTPLPVSPMALVHLCEVDSPQD

SEQ ID NO: 3086 - protein, 63 aa, Homo sapiens; identical to SEQ ID NO: 2934

SEQ ID NO: 3087 - protein, 378 aa, Homo sapiens; identical to SEQ ID NO: 2828
  VARIANT 1: note = MOD_RES - Any amino acid

SEQ ID NO: 3088 - protein, 844 aa, Homo sapiens; identical to SEQ ID NO: 2289

SEQ ID NO: 3089 - protein, 112 aa, Homo sapiens
MLTAALAPGAANSPTTNPVILIVDKVLETQDLNGDGLMTPAELINFPGVALRPYPPYIGVGPNSNMCSRSDLPEDSNTLYPGSHLWLRHALNSKGNLDARLDGGEKAMQPQW

SEQ ID NO: 3090 - protein, 891 aa, Homo sapiens; identical to SEQ ID NO: 2482

SEQ ID NO: 3091 - protein, 913 aa, Homo sapiens; identical to SEQ ID NO: 2128

SEQ ID NO: 3092 - protein, 129 aa, Homo sapiens; identical to SEQ ID NO: 2490

SEQ ID NO: 3093 - protein, 281 aa, Homo sapiens; identical to SEQ ID NO: 2231

SEQ ID NO: 3094 - protein, 147 aa, Homo sapiens; identical to SEQ ID NO: 2688

SEQ ID NO: 3095 - protein, 876 aa, Homo sapiens; identical to SEQ ID NO: 1912

SEQ ID NO: 3096 - protein, 582 aa, Homo sapiens
MDFLLALVLVSSLYLQAAAEFDGRWPRQIVSSIGLCRYGGRIDCCWGWARQSWGQCQPFYVLRQRIARIRCQLKAVCQPRCKHGECIGPNKCKCHPGYAGKTCNQDLNECGLKPRPCKHRCMNTYGSYKCYCLNGYMLMPDGSCSSALTCSMANCQYGCDVVKGQIRCQCPSPGLQLAPDGRTCVDVDECATGRASCPRFRQCVNTFGSYICKCHKGFDLMYIGGKYQCHDIDECSLGQYQCSSFARCYNIRGSYKCKCKEGYQGDGLTCVYIPKVMIEPSGPIHVPKGNGTILKGDTGNNNWIPDVGSTWWPPKTPYIPPIITNRPTSKPTTRPTPKPTPIPTPPPPPPLPTELRTPLPPTTPERPTTGLTTIAPAASTPPGGITVDNRVQTDPQKPRGDVFIPRQPSNDLFEIFEIERGVSADDEAKDDPGVLVHSCNFDHGLCGWIREKDNDLHWEPIRDPAGGQYLTVSAAKAPGGKAARLVLPLGRLMHSGDLCLSFRHKVTGLHSGTLQVFVRKHGAHGAALWGRNGGHGWRQTQITLRGADIKSVVFKGEKRRGHTGEIGLDDVSLKKGHCSEER

SEQ ID NO: 3097 - protein, 533 aa, Homo sapiens
MGSSRLAALLLPLLLIVIDLSDSAGIGFRHLPHWNTRCPLASHTDDSFTGSSAYIPCRTWWALFSTKPWCVRVWHCSRCLCQHLLSGGSGLQRGLFHLLVQKSKKSSTFKFYRRHKMPAPAQRKLLPRRHLSEKSHHISIPSPDISHKGLRSKRTQPSDPETWESLPRLDSQRHGGPEFSFDLLPEARAIRVTISSGPEVSVRLCHQWALECEELSSPYDVQKIVSGGHTVELPYEFLLPCLCIEASYLQEDTVRRKKCPFQSWPEAYGSDFWKSVHFTDYSQHTQMVMALTLRCPLKLEAALCQRHDWHTLCKDLPNATARESDGWYVLEKVDLHPQLCFKFSFGNSSHVECPHQTGSLTSWNVSMDTQAQQLILHFSSRMHATFSAAWSLPGLGQDTLVPPVYTVSQARGSSPVSLDLIIPFLRPGCCVLLHASLSSPGGEDAWLIGVGGSVPSGVAVRCPVCLEAPLVSGCLLQTPGALDPGTAGPPHPTGCCSGPHLPAPTVRPGPSAASAPPARGGLGGAAAPGGSAG

SEQ ID NO: 3098 - protein, 430 aa, Homo sapiens
MGVSKLDILYRRLLLTKLFIRGWGRPEDLKRLFEFRKMIGNRERCQNLVSSDYPVHIDKIEEQSDCKILDGHFVSPMAHYVPDIMPIESVIARFQFIVPKEWNSKYRPVCIHLAGTGDHHYWRRRTLMARPMIKEARMASLLLENPYYGCRKPKDQVRSSLKNVSDLFVMGGALVLESAALLHWLEREGYGPLGMTGISMGGHMASLAVSNWPKPMPLIPCLSWSTASGVFTTTDSFKMGQEFVKHFTSSADKLTNLNLVSRTLNLDISNQVVSQKPADCHNSSKTSVSATSEGLLLQDTSKMKRFNQTLSTNKSGYTSRNPQSYHLLSKEQSRNSLRKESLIFMKGVMDECTHVANFSVPVDPSLIIVVQAKEDAYIPRTGVRSLQEIWPGCEIRYLEGGHISAYLFKQGLFRQAIYDAFDRFLHKYAN

SEQ ID NO: 3099 - protein, 876 aa, Homo sapiens; identical to SEQ ID NO: 1912

SEQ ID NO: 3100 - protein, 78 aa, Homo sapiens; identical to SEQ ID NO: 2320

SEQ ID NO: 3101 - protein, 876 aa, Homo sapiens; identical to SEQ ID NO: 1912

SEQ ID NO: 3102 - protein, 418 aa, Homo sapiens; identical to SEQ ID NO: 2199

SEQ ID NO: 3103 - protein, 129 aa, Homo sapiens
MRKPRRKSRQNAEGRRSPSPYSLKCSPTRETLTYAQAQRIVEVDIDGRLHRISIYDPLKIITEDELTAQDITECNSNKENSEQPQFPGKSKKPSSKGKKKESCSKHASGTSFHLPQPSFRMVDSGIQPE

SEQ ID NO: 3104 - protein, 104 aa, Homo sapiens
MRVVTIVILLCFCKAAELRKASPGSVRSRVNHGRAGGGRRGSNPVKRYAPGLPCDVYTYLHEKYLDCQERKLVYVLPGWPQDLLHMLLARNKIRTLKNNMFSKF

SEQ ID NO: 3105 - protein, 212 aa, Homo sapiens; identical to SEQ ID NO: 2980

SEQ ID NO: 3106 - protein, 334 aa, Homo sapiens
MLALAKILLISTLFYSLLSGSHGKENQDINTTQNIAEVFKTMENKPISLESEANLNSDKENITTSNLKASHSPPLNLPNNSHGITDFSSNSSAEHSLGSLKPTSTISTSPPLIHSFVSKVPWNAPIADEDLLPISAHPNATPALSSENFTWSLVNDTVKTPDNSSITVSILSSEPTSPSVTPLIVEPSGWLTTNSDSFTGFTPYQEKTTLQPTLKFTNNSKLFPNTSDPQKENRNTGIVFGAILGAILGVSLLTLVGYLLCGKRKTDSFSHRRLYDDRNEPVLRLDNAPEPYDVSFGNSSYYNPTLNDSAMPESEENARDGIPMDDIPPLRTSV

SEQ ID NO: 3107 - protein, 328 aa, Homo sapiens
MGPAGCAFTLLLLLGISVCGQPVYSSRVVGGQDAAAGRWPWQVSLHFDHNFICGGSLVSERLILTAAHCIQPTWTTFSYTVWLGSITVGDSRKRVKYYVSKIVIHPKYQDTTADVALLKLSSQVTFTSAILPICLPSVTKQLAIPPFCWVTGWGKVKESSDRDYHSALQEAEVPIIDRQACEQLYNPIGIFLPALEPVIKEDKICAGDTQNMKDSCKGDSGGPLSCHIDGVWIQTGVVSWGLECGKSLPGVYTNVIYYQKWINATISRANNLDFSDFLFPIVLLSLALLRPSCAFGPNTIHRVGTVAEAVACIQGWEENAWRFSPRGR

SEQ ID NO: 3108 - protein, 150 aa, Homo sapiens; identical to SEQ ID NO: 2126

SEQ ID NO: 3109 - protein, 77 aa, Homo sapiens
MRVAGAAKLVVAVAVFLLTFYVISQVFEIKMDASLGNLFARSALDTAARSTKPPRYKCGISKACPEKHFAFKMASGA

SEQ ID NO: 3110 - protein, 380 aa, Homo sapiens; identical to SEQ ID NO: 2413

SEQ ID NO: 3111 - protein, 185 aa, Homo sapiens
MPGWLTLPTLCRFLLWAFTIFHKAQGDPASHPGPHYLLPPIHEVIHSHRGATATLPCVLGTTPPSYKVRWSKVEPGELRETLILITNGLHARGYGPLGGRARMRRGHRLDASLVIAGVRLEDEGRYRCELINGIEDESVALTLSLEGVVFPYQPSRGRYQFNYYEAKQACEEQDGRLATYSQLYQ

SEQ ID NO: 3112 - protein, 124 aa, Homo sapiens
MLMLFVFGVLLHEVSLSGQNEAPPNTHSIPGEPLYNYASIRLPEEHIPFFLHNNRHIATVCRKDSLCPYKKHLEKLKYCWGYEKSCKPEFRFGYPVCSYVDMGWTDTLESAEDIFWKQADFGYA

SEQ ID NO: 3113 - protein, 1952 aa, Homo sapiens; identical to SEQ ID NO: 2311

SEQ ID NO: 3114 - protein, 203 aa, Homo sapiens
MRTVVLTMKASVIEMFLVLLVTGVHSNKETAKKIKRPKFTVPQINCDVKAGKIIDPEFIVKCPAGCQDPKYHVYGTDVYASYSSVCGAAVHSGVLDNSGGKILVRKVAGQSGYKGSYSNGVQSLSLPRWRESFIVLESKPKKGVTYPSALTYSSSKSPAAQAGKCSRVIESKPSESMNTRRVLGDSGEINILTGQAPLALAIF

SEQ ID NO: 3115 - protein, 836 aa, Homo sapiens
METQELRGALALLLLCFFTSASQDLQVIDLLTVGESRQMVAVAEKIRTALLTAGDIYLLSTFRLPPKQGGVLFGLYSRQDNTRWLEASVVGKINKVTNALHSILGEQTKALVTQLTLFNQILVELRDDIRDQVKEMSLIRNTIMECQVCGFHEQRSHCSPNPCFRGVDCMEVYEYPGYRCGPCPPGLQGNGTHCSDINECAHADPCFPGSSCINTMPGFHCEACPRGYKGTQVSGVGIDYARASKQVCNDIDECNDGNNGGCDPNSICTNTVGSFKCGPCRLGFLGNQSQGCLPARTCHSPAHSPCHIHAHCLFERNGAVSCQCNVGWAGNGNVCGTDTDIDGYPDQALPCMDNNKHCKQDNCLLTPNSGQEDADNDGVGDQCDDDADGDGIKNVEDNCRLFPNKDQQNSDTDSFGDACDNCPNVPNNDQKDTDGNGEGDACDNDVDGDGIPNGLDNCPKVPNPLQTDRDEDGVGDACDSCPEMSNPTQTDADSDLVGDVCDTNEDSDGDGHQDTKDNCPQLPNSSQLDSDNDGLGDECDGDDDNDGIPDYVPPGPDNCRLVPNPNQKDSDGNGVGDVCEDDFDNDAVVDPLDVCPESAEVTLTDFRAYQTVVLDPEGDAQIDPNWVVLNQGMEIVQTMNSDPGLAVGYTAFNGVDFEGTFHVNTVTDDDYAGFLFSYQDSGRFYVVMWKQTEQTYWQATPFRAVAQPGLQLKAVTSVSGPGEHLRNALWHTGHTPDQVRLLWTDPRNVGWRDKTSYRWQLLHRPQVGYIRVKLYEGPQLVADSGVIIDTSMRGGRLGVFCFSQENIIWSNLQYRCNDTVPEDFEPFRRQLLQGRV

SEQ ID NO: 3116 - protein, 436 aa, Homo sapiens
MWRCPLGLLLLLPLAGHLALGAQQGRGRRELAPGLHLRGIRDAGGRYCQEQDLCCRGRADDCALPYLGAICYCDLFCNRTVSDCCPDFWDFCLGVPPPFPPIQGCMHGGRIYPVLGTYWDNCNRCWQAGNHSAFWGMTLDEGIRYRLGTIRPSSSVMNMHEIYTVLNPGEVLPTAFEASEKWPNLIHEPLDQGNCAGSWAFSTAAVASDRVSIHSLGHMTPVLSPQNLLSCDTHQQQGCRGGRLDGAWWFLRRRGVVSDHCYPFSGRERDEAGPAPPCMMHSRAMGRGKRQATAHCPNSYVNNNDIYQVTPVYRLGSNDKEIMKELMENGPVQALMEVHEDFFLYKGGIYSHTPVSLGRPERYRRHGTHSVKITGWGEETLPDGRTLKYWTAANSWGPAWGERGHFRIVRGVNECDIESFVLGVWGRVGMEDMGHH

SEQ ID NO: 3117 - protein, 313 aa, Homo sapiens; identical to SEQ ID NO: 2235

SEQ ID NO: 3118 - protein, 70 aa, Homo sapiens
MVAPAARVFLRAVRAALTSTVPDLLCLLARGSPRGLASGRLPLAVHSAQHGPGSGAPWLRIARRALSQRI

SEQ ID NO: 3119 - protein, 213 aa, Homo sapiens
MAQLFLPLLAALVLAQAPAALADVLEGDSSEDRAFRVRIAGDAPLQGVLGGALTIPCHVHYLRPPPSRRAVLGSPRVKWTFLSRGREAEVLVARGVRVKVNEAYRFRVALPAYPASLTDVSLALSELRPNDSGIYRCEVQHGIDDSSDAVEVKVKGVVFLYREGSARYAFSFSGAQEACARIGAHIATPEQLYAAYLGGYEQCDAGWLSDQTV

SEQ ID NO: 3120 - protein, 78 aa, Homo sapiens; identical to SEQ ID NO: 2320

SEQ ID NO: 3121 - protein, 216 aa, Homo sapiens
MSDLLLLGLIGGLTLLLLLTLLAFAGYSGLLAGVEVSAGSPPIRNVTVAYKFHMGLYGETGRLFTESCSISPKLRSIAVYYDNPHMVPPDKCRCAVGSILSEGEESPSPELIDLYQKFGFKVFSFPAPSHVVTATFPYTTILSIWLATRRVHPALDTYIKERKLCAYPRLEIYQEDQIHFMCPLARQGDFYVPEMKETEWKWRGLVEAIDTQVDGT

SEQ ID NO: 3122 - protein, 150 aa, Homo sapiens; identical to SEQ ID NO: 2126

SEQ ID NO: 3123 - protein, 56 aa, Homo sapiens
MKTGLFFLCLLGTAAAIPTNARLLSDHSKPTAETVAPDNTAIPSLRAEAEENEKET

SEQ ID NO: 3124 - protein, 781 aa, Homo sapiens
MAVAEVSRTCLLTVRVLQAHRLPSKDLVTPSDCYVTLWLPTACSHRLQTRTVKNSSSPVWNQSFHFRIHRQLKNVMELKVFDQDLVTGDDPVLSVLFDAGTLRAGEFRRESFSLSPQGEGRLEVEFRLQSLADRGEWLVSNGVLVARELSCLHVQLEETGDQKSSEHRVQLVVPGSCEGPQEASVGTGTFRFHCPACWEQELSIRLQDAPEEQLKAPLSALPSGQVVRLVFPTSQEPLMRVELKKEAGLRELAVRLGFGPCAEEQAFLSRRKQVVAAALRQALQLDGDLQEDEIPVVAIMATGGGIRAMTSLYGQLAGLKELGLLDCVSYITGASGSTWALANLYEDPEWSQKDLAGPTELLKTQVTKNKLGVLAPSQLQRYRQELAERARLGYPSCFTNLWALINEALLHDEPHDHKLSDQREALSHGQNPLPIYCALNTKGQSLTTFEFGEWCEFSPYEVGFPKYGAFIPSELFGSEFFMGQLMKRLPESRICFLEGIWSNLYAANLQDSLYWASEPSQFWDRWVRNQANLDKEQVPLLKIEEPPSTAGRIAEFFTDLLTWRPLAQATHNFLRGLHFHKDYFQHPHFSTWKATTLDGLPNQLTPSEPHLCLLDVGYLINTSCLPLLQPTRDVDLILSLDYNLHGAFQQLQLLGRFCQEQGIPFPPISPSPEEQLQPRECHTFSDPTCPGAPAVLHFPLVSDSFREYSAPGVRRTPEEAAAGEVNLSSSDSPYHYTKVTYSQEDVDKLLHLTHYNVCNNQEQLLEALRQAVQRRRQRRPH

SEQ ID NO: 3125 - protein, 72 aa, Homo sapiens
MAAATRGCRPWGSLLGLLGLVSAAAAAWDLASLRCTLGAFCECDFRPDLPEGSEELGPREPHCLWPLPLPLR

SEQ ID NO: 3126 - protein, 80 aa, Homo sapiens
MKVFFLFAVLFCLVQTNSGDVPPGIRNTICHMQQGICRLFFCHSGEKKRDICSDPWNRCCVSNTDEEGKEKPEMDGRSGI

SEQ ID NO: 3127 - protein, 286 aa, Homo sapiens
MGPEALSSLLLLLLVASGDADMKGHFDPAKCRYALGMQDRTIPDSDISASSSWSDSTAARHSRLESSDGDGAWCPAGSVFPKEEEYLQVDLQRLHLVALVGTQGRHAGGLGKEFSRSYRLRYSRDGRRWMGWKDRWGQEVISGNEDPEGVVLKDLGPPMVARLVRFYPRADRVMSVCLRVELYGCLWRDGLLSYTAPVGQTMYLSEAVYLNDSTYDGHTVGGLQYGGLGQLADGVVGLDDFRKSQELRVWPGYDYVGWSNHSFSSGYVEMEFEFDRLRAFQAMQVH

SEQ ID NO: 3128 - protein, 285 aa, Homo sapiens
MRGQGRKESLSDSRDLDGSYDQLTGHPPGPTKKALKQRFLKLLPCCGPQALPSVSEIGRVFRFLGDSSLPSALAAPASLRPHRPRLLDPDSVDDEFELSTVCHRPEGLEQLQEQTKFTRKELQVLYRGFKNECPSGIVNEENFKQIYSQFFPQGDSSTYATFLFNAFDTNHDGSVSFEDFVAGLSVILRGTVDDRLNWAFNLYDLNKDGCITKEEMLDIMKSIYDMMGKYTYPALREEAPREHVESFFQKMDRNKDGVVTIEEFIESCQKDENIMRSMQLFDNVI

SEQ ID NO: 3129 - protein, 436 aa, Homo sapiens; identical to SEQ ID NO: 2285

SEQ ID NO: 3130 - protein, 405 aa, Homo sapiens; identical to SEQ ID NO: 1930

SEQ ID NO: 3131 - protein, 99 aa, Homo sapiens
MLALLVLVTVALASAHHGGEHFEGEKVFRVNVEDENHINIIRELASTTQIDFWKPDSVTQIKPHSTVDFRVKAEDTVTVENVLKQNELQYKVLISNLRN

SEQ ID NO: 3132 - protein, 156 aa, Homo sapiens
MLLLLLLAPLFLRPPGAGGAQTPNATSEGCQIIHPPWEGGIRYRGLTRDQVKAINFLPVDYEIEYVCRGEREVVGPKVRKCLANGSWTDMDTPSRCVRICSKSYLTLENGKVFLTGGDLPALDGARVDFRCDPDFHLVGSSRSICSQGQWSTPKPH

SEQ ID NO: 3133 - protein, 82 aa, Homo sapiens
MGRVFLTGEKANSILKRYPRANGFFEEIRQGNIERECKEEFCTFEEAREAFENNEKTGLVLLPRLECSCEHGSLQPQLPVPK

SEQ ID NO: 3134 - protein, 123 aa, Homo sapiens
MQGTPGGGTRPGPSPVDRRTLLVFSFILAAALGQMNFTGDQVLRVLAKDEKQLSLLGDLEGLKPQKVDFWRGPARPSLPVDMRVPFSELKDIKAYLESHGLAYSIMIKDIQVLLDEERQAMAK

SEQ ID NO: 3135 - protein, 279 aa, Homo sapiens
MGRVFLTGEKANSILKRYPRANGFFEEIRQGNIERECKEEFCTFEEAREAFENNEKTITGVILLAVGVWGKLTLGTYISLIAENSTNAPYVLIGTGTTIVVFGLFGCFATCRGSPWMLKLYAMFLSLVFLAELVAGISGFVFRHEIKDTFLRTYTDAMQTYNGNDERSRAVDHVQRSLSCCGVQNYTNWSTSPYFLEHGIPPSCCMNETDCNPQDLHNLTVAATKVNQKGCYDLVTSFMETNMGIIAGVAFGIAFSQLIGMLLACCLSRFITANQYEMV

SEQ ID NO: 3136 - protein, 187 aa, Homo sapiens
MWCASPVAVVAFCAGLLVSHPVLTQGQEAGGRPGADCEVCKEFLNRFYKSLIDRGVNFSLDTIEKELISFCLDTKGKENRLCYYLGATKDAATKILSEVTRPMSVHMPAMKICEKLKKLDSQICELKYEKTLDLASVDLRKMRVAELKQILHSWGEECRACAEKTDYVNLIQELAPKYAATHPKTEL

SEQ ID NO: 3137 - protein, 436 aa, Homo sapiens; identical to SEQ ID NO: 2285

SEQ ID NO: 3138 - protein, 149 aa, Homo sapiens
MGRVFLTGEKANSILKRYPRANGFFEEIRQGNIERECKEEFCTFEEAREAFENNEKTKEFWSTYTKAQQGESNRGSDWFQFYLTFPLIFGLFIILLVIFLIWRCFLRNKTRRQTVTEGHIPFPQHLNIITPPPPPDEVFDSSGLSPGFL

SEQ ID NO: 3139 - protein, 311 aa, Homo sapiens
MLYQTINSLKTKNPKLKILLSIGGYLFGSKGFHPMVDSSTSRLEFINSIILFLRNHNFDGLDVSWIYPDQKENTHFTVLIHELAEAFQKDFTKSTKERLLLTAGVSAGRQMIDNSYQVEKLAKDLDFINLLSFDFHGSWEKPLITGHNSPLSKGWQDRGPSSYYNVEYAVGYWIHKGMPSEKVVMGIPTYGHSFTLASAETTVGAPASGPGAAGPITESSGFLAYYEICQFLKGAKITRLQDQQVPYAVKGNQWVGYDDVKSMETKVQFLKNLNLGGAMIWSIDMDDFTGKSCNQGPYPLVQAVKRSLGSL

SEQ ID NO: 3140 - protein, 206 aa, Homo sapiens
MDTIFLWSLLLLFFGSQASRCSAQKNTEFAVDLYQEVSLSHKDNIIFSPLGITLVLEMVQLGAKGKAQQQIRQTLKQQETSAGEEFFVLKSFFSAISEKKQEFTFNLANALYLQEGFTVKEQYLHGNKEFFQSAIKLVDFQDAKACAEMISTWVERKTDGKIKDMFSGEEFGPLTRLVLVNAIYFKGDWKQKFRKEDTQLINFTKK

SEQ ID NO: 3141 - protein, 405 aa, Homo sapiens; identical to SEQ ID NO: 1930

SEQ ID NO: 3142 - protein, 132 aa, Homo sapiens
MLIFWTITLFLLGAAKGKEVCYEDLGCFSDTEPWGGTAIRPLKILPWSPEKIGTRFLLYTNENPNNFQILLLSDPSTIEASNFQMDRKTRFIIHGFIDKGDESWVTDMCKKLFEVEEVNCICVDWKKGSQAT

SEQ ID NO: 3143 - protein, 201 aa, Homo sapiens; identical to SEQ ID NO: 2486

SEQ ID NO: 3144 - protein, 361 aa, Homo sapiens
MASLGLLLLLLLTALPPLWSSSLPGLDTAESKATIADLILSALERATVFLEQRLPEINLDGMVGVRVLEEQLKSVREKWAQEPLLQPLSLRVGMLGEKLEAAIQRSLHYLKLSDPKYLREFQLTLQPGFWKLPHAWIHTDASLVYPTFGPQDSFSEERSDVCLVQLLGTGTDSSEPCGLSDLCRSLMTKPGCSGYCLSHQLLFFLWARMRGCTQGPLQQSQDYINLFCANMMDLNRRAEAIGYAYPTRDIFMENIMFCGMGGFSDFYKLRWLEAILSWQKQQEGCFGEPDAEDEELSKAIQYQQHFSRRVKRREKQFPDGCSSHNTATAVAALGGFLYILAEYPPANREPHPSTPPPPSSR

SEQ ID NO: 3145 - protein, 53 aa, Homo sapiens
MWTNFFKLRLFCCLLAVLMVVVLVINVTQVEYLDHETVSATFIDSSGQFVSSQ

SEQ ID NO: 3146 - protein, 434 aa, Homo sapiens
MASLGLLLLLLLTALPPLWSSSLPGLDTAESKATIADLILSALERATVFLEQRLPEINLDGMVGVRVLEEQLKSVREKWAQEPLLQPLSLRVGMLGEKLEAAIQRSLHYLKLSDPKYLREFQLTLQPGFWKLPHAWIHTDASLVYPTFGPQDSFSEERSDVCLVQLLGTGTDSSEPCGLSDLCRSLMTKPGCSGYCLSHQLLFFLWARMRGCTQGPLQQSQDYINLFCANMMDLNRRAEAIGYAYPTRDIFMENSVTGHPVFYLPLCDSFLPPKAAPVTELYTDGPVMFCGMGGFSDFYKLRWLEAILSWQKQQEGCFGEPDAEDEELSKAIQYQQHFSRRVKRREKQFPDSRSVAQAGVQWRNLGSLQPLPPGFKQFSCLILPSSWDYRSVPPYLANFYIFLVETGFHHVAHAGLELLISRDPPTSGSQSVGL

SEQ ID NO: 3147 - protein, 436 aa, Homo sapiens; identical to SEQ ID NO: 2285

SEQ ID NO: 3148 - protein, 405 aa, Homo sapiens; identical to SEQ ID NO: 1930

SEQ ID NO: 3149 - protein, 169 aa, Homo sapiens
MLYQTINSLKTKNPKLKILLSIGGYLFGSKGFHPMVDSSTSRLEFINSIILFLRNHNFDGLDVSWIYPDQKENTHFTVLIHELAEAFQKDFTKSTKERLLLTAGVSAGRQMIDNSYQVEKLAKDLDFINLLSFDFHGSWEKPLITGHNSPLSKGWQDRGPSSYYNVEYA

SEQ ID NO: 3150 - protein, 402 aa, Homo sapiens
MASLGLLLLLLLTALPPLWSSSLPGLDTAESKATIADLILSALERATVFLEQRLPEINLDGMVGVRVLEEQLKSVREKWAQEPLLQPLSLRVGMLGEKLEAAIQRSLHYLKLSDPKYLREFQLTLQPGFWKLPHAWIHTDASLVYPTFGPQDSFSEERSDVCLVQLLGTGTDSSEPCGLSDLCRSLMTKPGCSGYCLSHQLLFFLWARMRGCTQGPLQQSQDYINLFCANMMDLNRRAEAIGYAYPTRDIFMENIMFCGMGGFSDFYKLRWLEAILSWQKQQEGCFGEPDAEDEELSKAIQYQQHFSRRVKRREKQFPDSRSVAQAGVQWRNLGSLQPLPPGFKQFSCLILPSSWDYRSVPPYLANFYIFLVETGFHHVAHAGLELLISRDPPTSGSQSVGL

SEQ ID NO: 3151 - protein, 559 aa, Homo sapiens; identical to SEQ ID NO: 1951

SEQ ID NO: 3152 - protein, 133 aa, Homo sapiens [sequence omitted]

SEQ ID NO: 3153 - protein, 201 aa, Homo sapiens; identical to SEQ ID NO: 2486

SEQ ID NO: 3154 - protein, 201 aa, Homo sapiens; identical to SEQ ID NO: 2486

SEQ ID NO: 3155 - protein, 243 aa, Homo sapiens; identical to SEQ ID NO: 3045

SEQ ID NO: 3156 - protein, 85 aa, Homo sapiens
MKIPVLPAVVLLSLLVLHSAQGATLGGPEEESTIENYASRPEAFKADEFLNWHALFESIKRKLPFLNWDAFPKLKGLRSATPDAQ

SEQ ID NO: 3157 - protein, 115 aa, Homo sapiens
MGRVFLTGEKANSILKRYPRANGFFEEIRQGNIERECKEEFCTFEEAREAFENNEKTKEFWSTYTKAQQGESNRGSDWFQFYLTFPLIFGLFIILLVIFLIWRCFLRNKTRRQTV

SEQ ID NO: 3158 - protein, 201 aa, Homo sapiens; identical to SEQ ID NO: 2486

SEQ ID NO: 3159 - protein, 436 aa, Homo sapiens; identical to SEQ ID NO: 2285

SEQ ID NO: 3160 - protein, 201 aa, Homo sapiens
MGATTMDQKSLWAGVVVLLLLQGGSAYKLVCYFTNWSQDRQEPGKFTPENIDPFLCSHLIYSFASIENNKVIIKDKSEVMLYQTINSLKTKNPKLKILLSIGGYLFGSKGFHPMVDSSTSRLEFINSIILFLRNHNFDGLDVSWIYPDQKENTHFTVLIHELAEAFQKDFTKSTKERLLLTAGVSAGRQMIDNSYQVEKLA

SEQ ID NO: 3161 - protein, 24 aa, Homo sapiens
MLVDGPSERPALCFLLLAVAMSFF

SEQ ID NO: 3162 - protein, 83 aa, Homo sapiens
MRPRGLPPLLVVLLGCWASVSAQTDATPAVTTEGLNSTEAALATFGTFPSTRPPGTPRAPGPSSGPRPTPVTDGSHSVTQAGV

SEQ ID NO: 3163 - protein, 417 aa, Homo sapiens; identical to SEQ ID NO: 1973

SEQ ID NO: 3164 - protein, 559 aa, Homo sapiens; identical to SEQ ID NO: 1951

SEQ ID NO: 3165 - protein, 32 aa, Homo sapiens
MQGTPGGGTRPGPSPVDRRTLLVFSFILAAAL

SEQ ID NO: 3166 - protein, 59 aa, Homo sapiens
MLALLVLVTVALASAHHGGEHFEGEKVFRVNVEDENHINIIRELASTTQIDFWKPDSVT

SEQ ID NO: 3167 - protein, 100 aa, Homo sapiens
MRPRGLPPLLVVLLGCWASVSAQTDATPAVTTEGLNSTEAALATFGTFPSTRPPGTPRAPGPSSGPRPTPVTDGGYHVPAPGVHSDPTSRGQPRCCSLCL

SEQ ID NO: 3168 - protein, 77 aa, Homo sapiens
MRSPRMRVCAKSVLLSHWLFLAYVLMVCCKLMSASSQHLRGHAGHHQIKQGTCEVVAVHRCCNKNRIEERSQTVKCS

SEQ ID NO: 3169 - skipped

SEQ ID NO: 3170 - protein, 133 aa, Homo sapiens [sequence omitted]

SEQ ID NO: 3171 - protein, 199 aa, Homo sapiens
MTMRHNWTPDLSPLWVLLLCAHVVTLLVRATPVSQTTTAATASVRSTKDPCPSQPPVFPAAKQCPALEVTWPEVEVPLNGTLSLSCVACSRFPNFSILYWLGNGSFIEHLPGRLWEGSTSRERGSTGTQLCKALVLEQLTPALHSTNFSCVLVDPEQVVQRHVVLAQLWVRSPRRGLQEQEELCFHMWGGKGGLCQSSL

SEQ ID NO: 3172 - protein, 347 aa, Homo sapiens
MGVVQYGDNPATHFNLKTHTNSRDLKTAIEKITQRGGLSNVGRAISFVTKNFFSKANGNRSGAPNVVVVMVDGWPTDKVEEASRLARESGINIFFITIEGAAENEKQYVVEPNFANKAVCRTNGFYSLHVQSWFGLHKTLQPLVKRVCDTDRLACSKTCLNSADIGFVIDGSSSVGTGNFRTVLQFVTNLTKEFEISDTDTRIGAVQYTYEQRLEFGFDKYSSKPDILNAIKRVGYWSGGTSTGAAINFALEQLFKKSKPNKRKLMILITDGRSYDDVRIPAMAAHLKGVITYAIGVAWAAQEELEVIATHPARDHSFFVDEFDNLHQYVPRIIQNICTEFNSQPRN

SEQ ID NO: 3173 - protein, 8 aa, Homo sapiens
MQGTPGGG

SEQ ID NO: 3174 - protein, 122 aa, Homo sapiens
MLYQTINSLKTKNPKLKILLSIGGYLFGSKGFHPMVDSSTSRLEFINSIILFLRNHNFDGLDVSWIYPDQKENTHFTVLIHELAEAFQKDFTKSTKERLLLTAGVSAGRQMIDNSYQVEKLA

SEQ ID NO: 3175 - protein, 102 aa, Homo sapiens
MRVSGVLRLLALIFAIVTTWMFIRSYMSFSMKTIRLPRWLAASPTKEIQVKKYKCGLIKPCPANYFAFKICSGAANVVGPTMCFEDRMIMSPVKNNVGRGLN

SEQ ID NO: 3176 - protein, 219 aa, Homo sapiens; identical to SEQ ID NO: 2252

SEQ ID NO: 3177 - protein, 622 aa, Homo sapiens
MGKSEGPVGMVESAGRAGQKRPGFLEGGLLLLLLLVTAALVALGVLYADRRGKQLPRLASRLCFLQEERTFVKRKPRGIPEAQEVSEVCTTPGCVIAAARILQNMDPTTEPCDDFYQFACGGWLRRHVIPETNSRYSIFDVLRDELEVILKAVLENSTAKATVPQEERHDVIALYHRMGLEELQSQFGLKGFNWTLFIQTVLSSVKIKLLPDEEVVVYGIPYLQNLENIIDTYSARTIQNYLVWRLVLDRIGSLSQRFKDTRVNYRKALFGTMVEEVRWRECVGYVNSNMENAVGSLYVREAFPGDSKSMVRELIDKVRTVFVETLDELGWMDEESKKKAQEKAMSIREQIGHPDYILEEMNRRLDEEYSNLNFSEDLYFENSLQNLKVGAQRSLRKLREKVDPNLWIIGAAVVNAFYSPNRNQIVFPAGILQPPFFSKEQPQALNFGGIGMVIGHEITHGFDDNGRNFDKNGNMMDWWSNFSTQHFREQSECMIYQYGNYSWDLADEQNVNGFNTLGENIADNGGVRQAYKAYLKWMAEGGKDQQLPGLDLTHEQLFFINYAQVWCGSYRPEFAIQSIKTDVHSPLKYRVLGSLQNLAAFADTFHCARGTPMHPKERCRVW

SEQ ID NO: 3178 - protein, 55 aa, Homo sapiens
MGPEALSSLLLLLLVASGDADMKGHFDPAKCRYALGMQDRTIPDSDISASSSWSD

SEQ ID NO: 3179 - protein, 51 aa, Homo sapiens
MGPEALSSLLLLLLVASGDADMKGHFDPAKCRYALGMQDRTIPDSDISASS

SEQ ID NO: 3180 - protein, 539 aa, Homo sapiens; identical to SEQ ID NO: 2982

SEQ ID NO: 3181 - protein, 196 aa, Homo sapiens
MPHLASLFTASSRCCPHPLRPEGSGAMGPEALSSLLLLLLVASGDADMKGHFDPAKCRYALGMQDRTIPDSDISASSSWSDSTAARHSRLESSDGDGAWCPAGSVFPKEEEYLQVDLQRLHLVALVGTQGRHAGGLGKEFSRSYRLRYSRDGRRWMGWKDRWGQEVISGNEDPEGVVLKDLGPPMVARLVRFYPRA

SEQ ID NO: 3182 - protein, 53 aa, Homo sapiens
MLPCLALLLLMELSVCTVAGDGGEEQTLSTEAETWVIVALEVLLGRGSDEGRG

SEQ ID NO: 3183 - protein, 41 aa, Homo sapiens
MGPEALSSLLLLLLVASGDADMKGHFDPAKCRYALGMQDRT

SEQ ID NO: 3184 - protein, 73 aa, Homo sapiens
MGPEALSSLLLLLLVASGDADMKGHFDPAKCRYALGMQDRTIPDSDISASSSWSDSTAARHSRLESSDGDGAW

SEQ ID NO: 3185 - protein, 122 aa, Homo sapiens
MGPEALSSLLLLLLVASGDADMKGHFDPAKCRYALGMQDRTIPDSDISASSSWSDSTAARHSRLESSDGDGAWCPAGSVFPKEEEYLQVDLQRLHLVALVGTQGRHAGGLGKEFSRSYRLRY

SEQ ID NO: 3186 - protein, 160 aa, Homo sapiens
MGPEALSSLLLLLLVASGDADMKGHFDPAKCRYALGMQDRTIPDSDISASSSWSDSTAARHSRLESSDGDGAWCPAGSVFPKEEEYLQVDLQRLHLVALVGTQGRHAGGLGKEFSRSYRLRYSRDGRRWMGWKDRWGQEVISGNEDPEGVVLKDLGPPMV

SEQ ID NO: 3187 - protein, 179 aa, Homo sapiens
MGSSGLLSLLVLFVLLANVQGPGLTDWLFPRRCPKIREECEFQERDVCTKDRQCQDNKKCCVFSCGKKCLDLKQDVCEMPKETGPCLAYFLHWWYDKKDNTCSMFVYGGCQGNNNNFQSKANCLNTCKNKQPCPKIKVECEVEEIDQCTKPRDCPENMKCCPFSRGKKCLDFRKASLST

SEQ ID NO: 3188 - protein, 145 aa, Homo sapiens
MLFRNRFLLLLALAALLAFVSLSLQFFHLIPVSTPKNGMSSKSRKRIMPDPVTEPPVTDPVYEALLYCNIPSVAERSMEGHAPHHFKLVSVHVFIRHGDRYPLYVIPKTKRPEIDCTLVANRKPYHPKLEAFISHMSKGSGASFE

SEQ ID NO: 3189 - protein, 132 aa, Homo sapiens
MGPEALSSLLLLLLVASGDADMKGHFDPAKCRYALGMQDRTIPDSDISASSSWSDSTAARHSRLESSDGDGAWCPAGSVFPKEEEYLQVDLQRLHLVALVGTQGRHAGGLGKEFSRSYRLRYSRDGRRWMGW

SEQ ID NO: 3190 - protein, 101 aa, Homo sapiens
MGPEALSSLLLLLLVASGDADMKGHFDPAKCRYALGMQDRTIPDSDISASSSWSDSTAARHSRLESSDGDGAWCPAGSVFPKEEEYLQVDLQRLHLVALVG

SEQ ID NO: 3191 - protein, 130 aa, Homo sapiens; identical to SEQ ID NO: 2082

SEQ ID NO: 3192 - protein, 139 aa, Homo sapiens
MPAIAVLAAAAAAWCFLQVESRHLDALAGGAGPNHGNFLDNDQWLSTVSQYDRDKYWNRFRDDDYFRNWNPNKPFDQALDPSKDPCLKVKCSPHKVCVTQDYQTALCVSRKHLLPRQKKGNVAQKHWVGPSNLVKCKPC

SEQ ID NO: 3193 - protein, 169 aa, Homo sapiens
MRLLILTCLVAVALARPKLPLRYPERLQNPSESSEPIPLESREEYMNGMNRQRNILREKQTDEIKNCVVAEPEKMESSISSSSEEQFCRLNEYNQLQLQAAHAQEQIRRMNENSHVQVPFQQLNQLAAYPYAVWYYPQIMQYVPFPPFSDISNPTAHENYEKNNVMLQW

SEQ ID NO: 3194 - protein, 306 aa, Homo sapiens
MKKDEPPLDFPDTLEGFEYAFNEKGQLRHIKTGEPFVFNYREDLHRWNQKRYEALGEIITKYVYELLEKDCNLKKVSIPEGYGVIVLNPNENYIEVEKPKIHVQSSSDSSDEPAEKRERKDKVSKETKKRRDFYEKYRNPQREKEMMQLYIRENGSPEEHAIYVWDHFIAQAAAENVFFVAHSYGGLAFVELMIQREADVKNKVTAVALTDSVHNVWHQEAGKTIREWMRENCCNWVSSSEPLDTSVESMLPDCPRVSAGTDRHELTSWKSFPSIFKFFTEASEAKTSSLKPAVTRRSHRIKHEEL

SEQ ID NO: 3195 - protein, 953 aa, Homo sapiens
  VARIANT 1: note = MOD_RES - Any amino acid
XQLCWLPLLAPLLLLRPPGVQSAGPIRAFVVPHSHMDVGWVYTVQESMRAYAANVYTSVVEELARGQQRRFIAVEQEFFRLWWDGVASDQQKYQVRQLLEEGRLEFVIGGQVMHDEAVTHLDDQILQLTEGHGFLYETFGIRPQFSWHVDPFGASATTPTLFALAGFNAHLGSRIDYDLKAAMQEARGLQFVWRGSPSLSERQEIFTHIMDQYSYCTPSHIPFSNRSGFYWNGVAVFPKPPQDGVYPNMSEPVTPANINLYAEALVANVKQRAAWFRTPHVLWPWGCDKQFFNASVQFANMDPLLDHINSHAAELGVSVQYATLGDYFRALHALNVTWRVRDHHDFLPYSTEPFQAWTGFYTSRSSLKGLARRASALLYAGESMFTRYLWPAPRGHLDPTWALQQLQQLRWAVSEVQHHDAITGTESPKVRDMYATHLASGMLGMRKLMASIVLDELQPQAPMAASSDAGPAGHFASVYNPLAWTVTTIVTLTVGFPGVRVTDEAGHPVPSQIQNSTETPSAYDLLILTTIPGLSYRHYNIRPTAGAQEGTQEPAATVASTLQFGRRLRRRTSHAGRYLVPVANDCYIVLLDQDTNLMHSIWERQSNRTVRVTQEFLEYHVNGDVKQGPISDNYLFTPGKAAVPAWEAVEMEIVAGQLVTEIRQYFYRNMTAQNYTYAIRSRLTHVPQGHDGELLCHRIEQEYQAGPLELNREAVLRTSTNLNSQQVIYSDNNGYQMQRRPYVSYVNNSIARNYYPMVQSAFMEDGKSRLVLLSERAHGISSQGNGQVEVMLHRRLWNNFDWDLGYNLTLNDTSVVHPVLWLLLGSWSLTTALRQRSALALQHRPVVLFGDLAGTAPKLPGPQQQEAVTLPPNLHLQILSIPGWRYSSNHTEHSQNLRKGHRGEAQADLRRVLLRLYHLYEVGEDPVLSQPVTVNLEVNFPTPIQTISQGSKP

SEQ ID NO: 3196 - protein, 152 aa, Homo sapiens; identical to SEQ ID NO: 2696

SEQ ID NO: 3197 - protein, 566 aa, Homo sapiens
MDFLLALVLVSSLYLQAAAEFDGRWPRQIVSSIGLCRYGGRIDCCWGWARQSWGQCQPVCQPRCKHGECIGPNKCKCHPGYAGKTCNQDEHIPAPLDQGSEQPLFQPLDHQATSLPSRDLNECGLKPRPCKHRCMNTYGSYKCYCLNGYMLMPDGSCSSALTCSMANCQYGCDVVKGQIRCQCPSPGLQLAPDGRTCVDVDECATGRASCPRFRQCVNTFGSYICKCHKGFDLMYIGGKYQCHDIDECSLGQYQCSSFARCYNIRGSYKCKCKEGYQGDGLTCVYIPKVMIEPSGPIHVPKGNGTILKGDTGNNNWIPDVGSTWWPPKTPYIPPIITNRPTSKPTTRPTPKPTPIPTPPPPPPLPTELRTPLPPTTPERPTTGLTTIAPAASTPPGGITVDNRVQTDPQKPRGDVFSVLVHSCNFDHGLCGWIREKDNDLHWEPIRDPAGGQYLTVSAAKAPGGKAARLVLPLGRLMHSGDLCLSFRHKVTGLHSGTLQVFVRKHGAHGAALWGRNGGHGWRQTQITLRGADIKSVVFKGEKRRGHTGEIGLDDVSLKKGHCSEER

SEQ ID NO: 3198 - protein, 70 aa, Homo sapiens
MGPEALSSLLLLLLVASGDADMKGHFDPAKCRYALGMQDRTIPDSDISASSSWSDSTAARHSRLESSDGD

SEQ ID NO: 3199 - protein, 78 aa, Homo sapiens
MGPEALSSLLLLLLVASGDADMKGHFDPAKCRYALGMQDRTIPDSDISASSSWSDSTAARHSRLESSDGDGAWCPAGS

SEQ ID NO: 3200 - protein, 112 aa, Homo sapiens
MRFKTTAKDGLLLWRGDSPMRPNSDFISLGLRDGALVFSYNLGSGVASIMVNGSFNDGRWHRVKAVRDGQSGKITVDDYGARTGKSPGMMRQLNINGALYVGGMKEIALHTN

SEQ ID NO: 3201 - protein, 894 aa, Homo sapiens
MSLPRCCPHPLRPEGSGAMGPEALSSLLLLLLVASGDADMKGHFDPAKCRYALGMQDRTIPDSDISASSSWSDSTAARHSRLESSDGDGAWCPAGSVFPKEEEYLQVDLQRLHLVALVGTQGRHAGGLGKEFSRSYRLRYSRDGRRWMGWKDRWGQEVISGNEDPEGVVLKDLGPPMVARLVRFYPRADRVMSVCLRVELYGCLWRDGLLSYTAPVGQTMYLSEAVYLNDSTYDGHTVGGLQYGGLGQLADGVVGLDDFRKSQELRVWPGYDYVGWSNHSFSSGYVEMEFEFDRLRAFQAMQVHCNNMHTLGARLPGGVECRFRRGPAMAWEGEPMRHNLGGNLGDPRARAVSVPLGGRVARFLQCRFLFAGPWLLFSEISFISDVVNNSSPALGGTFPPAPWWPPGPPPTNFSSLELEPRGQQPVAKAEGSPTAILIGCLVAIILLLLLIIALMLWRLHWRRLLSKAERRVLEEELTVHLSVPGDTILINNRPGPREPPPYQEPRPRGNPPHSAPCVPNGSAYSGDYMEPEKPGAPLLPPPPQNSVPHYAEADIVTLQGVTGGNTYAVPALPPGAVGDGPPRVDFPRSRLRFKEKLGEGQFGEVHLCEVDSPQDLVSLDFPLNVRKGHPLLVAVKILRPDATKNARNDFLKEVKIMSRLKDPNIIRLLGVCVQDDPLCMITDYMENGDLNQFLSAHQLEDKAAEGAPGDGQAAQGPTISYPMLLHVAAQIASGMRYLATLNFVHRDLATRNCLVGENFTIKIADFGMSRNLYAGDYYRVQGRAVLPIRWMAWECILMGKFTTASDVWAFGVTLWEVLMLCRAQPFGQLTDEQVIENAGEFFRDQGRQVYLSRPPACPQGLYELMLRCWSRESEQRPPFSQLHRFLAEDALNTV

SEQ ID NO: 3202 - protein, 127 aa, Homo sapiens
MGPEALSSLLLLLLVASGDADMKGHFDPAKCRYALGMQDRTIPDSDISASSSWSDSTAARHSRLESSDGDGAWCPAGSVFPKEEEYLQVDLQRLHLVALVGTQGRHAGGLGKEFSRSYRLRYSRDGR

SEQ ID NO: 3203 - protein, 370 aa, Homo sapiens
MKKDEPPLDFPDTLEGFEYAFNEKGQLRHIKTGEPFVFNYREDLHRWNQKRYEALGEIITKYVYELLEKDCNLKKVSIPVDATESEPKSFIFMSEDALTNPQKLMVLIHGSGVVRAGQWARRLIINEDLDSGTQIPFIKRAVAEGYGVIVLNPNENYIEVEKPKIHVQSSSDSSDEPAEKRERKDKVSKETKKRRDFYEKYRNPQREKEMMQLYIRENGSPEEHAIYVWDHFIAQAAAENVFFVAHSYGGLAFVELMIQREADVKNKVTAVALTDSVHNVWHQEAGKTIREWMRENCCNWVSSSEPLDTSVESMLPDCPRVSAGTDRHELTSWKSFPSIFKFFTEASEAKTSSLKPAVTRRSHRIKHEEL

SEQ ID NO: 3204 - protein, 144 aa, Homo sapiens
MKTGLFFLCLLGTAAAIPTNARLLSDHSKPTAETVAPDNTAIPSLRAEAEENEKETAVSTEDDSHHKAEKSSVLKSKEESHEQSAEQGKSSSQELGLKDQEDSDGHLSVNLEYAPTEGTLDIKEDMSEPQEKKLSENTDFLAPG

SEQ ID NO: 3205 - protein, 446 aa, Homo sapiens
LTLHSLTCYEDLVTFLQQSIHQFEVGPYGCILLTLSAILSRSTELIRQDFDVPTSHLIGAHGYCTQELVNLLLTGKAVSNVFNDVVELDSGDGNITLLRGIAARSDIGFLSLFEHYNMCQVGCFLKTPRFPIWVVCSESHFSILFSLQPGLLRDWRTERLFDLYYYDGLANQQEQIRLTIDTTQTISEDTDNDLVPPLELCIRTNIGSALGFKYPVGNNQTAVQDNVKVSLAFGLSIATLAQSVGHISGAHLNPAVTLGLLLSCQISIFRALMYIIAQCVGAIVATAILSGITSSLTGNSLGRNDLADGVNSGQGLGIEIIGTLQLVLCVLATTDRRRRDLGGSAPLAIGLSVALGHLLAIDYTGCGINPARSFGSAVITHNFSNHWIFWVGPFIGGALAVLIYDFILAPRSSDLTDRVKVWTSGQVEEYDLDADDINSRVEMKPK

SEQ ID NO: 3206 - protein, 26 aa, Homo sapiens
MKLLLWACIVCVAFARKNAGLGFLWL

SEQ ID NO: 3207 - protein, 115 aa, Homo sapiens
MGPEALSSLLLLLLVASGDADMKGHFDPAKCRYALGMQDRTIPDSDISASSSWSDSTAARHSRLESSDGDGAWCPAGSVFPKEEEYLQVDLQRLHLVALVGTQGRHAGGLGKEFS

SEQ ID NO: 3208 - protein, 54 aa, Homo sapiens
MYIPLDPDYNADCPNVTAPVCASNGHTFQNECFFCVEQREFHYRIKFEKYGKCD

SEQ ID NO: 3209 - protein, 116 aa, Homo sapiens
MVLLHWCLLWLLFPLSSRTQKLPTRDEELFQMQIRDKAFFHDSSVIPDGAEISSYLFRDTPKRYFFVVEEDNTPLSVTVTPCDAPLEWKLSLQELPEDRSGEGSGDLEPLEQQKQQ

SEQ ID NO: 3210 - protein, 143 aa, Homo sapiens
MGPEALSSLLLLLLVASGDADMKGHFDPAKCRYALGMQDRTIPDSDISASSSWSDSTAARHSRLESSDGDGAWCPAGSVFPKEEEYLQVDLQRLHLVALVGTQGRHAGGLGKEFSRSYRLRYSRDGRRWMGWKDRWGQEVISG

SEQ ID NO: 3211 - protein, 248 aa, Homo sapiens
MELLQVTILFLLPSICSSNSTGVLEAANNSLVVTTTKPSITTPNTESLQKNVVTPTTGTTPKGTITNELLKMSLMSTATFLTSKDEGLKATTTDVRKNDSIISNVTVTSVTLPNAVSTLQSSKPKSSVLQPDASPSKTGTLTSIPVTIPENTSQSQVIGTEGGKNASTSATSRSYSSIILPVVIALIVITLSVFVLVGLYRMCWKADPGTPENGNDQPQSDKESVKLLTVKTISHESGEHSAQGKTKN

SEQ ID NO: 3212 - protein, 120 aa, Homo sapiens
MKTGLFFLCLLGTAAAIPTNARLLSDHSKPTAETVAPDNTAIPSLRAEAEENEKETAVSTEDDSHHKAEKSSVLKSKEESHEQSAEQGKSSSQELGLKDQEDSDGHLSVNLEYAPTEGTL

SEQ ID NO: 3213 - protein, 112 aa, Homo sapiens
MGPEALSSLLLLLLVASGDADMKGHFDPAKCRYALGMQDRTIPDSDISASSSWSDSTAARHSRLESSDGDGAWCPAGSVFPKEEEYLQVDLQRLHLVALVGTQGRHAGGLGK

SEQ ID NO: 3214 - protein, 170 aa, Homo sapiens
MGPEALSSLLLLLLVASGDADMKGHFDPAKCRYALGMQDRTIPDSDISASSSWSDSTAARHSRLESSDGDGAWCPAGSVFPKEEEYLQVDLQRLHLVALVGTQGRHAGGLGKEFSRSYRLRYSRDGRRWMGWKDRWGQEVISGNEDPEGVVLKDLGPPMVARLVRFYPRA

SEQ ID NO: 3215 - protein, 138 aa, Homo sapiens
MGPEALSSLLLLLLVASGDADMKGHFDPAKCRYALGMQDRTIPDSDISASSSWSDSTAARHSRLESSDGDGAWCPAGSVFPKEEEYLQVDLQRLHLVALVGTQGRHAGGLGKEFSRSYRLRYSRDGRRWMGWKDRWGQ

SEQ ID NO: 3216 - protein, 94 aa, Homo sapiens; identical to SEQ ID NO: 2723

SEQ ID NO: 3217 - protein, 51 aa, Homo sapiens; identical to SEQ ID NO: 3179

SEQ ID NO: 3218 - protein, 919 aa, Homo sapiens; identical to SEQ ID NO: 2501

SEQ ID NO: 3219 - protein, 105 aa, Homo sapiens
MGVSKLDILYRRLLLTKLFIRGWGRPEDLKRLFEFRKMIGNRERCQNLVSSDYPVHIDKIEEQSDCKILDGHFVSPMAHYVPDIMPIESVIARFQFIVPKEWNSK

SEQ ID NO: 3220 - protein, 41 aa, Homo sapiens
MKLSGMFLLLSLALFCFLTGVFSQGGQVDCGEFQDPKVYCT

SEQ ID NO: 3221 - protein, 152 aa, Homo sapiens; identical to SEQ ID NO: 2696

SEQ ID NO: 3222 - protein, 536 aa, Homo sapiens
MDFLLALVLVSSLYLQAAAEFDGRWPRQIVSSIGLCRYGGRIDCCWGWARQSWGQCQPVCQPRCKHGECIGPNKCKCHPGYAGKTCNQDLNECGLKPRPCKHRCMNTYGSYKCYCLNGYMLMPDGSCSSALTCSMANCQYGCDVVKGQIRCQCPSPGLQLAPDGRTCVDVDECATGRASCPRFRQCVNTFGSYICKCHKGFDLMYIGGKYQCHDIDECSLGQYQCSSFARCYNIRGSYKCKCKEGYQGDGLTCVYIPKVMIEPSGPIHVPKGNGTILKGDTGNNNWIPDVGSTWWPPKTPYIPPIITNRPTSKPTTRPTPKPTPIPTPPPPPPLPTELRTPLPPTTPERPTTGLTTIAPAASTPPGGITVDNRVQTDPQKPRGDVFSVLVHSCNFDHGLCGWIREKDNDLHWEPIRDPAGGQYLTVSAAKAPGGKAARLVLPLGRLMHSGDLCLSFRHKVTGLHSGTLQVFVRKHGAHGAALWGRNGGHGWRQTQITLRGADIKSVVFKGEKRRGHTGEIGLDDVSLKKGHCSEER

SEQ ID NO: 3223 - protein, 95 aa, Homo sapiens
MLFRNRFLLLLALAALLAFVSLSLQFFHLIPVSTPKNGMSSKSRKRIMPDPVTEPPVTDPVYEALLYCNIPSVAERSMEGHAPHHFKLVSVHVFI

SEQ ID NO: 3224 - protein, 70 aa, Homo sapiens
MASDLIRTILAVALISKLGTAVDAELMPSGAILQNKRENLPRVCHALAFLGMARCQDLFLVRLQGWKLGT

SEQ ID NO: 3225 - protein, 138 aa, Homo sapiens; identical to SEQ ID NO: 3215

SEQ ID NO: 3226 - protein, 72 aa, Homo sapiens
MAVSVLRLTVVLGLLVLFLTCYADDKPDKPDDKPDDSGKDPKPDFPKFLSLLGTEIIENAVEFILRSMSRST

SEQ ID NO: 3227 - protein, 145 aa, Homo sapiens
MVLLHWCLLWLLFPLSSRTQKLPTRDEELFQMQIRDKAFFHDSSVIPDGAEISSYLFRDTPKRYFFVVEEDNTPLSVTVTPCDAPLEWKLSLQELPEDRSGEGSGDLEPLEQQKQQIINEEGTELFSYKGNDVEYFISSSSPSGL

SEQ ID NO: 3228 - protein, 85 aa, Homo sapiens
MGPEALSSLLLLLLVASGDADMKGHFDPAKCRYALGMQDRTIPDSDISASSSWSDSTAARHSRLESSDGDGAWCPAGSVFPKEEE

SEQ ID NO: 3229 - protein, 469 aa, Homo sapiens
MLKVHYPKFGVSEDCLYLNIYAPAHADTGSKLPVLVWFPGGAFKTGSASIFDGSALAAYEDVLVVVVQYRLGIFGFFTTWDQHAPGNWAFKDQVAALSWVQKNIEFFGGDPSSVTIFGESAGAISVSSLILSPMAKGLFHKAIMESGVAIIPYLEAHDYEKSEDLQVVAHFCGNNASDSEALLRCLRTKPSKELLTLSQKTKSFTRVVDGAFFPNEPLDLLSQKAFKAIPSIIGVNNHECGFLLPMKEAPEILSGSNKSLALHLIQNILHIPPQYLHLVANEYFHDKHSLTEIRDSLLDLLGDVFFVVPALITARYHRDAGAPVYFYEFRHRPQCFEDTKPAFVKADHADEVRFVFGGAFLKGDIVMFEGATEEEKLLSRKMMKYWATFARTGNPNGNDLSLWPAYNLTEQYLQLDLNMSLGQRLKEPRVDFWTSTIPLILSASDMLHSPLSSLTFLSLLQPFFFFCAP

SEQ ID NO: 3230 - protein, 130 aa, Homo sapiens
MLPFLFFSTLFSSIFTEAQKQYWVCNSSDASISYTYCGRDLKQLYFNLYITVNTMNLPKRKEVICRGSDDDYSFCRALKGETVNTTISFSFKGIKFSKGKYKCVVEAISGSPEEMLFCLEFVILHQPNSN

SEQ ID NO: 3231 - protein, 105 aa, Homo sapiens
MKCTAREWLRVTTVLFMARAIPAMVVPNATLLEKLLEKYMDEDGEWWIAKQRGKRAITDNDMQSILDLHNKLRSQVYPTASNMEYMTWDVELERSAESWAESCLW

SEQ ID NO: 3232 - protein, 188 aa, Homo sapiens
MTMVCHRPEGLEQLEAQTNFTKRELQVLYRGFKNECPSGVVNEDTFKQIYAQFFPHGDASTYAHYLFNAFDTTQTGSVKFEDFVTALSILLRGTVHEKLRWTFNLYDINKDGYINKEEMMDIVKAIYDMMGKYTYPVLKEDTPRQHVDVFFQKMDKNKDGIVTLDEFLESCQEDDNIMRSLQLFQNVM

SEQ ID NO: 3233 - protein, 424 aa, Homo sapiens
MPPFLITLFLFHSCCLRANGHLREGMTLLKTEFALHLYQSVAACRNETNFVISPAGVSLPLEILQFGAEGSTGQQLADALGYTVHDKRVKDFLHAVYATLPTSSQGTEMELACSLFVQVGTPLSPCFVEHVSWWANSSLEPADLSEPNSTAIQTSEGASRETAGGGPSEGPGGWPWEQVSAAFAQLVLVSTMSFQGTWRKRFSSTDTQILPFTCAYGLVLQVPMMHQTTEVNYGQFQDTAGHQVGVLELPYLGSAVSLFLVLPRDKDTPLSHIEPHLTASTIHLWTTSLRRARMDVFLPRFRIQNQFNLKSILNSWGVTDLFDPLKANLKGISGQDGFYVSEAIHKAKIEVLEEGTKASGATALLLLKRSRIPIFKADRPFIYFLREPNTGITVFFDRIQIIYQCLSSNKGSFVHYPLKNKHSF

SEQ ID NO: 3234 - protein, 604 aa, Homo sapiens
MAVLVCPASCHGLKEFRIRRGMWRLCLVYYFYPASSTLYVLRIDVLNYTSKDEGPSAEGPQRNTRLGWIQGKQVTVLGSPVPVNVFLGVPFAAPPLGSLRFTNPQPASPWDNLREATSYPNLCLQNSEWLLLDQHMLKVHYPKFGVSEDCLYLNIYAPAHADTGSKLPVLVWFPGGAFKTGSASIFDGSALAAYEDVLVVVVQYRLGIFGFFTTWDQHAPGNWAFKDQVAALSWVQKNIEFFGGDPSSVTIFGESAGAISVSSLILSPMAKGLFHKAIMESGVAIIPYLEAHDYEKSEDLQVVAHFCGNNASDSEALLRCLRTKPSKELLTLSQKTKSFTRVVDGAFFPNEPLDLLSQKAFKAIPSIIGVNNHECGFLLPMKEAPEILSGSNKSLALHLIQNILHIPPQYLHLVANEYFHDKHSLTEIRDSLLDLLGDVFFVVPALITARYHRDAGAPVYFYEFRHRPQCFEDTKPAFVKADHADEVRFVFGGAFLKGDIVMFEGATEEEKLLSRKMMKYWATFARTGNPNGNDLSLWPAYNLTEQYLQLDLNMSLGQRLKEPRVDFWTSTIPLILSASDMLHSPLSSLTFLSLLQPFFFFCAP

SEQ ID NO: 3235 - protein, 312 aa, Homo sapiens
MNIWGQIWPKAVYLVCNYSPKGNWWGHAPYKHGRPCSACPPSFGGGCRENLCYKEGSDRYYPPREEETNEIERQQSQVHDTHVRTRSDDSSRNEVISAQQMSQIVSCEVRLRDQCKGTTCNRYECPAGCLDSKAKVIGSVHYEMQSSICRAAIHYGIIDNDGGWVDITRQGRKHYFIKSNRNGIQTIGKYQSANSFTVSKVTVQAVTCETTVEQLCPFHKPASHCPRVYCPRNCMQANPHYARVIGTRVYSDLSSICRAAVHAGVVRNHGGYVDVMPVDKRKTYIASFQNGIFSESLQNPPGGKAFRVFAVV

SEQ ID NO: 3236 - protein, 258 aa, Homo sapiens; identical to SEQ ID NO: 1915

SEQ ID NO: 3237 - protein, 404 aa, Homo sapiens; identical to SEQ ID NO: 2740

SEQ ID NO: 3238 - protein, 311 aa, Homo sapiens; identical to SEQ ID NO: 3139

SEQ ID NO: 3239 - protein, 184 aa, Homo sapiens
MASERLPNRPACLLVASGAAEGVSAQSFLHCFTMASTAFNLQVATPGGKAMEFVDVTESNARWVQDFRLKAYASPAKLESIDEPICAVGHGVAALCCATNEDRSWVFDSYSLTGPSVCELVRAPGFARLPLVVEDFVKDSGACFSASEPDAVHVVLDRHLVTGQNASSTVPAVQNLLFLCGSRK

SEQ ID NO: 3240 - protein, 418 aa, Homo sapiens; identical to SEQ ID NO: 2309

SEQ ID NO: 3241 - protein, 474 aa, Homo sapiens
MDRNPSPPPPGRDKEEEEEVAGGDCIGSTVYSKHWLFGVLSGLIQIVSPENTKSSSDDEEQLTELDEEMENEICRVWDMSMDEDVALFLQEFNAPDIFMGVLAKSKCPRLREICVGILGNMACFQEICVSISSDKNLGQVLLHCLYDSDPPTLLETSRLLLTCLSQAEVASVWVERIQEHPAIYDSICFIMSSSTNVDLLVKVGEVVDKLFDLDEKLMLEWVRNGAAQPLDQPQEESEEQPVFRLVPCILEAAKQVRSENPEWLDVYMHILQLLTTVDDGIQAIVHCPDTGKDIWNLLFDLVCHEFCQSDDPPIILQEQKTVLASVFSVLSAIYASQTEQEYLKIEKVDLPLIDSLIRVLQNMEQCQKKPENSAESNTEETKRTDLTQDDFHLKILKDILCEFLSNIFQALTKETVAQGVKEGQLSKQKCSSAFQNLLPFYSPVVEDFIKILREVDKALADDLEKNFPSLKVQT

SEQ ID NO: 3242 - protein, 145 aa, Homo sapiens; identical to SEQ ID NO: 2075

SEQ ID NO: 3243 - protein, 575 aa, Homo sapiens
  VARIANT 1: note = MOD_RES - Any amino acid
XIFGGSIHYFRVPREYWRDRLLKMKACGLNTLTTYVPWNLHEPERGKFDFSGNLDLEAFVLMAAEIGLWVILRPGPYICSEMDLGGLPSWLLQDPGMRLRTTYKGFTEAVDLYFDHLMSRVVPLQYKRGGPIIAVQVENEYGSYNKDPAYMPYVKKALEDRGIVELLLTSDNKDGLSKGIVQGVLATINLQSTHELQLLTTFLFNVQGTQPKMVMEYWTGWFDSWGGPHNILDSSEVLKTVSAIVDAGSSINLYMFHGGTNFGFMNGAMHFHDYKSDVTSYDYDAVLTEAGDYTAKYMKLRDFFGSISGIPLPPPPDLLPKMPYEPLTPVLYLSLWDALKYLGEPIKSEKPINMENLPVNGGNGQSFGYILYETSITSSGILSGHVHDRGQVFVNTVSIGFLDYKTTKIAVPLIQGYTVLRILVENRGRVNYGENIDDQRKGLIGNLYLNDSPLKNFRIYSLDMKKSFFQRFGLDKWSSLPETPTLPAFFLGSLSISSTPCDTFLKLEGWEKGVVFINGQNLGRYWNIGPQKTLYLPGPWLSSGINQVIVFEETMAGPALQFTETPHLGRNQYIK

SEQ ID NO: 3244 - protein, 84 aa, Homo sapiens
MRTLFNLLWLALACSPVHTTLSKSDAKKAASKTLLEKSQFSDKPVQDRGLVVTDLKAESVVLEHRSYCSAKARDRHFAGDVLGY

SEQ ID NO: 3245 - protein, 247 aa, Homo sapiens
MRSLLLLSAFCLLEAALAAEVKKPAAAAAPGTAEKLSPKAATLAERSAGLAFSLYQAMAKDQAVENILVSPVVVASSLGLVSLGGKATTASQAKAVLSAEQLRDEEVHAGLGELLRSLSNSTARNVTWKLGSRLYGPSSVSFADDFVRSSKQHYNCEHSKINFRDKRSALQSINEWAAQTTDGKLPEVTKDVERTDGALLVNAMFFKPHWDEKFHHKMVDNRGFMVTRSYTVGVMMMHRTGLYNYYD

SEQ ID NO: 3246 - protein, 38 aa, Homo sapiens
MRTLFNLLWLALACSPVHTTLSKSDAKKAASKTLLEKV

SEQ ID NO: 3247 - protein, 249 aa, Homo sapiens
MRSLLLLSAFCLLEAALAAEVKKPAAAAAPGTAEKLSPKAATLAERSAGLAFSLYQAMAKDQAVENILVSPVVVASSLGLVSLGGKATTASQAKAVLSAEQLRDEEVHAGLGELLRSLSNSTARNVTWKLGSRLYGPSSVSFADDFVRSSKQHYNCEHSKINFRDKRSALQSINEWAAQTTDGKLPEVTKDVERTDGALLVNAMFFKPHWDEKFHHKMVDNRGFMVTRSYTVGVMMMHRTGLYNYYDDE

SEQ ID NO: 3248 - protein, 66 aa, Homo sapiens
MKPLLVVFVFLFLWDPVLAGINSLSSEMHKKCYKNGICRLECYESEMLVAYCMFQLECCVKGNPAP

SEQ ID NO: 3249 - protein, 333 aa, Homo sapiens; identical to SEQ ID NO: 2641

SEQ ID NO: 3250 - protein, 214 aa, Homo sapiens
MRPKTGQVGCETPEELGPGPRQRWPLLLLGLAMVAHGLLRPMVAPQSGDPDPGASVGSSRSSLRSLWGRLLLQPSPQRADPRCWPRGFWSEPQSLCYVFGTGTKVTVLGQPKANPTVTLFPPSSEELQANKATLVCLISDFYPGAVTVAWKADGSPVKAGVETTKPSKQSNNKYAASSYLSLTPEQWKSHRSYSCQVTHEGSTVEKTVAPTECS

SEQ ID NO: 3251 - protein, 349 aa, Homo sapiens
  VARIANT 1: note = MOD_RES - Any amino acid
XLYKNRLGSGGRGRCIKQGENWYSPTEFEAMAGRASSKDWKRSIRYAGRPLQCLIQDGILNPHAASCTCAACCDDMTLSGPVRLFVPYKRRKKENELPTTPVKKDSPKNITLLPATAATTFTVTPSGQITTSGALTFDRASTVEATAVISESPAQGDVFAGATVQEASVQPPCRASHPEPHYPGYQDSCQIAPFPEAALPTSHPKIVLTSLPALAVPPPTPTKAAPPALVNGLELSEPRSWLYLEEMVNSLLNTAQQLKTLFEQAKHASTYREAATNQAKIHADAERKEQSCVNCGREAMSECTGCHKVNYCSTFCQRKRWSLTMLTSLVSISWLRAILPCQPPKVLGL

SEQ ID NO: 3252 - protein, 199 aa, Homo sapiens
MSLDIQSLDIQCEELSDARWAELLPLLQQCQVVRLDDCGLTEARCKDISSALRVNPALAELNLRSNELGDVGVHCVLQGLQTPSCKIQKLSLQNCCLTGAGCGVLSSTLRTLPTLQELHLSDNLLGDAGLQLLCEGLLDPQCRLEKLQLEYCSLSAASCEPLASVLRAKPDFKELTVSNNDINEAGVRVLCQGLKDSPC

SEQ ID NO: 3253 - protein, 154 aa, Homo sapiens
MAGIPGLLFLLFFLLCAVGQVSPYSAPWKPTWPAYRLPVVLPQSTLNLAKPDFGAEAKLEVSSSCGPQCHKGTPLPTYEEAKQYLSYETLYANGSRTETQVGIYILSSSGDGAQHRDSGSSGKSRRKRQIYGYDSRFSIFGKDFLLNYPFSTSV

SEQ ID NO: 3254 - protein, 311 aa, Homo sapiens; identical to SEQ ID NO: 1965

SEQ ID NO: 3255 - protein, 467 aa, Homo sapiens; identical to SEQ ID NO: 2319

SEQ ID NO: 3256 - protein, 26 aa, Homo sapiens
MRTLFNLLWLALACSPVHTTLSKSDA

SEQ ID NO: 3257 - protein, 182 aa, Homo sapiens
MRRMWATQGLAVALALSVLPGSRALRPGDCEVCISYLGRFYQDLKDRDVTFSPATIENELIKFCREARGKENRLCYYIGATDDAATKIINEVSKPLAHHIPVEKICEKLKKKDSQICELKYDKQIDLSTVDLKKLRVKELKKILDDWGETCKGCAEKSDYIRKINELMPKYAPKAASARTDL

SEQ ID NO: 3258 - protein, 50 aa, Homo sapiens
MKVFFLFAVLFCLVQTNSVHISHREARGPSFRICVDFLGPRWARGCSTGN

SEQ ID NO: 3259 - protein, 221 aa, Homo sapiens
MGATTMDQKSLWAGVVVLLLLQGGSAYKLVCYFTNWSQDRQEPGKFTPENIDPFLCSHLIYSFASIENNKVIIKDKSEVMLYQTINSLKTKNPKLKILLSIGGYLFGSKGFHPMVDSSTSRLEFINSIILFLRNHNFDGLDVSWIYPDQKENTHFTVLIHELAEAFQKDFTKSTKERLLLTAGVSAGRQMIDNSYQVEKLAKDLDFINLLSFDFHGSWEKP

SEQ ID NO: 3260 - protein, 418 aa, Homo sapiens; identical to SEQ ID NO: 2199

SEQ ID NO: 3261 - protein, 203 aa, Homo sapiens
MRSLLLLSAFCLLEAALAAEVKKPAAAAAPGTAEKLSPKAATLAERSAGLAFSLYQAMAKDQAVENILVSPVVVASSLGLVSLGGKATTASQAKAVLSAEQLRDEEVHAGLGELLRSLSNSTARNVTWKLGSRLYGPSSVSFADDFVRSSKQHYNCEHSKINFRDKRSALQSINEWAAQTTDGKLPEVTKDVERTDGALLVNA

SEQ ID NO: 3262 - protein, 163 aa, Homo sapiens
MRSLLLLSAFCLLEAALAAEVKKPAAAAAPGTAEKLSPKAATLAERSAGLAFSLYQAMAKDQAVENILVSPVVVASSLGLVSLGGKATTASQAKAVLSAEQLRDEEVHAGLGELLRSLSNSTARNVTWKLGSRLYGPSSVSFADDFVRSSKQHYNCEHSKINF

SEQ ID NO: 3263 - protein, 189 aa, Homo sapiens
MSLDIQSLDIQCEELSDARWAELLPLLQQCQVVRLDDCGLTEARCKDISSALRVNPALAELNLRSNELGDVGVHCVLQGLQTPSCKIQKLSLQNCCLTGAGCGVLSSTLRTLPTLQELHLSDNLLGDAGLQLLCEGLLDPQCRLEKLQLEYCSLSAASCEPLASVLRAKPDFKELTVSNNDINEAGVRV

SEQ ID NO: 3264 - protein, 194 aa, Homo sapiens
MSLDIQSLDIQCEELSDARWAELLPLLQQCQVVRLDDCGLTEARCKDISSALRVNPALAELNLRSNELGDVGVHCVLQGLQTPSCKIQKLSLQNCCLTGAGCGVLSSTLRTLPTLQELHLSDNLLGDAGLQLLCEGLLDPQCRLEKLQLEYCSLSAASCEPLASVLRAKPDFKELTVSNNDINEAGVRVLCQGL

SEQ ID NO: 3265 - protein, 361 aa, Homo sapiens; identical to SEQ ID NO: 2968

SEQ ID NO: 3266 - protein, 108 aa, Homo sapiens
  VARIANT 1: note = MOD_RES - Any amino acid
XPKSKWRSKILLGLNFYGMDYATSKDAREPVVGARYIQTLKDHRPRMVWDSQASEHFFEYKKSRSGRHVVFYPTLKSLQVRLELARELGVGVSIWELGQGLDYFYDLL

SEQ ID NO: 3267 - protein, 167 aa, Homo sapiens
MRSLLLLSAFCLLEAALAAEVKKPAAAAAPGTAEKLSPKAATLAERSAGLAFSLYQAMAKDQAVENILVSPVVVASSLGLVSLGGKATTASQAKAVLSAEQLRDEEVHAGLGELLRSLSNSTARNVTWKLGSRLYGPSSVSFADDFVRSSKQHYNCEHSKINFRDKR

SEQ ID NO: 3268 - protein, 402 aa, Homo sapiens; identical to SEQ ID NO: 2149

SEQ ID NO: 3269 - protein, 324 aa, Homo sapiens
MRSLLLLSAFCLLEAALAAEVKKPAAAAAPGTAEKLSPKAATLAERSAGLAFSLYQAMAKDQAVENILVSPVVVASSLGLVSLGGKATTASQAKAVLSAEQLRDEEVHAGLGELLRSLSNSTARNVTWKLGSRLYGPSSVSFADDFVRSSKQHYNCEHSKINFRDKRSALQSINEWAAQTTDGKLPEVTKDVERTDGALLVNAMFFKPHWDEKFHHKMVDNRGFMVTRSYTVGVMMMHRTGLYNYYDDEKEKLQIVEMPLAHKLSSLIILMPHHVEPLERLEKLLTKEQLKIWMGKMQKKAVAISLPKGVVEVTHDLQVRGGPA

SEQ ID NO: 3270 - protein, 329 aa, Homo sapiens; identical to SEQ ID NO: 1856

SEQ ID NO: 3271 - protein, 116 aa, Homo sapiens
MRTLFNLLWLALACSPVHTTLSKSDAKKAASKTLLEKSQFSDKPVQDRGLVVTDLKAESVVLEHRSYCSAKARDRHFAGDVLGYVTPWNSHGYDVTKVFGSKFTQISPVWLQLKRR

SEQ ID NO: 3272 - protein, 93 aa, Homo sapiens; identical to SEQ ID NO: 2525

SEQ ID NO: 3273 - protein, 84 aa, Homo sapiens
MRPKTGQVGCETPEELGPGPRQRWPLLLLGLAMVAHGLLRPMVAPQSGDPDPGASVGSSRSSLRSLWGRSAQGQPHCHSVPALL

SEQ ID NO: 3274 - protein, 8 aa, Homo sapiens
MSLDIQSL

SEQ ID NO: 3275 - protein, 191 aa, Homo sapiens
MLIFWTITLFLLGAAKGKEVCYEDLGCFSDTEPWGGTAIRPLKILPWSPEKIGTRFLLYTNENPNNFQILLLSDPSTIEASNFQMDRKTRFIIHGFIDKGDESWVTDMCKKLFEVEEVNCICVDWKKGSQATYTQAANNVRVVGAQVAQMLDILLTEYSYPPSKVHLIGHSLGAHVAGEAGSKTPGLSRIT

SEQ ID NO: 3276 - protein, 40 aa, Homo sapiens
MSLDIQSLDIQCEELSDARWAELLPLLQQCQVVRLDDCGL

SEQ ID NO: 3277 - protein, 215 aa, Homo sapiens
MRPKTGQVGCETPEELGPGPRQRWPLLLLGLAMVAHGLLRPMVAPQSGDPDPGASVGSSRSSLRSLWGSRLLLQPSPQRADPRCWPRGFWSEPQSLCYVFGTGTKVTVLGQPKANPTVTLFPPSSEELQANKATLVCLISDFYPGAVTVAWKADGSPVKAGVETTKPSKQSNNKYAASSYLSLTPEQWKSHRSYSCQVTHEGSTVEKTVAPTECS

SEQ ID NO: 3278 - protein, 332 aa, Homo sapiens
MCPAGWKLLAMLALVLVVMVWYSISREDRYIELFYFPIPEKKEPCLQGEAESKASKLFGNYSRDQPIFLRLEDYFWVKTPSAYELPYGTKGSEDLLLRVLAITSSSIPKNIQSLRCRRCVVVGNGHRLRNSSLGDAINKYDVVIRLNNAPVAGYEGDVGSKTTMRLFYPESAHFDPKVENNPDTLLVLVAFKAMDFHWIETILSDKKRVRKGFWKQPPLIWDVNPKQIRILNPFFMEIAADKLLSLPMQQPRKIKQKPTTGLLAITLALHLCDLVHIAGFGYPDAYNKKQTIHYYEQITLKSMAGSGHNVSQEALAIKRMLEMGAIKNLTSF

SEQ ID NO: 3279 - protein, 295 aa, Homo sapiens
MRSLLLLSAFCLLEAALAAEVKKPAAAAAPGTAEKLSPKAATLAERSAGLAFSLYQAMAKDQAVENILVSPVVVASSLGLVSLGGKATTASQAKAVLSAEQLRDEEVHAGLGELLRSLSNSTARNVTWKLGSRLYGPSSVSFADDFVRSSKQHYNCEHSKINFRDKRSALQSINEWAAQTTDGKLPEVTKDVERTDGALLVNAMFFKPHWDEKFHHKMVDNRGFMVTRSYTVGVMMMHRTGLYNYYDDEKEKLQIVEMPLAHKLSSLIILMPHHVEPLERLEKLLTKEQLKIWMG

SEQ ID NO: 3280 - protein, 132 aa, Homo sapiens
MRTLFNLLWLALACSPVHTTLSKSDAKKAASKTLLEKSQFSDKPVQDRGLVVTDLKAESVVLEHRSYCSAKARDRHFAGDVLGYVTPWNSHGYDVTKVFGSKFTQISPVWLQLKRRGREMFEVTGLHDVDQG

SEQ ID NO: 3281 - protein, 119 aa, Homo sapiens
MRTLFNLLWLALACSPVHTTLSKSDAKKAASKTLLEKSQFSDKPVQDRGLVVTDLKAESVVLEHRSYCSAKARDRHFAGDVLGYVTPWNSHGYDVTKVFGSKFTQISPVWLQLKRRGRE

SEQ ID NO: 3282 - protein, 129 aa, Homo sapiens; identical to SEQ ID NO: 1961

SEQ ID NO: 3283 - protein, 461 aa, Homo sapiens [sequence omitted]

SEQ ID NO: 3284 - protein, 150 aa, Homo sapiens
MRSLLLLSAFCLLEAALAAEVKKPAAAAAPGTAEKLSPKAATLAERSAGLAFSLYQAMAKDQAVENILVSPVVVASSLGLVSLGGKATTASQAKAVLSAEQLRDEEVHAGLGELLRSLSNSTARNVTWKLGSRLYGPSSVSFADDFVRSS

SEQ ID NO: 3285 - protein, 418 aa, Homo sapiens; identical to SEQ ID NO: 2309

SEQ ID NO: 3286 - protein, 333 aa, Homo sapiens; identical to SEQ ID NO: 2641

SEQ ID NO: 3287 - protein, 328 aa, Homo sapiens
MCPAGWKLLAMLALVLVVMVWYSISREDSFYFPIPEKKEPCLQGEAESKASKLFGNYSRDQPIFLRLEDYFWVKTPSAYELPYGTKGSEDLLLRVLAITSSSIPKNIQSLRCRRCVVVGNGHRLRNSSLGDAINKYDVVIRLNNAPVAGYEGDVGSKTTMRLFYPESAHFDPKVENNPDTLLVLVAFKAMDFHWIETILSDKKRVRKGFWKQPPLIWDVNPKQIRILNPFFMEIAADKLLSLPMQQPRKIKQKPTTGLLAITLALHLCDLVHIAGFGYPDAYNKKQTIHYYEQITLKSMAGSGHNVSQEALAIKRMLEMGAIKNLTSF

SEQ ID NO: 3288 - protein, 194 aa, Homo sapiens; identical to SEQ ID NO: 1914

SEQ ID NO: 3289 - protein, 461 aa, Homo sapiens [sequence omitted]

SEQ ID NO: 3290 - protein, 664 aa, Homo sapiens
MPQAPSTGSSLIRDPSIAHRNTQILWTEAGRDLAQDTRYTGEESLTIFVDKRKLSKRAEGSDSTTNSSSVTLETLHQLAASYFIDRDSTLRRLHHIQIASTAIKVTETRTGPLGCSNYDNLDSVSSVLVQSPENKIQLQGLQVLLPDYLQERFVQAALSYIACNSEGEFICKENDCWCHCGPKFPECNCPSMDIQAMEENLLRITETWKAYNSDFEESDEFKLFMKRLPMNYFLNTSTIMHLWTMDSNFQRRYEQLENSMKQLFLKAQKIVHKLFSLSKRCHKQPLISLPRQRTSTYWLTRIQSFLYCNENGLLGSFSEETHSCTCPNDQVVCTAFLPCTVGDASACLTCAPDNRTRCGTCNTGYMLSQGLCKPEVAESTDHYIGFETDLQDLEMKYLLQKTDRRIEVHAIFISNDMRLNSWFDPSWRKRMLLTLKSNKYKSSLVHMILGLSLQICLTKNSTLEPVLAVYVNPFGGSHSESWFMPVNENSFPDWERTKLDLPLQCYNWTLTLGNKWKTFFETVHIYLRSRIKSNGPNGNESIYYEPLEFIDPSRNLGYMKINNIQVFGYSMHFDPEAIRDLILQLDYPYTQGSQDSALLQLLEIRDRVNKLSPPGQRRLDLFSCLLRHRLKLSTSEVVRIQSALQAFNAKLPNTMDYDTTKLCS

SEQ ID NO: 3291 - protein, 152 aa, Homo sapiens
MARDYDHLFKLLIIGDSGVGKSSLLLRFADNTFSGSYITTIGVDFKIRTVEINGEKVKLQIWDTAGQERFRTITSTYYRGTHGVIVVYDVTSAESFVNVKRWLHEINQNCDDVCRILDVQLHHGAGPPSKERQPGKTAAATTERCGEAHEEQ

SEQ ID NO: 3292 - protein, 231 aa, Homo sapiens
MLYIGIAEYFFKSASFAHFTAGVFNVTLSTEEISNHFVQNSQGLGNVLSRIAEIYILSQPFMVRIMATEPPIINLQPGNFTLDIPASIMMLTQPKNSTVETIVSMDFVASTSVGLVILGQRLVCSLSLNRFRLALPESNRSNIEVLRFENILSSILHFGVLPLANAKLQQGFPLSNPHKFLFVNSDIEVLEGFLLISTDLKYETSSKQQPSFHVWEGLNLISRQWRGKSAP

SEQ ID NO: 3293 - protein, 636 aa, Homo sapiens; identical to SEQ ID NO: 2224

SEQ ID NO: 3294 - protein, 457 aa, Homo sapiens
MGCSLPLSCIMVRSVAWAGFMVLLMIPWGSAAKLVCYFTNWAQYRQGEARFLPKDLDPSLCTHLIYAFAGMTNHQLSTTEWNDETLYQEFNGLKKMFTDMVATANNRQTFVNSAIRFLRKYSFDGLDLDWEYPGSQGSPAVDKERFTTLVQDLANAFQQEAQTSGKERLLLSAAVPAGQTYVDAGYEVDKIAQNLDFVNLMAYDFHGSWEKVTGHNSPLYKRQEESGAAASLNVDAAVQQWLQKGTPASKLILGMPTYGRSFTLASSSDTRVGAPATGSGTPGPFTKEGGMLAYYEVCSWKGATKQRIQDQKVPYIFRDNQWVGFDDVESFKTKVSYLKQKGLGGAMVWALDLDDFAGFSCNQGRYPLIQTLRQELSLPYLPSGTPELEVPKPGQPSEPEHGPSPGQDTFCQGKADGLYPNPRERSSFYSCAAGRLFQQSCPTGLVFSNSCKCCTWN

SEQ ID NO: 3295 - protein, 374 aa, Homo sapiens
MYVSTRERYKWLRFSEDCLYLNVYAPARAPGDPQLPVMVWFPGGAFIVGAASSYEGSDLAAREKVVLVFLQHRLGIFGFLRWRGRTDDSHARGNWGLLDQMAALRWVQENIAAFGGDPGNVTLFGQSAGAMSISGLMMSPLASGLFHRAISQSGTALFRLFITSNPLKVAKKVAHLAGCNHNSTQILVNCLRALSGTKVMRVSNKMRFLQLNFQRDPEEIIWSMSPVVDGVVIPDDPLVLLTQGKVSSVPYLLGVNNLEFNWLLPYIMKFPLNRQAMRKETITKMLWSTRTLLNITKEQVPLVVEEYLDNVNEHDWKMLRNRMMDIVQDATFVYATLQTAHYHRETPMMGICPAGHATTRMKSTCSWILPQEWA

SEQ ID NO: 3296 - protein, 127 aa, Homo sapiens
MKTGLFFLCLLGTAAAIPTNARLLSDHSKPTAETVAPDNTAIPSLRAEAEENEKETAVSTEDDSHHKAEKSSVLKSKEESHEQSAEQGKSSSQELGLKDQEDSDGHLSVNLEYAPTEGTLDIKEDMS

SEQ ID NO: 3297 - protein, 94 aa, Homo sapiens; identical to SEQ ID NO: 2593

SEQ ID NO: 3298 - protein, 137 aa, Homo sapiens
MAALSRALGPLRTPAPPLWIGLFLVATGSQQSLAQPLPGNTTEATPRSLRASGSLCGPHAKAPYLCEATHEPAAARIRAQVPDTRWSRVGGQRFYSRVLSPLHRGPSGHTEASAQRSHMGKLKEPQPQDHKPGLGAS

SEQ ID NO: 3299 - protein, 75 aa, Homo sapiens
MLKVHYPKFGVSEDCLYLNIYAPAHADTGSKLPVLVWFPGGAFKTGSASIFDGSALAAYEDVLVVVVQYRLGIFG

SEQ ID NO: 3300 - protein, 496 aa, Homo sapiens
MAPARTMARARLAPADCLNSFTAGVPGFVLDTNASVSNGATFLESPTVRRGWDCVRACCTTQNCNLALVELQPDRGEDAIAACFLINCLYEQNFVCKFAPREGFINYLTREVYRSYRQLRTQGFGGSGIPKAWAGIDLKVQPQEPLVLKDVENTDWRLLRGDTDVRVERKDPNQVELWGLKEGTYLFQLTVTSSDHPEDTANVTVTVLSTKQTEDYCLASNKVGRCRGSFPRWYYDPTEQICKSFVYGGCLGNKNNYLREEECILACRGVQGGPLRGSSGAQATFPQGPSMERRHPVCSGTCQPTQFRCSNGCCIDSFLECDDTPNCPDASDEAACEKYTSGFDELQRIHFPSDKGHCVDLPDTGLCKESIPRWYYNPFSEHCARFTYGGCYGNKNNFEEEQQCLESCRGISKKDVFGLRREIPIPSTGSVEMAVAVFLVICIVVVVAILGYCFFKNQRKDFHGHHHHPPPTPASSTVSTTEDTEHLVYNHTTRPL

SEQ ID NO: 3301 - protein, 175 aa, Homo sapiens
MPPGTRACRVPRPGRRAPRPRRDGEPGGHGVAPASAEEVGARPGLRAVARLLPQQHLQAGYVCERKDLLVNGCCNVNVPSTKQYCCDGCWPNGCCSAYEYCVSCCLQPNKQLLLERFLNRAAVAFQNLFMAVEDHFELCLAKCRTSSQSVQHENTYRDPIAKYCYGESPPELFPA

SEQ ID NO: 3302 - protein, 626 aa, Homo sapiens
MDLVLKRCLLHLAVIGALLAVGATKVPRNQDWLGVSRQLRTKAWNRQLYPEWTEAQRLDCWRGGQVSLKVSNDGPTLIGANASFSIALNFPGSQKVLPDGQVIWVNNTIINGDQVWGGQPVYPQETDDACIFPDGGPCPSGSWSQKRSFVYVWKTWGQYWQVLGGPVSGLSIGTGRAMLGTHTMEVTVYHRRGSRSYVPLAHSSSAFTITDQVPFSVSVSQLRALDGGNKHFLRNQPLTFALQLHDPSGYLAEADLSYTWDFGDSSGTLISRALVVTHTYLEPGPVTAQVVLQAAIPLTSCGSSPVPGTTDGHRPTAEAPNTTAGQVPTTEVVGTTPGQAPTAEPSGTTSVQVPTTEVISTAPVQMPTAESTAAQVTTTEWVETTARELPIPEPEGPDASSIMSTESITGSLGPLLDGTATLRLVKRQVPLDCVLYRYGSFSVTLDIVQGIESAEILQAVPSGEGDAFELTVSCQGGLPKEACMEISSPGCQPPAQRLCQPVLPSPACQLVLHQILKGGSGTYCLNVSLADTNSLAVVSTQLIMPVPGILLTGQEAGLGQVPLIVGILLVLMAVVLASLIYRRRLMKQDFSVPQLPHSSSHWLRLPRIFCSCPIGENSPLLSGQQV

SEQ ID NO: 3303 - protein, 536 aa, Homo sapiens
MPTLCSSFGLQVLLPEYLRERFVAAALSYITCSSEGELVCKENDCWCKCSPTFPECNCPDADIQAMEDSLLQIQDSWATHNRQFEESEEFQALLKRLPDDRFLNSTAISQFWAMDTSLQHRYQQLGAGLKVLFKKTHRILRRLFNLCKRCHRQPRFRLPKESSPRSLSYWWNRIQSLLYCGESTFPGTFLEQSHSCTCPYDQSSCQGPIPCALGEGPACAHCAPDNSTRCGSCNPGYVLAQGLCRPEVAESLENFLGLETDLQDLELKYLLQKQDSRIEVHSIFISNDMRLGSWFDPSWRKRMLLTLKSNKYKPGLVHVMLALSLQICLTKNSTLEPVMAIYVNPFGGSHSESWFMPVNEGSFPDWERTNVDAAAQCQNWTITLGNRWKTFFETVHVYLRSRIKSLDDSSNETIYYEPLEMTDPSKNLGYMKINTLQVFGYSLPFDPDAIRDLILQLDYPYTQGSQDSALLQLIELRDRVNQLSPPGKVRLDLFSCLLRHRLKLANNEVGRIQSSLRAFNSKLPNPVEYETGKLCS

SEQ ID NO: 3304 - protein, 140 aa, Homo sapiens
MSQSIEVLNLRTQRDFQYVLKMETQMKGLKAKFRQIEDDRKTLMTKHFQELKEKMDELLPLIPVLEQYKTDAKLITQFKEEIRNLSAVLTGIQEEIGAYDYEELHQRVLSLETRLRDCMKKLIDLKKRKEEEKRQQKGEA

SEQ ID NO: 3305 - protein, 372 aa, Homo sapiens
MAYIEQRRISHEGSPVKPVAIREFQKTEDMRRYLHQNRVPAEPSSLLSLSASHNQLSHTDLELHQRREQLVERTRREAQLAALQYEEEKIRTKQIQRDAVLDFVKQKASQSPQKQHPLLDGVDGECPFPSRRSQHTDDSALCMSLSGLNQVGCAATLPHSSAFTPLKSDDRPNALLSSPATETVHHSPAYSFPAAIQRNQPQRPESFLFRAGVRAETNKGHASPLPPSAAPTTDSTDSITGQNSRQREEELELIDQLRKHIEYRLKVSLPCDLGAALTDGVVLCHLANHVRPRSVPSIHVPSPAVPKLTMAKCRRNVENFLEACRKIGVPQEQLCLPLHILEEKGLSQVAVTVQALLELAPPKQQQHQLSAV

SEQ ID NO: 3306 - protein, 413 aa, Homo sapiens; identical to SEQ ID NO: 2399

SEQ ID NO: 3307 - protein, 846 aa, Homo sapiens; identical to SEQ ID NO: 2548

SEQ ID NO: 3308 - protein, 193 aa, Homo sapiens; identical to SEQ ID NO: 1844

SEQ ID NO: 3309 - protein, 270 aa, Homo sapiens
MHGSCSFLMLLLPLLLLLVATTGPVGALTDEEKRLMVELHNLYRAQVSPTASDMLHMRWDEELAAFAKAYARQCVWGHNKERGRRGENLFAITDEGMDVPLAMEEWHHEREHYNLSAATCSPGQMCGHYTQVVWAKTERIGCGSHFCEKLQGVEETNIELLVCNYEPPGNVKGKRPYQEGTPCSQCPSGYHCKNSLCEPIGSPEDAQDLPYLVTEAPSFRATEASDSRKMGAEGPDKPSVVSGLNSGPGHVWGPLLGLLLLPPLVLAGIF

SEQ ID NO: 3310 - protein, 233 aa, Homo sapiens
MDQVFMIDSKCESGKGRCSFNPNVNTVSVMINEELFSGMYIDFMGTDAAIFRSLTKRNAVRTDQHNSKWLSEPMFVDAHVIPDGTDPNDAKVYFFFKEKLTDNNRSTKQIHSMIARICPNDTGGLRSLVNKWTTFLKARLVCSVTDEDGPETHFDELEDVFLLETDNPRTTLVYGIFTTSSSVFKGSAVCVYHLSDIQTVFNGPFAHKEGPNHQLISYQGRIPYPRPGTNTCV

SEQ ID NO: 3311 - protein, 455 aa, Homo sapiens
MLHPETSPGRGHLLAVLLALLGTAWAEVWPPQLQEQAPMAGALNRKESFLLLSLHNRLRSWVQPPAADMRRLDWSDSLAQLAQARAALCGIPTPSLASGLWRTLQVGWNMQLLPAGLASFVEVVSLWFAEGQRYSHAAGECARNATCTHYTQLVWATSSQLGCGRHLCSAGQAAIEAFVCAYSPRGNWEVNGKTIVPYKKGAWCSLCTASVSGCFKAWDHAGGLCEVPRNPCRMSCQNHGRLNISTCHCHCPPGYTGRYCQVRCSLQCVHGRFREEECSCVCDIGYGGAQCATKVHFPFHTCDLRIDGDCFMVSSEADTYYRARMKCQRKGGVLAQIKSQKVQDILAFYLGRLETTNEVIDSDFETRNFWIGLTYKTAKDSFRWATGEHQAFTSFAFGQPDNHGLVWLSAAMGFGNCVELQASAAFNWNNQRCKTRNRYICQFAQEHISRWGPGS

SEQ ID NO: 3312 - protein, 153 aa, Homo sapiens
MARFWVCVAGAGFFLAFLVLHSRFCGSPVLRNFTFAVSWRTEKILYRLDVGWPKHPEYFTGTTFCVAVDSLNGLVYIGQRGDNIPKILVFTEDGYFLRAWNYTVDTPHGIFAASTLYEQSVWITDVGSDFMILWLHGENGTGPAKFNIPHSVT

SEQ ID NO: 3313 - protein, 124 aa, Homo sapiens
MWRCPLGLLLLLPLAGHLALGAQQGRGRRELAPGLHLRGIRDAGGRYCQEQDLCCRGRADDCALPYLGAICYCDLFCNRTVSDCCPDFWDFCLGVPPPFPPIQAPARRTGSGSVTKNHAWWIQT

SEQ ID NO: 3314 - protein, 258 aa, Homo sapiens [sequence omitted]

SEQ ID NO: 3315 - protein, 576 aa, Homo sapiens; identical to SEQ ID NO: 2667

SEQ ID NO: 3316 - protein, 452 aa, Homo sapiens
MADMHRGYADSPSKAGAAPYVQAFDSLLAGPVAEYLKISKEIGGDVQKHAEMVHTGLKLERALLVTASQCQQPAENKLSDLLAPISEQIKEVITFREKNRGSKLFNHLSAVSESIQALGWVAMAPKPGPYVKEMNDAAMFYTNRVLKEYKDVDKKHVDWVKAYLSIWTELQAYIKEFHTTGLAWSKTGPVAKELSGLPSGPSAGSCPPPPPPCPPPPPVSTISCSYESASRSSLFAQINQGESITHALKHVSDDMKTHKNPALKAQSGPVRSGPKPFSAPKPQTSPSPKRATKKEPAVLELEGKKWRVENQENVSNLVIEDTELKQVAYIYKCVNTTLQIKGKINSITVDNCKKLGLVFDDVVGIVEIINSKDVKVQVMGKVPTISINKTDGCHAYLSKNSLDCEIVSAKSSEMNVLIPTEGGDFNEFPVPEQFKTLWNGQKLVTTVTEIAG

SEQ ID NO: 3317 - protein, 510 aa, Homo sapiens
MGRPTQWPSLLLLLLLPGPPPVAGLEDAAFPHLGESLQPLPRACPLRCSCPRVDTVDCDGLDLRVFPDNITRAAQHLSLQNNQLQELPYNELSRLSGLRTLNLHNNLISSEGLPDEAFESLTQLQHLCVAHNKLSVAPQFLPRSLRVADLAANQVMEIFPLTFGEKPALRSVYLHNNQLSNAGLPPDAFRGSEAIATLSLSNNQLSYLPPSLPPSLERLHLQNNLISKVPRGALSRQTQLRELYLQHNQLTDSGLDATTFSKLHSLEYLDLSHNQLTTVPAGLPRTLAILHLGRNRIRQVEAARLHGARGLRYLLLQHNQLGSSGLPAGALRPLRGLHTLHLYGNGLDRVPPALPRRLRALVLPHNHVAALGARDLVATPGLTELNLAYNRLASARVHHRAFRRLRALRSLDLAGNQLTRLPMGLPTGLRTLQLQRNQLRMLEPEPLAGLDQLRELSLAHNRLRVGDIGPGTWHELQALQVRHRLVSHTVPRAPPSPCLPCHVPNILVSW

SEQ ID NO: 3318 - protein, 37 aa, Homo sapiens
MNSTLNFFIQSYNNASNDTYLYRVQRLIRSQMQQVHC

SEQ ID NO: 3319 - protein, 421 aa, Homo sapiens
MGRPTQWPSLLLLLLLPGPPPVAGLEDAAFPHLGESLQPLPRACPLRCSCPRVDTVDCDGLDLRVFPDNITRAAQHLSLQNNQLQELPYNELSRLSGLRTLNLHNNLISSEGLPDEAFESLTQLQHLCVAHNKNNLISKVPRGALSRQTQLRELYLQHNQLTDSGLDATTFSKLHSLEYLDLSHNQLTTVPAGLPRTLAILHLGRNRIRQVEAARLHGARGLRYLLLQHNQLGSSGLPAGALRPLRGLHTLHLYGNGLDRVPPALPRRLRALVLPHNHVAALGARDLVATPGLTELNLAYNRLASARVHHRAFRRLRALRSLDLAGNQLTRLPMGLPTGLRTLQLQRNQLRMLEPEPLAGLDQLRELSLAHNRLRVGDIGPGTWHELQALQVRHRLVSHTVPRAPPSPCLPCHVPNILVSW

SEQ ID NO: 3320 - protein, 330 aa, Homo sapiens
MSSWSRQRPKSPGGIQPHVSRTLFLLLLLAASAWGVTLSPKDCQVFRSDHGSSISCQPPAEIPGYLPADTVHLAVEFFNLTHLPANLLQGASKLQELHLSSNGLESLSPEFLRPVPQLRVLDLTRNALVLKENQLEVLEVSWLHGLKALGHLDLSGNRLRKLPPGLLANFTLLRTLDLGENQLETLPPDLLRGPLQLERLHLEGNKLQVLGKDLLLPQPDLRYLFLNGNKLARVAAGAFQGLRQLDMLDLSNNSLASVPEGLWASLGQPNWDMRDGFDISGNPWICDQNLSDLYRWLQAQKDKMFSQNDTRCAGPEAVKGQTLLAVAKSQ

SEQ ID NO: 3321 - protein, 604 aa, Homo sapiens; identical to SEQ ID NO: 1834

SEQ ID NO: 3322 - protein, 315 aa, Homo sapiens [sequence omitted]

SEQ ID NO: 3323 - protein, 68 aa, Homo sapiens
MQVSTAALAVLLCTMALCNQVLSAPLAADTPTACCFSYTSRQIPQNFIADYFETSSQCSKPSVMAAPG

SEQ ID NO: 3324 - protein, 1122 aa, Homo sapiens
MSLQEMFRFPMGLLLGSVLLVASAPATLEPPGCSNKEQQVTVSHTYKIDVPKSALVQVDADPQPLSDDGASLLALGEAREEQNIIFRHNIRLQTPQKDCELAGSVQDLLARVKKLEEEMVEMKEQCSAQRCCQGVTDLSRHCSGHGTFSLETCSCHCEEGREGPACERLACPGACSGHGRCVDGRCLCHEPYVGADCGYPACPENCSGHGECVRGVCQCHEDFMSEDCSEKRCPGDCSGHGFCDTGECYCEEGFTGLDCAQVVTPQGLQLLKNTEDSLLVSWEPSSQVDHYLLSYYPLGKELSGKQIQVPKEQHSYEILGLLPGTKYIVTLRNVKNEVSSSPQHLLATTDLAVLGTAWVTDETENSLDVEWENPSTEVDYYKLRYGPMTGQEVAEVTVPKSSDPKSRYDITGLHPGTEYKITVVPMRGELEGKPILLNGRTEIDSPTNVVTDRVTEDTATVSWDPVQAVIDKYVVRYTSADGDTKEMAVHKDESSTVLTGLKPGEAYKVYVWAERGNQGSKKADTNALTEIDSPANLVTDRVTENTATISWDPVQATIDRYVVRYTSAKDGETREVPVGKEQSSTVLTGLRPGVEYTVHVWAQKGAQESKKADTKAQTDIDSPQNLVTDWVTENTATVSWDPVQATIDRYVVHYTSANGETREVPVGKEQSSTVLTGLRPGMEYTVHVWAQKGNQESKKADTKAQTEIDGPKNLVTDWVTENMATVSWDPVQATIDKYMVRYTSADGETREVPVGKEHSSTVLTGLRPGMEYMVHVWAQKGAQESKKADTKAQTELDPPRNLRPSAVTQSGGILTWTPPSAQIHGYILTYQFPDGTVKEMQLGREDQRFALQGLEQGATYPVSLVAFKGGRRSRNVSTTLSTVGARFPHPSDCSQVQQNSNAASGLYTIYLHGDASRPLQVYCDMETDGGGWIVFQRRNTGQLDFFKRWRSYVEGFGDPMKEFWLGLDKLHNLTTGTPARYEVRVDLQTANESAYAIYDFFQVASSKERYKLTVGKYRGTAGDALTYHNGWKFTTFDRDNDIALSNCALTHHGGWWYKNCHLANPNGRYGETKHSEGVNWEPWKGHEFSIPYVELKIRPHGYSREPVLGRKKRTLRGRLRTF

SEQ ID NO: 3325 - protein, 298 aa, Homo sapiens
MLHPETSPGRGHLLAVLLALLGTAWAEVWPPQLQEQAPMAGALNRKESFLLLSLHNRLRSWVQPPAADMRRLDWSDSLNWLKPGPLWNPNPEPGVRPVAHPASGLEHAACPRAWRPLLKWSLWFAEGQRYSHAAGECARNATCTHYTQLVWATSSQLGCGRHLCSAGQAAIEAFVCAYSPRGNWEVNGKTIVPYKKGAWCSLCTASVSGCFKAWDHAGGLCEVPRNPCRMSCQNHGRLNISTCHCHCPPGYTGRYCQVRCSLQCVHGRFREEECSCVCDIGYEPSVPPRCIFPSTPVT

SEQ ID NO: 3326 - protein, 575 aa, Homo sapiens
MDLVLKRCLLHLAVIGALLAVGATKGSQVWGGQPVYPQETDDACIFPDGGPCPSGSWSQKRSFVYVWKTWGQYWQVLGGPVSGLSIGTGRAMLGTHTMEVTVYHRRGSRSYVPLAHSSSAFTITDQVPFSVSVSQLRALDGGNKHFLRNQPLTFALQLHDPSGYLAEADLSYTWDFGDSSGTLISRALVVTHTYLEPGPVTAQVVLQAAIPLTSCGSSPVPGTTDGHRPTAEAPNTTAGQVPTTEVVGTTPGQAPTAEPSGTTSVQVPTTEVISTAPVQMPTAESTGMTPEKVPVSEVMGTTLAEMSTPEATGMTPAEVSIVVLSGTTAAQVTTTEWVETTARELPIPEPEGPDASSIMSTESITGSLGPLLDGTATLRLVKRQVPLDCVLYRYGSFSVTLDIVQGIESAEILQAVPSGEGDAFELTVSCQGGLPKEACMEISSPGCQPPAQRLCQPVLPSPACQLVLHQILKGGSGTYCLNVSLADTNSLAVVSTQLIMPGQEAGLGQVPLIVGILLVLMAVVLASLIYRRRLMKQDFSVPQLPHSSSHWLRLPRIFCSCPIGENSPLLSGQQV

SEQ ID NO: 3327 - protein, 109 aa, Homo sapiens
  VARIANT 1: note = MOD_RES - Any amino acid
XSGQSLKSLNASSGHLALILSSIFGLLLLVLFILFLTWCRVQKQKHLPLRVSTRRRGSLEENLFHEMETCLKREDPHGTRTSDDTPNHGCEDASDTSLLGVLPASEATK

SEQ ID NO: 3328 - protein, 103 aa, Homo sapiens [sequence omitted]

SEQ ID NO: 3329 - protein, 962 aa, Homo sapiens; identical to SEQ ID NO: 2516

SEQ ID NO: 3330 - protein, 303 aa, Homo sapiens
MLHPETSPGRGHLLAVLLALLGTAWAEVWPPQLQEQAPMAGALNRKESFLLLSLHNRLRSWVQPPAADMRRLDWSDSLAQLAQARAALCGTPTPSLASGLWRTLQVGWNMQLLPAGLVSFVEVVSLWFAEGQRYSHAAGECARNATCTHYTQLVWATSSQLGCGRHLCSAGQAAIEAFVCAYSPRGNWEVNGKTIVPYKKGAWCSLCTASVSGCFKAWDHAGGLCEVPRNPCRMSCQNHGRLNISTCHCHCPPGYTGRYCQVRCSLQCVHGRFREEECSCVCDIGYGEPSVPPRCIFPSTPVT

SEQ ID NO: 3331 - protein, 451 aa, Homo sapiens
MEATGTDEVDKLKTKFISAWNNMKYSWVLKTKTYFSRNSPVLLLGKCYHFKYEDEDKTLPAESGCTIEDHVIAGNVEEFRKDFISRIWLTYREEFPQIEGSALTTDCGWGCTLRTGQMLLAQGLILHFLGRAWTWPDALNIENSDSESWTSHTVKKFTASFEASLSGEREFKTPTISLKETIGKYSDDHEMRNEVYHRKIISWFGDSPLALFGLHQLIEYGKKSGKKAGDWYGPAVVAHILRKAVEEARHPDLQGITIYVAQDCTVYNSDVIDKQSASMTSDNADDKAVIILVPVRLGGERTNTDYLEFVKGILSLEYCVGIIGGKPKQSYYFAGFQDDSLIYMDPHYCQSFVDVSIKDFPLETFHCPSPKKMSFRKMDPSCTIGFYCRNVQDFKRASEEITKMLKFSSKEKYPLFTFVNGHSRDYDFTSTTTNEEDLFSEDEKKQKKKKK

SEQ ID NO: 3332 - protein, 518 aa, Homo sapiens
MRTWDYRWSLALVAQTGVHCCNLSSLQPLPPRFKRFSCLSLSSGWDYSNSGNMKPPLLVFIVCLLWLKDSHCAPTWKDKTAISENLKSFSEVGEIDADEEVKKALTGIKQMKIMMERKEKEHTNLMSTLKKCREEKQEALKLLNEVQEHLEEEERLCRESLADSWGECRSCLENNCMRIYTTCQPSWSSVKNKIERFFRKIYQFLFPFHEDNEKDLPISEKLIEEDAQLTQMEDVFSQLTVDVNSLFNRSFNVFRQMQQEFDQTFQSHFISDTDLTEPYFFPAFSKEPMTKADLEQCWDIPNFFQLFCNFSVSIYESVSETITKMLKAIEDLPKQDKAPDHGGLISKMLPGQDRGLCGELDQNLSRCFKFHEKCQKCQAHLSEDCPDVPALHTELDEAIRLVNVSNQQYGQILQMTRKHLEDTAYLVEKMRGQFGWVSELANQAPETEIIFNSIQVVPRIHEGNISKQDETMMTDLSILPSSNFTLKIPLEESAESSNFIGYVVAKALQHFKEHFKTW

SEQ ID NO: 3333 - protein, 571 aa, Homo sapiens
VEMRKWSSEPGPEPDTVEAVIEYMYTGRIRVSTGSVHEVLELADRFLLIRLKEFCGEFLKKKLHLSNCVAIHSLAHMYTLSQLALKAADMIRRNFHKVIQDEEFYTLPFHLIRDWLSDLEITVDSEEVLFETVLKWVQRNAEERERYFEELFKLLRLSQMKPTYLTRHVKPERLVANNEVCVKLVADAVERHALRAENIQSGTCQHPTSHVSLLPRYGQNMDVIMVIGGVSEGGDYLSECVGYFVDEDRWVNLPHIHNHLDGHAVAVTESYVYVAGSMEPGFAKTVERYNPNLNTWEHVCSLMTRKHSFGLTEVKGKLYSIGGHGNFSPGFKDVTVYNPELDKWHNLESAPKILRDVKALAIEDRFVYIAARTPVDRDTEDGLKAVITCYDTETRQWQDVESLPLIDNYCFFQMSVVNSNFYQTASCCPKSYCLENEEAVRKIASQVSDEILESLPPEVLSIEGAAICYYKDDVFIIGGWKNSDDIDKQYRKEAYRYCAERKRWMLLPPMPQPRCRATACHVRIPYRYLHGTQRYPMPQNLMWQKDRIRQMQEIHRHALNMRRVPSSQIEC

SEQ ID NO: 3334 - protein, 242 aa, Homo sapiens
MLKKISVGVAGDLNTVTMKLGCVLMAWALYLSLGVLWVAQMLLAAGCHAELFPAPILRAVPSAEPQAGSPMTLSCQTKLPLQRSAARLLFSFYKDGRIVQSRGLSSEFQIPTASEDHSGSYWCEAATEDNQVWKQSPQLEIRVQGASSSAAPPTLNPAPQKSAAPGTAPEEAPGPLPPPPTPSSEDPGFSSPLGMPDPHLYHQMGLLLKHMQDVRVLLGHLLMELRELSGHRKPGTTKATAE

SEQ ID NO: 3335 - protein, 463 aa, Homo sapiens
MYVSTRERYKWLRFSEDCLYLNVYAPARAPGDPQLPVMVWFPGGAFIVGAASSYEGSDLAAREKVVLVFLQHRLGIFGFLSTDDSHARGNWGLLDQMAALRWVQENIAAFGGDPGNVTLFGQSAGAMSISGLMMSPLASGLFHRAISQSGTALFRLFITSNPLKVAKKVAHLAGCNHNSTQILVNCLRALSGTKVMRVSNKMRFLQLNFQRDPEEIIWSMSPVVDGVVIPDDPLVLLTQGKVSSVPYLLGVNNLEFNWLLPYIMKFPLNRQAMRKETITKMLWSTRTLLNITKEQVPLVVEEYLDNVNEHDWKMLRNRMMDIVQDATFVYATLQTAHYHRDAGLPVYLYEFEHHARGIIVKPRTDGADHGDEMYFLFGGPFATGLSMGKEKALSLQMMKYWANFARTGNPNDGNLPCWPRYNKDEKYLQLDFTTRVGMKLKEKKMAFWMSLYQSQRPEKQRQF

SEQ ID NO: 3336 - protein, 404 aa, Homo sapiens
MFYHAYDSYLENAFPFDELRPLTCDGHDTWGSFSLTLIDALDTLLILGNVSEFQRVVEVLQDSVDFDIDVNASVFETNIRVVGGLLSAHLLSKKAGVEVEAGWPCSGPLLRMAEEAARKLLPAFQTPTGMPYGTVNLLHGVNPGETPVTCTAGIGTFIVEFATLSSLTGDPVFEDVARVALMRLWESRSDIGLVGNHIDVLTGKWVAQDAGIGAGVDSYFEYLVKGAILLQDKKLMAMFLEYNKAIRNYTRFDDWYLWVQMYKGTVSMPVFQSLEAYWPGLQSLIGDIDNAMRTFLNYYTVWKQFGGLPEFYNIPQGYTVEKREGYPLRPELIESAMYLYRATGDPTLLELGRDAVESIEKISKVECGFATVSVCMAPRTGKSLPLLLKSLFKGRALGVLTYQH

SEQ ID NO: 3337 - protein, 426 aa, Homo sapiens
MGWTDTLESAEDIFWKQADFGYARERLEEMHVLCQPKETSDSSLVCSRYLQYCRATNLYLDLRNIKRNHDRFKEDFFQSGEIGGHCKLDIRTLTSEGQRKSPLQSWFAELQSYTQLNFRPIEDAKCDIVIEKPTYFMKLDAGVNMYHHFCDFINLYITQHVNNSFSTDVYIVMWDTSSYGYGDLFSDTWNAFTDYDVIHLKTYDSKRVCFKEAVFSLLPRMRYGLFYNTPLISGCQNTGLFRAFAQHVLHRLNITQEGPKDGKIRVTILARSTEYRKILNQNELVNALKTVSTFEVQIVDYKYRELGFLDQLRITHNTDIFIGMHGAGLTHLLFLPDWAAVFELYNCEDERCYLDLARLRGVHYITWRRQNKVFPQDKGHHPTLGEHPKFTNYSFDVEEFMYLVLQAADHVLQHPKWPFKKKHDEL

SEQ ID NO: 3338 - protein, 365 aa, Homo sapiens
MKLGCVLMAWALYLSLGVLWVAQMLLVASSFSAASFETLQCEGPVCTEESSCHTEDDLTDAREAGFQVKAYTFSEPFHLIVSYDWLILQGPAKPVFEGDLLVLRCQAWQDWPLTQVTFYRDGSALGPPGPNREFSITVVQKADSGHYHCSGIFQSPGPGIPETASVVAITVQELFPAPILRAVPSAEPQAGSPMTLSCQTKLPLQRSAARLLFSFYKDGRIVQSRGLSSEFQIPTASEDHSGSYWCEAATEDNQVWKQSPQLEIRVQGASSSAAPPTLNPAPQKSAAPGTAPEEAPGPLPPPPTPSSEDPGFSSPLGMPDPHLYHQMGLLLKHMQDVRVLLGHLLMELRELSGHRKPGTTKATAE

SEQ ID NO: 3339 - protein, 468 aa, Homo sapiens
MRWILCWSLTLCLMAQTALGALHTKRPQVVTKYGTLQGKQMHVGKTPIQVFLGVPFSRPPLGILRFAPPEPPEPWKGIRDATTYPPGCLQESWGQLASMYVSTRERYKWLRFSEDCLYLNVYAPARAPGDPQLPVMVWFPGGAFIVGAASSYEGSDLAAREKVVLVFLQHRLGIFGFLSTDDSHARGNWGLLDQMAALRWVQENIAAFGGDPGNVTLFGQSAGAMSISGLMMSPLASGLFHRAISQSGTALFRLFITSNPLKVAKKVAHLAGCNHNSTQILVNCLRALSGTKVMRVSNKMRFLQLNFQRDPEEIIWSMSPVVDGVVIPDDPLVLLTQGKVSSVPYLLGVNNLEFNWLLPYIMKFPLNRQAMRKETITKMLWSTRTLLNITKEQVPLVVEEYLDNVNEHDWKMLRNRMMDIVQDATFVYATLQTAHYHRETPMMGICPAGHATTRMKSTCSWILPQEWA

SEQ ID NO: 3340 - protein, 251 aa, Homo sapiens
MSSYGYGDLFSDTWNAFTDYDVIHLKTYDSKRVCFKEAVFSLLPRMRYGLFYNTPLISGCQNTGLFRAFAQHVLHRLNITQEGPKDGKIRVTILARSTEYRKILNQNELVNALKTVSTFEVQIVDYKYRELGFLDQLRITHNTDIFIGMHGAGLTHLLFLPDWAAVFELYNCEDERCYLDLARLRGVHYITWRRQNKVFPQDKGHHPTLGEHPKFTNYSFDVEEFMYLVLQAADHVLQHPKWPFKKKHDEL

SEQ ID NO: 3341 - protein, 308 aa, Homo sapiens [sequence omitted]

SEQ ID NO: 3342 - protein, 953 aa, Homo sapiens
MRVLACLLAALVGIQAVERLRLADGPHGCAGRLEVWHGGRWGTVCDDGWDLRDAAVACRQLGCGGALAAPGGAFFGEGAGPVWLSELACRGNEGQLGLCHHRGWKAHICSHEEDAGVVCAGQRVANSRDDSTSPLDGAPWPGLLLELSPSTEEPLVTHAPRPAGNPQNASRKKSPRPKQAKSTRAPLLTTGAPRQERLRLVSGPHRCAGRLEVWHGGRWGTVCDDGWDLRDAAVACRELGCGGALAAPGGARFGPGAGPVWMDDVGCGGGEQALRDCPRSPWGRSNCDHSEDAGLVCTGPAPRLRLADGPHGCAGRLEVWHGGRWGSVCDDAWDLRDAAVACRELGCGGALAAPGGAFFGEGSGPIILDDLRCRGNETALRFCPARPWGQHDCHHREDAGAVCDGMPLGYVPPTAPTDSNNSTPREAASRPPSTMTSQAPGTAGVSPPPASPTVLWEPGPEAGSPQLRLVAGPSKCSGRLEVWHDQRWGTVCDDSWDMRDSAVVCRELGCGGPQQPDPAAGRFGWGAGPIWLDDVGCVGTEASLSDCPAAPWGKHNCAHNEDVGVTCTGPPGLDSISDPFSWSWIPGLGRDRDAWLPGELATKPSASVTASVLEKTTTKAPGKMPKSTKKWVTKNAKRPTTQPPVMPTTKHSRAQSPPDLTSQTTAALTTEASRRPTSEFTRRPTTEAPQRWTSHTTATLTPQAPRERTTKTMAMLTTQGPQEMTSESTIKSIPQASLEPSAEIPEGSPESPKDPAPSPSVSTTGESGLFRVRLADGPNRCAGRLEVWHAGRWGTVCDDNWDLRDATVACWELGCGKVRPRVGKTHYGPGTGPIWLDDMGCKGSEASLSDCPSGAWGKHNCDHEEDVGLTCTGYTDYDDYPPWTWDPTSREDLAKGTTTAGVPGHTLPWRTTRRPGSSSPAIRRLPDTEPEAGLREVMLLVQGLPGLQRLPSP

SEQ ID NO: 3343 - protein, 157 aa, Homo sapiens
MLRTESCRPRSPAGQVAAASPLLLLLLLLAWCAGACRGAPILPQGLQPEQQLQLWNEIDDTCSSFLSIDSQPQASNALEELCFMIMGMLPKPQEQDEKDNTKRSSVVHPLLQLVPHLHERRMKRFRVDEEFQSPFASQSRGYFLFRPRNGRRSAGFI

SEQ ID NO: 3344 - protein, 514 aa, Homo sapiens
MPSTVLPSTVLPSLLPTAGAGWSMRWILCWSLTLCLMAQTALGALHTKRPQVVTKYGTLQGKQMHVGKTPIQVFLGVPFSRPPLGILRFAPPEPPEPWKGIRDATTYPPGCLQESWGQLASMYVSTRERYKWLRFSEDCLYLNVYAPARAPGDPQLPVMVWFPGGAFIVGAASSYEGSDLAAREKVVLVFLQHRLGIFGFLSTDDSHARGNWGLLDQMAALRWVQENIAAFGGDPGNVTLFGQSAGAMSISGLMMSPLASGLFHRAISQSGTALFRLFITSNPLKVAKKVAHLAGCNHNSTQILVNCLRALSGTKVMRVSNKMRFLQLNFQRDPEEIIWSMSPVVDGVVIPDDPLVLLTQGKVSSVPYLLGVNNLEFNWLLPYNITKEQVPLVVEEYLDNVNEHDWKMLRNRMMDIVQDATFVYATLQTAHYHRGLSMGKEKALSLQMMKYWANFARTGNPNDGNLPCWPRYNKDEKYLQLDFTTRVGMKLKEKKMAFWMSLYQSQRPEKQRQF

SEQ ID NO: 3345 - protein, 353 aa, Homo sapiens
MSNPTQTDADSDLVGDVCDTNEDSDGDGHQDTKDNCPQLPNSSQLDSDNDGLGDECDGDDDNDGIPDYVPPGPDNCRLVPNPNQKDSDGNGVGDVCEDDFDNDAVVDPLDVCPESAEVTLTDFRAYQTVVLDPEGDAQIDPNWVVLNQGMEIVQTMNSDPGLAVGYTAFNGVDFEGTFHVNTVTDDDYAGFLFSYQDSGRFYVVMWKQTEQTYWQATPFRAVAQPGLQLKAVTSVSGPGEHLRNALWHTGHTPDQVRLLWTDPRNVGWRDKTSYRWQLLHRPQVGYIRVKLYEGPQLVADSGVIIDTSMRGGRLGVFCFSQENIIWSNLQYRCNDTVPEDFEPFRRQLLQGRV

SEQ ID NO: 3346 - protein, 357 aa, Homo sapiens
MEIEHTLDQMISKVGNHIDVLTGKWVAQDAGIGAGVDSYFEYLVKGAILLQDKKLMAMFLEYNKAIRNYTRFDDWYLWVQMYKGTVSMPVFQSLEAYWPGLQSLIGDIDNAMRTFLNYYTVWKQFGGLPEFYNIPQGYTVEKREGYPLRPELIESAMYLYRATGDPTLLELGRDAVESIEKISKVECGFATIKDLRDHKLDNRMESFFLAETVKYLYLLFDPTNFIHNNGSTFDAVITPYGECILGAGGYIFNTEAHPIDPAALHCCQRLKEEQWEVEDLMREFYSLKRSRSKFQKNTVSSGPWEPPARPGTLFSPENHDQARERKPAKQKVPLLSCPSQPFTSKLALLGQVFLDSS

SEQ ID NO: 3347 - protein, 446 aa, Homo sapiens; identical to SEQ ID NO: 2086

SEQ ID NO: 3348 - protein, 299 aa, Homo sapiens; identical to SEQ ID NO: 2115

SEQ ID NO: 3349 - protein, 485 aa, Homo sapiens
MDNNKHCKQDNCLLTPNSGQEDADNDGVGDQCDDDADGDGIKNVEDNCRLFPNKDQQNSDTDSFGDACDNCPNVPNNDQKDTDGNGEGDACDNDVDGDGIPNGLDNCPKVPNPLQTDRDEDGVGDACDSCPEMSNPTQTDADSDLVGDVCDTNEDSDGDGHQDTKDNCPQLPNSSQLDSDNDGLGDECDGDDDNDGIPDYVPPGPDNCRLVPNPNQKDSDGNGVGDVCEDDFDNDAVVDPLDVCPESAEVTLTDFRAYQTVVLDPEGDAQIDPNWVVLNQGMEIVQTMNSDPGLAVGYTAFNGVDFEGTFHVNTVTDDDYAGFLFSYQDSGRFYVVMWKQTEQTYWQATPFRAVAQPGLQLKAVTSVSGPGEHLRNALWHTGHTPDQVRLLWTDPRNVGWRDKTSYRWQLLHRPQVGYIRVKLYEGPQLVADSGVIIDTSMRGGRLGVFCFSQENIIWSNLQYRCNDTVPEDFEPFRRQLLQGRV

SEQ ID NO: 3350 - protein, 785 aa, Homo sapiens
MKHTLALLAPLLGLGLGLALSQLAAGATDCKFLGPAEHLTFTPAARARWLAPRVRAPGLLDSLYGTVRRFLSVVQLNPFPSELVKALLNELASVKVNEVVRYEAGYVVCAVIAGLYLLLVPTAGLCFCCCRCHRRCGGRVKTEHKALACERAALMVFLLLTTLLLLIGVVCAFVTNQRTHEQMGPSIEAMPETLLSLWGLVSDVPQELQAVAQQFSLPQEQVSEELDGVGVSIGSAIHTQLRSSVYPLLAAVGSLGQVLQVSVHHLQTLNATVVELQAGQQDLEPAIREHRDRLLELLQEARCQGDCAGALSWARTLELGADFSQVPSVDHVLHQLKGVPEANFSSMVQEENSTFNALPALAAMQTSSVVQELKKAVAQQPEGVRTLAEGFPGLEAASRWAQALQEVEESSRPYLQEVQRYETYRWIVGCVLCSVVLFVVLCNLLGLNLGIWGLSARDDPSHPEAKGEAGARFLMAGVGLSFLFAAPLILLVFATFLVGGNVQTLVCQSWENGELFEFADTPGNLPPSMNLSQLLGLRKNISIHQAYQQCKEGAALWTVLQLNDSYDLEEHLDINQIQRPVVKTSMEQLAQELQGLAQAQDNSVLGQRLQEEAQGLRNLHQEKVVPQQSLVAKLNLSVRALESSAPNLQLETSDVLANVTYLKGELPAWAARILRNVSECFLAREMGYFSQYVAWVREEVTQRIATCQPLSGALDNSRVILCDMMADPWNAFWFCLAWCTFFLIPSIIFAVKTSKYFRPIRKRLSSTSSEETQLFHIPRVTSLKL

SEQ ID NO: 3351 - protein, 263 aa, Homo sapiens
MGRVLEEARFAVAFTESMKEMAQAQWKARQISLAVTSAVPVQPHAKGKVYVQSQGIATTPNAAFNWNTFLQRSEINQSADNLHIFLLICGLRQVKDPLYLVDAFSAWHQEEPNVHLVIVGPEVDPVFTREVKAKVKRAAGVRLIGEMPQEDLHAVVKNCFAVVNSSVSEGMSAAILEAMDLEVPVLARNIPGNAAVVKHEVTGLLFSNPQEFVHLAKRLVSDPALEKEIVVNGREYVRMYHSWQVERDTYQQLIRKLEGSTED

SEQ ID NO: 3352 - protein, 151 aa, Homo sapiens
MKTAVMKELYSFLHHQNRYGSEQEFVDDLKNMWFGLYSRGNEEGDSSGFEHVFSGEVKKGKVTGFHNWIRFYLEEKEGLVDYYSHIYDGPVPVKPGRISLSCPDIYLGQVHLWEWQEVHRHSLHSVFHLIELRARKGHEGSCETEVLSSLD

SEQ ID NO: 3353 - protein, 120 aa, Homo sapiens
MLPQWLLLLFLLFFFLFLLTRGSLSPTKYNLLELKESCIRNQDCETGCCQRAPDNCESHCAEKGSEGSLCQTQVFFGQYRACPCLRNLTCIYSKNEKWLSIAYGRCQKIGRQKLAKKMFF

SEQ ID NO: 3354 - protein, 316 aa, Homo sapiens
MAEAALEAVRSELREFPAAARELCVPLAVPYLDKPPTPLHFYRDWVCPNRPCIIRNALQHWPALQKWSLPYFRATVGSTEVSVAVTPDGYADAVRGDRFMMPAERRLPLSFVLDVLEGRAQHPGVLYVQKQCSNLPSELPQLLPDLESHVPWASEALGKMPDAVNFWLGEAAAVTSLHKDHYENLYCVVSGEKHFLFHPPSDRPFIPYELYTPATYQLTEEGTFKVVDEEAMEKVPWIPLDPLAPDLARYPSYSQAQALRCTVRAGEMLYLPALWFHHVQQSQGCIAVNFWYDMEYDLKYSYFQLLDSLTKASGLD

SEQ ID NO: 3355 - protein, 218 aa, Homo sapiens; identical to SEQ ID NO: 2537

SEQ ID NO: 3356 - protein, 302 aa, Homo sapiens
MAMFLEYNKAIRNYTRFDDWYLWVQMYKGTVSMPVFQSLEAYWPGLQSLIGDIDNAMRTFLNYYTVWKQFGGLPEFYNIPQGYTVEKREGYPLRPELIESAMYLYRATGDPTLLELGRDAVESIEKISKVECGFATIKDLRDHKLDNRMESFFLAETVKYLYLLFDPTNFIHNNGSTFDAVITPYGECILGAGGYIFNTEAHPIDPAALHCCQRLKEEQWEVEDLMREFYSLKRSRSKFQKNTVSSGPWEPPARPGTLFSPENHDQARERKPAKQKVPLLSCPSQPFTSKLALLGQVFLDSS

SEQ ID NO: 3357 - protein, 152 aa, Homo sapiens
MLVDGPSERPALCFLLLAVAMSFFGSALSIDETRAHLLLKEKMMRLGGRLVLNTKEELANERLMTLKIAEMKEAMRTLIFPPSMHFFQAKHLIERSQVFNILRMMPKGAALHLHDIGIVTMDWLVRNVTYRPHCHICFTPRGIMQFRFAHPT

SEQ ID NO: 3358 - protein, 1316 aa, Homo sapiens
MEPRLFCWTTLFLLAGWCLPGLPCPSRCLCFKSTVRCMHLMLDHIPQVPQQTTVLDLRFNRIREIPGSAFKKLKNLNTLLLNNNHIRKISRNAFEGLENLLYLYLYKNEIHALDKQTFKGLISLEHLYIHFNQLEMLQPETFGDLLRLERLFLHNNKLSKIPAGSFSNLDSLKRLRLDSNALVCDCDLMWLGELLQGFAQHGHTQAAATCEYPRRLHGRAVASVTVEEFNCQSPRITFEPQDVEVPSGNTVYFTCRAEGNPKPEIIWIHNNHSLDLEDDTRLNVFDDGTLMIRNTRESDQGVYQCMARNSAGEAKTQSAMLRYSSLPAKPSFVIQPQDTEVLIGTSTTLECMATGHPHPLITWTRDNGLELDGSRHVATSSGLYLQNITQRDHGRFTCHANNSHGTVQAAANIIVQAPPQFTVTPKDQVVLEEHAVEWLCEADGNPPPVIVWTKTGGQLPVEGQHTVLSSGTLRIDRAAQHDQGQYECQAVSSLGVKKVSVQLTVKPKALAVFTQLPQDTSVEVGKNINISCHAQGEPQPIITWNKEGVQITESGKFHVDDEGTLTIYDAGFPDQGRYECVARNSFGLAVTNMFLTVTAIQGRQAGDDFVESSILDAVQRVDSAINSTRRHLFSQKPHTSSDLLAQFHYPRDPLIVEMARAGEIFEHTLQLIRERVKQGLTVDLEGKEFRYNDLVSPRSLSLIANLSGCTARRPLPNCSNRCFHAKYRAHDGTCNNLQQPTWGAALTAFARLLQPAYRDGIRAPRGLGLPVGSRQPLPPPRLVATVWARAAAVTPDHSYTRMLMHWGWFLEHDLDHTVPALSTARFSDGRPCSSVCTNDPPCFPMNTRHADPRGTHAPCMLFARSSPACASGRPSATVDSVYAREQINQQTAYIDGSNVYGSSERESQALRDPSVPRGLLKTGFPWPPSGKPLLPFSTGPPTECARQEQESPCFLAGDHRANEHLALAAMHTLWFREHNRMATELSALNPHWEGNTVYQEARKIVGAELQHITYSHWLPKVLGDPGTRMLRGYRGYNPNVNAGIINSFATAAFRFGHTLINPILYRLNATLGEISEGHLPFHKALFSPSRIIKEGGIDPVLRGLFGVAAKWRAPSYLLSPELTQRLFSAAYSAAVDSAATIIQRGRDHGIPPYVDFRVFCNLTSVKNFEDLQNEIKDSEIRQKLRKLYGSPGDIDLWPALMVEDLIPGTRVGPTLMCLFVTQFQRLRDGDRFWYENPGVFTPAQLTQLKQASLSRVLCDNGDSIQQVQADVFVKAEYPQDYLNCSEIPKVDLRVWQDCCADKQAGGTPEAGRVYRC

SEQ ID NO: 3359 - protein, 296 aa, Homo sapiens
MDPSKIAHTEYPVNTIIIHEDFDNNSMSNNIALLKTDTAMHFGNLVQSICFLGRMLHTPPVLQNCWVSGWNPTSATGNHMTMSVLRKIFVKDLDMCPLYKLQKTECGSHTKEETKTACLGDPGSPMMCQLQQFDLWVLRGVLNFGGETCPGLFLYTKVEDYSKWITSKAERAGPPLSSLHHWEKLISFSHHGPNATMTQKTYSDSELGHVGSYLQGQRRTITHSRLGNSSRDSLDVREKDVKESGRSPEASVQPLYYDYYGGEVGEGRIFAGQNRLYQPEEIILVSFVLVFFCSSI

SEQ ID NO: 3360 - protein, 935 aa, Homo sapiens
MRKPRRKSRQNAEGRRSPSPYSLKCSPTRETLTYAQAQRIVEVDIDGRLHRISIYDPLKIITEDELTAQDITECNSNKENSEQPQFPGKSKKPSSKGKKKESCSKHASGTSFHLPQPSFRMVDSGIQPEAPPLPAAYYRYIEKPPEDLDAEVEYDMDEEDLAWLDMVNEKRRVDGHSLVSADTFELLVDRLEKESYLESRSSGAQQSLIDEDAFCCVCLDDECHNSNVILFCDICNLAVHQECYGVPYIPEGQWLCRCCLQSPSRPVDCILCPNKGGAFKQTSDGHWAHVVCAIWIPEVCFANTVFLEPIEGIDNIPPARWKLTCYICKQKGLGAAIQCHKVNCYTAFHVTCAQRAGLFMKIEPMRETSLNGTIFTVRKTAYCEAHSPPGAATARRKGDSPRSISETGDEEGLKEGDGEEEEEEEVEEEEQEAQGGVSGSLKGVPKKSKMSLKQKIKKEPEEAGQDTPSTLPMLAVPQIPSYRLNKICSGLSFQRKNQFMQRLHNYWLLKRQARNGVPLIRRLHSHLQSQRNAEQREQDEKTSAVKEELKYWQKLRHDLERARLLIELIRKREKLKREQVKVQQAAMELELMPFNVLLRTTLDLLQEKDPAHIFAEPVNLSEVPDYLEFISKPMDFSTMRRKLESHLYRTLEEFEEDFNLIVTNCMKYNAKDTIFHRAAVRLRDLGGAILRHARRQAENIGYDPERGTHLPESPKLEDFYRFSWEDGMTNGFGKHTESGSDSECSLGLSGGLAFEACSGLTPPKRSRGKPALSRVPFLEGVNGDSDYNGSGRSLLLPFEDRGDLEPLELVWAKCRGYPSYPALIIDPKMPREGLLHNGVPIPVPPLDVLKLGEQKQAEAGEKLFLVLFFDNKRTWQWLPRDKVLPLGVEDTVDKLKMLEGRKTSIRKSVQVAYDRAMIHLSRVRGPHSFVTSSYL

SEQ ID NO: 3361 - protein, 89 aa, Homo sapiens
MKTGLFFLCLLGTAAAIPTNARLLSDHSKPTAETVAPDNTAIPSLRAEAEENEKETAVSTEDDSHHKAEKSSVLKSKEESHEQSAEQGK

SEQ ID NO: 3362 - protein, 218 aa, Homo sapiens; identical to SEQ ID NO: 2537

SEQ ID NO: 3363 - protein, 179 aa, Homo sapiens
MSLGPEVFLGPPEAQSFLSSHTRIPRANHWDLELLTPGNLERECLEERCSWEEAREYFEDNTLTERFWESYIYNGKGGRGRVDVASLAVGLTGGILLIVLAGLGAFWYLRWRQHRGQQPCPQEAGLISPLSPLNPLGPPTPLPPPPPPPPGLPTYEQALAASGVHDAPPPPYTSLRRPH

SEQ ID NO: 3364 - protein, 254 aa, Homo sapiens
MTLEDIVQREVWGTVVARGAPAPPGPVPTRGAASRRLSVSPASTSETSLYQVLLGARQLVQPGPHAMYARVRQVESNPLYQGTASSADVALVELEAPVPFTNYILPVCLPDPSVIFETGMNCWVTGWGSPSEEDLLPEPRILQKLAVPIIDTPKCNLLYSKDTEFGYQPKTIKNDMLCAGFEEGKKDACKGDSGGPLVCLVGQSWLQAGVISWGEGCARQNRPGVYIRVTAHHNWIHRIIPKLQFQPARLGGQK

SEQ ID NO: 3365 - protein, 632 aa, Homo sapiens
MTPPVLTTAETSVKPSVSAFTHSPPENTTGISSTISFHSRTLNLTDVIEELAQASTQTLKSTIASETTLSSKSHQSTTTRKAIIRHSTIPPFLSSSATLMPVPISPPFTQRAVTDNVATPISGLMTNTVVKLHESSRHNAKPQQLVAEVATSPKVHPNAKFTIGTTHFIYSNLLHSTPMPALTTVKSQNSKLTPSPWAENQFWHKPYSEIAEKGKKPEVSMLATTGLSEATTLVSDWDGQKNTKKSDFDKKPVQEATTSKLLPFDSLSRYIFEKPRIVGGKAASFTIPANSDAFLPCEAVGNPLPTIHWTRVPSGLDLSKRKQNSRVQVLPNGTLSIQRVEIQDRGQYLCSASNLFGTDHLHVTLSVVSYPPRILERRTKEITVHSGSTVELKCRAEGRPSPTVTWILANQTVVSESSQGSRQAVVTVDGTLVLHNLSIYDRGFYKCVASNPGGQDSLLVKIQVIAAPPVILEQRRQVIVGTWGESLKLPCTAKGTPQPSVYWVLSDGTEVKPLQFTNSKLFLFSNGTLYIRNLASSDRGTYECIATSSTGSERRVVMLTMEERVTSPRIEAASQKRTEVNFGDKLLLNCSATGEPKPQIMWRLPSKAVVDQQHRVAAGSTSTLMDPCLLDQ

SEQ ID NO: 3366 - protein, 226 aa, Homo sapiens
MDIIVLLPKGHCTKIQELQMTTVLKQNVHVFGVEGNSDELDEPIKTVFADVAFVKKHNLMSLNSINWSRVLVQMAHHFFAYFQCTPSLDTHPLPLVEVVVPTGAAGNLAAGYIAQKIGLPIRLVVAVNRNDIIHRTVQQGDFSLSEAVKSTLASAMDIQVPYNMERVFWLLSGSDSQVTRALMEQFERTQSVNLPKELHSKHSPVLPRPCLCSQVPGSCPGCWPDP

SEQ ID NO: 3367 - protein, 242 aa, Homo sapiens
MFQTGGLIVFYGLLAQTLPLNVNPALPLSPTGLAGSLTNALSNGLLSGGLLGILENLPLLDILKPGGGTSGGLLGGLLGKVTSVIPGLNNIIDIKVTDPQLLELGLVQSPDGHRLYVTIPLGIKLQVNTPLVGASLLRLAVKLDITAEILAVRDKQERIHLVLGDCTHSPGSLQISLLDGLGPLPIQGLLDSLTGILNKVLPELVQGNVCPLVNEVLRGLDITLVHDIVNMLIHGLQFVIKV

SEQ ID NO: 3368 - protein, 473 aa, Homo sapiens
MSLEASLCSLEECAAFQPSSPSPLQPQGPVKSNNIVTVTGISLCLFIIIATVLITLWRRFGRPAKCSTPARHNSIHSPSFRKNSDEENICELSEQRGSFSDGGDGPTGSPGDTGIPLTYRRSGPVPPEDDASGSESFQSNAQKIIPPLFSYRLAQQQLKEMKKKGLTETTKVYHVSQSPLTDTAIDAAPSAPLDLESPEEAAANKFRIKSPFPEQPAVSAGERPPSRLDLNVTQASCAISPSQTLIRKSQARHVGSRGGPSERSHARNAHFRRTASFHEARQARPFRERSMSTLTPRQAPAYSSRTRTCEQAEDRFRPQSRGAHLFPEKLEHFQEASGTRGPLNPLPKSYTLGQPLRKPDLGDHQAGLVAGIERTEPHRARRGPSPSHKSVSRKQSSPISPKDNYQRVSSLSPSQCRKDKCQSFPTHPEFAFYDNTSFGLTEAEQRMLDLPGYFGSNEEDETTSTLSVEKLVI

SEQ ID NO: 3369 - protein, 769 aa, Homo sapiens
MLSKKGIFPWILTCISEEMAFRTICVLVGVFICSICVKGSSQPQARVYLTFDELRETKTSEYFSLSHHPLDYRILLMDEDQDRIYVGSKDHILSLNINNISQEALSVFWPASTIKVEECKMAGKDPTHGCGNFVRVIQTFNRTHLYVCGSGAFSPVCTYLNRGRRSEDQVFMIDSKCESGKGRCSFNPNVNTVSVMINEELFSGMYIDFMGTDAAIFRSLTKRNAVRTDQHNSKWLSEPMFVDAHVIPDGTDPNDAKVYFFFKEKLTDNNRSTKQIHSMIARICPNDTGGLRSLVNKWTTFLKARLVCSVTDEDGPETHFDELEDVFLLETDNPRTTLVYGIFTTSSSVFKGSAVCVYHLSDIQTVFNGPFAHKEGPNHQLISYQGRIPYPRPGTCPGGAFTPNMRTTKEFPDDVVTFIRNHPLMYNSIYPIHKRPLIVRIGTDYKYTKIAVDRVNAADGRYHVLFLGTDRGTVQKVVVLPTNNSVSGELILEELEVFKNHAPITTMKISSKKQQLYVSSNEGVSQVSLHRCHIYGTACADCCLARDPYCAWDGHSCSRFYPTGKRRSRRQDVRHGNPLTQCRGFNLKAYRNAAEIVQYGVKNNTTFLECAPKSPQASIKWLLQKDKDRRKEVKLNERIIATSQGLLIRSVQGSDQGLYHCIATENSFKQTIAKINFKVLDSEMVAVVTDKWSPWTWASSVRALPFHPKDIMGAFSHSEMQMINQYCKDTRQQHQQGDESQKMRGDYGKLKALINSRKSRNRRNQLPES

SEQ ID NO: 3370 - protein, 313 aa, Homo sapiens
MPGWLTLPTLCRFLLWAFTIFHKAQGDPASHPGTTPPSYKVRWSKVEPGELRETLILITNGLHARGYGPLGGRARMRRGHRLDASLVIAGVRLEDEGRYRCELINGIEDESVALTLSLEGVVFPYQPSRGRYQFNYYEAKQACEEQDGRLATYSQLYQAWTEGLDWCNAGWLLEGSVRYPVLTARAPCGGRGRPGIRSYGPRDRMRDRYDAFCFTSALAGQVFFVPGRLTLSEAHAACRRRGAVVAKVGHLYAAWKFSGLDQCDGGWLADGSVRFPITTPRPRCGGLPDPGVRSFGFPRPQQAAYGTYCYAEN

SEQ ID NO: 3371 - protein, 362 aa, Homo sapiens
MAWTFECSRTTSPEPLSTSPCRTTSSRNSPTMSCPASVACEPSTSTTTSSPPKACLTRPSSPSPSCSTSAWHNKNNLISKVPRGALSRQTQLRELYLQHNQLTDSGLDATTFSKLHSLEYLDLSHNQLTTVPAGLPRTLAILHLGRNRIRQVEAARLHGARGLRYLLLQHNQLGSSGLPAGALRPLRGLHTLHLYGNGLDRVPPALPRRLRALVLPHNHVAALGARDLVATPGLTELNLAYNRLASARVHHRAFRRLRALRSLDLAGNQLTRLPMGLPTGLRTLQLQRNQLRMLEPEPLAGLDQLRELSLAHNRLRVGDIGPGTWHELQALQVRHRLVSHTVPRAPPSPCLPCHVPNILVSW

SEQ ID NO: 3372 - protein, 299 aa, Homo sapiens
MLHPETSPGRGHLLAVLLALLGTAWAEVWPPQLQEQAPMAGALNRKESFLLLSLHNRLRSWVQPPAADMRRLDWSDSLAQLAQGSPLWNPNPEPGVRPVAHPASGLEHAAAPRAWCPLSKWSLWFAEGQRYSHAAGECARNATCTHYTQLVWATSSQLGCGRHLCSAGQAAIEAFVCAYSPRGNWEVNGKTIVPYKKGAWCSLCTASVSGCFKAWDHAGGLCEVPRNPCRMSCQNHGRLNISTCHCHCPPGYTGRYCQVRCSLQCVHGRFREEECSCVCDIGYEPSVPPRCIFPSTPVT

SEQ ID NO: 3373 - protein, 348 aa, Homo sapiens
MLDTNLILLPLFQFIVPKEWNSKYRPVCIHLAGTGDHHYWRRRTLMARPMIKEARMASLLLENPYYGCRKPKDQVRSSLKNVSDLFVMGGALVLESAALLHWLEREGYGPLGMTGISMGGHMASLAVSNWPKPMPLIPCLSWSTASGVFTTTDSFKMGQEFVKHFTSSADKLTNLNLVSRTLNLDISNQVVSQKPADCHNSSKTSVSATSEGLLLQDTSKMKRFNQTLSTNKSGYTSRNPQSYHLLSKEQSRNSLRKESLIFMKGVMDECTHVANFSVPVDPSLIIVVQAKEDAYIPRTGVRSLQEIWPGCEIRYLEGGHISAYLFKQGLFRQAIYDAFDRFLHKYAN

SEQ ID NO: 3374 - protein, 347 aa, Homo sapiens
MRACISLVLAVLCGLAWADLYSAPTSCQGRCYEAFDKHHQCHCNARCQEFGNCCKDFESLCSDHEVSHSSDAITKEEIQSISEKIYRADTNKAQKEDIVLNSQNCISPSETRNQVDRCPKPLFTYVNEKLFSKPTYAAFINLLNNYQRATGHGEHFSAQELAEQDAFLREIMKTAVMKELYSFLHHQNRYGSEQEFVDDLKNMWFGLYSRGNEEGDSSGFEHVFSGEVKKGKVTGFHNWIRFYLEEKEGLVDYYSHIYDGPWDSYPDVLAMQFNWDGYYKEVGSAFIGSSPEFEFALYSLCFIARPGKVCQLSLGGYPLAVRTYTWDKSTYGNGKKYIATAYIVSST

SEQ ID NO: 3375 - protein, 287 aa, Homo sapiens
MLKKISVGVAGDLNTVTMKLGCVLMAWALYLSLGVLWVAQMLLAASFETLQCEGPVCTEESSCHTEDDLTDAREAGFQVKAYTFSEPFHLIVSYELFPAPILRAVPSAEPQAGSPMTLSCQTKLPLQRSAARLLFSFYKDGRIVQSRGLSSEFQIPTASEDHSGSYWCEAATEDNQVWKQSPQLEIRVQGASSSAAPPTLNPAPQKSAAPGTAPEEAPGPLPPPPTPSSEDPGFSSPLGMPDPHLYHQMGLLLKHMQDVRVLLGHLLMELRELSGHRKPGTTKATAE

SEQ ID NO: 3376 - protein, 604 aa, Homo sapiens; identical to SEQ ID NO: 1834

SEQ ID NO: 3377 - protein, 334 aa, Homo sapiens
MRSAGGRGEIKVRRELQPSKQVSGLTNHARTGQEKRNLQRLVLETPSQNIFFSPVSVSTSLAMLSLGAHSVTKTQILQGLGFNLTHTPESAIHQGFQHLVHSLTVPSKDLTLKMGSALFVKKELQLQANFLGNVKRLYEAEVFSTDFSNPSIAQARINSHVKKKTQGKVVDIIQGLDLLTAMVLVNHIFFKAKWEKPFHPEYTRKNFPFLVGEQVTVHVPMMHQKEQFAFGVDTELNCFVLQMDYKGDAVAFFVLPSKGKMRQLEQALSARTLRKWSHSLQKRWIEVFIPRFSISASYNLETILPKMGIQNVFDKNADFSGIAKRDSLQVSKVS

SEQ ID NO: 3378 - protein, 354 aa, Homo sapiens
MAPARRPAGARLLLVYAGLLAAAAAGLGSPEPGAPSRSRARREPPPGNELPRGPGESRAGPAARPPEPTAERAHSVDPRDAWMLFVRQSDKGVNGKKRSRGKAKKLKFGLPGPPGPPGPQGPPGPIIPPEALLKEFQLLLKGAVRQRERAEPEPCTCGPAGPVAASLAPVSATAGEDDDDVVGDVLALLAAPLAPGPRAPRVEAAFLCRLRRDALVERRALHELGVYYLPDAEGAFRRGPGLNLTSGQYRAPVAGFYALAATLHVALGEPPRRGPPRPRDHLRLLICIQSRCQRNASLEAIMGLESSSELFTISVNGVLYLQMGQWTSVFLDNASGCSLTVRSGSHFSAVLLGV

SEQ ID NO: 3379 - protein, 894 aa, Homo sapiens; identical to SEQ ID NO: 3201

SEQ ID NO: 3380 - protein, 894 aa, Homo sapiens; identical to SEQ ID NO: 3201

SEQ ID NO: 3381 - protein, 961 aa, Homo sapiens; identical to SEQ ID NO: 2513

SEQ ID NO: 3382 - protein, 852 aa, Homo sapiens; identical to SEQ ID NO: 2481

SEQ ID NO: 3383 - protein, 251 aa, Homo sapiens
MPHLASLFTASSRCCPHPLRPEGSGAMGPEALSSLLLLLLVASGDADMKGHFDPAKCRYALGMQDRTIPDSDISASSSWSDSTAARHSRLESSDGDGAWCPAGSVFPKEEEYLQVDLQRLHLVALVGTQGRHAGGLGKEFSRSYRLRYSRDGRRWMGWKDRWGQEVISGNEDPEGVVLKDLGPPMVARLVRFYPRADRVMSVCLRVELYGCLWRGEWLSFLGICFLSRGLEGGECGEWASRIPSPAGKLSL

SEQ ID NO: 3384 - protein, 241 aa, Homo sapiens
MKFILLWALLNLTVALAFNPDYTVSSTPPYLVYLKSDYLPCAGVLIHPLWVITAAHCNLPKLRVILGVTIPADSNEKHLQVIGYEKMIHHPHFSVTSIDHDIMLIKLKTEAELNDYVKLANLPYQTISENTMCSVSTWSYNVCDIYKEPDSLQTVNISVISKPQCRDAYKTYNITENMLCVGIVPGRRQPCKEVSAAPAICNGMLQGILSFADGCVLRADVGIYAKIFYYIPWIENVIQNN

SEQ ID NO: 3385 - protein, 511 aa, Homo sapiens
MAKGLSVQNDKHPGYQPALLLSPGAPLFADGPAYALLHLLLHEGKAEMADQAAAWLTRQGSFQGGFRSTQDTVIALDALSAYWIASHTTEERGLNVTLSSTGRNGFKSHALQLNNRQIRGLEEELQFSLGSKINVKVGGNSKGTLKVLRTYNVLDMKNTTCQDLQIEVTVKGHVEYTMEANEDYEDYEYDELPAKDDPDAPLQPVTPLQLFEGRRNRRRREAPKVVEEQESRVHYTVCIWRNGKVGLSGMAIADVTLLSGFHALRADLEKLTSLSDRYVSHFETEGPHVLLYFDSVPTSRECVGFEAVQEVPVGLVQPASATLYDYYNPERRCSVFYGAPSKSRLLATLCSAEVCQCAEGKCPRQRRALERGLQDEDGYRMKFACYYPRVEYGFQVKVLREDSRAAFRLFETKITQVLHFTKDVKAAANQMRNFLVRASCRLRLEPGKEYLIMGLDGATYDLEGHPQYLLDSNSWIEEMPSERLCRSTRQRAACAQLNDFLQEYGTQGCQV

SEQ ID NO: 3386 - protein, 688 aa, Homo sapiens [sequence omitted]

SEQ ID NO: 3387 - protein, 852 aa, Homo sapiens; identical to SEQ ID NO: 2481

SEQ ID NO: 3388 - protein, 578 aa, Homo sapiens; identical to SEQ ID NO: 2508

SEQ ID NO: 3389 - protein, 441 aa, Homo sapiens; identical to SEQ ID NO: 2345

SEQ ID NO: 3390 - protein, 894 aa, Homo sapiens; identical to SEQ ID NO: 3201

SEQ ID NO: 3391 - protein, 71 aa, Homo sapiens; identical to SEQ ID NO: 2529

SEQ ID NO: 3392 - protein, 919 aa, Homo sapiens; identical to SEQ ID NO: 2501

SEQ ID NO: 3393 - protein, 148 aa, Homo sapiens; identical to SEQ ID NO: 2485

SEQ ID NO: 3394 - protein, 1698 aa, Homo sapiens
MRLLWGLIWASSFFTLSLQKPRLLLFSPSVVHLGVPLSVGVQLQDVPRGQVVKGSVFLRNPSRNNVPCSPKVDFTLSSERDFALLSLQVPLKDAKSCGLHQLLRGPEVQLVAHSPWLKDSLSRTTNIQGINLLFSSRRGHLFLQTDQPIYNPGQRVRYRVFALDQKMRPSTDTITVMVENSHGLRVRKKEVYMPSSIFQDDFVIPDISEPGTWKISARFSDGLESNSSTQFEVKKYVLPNFEVKITPGKPYILTVPGHLDEMQLDIQARYIYGKPVQGVAYVRFGLLDEDGKKTFFRGLESQTKLVNGQSHISLSKAEFQDALEKLNMGITDLQGLRLYVAAAIIEYPGGEMEEAELTSWYFVSSPFSLDLSKTKRHLVPGAPFLLQALVREMSGSPASGIPVKVSATVSSPGSVPEVQDIQQNTDGSGQVSIPIIIPQTISELQLSVSAGSPHPAIARLTVAAPPSGGPGFLSIERPDSRPPRVGDTLNLNLRAVGSGATFSHYYYMILSRGQIVFMNREPKRTLTSVSVFVDHHLAPSFYFVAFYYHGDHPVANSLRVDVQAGACEGKLELSVDGAKQYRNGESVKLHLETDSLALVALGALDTALYAAGSKSHKPLNMGKVFEAMNSYDLGCGPGGGDSALQVFQAAGLAFSDGDQWTLSRKRLSCPKEKTTRKKRNVNFQKAINEKLGQYASPTAKRCCQDGVTRLPMMRSCEQRAARVQQPDCREPFLSCCQFAESLRKKSRDKGQAGLQRALEILQEEDLIDEDDIPVRSFFPENWLWRVETVDRFQILTLWLPDSLTTWEIHGLSLSKTKGLCVATPVQLRVFREFHLHLRLPMSVRRFEQLELRPVLYNYLDKNLTVSVHVSPVEGLCLAGGGGLAQQVLVPAGSARPVAFSVVPTAAAAVSLKVVARGSFEFPVGDAVSKVLQIEKEGAIHREELVYELNPLDHRGRTLEIPGNSDPNMIPDGDFNSYVRVTASDPLDTLGSEGALSPGGVASLLRLPRGCGEQTMIYLAPTLAASRYLDKTEQWSTLPPETKDHAVDLIQKGYMRIQQFRKADGSYAAWLSRGSSTWLTAFVLKVLSLAQEQVGGSPEKLQETSNWLLSQQQADGSFQDLSPVIHRSMQGGLVGNDETVALTAFVTIALHHGLAVFQDEGAEPLKQRVEASISKASSFLGEKASAGLLGAHAAAITAYALTLTKAPADLRGVAHNNLMAMAQETGDNLYWGSVTGSQSNAVSPTPAPRNPSDPMPQAPALWIETTAYALLHLLLHEGKAEMADQAAAWLTRQGSFQGGFRSTQDTVIALDALSAYWIASHTTEERGLNVTLSSTGRNGFKSHALQLNNRQIRGLEEELQFSLGSKINVKVGGNSKGTLKVLRTYNVLDMKNTTCQDLQIEVTVKGHVEYTMEANEDYEDYEYDELPAKDDPDAPLQPVTPLQLFEGRRNRRRREAPKLTSLSDRYVSHFETEGPHVLLYFDSVPTSRECVGFEAVQEVPVGLVQPASATLYDYYNPERRCSVFYGAPSKSRLLATLCSAEVCQCAEGKCPRQRRALERGLQDEDGYRMKFACYYPRVEYGFQVKVLREDSRAAFRLFETKITQVLHFTKDVKAAANQMRNFLVRASCRLRLEPGKEYLIMGLDGATYDLEGHPQYLLDSNSWIEEMPSERLCRSTRQRAACAQLNDFLQEYGTQGCQV

SEQ ID NO: 3395 - protein, 661 aa, Homo sapiens
MDLVLKRCLLHLAVIGALLAVGATKVPRNQDWLGVSRQLRTKAWNRQLYPEWTEAQRLDCWRGGQVSLKVSNDGPTLIGANASFSIALNFPGSQKVLPDGQVIWVNNTIINGSQVWGGQPVYPQETDDACIFPDGGPCPSGSWSQKRSFVYVWKTWGQYWQVLGGPVSGLSIGTGRAMLGTHTMEVTVYHRRGSRSYVPLAHSSSAFTITDQVPFSVSVSQLRALDGGNKHFLRNQPLTFALQLHDPSGYLAEADLSYTWDFGDSSGTLISRALVVTHTYLEPGPVTAQVVLQAAIPLTSCGSSPVPGTTDGHRPTAEAPNTTAGQVPTTEVVGTTPGQAPTAEPSGTTSVQVPTTEVISTAPVQMPTAESTGMTPEKVPVSEVMGTTLAEMSTPEATGMTPAEVSIVVLSGTTAAQVTTTEWVETTARELPIPEPEGPDASSIMSTESITGSLGPLLDGTATLRLVKRQVPLDCVLYRYGSFSVTLDIVQGIESAEILQAVPSGEGDAFELTVSCQGGLPKEACMEISSPGCQPPAQRLCQPVLPSPACQLVLHQILKGGSGTYCLNVSLADTNSLAVVSTQLIMPGQEAGLGQVPLIVGILLVLMAVVLASLIYRRRLMKQDFSVPQLPHSSSHWLRLPRIFCSCPIGENSPLLSGQQV

SEQ ID NO: 3396 - protein, 171 aa, Homo sapiens; identical to SEQ ID NO: 3085

SEQ ID NO: 3397 - protein, 661 aa, Homo sapiens; identical to SEQ ID NO: 3395

SEQ ID NO: 3398 - protein, 578 aa, Homo sapiens; identical to SEQ ID NO: 2508

SEQ ID NO: 3399 - protein, 441 aa, Homo sapiens; identical to SEQ ID NO: 2345

SEQ ID NO: 3400 - protein, 148 aa, Homo sapiens; identical to SEQ ID NO: 2485

SEQ ID NO: 3401 - protein, 243 aa, Homo sapiens; identical to SEQ ID NO: 3045

SEQ ID NO: 3402 - protein, 243 aa, Homo sapiens; identical to SEQ ID NO: 3045

SEQ ID NO: 3403 - protein, 407 aa, Homo sapiens
MRLLAWLIFLANWGGARAEPGKFWHIADLHLDPDYKVSKDPFQVCPSAGSQPVPDAGPWGDYLCDSPWALINSSIYAMKEIEPEPDFILWTGDDTPHVPDEKLGEAAVLEIVERLTKLIREVFPGAFYCEKLPGPSGAGRIVVLNTNLYYTSNALTADMADPGQQFQWLEDVLTDASKAGDMVYIVGHVPPGFFEKTQNKAWFREGFNEKYLKVVRKHHRVIAGQFFGHHHTDSFRMLYDDAGVPISAMFITPGVTPWKTTLPGVVNGANNPAIRVFEYDRATLSLKDMVTYFMNLSQANAQGTPRWELEYQLTEAYGVPDASAHSMHTVLDRIAGDQSTLQRYYVYNSVSYSAGVCDEACSMQHVCAMRQVDIDAYTTCLYASGTTPVPQLPLLLMALLGLCTLVL

SEQ ID NO: 3404 - protein, 251 aa, Homo sapiens; identical to SEQ ID NO: 3383

SEQ ID NO: 3405 - protein, 251 aa, Homo sapiens; identical to SEQ ID NO: 3383

SEQ ID NO: 3406 - protein, 151 aa, Homo sapiens
MDLVLKRCLLHLAVIGALLAVGATKVPRNQDWLGVSRQLRTKAWNRQLYPEWTEAQRLDCWRGGQVSLKVSNDGPTLIGANASFSIALNFPGSQKVLPDGQVIWVNNTIINGSQVWGGQPVYPQETDDACIFPDGGPCPSGSWSQKRSFVY

SEQ ID NO: 3407 - protein, 71 aa, Homo sapiens; identical to SEQ ID NO: 2529

SEQ ID NO: 3408 - protein, 148 aa, Homo sapiens; identical to SEQ ID NO: 2485

SEQ ID NO: 3409 - protein, 148 aa, Homo sapiens; identical to SEQ ID NO: 2485

SEQ ID NO: 3410 - protein, 441 aa, Homo sapiens; identical to SEQ ID NO: 2345

SEQ ID NO: 3411 - protein, 688 aa, Homo sapiens [sequence omitted]

SEQ ID NO: 3412 - protein, 441 aa, Homo sapiens
MEFEFDRLRAFQAMQVHCNNMHTLGARLPGGVECRFRRGPAMAWEGEPMRHNLGGNLGDPRARAVSVPLGGRVARFLQCRFLFAGPWLLFSEISFISDVVNNSSPALGGTFPPAPWWPPGPPPTNFSSLELEPRGQQPVAKAEGSPTAILIGCLVAIILLLLLIIALMLWRLHWRRLLSKVLESHPRTRSPGLVGIRPTLLPVSPMALRCCSPIQPTASFWPLTPVPLEARAPPHPPGPNPPTPRGVTGGNTYAVPALPPGAVGDGPPRVDFPRSRLRFKEKLGEGQFGEVHLCEVDSPQDLVSLDFPLNVRKGHPLLVAVKILRPDATKNARNDFLKEVKIMSRLKDPNIIRLLGVCVQDDPLCMITDYMENGDLNQFLSAHQLEDKAAEGAPGDGQAAQGPTISYPMLLHVAAQIASGMRYLATLNFVHFWGERHRFLH

SEQ ID NO: 3413 - protein, 852 aa, Homo sapiens; identical to SEQ ID NO: 2481

SEQ ID NO: 3414 - protein, 243 aa, Homo sapiens; identical to SEQ ID NO: 3045

SEQ ID NO: 3415 - protein, 919 aa, Homo sapiens; identical to SEQ ID NO: 2501

SEQ ID NO: 3416 - protein, 899 aa, Homo sapiens; identical to SEQ ID NO: 2512

SEQ ID NO: 3417 - protein, 148 aa, Homo sapiens; identical to SEQ ID NO: 2485

SEQ ID NO: 3418 - protein, 171 aa, Homo sapiens; identical to SEQ ID NO: 3085

SEQ ID NO: 3419 - protein, 221 aa, Homo sapiens
MTTQLRVVHLLPLLLACFVQTSPKQEKMKMDCHKDEKGTIYDYEAIALNKNEYVSFKQYVGKHILFVNVATYCGLTAQYPELNALQEELKPYGLVVLGFPCNQFGKQEPGDNKEILPGLKYVRPGGGFVPSFQLFEKGDVNGEKEQKVFSFLKHSCPHPSEILGTFKSISWDPVKVHDIRWNFEKFLVGPDGIPVMRWSHRATVSSVKTDILAYLKQFKTK

SEQ ID NO: 3420 - protein, 148 aa, Homo sapiens; identical to SEQ ID NO: 2485

SEQ ID NO: 3421 - protein, 578 aa, Homo sapiens; identical to SEQ ID NO: 2508

SEQ ID NO: 3422 - protein, 578 aa, Homo sapiens; identical to SEQ ID NO: 2508

SEQ ID NO: 3423 - protein, 251 aa, Homo sapiens; identical to SEQ ID NO: 3383

SEQ ID NO: 3424 - protein, 587 aa, Homo sapiens
MRPRGLPPLLVVLLGCWASVSAQTDATPAVTTEGLNSTEAALATFGTFPSTRPPGTPRAPGPSSGPRPTPVTDVAVLCVCDLSPAQCDINCCCDPDCSSVDFSVFSACSVPVVTGDSQFCSQKAVIYSLNFTANPPQRVFELVDQINPSIFCIHITNYKPALSFINPEVPDENNFDTLMKTSDGFTLNAESYVSFTTKLDIPTAAKYEYGVPLQTSDSFLRFPSSLTSSLCTDNNPAAFLVNQAVKCTRKINLEQCEEIEALSMAFYSSPEILRVPDSRKKVPITVQSIVIQSLNKTLTRREDTDVLQPTLVNAGHFSLCVNVVLEVKYSLTYTDAGEVTKADLSFVLGTVSSVVVPLQQKFEIHFLQENTQPVPLSGNPGYVVGLPLAAGFQPHKGSGIIQTTNRYGQLTILHSTTEQDCLALEGVRTPVLFGYTMQSGCKLRLTGALPCQLVAQKVKSLLWGQGFPDYVAPFGNSQAQDMLDWVPIHFITQSFNRKDSCQLPGALVIEVKWTKYGSLLNPQAKIVNVTANLISSSFPEANSGNERTILISTAVTFVDVSAPAEAGFRAPPAINARLPFNFFFPFV

SEQ ID NO: 3425 - protein, 688 aa, Homo sapiens [sequence omitted]

SEQ ID NO: 3426 - protein, 100 aa, Homo sapiens
MTTQLRVVHLLPLLLACFVQTSPKQEKMKMDCHKDEKGTIYDYEAIALNKNEYVSFKQYVGKHILFVNVATYCGLTAQYPGMSVQGEDLYLVSSFLRKGM

SEQ ID NO: 3427 - protein, 234 aa, Homo sapiens
MKTLAGLVLGLVIFDAAVTAPTLESINYDSETYDATLEDLDNLYNYENIPVDKVEIEIATVMPSGNRELLTPPPQPEKAQEEEEEEESTPRLIDGSSPQEPEFTGVLGPHTNEDFPTCLLCTCISTTVYCDDHELDAIPPLPKNTAYFYSRFNRIKKINKNDFASLSDLKRIDLTSNLISEIDEDAFRKLPQLRELVLRDNKIRQLPELPTTLTFIDISNNRLGRKGIKQEAFK

SEQ ID NO: 3428 - protein, 852 aa, Homo sapiens; identical to SEQ ID NO: 2481

SEQ ID NO: 3429 - protein, 919 aa, Homo sapiens; identical to SEQ ID NO: 2501

SEQ ID NO: 3430 - protein, 578 aa, Homo sapiens; identical to SEQ ID NO: 2508

SEQ ID NO: 3431 - protein, 171 aa, Homo sapiens; identical to SEQ ID NO: 3085

SEQ ID NO: 3432 - protein, 688 aa, Homo sapiens [sequence omitted]

SEQ ID NO: 3433 - protein, 1698 aa, Homo sapiens; identical to SEQ ID NO: 3394

SEQ ID NO: 3434 - protein, 241 aa, Homo sapiens; identical to SEQ ID NO: 3384

SEQ ID NO: 3435 - protein, 243 aa, Homo sapiens; identical to SEQ ID NO: 3045

SEQ ID NO: 3436 - protein, 661 aa, Homo sapiens; identical to SEQ ID NO: 3395

SEQ ID NO: 3437 - protein, 919 aa, Homo sapiens; identical to SEQ ID NO: 2501

SEQ ID NO: 3438 - protein, 71 aa, Homo sapiens; identical to SEQ ID NO: 2529

SEQ ID NO: 3439 - protein, 894 aa, Homo sapiens; identical to SEQ ID NO: 3201

SEQ ID NO: 3440 - protein, 90 aa, Homo sapiens
MQLFLLLCLVLLSPQGASLHRHHPREMKKRVEDLHVGATVAPSSRRDFTFDLYRALASAAPSQSIFFSPVSISMSLAMLSLGAGSSTKMQ

SEQ ID NO: 3441 - protein, 205 aa, Homo sapiens; identical to SEQ ID NO: 2215

SEQ ID NO: 3442 - protein, 9 aa, Homo sapiens
MSFSATILF

SEQ ID NO: 3443 - protein, 199 aa, Homo sapiens
MSFSATILFSPPSGSEARCCCCACKSETNGGNTGSQGGNPPPSTPITVTGHGLAVQSSEQLLHVIYQRVDKAVGLAEAALGLARANNELLKRLQEEVGDLRQGKVSIPDEDGESRAHSSPPEEPGPLKESPGEAFKALSAVEEECDSVGSGVQVVIEELRQLGAASVGPGPLGFPATQRDMRLPGCTLAASEAAPLLNP

SEQ ID NO: 3444 - protein, 210 aa, Homo sapiens; identical to SEQ ID NO: 2772

SEQ ID NO: 3445 - protein, 406 aa, Homo sapiens; identical to SEQ ID NO: 2150

SEQ ID NO: 3446 - protein, 199 aa, Homo sapiens; identical to SEQ ID NO: 2193

SEQ ID NO: 3447 - protein, 136 aa, Homo sapiens
MSFSATILFSPPSGSEARCCCCACKSETNGGNTGSQGGNPPPSTPITVTGHGLAVQSSEQLLHVIYQRVDKAVGLAEAALGLARANNELLKRLQEEVGDLRQGKVSIPDEDGESRAHSSPPEEPGPLKESPGEAFK

SEQ ID NO: 3448 - protein, 83 aa, Homo sapiens
MSFSATILFSPPSGSEARCCCCACKSETNGGNTGSQGGNPPPSTPITVTGHGLAVQSSEQLLHVIYQRVDKAVGLAEAALGLA

SEQ ID NO: 3449 - protein, 9 aa, Homo sapiens
MSFSATILF

SEQ ID NO: 3450 - protein, 172 aa, Homo sapiens
MQLFLLLCLVLLSPQGASLHRHHPREMKKRVEDLHVGATVAPSSRRDFTFDLYRALASAAPSQSIFFSPVSISMSLAMLSLGAGSSTKMQILEGLGLNLQKSSEKELHRGFQQLLQELNQPRDGFQLSLGNALFTDLVVDLQDTFVSAMKTLYLADTFPTNFRDSAGAMKQI

SEQ ID NO: 3451 - protein, 204 aa, Homo sapiens
MPGGKKVAGGGSSGATPTSAAATAPSGVRRLETSEGTSAQRDEEPEEEGEEDLRDGGVPFFVNRGGLPVDEATWERMWKHVAKIHPDGEKVAQRIRGATDLPKIPIPSVPTFQPSTPVPERLEAVQRYIRELQYNHTGTQFFEIKKSRPLTGLMDLAKEMTKEALPIKCLEAVILGMYPSSPEGEGSGLLWASASCSESEGGVG

SEQ ID NO: 3452 - protein, 406 aa, Homo sapiens; identical to SEQ ID NO: 2150

SEQ ID NO: 3453 - protein, 1278 aa, Homo sapiens; identical to SEQ ID NO: 2907

SEQ ID NO: 3454 - protein, 86 aa, Homo sapiens
MQLFLLLCLVLLSPQGASLHRHHPREMKKRVEDLHVGATVAPSSRRDFTFDLYRALASAAPSQSIFFSPVSISMSLAMLSLGAGSS

SEQ ID NO: 3455 - protein, 301 aa, Homo sapiens
MQLFLLLCLVLLSPQGASLHRHHPREMKKRVEDLHVGATVAPSSRRDFTFDLYRALASAAPSQSIFFSPVSISMSLAMLSLGAGSSTKMQILEGLGLNLQKSSEKELHRGFQQLLQELNQPRDGFQLSLGNALFTDLVVDLQDTFVSAMKTLYLADTFPTNFRDSAGAMKQINDYVAKQTKGKIVDLLKNLDSNAVVIMVNYIFFKAKWETSFNHKGTQEQDFYVTSETVVRVPMMSREDQYHYLLDRNLSCRVVGVPYQGNATALFILPSEGKMQQVENGLSEKTLRKWLKMFKKRYFQT

SEQ ID NO: 3456 - protein, 136 aa, Homo sapiens
METFPLLLLSLGLVLAEASESTMKIIKEEFTDEEMQYDMAKSGQEKQTIEILMNPILLVKNTSLSMSKDDMSSTLLTFRSLHYNDPKGNSSGNDKECCNDMTVWRKVSEANGSCKWSNNFIRSSTEVMRRVHRAPS

SEQ ID NO: 3457 - protein, 406 aa, Homo sapiens; identical to SEQ ID NO: 2150

SEQ ID NO: 3458 - protein, 205 aa, Homo sapiens; identical to SEQ ID NO: 2215

SEQ ID NO: 3459 - protein, 79 aa, Homo sapiens
MSFSATILFSPPSGSEARCCCCACKSETNGGNTGSQGGNPPPSTPITVTGHGLAVQSSEQLLHVIYQRVDKAVGLAEAA

SEQ ID NO: 3460 - protein, 205 aa, Homo sapiens; identical to SEQ ID NO: 2215

SEQ ID NO: 3461 - protein, 1262 aa, Homo sapiens
MRLLLLVPLLLAPAPGSSAPKVRRQSDTWGPWSQWSPCSRTCGGGVSFRERPCYSQRRDGGSSCVGPARSHRSCRTESCPDGARDFRAEQCAEFDGAEFQGRRYRWLPYYSAPNKCELNCIPKGENFYYKHREAVVDGTPCEPGKRDVCVDGSCRVVGCDHELDSSKQEDKCLRCGGDGTTCYPVAGTFDANDLSRGYNQILIVPMGATSILIDEAAASRNFLAVKNVRGEYYLNGHWTIEAARALPAASTILHYERGAEGDLAPERLHARGPTSEPLVIELISQEPNPGVHYEYHLPLRRPSPGFSWSHGSWSDCSAECGGGHQSRLVFCTIDHEAYPDHMCQRQPRPADRRSCNLHPCPETKRWKAGPWAPCSASCGGGSQSRSVYCISSDGAGIQEAVEEAECAGLPGKPPAIQACNLQRCAAWSPEPWGECSVSCGVGVRKRSVTCRGERGSLLHTAACSLEDRPPLTEPCVHEDCPLLSDQAWHVGTWGLCSKSCSSGTRRRQVICAIGPPSHCGSLQHSKPVDVEPCNTQPCHLPQEVPSMQDVHTPASNPWMPLGPQESPASDSRGQWWAAQEHPSARGDHRGERGDPRGDQGTHLSALGPAPSLQQPPYQQPLRSGSGPHDCRHSPHGCCPDGHTASLGPQWQGCPGAPCQQSRYGCCPDRVSVAEGPHHAGCTKSYGGDSTGGMPRSRAVASTVHNTHQPQAQQNEPSECRGSQFGCCYDNVATAAGPLGEGCVGQPSHDWAARWYFVASVGQCNRFWYGGCHGNANNFASEQECMSSCQGSLHGPRRPQPGASGRSTHTDGGGSSPAGEQEPSQHRTGAAVQRKPWPSGGLWRQDQQPGPGEAPHTQAFGEWPWGQELGSRAPGLGGDAGSPAPPFHSSSYRISLAGVEPSLVQAALGQLVRLSCSDDTAPESQAAWQKDGQPISSDRHRLQFDGSLIIHPLQAEDAGTYSCGSTRPGRDSQKIQLRIIGGDMAVLSEAELSRFPQPRDPAQDFGQAGAAGPLGAIPSSHPQPANRLRLDQNQPRVVDASPGQRIRMTCRAEGFPPPAIEWQRDGQPVSSPRHQLQPDGSLVISRVAVEDGGFYTCVAFNGQDRDQRWVQLRVLGELTISGLPPTVTVPEGDTARLLCVVAGESVNIRWSRNGLPVQADGHRVHQSPDGTLLIYNLRARDEGSYTCSAYQGSQAVSRSTEVKVVSPAPTAQPRDPGRDCVDQPELANCDLILQAQLCGNEYYSSFCCASCSRFQPHAQPIWQ

SEQ ID NO: 3462 - protein, 106 aa, Homo sapiens
MSFSATILFSPPSGSEARCCCCACKSETNGGNTGSQGGNPPPSTPITVTGHGLAVQSSEQLLHVIYQRVDKAVGLAEAALGLARANNELLKRLQEEVGDLRQGKVS

SEQ ID NO: 3463 - protein, 147 aa, Homo sapiens; identical to SEQ ID NO: 2716

SEQ ID NO: 3464 - protein, 144 aa, Homo sapiens
MQLFLLLCLVLLSPQGASLHRHHPREMKKRVEDLHVGATVAPSSRRDFTFDLYRALASAAPSQSIFFSPVSISMSLAMLSLGAGSSTKMQILEGLGLNLQKSSEKELHRGFQQLLQELNQPRDGFQLSLGNALFTDLVVDLQDT

SEQ ID NO: 3465 - protein, 179 aa, Homo sapiens; identical to SEQ ID NO: 3187

SEQ ID NO: 3466 - protein, 147 aa, Homo sapiens; identical to SEQ ID NO: 2716

SEQ ID NO: 3467 - protein, 199 aa, Homo sapiens; identical to SEQ ID NO: 2193

SEQ ID NO: 3468 - protein, 50 aa, Homo sapiens
MSFSATILFSPPSGSEARCCCCACKSETNGGNTGSQGGNPPPSTPITVTG

SEQ ID NO: 3469 - protein, 24 aa, Homo sapiens
MQLFLLLCLVLLSPQGASLHRHHP

SEQ ID NO: 3470 - protein, 210 aa, Homo sapiens; identical to SEQ ID NO: 2772

SEQ ID NO: 3471 - protein, 11 aa, Homo sapiens
MSFSATILFSP

SEQ ID NO: 3472 - protein, 147 aa, Homo sapiens; identical to SEQ ID NO: 2596

SEQ ID NO: 3473 - protein, 231 aa, Homo sapiens
MQLFLLLCLVLLSPQGASLHRHHPREMKKRVEDLHVGATVAPSSRRDFTFDLYRALASAAPSQSIFFSPVSISMSLAMLSLGAGSSTKMQILEGLGLNLQKSSEKELHRGFQQLLQELNQPRDGFQLSLGNALFTDLVVDLQDTFVSAMKTLYLADTFPTNFRDSAGAMKQINDYVAKQTKGKIVDLLKNLDSNAVVIMVNYIFFKAKWETSFNHKGTQEQDFYVTSETVV

SEQ ID NO: 3474 - protein, 541 aa, Homo sapiens
MAKFGVHRILLLAISLTKCLESTKLLADLKKCGDLECEALINRVSAMRDYRGPDCRYLNFTKGEEISVYVKLAGEREDLWAGKGKEFGYFPRDAVQIEEVFISEEIQMSTKESDFLCLLGVSYTFDNEDSELNGDYGENIYPYEEDKDEKSSIYESDFQIEPGFYATYESTLFEDQVPALEAPEDIGSTSESKDWEEVVVESMEQDRIPEVHVPPSSAVSGVKEWFGLGGEQAEEKAFESVIEPVQESSFRSRKIAVEDENDLEELNNGEPQTEHQQESESEIDSVPKTQSELASESEHIPKPQSTGWFGGGFTSYLGFGDEDTGLELIAEESNPPLQDFPNSISSDKEATVPCTEILTEKKDTITNDSLSLKPSWFDFGFAILGFAYAKEDKIMLDDRKNEEDGGADEHEHPLTSELDPEKEQEIETIKIIETEDQIDKKPVSEKTDESDTIPYLKKFLYNFDNPWNFQNIPKETELPFPKQILDQNNVIENEETGEFSIDNYPTDNTKVMIFKSSYSLSGWYENIYIRIYFIFKHNLFL

SEQ ID NO: 3475 - protein, 414 aa, Homo sapiens; identical to SEQ ID NO: 2234

SEQ ID NO: 3476 - protein, 205 aa, Homo sapiens; identical to SEQ ID NO: 2215

SEQ ID NO: 3477 - protein, 171 aa, Homo sapiens
METFPLLLLSLGLVLAEASESTMKIIKEEFTDEEMQYDMAKSGQEKQTIEILMNPILLVKNTSLSMSKDDMSSTLLTFRSLHYNDPKGNSSGNDKECCNDMTVWRKVSEANGSCKWSNNFIRSSTEVMRRVHRAPSCKFVQNPGISCCESLELENTVCQFTTGKQFPRCQY

SEQ ID NO: 3478 - protein, 210 aa, Homo sapiens; identical to SEQ ID NO: 2772

SEQ ID NO: 3479 - protein, 178 aa, Homo sapiens; identical to SEQ ID NO: 3020

SEQ ID NO: 3480 - protein, 157 aa, Homo sapiens
MQLFLLLCLVLLSPQGASLHRHHPREMKKRVEDLHVGATVAPSSRRDFTFDLYRALASAAPSQSIFFSPVSISMSLAMLSLGAGSSTKMQILEGLGLNLQKSSEKELHRGFQQLLQELNQPRDGFQLSLGNALFTDLVVDLQDTFVSAMKTLYLADT

SEQ ID NO: 3481 - protein, 344 aa, Homo sapiens
MPPRMLVAPLPLHFLLAAVSSENRSGRRQWQQAVAAGSGPGRNSSRAIHWSLPRALVPATGTRASGSQKRQRPPKGQEALWSRPHSRHSAERAGGSHSDPGRLSAPLGLGLPSGRGRLTAMPGRAPLRTVPGALGAWLLGGLWAWTLCGLCSLGAVGAPRPCQAPQQWEGRQVMYQQSSGRNSRALLSYDGLNQRVRVLDERKALIPCKRLFEYILLYKDGVMFQIDQATKQCSKMTLTQPWDPLDIPQNSTFEDQYSIGGPQEQITVQEWSDRKSARSYETWIGIYTVKDCYPVQETFTINYSVILSTRFFDIQLGIKDPSVFTPPSTCQMAQLEKMSEDCSW

SEQ ID NO: 3482 - protein, 106 aa, Homo sapiens
GQPKAAPSVTLFPPSSEELQANKATLVCLVSDFYPGAVTVAWKADGSPVKVGVETTKPSKQSNNKYAASSYLSLTPEQWKSHRSYSCRVTHEGSTVEKTVAPAECS

SEQ ID NO: 3483 - protein, 223 aa, Homo sapiens
MRLQRPRQAPAGGRRAPRGGRGSPYRPDPGRGARRLRRFQKGGEGAPRADPPWAPLGTMALLALLLVVALPRVWTDANLTARQRDPEDSQRTDEGDNRVWCHVCERENTFECQNPRRCKWTEPYCVIAAVKIFPRFFMVAKQCSAGCAAMERPKPEEKRFLLEEPMPFFYLKCCKIRYCNLEGPPINSSVFKEYAGSMGESCGGLWLAILLLLASIAAGLSLS

SEQ ID NO: 3484 - protein, 135 aa, Homo sapiens
MTPTPTAAWTPPPPLRPSAAAAGAQCRSCPFRGGCAPSTARTPPACMRPAGPCAPPTWPAPSTTTSTCTSRRAGCTASSASYSTLAAACSLRRSGVRWPPSSAYSTWAFASCCASSASCRCCCCCWAAGAWTSAW

SEQ ID NO: 3485 - protein, 513 aa, Homo sapiens; identical to SEQ ID NO: 2936

SEQ ID NO: 3486 - protein, 446 aa, Homo sapiens; identical to SEQ ID NO: 2086

SEQ ID NO: 3487 - protein, 311 aa, Homo sapiens
MGVMAMLMLPLLLLGISGLLFIYQEVSRLWSKSAVQNKVVVITDAISGLGKECARVFHTGGARLVLCGKNWERLENLYDALISVADPSKTFTPKLVLLDLSDISCVPDVAKEVLDCYGCVDILINNASVKVKGPAHKISLELDKKIMDANYFGPITLTKALLPNMISRRTGQIVLVNNIQGKFGIPFRTTYAASKHAALGFFDCLRAEVEEYDVVISTVSPTFIRSYHVYPEQGNWEASIWKFFFRKLTYGVHPVEVAEEVMRTVRRKKQEVFMANPIPKAAVYVRTFFPEFFFAVVACGVKEKLNVPEEG

SEQ ID NO: 3488 - protein, 197 aa, Homo sapiens; identical to SEQ ID NO: 2033

SEQ ID NO: 3489 - protein, 234 aa, Homo sapiens
MKVLLLTGLGALFFAYYWDDNFDPGGLDYLVLNHIGGAPAGTRARSPQATRWLMQVNFVSYVQLTSRALPSLTDSKGSLVVVSSLLGRVPTSFSTPYSAAKFALDGFFGSLRRELDVQDVNVAITMCVLGLRDRASAAEAVRSSTSRPRQPEHRGVPLQSQTAMFLPPTVPGARTLTETPLRGWPQPKMKSSRQKSKTEKNDGHLEPVTAWEVQVPRVRRLCRGLARPHLFGHD

SEQ ID NO: 3490 - protein, 75 aa, Homo sapiens
MKVLLLTGLGALFFAYYWDDNFDPASLQGARVLLTGANAGVGEELAYHYARLGSHLVLTAHTEALLQKAGWTTSC

SEQ ID NO: 3491 - protein, 74 aa, Homo sapiens
MQPSEMVMNPKQVFLSVLIFGVAGLLLFMYLQVWIEEQHTGRVEKRREQKVTSGWGPVKYLRPVPRIKPQVSHA

SEQ ID NO: 3492 - protein, 286 aa, Homo sapiens; identical to SEQ ID NO: 2219

SEQ ID NO: 3493 - protein, 152 aa, Homo sapiens
MQVNFVSYVQLTSRALPSLTDSKGSLVVVSSLLGRVPTSFSTPYSAAKFALDGFFGSLRRELDVQDVNVAITMCVLGLRDRASAAEAVRGVTRVKAAPGPKAALAVIRGGATRAAGVFYPWRFRLLCLLRRWLPRPRAWFIRQELNVTAAAA

SEQ ID NO: 3494 - protein, 951 aa, Homo sapiens
MRVLACLLAALVGIQAVERLRLADGPHGCAGRLEVWHGGRWGTVCDDGWDLRDAAVACRQLGCGGALAAPGGAFFGEGAGPVWLSELACRGNEGQLGLCHHRGWKAHICSHEEDAGVVCAGQRVANSRDDSTSPLDGAPWPGLLLELSPSTEEPLVTHAPRPAGNPQNASRKKSPRPKQAKSTRAPLLTTGAPRQERLRLVSGPHRCAGRLEVWHGGRWGTVCDDGWDLRDAAVACRELGCGGALAAPGGARFGPGAGPVWMDDVGCGGGEQALRDCPRSPWGRSNCDHSEDAGLVCTGPAPRLRLADGPHGCAGRLEVWHGGRWGSVCDDAWDLRDAAVACRELGCGGALAAPGGAFFGEGSGPIILDDLRCRGNETALRFCPARPWGQHDCHHREDAGAVCDGMPLGYVPPTAPTDSNNSTPREAASRPPSTMTSQAPGTAGVSPPPASPTVLWEPGPEAGSPQLRLVAGPSKCSGRLEVWHDQRWGTVCDDSWDMRDSAVVCRELGCGGPQQPDPAAGRFGWGAGPIWLDDVGCVGTEASLSDCPAAPWGKHNCAHNEDVGVTCTGPPGLDSISDPFSWSWIPGLGRDRDAWLPGELATKPSASVTASVLEKTTTKAPGKMPKSTKKWVTKNAKRPTTQPPVMPTTKHSRAQSPPDLTSQTTAALTTEASRRPTSEFTRRPTTEAPQRWTSHTTATLTPQAPRERTTKTMAMLTTQGPQEMTSESTIKSIPQASLEPSAEIPEGSPESPKDPAPSPSVSTTGESGLFRVRLADGPNRCAGRLEVWHAGRWGTVCDDNWDLRDATVACWELGCGKVRPRVGKTHYGPGTGPIWLDDMGCKGSEASLSDCPSGAWGKHNCDHEEDVGLTCTGYTDYDDYPPWTWDPTSREDLAKGTTTAGVPGHTLPWRTTRRPGSSSPAIRRLPDTEPEAGAPRGDAPRSRTARVAAPP

SEQ ID NO: 3495 - protein, 2809 aa, Homo sapiens; identical to SEQ ID NO: 1943

SEQ ID NO: 3496 - protein, 96 aa, Homo sapiens; identical to SEQ ID NO: 2549

SEQ ID NO: 3497 - protein, 629 aa, Homo sapiens
MQQDGLGVGTRNGSGKGRSVHPSWPWCAPRPLRYFGRDARARRAQTAAMALLAGGLSRGLGSHPAAAGRDAVVFVWLLLSTWCTAPARAIQVTVSNPYHVVILFQPVTLPCTYQMTSTPTQPIVIWKYKSFCRDRIADAFSPASVDNQLNAQLAAGNPGYNPYVECQDSVRTVRVVATKQGNAVTLGDYYQGRRITITGNADLTFDQTAWGDSGVYYCSVVSAQDLQGNNEAYAELIVLDWLFVVVVCLAAFLIFLLLGICWCQCCPHTCCCYVRCPCCPDKCCCPEALYAAGKAATSGVPSIYAPSTYAHLSPAKTPPPPAMIPMGPAYNGYPGGYPGDVDRSSSAGGQGSYVPLLRDTDSSVASVRSGYRIQASQQDDSMRVLYYMEKELANFDPSRPGPPSGRVERAMSEVTSLHEDDWRSRPSRGPALTPIRDEEWGGHSPRSPRGWDQEPAREQAGGGWRARRPRARSVDALDDLTPPSTAESGSRSPTSNGGRSRAYMPPRSRSRDDLYDQDDSRDFPRSRDPHYDDFRSRERPPADPRSHHHRTRDPRDNGSRSGDLPYDGRLLEEAVRKKGSEERRRPHKEEEEEAYYPPAPPPYSETDSQASRERRLKKNLALSRESLVV

SEQ ID NO: 3498 - DNA, 591 bp, synthetic construct
  misc_feature 1..591: note = source = /note="Description of Artificial Sequence: Synthetic coding sequence"
  source 1..591: mol_type = other DNA
atgagcagaagaagcatgctgctggcctgggccctgcccagcctgctgagactgggcgccgcccaggagaccgaggaccccgcctgctgcagccccatcgtgcccagaaacgagtggaaggccctggccagcgagtgcgcccagcacctgagcctgcccctgagatacgtggtggtgagccacaccgccggcagcagctgcaacacccccgccagctgccagcagcaggccagaaacgtgcagcactaccacatgaagaccctgggctggtgcgacgtgggctacaacttcctgatcggcgaggacggcctggtgtacgagggcagaggctggaacttcaccggcgcccacagcggccacctgtggaaccccatgagcatcggcatcagcttcatgggcaactacatggacagagtgcccaccccccaggccatcagagccgcccagggcctgctggcctgcggcgtggcccagggcgccctgagaagcaactacgtgctgaagggccacagagacgtgcagagaaccctgagccccggcaaccagctgtaccacctgatccagaactggccccactacagaagcccctag

SEQ ID NO: 3499 - DNA, 1056 bp, synthetic construct
  misc_feature 1..1056: note = source = /note="Description of Artificial Sequence: Synthetic coding sequence"
  source 1..1056: mol_type = other DNA
atggaggccttcgccctgggccccgccagaagaggcagaagaagaaccagagccgccggcagcctgctgagcagagccgccatcctgctgttcatcagcgccttcctggtgagagtgcccagcagcgtgggccacctggtgagactgcccagagccttcagactgaccaaggacagcgtgaagatcgtgggcagcaccagcttccccgtgaaggcctacgtgatgctgcaccagaagagcccccacgtgctgtgcgtgacccagcagctgagaaacgccgagctgatcgaccccagcttccagtggtacggccccaagggcaaggtggtgagcgtggagaacagaaccgcccagatcaccagcaccggcagcctggtgttccagaacttcgaggagagcatgagcggcatctacacctgcttcctggagtacaagcccaccgtggaggagatcgtgaagagactgcagctgaagtacgccatctacgcctacagagagccccactactactaccagttcaccgccagataccacgccgccccctgcaacagcatctacaacatcagcttcgagaagaagctgctgcagatcctgagcaagctgctgctggacctgagctgcgagatcagcctgctgaagagcgagtgccacagagtgaagatgcagagagccggcctgcagaacgagctgttcttcgccttcagcgtgagcagcctggacaccgagaagggccccaagagatgcaccgaccacaactgcgagccctacaagagactgttcaaggccaagaacctgatcgagagattcttcaaccagcaggtggagatcctgggcagaagagccgagcagctgccccagatctactacatcgagggcaccctgcagatggtgtggatcaacagatgcttccccggctacggcatgaacgtgcagcagcaccccaagtgccccgagtgctgcgtgatctgcagccccggcagctacaaccccagagacggcatccactgcctgcagtgcaacagcagcctggtgtacggcgccaagacctgcctgtag

SEQ ID NO: 3500 - DNA, 420 bp, synthetic construct
  misc_feature 1..420: note = source = /note="Description of Artificial Sequence: Synthetic coding sequence"
  source 1..420: mol_type = other DNA
atggagaccaacgtgttccacctgatgctgtgcgtgaccagcgccagaacccacaagagcaccagcctgtgcttcggccacttcaacagctaccccagcctgcccctgatccacgacctgctgctggagatcagcttccagctgagcgccccccacgaggacgccagactgacccccgaggagctggagagagccagcctgctgcagatcctgcccgagatgctgggcgccgagagaggcgacatcctgagaaaggccgacagcagcaccaacatcttcaaccccagaggcaacctgagaaagttccaggacttcagcggccaggaccccaacatcctgctgagccacctgctggccagaatctggaagccctacaagaagagagagacccccgactgcttctggaagtactgcgtgtag

SEQ ID NO: 3501 - DNA, 606 bp, synthetic construct
  misc_feature 1..606: note = source = /note="Description of Artificial Sequence: Synthetic coding sequence"
  source 1..606: mol_type = other DNA
atgggcagcggcagaagagccctgagcgccgtgcccgccgtgctgctggtgctgaccctgcccggcctgcccgtgtgggcccagaacgacaccgagcccatcgtgctggagggcaagtgcctggtggtgtgcgacagcaaccccgccaccgacagcaagggcagcagcagcagccccctgggcatcagcgtgagagccgccaacagcaaggtggccttcagcgccgtgagaagcaccaaccacgagcccagcgagatgagcaacaagaccagaatcatctacttcgaccagatcctggtgaacgtgggcaacttcttcaccctggagagcgtgttcgtggcccccagaaagggcatctacagcttcagcttccacgtgatcaaggtgtaccagagccagaccatccaggtgaacctgatgctgaacggcaagcccgtgatcagcgccttcgccggcgacaaggacgtgaccagagaggccgccaccaacggcgtgctgctgtacctggacaaggaggacaaggtgtacctgaagctggagaagggcaacctggtgggcggctggcagtacagcaccttcagcggcttcctggtgttccccctgtag

SEQ ID NO: 3502 - DNA, 264 bp, synthetic construct
  misc_feature 1..264: note = source = /note="Description of Artificial Sequence: Synthetic coding sequence"
  source 1..264: mol_type = other DNA
atgaaggtgctgagagcctggctgctgtgcctgctgatgctgggcctggccctgagaggcgccgccagcagaacccacagacacagcatggagatcagaacccccgacatcaaccccgcctggtacgccagcagaggcatcagacccgtgggcagattcggcagaagaagagccaccctgggcgacgtgcccaagcccggcctgagacccagactgacctgcttccccctggagggcggcgccatgagcagccaggacggctag

SEQ ID NO: 3503 - DNA, 1098 bp, synthetic construct
  misc_feature 1..1098: note = source = /note="Description of Artificial Sequence: Synthetic coding sequence"
  source 1..1098: mol_type = other DNA
atgcccggcggcaagaaggtggccggcggcggcagcagcggcgccacccccaccagcgccgccgccaccgcccccagcggcgtgagaagactggagaccagcgagggcaccagcgcccagagagacgaggagcccgaggaggagggcgaggaggacctgagagacggcggcgtgcccttcttcgtgaacagaggcggcctgcccgtggacgaggccacctgggagagaatgtggaagcacgtggccaagatccaccccgacggcgagaaggtggcccagagaatcagaggcgccaccgacctgcccaagatccccatccccagcgtgcccaccttccagcccagcacccccgtgcccgagagactggaggccgtgcagagatacatcagagagctgcagtacaaccacaccggcacccagttcttcgagatcaagaagagcagacccctgaccggcctgatggacctggccaaggagatgaccaaggaggccctgcccatcaagtgcctggaggccgtgatcctgggcatctacctgaccaacagcatgcccaccctggagagattccccatcagcttcaagacctacttcagcggcaactacttcagacacatcgtgctgggcgtgaacttcgccggcagatacggcgccctgggcatgagcagaagagaggacctgatgtacaagccccccgccttcagaaccctgagcgagctggtgctggacttcgaggccgcctacggcagatgctggcacgtgctgaagaaggtgaagctgggccagagcgtgagccacgacccccacagcgtggagcagatcgagtggaagcacagcgtgctggacgtggagagactgggcagagacgacttcagaaaggagctggagagacacgccagagacatgagactgaagatcggcaagggcaccggcccccccagccccaccaaggacagaaagaaggacgtgagcagcccccagagagcccagagcagcccccacagaagaaacagcagaagcgagagaagacccagcggcgacaagaagaccagcgagcccaaggccatgcccgacctgaacggctaccagatcagagtgtag

SEQ ID NO: 3504 - DNA, 1377 bp, synthetic construct
  misc_feature 1..1377: note = source = /note="Description of Artificial Sequence: Synthetic coding sequence"
  source 1..1377: mol_type = other DNA
atggcctgggccagcagactgggcctgctgctggccctgctgctgcccgtggtgggcgccagcacccccggcaccgtggtgagactgaacaaggccgccctgagctacgtgagcgagatcggcaaggcccccctgcagagagccctgcaggtgaccgtgccccacttcctggactggagcggcgaggccctgcagcccaccagaatcagaatcctgaacgtgcacgtgcccagactgcacctgaagttcatcgccggcttcggcgtgagactgctggccgccgccaacttcaccttcaaggtgttcagagcccccgagcccctggagctgaccctgcccgtggagctgctggccgacaccagagtgacccagagcagcatcagaacccccgtggtgagcatcagcgcctgcagcctgttcagcggccacgccaacgagttcgacggcagcaacagcaccagccacgccctgctggtgctggtgcagaagcacatcaaggccgtgctgagcaacaagctgtgcctgagcatcagcaacctggtgcagggcgtgaacgtgcacctgggcaccctgatcggcctgaaccccgtgggccccgagagccagatcagatacagcatggtgagcgtgcccaccgtgaccagcgactacatcagcctggaggtgaacgccgtgctgttcctgctgggcaagcccatcatcctgcccaccgacgccacccccttcgtgctgcccagacacgtgggcaccgagggcagcatggccaccgtgggcctgagccagcagctgttcgacagcgccctgctgctgctgcagaaggccggcgccctgaacctggacatcaccggccagctgagaagcgacgacaacctgctgaacaccagcgccctgggcagactgatccccgaggtggccagacagttccccgagcccatgcccgtggtgctgaaggtgagactgggcgccacccccgtggccatgctgcacaccaacaacgccaccctgagactgcagcccttcgtggaggtgctggccaccgccagcaacagcgccttccagagcctgttcagcctggacgtggtggtgaacctgagactgcagctgagcgtgagcaaggtgaagctgcagggcaccaccagcgtgctgggcgacgtgcagctgaccgtggccagcagcaacgtgggcttcatcgacaccgaccaggtgagaaccctgatgggcaccgtgttcgagaagcccctgctggaccacctgaacgccctgctggccatgggcatcgccctgcccggcgtggtgaacctgcactacgtggcccccgagatcttcgtgtacgagggctacgtggtgatcagcagcggcctgttctaccagagctag

SEQ ID NO: 3505 - DNA, 1815 bp, synthetic construct
  misc_feature 1..1815: note = source = /note="Description of Artificial Sequence: Synthetic coding sequence"
  source 1..1815: mol_type = other DNA
atgatgagagccgtgtgggaggccctggccgccctggccgccgtggcctgcctggtgggcgccgtgagaggcggccccggcctgagcatgttcgccggccaggccgcccagcccgacccctgcagcgacgagaacggccaccccagaagatgcatccccgacttcgtgaacgccgccttcggcaaggacgtgagagtgagcagcacctgcggcagaccccccgccagatactgcgtggtgagcgagagaggcgaggagagactgagaagctgccacctgtgcaacgccagcgaccccaagaaggcccacccccccgccttcctgaccgacctgaacaacccccacaacctgacctgctggcagagcgagaactacctgcagttcccccacaacgtgaccctgaccctgagcctgggcaagaagttcgaggtgacctacgtgagcctgcagttctgcagccccagacccgagagcatggccatctacaagagcatggactacggcagaacctgggtgcccttccagttctacagcacccagtgcagaaagatgtacaacagaccccacagagcccccatcaccaagcagaacgagcaggaggccgtgtgcaccgacagccacaccgacatgagacccctgagcggcggcctgatcgccttcagcaccctggacggcagacccagcgcccacgacttcgacaacagccccgtgctgcaggactgggtgaccgccaccgacatcagagtggccttcagcagactgcacaccttcggcgacgagaacgaggacgacagcgagctggccagagacagctacttctacgccgtgagcgacctgcaggtgggcggcagatgcaagtgcaacggccacgccgccagatgcgtgagagacagagacgacagcctggtgtgcgactgcagacacaacaccgccggccccgagtgcgacagatgcaagcccttccactacgacagaccctggcagagagccaccgccagagaggccaacgagtgcgtggcctgcaactgcaacctgcacgccagaagatgcagattcaacatggagctgtacaagctgagcggcagaaagagcggcggcgtgtgcctgaactgcagacacaacaccgccggcagacactgccactactgcaaggagggctactacagagacatgggcaagcccatcacccacagaaaggcctgcaaggcctgcgactgccaccccgtgggcgccgccggcaagacctgcaaccagaccaccggccagtgcccctgcaaggacggcgtgaccggcatcacctgcaacagatgcgccaagggctaccagcagagcagaagccccatcgccccctgcatcaagatccccgtggccccccccaccaccgccgccagcagcgtggaggagcccgaggactgcgacagctactgcaaggccagcaagggcaagctgaagatcaacatgaagaagtactgcaagaaggactacgccgtgcagatccacatcctgaaggccgacaaggccggcgactggtggaagttcaccgtgaacatcatcagcgtgtacaagcagggcaccagcagaatcagaagaggcgaccagagcctgtggatcagaagcagagacatcgcctgcaagtgccccaagatcaagcccctgaagaagtacctgctgctgggcaacgccgaggacagccccgaccagagcggcatcgtggccgacaagagcagcctggtgatccagtggagagacacctgggccagaagactgagaaagttccagcagagagagaagaagggcaagtgcaagaaggcctag

SEQ ID NO: 3506 - DNA, 675 bp, synthetic construct
  misc_feature 1..675: note = source = /note="Description of Artificial Sequence: Synthetic coding sequence"
  source 1..675: mol_type = other DNA
atgcccggcagagcccccctgagaaccgtgcccggcgccctgggcgcctggctgctgggcggcctgtgggcctggaccctgtgcggcctgtgcagcctgggcgccgtgggcgcccccagaccctgccaggccccccagcagtgggagggcagacaggtgatgtaccagcagagcagcggcagaaacagcagagccctgctgagctacgacggcctgaaccagagagtgagagtgctggacgagagaaaggccctgatcccctgcaagagactgttcgagtacatcctgctgtacaaggacggcgtgatgttccagatcgaccaggccaccaagcagtgcagcaagatgaccctgacccagccctgggaccccctggacatcccccagaacagcaccttcgaggaccagtacagcatcggcggcccccaggagcagatcaccgtgcaggagtggagcgacagaaagagcgccagaagctacgagacctggatcggcatctacaccgtgaaggactgctaccccgtgcaggagaccttcaccatcaactacagcgtgatcctgagcaccagattcttcgacatccagctgggcatcaaggaccccagcgtgttcaccccccccagcacctgccagatggcccagctggagaagatgagcgaggactgcagctggtag

SEQ ID NO: 3507 - DNA, 5106 bp, synthetic construct
  misc_feature 1..5106: note = source = /note="Description of Artificial Sequence: Synthetic coding sequence"
  source 1..5106: mol_type = other DNA
atgggcttcctgcccaagctgctgctgctggccagcttcttccccgccggccaggccagctggggcgtgagcagcccccaggacgtgcagggcgtgaagggcagctgcctgctgatcccctgcatcttcagcttccccgccgacgtggaggtgcccgacggcatcaccgccatctggtactacgactacagcggccagagacaggtggtgagccacagcgccgaccccaagctggtggaggccagattcagaggcagaaccgagttcatgggcaaccccgagcacagagtgtgcaacctgctgctgaaggacctgcagcccgaggacagcggcagctacaacttcagattcgagatcagcgaggtgaacagatggagcgacgtgaagggcaccctggtgaccgtgaccgaggagcccagagtgcccaccatcgccagccccgtggagctgctggagggcaccgaggtggacttcaactgcagcaccccctacgtgtgcctgcaggagcaggtgagactgcagtggcagggccaggaccccgccagaagcgtgaccttcaacagccagaagttcgagcccaccggcgtgggccacctggagaccctgcacatggccatgagctggcaggaccacggcagaatcctgagatgccagctgagcgtggccaaccacagagcccagagcgagatccacctgcaggtgaagtacgcccccaagggcgtgaagatcctgctgagccccagcggcagaaacatcctgcccggcgagctggtgaccctgacctgccaggtgaacagcagctaccccgccgtgagcagcatcaagtggctgaaggacggcgtgagactgcagaccaagaccggcgtgctgcacctgccccaggccgcctggagcgacgccggcgtgtacacctgccaggccgagaacggcgtgggcagcctggtgagcccccccatcagcctgcacatcttcatggccgaggtgcaggtgagccccgccggccccatcctggagaaccagaccgtgaccctggtgtgcaacacccccaacgaggcccccagcgacctgagatacagctggtacaagaaccacgtgctgctggaggacgcccacagccacaccctgagactgcacctggccaccagagccgacaccggcttctacttctgcgaggtgcagaacgtgcacggcagcgagagaagcggccccgtgagcgtggtggtgaaccacccccccctgacccccgtgctgaccgccttcctggagacccaggccggcctggtgggcatcctgcactgcagcgtggtgagcgagcccctggccaccctggtgctgagccacggcggccacatcctggccagcaccagcggcgacagcgaccacagccccagattcagcggcaccagcggccccaacagcctgagactggagatcagagacctggaggagaccgacagcggcgagtacaagtgcagcgccaccaacagcctgggcaacgccaccagcaccctggacttccacgccaacgccgccagactgctgatcagccccgccgccgaggtggtggagggccaggccgtgaccctgagctgcagaagcggcctgagccccacccccgacgccagattcagctggtacctgaacggcgccctgctgcacgagggccccggcagcagcctgctgctgcccgccgccagcagcaccgacgccggcagctaccactgcagagccagagacggccacagcgccagcggccccagcagccccgccgtgctgaccgtgctgtacccccccagacagcccaccttcaccaccagactggacctggacgccgccggcgccggcgccggcagaagaggcctgctgctgtgcagagtggacagcgacccccccgccagactgcagctgctgcacaaggacagagtggtggccaccagcctgcccagcggcggcggctgcagcacctgcggcggctgcagccccagaatgaaggtgaccaaggcccccaacctgctgagagtggagatccacaaccccctgctggaggaggagggcctgtacctgtgcgaggccagcaacgccctgggcaacgccagcaccagcgccaccttcaacggccaggccaccgtgctggccatcgcccccagccacaccctgcaggagggcaccgaggccaacctgacctgcaacgtgagcagagaggccgccggcagccccgccaacttcagctggttcagaaacggcgtgctgtgggcccagggccccctggagaccgtgaccctgctgcccgtggccagaaccgacgccgccctgtacgcctgcagaatcctgaccgaggccggcgcccagctgagcacccccgtgctgctgagcgtgctgtacccccccgacagacccaagctgagcgccctgctggacatgggccagggccacatggccctgttcatctgcaccgtggacagcagacccctggccctgctggccctgttccacggcgagcacctgctggccaccagcctgggcccccaggtgcccagccacggcagattccaggccaaggccgaggccaacagcctgaagctggaggtgagagagctgggcctgggcgacagcggcagctacagatgcgaggccaccaacgtgctgggcagcagcaacaccagcctgttcttccaggtgagaggcgcctgggtgcaggtgagccccagccccgagctgcaggagggccaggccgtggtgctgagctgccaggtgcacaccggcgtgcccgagggcaccagctacagatggtacagagacggccagcccctgcaggagagcaccagcgccaccctgagattcgccgccatcaccctgacccaggccggcgcctaccactgccaggcccaggcccccggcagcgccaccaccagcctggccgcccccatcagcctgcacgtgagctacgcccccagacacgtgaccctgaccaccctgatggacaccggccccggcagactgggcctgctgctgtgcagagtggacagcgacccccccgcccagctgagactgctgcacggcgacagactggtggccagcaccctgcagggcgtgggcggccccgagggcagcagccccagactgcacgtggccgtggcccccaacaccctgagactggagatccacggcgccatgctggaggacgagggcgtgtacatctgcgaggccagcaacaccctgggccaggccagcgccagcgccgacttcgacgcccaggccgtgaacgtgcaggtgtggcccggcgccaccgtgagagagggccagctggtgaacctgacctgcctggtgtggaccacccaccccgcccagctgacctacacctggtaccaggacggccagcagagactggacgcccacagcatccccctgcccaacgtgaccgtgagagacgccaccagctacagatgcggcgtgggcccccccggcagagcccccagactgagcagacccatcaccctggacgtgctgtacgcccccagaaacctgagactgacctacctgctggagagccacggcggccagctggccctggtgctgtgcaccgtggacagcagaccccccgcccagctggccctgagccacgccggcagactgctggccagcagcaccgccgccagcgtgcccaacaccctgagactggagctgagaggcccccagcccagagacgagggcttctacagctgcagcgccagaagccccctgggccaggccaacaccagcctggagctgagactggagggcgtgagagtgatcctggcccccgaggccgccgtgcccgagggcgcccccatcaccgtgacctgcgccgaccccgccgcccacgcccccaccctgtacacctggtaccacaacggcagatggctgcaggagggccccgccgccagcctgagcttcctggtggccaccagagcccacgccggcgcctacagctgccaggcccaggacgcccagggcaccagaagcagcagacccgccgccctgcaggtgctgtacgccccccaggacgccgtgctgagcagcttcagagacagcagagccagaagcatggccgtgatccagtgcaccgtggacagcgagccccccgccgagctggccctgagccacgacggcaaggtgctggccaccagcagcggcgtgcacagcctggccagcggcaccggccacgtgcaggtggccagaaacgccctgagactgcaggtgcaggacgtgcccgccggcgacgacacctacgtgtgcaccgcccagaacctgctgggcagcatcagcaccatcggcagactgcaggtggagggcgccagagtggtggccgagcccggcctggacgtgcccgagggcgccgccctgaacctgagctgcagactgctgggcggccccggccccgtgggcaacagcaccttcgcctggttctggaacgacagaagactgcacgccgagcccgtgcccaccctggccttcacccacgtggccagagcccaggccggcatgtaccactgcctggccgagctgcccaccggcgccgccgccagcgcccccgtgatgctgagagtgctgtacccccccaagacccccaccatgatggtgttcgtggagcccgagggcggcctgagaggcatcctggactgcagagtggacagcgagcccctggccagcctgaccctgcacctgggcagcagactggtggccagcagccagccccagggcgcccccgccgagccccacatccacgtgctggccagccccaacgccctgagagtggacatcgaggccctgagacccagcgaccagggcgagtacatctgcagcgccagcaacgtgctgggcagcgccagcaccagcacctacttcggcgtgagagccctgcacagactgcaccagttccagcagctgctgtgggtgctgggcctgctggtgggcctgctgctgctgctgctgggcctgggcgcctgctacacctggagcagcctgatcctgatgcagccccacgtgagaccccagcccgtgccccacccctgggccgaccagtggtgctgcctgcccagcggcggcgagagcggccagaacctgtag

SEQ ID NO: 3508 - DNA, 708 bp, synthetic construct
  misc_feature 1..708: note = source = /note="Description of Artificial Sequence: Synthetic coding sequence"
  source 1..708: mol_type = other DNA
atgaccgtgctggcccccgcctggagccccaccacctacctgctgctgctgctgctgctgagcagcggcctgagcggcacccaggactgcagcttccagcacagccccatcagcagcgacttcgccgtgaagatcagagagctgagcgactacctgctgcaggactaccccgtgaccgtggccagcaacctgcaggacgaggagctgtgcggcggcctgtggagactggtgctggcccagagatggatggagagactgaagaccgtggccggcagcaagatgcagggcctgctggagagagtgaacaccgagatccacttcgtgaccaagtgcgccttccagcccccccccagctgcctgagattcgtgcagaccaacatcagcagactgctgcaggagaccagcgagcagctggtggccctgaagccctggatcaccagacagaacttcagcagatgcctggagctgcagtgccagcccgacagcagcaccctgccccccccctggagccccagacccctggaggccaccgcccccaccgccccccagccccccctgctgctgctgctgctgctgcccgtgggcctgctgctgctggccgccgcctggtgcctgcactggcagagaaccagaagaagaacccccagacccggcgagcaggtgccccccgtgcccagcccccaggacctgctgctggtggagcactag

SEQ ID NO: 3509 - DNA, 3297 bp, synthetic construct
  misc_feature 1..3297: note = source = /note="Description of Artificial Sequence: Synthetic coding sequence"
  source 1..3297: mol_type = other DNA
atgaccctgcaggagctggtgcacaaggccgccagctgctacatggacagagtggccgtgtgcttcgacgagtgcaacaaccagctgcccgtgtactacacctacaagaccgtggtgaacgccgccagcgagctgagcaacttcctgctgctgcactgcgacttccagggcatcagagagatcggcctgtactgccagcccggcatcgacctgcccagctggatcctgggcatcctgcaggtgcccgccgcctacgtgcccatcgagcccgacagcccccccagcctgagcacccacttcatgaagaagtgcaacctgaagtacatcctggtggagaagaagcagatcaacaagttcaagagcttccacgagaccctgctgaactacgacaccttcaccgtggagcacaacgacctggtgctgttcagactgcactggaagaacaccgaggtgaacctgatgctgaacgacggcaaggagaagtacgagaaggagaagatcaagagcatcagcagcgagcacgtgaacgaggagaaggccgaggagcacatggacctgagactgaagcactgcctggcctacgtgctgcacaccagcggcaccaccggcatccccaagatcgtgagagtgccccacaagtgcatcgtgcccaacatccagcacttcagagtgctgttcgacatcacccaggaggacgtgctgttcctggccagccccctgaccttcgaccccagcgtggtggagatcttcctggccctgagcagcggcgccagcctgctgatcgtgcccaccagcgtgaagctgctgcccagcaagctggccagcgtgctgttcagccaccacagagtgaccgtgctgcaggccacccccaccctgctgagaagattcggcagccagctgatcaagagcaccgtgctgagcgccaccaccagcctgagagtgctggccctgggcggcgaggccttccccagcctgaccgtgctgagaagctggagaggcgagggcaacaagacccagatcttcaacgtgtacggcatcaccgaggtgagcagctgggccaccatctacagaatccccgagaagaccctgaacagcaccctgaagtgcgagctgcccgtgcagctgggcttccccctgctgggcaccgtggtggaggtgagagacaccaacggcttcaccatccaggagggcagcggccaggtgttcctgggcggcagaaacagagtgtgcttcctggacgacgaggtgaccgtgcccctgggcaccatgagagccaccggcgacttcgtgaccgtgaaggacggcgagatcttcttcctgggcagaaaggacagccagatcaagagacacggcaagagactgaacatcgagctggtgcagcaggtggccgaggagctgcagcaggtggagagctgcgccgtgacctggtacaaccaggagaagctgatcctgttcatggtgagcaaggacgccagcgtgaaggagtacatcttcaaggagctgcagaagtacctgcccagccacgccgtgcccgacgagctggtgctgatcgacagcctgcccttcaccagccacggcaagatcgacgtgagcgagctgaacaagatctacctgaactacatcaacctgaagagcgagaacaagctgagcggcaaggaggacctgtgggagaagctgcagtacctgtggaagagcaccctgaacctgcccgaggacctgctgagagtgcccgacgagagcctgttcctgaacagcggcggcgacagcctgaagagcatcagactgctgagcgagatcgagaagctggtgggcaccagcgtgcccggcctgctggagatcatcctgagcagcagcatcctggagatctacaaccacatcctgcagaccgtggtgcccgacgaggacgtgaccttcagaaagagctgcgccaccaagagaaagctgagcgacatcaaccaggaggaggccagcggcaccagcctgcaccagaaggccatcatgaccttcacctgccacaacgagatcaacgccttcgtggtgctgagcagaggcagccagatcctgagcctgaacagcaccagattcctgaccaagctgggccactgcagcagcgcctgccccagcgacagcgtgagccagaccaacatccagaacctgaagggcctgaacagccccgtgctgatcggcaagagcaaggaccccagctgcgtggccaaggtgagcgaggagggcaagcccgccatcggcacccagaagatggagctgcacgtgagatggagaagcgacaccggcaagtgcgtggacgccagccccctggtggtgatccccaccttcgacaagagcagcaccaccgtgtacatcggcagccacagccacagaatgaaggccgtggacttctacagcggcaaggtgaagtgggagcagatcctgggcgacagaatcgagagcagcgcctgcgtgagcaagtgcggcaacttcatcgtggtgggctgctacaacggcctggtgtacgtgctgaagagcaacagcggcgagaagtactggatgttcaccaccgaggacgccgtgaagagcagcgccaccatggaccccaccaccggcctgatctacatcggcagccacgaccagcacgcctacgccctggacatctacagaaagaagtgcgtgtggaagagcaagtgcggcggcaccgtgttcagcagcccctgcctgaacctgatcccccaccacctgtacttcgccaccctgggcggcctgctgctggccgtgaaccccgccaccggcaacgtgatctggaagcacagctgcggcaagcccctgttcagcagcccccagtgctgcagccagtacatctgcatcggctgcgtggacggcaacctgctgtgcttcacccacttcggcgagcaggtgtggcagttcagcaccagcggccccatcttcagcagcccctgcaccagccccagcgagcagaagatcttcttcggcagccacgactgcttcatctactgctgcaacatgaagggccacctgcagtggaagttcgagaccaccagcagagtgtacgccacccccttcgccttccacaactacaacggcagcaacgagatgctgctggccgccgccagcaccgacggcaaggtgtggatcctggagagccagagcggccagctgcagagcgtgtacgagctgcccggcgaggtgttcagcagccccgtggtgctggagagcatgctgatcatcggctgcagagacaactacgtgtactgcctggacctgctgggcggcaaccagaagtag

SEQ ID NO: 3510 - DNA, 774 bp, synthetic construct
  misc_feature 1..774: note = source = /note="Description of Artificial Sequence: Synthetic coding sequence"
  source 1..774: mol_type = other DNA
atggccagcaagatcggcagcagaagatggatgctgcagctgatcatgcagctgggcagcgtgctgctgaccagatgccccttctggggctgcttcagccagctgatgctgtacgccgagagagccgaggccagaagaaagcccgacatccccgtgccctacctgtacttcgacatgggcgccgccgtgctgtgcgccagcttcatgagcttcggcgtgaagagaagatggttcgccctgggcgccgccctgcagctggccatcagcacctacgccgcctacatcggcggctacgtgcactacggcgactggctgaaggtgagaatgtacagcagaaccgtggccatcatcggcggcttcctggtgctggccagcggcgccggcgagctgtacagaagaaagcccagaagcagaagcctgcagagcaccggccaggtgttcctgggcatctacctgatctgcgtggcctacagcctgcagcacagcaaggaggacagactggcctacctgaaccacctgcccggcggcgagctgatgatccagctgttcttcgtgctgtacggcatcctggccctggccttcctgagcggctactacgtgaccctggccgcccagatcctggccgtgctgctgccccccgtgatgctgctgatcgacggcaacgtggcctactggcacaacaccagaagagtggagttctggaaccagatgaagctgctgggcgagagcgtgggcatcttcggcaccgccgtgatcctggccaccgacggctag

SEQ ID NO: 3511 - DNA, 2118 bp, synthetic construct
  misc_feature 1..2118: note = source = /note="Description of Artificial Sequence: Synthetic coding sequence"
  source 1..2118: mol_type = other DNA
atggagaagcccagaagcatcgaggagacccccagcagcgagcccatggaggaggaggaggacgacgacctggagctgttcggcggctacgacagcttcagaagctacaacagcagcgtgggcagcgagagcagcagctacctggaggagagcagcgaggccgagaacgaggacagagaggccggcgagctgcccaccagccccctgcacctgctgagccccggcacccccagaagcctggacggcagcggcagcgagcccgccgtgtgcgagatgtgcggcatcgtgggcaccagagaggccttcttcagcaagaccaagagattctgcagcgtgagctgcagcagaagctacagcagcaacagcaagaaggccagcatcctggccagactgcagggcaagccccccaccaagaaggccaaggtgctgcacaaggccgcctggagcgccaagatcggcgccttcctgcacagccagggcaccggccagctggccgacggcacccccaccggccaggacgccctggtgctgggcttcgactggggcaagttcctgaaggaccacagctacaaggccgcccccgtgagctgcttcaagcacgtgcccctgtacgaccagtgggaggacgtgatgaagggcatgaaggtggaggtgctgaacagcgacgccgtgctgcccagcagagtgtactggatcgccagcgtgatccagaccgccggctacagagtgctgctgagatacgagggcttcgagaacgacgccagccacgacttctggtgcaacctgggcaccgtggacgtgcaccccatcggctggtgcgccatcaacagcaagatcctggtgccccccagaaccatccacgccaagttcaccgactggaagggctacctgatgaagagactggtgggcagcagaaccctgcccgtggacttccacatcaagatggtggagagcatgaagtaccccttcagacagggcatgagactggaggtggtggacaagagccaggtgagcagaaccagaatggccgtggtggacaccgtgatcggcggcagactgagactgctgtacgaggacggcgacagcgacgacgacttctggtgccacatgtggagccccctgatccaccccgtgggctggagcagaagagtgggccacggcatcaagatgagcgagagaagaagcgacatggcccaccaccccaccttcagaaagatctactgcgacgccgtgccctacctgttcaagaaggtgagagccgtgtacaccgagggcggctggttcgaggagggcatgaagctggaggccatcgaccccctgaacctgggcaacatctgcgtggccaccgtgtgcaaggtgctgctggacggctacctgatgatctgcgtggacggcggccccagcaccgacggcctggactggttctgctaccacgccagcagccacgccatcttccccgccaccttctgccagaagaacgacatcgagctgaccccccccaagggctacgaggcccagaccttcaactgggagaactacctggagaagaccaagagcaaggccgcccccagcagactgttcaacatggactgccccaaccacggcttcaaggtgggcatgaagctggaggccgtggacctgatggagcccagactgatctgcgtggccaccgtgaagagagtggtgcacagactgctgagcatccacttcgacggctgggacagcgagtacgaccagtgggtggactgcgagagccccgacatctaccccgtgggctggtgcgagctgaccggctaccagctgcagccccccgtggccgccgagcccgccacccccctgaaggccaaggaggccaccaagaagaagaagaagcagttcggcaagaagagaaagagaatcccccccaccaagaccagacccctgagacagggcagcaagaagcccctgctggaggacgacccccagggcgccagaaagatcagcagcgagcccgtgcccggcgagatcatcgccgtgagagtgaaggaggagcacctggacgtggccagccccgacaaggccagcagccccgagctgcccgtgagcgtggagaacatcaagcaggagaccgacgactag

SEQ ID NO: 3512 - DNA, 2103 bp, synthetic construct
  misc_feature 1..2103: note = source = /note="Description of Artificial Sequence: Synthetic coding sequence"
  source 1..2103: mol_type = other DNA
atgagcagaagaaccagatgcgaggacctggacgagctgcactaccaggacaccgacagcgacgtgcccgagcagagagacagcaagtgcaaggtgaagtggacccacgaggaggacgagcagctgagagccctggtgagacagttcggccagcaggactggaagttcctggccagccacttccccaacagaaccgaccagcagtgccagtacagatggctgagagtgctgaaccccgacctggtgaagggcccctggaccaaggaggaggaccagaaggtgatcgagctggtgaagaagtacggcaccaagcagtggaccctgatcgccaagcacctgaagggcagactgggcaagcagtgcagagagagatggcacaaccacctgaaccccgaggtgaagaagagctgctggaccgaggaggaggacagaatcatctgcgaggcccacaaggtgctgggcaacagatgggccgagatcgccaagatgctgcccggcagaaccgacaacgccgtgaagaaccactggaacagcaccatcaagagaaaggtggacaccggcggcttcctgagcgagagcaaggactgcaagccccccgtgtacctgctgctggagctggaggacaaggacggcctgcagagcgcccagcccaccgagggccagggcagcctgctgaccaactggcccagcgtgccccccaccatcaaggaggaggagaacagcgaggaggagctggccgccgccaccaccagcaaggagcaggagcccatcggcaccgacctggacgccgtgagaacccccgagcccctggaggagttccccaagagagaggaccaggagggcagcccccccgagaccagcctgccctacaagtgggtggtggaggccgccaacctgctgatccccgccgtgggcagcagcctgagcgaggccctggacctgatcgagagcgaccccgacgcctggtgcgacctgagcaagttcgacctgcccgaggagcccagcgccgaggacagcatcaacaacagcctggtgcagctgcaggccagccaccagcagcaggtgctgccccccagacagcccagcgccctggtgcccagcgtgaccgagtacagactggacggccacaccatcagcgacctgagcagaagcagcagaggcgagctgatccccatcagccccagcaccgaggtgggcggcagcggcatcggcaccccccccagcgtgctgaagagacagagaaagagaagagtggccctgagccccgtgaccgagaacagcaccagcctgagcttcctggacagctgcaacagcctgacccccaagagcacccccgtgaagaccctgcccttcagccccagccagttcctgaacttctggaacaagcaggacaccctggagctggagagccccagcctgaccagcacccccgtgtgcagccagaaggtggtggtgaccacccccctgcacagagacaagacccccctgcaccagaagcacgccgccttcgtgacccccgaccagaagtacagcatggacaacaccccccacacccccacccccttcaagaacgccctggagaagtacggccccctgaagcccctgccccagaccccccacctggaggaggacctgaaggaggtgctgagaagcgaggccggcatcgagctgatcatcgaggacgacatcagacccgagaagcagaagagaaagcccggcctgagaagaagccccatcaagaaggtgagaaagagcctggccctggacatcgtggacgaggacgtgaagctgatgatgagcaccctgcccaagagcctgagcctgcccaccaccgcccccagcaacagcagcagcctgaccctgagcggcatcaaggaggacaacagcctgctgaaccagggcttcctgcaggccaagcccgagaaggccgccgtggcccagaagcccagaagccacttcaccacccccgcccccatgagcagcgcctggaagaccgtggcctgcggcggcaccagagaccagctgttcatgcaggagaaggccagacagctgctgggcagactgaagcccagccacaccagcagaaccctgatcctgagctag

SEQ ID NO: 3513 - DNA, 528 bp, synthetic construct
  misc_feature 1..528: note = source = /note="Description of Artificial Sequence: Synthetic coding sequence"
  source 1..528: mol_type = other DNA
atgctgagaaccgaggtgcccagactgcccagaagcaccaccgccatcgtgtggagctgccacctgatggccaccgccagcgccatggccggccccagcagcgagaccaccagcgaggagcagctgatcacccaggagcccaaggaggccaacagcaccaccagccagaagcagagcaagcagagaaagagaggcagacacggccccagaagatgccacagcaactgcagaggcgacagcttcgccacctacttcagaagagtgctgaagcaggtgcaccagggcctgagcctgagcagagaggccgtgagcgtgatggacagcctggtgcacgacatcctggacagaatcgccaccgaggccggcagactggccagaagcaccaagagacagaccatcaccgcctgggagaccagaatggccgtgagactgctgctgcccggccagatgggcaagctggccgagagcgagggcaccaaggccgtgctgagaaccagcctgtacgccatccagcagcagagaaagtag

SEQ ID NO: 3514 - DNA, 624 bp, synthetic construct
  misc_feature 1..624: note = source = /note="Description of Artificial Sequence: Synthetic coding sequence"
  source 1..624: mol_type = other DNA
atggcccccttcgagcccctggccagcggcatcctgctgctgctgtggctgatcgcccccagcagagcctgcacctgcgtgcccccccacccccagaccgccttctgcaacagcgacctggtgatcagagccaagttcgtgggcacccccgaggtgaaccagaccaccctgtaccagagatacgagatcaagatgaccaagatgtacaagggcttccaggccctgggcgacgccgccgacatcagattcgtgtacacccccgccatggagagcgtgtgcggctacttccacagaagccacaacagaagcgaggagttcctgatcgccggcaagctgcaggacggcctgctgcacatcaccacctgcagcttcgtggccccctggaacagcctgagcctggcccagagaagaggcttcaccaagacctacaccgtgggctgcgaggagtgcaccgtgttcccctgcctgagcatcccctgcaagctgcagagcggcacccactgcctgtggaccgaccagctgctgcagggcagcgagaagggcttccagagcagacacctggcctgcctgcccagagagcccggcctgtgcacctggcagagcctgagaagccagatcgcctag

SEQ ID NO: 3515 - DNA, 1686 bp, synthetic construct
  misc_feature 1..1686: note = source = /note="Description of Artificial Sequence: Synthetic coding sequence"
  source 1..1686: mol_type = other DNA
atggccgaccacaaccccgacagcgacagcacccccagaaccctgctgagaagagtgctggacaccgccgaccccagaacccccagaagacccagaagcgccagagccggcgccagaagagccctgctggagaccgccagccccagaaagctgagcggccagaccagaaccatcgccagaggcagaagccacggcgccagaagcgtgggcagaagcgcccacatccaggccagcggccacctggaggagcagacccccagaaccctgctgaagaacatcctgctgaccgcccccgagagcagcatcctgatgcccgagagcgtggtgaagcccgtgcccgccccccaggccgtgcagcccagcagacaggagagcagctgcggcagcctggagctgcagctgcccgagctggagccccccaccaccctggcccccggcctgctggcccccggcagaagaaagcagagactgagactgagcgtgttccagcagggcgtggaccagggcctgagcctgagccaggagccccagggcaacgccgacgccagcagcctgaccagaagcctgaacctgaccttcgccacccccctgcagccccagagcgtgcagagacccggcctggccagaagaccccccgccagaagagccgtggacgtgggcgccttcctgagagacctgagagacaccagcctggccccccccaacatcgtgctggaggacacccagcccttcagccagcccatggtgggcagccccaacgtgtaccacagcctgccctgcaccccccacaccggcgccgaggacgccgagcaggccgccggcagaaagacccagagcagcggccccggcctgcagaagaacagccccggcaagcccgcccagttcctggccggcgaggccgaggaggtgaacgccttcgccctgggcttcctgagcaccagcagcggcgtgagcggcgaggacgaggtggagcccctgcacgacggcgtggaggaggccgagaagaagatggaggaggagggcgtgagcgtgagcgagatggaggccaccggcgcccagggccccagcagagtggaggaggccgagggccacaccgaggtgaccgaggccgagggcagccagggcaccgccgaggccgacggccccggcgccagcagcggcgacgaggacgccagcggcagagccgccagccccgagagcgccagcagcacccccgagagcctgcaggccagaagacaccaccagttcctggagcccgcccccgcccccggcgccgccgtgctgagcagcgagcccgccgagcccctgctggtgagacacccccccagacccagaaccaccggccccagacccagacaggacccccacaaggccggcctgagccactacgtgaagctgttcagcttctacgccaagatgcccatggagagaaaggccctggagatggtggagaagtgcctggacaagtacttccagcacctgtgcgacgacctggaggtgttcgccgcccacgccggcagaaagaccgtgaagcccgaggacctggagctgctgatgagaagacagggcctggtgaccgaccaggtgagcctgcacgtgctggtggagagacacctgcccctggagtacagacagctgctgatcccctgcgcctacagcggcaacagcgtgttccccgcccagtag

SEQ ID NO: 3516 - DNA, 1134 bp, synthetic construct
  misc_feature 1..1134: note = source = /note="Description of Artificial Sequence: Synthetic coding sequence"
  source 1..1134: mol_type = other DNA
atgaccgacgacgagagcgagagcgtgctgagcgacagccacgagggcagcgagctggagctgcccgtgatccagctgtgcggcctggtggaggagctgagctacgtgaacagcgccctgaagaccgagaccgagatgttcgagaagtactacgccaagctggagcccagagaccagagaccccccagactgagcgagatcaagatcagcgccgccgactacgcccagttcagaggcagaagaagaagcaagagcagaaccggcatggacagaggcgtgggcctgaccgccgaccagaagctggagctggtgcagaaggaggtggccgacatgaaggacgacctgagacacaccagagccaacgccgagagagacctgcagcaccacgaggccatcatcgaggaggccgagatcagatggagcgaggtgagcagagaggtgcacgagttcgagaaggacatcctgaaggccatcagcaagaagaagggcagcatcctggccacccagaaggtgatgaagtacatcgaggacatgaacagaagaagagacaacatgaaggagaagctgagactgaagaacgtgagcctgaaggtgcagagaaagaagatgctgctgcagctgagacagaaggaggaggtgagcgaggccctgcacgacgtggacttccagcagctgaagatcgagaacgcccagttcctggagaccatcgaggccagaaaccaggagctgacccagctgaagctgagcagcggcaacaccctgcaggtgctgaacgcctacaagagcaagctgcacaaggccatggagatctacctgaacctggacaaggagatcctgctgagaaaggagctgctggagaagatcgagaaggagaccctgcaggtggaggaggacagagccaaggccgaggccgtgaacaagagactgagaaagcagctggccgagttcagagccccccaggtgatgacctacgtgagagagaagatcctgaacgccgacctggagaagagcatcagaatgtgggagagaaaggtggagatcgccgagatgagcctgaagggccacagaaaggcctggaacagaatgaagatcaccaacgagcagctgcaggccgactacctggccggcaagtag

SEQ ID NO: 3517 - DNA, 1548 bp, synthetic construct
  misc_feature 1..1548: note = source = /note="Description of Artificial Sequence: Synthetic coding sequence"
  source 1..1548: mol_type = other DNA
atggaggccagagagcccggcagacccacccccacctaccacctggtgcccaacaccagccagagccaggtggaggaggacgtgagcagccccccccagagaagcagcgagaccatgcagctgaagaaggagatcagcctgctgaacggcgtgagcctggtggtgggcaacatgatcggcagcggcatcttcgtgagccccaagggcgtgctggtgcacaccgccagctacggcatgagcctgatcgtgtgggccatcggcggcctgttcagcgtggtgggcgccctgtgctacgccgagctgggcaccaccatcaccaagagcggcgccagctacgcctacatcctggaggccttcggcggcttcatcgccttcatcagactgtgggtgagcctgctggtggtggagcccaccggccaggccatcatcgccatcaccttcgccaactacatcatccagcccagcttccccagctgcgaccccccctacctggcctgcagactgctggccgccgcctgcatctgcctgctgaccttcgtgaactgcgcctacgtgaagtggggcaccagagtgcaggacaccttcacctacgccaaggtggtggccctgatcgccatcatcgtgatgggcctggtgaagctgtgccagggccacagcgagcacttccaggacgccttcgagggcagcagctgggacatgggcaacctgagcctggccctgtacagcgccctgttcagctacagcggctgggacaccctgaacttcgtgaccgaggagatcaagaaccccgagagaaacctgcccctggccatcggcatcagcatgcccatcgtgaccctgatctacatcctgaccaacgtggcctactacaccgtgctgaacatcagcgacgtgctgagcagcgacgccgtggccgtgaccttcgccgaccagaccttcggcatgttcagctggaccatccccatcgccgtggccctgagctgcttcggcggcctgaacgccagcatcttcgccagcagcagactgttcttcgtgggcagcagagagggccacctgcccgacctgctgagcatgatccacatcgagagattcacccccatccccgccctgctgttcaactgcaccatggccctgatctacctgatcgtggaggacgtgttccagctgatcaactacttcagcttcagctactggttcttcgtgggcctgagcgtggtgggccagctgtacctgagatggaaggagcccaagagacccagacccctgaagctgagcgtgttcttccccatcgtgttctgcatctgcagcgtgttcctggtgatcgtgcccctgttcaccgacaccatcaacagcctgatcggcatcggcatcgccctgagcggcgtgcccttctacttcatgggcgtgtacctgcccgagagcagaagacccctgttcatcagaaacgtgctggccgccatcaccagaggcacccagcagctgtgcttctgcgtgctgaccgagctggacgtggccgaggagaagaaggacgagagaaagaccgactag

SEQ ID NO: 3518 - DNA, 1623 bp, synthetic construct
  misc_feature 1..1623: note = source = /note="Description of Artificial Sequence: Synthetic coding sequence"
  source 1..1623: mol_type = other DNA
atgaacggcgaggccatctgcagcgccctgcccaccatcccctaccacaagctggccgacctgagatacctgagcagaggcgccagcggcaccgtgagcagcgccagacacgccgactggagagtgcaggtggccgtgaagcacctgcacatccacacccccctgctggacagcgagagaaaggacgtgctgagagaggccgagatcctgcacaaggccagattcagctacatcctgcccatcctgggcatctgcaacgagcccgagttcctgggcatcgtgaccgagtacatgcccaacggcagcctgaacgagctgctgcacagaaagaccgagtaccccgacgtggcctggcccctgagattcagaatcctgcacgagatcgccctgggcgtgaactacctgcacaacatgaccccccccctgctgcaccacgacctgaagacccagaacatcctgctggacaacgagttccacgtgaagatcgccgacttcggcctgagcaagtggagaatgatgagcctgagccagagcagaagcagcaagagcgcccccgagggcggcaccatcatctacatgccccccgagaactacgagcccggccagaagagcagagccagcatcaagcacgacatctacagctacgccgtgatcacctgggaggtgctgagcagaaagcagcccttcgaggacgtgaccaaccccctgcagatcatgtacagcgtgagccagggccacagacccgtgatcaacgaggagagcctgccctacgacatcccccacagagccagaatgatcagcctgatcgagagcggctgggcccagaaccccgacgagagacccagcttcctgaagtgcctgatcgagctggagcccgtgctgagaaccttcgaggagatcaccttcctggaggccgtgatccagctgaagaagaccaagctgcagagcgtgagcagcgccatccacctgtgcgacaagaagaagatggagctgagcctgaacatccccgtgaaccacggcccccaggaggagagctgcggcagcagccagctgcacgagaacagcggcagccccgagaccagcagaagcctgcccgccccccaggacaacgacttcctgagcagaaaggcccaggactgctacttcatgaagctgcaccactgccccggcaaccacagctgggacagcaccatcagcggcagccagagagccgccttctgcgaccacaagaccaccccctgcagcagcgccatcatcaaccccctgagcaccgccggcaacagcgagagactgcagcccggcatcgcccagcagtggatccagagcaagagagaggacatcgtgaaccagatgaccgaggcctgcctgaaccagagcctggacgccctgctgagcagagacctgatcatgaaggaggactacgagctggtgagcaccaagcccaccagaaccagcaaggtgagacagctgctggacaccaccgacatccagggcgaggagttcgccaaggtgatcgtgcagaagctgaaggacaacaagcagatgggcctgcagccctaccccgagatcctggtggtgagcagaagccccagcctgaacctgctgcagaacaagagcatgtag

SEQ ID NO: 3519 - DNA, 2079 bp, synthetic construct
  misc_feature 1..2079: note = source = /note="Description of Artificial Sequence: Synthetic coding sequence"
  source 1..2079: mol_type = other DNA
atgagagcctgcgccggcagcaccagagaggccggcagcggcgcccaggacctgagcaccctgctgtgcctggaggagagcatggaggagcaggacgagaagccccccgagccccccaaggcctgcgcccaggacagcttcctgccccaggagatcatcatcaaggtggagggcgaggacaccggcagcctgaccatccccagccaggagggcgtgaacttcaagatcgtgaccgtggacttcaccagagaggagcagggcacctggaaccccgcccagagaaccctggacagagacgtgatcctggagaaccacagagacctggtgagctgggacctggccaccgccgtgggcaagaaggacagcaccagcaagcagagaatcttcgacgaggagcccgccaacggcgtgaagatcgagagattcaccagagacgacccctggctgagcagctgcgaggaggtggacgactgcaaggaccagctggagaagcagcaggagaagcaggagatcctgctgcaggaggtggccttcacccagagaaaggccgtgatccacgagagagtgtgcaagagcgacgagaccggcgagaagagcggcctgaacagcagcctgttcagcagccccgtgatccccatcagaaaccacttccacaagcacgtgagccacgccaagaagtggcacctgaacgccgccgtgaacagccaccagaagatcaacgagaacgagaccctgtacgagaacaacgagtgcggcaagcccccccagagcatccacctgatccagttcaccagaacccagaccaaggacaagtgctacggcttcagcgacagaatccagagcttctgccacggcacccccctgcacatccacgagaagatccacggcggcggcaagaccttcgacttcaaggagtgcggccaggtgctgaaccccaagatcagccacaacgagcagcagagaatccccttcgaggagagccagtacaagtgcagcgagaccagccacagcagcagcctgacccagaacatgagaaacaacagcgaggagaagcccttcgagtgcaaccagtgcggcaagagcttcagctggagcagccacctggtggcccaccagagaacccacaccggcgagaagccctacgagtgcagcgagtgcggcaagagcttcagcagaagcagccacctggtgagccaccagagaacccacaccggcgagaagccctacagatgcaaccagtgcggcaagagcttcagccagagctacgtgctggtggtgcaccagagaacccacaccggcgagaagccctacgagtgcaaccagtgcggcaagagcttcagacagagctacaagctgatcgcccaccagagaacccacaccggcgagaagccctacgagtgcaaccagtgcggcaagagcttcatccagagctacaagctgatcgcccaccagagaatccacaccggcgagaagccctacgagtgcaaccagtgcggcaagagcttcagccagagctacaagctggtggcccaccagagaacccacaccggcgagaagcccttcgagtgcaaccagtgcggcaagagcttcagctggagcagccagctggtggcccaccagagaacccacaccggcgagaagccctacgagtgcagcgagtgcggcaagagcttcaacagaagcagccacctggtgatgcaccagagaatccacaccggcgagaagccctacgagtgcaaccagtgcggcaagagcttcagccagagctacgtgctggtggtgcaccagagaacccacaccggcgagaagccctacgagtgcagccagtgcggcaagagcttcagacagagcagctgcctgacccagcaccagagaacccacaccggcgagaagcccttcgagtgcaaccagtgcggcaagaccttcagcctgagcgccagactgatcgtgcaccagagaacccacaccggcgagaagcccttcacctgcatccagtgcggcaaggccttcatcaacagctacaagctgatcagacaccaggccacccacaccgaggagaagctgtacgagtgcaactag

SEQ ID NO: 3520 - DNA, 942 bp, synthetic construct
  misc_feature 1..942: note = source = /note="Description of Artificial Sequence: Synthetic coding sequence"
  source 1..942: mol_type = other DNA
atggacaacaagaagagactggcctacgccatcatccagttcctgcacgaccagctgagacacggcggcctgagcagcgacgcccaggagagcctggaggtggccatccagtgcctggagaccgccttcggcgtgaccgtggaggacagcgacctggccctgccccagaccctgcccgagatcttcgaggccgccgccaccggcaaggagatgccccaggacctgagaagccccgccagaaccccccccagcgaggaggacagcgccgaggccgagagactgaagaccgagggcaacgagcagatgaaggtggagaacttcgaggccgccgtgcacttctacggcaaggccatcgagctgaaccccgccaacgccgtgtacttctgcaacagagccgccgcctacagcaagctgggcaactacgccggcgccgtgcaggactgcgagagagccatctgcatcgaccccgcctacagcaaggcctacggcagaatgggcctggccctgagcagcctgaacaagcacgtggaggccgtggcctactacaagaaggccctggagctggaccccgacaacgagacctacaagagcaacctgaagatcgccgagctgaagctgagagaggcccccagccccaccggcggcgtgggcagcttcgacatcgccggcctgctgaacaaccccggcttcatgagcatggccagcaacctgatgaacaacccccagatccagcagctgatgagcggcatgatcagcggcggcaacaaccccctgggcacccccggcaccagccccagccagaacgacctggccagcctgatccaggccggccagcagttcgcccagcagatgcagcagcagaaccccgagctgatcgagcagctgagaagccagatcagaagcagaacccccagcgccagcaacgacgaccagcaggagtag

SEQ ID NO: 3521 - DNA, 1584 bp, synthetic construct
  misc_feature 1..1584: note = source = /note="Description of Artificial Sequence: Synthetic coding sequence"
  source 1..1584: mol_type = other DNA
atgtaccagcccgaggacgacaacaacagcgacgtgaccagcgacgacgacatgaccagaaacagaagagagagcagccccccccacagcgtgcacagcttcagcggcgacagagactgggacagaagaggcagaagcagagacatggagcccagagacagatggagccacaccagaaaccccagaagcagaatgccccccagagacctgagcctgcccgtggtggccaagaccagcttcgagatggacagagaggacgacagagacagcagagcctacgagagcagaagccaggacgccgagagctaccagaacgtggtggacctggccgaggacagaaagccccacaacaccatccaggacaacatggagaactacagaaagctgctgagcctgggcttcctggcccaggacagcgtgcccgccgagaagagaaacaccgagatgctggacaacctgcccagcgccggcagccagttccccgacttcaagcacctgggcaccttcctggtgttcgaggagctggtgaccttcgaggacgtgctggtggacttcagccccgaggagctgagcagcctgagcgccgcccagagaaacctgtacagagaggtgatgctggagaactacagaaacctggtgagcctgggccaccagttcagcaagcccgacatcatcagcagactggaggaggaggagagctacgccatggagaccgacagcagacacaccgtgatctgccagggcgagagccacgacgaccccctggagccccaccagggcaaccaggagaagctgctgacccccatcaccatgaacgaccccaagaccctgacccccgagagaagctacggcagcgacgagttcgagagaagcagcaacctgagcaagcagagcaaggaccccctgggcaaggacccccaggagggcaccgcccccggcatctgcaccagcccccagagcgccagccaggagaacaagcacaacagatgcgagttctgcaagagaaccttcagcacccaggtggccctgagaagacacgagagaatccacaccggcaagaagccctacgagtgcaagcagtgcgccgaggccttctacctgatgccccacctgaacagacaccagaagacccacagcggcagaaagaccagcggctgcaacgagggcagaaagcccagcgtgcagtgcgccaacctgtgcgagagagtgagaatccacagccaggaggactacttcgagtgcttccagtgcggcaaggccttcctgcagaacgtgcacctgctgcagcacctgaaggcccacgaggccgccagagtgctgccccccggcctgagccacagcaagacctacctgatcagataccagagaaagcacgactacgtgggcgagagagcctgccagtgctgcgactgcggcagagtgttcagcagaaacagctacctgatccagcactacagaacccacacccaggagagaccctaccagtgccagctgtgcggcaagtgcttcggcagacccagctacctgacccagcactaccagctgcacagccaggagaagaccgtggagtgcgaccactgctag

SEQ ID NO: 3522 - DNA, 444 bp, synthetic construct
  misc_feature 1..444: note = source = /note="Description of Artificial Sequence: Synthetic coding sequence"
  source 1..444: mol_type = other DNA
atggccctgaagagaatccagaaggagctgaccgacctgcagagagacccccccgcccagtgcagcgccggccccgtgggcgacgacctgttccactggcaggccaccatcatgggccccaacgacagcccctaccagggcggcgtgttcttcctgaccatccacttccccaccgactaccccttcaagccccccaaggtggccttcaccaccaagatctaccaccccaacatcaacagcaacggcagcatctgcctggacatcctgagaagccagtggagccccgccctgaccgtgagcaaggtgctgctgagcatctgcagcctgctgtgcgaccccaaccccgacgaccccctggtgcccgagatcgcccacacctacaaggccgacagagagaagtacaacagactggccagagagtggacccagaagtacgccatgtag

SEQ ID NO: 3523 - DNA, 3072 bp, synthetic construct
  misc_feature 1..3072: note = source = /note="Description of Artificial Sequence: Synthetic coding sequence"
  source 1..3072: mol_type = other DNA
atgttccacctgagaacctgcgccgccaagctgagacccctgaccgccagccagaccgtgaagaccttcagccagaacagacccgccgccgccagaaccttccagcagatcagatgctacagcgcccccgtggccgccgagcccttcctgagcggcaccagcagcaactacgtggaggagatgtactgcgcctggctggagaaccccaagagcgtgcacaagagctgggacatcttcttcagaaacaccaacgccggcgccccccccggcaccgcctaccagagccccctgcccctgagcagaggcagcctggccgccgtggcccacgcccagagcctggtggaggcccagcccaacgtggacaagctggtggaggaccacctggccgtgcagagcctgatcagagcctaccagatcagaggccaccacgtggcccagctggaccccctgggcatcctggacgccgacctggacagcagcgtgcccgccgacatcatcagcagcaccgacaagctgggcttctacggcctggacgagagcgacctggacaaggtgttccacctgcccaccaccaccttcatcggcggccaggagagcgccctgcccctgagagagatcatcagaagactggagatggcctactgccagcacatcggcgtggagttcatgttcatcaacgacctggagcagtgccagtggatcagacagaagttcgagacccccggcatcatgcagttcaccaacgaggagaagagaaccctgctggccagactggtgagaagcaccagattcgaggagttcctgcagagaaagtggagcagcgagaagagattcggcctggagggctgcgaggtgctgatccccgccctgaagaccatcatcgacaagagcagcgagaacggcgtggactacgtgatcatgggcatgccccacagaggcagactgaacgtgctggccaacgtgatcagaaaggagctggagcagatcttctgccagttcgacagcaagctggaggccgccgacgagggcagcggcgacgtgaagtaccacctgggcatgtaccacagaagaatcaacagagtgaccgacagaaacatcaccctgagcctggtggccaaccccagccacctggaggccgccgaccccgtggtgatgggcaagaccaaggccgagcagttctactgcggcgacaccgagggcaagaaggtgatgagcatcctgctgcacggcgacgccgccttcgccggccagggcatcgtgtacgagaccttccacctgagcgacctgcccagctacaccacccacggcaccgtgcacgtggtggtgaacaaccagatcggcttcaccaccgaccccagaatggccagaagcagcccctaccccaccgacgtggccagagtggtgaacgcccccatcttccacgtgaacagcgacgaccccgaggccgtgatgtacgtgtgcaaggtggccgccgagtggagaagcaccttccacaaggacgtggtggtggacctggtgtgctacagaagaaacggccacaacgagatggacgagcccatgttcacccagcccctgatgtacaagcagatcagaaagcagaagcccgtgctgcagaagtacgccgagctgctggtgagccagggcgtggtgaaccagcccgagtacgaggaggagatcagcaagtacgacaagatctgcgaggaggccttcgccagaagcaaggacgagaagatcctgcacatcaagcactggctggacagcccctggcccggcttcttcaccctggacggccagcccagaagcatgagctgccccagcaccggcctgaccgaggacatcctgacccacatcggcaacgtggccagcagcgtgcccgtggagaacttcaccatccacggcggcctgagcagaatcctgaagaccagaggcgagatggtgaagaacagaaccgtggactgggccctggccgagtacatggccttcggcagcctgctgaaggagggcatccacatcagactgagcggccaggacgtggagagaggcaccttcagccacagacaccacgtgctgcacgaccagaacgtggacaagagaacctgcatccccatgaaccacctgtggcccaaccaggccccctacaccgtgtgcaacagcagcctgagcgagtacggcgtgctgggcttcgagctgggcttcgccatggccagccccaacgccctggtgctgtgggaggcccagttcggcgacttccacaacaccgcccagtgcatcatcgaccagttcatctgccccggccaggccaagtgggtgagacagaacggcatcgtgctgctgctgccccacggcatggagggcatgggccccgagcacagcagcgccagacccgagagattcctgcagatgtgcaacgacgaccccgacgtgctgcccgacctgaaggaggccaacttcgacatcaaccagctgtacgactgcaactgggtggtggtgaactgcagcacccccggcaacttcttccacgtgctgagaagacagatcctgctgcccttcagaaagcccctgatcatcttcacccccaagagcctgctgagacaccccgaggccagaagcagcttcgacgagatgctgcccggcacccacttccagagagtgatccccgaggacggccccgccgcccagaaccccgagaacgtgaagagactgctgttctgcaccggcaaggtgtactacgacctgaccagagagagaaaggccagagacatggtgggccaggtggccatcaccagaatcgagcagctgagccccttccccttcgacctgctgctgaaggaggtgcagaagtaccccaacgccgagctggcctggtgccaggaggagcacaagaaccagggctactacgactacgtgaagcccagactgagaaccaccatcagcagagccaagcccgtgtggtacgccggcagagaccccgccgccgcccccgccaccggcaacaagaagacccacctgaccgagctgcagagactgctggacaccgccttcgacctggacgtgttcaagaacttcagctag

SEQ ID NO: 3524 - DNA, 2667 bp, synthetic construct
  misc_feature 1..2667: note = source = /note="Description of Artificial Sequence: Synthetic coding sequence"
  source 1..2667: mol_type = other DNA
atggagggcgacgactgcgagttcagatacggcgacggcaccaacgaggcccaggacaacgacttccccaccgtggagagaagcagactgcaggagatgctgagcctgctgggcctggagacctaccaggtgcagaagctgagcctgcaggacagcctgcagatcagcttcgacagcatgaagaactgggccccccaggtgcccaaggacctgccctggaacttcctgagaaagctgcaggccctgaacgccgacgccagaaacaccaccatggtgctggacgtgctgcccgacgccagacccgtggagaaggagagccagatggaggaggagatcatctactgggaccccgccgacgacctggccgccgacatctacagcttcagcgagctgcccacccccgacacccccgtgaaccccctggacctgctgtgcgccctgctgctgagcagcgacagcttcctgcagcaggagatcgccctgaagatggccctgtgccagttcgccctgcccctggtgctgcccgacagcgagaaccactaccacaccttcctgctgtgggccatgagaggcatcgtgagaacctggtggagccagccccccagaggcatgggcagcttcagagaggacagcgtggtgctgagcagagcccccgccttcgccttcgtgagaatggacgtgagcagcaacagcaagagccagctgctgaacgccgtgctgagccccggccacagacagtgggactgcttctggcacagagacctgaacctgggcaccaacgccagagagatcagcgacggcctggtggagatcagctggttcttccccagcggcagagaggacctggacatcttccccgagcccgtggccttcctgaacctgagaggcgacatcggcagccactggctgcagttcaagctgctgaccgagatcagcagcgccgtgttcatcctgaccgacaacatcagcaagaaggagtacaagctgctgtacagcatgaaggagagcaccaccaagtactacttcatcctgagcccctacagaggcaagagaaacaccaacctgagattcctgaacaagctgatccccgtgctgaagatcgaccacagccacgtgctggtgaaggtgagcagcaccgacagcgacagcttcgtgaagagaatcagagccatcgtgggcaacgtgctgagagccccctgcagaagagtgagcgtggaggacatggcccacgccgccagaaagctgggcctgaaggtggacgaggactgcgaggagtgccagaaggccaaggacagaatggagagaatcaccagaaagatcaaggacagcgacgcctacagaagagacgagctgagactgcagggcgacccctggagaaaggccgcccaggtggagaaggagttctgccagctgcagtgggccgtggacccccccgagaagcacagagccgagctgagaagaagactgctggagctgagaatgcagcagaacggccacgaccccagcagcggcgtgcaggagttcatcagcggcatcagcagccccagcctgagcgagaagcagtacttcctgagatggatggagtggggcctggccagagtggcccagcccagactgagacagccccccgagaccctgctgaccctgagacccaagcacggcggcaccaccgacgtgggcgagcccctgtggcccgagcccctgggcgtggagcacttcctgagagagatgggccagttctacgaggccgagagctgcctggtggaggccggcagactgcccgccggccagagaagattcgcccacttccccggcctggccagcgagctgctgctgaccggcctgcccctggagctgatcgacggcagcaccctgagcatgcccgtgagatgggtgaccggcctgctgaaggagctgcacgtgagactggagagaagaagcagactggtggtgctgagcaccgtgggcgtgcccggcaccggcaagagcaccctgctgaacaccatgttcggcctgagattcgccaccggcaagagctgcggccccagaggcgccttcatgcagctgatcaccgtggccgagggcttcagccaggacctgggctgcgaccacatcctggtgatcgacagcggcggcctgatcggcggcgccctgaccagcgccggcgacagattcgagctggaggccagcctggccaccctgctgatgggcctgagcaacgtgaccgtgatcagcctggccgagaccaaggacatccccgccgccatcctgcacgccttcctgagactggagaagaccggccacatgcccaactaccagttcgtgtaccagaacctgcacgacgtgagcgtgcccggccccagacccagagacaagagacagctgctggacccccccggcgacctgagcagagccgccgcccagatggagaagcagggcgacggcttcagagccctggccggcctggccttctgcgaccccgagaagcagcacatctggcacatccccggcctgtggcacggcgccccccccatggccgccgtgagcctggcctacagcgaggccatcttcgagctgaagagatgcctgctggagaacatcagaaacggcctgagcaaccagaacaagaacatccagcagctgatcgagctggtgagaagactgtag

SEQ ID NO: 3525 - DNA, 3744 bp, synthetic construct
  misc_feature 1..3744: note = source = /note="Description of Artificial Sequence: Synthetic coding sequence"
  source 1..3744: mol_type = other DNA
atgatgagagagtgggtgctgctgatgagcgtgctgctgtgcggcctggccggccccacccacctgttccagcccagcctggtgctggacatggccaaggtgctgctggacaactactgcttccccgagaacctgctgggcatgcaggaggccatccagcaggccatcaagagccacgagatcctgagcatcagcgacccccagaccctggccagcgtgctgaccgccggcgtgcagagcagcctgaacgaccccagactggtgatcagctacgagcccagcacccccgagccccccccccaggtgcccgccctgaccagcctgagcgaggaggagctgctggcctggctgcagagaggcctgagacacgaggtgctggagggcaacgtgggctacctgagagtggacagcgtgcccggccaggaggtgctgagcatgatgggcgagttcctggtggcccacgtgtggggcaacctgatgggcaccagcgccctggtgctggacctgagacactgcaccggcggccaggtgagcggcatcccctacatcatcagctacctgcaccccggcaacaccatcctgcacgtggacaccatctacaacagacccagcaacaccaccaccgagatctggaccctgccccaggtgctgggcgagagatacggcgccgacaaggacgtggtggtgctgaccagcagccagaccagaggcgtggccgaggacatcgcccacatcctgaagcagatgagaagagccatcgtggtgggcgagagaaccggcggcggcgccctggacctgagaaagctgagaatcggcgagagcgacttcttcttcaccgtgcccgtgagcagaagcctgggccccctgggcggcggcagccagacctgggagggcagcggcgtgctgccctgcgtgggcacccccgccgagcaggccctggagaaggccctggccatcctgaccctgagaagcgccctgcccggcgtggtgcactgcctgcaggaggtgctgaaggactactacaccctggtggacagagtgcccaccctgctgcagcacctggccagcatggacttcagcaccgtggtgagcgaggaggacctggtgaccaagctgaacgccggcctgcaggccgccagcgaggaccccagactgctggtgagagccatcggccccaccgagacccccagctggcccgcccccgacgccgccgccgaggacagccccggcgtggcccccgagctgcccgaggacgaggccatcagacaggccctggtggacagcgtgttccaggtgagcgtgctgcccggcaacgtgggctacctgagattcgacagcttcgccgacgccagcgtgctgggcgtgctggccccctacgtgctgagacaggtgtgggagcccctgcaggacaccgagcacctgatcatggacctgagacacaaccccggcggccccagcagcgccgtgcccctgctgctgagctacttccagggccccgaggccggccccgtgcacctgttcaccacctacgacagaagaaccaacatcacccaggagcacttcagccacatggagctgcccggccccagatacagcacccagagaggcgtgtacctgctgaccagccacagaaccgccaccgccgccgaggagttcgccttcctgatgcagagcctgggctgggccaccctggtgggcgagatcaccgccggcaacctgctgcacaccagaaccgtgcccctgctggacacccccgagggcagcctggccctgaccgtgcccgtgctgaccttcatcgacaaccacggcgaggcctggctgggcggcggcgtggtgcccgacgccatcgtgctggccgaggaggccctggacaaggcccaggaggtgctggagttccaccagagcctgggcgccctggtggagggcaccggccacctgctggaggcccactacgccagacccgaggtggtgggccagaccagcgccctgctgagagccaagctggcccagggcgcctacagaaccgccgtggacctggagagcctggccagccagctgaccgccgacctgcaggaggtgagcggcgaccacagactgctggtgttccacagccccggcgagctggtggtggaggaggcccccccccccccccccgccgtgcccagccccgaggagctgacctacctgatcgaggccctgttcaagaccgaggtgctgcccggccagctgggctacctgagattcgacgccatggccgagctggagaccgtgaaggccgtgggcccccagctggtgagactggtgtggcagcagctggtggacaccgccgccctggtgatcgacctgagatacaaccccggcagctacagcaccgccatccccctgctgtgcagctacttcttcgaggccgagcccagacagcacctgtacagcgtgttcgacagagccaccagcaaggtgaccgaggtgtggaccctgccccaggtggccggccagagatacggcagccacaaggacctgtacatcctgatgagccacaccagcggcagcgccgccgaggccttcgcccacaccatgcaggacctgcagagagccaccgtgatcggcgagcccaccgccggcggcgccctgagcgtgggcatctaccaggtgggcagcagccccctgtacgccagcatgcccacccagatggccatgagcgccaccaccggcaaggcctgggacctggccggcgtggagcccgacatcaccgtgcccatgagcgaggccctgagcatcgcccaggacatcgtggccctgagagccaaggtgcccaccgtgctgcagaccgccggcaagctggtggccgacaactacgccagcgccgagctgggcgccaagatggccaccaagctgagcggcctgcagagcagatacagcagagtgaccagcgaggtggccctggccgagatcctgggcgccgacctgcagatgctgagcggcgacccccacctgaaggccgcccacatccccgagaacgccaaggacagaatccccggcatcgtgcccatgcagatccccagccccgaggtgttcgaggagctgatcaagttcagcttccacaccaacgtgctggaggacaacatcggctacctgagattcgacatgttcggcgacggcgagctgctgacccaggtgagcagactgctggtggagcacatctggaagaagatcatgcacaccgacgccatgatcatcgacatgagattcaacatcggcggccccaccagcagcatccccatcctgtgcagctacttcttcgacgagggcccccccgtgctgctggacaagatctacagcagacccgacgacagcgtgagcgagctgtggacccacgcccaggtggtgggcgagagatacggcagcaagaagagcatggtgatcctgaccagcagcgtgaccgccggcaccgccgaggagttcacctacatcatgaagagactgggcagagccctggtgatcggcgaggtgaccagcggcggctgccagcccccccagacctaccacgtggacgacaccaacctgtacctgaccatccccaccgccagaagcgtgggcgccagcgacggcagcagctgggagggcgtgggcgtgaccccccacgtggtggtgcccgccgaggaggccctggccagagccaaggagatgctgcagcacaaccagctgagagtgaagagaagccccggcctgcaggaccacctgtag

SEQ ID NO: 3526 - DNA, 885 bp, synthetic construct
  misc_feature 1..885: note = source = /note="Description of Artificial Sequence: Synthetic coding sequence"
  source 1..885: mol_type = other DNA
atgaacagcgagctggactactacgagaagttcgaggaggtgcacggcatcctgatgtacaaggacttcgtgaagtactgggacaacgtggaggccttccaggccagacccgacgacctggtgatcgccacctaccccaagagcggcaccacctgggtgagcgagatcgtgtacatgatctacaaggagggcgacgtggagaagtgcaaggaggacgtgatcttcaacagaatccccttcctggagtgcagaaaggagaacctgatgaacggcgtgaagcagctggacgagatgaacagccccagaatcgtgaagacccacctgccccccgagctgctgcccgccagcttctgggagaaggactgcaagatcatctacctgtgcagaaacgccaaggacgtggccgtgagcttctactacttcttcctgatggtggccggccaccccaaccccggcagcttccccgagttcgtggagaagttcatgcagggccaggtgccctacggcagctggtacaagcacgtgaagagctggtgggagaagggcaagagccccagagtgctgttcctgttctacgaggacctgaaggaggacatcagaaaggaggtgatcaagctgatccacttcctggagagaaagcccagcgaggagctggtggacagaatcatccaccacaccagcttccaggagatgaagaacaaccccagcaccaactacaccaccctgcccgacgagatcatgaaccagaagctgagccccttcatgagaaagggcatcaccggcgactggaagaaccacttcaccgtggccctgaacgagaagttcgacaagcactacgagcagcagatgaaggagagcaccctgaagttcagaaccgagatctag

SEQ ID NO: 3527 - DNA, 1446 bp, synthetic construct
  misc_feature 1..1446: note = source = /note="Description of Artificial Sequence: Synthetic coding sequence"
  source 1..1446: mol_type = other DNA
atggcctacaacgacaccgacagaaaccagaccgagaagctgctgaagagagtgagagagctggagcaggaggtgcagagactgaagaaggagcaggccaagaacaaggaggacagcaacatcagagagaacagcgccggcgccggcaagaccaagagagccttcgacttcagcgcccacggcagaagacacgtggccctgagaatcgcctacatgggctggggctaccagggcttcgccagccaggagaacaccaacaacaccatcgaggagaagctgttcgaggccctgaccaagaccagactggtggagagcagacagaccagcaactaccacagatgcggcagaaccgacaagggcgtgagcgccttcggccaggtgatcagcctggacctgagaagccagttccccagaggcagagacagcgaggacttcaacgtgaaggaggaggccaacgccgccgccgaggagatcagatacacccacatcctgaacagagtgctgccccccgacatcagaatcctggcctgggcccccgtggagcccagcttcagcgccagattcagctgcctggagagaacctacagatacttcttccccagagccgacctggacatcgtgaccatggactacgccgcccagaagtacgtgggcacccacgacttcagaaacctgtgcaagatggacgtggccaacggcgtgatcaacttccagagaaccatcctgagcgcccaggtgcagctggtgggccagagccccggcgagggcagatggcaggagcccttccagctgtgccagttcgaggtgaccggccaggccttcctgtaccaccaggtgagatgcatgatggccatcctgttcctgatcggccagggcatggagaagcccgagatcatcgacgagctgctgaacatcgagaagaacccccagaagccccagtacagcatggccgtggagttccccctggtgctgtacgactgcaagttcgagaacgtgaagtggatctacgaccaggaggcccaggagttcaacatcacccacctgcagcagctgtgggccaaccacgccgtgaagacccacatgctgtacagcatgctgcagggcctggacaccgtgcccgtgccctgcggcatcggccccaagatggacggcatgaccgagtggggcaacgtgaagcccagcgtgatcaagcagaccagcgccttcgtggagggcgtgaagatgagaacctacaagcccctgatggacagacccaagtgccagggcctggagagcagaatccagcacttcgtgagaagaggcagaatcgagcacccccacctgttccacgaggaggagaccaaggccaagagagactgcaacgacaccctggaggaggagaacaccaacctggagacccccaccaagagagtgtgcgtggacaccgagatcaagagcatcatctag

SEQ ID NO: 3528 - DNA, 618 bp, synthetic construct
  misc_feature 1..618: note = source = /note="Description of Artificial Sequence: Synthetic coding sequence"
  source 1..618: mol_type = other DNA
atgagcaacttcctgcacctgaagtacaacgagaagagcgtgagcgtgaccaaggccctgaccgtgagattcctgaccaagagattcatcggcgagtacgccagcaacttcgagagcatctacaagaagcacctgtgcctggagagaaagcagctgaacctggagatctacgacccctgcagccagacccagaaggccaagttcagcctgaccagcgagctgcactgggccgacggcttcgtgatcgtgtacgacatcagcgacagaagcagcttcgccttcgccaaggccctgatctacagaatcagagagccccagaccagccactgcaagagagccgtggagagcgccgtgttcctggtgggcaacaagagagacctgtgccacgtgagagaggtgggctgggaggagggccagaagctggccctggagaacagatgccagttctgcgagctgagcgccgccgagcagagcctggaggtggagatgatgttcatcagaatcatcaaggacatcctgatcaacttcaagctgaaggagaagagaagacccagcggcagcaagagcatggccaagctgatcaacaacgtgttcggcaagagaagaaagagcgtgtag

SEQ ID NO: 3529 - DNA, 1008 bp, synthetic construct
  misc_feature 1..1008: note = source = /note="Description of Artificial Sequence: Synthetic coding sequence"
  source 1..1008: mol_type = other DNA
atgggcaaggtgaaggtgggcgtgaacggcttcggcagaatcggcagactggtgaccagagccgccttcaacagcggcaaggtggacatcgtggccatcaacgaccccttcatcgacctgaactacatggtgtacatgttccagtacgacagcacccacggcaagttccacggcaccgtgaaggccgagaacggcaagctggtgatcaacggcaaccccatcaccatcttccaggagagagaccccagcaagatcaagtggggcgacgccggcgccgagtacgtggtggagagcaccggcgtgttcaccaccatggagaaggccggcgcccacctgcagggcggcgccaagagagtgatcatcagcgcccccagcgccgacgcccccatgttcgtgatgggcgtgaaccacgagaagtacgacaacagcctgaagatcatcagcaacgccagctgcaccaccaactgcctggcccccctggccaaggtgatccacgacaacttcggcatcgtggagggcctgatgaccaccgtgcacgccatcaccgccacccagaagaccgtggacggccccagcggcaagctgtggagagacggcagaggcgccctgcagaacatcatccccgccagcaccggcgccgccaaggccgtgggcaaggtgatccccgagctgaacggcaagctgaccggcatggccttcagagtgcccaccgccaacgtgagcgtggtggacctgacctgcagactggagaagcccgccaagtacgacgacatcaagaaggtggtgaagcaggccagcgagggccccctgaagggcatcctgggctacaccgagcaccaggtggtgagcagcgacttcaacagcgacacccacagcagcaccttcgacgccggcgccggcatcgccctgaacgaccacttcgtgaagctgatcagctggtacgacaacgagttcggctacagcaacagagtggtggacctgatggcccacatggccagcaaggagtag

SEQ ID NO: 3530 - DNA, 597 bp, synthetic construct
  misc_feature 1..597: note = source = /note="Description of Artificial Sequence: Synthetic coding sequence"
  source 1..597: mol_type = other DNA
atggacagcctgctgatgaacagaagaaagttcctgtaccagttcaagaacgtgagatgggccaagggcagaagagagacctacctgtgctacgtggtgaagagaagagacagcgccaccagcttcagcctggacttcggctacctgagaaacaagaacggctgccacgtggagctgctgttcctgagatacatcagcgactgggacctggaccccggcagatgctacagagtgacctggttcaccagctggagcccctgctacgactgcgccagacacgtggccgacttcctgagaggcaaccccaacctgagcctgagaatcttcaccgccagactgtacttctgcgaggacagaaaggccgagcccgagggcctgagaagactgcacagagccggcgtgcagatcgccatcatgaccttcaaggactacttctactgctggaacaccttcgtggagaaccacgagagaaccttcaaggcctgggagggcctgcacgagaacagcgtgagactgagcagacagctgagaagaatcctgctgcccctgtacgaggtggacgacctgagagacgccttcagaaccctgggcctgtag

SEQ ID NO: 3531 - DNA, 5472 bp, synthetic construct
  misc_feature 1..5472: note = source = /note="Description of Artificial Sequence: Synthetic coding sequence"
  source 1..5472: mol_type = other DNA
atggccctgagcagcgcctggagaagcgtgctgcccctgtggctgctgtggagcgccgcctgcagcagagccgccagcggcgacgacaacgccttccccttcgacatcgagggcagcagcgccgtgggcagacaggacccccccgagaccagcgagcccagagtggccctgggcagactgccccccgccgccgagaagtgcaacgccggcttcttccacaccctgagcggcgagtgcgtgccctgcgactgcaacggcaacagcaacgagtgcctggacggcagcggctactgcgtgcactgccagagaaacaccaccggcgagcactgcgagaagtgcctggacggctacatcggcgacagcatcagaggcgccccccagttctgccagccctgcccctgccccctgccccacctggccaacttcgccgagagctgctacagaaagaacggcgccgtgagatgcatctgcaacgagaactacgccggccccaactgcgagagatgcgcccccggctactacggcaaccccctgctgatcggcagcacctgcaagaagtgcgactgcagcggcaacagcgaccccaacctgatcttcgaggactgcgacgaggtgaccggccagtgcagaaactgcctgagaaacaccaccggcttcaagtgcgagagatgcgcccccggctactacggcgacgccagaatcgccaagaactgcgccgtgtgcaactgcggcggcggcccctgcgacagcgtgaccggcgagtgcctggaggagggcttcgagccccccaccggcatggactgccccaccatcagctgcgacaagtgcgtgtgggacctgaccgacgccctgagactggccgccctgagcatcgaggagggcaagagcggcgtgctgagcgtgagcagcggcgccgccgcccacagacacgtgaacgagatcaacgccaccatctacctgctgaagaccaagctgagcgagagagagaaccagtacgccctgagaaagatccagatcaacaacgccgagaacaccatgaagagcctgctgagcgacgtggaggagctggtggagaaggagaaccaggccagcagaaagggccagctggtgcagaaggagagcatggacaccatcaaccacgccagccagctggtggagcaggcccacgacatgagagacaagatccaggagatcaacaacaagatgctgtactacggcgaggagcacgagctgagccccaaggagatcagcgagaagctggtgctggcccagaagatgctggaggagatcagaagcagacagcccttcttcacccagagagagctggtggacgaggaggccgacgaggcctacgagctgctgagccaggccgagagctggcagagactgcacaacgagaccagaaccctgttccccgtggtgctggagcagctggacgactacaacgccaagctgagcgacctgcaggaggccctggaccaggccctgaactacgtgagagacgccgaggacatgaacagagccaccgccgccagacagagagaccacgagaagcagcaggagagagtgagagagcagatggaggtggtgaacatgagcctgagcaccagcgccgacagcctgaccacccccagactgaccctgagcgagctggacgacatcatcaagaacgccagcggcatctacgccgagatcgacggcgccaagagcgagctgcaggtgaagctgagcaacctgagcaacctgagccacgacctggtgcaggaggccatcgaccacgcccaggacctgcagcaggaggccaacgagctgagcagaaagctgcacagcagcgacatgaacggcctggtgcagaaggccctggacgccagcaacgtgtacgagaacatcgtgaactacgtgagcgaggccaacgagaccgccgagttcgccctgaacaccaccgacagaatctacgacgccgtgagcggcatcgacacccagatcatctaccacaaggacgagagcgagaacctgctgaaccaggccagagagctgcaggccaaggccgagagcagcagcgacgaggccgtggccgacaccagcagaagagtgggcggcgccctggccagaaagagcgccctgaagaccagactgagcgacgccgtgaagcagctgcaggccgccgagagaggcgacgcccagcagagactgggccagagcagactgatcaccgaggaggccaacagaaccaccatggaggtgcagcaggccaccgcccccatggccaacaacctgaccaactggagccagaacctgcagcacttcgacagcagcgcctacaacaccgccgtgaacagcgccagagacgccgtgagaaacctgaccgaggtggtgccccagctgctggaccagctgagaaccgtggagcagaagagacccgccagcaacgtgagcgccagcatccagagaatcagagagctgatcgcccagaccagaagcgtggccagcaagatccaggtgagcatgatgttcgacggccagagcgccgtggaggtgcacagcagaaccagcatggacgacctgaaggccttcaccagcctgagcctgtacatgaagccccccgtgaagagacccgagctgaccgagaccgccgaccagttcatcctgtacctgggcagcaagaacgccaagaaggagtacatgggcctggccatcaagaacgacaacctggtgtacgtgtacaacctgggcaccaaggacgtggagatccccctggacagcaagcccgtgagcagctggcccgcctacttcagcatcgtgaagatcgagagagtgggcaagcacggcaaggtgttcctgaccgtgcccagcctgagcagcaccgccgaggagaagttcatcaagaagggcgagttcagcggcgacgacagcctgctggacctggaccccgaggacaccgtgttctacgtgggcggcgtgcccagcaacttcaagctgcccaccagcctgaacctgcccggcttcgtgggctgcctggagctggccaccctgaacaacgacgtgatcagcctgtacaacttcaagcacatctacaacatggaccccagcaccagcgtgccctgcgccagagacaagctggccttcacccagagcagagccgccagctacttcttcgacggcagcggctacgccgtggtgagagacatcaccagaagaggcaagttcggccaggtgaccagattcgacatcgaggtgagaacccccgccgacaacggcctgatcctgctgatggtgaacggcagcatgttcttcagactggagatgagaaacggctacctgcacgtgttctacgacttcggcttcagcggcggccccgtgcacctggaggacaccctgaagaaggcccagatcaacgacgccaagtaccacgagatcagcatcatctaccacaacgacaagaagatgatcctggtggtggacagaagacacgtgaagagcatggacaacgagaagatgaagatccccttcaccgacatctacatcggcggcgccccccccgagatcctgcagagcagagccctgagagcccacctgcccctggacatcaacttcagaggctgcatgaagggcttccagttccagaagaaggacttcaacctgctggagcagaccgagaccctgggcgtgggctacggctgccccgaggacagcctgatcagcagaagagcctacttcaacggccagagcttcatcgccagcatccagaagatcagcttcttcgacggcttcgagggcggcttcaacttcagaaccctgcagcccaacggcctgctgttctactacgccagcggcagcgacgtgttcagcatcagcctggacaacggcaccgtgatcatggacgtgaagggcatcaaggtgcagagcgtggacaagcagtacaacgacggcctgagccacttcgtgatcagcagcgtgagccccaccagatacgagctgatcgtggacaagagcagagtgggcagcaagaaccccaccaagggcaagatcgagcagacccaggccagcgagaagaagttctacttcggcggcagccccatcagcgcccagtacgccaacttcaccggctgcatcagcaacgcctacttcaccagagtggacagagacgtggaggtggaggacttccagagatacaccgagaaggtgcacaccagcctgtacgagtgccccatcgagagcagccccctgttcctgctgcacaagaagggcaagaacctgagcaagcccaaggccagccagaacaagaagggcggcaagagcaaggacgcccccagctgggaccccgtggccctgaagctgcccgagagaaacacccccagaaacagccactgccacctgagcaacagccccagagccatcgagcacgcctaccagtacggcggcaccgccaacagcagacaggagttcgagcacctgaagggcgacttcggcgccaagagccagttcagcatcagactgagaaccagaagcagccacggcatgatcttctacgtgagcgaccaggaggagaacgacttcatgaccctgttcctggcccacggcagactggtgtacatgttcaacgtgggccacaagaagctgaagatcagaagccaggagaagtacaacgacggcctgtggcacgacgtgatcttcatcagagagagaagcagcggcagactggtgatcgacggcctgagagtgctggaggagagcctgccccccaccgaggccacctggaagatcaagggccccatctacctgggcggcgtggcccccggcaaggccgtgaagaacgtgcagatcaacagcatctacagcttcagcggctgcctgagcaacctgcagctgaacggcgccagcatcaccagcgccagccagaccttcagcgtgaccccctgcttcgagggccccatggagaccggcacctacttcagcaccgagggcggctacgtggtgctggacgagagcttcaacatcggcctgaagttcgagatcgccttcgaggtgagacccagaagcagcagcggcaccctggtgcacggccacagcgtgaacggcgagtacctgaacgtgcacatgaagaacggccaggtgatcgtgaaggtgaacaacggcatcagagacttcagcaccagcgtgacccccaagcagagcctgtgcgacggcagatggcacagaatcaccgtgatcagagacagcaacgtggtgcagctggacgtggacagcgaggtgaaccacgtggtgggccccctgaaccccaagcccatcgaccacagagagcccgtgttcgtgggcggcgtgcccgagagcctgctgacccccagactggcccccagcaagcccttcaccggctgcatcagacacttcgtgatcgacggccaccccgtgagcttcagcaaggccgccctggtgagcggcgccgtgagcatcaacagctgccccgccgcctag

SEQ ID NO: 3532 - DNA, 1434 bp, synthetic construct
  misc_feature 1..1434: note = source = /note="Description of Artificial Sequence: Synthetic coding sequence"
  source 1..1434: mol_type = other DNA
atgaccagcaagttcctgctggtgagcttcatcctggccgccctgagcctgagcaccaccttcagcctgcagcccgaccagcagaaggtgctgctggtgagcttcgacggcttcagatgggactacctgtacaaggtgcccaccccccacttccactacatcatgaagtacggcgtgcacgtgaagcaggtgaccaacgtgttcatcaccaagacctaccccaaccactacaccctggtgaccggcctgttcgccgagaaccacggcatcgtggccaacgacatgttcgaccccatcagaaacaagagcttcagcctggaccacatgaacatctacgacagcaagttctgggaggaggccacccccatctggatcaccaaccagagagccggccacaccagcggcgccgccatgtggcccggcaccgacgtgaagatccacaagagattccccacccactacatgccctacaacgagagcgtgagcttcgaggacagagtggccaagatcatcgagtggttcaccagcaaggagcccatcaacctgggcctgctgtactgggaggaccccgacgacatgggccaccacctgggccccgacagccccctgatgggccccgtgatcagcgacatcgacaagaagctgggctacctgatccagatgctgaagaaggccaagctgtggaacaccctgaacctgatcatcaccagcgaccacggcatgacccagtgcagcgaggagagactgatcgagctggaccagtacctggacaaggaccactacaccctgatcgaccagagccccgtggccgccatcctgcccaaggagggcaagttcgacgaggtgtacgaggccctgacccacgcccaccccaacctgaccgtgtacaagaaggaggacgtgcccgagagatggcactacaagtacaacagcagaatccagcccatcatcgccgtggccgacgagggctggcacatcctgcagaacaagagcgacgacttcctgctgggcaaccacggctacgacaacgccctggccgacatgcaccccatcttcctggcccacggccccgccttcagaaagaacttcagcaaggaggccatgaacagcaccgacctgtaccccctgctgtgccacctgctgaacatcaccgccatgccccacaacggcagcttctggaacgtgcaggacctgctgaacagcgccatgcccagagtggtgccctacacccagagcaccatcctgctgcccggcagcgtgaagcccgccgagtacgaccaggagggcagctacccctacttcatcggcgtgagcctgggcagcatcatcgtgatcgtgttcttcgtgatcttcatcaagcacctgatccacagccagatccccgccctgcaggacatgcacgccgagatcgcccagcccctgctgcaggcctag

SEQ ID NO: 3533 - DNA, 1254 bp, synthetic construct
  misc_feature 1..1254: note = source = /note="Description of Artificial Sequence: Synthetic coding sequence"
  source 1..1254: mol_type = other DNA
atgagattcgcctggaccgtgctgctgctgggccccctgcagctgtgcgccctggtgcactgcgccccccccgccgccggccagcagcagccccccagagagccccccgccgcccccggcgcctggagacagcagatccagtgggagaacaacggccaggtgttcagcctgctgagcctgggcagccagtaccagccccagagaagaagagaccccggcgccgccgtgcccggcgccgccaacgccagcgcccagcagcccagaacccccatcctgctgatcagagacaacagaaccgccgccgccagaaccagaaccgccggcagcagcggcgtgaccgccggcagacccagacccaccgccagacactggttccaggccggctacagcaccagcagagccagagaggccggcgccagcagagccgagaaccagaccgcccccggcgaggtgcccgccctgagcaacctgagaccccccagcagagtggacggcatggtgggcgacgacccctacaacccctacaagtacagcgacgacaacccctactacaactactacgacacctacgagagacccagacccggcggcagatacagacccggctacggcaccggctacttccagtacggcctgcccgacctggtggccgacccctactacatccaggccagcacctacgtgcagaagatgagcatgtacaacctgagatgcgccgccgaggagaactgcctggccagcaccgcctacagagccgacgtgagagactacgaccacagagtgctgctgagattcccccagagagtgaagaaccagggcaccagcgacttcctgcccagcagacccagatacagctgggagtggcacagctgccaccagcactaccacagcatggacgagttcagccactacgacctgctggacgccaacacccagagaagagtggccgagggccacaaggccagcttctgcctggaggacaccagctgcgactacggctaccacagaagattcgcctgcaccgcccacacccagggcctgagccccggctgctacgacacctacggcgccgacatcgactgccagtggatcgacatcaccgacgtgaagcccggcaactacatcctgaaggtgagcgtgaaccccagctacctggtgcccgagagcgactacaccaacaacgtggtgagatgcgacatcagatacaccggccaccacgcctacgccagcggctgcaccatcagcccctactag

SEQ ID NO: 3534 - DNA, 879 bp, synthetic construct
  misc_feature 1..879: note = source = /note="Description of Artificial Sequence: Synthetic coding sequence"
  source 1..879: mol_type = other DNA
atgggcgagaagagcgagaactgcggcgtgcccgaggacctgctgaacggcctgaaggtgaccgacacccaggaggccgagtgcgccggcccccccgtgcccgaccccaagaaccagcacagccagagcaagctgctgagagacgacgaggcccacctgcaggaggaccagggcgaggaggagtgcttccacgactgcagcgccagcttcgaggaggagcccggcgccgacaaggtggagaacaagagcaacgaggacgtgaacagcagcgagctggacgaggagtacctgatcgagctggagaagaacatgagcgacgaggagaagcagaagagaagagaggagagcaccagactgaaggaggagggcaacgagcagttcaagaagggcgactacatcgaggccgagagcagctacagcagagccctggagatgtgccccagctgcttccagaaggagagaagcatcctgttcagcaacagagccgccgccagaatgaagcaggacaagaaggagatggccatcaacgactgcagcaaggccatccagctgaaccccagctacatcagagccatcctgagaagagccgagctgtacgagaagaccgacaagctggacgaggccctggaggactacaagagcatcctggagaaggaccccagcatccaccaggccagagaggcctgcatgagactgcccaagcagatcgaggagagaaacgagagactgaaggaggagatgctgggcaagctgaaggacctgggcaacctggtgctgagacccttcggcctgagcaccgagaacttccagatcaagcaggacagcagcaccggcagctacagcatcaacttcgtgcagaaccccaacaacaacagatag

SEQ ID NO: 3535 - DNA, 2316 bp, synthetic construct
  misc_feature 1..2316: note = source = /note="Description of Artificial Sequence: Synthetic coding sequence"
  source 1..2316: mol_type = other DNA
atgagcggcttcttcaccagcctggaccccagaagagtgcagtggggcgccgcctggtacgccatgcacagcagaatcctgagaaccaagcccgtggagagcatgctggagggcaccggcaccaccaccgcccacggcaccaagctggcccaggtgctgaccaccgtggacctgatcagcctgggcgtgggcagctgcgtgggcaccggcatgtacgtggtgagcggcctggtggccaaggagatggccggccccggcgtgatcgtgagcttcatcatcgccgccgtggccagcatcctgagcggcgtgtgctacgccgagttcggcgtgagagtgcccaagaccaccggcagcgcctacacctacagctacgtgaccgtgggcgagttcgtggccttcttcatcggctggaacctgatcctggagtacctgatcggcaccgccgccggcgccagcgccctgagcagcatgttcgacagcctggccaaccacaccatcagcagatggatggccgacagcgtgggcaccctgaacggcctgggcaagggcgaggagagctaccccgacctgctggccctgctgatcgccgtgatcgtgaccatcatcgtggccctgggcgtgaagaacagcatcggcttcaacaacgtgctgaacgtgctgaacctggccgtgtgggtgttcatcatgatcgccggcctgttcttcatcaacggcaagtactgggccgagggccagttcctgccccacggctggagcggcgtgctgcagggcgccgccacctgcttctacgccttcatcggcttcgacatcatcgccaccaccggcgaggaggccaagaaccccaacaccagcatcccctacgccatcaccgccagcctggtgatctgcctgaccgcctacgtgagcgtgagcgtgatcctgaccctgatggtgccctactacaccatcgacaccgagagccccctgatggagatgttcgtggcccacggcttctacgccgccaagttcgtggtggccatcggcagcgtggccggcctgaccgtgagcctgctgggcagcctgttccccatgcccagagtgatctacgccatggccggcgacggcctgctgttcagattcctggcccacgtgagcagctacaccgagacccccgtggtggcctgcatcgtgagcggcttcctggccgccctgctggccctgctggtgagcctgagagacctgatcgagatgatgagcatcggcaccctgctggcctacaccctggtgagcgtgtgcgtgctgctgctgagataccagcccgagagcgacatcgacggcttcgtgaagttcctgagcgaggagcacaccaagaagaaggagggcatcctggccgactgcgagaaggaggcctgcagccccgtgagcgagggcgacgagttcagcggccccgccaccaacacctgcggcgccaagaacctgcccagcctgggcgacaacgagatgctgatcggcaagagcgacaagagcacctacaacgtgaaccaccccaactacggcaccgtggacatgaccaccggcatcgaggccgacgagagcgagaacatctacctgatcaagctgaagaagctgatcggcccccactactacaccatgagaatcagactgggcctgcccggcaagatggacagacccaccgccgccaccggccacaccgtgaccatctgcgtgctgctgctgttcatcctgatgttcatcttctgcagcttcatcatcttcggcagcgactacatcagcgagcagagctggtgggccatcctgctggtggtgctgatggtgctgctgatcagcaccctggtgttcgtgatcctgcagcagcccgagaaccccaagaagctgccctacatggccccctgcctgcccttcgtgcccgccttcgccatgctggtgaacatctacctgatgctgaagctgagcaccatcacctggatcagattcgccgtgtggtgcttcgtgggcctgctgatctacttcggctacggcatctggaacagcaccctggagatcagcgccagagaggaggccctgcaccagagcacctaccagagatacgacgtggacgaccccttcagcgtggaggagggcttcagctacgccaccgagggcgagagccaggaggactggggcggccccaccgaggacaagggcttctactaccagcagatgagcgacgccaaggccaacggcagaaccagcagcaaggccaagagcaagagcaagcacaagcagaacagcgaggccctgatcgccaacgacgagctggactacagccccgagtag

SEQ ID NO: 3536 - DNA, 513 bp, synthetic construct
  misc_feature 1..513: note = source = /note="Description of Artificial Sequence: Synthetic coding sequence"
  source 1..513: mol_type = other DNA
atgggcaacgaggccagctaccccctggagatgtgcagccacttcgacgccgacgagatcaagagactgggcaagagattcaagaagctggacctggacaacagcggcagcctgagcgtggaggagttcatgagcctgcccgagctgcagcagaaccccctggtgcagagagtgatcgacatcttcgacaccgacggcaacggcgaggtggacttcaaggagttcatcgagggcgtgagccagttcagcgtgaagggcgacaaggagcagaagctgagattcgccttcagaatctacgacatggacaaggacggctacatcagcaacggcgagctgttccaggtgctgaagatgatggtgggcaacaacctgaaggacacccagctgcagcagatcgtggacaagaccatcatcaacgccgacaaggacggcgacggcagaatcagcttcgaggagttctgcgccgtggtgggcggcctggacatccacaagaagatggtggtggacgtgtag

SEQ ID NO: 3537 - DNA, 1218 bp, synthetic construct
  misc_feature 1..1218: note = source = /note="Description of Artificial Sequence: Synthetic coding sequence"
  source 1..1218: mol_type = other DNA
atgagcagcagcgtgaagacccccgccctggaggagctggtgcccggcagcgaggagaagcccaagggcagaagccccctgagctggggcagcctgttcggccacagaagcgagaagatcgtgttcgccaagagcgacggcggcaccgacgagaacgtgctgaccgtgaccatcaccgagaccaccgtgatcgagagcgacctgggcgtgtggagcagcagagccctgctgtacctgaccctgtggttcttcttcagcttctgcaccctgttcctgaacaagtacatcctgagcctgctgggcggcgagcccagcatgctgggcgccgtgcagatgctgagcaccaccgtgatcggctgcgtgaagaccctggtgccctgctgcctgtaccagcacaaggccagactgagctacccccccaacttcctgatgaccatgctgttcgtgggcctgatgagattcgccaccgtggtgctgggcctggtgagcctgaagaacgtggccgtgagcttcgccgagaccgtgaagagcagcgcccccatcttcaccgtgatcatgagcagaatgatcctgggcgagtacaccggcctgctggtgaacctgagcctgatccccgtgatgggcggcctggccctgtgcaccgccaccgagatcagcttcaacgtgctgggcttcagcgccgccctgagcaccaacatcatggactgcctgcagaacgtgttcagcaagaagctgctgagcggcgacaagtacagattcagcgcccccgagctgcagttctacaccagcgccgccgccgtggccatgctggtgcccgccagagtgttcttcaccgacgtgcccgtgatcggcagaagcggcaagagcttcagctacaaccaggacgtggtgctgctgctgctgaccgacggcgtgctgttccacctgcagagcgtgaccgcctacgccctgatgggcaagatcagccccgtgaccttcagcgtggccagcaccgtgaagcacgccctgagcatctggctgagcgtgatcgtgttcggcaacaagatcaccagcctgagcgccgtgggcaccgccctggtgaccgtgggcgtgctgctgtacaacaaggccagacagcaccagcaggaggccctgcagagcctggccgccgccaccggcagagcccccgacgacaccgtggagcccctgctgccccaggaccccagacagcacccctag

SEQ ID NO: 3538 - DNA, 1131 bp, synthetic construct
  misc_feature 1..1131: note = source = /note="Description of Artificial Sequence: Synthetic coding sequence"
  source 1..1131: mol_type = other DNA
atgctgaagaagatcagcgtgggcgtggccggcgacctgaacaccgtgaccatgaagctgggctgcgtgctgatggcctgggccctgtacctgagcctgggcgtgctgtgggtggcccagatgctgctggccgccagcttcgagaccctgcagtgcgagggccccgtgtgcaccgaggagagcagctgccacaccgaggacgacctgaccgacgccagagaggccggcttccaggtgaaggcctacaccttcagcgagcccttccacctgatcgtgagctacgactggctgatcctgcagggccccgccaagcccgtgttcgagggcgacctgctggtgctgagatgccaggcctggcaggactggcccctgacccaggtgaccttctacagagacggcagcgccctgggcccccccggccccaacagagagttcagcatcaccgtggtgcagaaggccgacagcggccactaccactgcagcggcatcttccagagccccggccccggcatccccgagaccgccagcgtggtggccatcaccgtgcaggagctgttccccgcccccatcctgagagccgtgcccagcgccgagccccaggccggcagccccatgaccctgagctgccagaccaagctgcccctgcagagaagcgccgccagactgctgttcagcttctacaaggacggcagaatcgtgcagagcagaggcctgagcagcgagttccagatccccaccgccagcgaggaccacagcggcagctactggtgcgaggccgccaccgaggacaaccaggtgtggaagcagagcccccagctggagatcagagtgcagggcgccagcagcagcgccgccccccccaccctgaaccccgccccccagaagagcgccgcccccggcaccgcccccgaggaggcccccggccccctgccccccccccccacccccagcagcgaggaccccggcttcagcagccccctgggcatgcccgacccccacctgtaccaccagatgggcctgctgctgaagcacatgcaggacgtgagagtgctgctgggccacctgctgatggagctgagagagctgagcggccacagaaagcccggcaccaccaaggccaccgccgagtag

SEQ ID NO: 3539 - DNA, 1572 bp, synthetic construct
  misc_feature 1..1572: note = source = /note="Description of Artificial Sequence: Synthetic coding sequence"
  source 1..1572: mol_type = other DNA
atggccagaaaggccctgaagctggccagctggaccagcatggccctggccgccagcggcatctacttctacagcaacaagtacctggaccccaacgacttcggcgccgtgagagtgggcagagccgtggccaccaccgccgtgatcagctacgactacctgaccagcctgaagagcgtgccctacggcagcgaggagtacctgcagctgagaagcaaggtgcacctgagaagcgccagaagactgtgcgagctgtgctgcgccaacagaggcaccttcatcaaggtgggccagcacctgggcgccctggactacctgctgcccgaggagtacaccagcaccctgaaggtgctgcacagccaggccccccagagcagcatgcaggagatcagacaggtgatcagagaggacctgggcaaggagatccacgacctgttccagagcttcgacgacacccccctgggcaccgccagcctggcccaggtgcacaaggccgtgctgcacgacggcagaaccgtggccgtgaaggtgcagcaccccaaggtgagagcccagagcagcaaggacatcctgctgatggaggtgctggtgctggccgtgaagcagctgttccccgagttcgagttcatgtggctggtggacgaggccaagaagaacctgcccctggagctggacttcctgaacgagggcagaaacgccgagaaggtgagccagatgctgagacacttcgacttcctgaaggtgcccagaatccactgggacctgagcaccgagagagtgctgctgatggagttcgtggacggcggccaggtgaacgacagagactacatggagagaaacaagatcgacgtgaacgagatcagcagacacctgggcaagatgtacagcgagatgatcttcgtgaacggcttcgtgcactgcgacccccaccccggcaacgtgctggtgagaaagcaccccggcaccggcaaggccgagatcgtgctgctggaccacggcctgtaccagatgctgaccgaggagttcagactgaactactgccacctgtggcagagcctgatctggaccgacatgaagagagtgaaggagtacagccagagactgggcgccggcgacctgtaccccctgttcgcctgcatgctgaccgccagaagctgggacagcgtgaacagaggcatcagccaggcccccgtgaccgccaccgaggacctggagatcagaaacaacgccgccaactacctgccccagatcagccacctgctgaaccacgtgcccagacagatgctgctgatcctgaagaccaacgacctgctgagaggcatcgaggccgccctgggcaccagagccagcgccagcagcttcctgaacatgagcagatgctgcatcagagccctggccgagcacaagaagaagaacacctgcagcttcttcagaagaacccagatcagcttcagcgaggccttcaacctgtggcagatcaacctgcacgagctgatcctgagagtgaagggcctgaagctggccgacagagtgctggccctgatctgctggctgttccccgcccccctgtag

SEQ ID NO: 3540 - DNA, 1197 bp, synthetic construct
  misc_feature 1..1197: note = source = /note="Description of Artificial Sequence: Synthetic coding sequence"
  source 1..1197: mol_type = other DNA
atgtggctgctgctgaccatggccagcctgatcagcgtgctgggcaccacccacggcctgttcggcaagctgcaccccggcagccccgaggtgaccatgaacatcagccagatgatcacctactggggctaccccaacgaggagtacgaggtggtgaccgaggacggctacatcctggaggtgaacagaatcccctacggcaagaagaacagcggcaacaccggccagagacccgtggtgttcctgcagcacggcctgctggccagcgccaccaactggatcagcaacctgcccaacaacagcctggccttcatcctggccgacgccggctacgacgtgtggctgggcaacagcagaggcaacacctgggccagaagaaacctgtactacagccccgacagcgtggagttctgggccttcagcttcgacgagatggccaagtacgacctgcccgccaccatcgacttcatcgtgaagaagaccggccagaagcagctgcactacgtgggccacagccagggcaccaccatcggcttcatcgccttcagcaccaaccccagcctggccaagagaatcaagaccttctacgccctggcccccgtggccaccgtgaagtacaccaagagcctgatcaacaagctgagattcgtgccccagagcctgttcaagttcatcttcggcgacaagatcttctacccccacaacttcttcgaccagttcctggccaccgaggtgtgcagcagagagatgctgaacctgctgtgcagcaacgccctgttcatcatctgcggcttcgacagcaagaacttcaacaccagcagactggacgtgtacctgagccacaaccccgccggcaccagcgtgcagaacatgttccactggacccaggccgtgaagagcggcaagttccaggcctacgactggggcagccccgtgcagaacagaatgcactacgaccagagccagcccccctactacaacgtgaccgccatgaacgtgcccatcgccgtgtggaacggcggcaaggacctgctggccgacccccaggacgtgggcctgctgctgcccaagctgcccaacctgatctaccacaaggagatccccttctacaaccacctggacttcatctgggccatggacgccccccaggaggtgtacaacgacatcgtgagcatgatcagcgaggacaagaagtag

SEQ ID NO: 3541 - DNA, 555 bp, synthetic construct
  misc_feature 1..555: note = source = /note="Description of Artificial Sequence: Synthetic coding sequence"
  source 1..555: mol_type = other DNA
atgagaggccagggcagaaaggagagcctgagcgacagcagagacctggacggcagctacgaccagctgaccgacagcgtggacgacgagttcgagctgagcaccgtgtgccacagacccgagggcctggagcagctgcaggagcagaccaagttcaccagaaaggagctgcaggtgctgtacagaggcttcaagaacgagtgccccagcggcatcgtgaacgaggagaacttcaagcagatctacagccagttcttcccccagggcgacagcagcacctacgccaccttcctgttcaacgccttcgacaccaaccacgacggcagcgtgagcttcgaggagatgctggacatcatgaagagcatctacgacatgatgggcaagtacacctaccccgccctgagagaggaggcccccagagagcacgtggagagcttcttccagaagatggacagaaacaaggacggcgtggtgaccatcgaggagttcatcgagagctgccagaaggtgcagctgcccgccctgtacatcaccctgacctggacccaggcctag

SEQ ID NO: 3542 - DNA, 3900 bp, synthetic construct
  misc_feature 1..3900: note = source = /note="Description of Artificial Sequence: Synthetic coding sequence"
  source 1..3900: mol_type = other DNA
atgagcctgcaggagatgttcagattccccatgggcctgctgctgggcagcgtgctgctggtggccagcgcccccgccaccctggagccccccggctgcagcaacaaggagcagcaggtgaccgtgagccacacctacaagatcgacgtgcccaagagcgccctggtgcaggtggacgccgacccccagcccctgagcgacgacggcgccagcctgctggccctgggcgaggccagagaggagcagaacatcatcttcagacacaacatcagactgcagaccccccagaaggactgcgagctggccggcagcgtgcaggacctgctggccagagtgaagaagctggaggaggagatggtggagatgaaggagcagtgcagcgcccagagatgctgccagggcgtgaccgacctgagcagacactgcagcggccacggcaccttcagcctggagacctgcagctgccactgcgaggagggcagagagggccccgcctgcgagagactggcctgccccggcgcctgcagcggccacggcagatgcgtggacggcagatgcctgtgccacgagccctacgtgggcgccgactgcggctaccccgcctgccccgagaactgcagcggccacggcgagtgcgtgagaggcgtgtgccagtgccacgaggacttcatgagcgaggactgcagcgagaagagatgccccggcgactgcagcggccacggcttctgcgacaccggcgagtgctactgcgaggagggcttcaccggcctggactgcgcccaggtggtgaccccccagggcctgcagctgctgaagaacaccgaggacagcctgctggtgagctgggagcccagcagccaggtggaccactacctgctgagctactaccccctgggcaaggagctgagcggcaagcagatccaggtgcccaaggagcagcacagctacgagatcctgggcctgctgcccggcaccaagtacatcgtgaccctgagaaacgtgaagaacgaggtgagcagcagcccccagcacctgctggccaccaccgacctggccgtgctgggcaccgcctgggtgaccgacgagaccgagaacagcctggacgtggagtgggagaaccccagcaccgaggtggactactacaagctgagatacggccccatgaccggccaggaggtggccgaggtgaccgtgcccaagagcagcgaccccaagagcagatacgacatcaccggcctgcaccccggcaccgagtacaagatcaccgtggtgcccatgagaggcgagctggagggcaagcccatcctgctgaacggcagaaccgagatcgacagccccaccaacgtggtgaccgacagagtgaccgaggacaccgccaccgtgagctgggaccccgtgcaggccgtgatcgacaagtacgtggtgagatacaccagcgccgacggcgacaccaaggagatggccgtgcacaaggacgagagcagcaccgtgctgaccggcctgaagcccggcgaggcctacaaggtgtacgtgtgggccgagagaggcaaccagggcagcaagaaggccgacaccaacgccctgaccgagatcgacagccccgccaacctggtgaccgacagagtgaccgagaacaccgccaccatcagctgggaccccgtgcaggccaccatcgacaagtacgtggtgagatacaccagcgccgacgaccaggagaccagagaggtgctggtgggcaaggagcagagcagcaccgtgctgaccggcctgagacccggcgtggagtacaccgtgcacgtgtgggcccagaagggcgacagagagagcaagaaggccgacaccaacgcccccaccgacatcgacagccccaagaacctggtgaccgacagagtgaccgagaacatggccaccgtgagctgggaccccgtgcaggccgccatcgacaagtacgtggtgagatacaccagcgccggcggcgagaccagagaggtgcccgtgggcaaggagcagagcagcaccgtgctgaccggcctgagacccggcatggagtacatggtgcacgtgtgggcccagaagggcgaccaggagagcaagaaggccgacaccaaggcccagaccgacatcgacagcccccagaacctggtgaccgacagagtgaccgagaacatggccaccgtgagctgggaccccgtgagagccaccatcgacagatacgtggtgagatacaccagcgccaaggacggcgagaccagagaggtgcccgtgggcaaggagcagagcagcaccgtgctgaccggcctgagacccggcgtggagtacaccgtgcacgtgtgggcccagaagggcgcccaggagagcaagaaggccgacaccaaggcccagaccgacatcgacagcccccagaacctggtgaccgactgggtgaccgagaacaccgccaccgtgagctgggaccccgtgcaggccaccatcgacagatacgtggtgcactacaccagcgccaacggcgagaccagagaggtgcccgtgggcaaggagcagagcagcaccgtgctgaccggcctgagacccggcatggagtacaccgtgcacgtgtgggcccagaagggcaaccaggagagcaagaaggccgacaccaaggcccagaccgagatcgacggccccaagaacctggtgaccgactgggtgaccgagaacatggccaccgtgagctgggaccccgtgcaggccaccatcgacaagtacatggtgagatacaccagcgccgacggcgagaccagagaggtgcccgtgggcaaggagcacagcagcaccgtgctgaccggcctgagacccggcatggagtacatggtgcacgtgtgggcccagaagggcgcccaggagagcaagaaggccgacaccaaggcccagaccgagctggacccccccagaaacctgagacccagcgccgtgacccagagcggcggcatcctgacctggaccccccccagcgcccagatccacggctacatcctgacctaccagttccccgacggcaccgtgaaggagatgcagctgggcagagaggaccagagattcgccctgcagggcctggagcagggcgccacctaccccgtgagcctggtggccttcaagggcggcagaagaagcagaaacgtgagcaccaccctgagcaccgtgggcgccagattcccccaccccagcgactgcagccaggtgcagcagaacagcaacgccgccagcggcctgtacaccatctacctgcacggcgacgccagcagacccctgcaggtgtactgcgacatggagaccgacggcggcggctggatcgtgttccagagaagaaacaccggccagctggacttcttcaagagatggagaagctacgtggagggcttcggcgaccccatgaaggagttctggctgggcctggacaagctgcacaacctgaccaccggcacccccgccagatacgaggtgagagtggacctgcagaccgccaacgagagcgcctacgccatctacgacttcttccaggtggccagcagcaaggagagatacaagctgaccgtgggcaagtacagaggcaccgccggcgacgccctgacctaccacaacggctggaagttcaccaccttcgacagagacaacgacatcgccctgagcaactgcgccctgacccaccacggcggctggtggtacaagaactgccacctggccaaccccaacggcagatacggcgagaccaagcacagcgagggcgtgaactgggagccctggaagggccacgagttcagcatcccctacgtggagctgaagatcagaccccacggctacagcagagagcccgtgctgggcagaaagaagagaaccctgagaggcagactgagaaccttctag

SEQ ID NO: 3543 - DNA, 1662 bp, synthetic construct
  misc_feature 1..1662: note = source = /note="Description of Artificial Sequence: Synthetic coding sequence"
  source 1..1662: mol_type = other DNA
atgaccagaggcggccccggcggcagacccggcctgccccagcccccccccctgctgctgctgctgctgctgctgcccctgctgctggtgaccgccgagccccccaagcccgccggcgtgtactacgccaccgcctactggatgcccgccgagaagaccgtgcaggtgaagaacgtgatggacaagaacggcgacgcctacggcttctacaacaacagcgtgaagaccaccggctggggcatcctggagatcagagccggctacggcagccagaccctgagcaacgagatcatcatgttcgtggccggcttcctggagggctacctgaccgccccccacatgaacgaccactacaccaacctgtacccccagctgatcaccaagcccagcatcatggacaaggtgcaggacttcatggagaagcaggacaagtggaccagaaagaacatcaaggagtacaagaccgacagcttctggagacacaccggctacgtgatggcccagatcgacggcctgtacgtgggcgccaagaagagagccatcctggagggcaccaagcccatgaccctgttccagatccagttcctgaacagcgtgggcgacctgctggacctgatccccagcctgagccccaccaagaacggcagcctgaaggtgttcaagagatgggacatgggccactgcagcgccctgatcaaggtgctgcccggcttcgagaacatcctgttcgcccacagcagctggtacacctacgccgccatgctgagaatctacaagcactgggacttcaacgtgatcgacaaggacaccagcagcagcagactgagcttcagcagctaccccggcttcctggagagcctggacgacttctacatcctgagcagcggcctgatcctgctgcagaccaccaacagcgtgttcaacaagaccctgctgaagcaggtgatccccgagaccctgctgagctggcagagagtgagagtggccaacatgatggccgacagcggcaagagatgggccgacatcttcagcaagtacaacagcggcacctacaacaaccagtacatggtgctggacctgaagaaggtgaagctgaaccacagcctggacaagggcaccctgtacatcgtggagcagatccccacctacgtggagtacagcgagcagaccgacgtgctgagaaagggctactggcccagctacaacgtgcccttccacgagaagatctacaactggagcggctaccccctgctggtgcagaagctgggcctggactacagctacgacctggcccccagagccaagatcttcagaagagaccagggcaaggtgaccgacaccgccagcatgaagtacatcatgagatacaacaactacaagaaggacccctacagcagaggcgacccctgcaacaccatctgctgcagagaggacctgaacagccccaaccccagccccggcggctgctacgacaccaaggtggccgacatctacctggccagccagtacaccagctacgccatcagcggccccaccgtgcagggcggcctgcccgtgttcagatgggacagattcaacaagaccctgcaccagggcatgcccgaggtgtacaacttcgacttcatcaccatgaagcccatcctgaagctggacatcaagtag

SEQ ID NO: 3544 - DNA, 2271 bp, synthetic construct
  misc_feature 1..2271: note = source = /note="Description of Artificial Sequence: Synthetic coding sequence"
  source 1..2271: mol_type = other DNA
atgagcagacccggcaccgccacccccgccctggccctggtgctgctggccgtgaccctggccggcgtgggcgcccagggcgccgccctggaggaccccgactactacggccaggagatctggagcagagagccctactacgccagacccgagcccgagctggagaccttcagcccccccctgcccgccggccccggcgaggagtgggagagaagaccccaggagcccagaccccccaagagagccaccaagcccaagaaggcccccaagagagagaagagcgcccccgagccccccccccccggcaagcacagcaacaagaaggtgatgagaaccaagagcagcgagaaggccgccaacgacgaccacagcgtgagagtggccagagaggacgtgagagagagctgcccccccctgggcctggagaccctgaagatcaccgacttccagctgcacgccagcaccgtgaagagatacggcctgggcgcccacagaggcagactgaacatccaggccggcatcaacgagaacgacttctacgacggcgcctggtgcgccggcagaaacgacctgcagcagtggatcgaggtggacgccagaagactgaccagattcaccggcgtgatcacccagggcagaaacagcctgtggctgagcgactgggtgaccagctacaaggtgatggtgagcaacgacagccacacctgggtgaccgtgaagaacggcagcggcgacatgatcttcgagggcaacagcgagaaggagatccccgtgctgaacgagctgcccgtgcccatggtggccagatacatcagaatcaacccccagagctggttcgacaacggcagcatctgcatgagaatggagatcctgggctgccccctgcccgaccccaacaactactaccacagaagaaacgagatgaccaccaccgacgacctggacttcaagcaccacaactacaaggagatgagacagctgatgaaggtggtgaacgagatgtgccccaacatcaccagaatctacaacatcggcaagagccaccagggcctgaagctgtacgccgtggagatcagcgaccaccccggcgagcacgaggtgggcgagcccgagttccactacatcgccggcgcccacggcaacgaggtgctgggcagagagctgctgctgctgctggtgcagttcgtgtgccaggagtacctggccagaaacgccagaatcgtgcacctggtggaggagaccagaatccacgtgctgcccagcctgaaccccgacggctacgagaaggcctacgagggcggcagcgagctgggcggctggagcctgggcagatggacccacgacggcatcgacatcaacaacaacttccccgacctgaacaccctgctgtgggaggccgaggacagacagaacgtgcccagaaaggtgcccaaccactacatcgccatccccgagtggttcctgagcgagaacgccaccgtggccgccgagaccagagccgtgatcgcctggatggagaagatccccttcgtgctgggcggcaacctgcagggcggcgagctggtggtggcctacccctacgacctggtgagaagcccctggaagacccaggagcacacccccacccccgacgaccacgtgttcagatggctggcctacagctacgccagcacccacagactgatgaccgacgccagaagaagagtgtgccacaccgaggacttccagaaggaggagggcaccgtgaacggcgccagctggcacaccgtggccggcagcctgaacgacttcagctacctgcacaccaactgcttcgagctgagcatctacgtgggctgcgacaagtacccccacgagagccagctgcccgaggagtgggagaacaacagagagagcctgatcgtgttcatggagcaggtgcacagaggcatcaagggcctggtgagagacagccacggcaagggcatccccaacgccatcatcagcgtggagggcatcaaccacgacatcagaaccgccaacgacggcgactactggagactgctgaaccccggcgagtacgtggtgaccgccaaggccgagggcttcaccgccagcaccaagaactgcatggtgggctacgacatgggcgccaccagatgcgacttcaccctgagcaagaccaacatggccagaatcagagagatcatggagaagttcggcaagcagcccgtgagcctgcccgccagaagactgaagctgagaggccagaagagaagacagagaggctag

SEQ ID NO: 3545 - DNA, 702 bp, synthetic construct
  misc_feature 1..702: note = source = /note="Description of Artificial Sequence: Synthetic coding sequence"
  source 1..702: mol_type = other DNA
atggccaccccccccttcagactgatcagaaagatgttcagcttcaaggtgagcagatggatgggcctggcctgcttcagaagcctggccgccagcagccccagcatcagacagaagaagctgatgcacaagctgcaggaggagaaggccttcagagaggagatgaagatcttcagagagaagatcgaggacttcagagaggagatgtggaccttcagaggcaagatccacgccttcagaggccagatcctgggcttctgggaggaggagagacccttctgggaggaggagaagaccttctggaaggaggagaagagcttctgggagatggagaagagcttcagagaggaggagaagaccttctggaagaagtacagaaccttctggaaggaggacaaggccttctggaaggaggacaacgccctgtgggagagagacagaaacctgctgcaggaggacaaggccctgtgggaggaggagaaggccctgtgggtggaggagagagccctgctggagggcgagaaggccctgtgggaggacaagaccagcctgtgggaggaggagaacgccctgtgggaggaggagagagccttctggatggagaacaacggccacatcgccggcgagcagatgctggaggacggcccccacaacgccaacagaggccagagactgctggccttcagcagaggcagagcctag

SEQ ID NO: 3546 - DNA, 696 bp, synthetic construct
  misc_feature 1..696: note = source = /note="Description of Artificial Sequence: Synthetic coding sequence"
  source 1..696: mol_type = other DNA
atgatgctgagctgcctgttcctgctgaaggccctgctggccctgggcagcctggagagctggatcaccgccggcgagcacgccaaggagggcgagtgccccccccacaagaacccctgcaaggagctgtgccagggcgacgagctgtgccccgccgagcagaagtgctgcaccaccggctgcggcagaatctgcagagacatccccaagggcagaaagagagactgccccagagtgatcagaaagcagagctgcctgaagagatgcatcaccgacgagacctgccccggcgtgaagaagtgctgcaccctgggctgcaacaagagctgcgtggtgcccatcagcaagcagaagctggccgagttcggcggcgagtgccccgccgaccccctgccctgcgaggagctgtgcgacggcgacgccagctgcccccagggccacaagtgctgcagcaccggctgcggcagaacctgcctgggcgacatcgagggcggcagaggcggcgactgccccaaggtgctggtgggcctgtgcatcgtgggctgcgtgatggacgagaactgccaggccggcgagaagtgctgcaagagcggctgcggcagattctgcgtgccccccgtgctgccccccaagctgaccatgaaccccaactggaccgtgagaagcgacagcgagctggagatccccgtgccctag

SEQ ID NO: 3547 - DNA, 1050 bp, synthetic construct
  misc_feature 1..1050: note = source = /note="Description of Artificial Sequence: Synthetic coding sequence"
  source 1..1050: mol_type = other DNA
atgggccccatcagcgcccccagctgcagatggagaatcccctggcagggcctgctgctgaccgccagcctgttcaccttctggaacccccccaccaccgcccagctgaccatcgaggccgtgcccagcaacgccgccgagggcaaggaggtgctgctgctggtgcacaacctgccccaggaccccagaggctacaactggtacaagggcgagaccgtggacgccaacagaagaatcatcggctacgtgatcagcaaccagcagatcacccccggccccgcctacagcaacagagagaccatctaccccaacgccagcctgctgatgagaaacgtgaccagaaacgacaccggcagctacaccctgcaggtgatcaagctgaacctgatgagcgaggaggtgaccggccagttcagcgtgcaccccgagacccccaagcccagcatcagcagcaacaacagcaaccccgtggaggacaaggacgccgtggccttcacctgcgagcccgagacccagaacaccacctacctgtggtgggtgaacggccagagcctgcccgtgagccccagactgcagctgagcaacggcaacagaaccctgaccctgctgagcgtgaccagaaacgacgtgggcccctacgagtgcgagatccagaaccccgccagcgccaacttcagcgaccccgtgaccctgaacgtgctgtacggccccgacgcccccaccatcagccccagcgacacctactaccacgccggcgtgaacctgaacctgagctgccacgccgccagcaacccccccagccagtacagctggagcgtgaacggcaccttccagcagtacacccagaagctgttcatccccaacatcaccaccaagaacagcggcagctacgcctgccacaccaccaacagcgccaccggcagaaacagaaccaccgtgagaatgatcaccgtgagcgacgccctggtgcagggcagcagccccggcctgagcgccagagccaccgtgagcatcatgatcggcgtgctggccagagtggccctgatctag

SEQ ID NO: 3548 - DNA, 510 bp, synthetic construct
  misc_feature 1..510: note = source = /note="Description of Artificial Sequence: Synthetic coding sequence"
  source 1..510: mol_type = other DNA
atgaccgccggcagaagaatggagatgctgtgcgccggcagagtgcccgccctgctgctgtgcctgggcttccacctgctgcaggccgtgctgagcaccaccgtgatccccagctgcatccccggcgagagcagcgacaactgcaccgccctggtgcagaccgaggacaaccccagagtggcccaggtgagcatcaccaagtgcagcagcgacatgaacggctactgcctgcacggccagtgcatctacctggtggacatgagccagaactactgcagatgcgaggtgggctacaccggcgtgagatgcgagcacttcttcctgaccgtgcaccagcccctgagcaaggagtacgtggccctgaccgtgatcctgatcatcctgttcctgatcaccgtggtgggcagcacctactacttctgcagatggtacagaaacagaaagagcaaggagcccaagaaggagtacgagagagtgaccagcggcgaccccgagctgccccaggtgtag

SEQ ID NO: 3549 - DNA, 273 bp, synthetic construct
  misc_feature 1..273: note = source = /note="Description of Artificial Sequence: Synthetic coding sequence"
  source 1..273: mol_type = other DNA
atgaagctgagcgtgtgcctgctgctggtgaccctggccctgtgctgctaccaggccaacgccgagttctgccccgccctggtgagcgagctgctggacttcttcttcatcagcgagcccctgttcaagctgagcctggccaagttcgacgccccccccgaggccgtggccgccaagctgggcgtgaagagatgcaccgaccagatgagcctgcagaagagaagcctgatcgccgaggtgctggtgaagatcctgaagaagtgcagcgtgtag

SEQ ID NO: 3550 - DNA, 429 bp, synthetic construct
  misc_feature 1..429: note = source = /note="Description of Artificial Sequence: Synthetic coding sequence"
  source 1..429: mol_type = other DNA
atgcccagatgcagatggctgagcctgatcctgctgaccatccccctggccctggtggccagaaaggaccccaagaagaacgagaccggcgtgctgagaaagctgaagcccgtgaacgccagcaacgccaacgtgaagcagtgcctgtggttcgccatgcaggagtacaacaaggagagcgaggacaagtacgtgttcctggtggtgaagaccctgcaggcccagctgcaggtgaccaacctgctggagtacctgatcgacgtggagatcgccagaagcgactgcagaaagcccctgagcaccaacgagatctgcgccatccaggagaacagcaagctgaagagaaagctgagctgcagcttcctggtgggcgccctgccctggaacggcgagttcaccgtgatggagaagaagtgcgaggacgcctag

SEQ ID NO: 3551 - DNA, 438 bp, synthetic construct
  misc_feature 1..438: note = source = /note="Description of Artificial Sequence: Synthetic coding sequence"
  source 1..438: mol_type = other DNA
atgggcatcggctgctggagaaaccccctgctgctgctgatcgccctggtgctgagcgccaagctgggccacttccagagatgggagggcttccagcagaagctgatgagcaagaagaacatgaacagcaccctgaacttcttcatccagagctacaacaacgccagcaacgacacctacctgtacagagtgcagagactgatcagaagccagatgcagctgaccaccggcgtggagtacatcgtgaccgtgaagatcggctggaccaagtgcaagagaaacgacaccagcaacagcagctgccccctgcagagcaagaagctgagaaagagcctgatctgcgagagcctgatctacaccatgccctggatcaactacttccagctgtggaacaacagctgcctggaggccgagcacgtgggcagaaacctgagatag

SEQ ID NO: 3552 - DNA, 552 bp, synthetic construct
  misc_feature 1..552: note = source = /note="Description of Artificial Sequence: Synthetic coding sequence"
  source 1..552: mol_type = other DNA
atgaagctgctgttccccatcttcgccagcctgatgctgcagtaccaggtgaacaccgagttcatcggcctgagaagatgcctgatgggcctgggcagatgcagagaccactgcaacgtggacgagaaggagatccagaagtgcaagatgaagaagtgctgcgtgggccccaaggtggtgaagctgatcaagaactacctgcagtacggcacccccaacgtgctgaacgaggacgtgcaggagatgctgaagcccgccaagaacagcagcgccgtgatccagagaaagcacatcctgagcgtgctgccccagatcaagagcaccagcttcttcgccaacaccaacttcgtgatcatccccaacgccacccccatgaacagcgccaccatcagcaccatgacccccggccagatcacctacaccgccaccagcaccaagagcaacaccaaggagagcagagacagcgccaccgccagccccccccccgccccccccccccccaacatcctgcccacccccagcctggagctggaggaggccgaggagcagtag

SEQ ID NO: 3553 - DNA, 609 bp, synthetic construct
  misc_feature 1..609: note = source = /note="Description of Artificial Sequence: Synthetic coding sequence"
  source 1..609: mol_type = other DNA
atgagaggccaccccagcctgctgctgctgtacatggccctgaccacctgcctggacaccagccccagcgaggagaccgaccaggaggtgttcctgggcccccccgaggcccagagcttcctgagcagccacaccagaatccccagagccaaccactgggacctggagctgctgacccccggcaacctggagagagagtgcctggaggagagatgcagctgggaggaggccagagagtacttcgaggacaacaccctgaccgagagattctgggagagctacatctacaacggcaagggcggcagaggcagagtggacgtggccagcctggccgtgggcctgaccggcggcatcctgctgatcgtgctggccggcctgggcgccttctggtacctgagatggagacagcacagaggccagcagccctgcccccaggaggccggcctgatcagccccctgagccccctgaaccccctgggcccccccacccccctgccccccccccccccccccccccccggcctgcccacctacgagcaggccctggccgccagcggcgtgcacgacgcccccccccccccctacaccagcctgagaagaccccactag

SEQ ID NO: 3554 - DNA, 558 bp, synthetic construct
  misc_feature 1..558: note = source = /note="Description of Artificial Sequence: Synthetic coding sequence"
  source 1..558: mol_type = other DNA
atgagactgctgatcctgacctgcctggtggccgtggccctggccagacccaagctgcccctgagataccccgagagactgcagaaccccagcgagagcagcgagcccatccccctggagagcagagaggagtacatgaacggcatgaacagacagagaaacatcctgagagagaagcagaccgacgagatcaaggacaccagaaacgagagcacccagaactgcgtggtggccgagcccgagaagatggagagcagcatcagcagcagcagcgaggagatgagcctgagcaagtgcgccgagcagttctgcagactgaacgagtacaaccagctgcagctgcaggccgcccacgcccaggagcagatcagaagaatgaacgagaacagccacgtgcaggtgcccttccagcagctgaaccagctggccgcctacccctacgccgtgtggtactacccccagatcatgcagtacgtgcccttcccccccttcagcgacatcagcaaccccaccgcccacgagaactacgagaagaacaacgtgatgctgcagtggtag

SEQ ID NO: 3555 - DNA, 1410 bp, synthetic construct
  misc_feature 1..1410: note = source = /note="Description of Artificial Sequence: Synthetic coding sequence"
  source 1..1410: mol_type = other DNA
atgatcaccgagggcgcccaggcccccagactgctgctgccccccctgctgctgctgctgaccctgcccgccaccggcagcgaccccgtgctgtgcttcacccagtacgaggagagcagcggcaagtgcaagggcctgctgggcggcggcgtgagcgtggaggactgctgcctgaacaccgccttcgcctaccagaagagaagcggcggcctgtgccagccctgcagaagccccagatggagcctgtggagcacctgggccccctgcagcgtgacctgcagcgagggcagccagctgagatacagaagatgcgtgggctggaacggccagtgcagcggcaaggtggcccccggcaccctggagtggcagctgcaggcctgcgaggaccagcagtgctgccccgagatgggcggctggagcggctggggcccctgggagccctgcagcgtgacctgcagcaagggcaccagaaccagaagaagagcctgcaaccaccccgcccccaagtgcggcggccactgccccggccaggcccaggagagcgaggcctgcgacacccagcaggtgtgccccacccacggcgcctgggccacctggggcccctggaccccctgcagcgccagctgccacggcggcccccacgagcccaaggagaccagaagcagaaagtgcagcgcccccgagcccagccagaagccccccggcaagccctgccccggcctggcctacgagcagagaagatgcaccggcctgcccccctgccccgtggccggcggctggggcccctggggccccgtgagcccctgccccgtgacctgcggcctgggccagaccatggagcagagaacctgcaaccaccccgtgccccagcacggcggccccttctgcgccggcgacgccaccagaacccacatctgcaacaccgccgtgccctgccccgtggacggcgagtgggacagctggggcgagtggagcccctgcatcagaagaaacatgaagagcatcagctgccaggagatccccggccagcagagcagaggcagaacctgcagaggcagaaagttcgacggccacagatgcgccggccagcagcaggacatcagacactgctacagcatccagcactgccccctgaagggcagctggagcgagtggagcacctggggcctgtgcatgcccccctgcggccccaaccccaccagagccagacagagactgtgcacccccctgctgcccaagtacccccccaccgtgagcatggtggagggccagggcgagaagaacgtgaccttctggggcagacccctgcccagatgcgaggagctgcagggccagaagctggtggtggaggagaagagaccctgcctgcacgtgcccgcctgcaaggaccccgaggaggaggagctgtag

SEQ ID NO: 3556 - DNA, 453 bp, synthetic construct
  misc_feature 1..453: note = source = /note="Description of Artificial Sequence: Synthetic coding sequence"
  source 1..453: mol_type = other DNA
atgctgatcgccaccagcttcttcctgttcttcagcagcgtggtggccgcccccacccacagcagcttctggcagttccagagaagagtgaagcacatcaccggcagaagcgccttcttcagctactacggctacggctgctactgcggcctgggcgacaagggcatccccgtggacgacaccgacagccccagcagccccagcccctacgagaagctgaaggagttcagctgccagcccgtgctgaacagctaccagttccacatcgtgaacggcgccgtggtgtgcggctgcaccctgggccccggcgccagctgccactgcagactgaaggcctgcgagtgcgacaagcagagcgtgcactgcttcaaggagagcctgcccacctacgagaagaacttcaagcagttcagcagccagcccagatgcggcagacacaagccctggtgctag

SEQ ID NO: 3557 - DNA, 1347 bp, synthetic construct
  misc_feature 1..1347: note = source = /note="Description of Artificial Sequence: Synthetic coding sequence"
  source 1..1347: mol_type = other DNA
atgagagagtgcatcagcgtgcacgtgggccaggccggcgtgcagatgggcaacgcctgctgggagctgtactgcctggagcacggcatccagcccgacggccagatgcccagcgacaagaccatcggcggcggcgacgacagcttcaccaccttcttctgcgagaccggcgccggcaagcacgtgcccagagccgtgttcgtggacctggagcccaccgtgatcgacgagatcagaaacggcccctacagacagctgttccaccccgagcagctgatcaccggcaaggaggacgccgccaacaactacgccagaggccactacaccatcggcaaggagatcatcgaccccgtgctggacagaatcagaaagctgagcgaccagtgcaccggcctgcagggcttcctggtgttccacagcttcggcggcggcaccggcagcggcttcaccagcctgctgatggagagactgagcgtggactacggcaagaagagcaagctggagttcagcatctaccccgccccccaggtgagcaccgccgtggtggagccctacaacagcatcctgaccacccacaccaccctggagcacagcgactgcgccttcatggtggacaacgaggccatctacgacatctgcagaagaaacctggacatcgagagacccacctacaccaacctgaacagactgatcagccagatcgtgagcagcatcaccgccagcctgagattcgacggcgccctgaacgtggacctgaccgagttccagaccaacctggtgccctaccccagaatccacttccccctggccacctacgcccccgtgatcagcgccgagaaggcctaccacgagcagctgagcgtggccgagatcaccaacgcctgcttcgagcccgccaaccagatggtgaagtgcgaccccagacacggcaagtacatggcctgctgcctgctgtacagaggcgacgtggtgcccaaggacgtgaacgccgccatcgccgccatcaagaccaagagaagcatccagttcgtggactggtgccccaccggcttcaaggtgggcatcaactaccagccccccaccgtggtgcccggcggcgacctggccaaggtgcagagagccgtgtgcatgctgagcaacaccaccgccatcgccgaggcctgggccagactggaccacaagttcgacctgatgtacgccaagagagccttcgtgcactggtacgtgggcgagggcatggaggagggcgagttcagcgaggccagagaggacatggccgccctggagaaggactacgaggaggtgggcatcgacagctacgaggacgaggacgagggcgaggagtag

SEQ ID NO: 3558 - DNA, 942 bp, synthetic construct
  misc_feature 1..942: note = source = /note="Description of Artificial Sequence: Synthetic coding sequence"
  source 1..942: mol_type = other DNA
atgagagtggtgaccatcgtgatcctgctgtgcttctgcaaggccgccgagctgagaaaggccagccccggcagcgtgagaagcagagtgaaccacggcagagccggcggcggcagaagaggcagcaaccccgtgaagagatacgcccccggcctgccctgcgacgtgtacacctacctgcacgagaagtacctggactgccaggagagaaagctggtgtacgtgctgcccggctggccccaggacctgctgcacatgctgctggccagaaacaagatcagaaccctgaagaacaacatgttcagcaagttcaagaagctgaagagcctggacctgcagcagaacgagatcagcaagatcgagagcgaggccttcttcggcctgaacaagctgaccaccctgctgctgcagcacaaccagatcaaggtgctgaccgaggaggtgttcatctacacccccctgctgagctacctgagactgtacgacaacccctggcactgcacctgcgagatcgagaccctgatcagcatgctgcagatccccagaaacagaaacctgggcaactacgccaagtgcgagagcccccaggagcagaagaacaagaagctgagacagatcaagagcgagcagctgtgcaacgaggaggagaaggagcagctggaccccaagccccaggtgagcggcagaccccccgtgatcaagcccgaggtggacagcaccttctgccacaactacgtgttccccatccagaccctggactgcaagagaaaggagctgaagaaggtgcccaacaacatcccccccgacatcgtgaagctggacctgagctacaacaagatcaaccagctgagacccaaggagttcgaggacgtgcacgagctgaagaagctgaacctgagcagcaacggcatcgagttcatcgaccccggcagcctgagatag

SEQ ID NO: 3559 - DNA, 972 bp, synthetic construct
  misc_feature 1..972: note = source = /note="Description of Artificial Sequence: Synthetic coding sequence"
  source 1..972: mol_type = other DNA
atgcaggccgcctggctgctgggcgccctggtggtgccccagctgctgggcttcggccacggcgccagaggcgccgagagagagtgggagggcggctggggcggcgcccaggaggaggagagagagagagaggccctgatgctgaagcacctgcaggaggccctgggcctgcccgccggcagaggcgacgagaaccccgccggcaccgtggagggcaaggaggactgggagatggaggaggaccagggcgaggaggaggaggaggaggccacccccacccccagcagcggccccagccccagccccacccccgaggacatcgtgacctacatcctgggcagactggccggcctggacgccggcctgcaccagctgcacgtgagactgcacgccctggacaccagagtggtggagctgacccagggcctgagacagctgagaaacgccgccggcgacaccagagacgccgtgcaggccctgcaggaggcccagggcagagccgagagagagcacggcagactggagggctgcctgaagggcctgagactgggccacaagtgcttcctgctgagcagagacttcgaggcccaggccgccgcccaggccagatgcaccgccagaggcggcagcctggcccagcccgccgacagacagcagatggaggccctgaccagatacctgagagccgccctggccccctacaactggcccgtgtggctgggcgtgcacgacagaagagccgagggcctgtacctgttcgagaacggccagagagtgagcttcttcgcctggcacagaagccccagacccgagctgggcgcccagcccagcgccagcccccaccccctgagccccgaccagcccaacggcggcaccctggagaactgcgtggcccaggccagcgacgacggcagctggtgggaccacgactgccagagaagactgtactacgtgtgcgagttccccttctag

SEQ ID NO: 3560 - DNA, 1086 bp, synthetic construct
  misc_feature 1..1086: note = source = /note="Description of Artificial Sequence: Synthetic coding sequence"
  source 1..1086: mol_type = other DNA
atgaacggcctgagcctgagcgagctgtgctgcctgttctgctgccccccctgccccggcagaatcgccgccaagctggccttcctgccccccgaggccacctacagcctggtgcccgagcccgagcccggccccggcggcgccggcgccgcccccctgggcaccctgagagccagcagcggcgcccccggcagatggaagctgcacctgaccgagagagccgacttccagtacagccagagagagctggacaccatcgaggtgttccccaccaagagcgccagaggcaacagagtgagctgcatgtacgtgagatgcgtgcccggcgccagacagggccaccaggcccagggcggccacccccagctggcctgggtgggcagactgggcgacagcaacaaccccgcccccggcggctgcctgctgggcaagagctggggcaccggcgccgccctggcctgcggctacatccacctgctggccagatacaccgtgctgttcagccacggcaacgccgtggacctgggccagatgagcagcttctacatcggcctgggcagcagactgcactgcaacatcttcagctacgactacagcggctacggcgccagcagcggcagacccagcgagagaaacctgtacgccgacatcgacgccgcctggcaggccctgagaaccagatacggcatcagccccgacagcatcatcctgtacggccagagcatcggcaccgtgcccaccgtggacctggccagcagatacgagtgcgccgccgtggtgctgcacagccccctgaccagcggcatgagagtggccttccccgacaccaagaagacctactgcttcgacgccttccccaacatcgagaaggtgagcaagatcaccagccccgtgctgatcatccacggcaccgaggacgaggtgatcgacttcagccacggcctggccctgtacgagagatgccccaaggccgtggagcccctgtgggtggagggcgccggccacaacgacatcgagctgtacagccagtacctggagagactgagaagattcatcagccaggagctgcccagccagagagcctag

SEQ ID NO: 3561 - DNA, 1404 bp, synthetic construct
  misc_feature 1..1404: note = source = /note="Description of Artificial Sequence: Synthetic coding sequence"
  source 1..1404: mol_type = other DNA
atgagaaccgcccccagcctgagaagatgcgtgtgcctgctgctggccgccatcctggacctggccagaggctacctgaccgtgaacatcgagcccctgccccccgtggtggccggcgacgccgtgaccctgaagtgcaacttcaagaccgacggcagaatgagagagatcgtgtggtacagagtgaccgacggcggcaccatcaagcagaagatcttcaccttcgacgccatgttcagcaccaactacagccacatggagaactacagaaagagagaggacctggtgtaccagagcaccgtgagactgcccgaggtgagaatcagcgacaacggcccctacgagtgccacgtgggcatctacgacagagccaccagagagaaggtggtgctggccagcggcaacatcttcctgaacgtgatggccccccccaccagcatcgaggtggtggccgccgacacccccgcccccttcagcagataccaggcccagaacttcaccctggtgtgcatcgtgagcggcggcaagcccgcccccatggtgtacttcaagagagacggcgagcccatcgacgccgtgcccctgagcgagccccccgccgccagcagcggccccctgcaggacagcagacccttcagaagcctgctgcacagagacctggacgacaccaagatgcagaagagcctgagcctgctggacgccgagaacagaggcggcagaccctacaccgagagacccagcagaggcctgacccccgaccccaacatcctgctgcagcccaccaccgagaacatccccgagaccgtggtgagcagagagttccccagatgggtgcacagcgccgagcccacctacttcctgagacacagcagaacccccagcagcgacggcaccgtggaggtgagagccctgctgacctggaccctgaacccccagatcgacaacgaggccctgttcagctgcgaggtgaagcaccccgccctgagcatgcccatgcaggccgaggtgaccctggtggcccccaagggccccaagatcgtgatgacccccagcagagccagagtgggcgacaccgtgagaatcctggtgcacggcttccagaacgaggtgttccccgagcccatgttcacctggaccagagtgggcagcagactgctggacggcagcgccgagttcgacggcaaggagctggtgctggagagagtgcccgccgagctgaacggcagcatgtacagatgcaccgcccagaaccccctgggcagcaccgacacccacaccagactgatcgtgttcgagaaccccaacatccccagaggcaccgaggacagcaacggcagcatcggccccaccggcgccagactgaccctggtgctggccctgaccgtgatcctggagctgacctag

SEQ ID NO: 3562 - DNA, 783 bp, synthetic construct
  misc_feature 1..783: note = source = /note="Description of Artificial Sequence: Synthetic coding sequence"
  source 1..783: mol_type = other DNA
atggccagacccggcatggagagatggagagacagactggccctggtgaccggcgccagcggcggcatcggcgccgccgtggccagagccctggtgcagcagggcctgaaggtggtgggctgcgccagaaccgtgggcaacatcgaggagctggccgccgagtgcaagagcgccggctaccccggcaccctgatcccctacagatgcgacctgagcaacgaggaggacatcctgagcatgttcagcgccatcagaagccagcacagcggcgtggacatctgcatcaacaacgccggcctggccagacccgacaccctgctgagcggcagcaccagcggctggaaggacatgttcaacgtgaacgtgctggccctgagcatctgcaccagagaggcctaccagagcatgaaggagagaaacgtggacgacggccacatcatcaacatcaacagcatgagcggccacagagtgctgcccctgagcgtgacccacttctacagcgccaccaagtacgccgtgaccgccctgaccgagggcctgagacaggagctgagagaggcccagacccacatcagagccacctgcatcagccccggcgtggtggagacccagttcgccttcaagctgcacgacaaggaccccgagaaggccgccgccacctacgagcagatgaagtgcctgaagcccgaggacgtggccgaggccgtgatctacgtgctgagcacccccgcccacatccagatcggcgacatccagatgagacccaccgagcaggtgacctag

SEQ ID NO: 3563 - DNA, 1218 bp, synthetic construct
  misc_feature 1..1218: note = source = /note="Description of Artificial Sequence: Synthetic coding sequence"
  source 1..1218: mol_type = other DNA
atgagcagccccgccctgaccgccggcgccagcggcaaggtgatggacttcaacaacggcacctacctggtgagcttcaccctgttctgggagggccaggtgagcctgagcctgctgctgatccaccccagcgagggcgccagcgccctgtggagagccagaaaccagggctacgacaagatcatcttcaagggcaagttcgtgaacggcaccagccacgtgttcaccgagtgcggcctgaccctgaacagcaacgccgagctgtgcgagtacctggacgacagagaccaggaggccttctactgcatgaagccccagcacatgccctgcgaggccctgacctacatgaccaccagaaacagagaggtgagctacctgaccgacaaggagaacagcctgttccacagaagcaaggtgggcgtggagatgatgaaggacagaaagcacatcgacgtgaccaactgcaacaagagagagaagatcgaggagacctgccaggtgggcatgaagccccccgtgcccggcggctacaccctgcagggcaagtggatcaccaccttctgcaaccaggtgcagctggacaccatcaagatcaacggctgcctgaagggcaagctgatctacctgctgggcgacagcaccctgagacagtggatctactacttccccaaggtggtgaagaccctgaagttcttcgacctgcacgagaccggcatcttcaagaagcacctgctgctggacgccgagagacacacccagatccagtggaagaagcacagctaccccttcgtgaccttccagctgtacagcctgatcgaccacgactacatccccagagagatcgacagactgagcggcgacaagaacaccgccatcgtgatcaccttcggccagcacttcagacccttccccatcgacatcttcatcagaagagccatcggcgtgcagaaggccatcgagagactgttcctgagaagccccgccaccaaggtgatcatcaagaccgagaacatcagagagatgcacatcgagaccgagagattcggcgacttccacggctacatccactacctgatcatgaaggacatcttcaaggacctgaacgtgggcatcatcgacgcctgggacatgaccatcgcctacggcaccgacaccatccacccccccgaccacgtgatcggcaaccagatcaacatgttcctgaactacatctgctag

SEQ ID NO: 3564 - DNA, 597 bp, synthetic construct
  misc_feature 1..597: note = source = /note="Description of Artificial Sequence: Synthetic coding sequence"
  source 1..597: mol_type = other DNA
atgcccgtgcccgccctgtgcctgctgtgggccctggccatggtgaccagacccgccagcgccgcccccatgggcggccccgagctggcccagcacgaggagctgaccctgctgttccacggcaccctgcagctgggccaggccctgaacggcgtgtacagaaccaccgagggcagactgaccaaggccagaaacagcctgggcctgtacggcagaaccatcgagctgctgggccaggaggtgagcagaggcagagacgccgcccaggagctgagagccagcctgctggagacccagatggaggaggacatcctgcagctgcaggccgaggccaccgccgaggtgctgggcgaggtggcccaggcccagaaggtgctgagagacagcgtgcagagactggaggtgcagctgagaagcgcctggctgggccccgcctacagagagttcgaggtgctgaaggcccacgccgacaagcagagccacatcctgtgggccctgaccggccacgtgcagagacagagaagagagatggtggcccagcagcacagactgagacagatccaggagagactgcacaccgccgccctgcccgcctag

SEQ ID NO: 3565 - DNA, 1455 bp, synthetic construct
  misc_feature 1..1455: note = source = /note="Description of Artificial Sequence: Synthetic coding sequence"
  source 1..1455: mol_type = other DNA
atggccggcccctggaccttcaccctgctgtgcggcctgctggccgccaccctgatccaggccaccctgagccccaccgccgtgctgatcctgggccccaaggtgatcaaggagaagctgacccaggagctgaaggaccacaacgccaccagcatcctgcagcagctgcccctgctgagcgccatgagagagaagcccgccggcggcatccccgtgctgggcagcctggtgaacaccgtgctgaagcacatcatctggctgaaggtgatcaccgccaacatcctgcagctgcaggtgaagcccagcgccaacgaccaggagctgctggtgaagatccccctggacatggtggccggcttcaacacccccctggtgaagaccatcgtggagttccacatgaccaccgaggcccaggccaccatcagaatggacaccagcgccagcggccccaccagactggtgctgagcgactgcgccaccagccacggcagcctgagaatccagctgctgcacaagctgagcttcctggtgaacgccctggccaagcaggtgatgaacctgctggtgcccagcctgcccaacctggtgaagaaccagctgtgccccgtgatcgaggccagcttcaacggcatgtacgccgacctgctgcagctggtgaaggtgcccatcagcctgagcatcgacagactggagttcgacctgctgtaccccgccatcaagggcgacaccatccagctgtacctgggcgccaagctgctggacagccagggcaaggtgaccaagtggttcaacaacagcgccgccagcctgaccatgcccaccctggacaacatccccttcagcctgatcgtgagccaggacgtggtgaaggccgccgtggccgccgtgctgagccccgaggagttcatggtgctgctggacagcgtgctgcccgagagcgcccacagactgaagagcagcatcggcctgatcaacgagaaggccgccgacaagctgggcagcacccagatcgtgaagatcctgacccaggacacccccgagttcttcatcgaccagggccacgccaaggtggcccagctgatcgtgctggaggtgttccccagcagcgaggccctgagacccctgttcaccctgggcatcgaggccagcagcgaggcccagttctacaccaagggcgaccagctgatcctgaacctgaacaacatcagcagcgacagaatccagctgatgaacagcggcatcggctggttccagcccgacgtgctgaagaacatcatcaccgagatcatccacagcatcctgctgcccaaccagaacggcaagctgagaagcggcgtgcccgtgagcctggtgaaggccctgggcttcgaggccgccgagagcagcctgaccaaggacgccctggtgctgacccccgccagcctgtggaagcccagcagccccgtgagccagtag

SEQ ID NO: 3566 - DNA, 750 bp, synthetic construct
  misc_feature 1..750: note = source = /note="Description of Artificial Sequence: Synthetic coding sequence"
  source 1..750: mol_type = other DNA
atgctgcagctgtggaagctggtgctgctgtgcggcgtgctgaccggcaccagcgagagcctgctggacaacctgggcaacgacctgagcaacgtggtggacaagctggagcccgtgctgcacgagggcctggagaccgtggacaacaccctgaagggcatcctggagaagctgaaggtggacctgggcgtgctgcagaagagcagcgcctggcagctggccaagcagaaggcccaggaggccgagaagctgctgaacaacgtgatcagcaagctgctgcccaccaacaccgacatcttcggcctgaagatcagcaacagcctgatcctggacgtgaaggccgagcccatcgacgacggcaagggcctgaacctgagcttccccgtgaccgccaacgtgaccgtggccggccccatcatcggccagatcatcaacctgaaggccagcctggacctgctgaccgccgtgaccatcgagaccgacccccagacccaccagcccgtggccgtgctgggcgagtgcgccagcgaccccaccagcatcagcctgagcctgctggacaagcacagccagatcatcaacaagttcgtgaacagcgtgatcaacaccctgaagagcaccgtgagcagcctgctgcagaaggagatctgccccctgatcagaatcttcatccacagcctggacgtgaacgtgatccagcaggtggtggacaacccccagcacaagacccagctgcagaccctgatctag

SEQ ID NO: 3567 - DNA, 1959 bp, synthetic construct
  misc_feature 1..1959: note = source = /note="Description of Artificial Sequence: Synthetic coding sequence"
  source 1..1959: mol_type = other DNA
atgcagggccccctgctgctgcccggcctgtgcttcctgctgagcctgttcggcgccgtgacccagaagaccaagaccagctgcgccaagtgcccccccaacgccagctgcgtgaacaacacccactgcacctgcaaccacggctacaccagcggcagcggccagaagctgttcaccttccccctggagacctgcaacgacatcaacgagtgcacccccccctacagcgtgtactgcggcttcaacgccgtgtgctacaacgtggagggcagcttctactgccagtgcgtgcccggctacagactgcacagcggcaacgagcagttcagcaacagcaacgagaacacctgccaggacaccaccagcagcaagaccaccgagggcagaaaggagctgcagaagatcgtggacaagttcgagagcctgctgaccaaccagaccctgtggagaaccgagggcagacaggagatcagcagcaccgccaccaccatcctgagagacgtggagagcaaggtgctggagaccgccctgaaggaccccgagcagaaggtgctgaagatccagaacgacagcgtggccatcgagacccaggccatcaccgacaactgcagcgaggagagaaagaccttcaacctgaacgtgcagatgaacagcatggacatcagatgcagcgacatcatccagggcgacacccagggccccagcgccatcgccttcatcagctacagcagcctgggcaacatcatcaacgccaccttcttcgaggagatggacaagaaggaccaggtgtacctgaacagccaggtggtgagcgccgccatcggccccaagagaaacgtgagcctgagcaagagcgtgaccctgaccttccagcacgtgaagatgacccccagcaccaagaaggtgttctgcgtgtactggaagagcaccggccagggcagccagtggagcagagacggctgcttcctgatccacgtgaacaagagccacaccatgtgcaactgcagccacctgagcagcttcgccgtgctgatggccctgaccagccaggaggaggaccccgtgctgaccgtgatcacctacgtgggcctgagcgtgagcctgctgtgcctgctgctggccgccctgaccttcctgctgtgcaaggccatcagaaacaccagcaccagcctgcacctgcagctgagcctgtgcctgttcctggcccacctgctgttcctggtgggcatcgacagaaccgagcccaaggtgctgtgcagcatcatcgccggcgccctgcactacctgtacctggccgccttcacctggatgctgctggagggcgtgcacctgttcctgaccgccagaaacctgaccgtggtgaactacagcagcatcaacagactgatgaagtggatcatgttccccgtgggctacggcgtgcccgccgtgaccgtggccatcagcgccgccagctggccccacctgtacggcaccgccgacagatgctggctgcacctggaccagggcttcatgtggagcttcctgggccccgtgtgcgccatcttcagcgccaacctggtgctgttcatcctggtgttctggatcctgaagagaaagctgagcagcctgaacagcgaggtgagcaccatccagaacaccagaatgctggccttcaaggccaccgcccagctgttcatcctgggctgcacctggtgcctgggcctgctgcaggtgggccccgccgcccaggtgatggcctacctgttcaccatcatcaacagcctgcagggcttcttcatcttcctggtgtactgcctgctgagccagcaggtgcagaagcagtaccagaagtggttcagagagatcgtgaagagcaagagcgagagcgagacctacaccctgagcagcaagatgggccccgacagcaagcccagcgagggcgacgtgttccccggccaggtgaagagaaagtactag

SEQ ID NO: 3568 - DNA, 1263 bp, synthetic construct
  misc_feature 1..1263: note = source = /note="Description of Artificial Sequence: Synthetic coding sequence"
  source 1..1263: mol_type = other DNA
atgagccccccccccctgctgcagcccctgctgctgctgctgcccctgctgaacgtggagcccagcggcgccaccctgatcagaatccccctgcacagagtgcagcccggcagaagaatcctgaacctgctgagaggctggagagagcccgccgagctgcccaagctgggcgcccccagccccggcgacaagcccatcttcgtgcccctgagcaactacagagacgtgcagtacttcggcgagatcggcctgggcacccccccccagaacttcaccgtggccttcgacaccggcagcagcaacctgtgggtgcccagcagaagatgccacttcttcagcgtgccctgctggctgcaccacagattcgaccccaaggccagcagcagcttccaggccaacggcaccaagttcgccatccagtacggcaccggcagagtggacggcatcctgagcgaggacaagctgaccatcggcggcatcaagggcgccagcgtgatcttcggcgaggccctgtgggagcccagcctggtgttcgccttcgcccacttcgacggcatcctgggcctgggcttccccatcctgagcgtggagggcgtgagaccccccatggacgtgctggtggagcagggcctgctggacaagcccgtgttcagcttctacctgaacagagaccccgaggagcccgacggcggcgagctggtgctgggcggcagcgaccccgcccactacatcccccccctgaccttcgtgcccgtgaccgtgcccgcctactggcagatccacatggagagagtgaaggtgggccccggcctgaccctgtgcgccaagggctgcgccgccatcctggacaccggcaccagcctgatcaccggccccaccgaggagatcagagccctgcacgccgccatcggcggcatccccctgctggccggcgagtacatcatcctgtgcagcgagatccccaagctgcccgccgtgagcttcctgctgggcggcgtgtggttcaacctgaccgcccacgactacgtgatccagaccaccagaaacggcgtgagactgtgcctgagcggcttccaggccctggacgtgcccccccccgccggccccttctggatcctgggcgacgtgttcctgggcacctacgtggccgtgttcgacagaggcgacatgaagagcagcgccagagtgggcctggccagagccagaaccagaggcgccgacctgggctggggcgagaccgcccaggcccagttccccggctag

SEQ ID NO: 3569 - DNA, 1293 bp, synthetic construct
  misc_feature 1..1293: note = source = /note="Description of Artificial Sequence: Synthetic coding sequence"
  source 1..1293: mol_type = other DNA
atggcctggaccttcgagtgcagcagaaccaccagccccgagcccctgagcaccagcccctgcagaaccaccagcagcagaaacagccccaccatgagctgccccgccagcgtggcctgcgagcccagcaccagcaccaccaccagcagcccccccaagctgagcgtggccccccagttcctgcccagaagcctgagagtggccgacctggccgccaaccaggtgatggagatcttccccctgaccttcggcgagaagcccgccctgagaagcgtgtacctgcacaacaaccagctgagcaacgccggcctgccccccgacgccttcagaggcagcgaggccatcgccaccctgagcctgagcaacaaccagctgagctacctgccccccagcctgccccccagcctggagagactgcacctgcagaacaacctgatcagcaaggtgcccagaggcgccctgagcagacagacccagctgagagagctgtacctgcagcacaaccagctgaccgacagcggcctggacgccaccaccttcagcaagctgcacagcctggagtacctggacctgagccacaaccagctgaccaccgtgcccgccggcctgcccagaaccctggccatcctgcacctgggcagaaacagaatcagacaggtggaggccgccagactgcacggcgccagaggcctgagatacctgctgctgcagcacaaccagctgggcagcagcggcctgcccgccggcgccctgagacccctgagaggcctgcacaccctgcacctgtacggcaacggcctggacagagtgccccccgccctgcccagaagactgagagccctggtgctgccccacaaccacgtggccgccctgggcgccagagacctggtggccacccccggcctgaccgagctgaacctggcctacaacagactggccagcgccagagtgcaccacagagccttcagaagactgagagccctgagaagcctggacctggccggcaaccagctgaccagactgcccatgggcctgcccaccggcctgagaaccctgcagctgcagagaaaccagctgagaatgctggagcccgagcccctggccggcctggaccagctgagagagctgagcctggcccacaacagactgagagtgggcgacatcggccccggcacctggcacgagctgcaggccctgcaggtgagacacagactggtgagccacaccgtgcccagagccccccccagcccctgcctgccctgccacgtgcccaacatcctggtgagctggtag

SEQ ID NO: 3570 - DNA, 3162 bp, synthetic construct
  misc_feature 1..3162: note = source = /note="Description of Artificial Sequence: Synthetic coding sequence"
  source 1..3162: mol_type = other DNA
atgtggcagcccagaagaccctggcccagagtgccctggagatgggccctggccctgctggccctggtgggcgccggcctgtgccacgccggcccccagcccggctaccccgccagacccagcgccagaaacaagaactggtgcgcctacatcgtgaacaagaacgtgagctgcagcgtgctggagggcagcgagagcttcatccaggcccagtacaactgcgcctggaaccagatgccctgccccagcgccctggtgtacagagtgaacttcagacccagatacgtgaccagatacaagaccgtgacccagctggagtggagatgctgccccggcttcagaggcggcgactgccaggagggccccaaggaccccgtgaagaccctgagacccacccccgccagacccagaaacagcctgaagaaggccaccgacaacgagcccagccagttcagcgagcccagaaagaccctgagccccaccggcaccgcccagcccagctggggcgtggaccccaaggagggcccccaggagctgcaggagaagaagatccaggtgctggaggagaaggtgctgagactgaccagaaccgtgctggacctgcagagcagcctggccggcgtgagcgagaacctgaagcacgccacccaggacgacgccagcagaaccagagcccccggcctgagcagccagcaccccaagcccgacaccaccgtgagcggcgacaccgagaccggccagagccccggcgtgttcaacaccaaggagagcggcatgaaggacatcaagagcgagctggccgaggtgaaggacaccctgaagaacaagagcgacaagctggaggagctggacggcaaggtgaagggctacgagggccagctgagacagctgcaggaggccgcccagggccccaccgtgaccatgaccaccaacgagctgtaccaggcctacgtggacagcaagatcgacgccctgagagaggagctgatggagggcatggacagaaagctggccgacctgaagaacagctgcgagtacaagctgaccggcctgcagcagcagtgcgacgactacggcagcagctacctgggcgtgatcgagctgatcggcgagaaggagaccagcctgagaaaggagatcaacaacctgagagccagactgcaggagcccagcgcccaggccaactgctgcgacagcgagaagaacggcgacatcggccagcagatcaagaccctggaccagaagatcgagagagtggccgaggccaccagaatgctgaacggcagactggacaacgagttcgacagactgatcgtgcccgagcccgacgtggacttcgacgccaagtggaacgagctggacgccagaatcaacgtgaccgagaagaacgccgaggagcactgcttctacatcgaggagaccctgagaggcgccatcaacggcgaggtgggcgacctgaagcagctggtggaccagaagatccagagcctggaggacagactgggcagcgtgctgctgcagatgaccaacaacaccggcgccgagctgagcccccccggcgccgccgccctgcccggcgtgagcggcagcggcgacgagagagtgatgatggagctgaaccacctgaaggacaaggtgcaggtggtggaggacatctgcctgctgaacatccagggcaagccccacggcatggagggcgccctgcccaacagagaggacagagccgtgagagacagcctgcacctgctgaagagcctgaacgacaccatgcacagaaagttccaggagaccgagcagaccatccagaagctgcagcaggacttcagcttcctgtacagccagctgaaccacaccgagaacgacgtgacccacctgcagaaggagatgagcaactgcagagccggcgagaacgccggcatgggcagattcaccaaggtgggcgagcaggagagaaccgtggacaccctgcccagcccccagcaccccgtggcccactgctgcagccagctggaggagagatggcagagactgcagagccaggtgatcagcgagctggacgcctgcaaggagtgcacccagggcgtgcagagagaggtgagcatggtggagggcagagtgagccacatggagaagacctgcagcaagctggacagcatcagcggcaacctgcagagaatcaaggagggcctgaacaagcacgtgagcagcctgtggaactgcgtgagacagatgaacggcaccctgagaagccacagcagagacatcagcggcctgaagaacagcgtgcagcagttctacagccacgtgttccagatcagcaccgacctgcaggacctggtgaagttccagcccagcgccaaggcccccagcccccccccccccgccgaggcccccaaggagcccctgcagcccgagcccgccccccccagacccagcggccccgccaccgccgaggaccccggcagaagacccgtgctgccccagagaccccccgaggagagacccccccagccccccggcagcaccggcgtgatcgccgagaccggccaggccggcccccccgccggcgccggcgtgagcggcagaggcctgcccagaggcgtggacggccagaccggcagcggcaccgtgcccggcgccgagggcttcgccggcgcccccggctaccccaagagcccccccgtggccagccccggcgcccccgtgcccagcctggtgagcttcagcgccggcctgacccagaagcccttccccagcgacggcggcgtggtgctgttcaacaaggtgctggtgaacgacggcgacgtgtacaaccccagcaccggcgtgttcaccgccccctacgacggcagatacctgatcaccgccaccctgacccccgagagagacgcctacgtggaggccgtgctgagcgtgagcaacgccagcgtggcccagctgcacaccgccggctacagaagagagttcctggagtaccacagaccccccggcgccctgcacacctgcggcggccccggcgccttccacctgatcgtgcacctgaaggccggcgacgccgtgaacgtggtggtgaccggcggcaagctggcccacaccgacttcgacgagatgtacagcaccttcagcggcgtgttcctgtaccccttcctgagccacctgtag

SEQ ID NO: 3571 - DNA, 1548 bp, synthetic construct
  misc_feature 1..1548: note = source = /note="Description of Artificial Sequence: Synthetic coding sequence"
  source 1..1548: mol_type = other DNA
atggcccagctgttcctgcccctgctggccgccctggtgctggcccaggcccccgccgccctggccgacgtgctggagggcgacagcagcgaggacagagccttcagagtgagaatcgccggcgacgcccccctgcagggcgtgctgggcggcgccctgaccatcccctgccacgtgcactacctgagacccccccccagcagaagagccgtgctgggcagccccagagtgaagtggaccttcctgagcagaggcagagaggccgaggtgctggtggccagaggcgtgagagtgaaggtgaacgaggcctacagattcagagtggccctgcccgcctaccccgccagcctgaccgacgtgagcctggccctgagcgagctgagacccaacgacagcggcatctacagatgcgaggtgcagcacggcatcgacgacagcagcgacgccgtggaggacagccagctgtaccccatccagacccccagagaggcctgctacggcgacatggacggcttccccggcgtgagaaactacggcgtggtggaccccgacgacctgtacgacgtgtactgctacgccgaggacctgaacggcgagctgttcctgggcgacccccccgagaagctgaccctggaggaggccagagcctactgccaggagagaggcgccgagatcgccaccaccggccagctgtacgccgcctgggacggcggcctggaccactgcagccccggctggctggccgacggcagcgtgagataccccatcgtgacccccagccagagatgcggcggcggcctgcccggcgtgaagaccctgttcctgttccccaaccagaccggcttccccaacaagcacagcagattcaacgtgtactgcttcagaggcagcacctgcctgctgcccagcctgagaccccccacccagccccccacccaggacggcctggaggccatcgtgaccgtgaccgagaccctggaggagctgcagctgccccaggaggccaccgagagcgagagcagaggcgccatctacagcatccccatcatggaggacggcggcggcggcagcagcacccccgaggaccccgccgaggcccccagaaccctgctggagttcgagacccagagcatggtgccccccaccggcttcagcgaggaggagggcaaggccctggaggaggaggagaagtacgaggacgaggaggagaaggaggaggaggaggaggaggaggaggtggaggacgaggccctgtgggcctggcccagcgagctgagcagccccggccccgaggccagcctgcccaccgagcccgccgcccaggaggagagcctgagccaggcccccgccagagccgtgctgcagcccggcgccagccccctgcccgacggcgagagcgaggccagcagaccccccagagtgcacggcccccccaccgagaccctgcccacccccagagagagaaacctggccagccccagccccagcaccctggtggaggccagagaggtgggcgaggccaccggcggccccgagctgagcggctag

SEQ ID NO: 3572 - DNA, 1023 bp, synthetic construct
  misc_feature 1..1023: note = source = /note="Description of Artificial Sequence: Synthetic coding sequence"
  source 1..1023: mol_type = other DNA
atgcccggctggctgaccctgcccaccctgtgcagattcctgctgtgggccttcaccatcttccacaaggcccagggcgaccccgccagccaccccggcccccactacctgctgccccccatccacgaggtgatccacagccacagaggcgccaccgccaccctgccctgcgtgctgggcaccaccccccccagctacaaggtgagatggagcaaggtggagcccggcgagctgagagagaccctgatcctgatcaccaacggcctgcacgccagaggctacggccccctgggcggcagagccagaatgagaagaggccacagactggacgccagcctggtgatcgccggcgtgagactggaggacgagggcagatacagatgcgagctgatcaacggcatcgaggacgagagcgtggccctgaccctgagcctggagggcgtggtgttcccctaccagcccagcagaggcagataccagttcaactactacgaggccaagcaggcctgcgaggagcaggacggcagactggccacctacagccagctgtaccaggcctggaccgagggcctggactggtgcaacgccggctggctgctggagggcagcgtgagataccccgtgctgaccgccagagccccctgcggcggcagaggcagacccggcatcagaagctacggccccagagacagaatgagagacagatacgacgccttctgcttcaccagcgccctggccggccaggtgttcttcgtgcccggcagactgaccctgagcgaggcccacgccgcctgcagaagaagaggcgccgtggtggccaaggtgggccacctgtacgccgcctggaagttcagcggcctggaccagtgcgacggcggctggctggccgacggcagcgtgagattccccatcaccacccccagacccagatgcggcggcctgcccgaccccggcgtgagaagcttcggcttccccagaccccagcaggccgcctacggcacctactgctacgccgagaactag

SEQ ID NO: 3573 - DNA, 690 bp, synthetic construct
  misc_feature 1..690: note = source = /note="Description of Artificial Sequence: Synthetic coding sequence"
  source 1..690: mol_type = other DNA
atggacctgctgcagttcctggccttcctgttcgtgctgctgctgagcggcatgggcgccaccggcaccctgagaaccagcctggaccccagcctggagatctacaagaagatgttcgaggtgaagagaagagagcagctgctggccctgaagaacctggcccagctgaacgacatccaccagcagtacaagatcctggacgtgatgctgaagggcctgttcaaggtgctggaggacagcagaaccgtgctgaccgccgccgacgtgctgcccgacggccccttcccccaggacgagaagctgaaggacgccttcagccacgtggtggagaacaccgccttcttcggcgacgtggtgctgagattccccagaatcgtgcactactacttcgaccacaacagcaactggaacctgctgatcagatggggcatcagcttctgcaaccagaccggcgtgttcaaccagggcccccacagccccatcctgagcctgatggcccaggagctgggcatcagcgagaaggacagcaacttccagaaccccttcaagatcgacagaaccgagttcatccccagcaccgaccccttccagaaggccctgagagaggaggagaagagaagaaagaaggaggagaagagaaaggagatcagaaagggccccagaatcagcagaagccagagcgagctgtag

SEQ ID NO: 3574 - DNA, 465 bp, synthetic construct
  misc_feature 1..465: note = source = /note="Description of Artificial Sequence: Synthetic coding sequence"
  source 1..465: mol_type = other DNA
atgagcgtgggcaccagcctggagcaggcccagatgagcaccctgacctgccccctgttcatccccaccgtgggcagaaagaccgccctgcacagcggcgaggacttccagaccctgctgttcgagagagtgttcgtgaacctggacggctgcttcgacatggccaccggccagttcgccgcccccctgagaggcatctacttcttcagcctgaacgtgcacagctggaactacaaggagacctacgtgcacatcatgcacaaccagaaggaggccgtgatcctgtacgcccagcccagcgagagaagcatcatgcagagccagagcgtgatgctggacctggcctacggcgacagagtgtgggtgagactgttcaagagacagagagagaacgccatctacagcaacgacttcgacacctacatcaccttcagcggccacctgatcaaggccgaggacgactag

SEQ ID NO: 3575 - DNA, 900 bp, synthetic construct
  misc_feature 1..900: note = source = /note="Description of Artificial Sequence: Synthetic coding sequence"
  source 1..900: mol_type = other DNA
atgagaagcgtgggcgagggcgccagagagtggatcagagagtgccagcaccagttcagacaccacagatggaactgcaccaccctggacagagaccacaccgtgttcggcagagtgatgctgagaagcagcagagaggccgccttcgtgtacgccatcagcagcgccggcgtggtgcacgccatcaccagagcctgcagccagggcgagctgagcgtgtgcagctgcgacccctacaccagaggcagacaccacgaccagagaggcgacttcgactggggcggctgcagcgacaacatccactacggcgtgagattcgccaaggccttcgtggacgccaaggagaagagactgaaggacgccagagccctgatgaacctgcacaacaacagatgcggcagaaccgccgtgagaagattcctgaagctggagtgcaagtgccacggcgtgagcggcagctgcaccctgagaacctgctggagagccctgagcgacttcagaagaaccggcgactacctgagaagaagatacgacggcgccgtgcaggtgatggccacccaggacggcgccaacttcaccgccgccagacagggctacagaagagccaccagaaccgacctggtgtacttcgacaacagccccgactactgcgtgctggacaaggccgccggcagcctgggcaccgccggcagagtgtgcagcaagaccagcaagggcaccgacggctgcgagatcatgtgctgcggcagaggctacgacaccaccagagtgaccagagtgacccagtgcgagtgcaagttccactggtgctgcgccgtgagatgcaaggagtgcagaaacaccgtggacgtgcacacctgcaaggcccccaagaaggccgagtggctggaccagacctag

SEQ ID NO: 3576 - DNA, 1710 bp, synthetic construct
  misc_feature 1..1710: note = source = /note="Description of Artificial Sequence: Synthetic coding sequence"
  source 1..1710: mol_type = other DNA
atgctgctgctgttcagcgtgatcctgatcagctgggtgagcaccgtgggcggcgagggcaccctgtgcgacttccccaagatccaccacggcttcctgtacgacgaggaggactacaaccccttcagccaggtgcccaccggcgaggtgttctactacagctgcgagtacaacttcgtgagccccagcaagagcttctggaccagaatcacctgcaccgaggagggctggagccccacccccaagtgcctgagaatgtgcagcttccccttcgtgaagaacggccacagcgagagcagcggcctgatccacctggagggcgacaccgtgcagatcatctgcaacaccggctacagcctgcagaacaacgagaagaacatcagctgcgtggagagaggctggagcaccccccccatctgcagcttcaccaagggcgagtgccacgtgcccatcctggaggccaacgtggacgcccagcccaagaaggagagctacaaggtgggcgacgtgctgaagttcagctgcagaaagaacctgatcagagtgggcagcgacagcgtgcagtgctaccagttcggctggagccccaacttccccacctgcaagggccaggtgagaagctgcggcccccccccccagctgagcaacggcgaggtgaaggagatcagaaaggaggagtacggccacaacgaggtggtggagtacgactgcaaccccaacttcatcatcaacggccccaagaagatccagtgcgtggacggcgagtggaccaccctgcccacctgcgtggagcaggtgaagacctgcggctacatccccgagctggagtacggctacgtgcagcccagcgtgcccccctaccagcacggcgtgagcgtggaggtgaactgcagaaacgagtacgccatgatcggcaacaacatgatcacctgcatcaacggcatctggaccgagctgcccatgtgcgtggccacccaccagctgaagagatgcaagatcgccggcgtgaacatcaagaccctgctgaagctgagcggcaaggagttcaaccacaacagcagaatcagatacagatgcagcgacatcttcagatacagacacagcgtgtgcatcaacggcaagtggaaccccgaggtggactgcaccgagaagagagagcagttctgccccccccccccccagatccccaacgcccagaacatgaccaccaccgtgaactaccaggacggcgagaaggtggccgtgctgtgcaaggagaactacctgctgcccgaggccaaggagatcgtgtgcaaggacggcagatggcagagcctgcccagatgcgtggagagcaccgcctactgcggccccccccccagcatcaacaacggcgacaccaccagcttccccctgagcgtgtacccccccggcagcaccgtgacctacagatgccagagcttctacaagctgcagggcagcgtgaccgtgacctgcagaaacaagcagtggagcgagccccccagatgcctggacccctgcgtggtgagcgaggagaacatgaacaagaacaacatccagctgaagtggagaaacgacggcaagctgtacgccaagaccggcgacgccgtggagttccagtgcaagttcccccacaaggccatgatcagcagcccccccttcagagccatctgccaggagggcaagttcgagtaccccatctgcgagtag

SEQ ID NO: 3577 - DNA, 351 bp, synthetic construct
  misc_feature 1..351: note = source = /note="Description of Artificial Sequence: Synthetic coding sequence"
  source 1..351: mol_type = other DNA
atgaagggcctgagaagcctggccgccaccaccctggccctgttcctggtgttcgtgttcctgggcaacagcagctgcgccccccagagactgctggagagaagaaactggaccccccaggccatgctgtacctgaagggcgcccagggcagaagattcatcagcgaccagagcagaagaaaggacctgagcgacagacccctgcccgagagaagaagccccaacccccagctgctgaccatccccgaggccgccaccatcctgctggccagcctgcagaagagccccgaggacgaggagaagaacttcgaccagaccagattcctggaggacagcctgctgaactggtag

SEQ ID NO: 3578 - DNA, 192 bp, synthetic construct
  misc_feature 1..192: note = source = /note="Description of Artificial Sequence: Synthetic coding sequence"
  source 1..192: mol_type = other DNA
atgaagcacgtgctgaacctgtacctgctgggcgtggtgctgaccctgctgagcatcttcgtgagagtgatggagagcctggagggcctgctggagagccccagccccggcaccagctggaccaccagaagccagctggccaacaccgagcccaccaagggcctgcccgaccaccccagcagaagcatgtag

SEQ ID NO: 3579 - DNA, 567 bp, synthetic construct
  misc_feature 1..567: note = source = /note="Description of Artificial Sequence: Synthetic coding sequence"
  source 1..567: mol_type = other DNA
atggtgcccggcgccgccggctggtgctgcctggtgctgtggctgcccgcctgcgtggccgcccacggcttcagaatccacgactacctgtacttccaggtgctgagccccggcgacatcagatacatcttcaccgccacccccgccaaggacttcggcggcatcttccacaccagatacgagcagatccacctggtgcccgccgagccccccgaggcctgcggcgagctgagcaacggcttcttcatccaggaccagatcgccctggtggagagaggcggctgcagcttcctgagcaagaccagagtggtgcaggagcacggcggcagagccgtgatcatcagcgacaacgccgtggacaacgacagcttctacgtggagatgatccaggacagcacccagagaaccgccgacatccccgccctgttcctgctgggcagagacggctacatgatcagaagaagcctggagcagcacggcctgccctgggccatcatcagcatccccgtgaacgtgaccagcatccccaccttcgagctgctgcagcccccctggaccttctggtag

SEQ ID NO: 3580 - DNA, 2559 bp, synthetic construct
  misc_feature 1..2559: note = source = /note="Description of Artificial Sequence: Synthetic coding sequence"
  source 1..2559: mol_type = other DNA
atgaagcccatgctgaaggacttcagcaacctgctgctggtggtgctgtgcgactacgtgctgggcgaggccgagtacctgctgctgagagagcccggccacgtggccctgagcaacgacaccgtgtacgtggacttccagtacttcgacggcgccaacggcaccctgagaaacgtgagcgtgctgctgctggaggccaacaccaaccagaccgtgaccaccaagtacctgctgaccaaccagagccagggcaccctgaagttcgagtgcttctacttcaaggaggccggcgactactggttcaccatgacccccgaggccaccgacaacagcacccccttcccctggtgggagaagagcgccttcctgaaggtggagtggcccgtgttccacgtggacctgaacagaagcgccaaggccgccgagggcaccttccaggtgggcctgttcaccagccagcccctgtgccccttccccgtggacaagcccaacatcgtggtggacgtgatcttcaccaacagcctgcccgaggccagaagaaacagcagacagcccctggagatcagaaccagcaagagaaccgagctggcccagggccagtgggtggagttcggctgcgcccccctgggccccgaggcctacgtgaccgtggtgctgaagctgctgggcagagacagcgtgatcaccagcaccggccccatcgacctggcccagaagttcggctacaagctggtgatggtgcccgagctgacctgcgagagcggcgtggaggtgaccgtgctgccccccccctgcaccttcgtgcagggcgtggtgaccgtgttcaaggaggcccccagataccccggcaagagaaccatccacctggccgagaacagcctgcccctgggcgagagaagaaccatcttcaactgcaccctgttcgacatgggcaagaacaagtactgcttcgacttcggcatcagcagcagaagccacttcagcgccaaggaggagtgcatgctgatccagagaaacaccgagacctggggcctgtggcagccctggagccagtgcagcgccacctgcggcgacggcgtgagagagagaagaagagtgtgcctgaccagcttccccagcagccccgtgtgccccggcatgagcctggaggccagcctgtgcagcctggaggagtgcgccgccttccagcccagcagccccagccccctgcagccccagggccccgtgaagagcaacaacatcgtgaccgtgaccggcatcagcctgtgcctgttcatcatcatcgccaccgtgctgatcaccctgtggagaagattcggcagacccgccaagtgcagcacccccgccagacacaacagcatccacagccccagcttcagaaagaacagcgacgaggagaacatctgcgagctgagcgagcagagaggcagcttcagcgacggcggcgacggccccaccggcagccccggcgacaccggcatccccctgacctacagaagaagcggccccgtgccccccgaggacgacgccagcggcagcgagagcttccagagcaacgcccagaagatcatcccccccctgttcagctacagactggcccagcagcagctgaaggagatgaagaagaagggcctgaccgagaccaccaaggtgtaccacgtgagccagagccccctgaccgacaccgccatcgacgccgcccccagcgcccccctggacctggagagccccgaggaggccgccgccaacaagttcagaatcaagagccccttccccgagcagcccgccgtgagcgccggcgagagaccccccagcagactggacctgaacgtgacccaggccagctgcgccatcagccccagccagaccctgatcagaaagagccaggccagacacgtgggcagcagaggcggccccagcgagagaagccacgccagaaacgcccacttcagaagaaccgccagcttccacgaggccagacaggccagacccttcagagagagaagcatgagcaccctgacccccagacaggcccccgcctacagcagcagaaccagaacctgcgagcaggccgaggacagattcagaccccagagcagaggcgcccacctgttccccgagaagctggagcacttccaggaggccagcggcaccagaggccccctgaaccccctgcccaagagctacaccctgggccagcccctgagaaagcccgacctgggcgaccaccaggccggcctggtggccggcatcgagagaaccgagccccacagagccagaagaggccccagccccagccacaagagcgtgagcagaaagcagagcagccccatcagccccaaggacaactaccagagagtgagcagcctgagccccagccagtgcagaaaggacaagtgccagagcttccccacccaccccgagttcgccttctacgacaacaccagcttcggcctgaccgaggccgagcagagaatgctggacctgcccggctacttcggcagcaacgaggaggacgagaccaccagcaccctgagcgtggagaagctggtgatctag

SEQ ID NO: 3581 - DNA, 369 bp, synthetic construct
  misc_feature 1..369: note = source = /note="Description of Artificial Sequence: Synthetic coding sequence"
  source 1..369: mol_type = other DNA
atgggcttccacttctgcatctggatcatcttcctgctgccccccccctgcaagaagtgcctgagcccccccaccatgaacctgagaccccccaagagctgcggcaacgtgttctactgggtgctggtgctgaacagcggcctgctgtacaagttctgccagaccatcaagtgcagagccaactggagacccgccagagcccccagaggctggaacgaggccaccgagagacaccaggagagaagaacccagatggagaccgagatgggcggcatcagcaccacctactggcacagactgtgcacctgcaccgacagaagagccgagaagctggtgatggacggcaacaactgctggttccacaagtag

SEQ ID NO: 3582 - DNA, 978 bp, synthetic construct
  misc_feature 1..978: note = source = /note="Description of Artificial Sequence: Synthetic coding sequence"
  source 1..978: mol_type = other DNA
atgcagggcagagtggccggcagctgcgcccccctgggcctgctgctggtgtgcctgcacctgcccggcctgttcgccagaagcatcggcgtggtggaggagaaggtgagccagaacctgggcaccaacctgccccagctgggccagcccagcagcaccggccccagcaacagcgagcacccccagcccgccctggaccccagaagcaacgacctggccagagtgcccctgaagctgagcgtgcccgccagcgacggcttcccccccgccggcggcagcgccgtgcagagatggccccccagctggggcctgcccgccatggacagctggccccccgaggacccctggcagatgatggccgccgccgccgaggacagactgggcgaggccctgcccgaggagctgagctacctgagcagcgccgccgccctggcccccggcagcggccccctgcccggcgagagcagccccgacgccaccggcctgagccccaaggccagcctgctgcaccaggacagcgagagcagaagactgcccagaagcaacagcctgggcgccggcggcaagatcctgagccagagacccccctggagcctgatccacagagtgctgcccgaccacccctggggcaccctgaaccccagcgtgagctggggcggcggcggccccggcaccggctggggcaccagacccatgccccaccccgagggcatctggggcatcaacaaccagccccccggcaccagctggggcaacatcaacagataccccggcggcagctggggcaacatcaacagataccccggcggcagctggggcaacatcaacagataccccggcggcagctggggcaacatccacctgtaccccggcatcaacaaccccttcccccccggcgtgctgagaccccccggcagcagctggaacatccccgccggcttccccaacccccccagccccagactgcagtggggctag

SEQ ID NO: 3583 - DNA, 2631 bp, synthetic construct
  misc_feature 1..2631: note = source = /note="Description of Artificial Sequence: Synthetic coding sequence"
  source 1..2631: mol_type = other DNA
atgggccccgaggccctgagcagcctgctgctgctgctgctggtggccagcggcgacgccgacatgaagggccacttcgaccccgccaagtgcagatacgccctgggcatgcaggacagaaccatccccgacagcgacatcagcgccagcagcagctggagcgacagcaccgccgccagacacagcagactggagagcagcgacggcgacggcgcctggtgccccgccggcagcgtgttccccaaggaggaggagtacctgcaggtggacctgcagagactgcacctggtggccctggtgggcacccagggcagacacgccggcggcctgggcaaggagttcagcagaagctacagactgagatacagcagagacggcagaagatggatgggctggaaggacagatggggccaggaggtgatcagcggcaacgaggaccccgagggcgtggtgctgaaggacctgggcccccccatggtggccagactggtgagattctaccccagagccgacagagtgatgagcgtgtgcctgagagtggagctgtacggctgcctgtggagagacggcctgctgagctacaccgcccccgtgggccagaccatgtacctgagcgaggccgtgtacctgaacgacagcacctacgacggccacaccgtgggcggcctgcagtacggcggcctgggccagctggccgacggcgtggtgggcctggacgacttcagaaagagccaggagctgagagtgtggcccggctacgactacgtgggctggagcaaccacagcttcagcagcggctacgtggagatggagttcgagttcgacagactgagagccttccaggccatgcaggtgcactgcaacaacatgcacaccctgggcgccagactgcccggcggcgtggagtgcagattcagaagaggccccgccatggcctgggagggcgagcccatgagacacaacctgggcggcaacctgggcgaccccagagccagagccgtgagcgtgcccctgggcggcagagtggccagattcctgcagtgcagattcctgttcgccggcccctggctgctgttcagcgagatcagcttcatcagcgacgtggtgaacaacagcagccccgccctgggcggcaccttcccccccgccccctggtggccccccggccccccccccaccaacttcagcagcctggagctggagcccagaggccagcagcccgtggccaaggccgagggcagccccaccgccatcctgatcggctgcctggtggccatcatcctgctgctgctgctgatcatcgccctgatgctgtggagactgcactggagaagactgctgagcaaggccgagagaagagtgctggaggaggagctgaccgtgcacctgagcgtgcccggcgacaccatcctgatcaacaacagacccggccccagagagccccccccctaccaggagcccagacccagaggcaaccccccccacagcgccccctgcgtgcccaacggcagcgcctacagcggcgactacatggagcccgagaagcccggcgcccccctgctgcccccccccccccagaacagcgtgccccactacgccgaggccgacatcgtgaccctgcagggcgtgaccggcggcaacacctacgccgtgcccgccctgccccccggcgccgtgggcgacggcccccccagagtggacttccccagaagcagactgagattcaaggagaagctgggcgagggccagttcggcgaggtgcacctgtgcgaggtggacagcccccaggacctggtgagcctggacttccccctgaacgtgagaaagggccaccccctgctggtggccgtgaagatcctgagacccgacgccaccaagaacgccagaaacgacttcctgaaggaggtgaagatcatgagcagactgaaggaccccaacatcatcagactgctgggcgtgtgcgtgcaggacgaccccctgtgcatgatcaccgactacatggagaacggcgacctgaaccagttcctgagcgcccaccagctggaggacaaggccgccgagggcgcccccggcgacggccaggccgcccagggccccaccatcagctaccccatgctgctgcacgtggccgcccagatcgccagcggcatgagatacctggccaccctgaacttcgtgcacagagacctggccaccagaaactgcctggtgggcgagaacttcaccatcaagatcgccgacttcggcatgagcagaaacctgtacgccggcgactactacagagtgcagggcagagccgtgctgcccatcagatggatggcctgggagtgcatcctgatgggcaagttcaccaccgccagcgacgtgtgggccttcggcgtgaccctgtgggaggtgctgatgctgtgcagagcccagcccttcggccagctgaccgacgagcaggtgatcgagaacgccggcgagttcttcagagaccagggcagacaggtgtacctgagcagaccccccgcctgcccccagggcctgtacgagctgatgctgagatgctggagcagagagagcgagcagagaccccccttcagccagctgcacagattcctggccgaggacgccctgaacaccgtgtag

SEQ ID NO: 3584 - DNA, 672 bp, synthetic construct
  misc_feature 1..672: note = source = /note="Description of Artificial Sequence: Synthetic coding sequence"
  source 1..672: mol_type = other DNA
atgaagttcgtgccctgcctgctgctggtgaccctgagctgcctgggcaccctgggccaggcccccagacagaagcagggcagcaccggcgaggagttccacttccagaccggcggcagagacagctgcaccatgagacccagcagcctgggccagggcgccggcgaggtgtggctgagagtggactgcagaaacaccgaccagacctactggtgcgagtacagaggccagcccagcatgtgccaggccttcgccgccgaccccaagccctactggaaccaggccctgcaggagctgagaagactgcaccacgcctgccagggcgcccccgtgctgagacccagcgtgtgcagagaggccggcccccaggcccacatgcagcaggtgaccagcagcctgaagggcagccccgagcccaaccagcagcccgaggccggcacccccagcctgagacccaaggccaccgtgaagctgaccgaggccacccagctgggcaaggacagcatggaggagctgggcaaggccaagcccaccaccagacccaccgccaagcccacccagcccggccccagacccggcggcaacgaggaggccaagaagaaggcctgggagcactgctggaagcccttccaggccctgtgcgccttcctgatcagcttcttcagaggctag

SEQ ID NO: 3585 - DNA, 585 bp, synthetic construct
  misc_feature 1..585: note = source = /note="Description of Artificial Sequence: Synthetic coding sequence"
  source 1..585: mol_type = other DNA
atgaccatgagacacaactggacccccgacctgagccccctgtgggtgctgctgctgtgcgcccacgtggtgaccctgctggtgagagccacccccgtgagccagaccaccaccgccgccaccgccagcgtgagaagcaccaaggacccctgccccagccagccccccgtgttccccgccgccaagcagtgccccgccctggaggtgacctggcccgaggtggaggtgcccctgaacggcaccctgagcctgagctgcgtggcctgcagcagattccccaacttcagcatcctgtactggctgggcaacggcagcttcatcgagcacctgcccggcagactgtgggagggcagcaccagcagagagagaggcagcaccggcacccagctgtgcaaggccctggtgctggagcagctgacccccgccctgcacagcaccaacttcagctgcgtgctggtggaccccgagcaggtggtgcagagacacgtggtgctggcccagctgtgggccggcctgagagccaccctgccccccacccaggaggccctgcccagcagccacagcagcccccagcagcagggctag

SEQ ID NO: 3586 - DNA, 777 bp, synthetic construct
  misc_feature 1..777: note = source = /note="Description of Artificial Sequence: Synthetic coding sequence"
  source 1..777: mol_type = other DNA
atgatcgccatcagcgccgtgagcagcgccctgctgttcagcctgctgtgcgaggccagcaccgtggtgctgctgaacagcaccgacagcagcccccccaccaacaacttcaccgacatcgaggccgccctgaaggcccagctggacagcgccgacatccccaaggccagaagaaagagatacatcagccagaacgacatgatcgccatcctggactaccacaaccaggtgagaggcaaggtgttcccccccgccgccaacatggagtacatggtgtgggacgagaacctggccaagagcgccgaggcctgggccgccacctgcatctgggaccacggccccagctacctgctgagattcctgggccagaacctgagcgtgagaaccggcagatacagaagcatcctgcagctggtgaagccctggtacgacgaggtgaaggactacgccttcccctacccccaggactgcaaccccagatgccccatgagatgcttcggccccatgtgcacccactacacccagatggtgtgggccaccagcaacagaatcggctgcgccatccacacctgccagaacatgaacgtgtggggcagcgtgtggagaagagccgtgtacctggtgtgcaactacgcccccaagggcaactggatcggcgaggccccctacaaggtgggcgtgccctgcagcagctgcccccccagctacggcggcagctgcaccgacaacctgtgcttccccggcgtgaccagcaactacctgtactggttcaagtag

SEQ ID NO: 3587 - DNA, 906 bp, synthetic construct
  misc_feature 1..906: note = source = /note="Description of Artificial Sequence: Synthetic coding sequence"
  source 1..906: mol_type = other DNA
atgctgcccctgaccatgaccgtgctgatcctgctgctgctgcccaccggccaggccgcccccaaggacggcgtgaccagacccgacagcgaggtgcagcaccagctgctgcccaaccccttccagcccggccaggagcagctgggcctgctgcagagctacctgaagggcctgggcagaaccgaggtgcagctggagcacctgagcagagagcaggtgctgctgtacctgttcgccctgcacgactacgaccagagcggccagctggacggcctggagctgctgagcatgctgaccgccgccctggcccccggcgccgccaacagccccaccaccaaccccgtgatcctgatcgtggacaaggtgctggagacccaggacctgaacggcgacggcctgatgacccccgccgagctgatcaacttccccggcgtggccctgagacacgtggagcccggcgagcccctggcccccagcccccaggagccccaggccgtgggcagacagagcctgctggccaagagccccctgagacaggagacccaggaggcccccggccccagagaggaggccaagggccaggtggaggccagaagagagagcctggaccccgtgcaggagcccggcggccaggccgaggccgacggcgacgtgcccggccccagaggcgaggccgagggccaggccgaggccaagggcgacgcccccggccccagaggcgaggccggcggccaggccgaggccgagggcgacgcccccggccccagaggcgaggccggcggccaggccgaggccagagagaacggcgaggaggccaaggagctgcccggcgagaccctggagagcaagaacacccagaacgacttcgaggtgcacatcgtgcaggtggagaacgacgagatctag

SEQ ID NO: 3588 - DNA, 969 bp, synthetic construct
  misc_feature 1..969: note = source = /note="Description of Artificial Sequence: Synthetic coding sequence"
  source 1..969: mol_type = other DNA
atgaagaccctggccggcctggtgctgggcctggtgatcttcgacgccgccgtgaccgcccccaccctggagagcatcaactacgacagcgagacctacgacgccaccctggaggacctggacaacctgtacaactacgagaacatccccgtggacaaggtggagatcgagatcgccaccgtgatgcccagcggcaacagagagctgctgaccccccccccccagcccgagaaggcccaggaggaggaggaggaggaggagagcacccccagactgatcgacggcagcagcccccaggagcccgagttcaccggcgtgctgggcccccacaccaacgaggacttccccacctgcctgctgtgcacctgcatcagcaccaccgtgtactgcgacgaccacgagctggacgccatcccccccctgcccaagaacaccgcctacttctacagcagattcaacagaatcaagaagatcaacaagaacgacttcgccagcctgagcgacctgaagagaatcgacctgaccagcaacctgatcagcgagatcgacgaggacgccttcagaaagctgccccagctgagagagctggtgctgagagacaacaagatcagacagctgcccgagctgcccaccaccctgaccttcatcgacatcagcaacaacagactgggcagaaagggcatcaagcaggaggccttcaaggacatgtacgacctgcaccacctgtacctgaccgacaacaacctggaccacatccccctgcccctgcccgagaacctgagagccctgcacctgcagaacaacaacatcctggagatgcacgaggacaccttctgcaacgtgaagaacctgacctacatcagaaaggccctggaggacatcagactggacggcaaccccatcaacctgagcaagaccccccaggcctacatgtgcctgcccagactgcccgtgggcagcctggtgtag

SEQ ID NO: 3589 - DNA, 618 bp, synthetic construct
  misc_feature 1..618: note = source = /note="Description of Artificial Sequence: Synthetic coding sequence"
  source 1..618: mol_type = other DNA
atggtgaacctggccgccatggtgtggagaagactgctgagaaagagatgggtgctggccctggtgttcggcctgagcctggtgtacttcctgagcagcaccttcaagcaggaggagagagccgtgagagacagaaacctgctgcaggtgcacgaccacaaccagcccatcccctggaaggtgcagttcaacctgggcaacagcagcagacccagcaaccagtgcagaaacagcatccagggcaagcacctgatcaccgacgagctgggctacgtgtgcgagagaaaggacctgctggtgaacggctgctgcaacgtgaacgtgcccagcaccaagcagtactgctgcgacggctgctggcccaacggctgctgcagcgcctacgagtactgcgtgagctgctgcctgcagcccaacaagcagctgctgctggagagattcctgaacagagccgccgtggccttccagaacctgttcatggccgtggaggaccacttcgagctgtgcctggccaagtgcagaaccagcagccagagcgtgcagcacgagaacacctacagagaccccatcgccaagtactgctacggcgagagcccccccgagctgttccccgcctag

SEQ ID NO: 3590 - DNA, 3057 bp, synthetic construct
  misc_feature 1..3057: note = source = /note="Description of Artificial Sequence: Synthetic coding sequence"
  source 1..3057: mol_type = other DNA
atggtgagccacttcatgggcagcctgagcgtgctgtgcttcctgctgctgctgggcttccagttcgtgtgcccccagcccagcacccagcacagaaaggtgccccagagaatggccgccgagggcgcccccgaggacgacggcggcggcggcgcccccggcgtgtggggcgcctggggcccctggagcgcctgcagcagaagctgcagcggcggcgtgatggagcagaccagaccctgcctgcccagaagctacagactgagaggcggccagagacccggcgcccccgccagagccttcgccgaccacgtggtgagcgccgtgagaaccagcgtgcccctgcacagaagcagagacgagacccccgccctggccggcaccgacgccagcagacagggccccaccgtgctgagaggcagcagacacccccagccccagggcctggaggtgaccggcgacagaagaagcagaaccagaggcaccatcggccccggcaagtacggctacggcaaggccccctacatcctgcccctgcagaccgacaccgcccacaccccccagagactgagaagacagaagctgagcagcagacacagcagaagccagggcgccagcagcgccagacacggctacagcagccccgcccaccaggtgccccagcacggccccctgtaccagagcgacagcggccccagaagcggcctgcaggccgccgaggcccccatctaccagctgcccctgacccacgaccagggctaccccgccgccagcagcctgttccacagccccgagaccagcaacaaccacggcgtgggcacccacggcgccacccagagcttcagccagcccgccagaagcaccgccatcagctgcatcggcgcctacagacagtacaagctgtgcaacaccaacgtgtgccccgagagcagcagaagcatcagagaggtgcagtgcgccagctacaacaacaagcccttcatgggcagattctacgagtgggagcccttcgccgaggtgaagggcaacagaaagtgcgagctgaactgccaggccatgggctacagattctacgtgagacaggccgagaaggtgatcgacggcaccccctgcgaccagaacggcaccgccatctgcgtgagcggccagtgcaagagcatcggctgcgacgactacctgggcagcgacaaggtggtggacaagtgcggcgtgtgcggcggcgacaacaccggctgccaggtggtgagcggcgtgttcaagcacgccctgaccagcctgggctaccacagagtggtggagatccccgagggcgccaccaagatcaacatcaccgagatgtacaagagcaacaactacctggccctgagaagcagaagcggcagaagcatcatcaacggcaactgggccatcgacagacccggcaagtacgagggcggcggcaccatgttcacctacaagagacccaacgagatcagcagcaccgccggcgagagcttcctggccgagggccccaccaacgagatcctggacgtgtacatgatccaccagcagcccaaccccggcgtgcactacgagtacgtgatcatgggcaccaacgccatcagcccccaggtgcccccccacagaagacccggcgagcccttcaacggccagatggtgaccgagggcagaagccaggaggagggcgagcagaagggcagaaacgaggagaaggaggacctgagaggcgaggcccccgagatgttcaccagcgagagcgcccagaccttccccgtgagacaccccgacagattcagcccccacagacccgacaacctggtgccccccgccccccagccccccagaagaagcagagaccacaactggaagcagctgggcaccaccgagtgcagcaccacctgcggcaagggcagccagtaccccatcttcagatgcgtgcacagaagcacccacgaggaggcccccgagagctactgcgacagcagcatgaagcccacccccgaggaggagccctgcaacatcttcccctgccccgccttctgggacatcggcgagtggagcgagtgcagcaagacctgcggcctgggcatgcagcacagacaggtgctgtgcagacaggtgtacgccaacagaagcctgaccgtgcagccctacagatgccagcacctggagaagcccgagaccaccagcacctgccagctgaagatctgcagcgagtggcagatcagaaccgactggaccagctgcagcgtgccctgcggcgtgggccagagaaccagagacgtgaagtgcgtgagcaacatcggcgacgtggtggacgacgaggagtgcaacatgaagctgagacccaacgacatcgagaactgcgacatgggcccctgcgccaagagctggttcctgaccgagtggagcgagagatgcagcgccgagtgcggcgccggcgtgagaaccagaagcgtggtgtgcatgaccaaccacgtgagcagcctgcccctggagggctgcggcaacaacagacccgccgaggccaccccctgcgacaacggcccctgcaccggcaaggtggagtggttcgccggcagctggagccagtgcagcatcgagtgcggcagcggcacccagcagagagaggtgatctgcgtgagaaagaacgccgacaccttcgaggtgctggaccccagcgagtgcagcttcctggagaagccccccagccagcagagctgccacctgaagccctgcggcgccaagtggttcagcaccgagtggagcatgtgcagcaagagctgccagggcggcttcagagtgagagaggtgagatgcctgagcgacgacatgaccctgagcaacctgtgcgacccccagctgaagcccgaggagagagagagctgcaacccccaggactgcgtgcccgaggtggacgagaactgcaaggacaagtactacaactgcaacgtggtggtgcaggccagactgtgcgtgtacaactactacaagaccgcctgctgcgccagctgcaccagagtggccaacagacagaccggcttcctgggcagcagatag

SEQ ID NO: 3591 - DNA, 1503 bp, synthetic construct
  misc_feature 1..1503: note = source = /note="Description of Artificial Sequence: Synthetic coding sequence"
  source 1..1503: mol_type = other DNA
atgaagtgcaccgccagagagtggctgagagtgaccaccgtgctgttcatggccagagccatccccgccatggtggtgcccaacgccaccctgctggagaagctgctggagaagtacatggacgaggacggcgagtggtggatcgccaagcagagaggcaagagagccatcaccgacaacgacatgcagagcatcctggacctgcacaacaagctgagaagccaggtgtaccccaccgccagcaacatggagtacatgacctgggacgtggagctggagagaagcgccgagagctgggccgagagctgcctgtgggagcacggccccgccagcctgctgcccagcatcggccagaacctgggcgcccactggggcagatacagaccccccaccttccacgtgcagagctggtacgacgaggtgaaggacttcagctacccctacgagcacgagtgcaacccctactgccccttcagatgcagcggccccgtgtgcacccactacacccaggtggtgtgggccaccagcaacagaatcggctgcgccatcaacctgtgccacaacatgaacatctggggccagatctggcccaaggccgtgtacctggtgtgcaactacagccccaagggcaactggtggggccacgccccctacaagcacggcagaccctgcagcgcctgcccccccagcttcggcggcggctgcagagagaacctgtgctacaaggagggcagcgacagatactacccccccagagaggaggagaccaacgagatcgagagacagcagagccaggtgcacgacacccacgtgagaaccagaagcgacgacagcagcagaaacgaggtgatcagcgcccagcagatgagccagatcgtgagctgcgaggtgagactgagagaccagtgcaagggcaccacctgcaacagatacgagtgccccgccggctgcctggacagcaaggccaaggtgatcggcagcgtgcactacgagatgcagagcagcatctgcagagccgccatccactacggcatcatcgacaacgacggcggctgggtggacatcaccagacagggcagaaagcactacttcatcaagagcaacagaaacggcatccagaccatcggcaagtaccagagcgccaacagcttcaccgtgagcaaggtgaccgtgcaggccgtgacctgcgagaccaccgtggagcagctgtgccccttccacaagcccgccagccactgccccagagtgtactgccccagaaactgcatgcaggccaacccccactacgccagagtgatcggcaccagagtgtacagcgacctgagcagcatctgcagagccgccgtgcacgccggcgtggtgagaaaccacggcggctacgtggacgtgatgcccgtggacaagagaaagacctacatcgccagcttccagaacggcatcttcagcgagagcctgcagaacccccccggcggcaaggccttcagagtgttcgccgtggtgtag

SEQ ID NO: 3592 - DNA, 2070 bp, synthetic construct
  misc_feature 1..2070: note = source = /note="Description of Artificial Sequence: Synthetic coding sequence"
  source 1..2070: mol_type = other DNA
atgaagttcggcgccgtgaccagaatcggcggcccccccctgggcaaccagagccccagcagctgcagcctgctgcacgagaaggacccccccaccaccagcggcccccagaccgaccagcccaagaagcacctgaccaacttcaagagcgccaccagaagagtggccagaacccagtggctgaccgccgacagacagacctgggccagcatcagcagcgtgccctgggcccagaccatcagcgagaagaagcccggcggcagcctgtgggagaccagaagcagcccccccaccaccgccggcaccgaggaggccatgaacaccaccagcctgctggcccccgccgccgagatcatggccacccccggcagccccagccaggccagccccaccctgggcgccttcacccacggcacccagacccccagccccaccaaggccaccgcccccagatacccccagaccggcgacctgagcgccgagtggcccttcaccgccggcgaggagcccgtgctggtgcccagaccccaccaggtgagcagagtgagaagcagctgctgcctgagccccatcctgtgcagccccgccatgatcgccttcctgctgaccagcgtgctgatgatcccccacgccggcggccaccccctggacaccccccacctgccccaggagctgccccccggcctgcccaacaacatcaacatcaccttcttcagcggcatgttcaagaacgtggagagcgtggccgagatcttcgactgcctgggcccccacttcacctggctgcaggccgtgttcaccaacttccccgtgctgatccagttcgtgaacggcatgaagtgcgtggccggcctgtgccccagagacttcgaggactacggctgcacctgcagattcgagatggagggcctgcccgtggacgagagcgacagctgctgcttccagcacagaagatgctacgaggaggccgccgagatggactgcctgcaggaccccgccaagctgagcaccgaggtgaactgcgtgagcaagaagatcatctgcgagagcaaggacaactgcgagcacctgctgtgcacctgcgacaaggccgccatcgagtgcctggccagaagcagcctgaacagcagcctgaacctgctggacaccagcttctgcctggcccagacccccgagaccaccatcaaggaggacctgaccaccctgctgcccagagtggtgcccgtggagcccaccgacaccagcctgaccgccctgagcggcgaggtggccgccgagaccgaggccgacagactgatcaccctgagcaagaagaaggccggccacgaccaggagggcgtgggcgccgccagagccaccagcccccccggcagcgccgagatcgtggccaccagagtgaccgccaagatcgtgaccctggtgcccgccggcatcaagagcctgggcctggccgtgagcagcgtggagaacgaccccgaggagaccaccgagaaggcctgcgacagattcaccttcctgcacctgggcagcggcgacaacatgcaggtgatgccccagctgggcgagatgctgttctgcctgaccagcagatgccccgaggagttcgagagctacggctgctactgcggccaggagggcagaggcgagcccagagacgacctggacagatgctgcctgagccaccactgctgcctggagcaggtgagaagactgggctgcctgctggagagactgccctggagccccgtggtgtgcgtggaccacacccccaagtgcggcggccagagcctgtgcgagaagctgctgtgcgcctgcgaccagaccgccgccgagtgcatgaccagcgccagcttcaaccagagcctgaagagccccagcagactgggctgccccggccagcccgccgcctgcgaggacagcctgcaccccgtgcccgccgcccccaccctgggcagcagcagcgaggaggacagcgaggaggaccccccccaggaggacctgggcagagccaagagattcctgagaaagagcctgggccccctgggcatcggccccctgcacggcagatag

SEQ ID NO: 3593 - DNA, 1359 bp, synthetic construct
  misc_feature 1..1359: note = source = /note="Description of Artificial Sequence: Synthetic coding sequence"
  source 1..1359: mol_type = other DNA
atggagctggccctgagaagaagccccgtgcccagatggctgctgctgctgcccctgctgctgggcctgaacgccggcgccgtgatcgactggcccaccgaggagggcaaggaggtgtgggactacgtgaccgtgagaaaggacgcctacatgttctggtggctgtactacgccaccaacagctgcaagaacttcagcgagctgcccctggtgatgtggctgcagggcggccccggcggcagcagcaccggcttcggcaacttcgaggagatcggccccctggacagcgacctgaagcccagaaagaccacctggctgcaggccgccagcctgctgttcgtggacaaccccgtgggcaccggcttcagctacgtgaacggcagcggcgcctacgccaaggacctggccatggtggccagcgacatgatggtgctgctgaagaccttcttcagctgccacaaggagttccagaccgtgcccttctacatcttcagcgagagctacggcggcaagatggccgccggcatcggcctggagctgtacaaggccatccagagaggcaccatcaagtgcaacttcgccggcgtggccctgggcgacagctggatcagccccgtggacagcgtgctgagctggggcccctacctgtacagcatgagcctgctggaggacaagggcctggccgaggtgagcaaggtggccgagcaggtgctgaacgccgtgaacaagggcctgtacagagaggccaccgagctgtggggcaaggccgagatgatcatcgagcagaacaccgacggcgtgaacttctacaacatcctgaccaagagcacccccaccagcaccatggagagcagcctggagttcacccagagccacctggtgtgcctgtgccagagacacgtgagacacctgcagagagacgccctgagccagctgatgaacggccccatcagaaagaagctgaagatcatccccgaggaccagagctggggcggccaggccaccaacgtgttcgtgaacatggaggaggacttcatgaagcccgtgatcagcatcgtggacgagctgctggaggccggcatcaacgtgaccgtgtacaacggccagctggacctgatcgtggacaccatgggccaggaggcctgggtgagaaagctgaagtggcccgagctgcccaagttcagccagctgaagtggaaggccctgtacagcgaccccaagagcctggagaccagcgccttcgtgaagagctacaagaacctggccttctactggatcctgaaggccggccacatggtgcccagcgaccagggcgacatggccctgaagatgatgagactggtgacccagcaggagtag

SEQ ID NO: 3594 - DNA, 1395 bp, synthetic construct
  misc_feature 1..1395: note = source = /note="Description of Artificial Sequence: Synthetic coding sequence"
  source 1..1395: mol_type = other DNA
atggtgagactggccgccgagctgctgctgctgctgggcctgctgctgctgaccctgcacatcaccgtgctgagaggcagcggcgccgccgacggccccgacgccgccgccggcaacgccagccaggcccagctgcagaacaacctgaacgtgggcagcgacaccaccagcgagaccagcttcagcctgagcaaggaggcccccagagagcacctggaccaccaggccgcccaccagcccttccccagacccagattcagacaggagaccggccaccccagcctgcagagagacttccccagaagcttcctgctggacctgcccaacttccccgacctgagcaaggccgacatcaacggccagaaccccaacatccaggtgaccatcgaggtggtggacggccccgacagcgaggccgacaaggaccagcaccccgagaacaagcccagctggagcgtgcccagccccgactggagagcctggtggcagagaagcctgagcctggccagagccaacagcggcgaccaggactacaagtacgacagcaccagcgacgacagcaacttcctgaacccccccagaggctgggaccacaccgcccccggccacagaaccttcgagaccaaggaccagcccgagtacgacagcaccgacggcgagggcgactggagcctgtggagcgtgtgcagcgtgacctgcggcaacggcaaccagaagagaaccagaagctgcggctacgcctgcaccgccaccgagagcagaacctgcgacagacccaactgccccggcatcgaggacaccttcagaaccgccgccaccgaggtgagcctgctggccggcagcgaggagttcaacgccaccaagctgttcgaggtggacaccgacagctgcgagagatggatgagctgcaagagcgagttcctgaagaagtacatgcacaaggtgatgaacgacctgcccagctgcccctgcagctaccccaccgaggtggcctacagcaccgccgacatcttcgacagaatcaagagaaaggacttcagatggaaggacgccagcggccccaaggagaagctggagatctacaagcccaccgccagatactgcatcagaagcatgctgagcctggagagcaccaccctggccgcccagcactgctgctacggcgacaacatgcagctgatcaccagaggcaagggcgccggcacccccaacctgatcagcaccgagttcagcgccgagctgcactacaaggtggacgtgctgccctggatcatctgcaagggcgactggagcagatacaacgaggccagaccccccaacaacggccagaagtgcaccgagagccccagcgacgaggactacatcaagcagttccaggaggccagagagtactag

SEQ ID NO: 3595 - DNA, 1536 bp, synthetic construct
  misc_feature 1..1536: note = source = /note="Description of Artificial Sequence: Synthetic coding sequence"
  source 1..1536: mol_type = other DNA
atgctggtggacggccccagcgagagacccgccctgtgcttcctgctgctggccgtggccatgagcttcttcggcagcgccctgagcatcgacgagaccagagcccacctgctgctgaaggagaagatgatgagactgggcggcagactggtgctgaacaccaaggaggagctggccaacgagagactgatgaccctgaagatcgccgagatgaaggaggccatgagaaccctgatcttcccccccagcatgcacttcttccaggccaagcacctgatcgagagaagccaggtgttcaacatcctgagaatgatgcccaagggcgccgccctgcacctgcacgacatcggcatcgtgaccatggactggctggtgagaaacgtgacctacagaccccactgccacatctgcttcacccccagaggcatcatgcagttcagattcgcccaccccacccccagacccagcgagaagtgcagcaagtggatcctgctggaggactacagaaagagagtgcagaacgtgaccgagttcgacgacagcctgctgagaaacttcaccctggtgacccagcaccccgaggtgatctacaccaaccagaacgtggtgtggagcaagttcgagaccatcttcttcaccatcagcggcctgatccactacgcccccgtgttcagagactacgtgttcagaagcatgcaggagttctacgaggacaacgtgctgtacatggagatcagagccagactgctgcccgtgtacgagctgagcggcgagcaccacgacgaggagtggagcgtgaagacctaccaggaggtggcccagaagttcgtggagacccaccccgagttcatcggcatcaagatcatctacagcgaccacagaagcaaggacgtggccgtgatcgccgagagcatcagaatggccatgggcctgagaatcaagttccccaccgtggtggccggcttcgacctggtgggccacgaggacaccggccacagcctgcacgactacaaggaggccctgatgatccccgccaaggacggcgtgaagctgccctacttcttccacgccggcgagaccgactggcagggcaccagcatcgacagaaacatcctggacgccctgatgctgaacaccaccagaatcggccacggcttcgccctgagcaagcaccccgccgtgagaacctacagctggaagaaggacatccccatcgaggtgtgccccatcagcaaccaggtgctgaagctggtgagcgacctgagaaaccaccccgtggccaccctgatggccaccggccaccccatggtgatcagcagcgacgaccccgccatgttcggcgccaagggcctgagctacgacttctacgaggtgttcatgggcatcggcggcatgaaggccgacctgagaaccctgaagcagctggccatgaacagcatcaagtacagcaccctgctggagagcgagaagaacaccttcatggagatctggaagaagagatgggacaagttcatcgccgacgtggccaccaagtag

SEQ ID NO: 3596 - DNA, 777 bp, synthetic construct
  misc_feature 1..777: note = source = /note="Description of Artificial Sequence: Synthetic coding sequence"
  source 1..777: mol_type = other DNA
atgaagcagatcctgcaccccgccctggagaccaccgccatgaccctgttccccgtgctgctgttcctggtggccggcctgctgcccagcttccccgccaacgaggacaaggaccccgccttcaccgccctgctgaccacccagacccaggtgcagagagagatcgtgaacaagcacaacgagctgagaagagccgtgagcccccccgccagaaacatgctgaagatggagtggaacaaggaggccgccgccaacgcccagaagtgggccaaccagtgcaactacagacacagcaaccccaaggacagaatgaccagcctgaagtgcggcgagaacctgtacatgagcagcgccagcagcagctggagccaggccatccagagctggttcgacgagtacaacgacttcgacttcggcgtgggccccaagacccccaacgccgtggtgggccactacacccaggtggtgtggtacagcagctacctggtgggctgcggcaacgcctactgccccaaccagaaggtgctgaagtactactacgtgtgccagtactgccccgccggcaactgggccaacagactgtacgtgccctacgagcagggcgccccctgcgccagctgccccgacaactgcgacgacggcctgtgcaccaacggctgcaagtacgaggacctgtacagcaactgcaagagcctgaagctgaccctgacctgcaagcaccagctggtgagagacagctgcaaggccagctgcaactgcagcaacagcatctactag

SEQ ID NO: 3597 - DNA, 714 bp, synthetic construct
  misc_feature 1..714: note = source = /note="Description of Artificial Sequence: Synthetic coding sequence"
  source 1..714: mol_type = other DNA
atggtgacccccccccccccccccgtgttcagcctgctgaagatcagccagagaatcgtgtgcctggtgctggacaagagcggcagcatgggcggcaaggacagactgaacagaatgaaccaggccgccaagcacttcctgctgcagaccgtggagaacggcagctgggtgggcatggtgcacttcgacagcaccgccaccatcgtgaacaagctgatccagatcaagagcagcgacgagagaaacaccctgatggccggcctgcccacctaccccctgggcggcaccagcatctgcagcggcatcaagtacgccttccaggtgatcggcgagctgcacagccagctggacggcagcgaggtgctgctgctgaccgacggcgaggacaacaccgccagcagctgcatcgacgaggtgaagcagagcggcgccatcgtgcacttcatcgccctgggcagagccgccgacgaggccgtgatcgagatgagcaagatcaccggcggcagccacttctacgtgagcgacgaggcccagaacaacggcctgatcgacgccttcggcgccctgaccagcggcaacaccgacctgagccagaagagcctgcaggtgagagtgctgatcccctgggtgttcatgttcaccttcgccaccagaaagaaccacctggtggtgatcagcttcgagttccacatcttcctgaaggtgaacttctag

SEQ ID NO: 3598 - DNA, 459 bp, synthetic construct
  misc_feature 1..459: note = source = /note="Description of Artificial Sequence: Synthetic coding sequence"
  source 1..459: mol_type = other DNA
atggacaacgtgcagcccaagatcaagcacagacccttctgcttcagcgtgaagggccacgtgaagatgctgagactggccctgaccgtgaccagcatgaccttcttcatcatcgcccaggcccccgagccctacatcgtgatcaccggcttcgaggtgaccgtgatcctgttcttcatcctgctgtacgtgctgagactggacagactgatgaagtggctgttctggcccctgctggacatcatcaacagcctggtgaccaccgtgttcatgctgatcgtgagcgtgctggccctgatccccgagaccaccaccctgaccgtgggcggcggcgtgttcgccctggtgaccgccgtgtgctgcctggccgacggcgccctgatctacagaaagctgctgttcaaccccagcggcccctaccagaagaagcccgtgcacgagaagaaggaggtgctgtag

SEQ ID NO: 3599 - DNA, 3744 bp, synthetic construct
  misc_feature 1..3744: note = source = /note="Description of Artificial Sequence: Synthetic coding sequence"
  source 1..3744: mol_type = other DNA
atgctggccagcagcagcagaatcagagccgcctggaccagagccctgctgctgcccctgctgctggccggccccgtgggctgcctgagcagacaggagctgttccccttcggccccggccagggcgacctggagctggaggacggcgacgacttcgtgagccccgccctggagctgagcggcgccctgagattctacgacagaagcgacatcgacgccgtgtacgtgaccaccaacggcatcatcgccaccagcgagccccccgccaaggagagccaccccggcctgttcccccccaccttcggcgccgtggcccccttcctggccgacctggacaccaccgacggcctgggcaaggtgtactacagagaggacctgagccccagcatcacccagagagccgccgagtgcgtgcacagaggcttccccgagatcagcttccagcccagcagcgccgtggtggtgacctgggagagcgtggccccctaccagggccccagcagagaccccgaccagaagggcaagagaaacaccttccaggccgtgctggccagcagcgacagcagcagctacgccatcttcctgtaccccgaggacggcctgcagttccacaccaccttcagcaagaaggagaacaaccaggtgcccgccgtggtggccttcagccagggcagcgtgggcttcctgtggaagagcaacggcgcctacaacatcttcgccaacgacagagagagcgtggagaacctggccaagagcagcaacagcggccagcagggcgtgtgggtgttcgagatcggcagccccgccaccaccaacggcgtggtgcccgccgacgtgatcctgggcaccgaggacggcgccgagtacgacgacgaggacgaggactacgacctggccaccaccagactgggcctggaggacgtgggcaccacccccttcagctacaaggccctgagaagaggcggcgccgacacctacagcgtgcccagcgtgctgagccccagaagagccgccaccgagagacccctgggcccccccaccgagagaaccagaagcttccagctggccgtggagaccttccaccagcagcacccccaggtgatcgacgtggacgaggtggaggagaccggcgtggtgttcagctacaacaccgacagcagacagacctgcgccaacaacagacaccagtgcagcgtgcacgccgagtgcagagactacgccaccggcttctgctgcagctgcgtggccggctacaccggcaacggcagacagtgcgtggccgagggcagcccccagagagtgaacggcaaggtgaagggcagaatcttcgtgggcagcagccaggtgcccatcgtgttcgagaacaccgacctgcacagctacgtggtgatgaaccacggcagaagctacaccgccatcagcaccatccccgagaccgtgggctacagcctgctgcccctggcccccgtgggcggcatcatcggctggatgttcgccgtggagcaggacggcttcaagaacggcttcagcatcaccggcggcgagttcaccagacaggccgaggtgaccttcgtgggccaccccggcaacctggtgatcaagcagagattcagcggcatcgacgagcacggccacctgaccatcgacaccgagctggagggcagagtgccccagatccccttcggcagcagcgtgcacatcgagccctacaccgagctgtaccactacagcaccagcgtgatcaccagcagcagcaccagagagtacaccgtgaccgagcccgagagagacggcgccagccccagcagaatctacacctaccagtggagacagaccatcaccttccaggagtgcgtgcacgacgacagcagacccgccctgcccagcacccagcagctgagcgtggacagcgtgttcgtgctgtacaaccaggaggagaagatcctgagatacgccctgagcaacagcatcggccccgtgagagagggcagccccgacgccctgcagaacccctgctacatcggcacccacggctgcgacaccaacgccgcctgcagacccggccccagaacccagttcacctgcgagtgcagcatcggcttcagaggcgacggcagaacctgctacgacatcgacgagtgcagcgagcagcccagcgtgtgcggcagccacaccatctgcaacaaccaccccggcaccttcagatgcgagtgcgtggagggctaccagttcagcgacgagggcacctgcgtggccgtggtggaccagagacccatcaactactgcgagaccggcctgcacaactgcgacatcccccagagagcccagtgcatctacaccggcggcagcagctacacctgcagctgcctgcccggcttcagcggcgacggccaggcctgccaggacgtggacgagtgccagcccagcagatgccaccccgacgccttctgctacaacacccccggcagcttcacctgccagtgcaagcccggctaccagggcgacggcttcagatgcgtgcccggcgaggtggagaagaccagatgccagcacgagagagagcacatcctgggcgccgccggcgccaccgacccccagagacccatcccccccggcctgttcgtgcccgagtgcgacgcccacggccactacgcccccacccagtgccacggcagcaccggctactgctggtgcgtggacagagacggcagagaggtggagggcaccagaaccagacccggcatgacccccccctgcctgagcaccgtggccccccccatccaccagggccccgccgtgcccaccgccgtgatccccctgccccccggcacccacctgctgttcgcccagaccggcaagatcgagagactgcccctggagggcaacaccatgagaaagaccgaggccaaggccttcctgcacgtgcccgccaaggtgatcatcggcctggccttcgactgcgtggacaagatggtgtactggaccgacatcaccgagcccagcatcggcagagccagcctgcacggcggcgagcccaccaccatcatcagacaggacctgggcagccccgagggcatcgccgtggaccacctgggcagaaacatcttctggaccgacagcaacctggacagaatcgaggtggccaagctggacggcacccagagaagagtgctgttcgagaccgacctggtgaaccccagaggcatcgtgaccgacagcgtgagaggcaacctgtactggaccgactggaacagagacaaccccaagatcgagaccagctacatggacggcaccaacagaagaatcctggtgcaggacgacctgggcctgcccaacggcctgaccttcgacgccttcagcagccagctgtgctgggtggacgccggcaccaacagagccgagtgcctgaaccccagccagcccagcagaagaaaggccctggagggcctgcagtaccccttcgccgtgaccagctacggcaagaacctgtacttcaccgactggaagatgaacagcgtggtggccctggacctggccatcagcaaggagaccgacgccttccagccccacaagcagaccagactgtacggcatcaccaccgccctgagccagtgcccccagggccacaactactgcagcgtgaacaacggcggctgcacccacctgtgcctggccacccccggcagcagaacctgcagatgccccgacaacaccctgggcgtggactgcatcgagcagaagtag

SEQ ID NO: 3600 - DNA, 525 bp, synthetic construct
  misc_feature 1..525: note = source = /note="Description of Artificial Sequence: Synthetic coding sequence"
  source 1..525: mol_type = other DNA
atgctgagaaccgagagctgcagacccagaagccccgccggccaggtggccgccgccagccccctgctgctgctgctgctgctgctggcctggtgcgccggcgcctgcagaggcgcccccatcctgccccagggcctgcagcccgagcagcagctgcagctgtggaacgagatcgacgacacctgcagcagcttcctgagcatcgacagccagccccaggccagcaacgccctggaggagctgtgcttcatgatcatgggcatgctgcccaagccccaggagcaggacgagaaggacaacaccaagagattcctgttccactacagcaagacccagaagctgggcaagagcaacgtggtgagcagcgtggtgcaccccctgctgcagctggtgccccacctgcacgagagaagaatgaagagattcagagtggacgaggagttccagagccccttcgccagccagagcagaggctacttcctgttcagacccagaaacggcagaagaagcgccggcttcatctag

SEQ ID NO: 3601 - DNA, 1218 bp, synthetic construct
  misc_feature 1..1218: note = source = /note="Description of Artificial Sequence: Synthetic coding sequence"
  source 1..1218: mol_type = other DNA
atggacaccatcttcctgtggagcctgctgctgctgttcttcggcagccaggccagcagatgcagcgcccagaagaacaccgagttcgccgtggacctgtaccaggaggtgagcctgagccacaaggacaacatcatcttcagccccctgggcatcaccctggtgctggagatggtgcagctgggcgccaagggcaaggcccagcagcagatcagacagaccctgaagcagcaggagaccagcgccggcgaggagttcttcgtgctgaagagcttcttcagcgccatcagcgagaagaagcaggagttcaccttcaacctggccaacgccctgtacctgcaggagggcttcaccgtgaaggagcagtacctgcacggcaacaaggagttcttccagagcgccatcaagctggtggacttccaggacgccaaggcctgcgccgagatgatcagcacctgggtggagagaaagaccgacggcaagatcaaggacatgttcagcggcgaggagttcggccccctgaccagactggtgctggtgaacgccatctacttcaagggcgactggaagcagaagttcagaaaggaggacacccagctgatcaacttcaccaagaagaacggcagcaccgtgaagatccccatgatgaaggccctgctgagaaccaagtacggctacttcagcgagagcagcctgaactaccaggtgctggagctgagctacaagggcgacgagttcagcctgatcatcatcctgcccgccgagggcatggacatcgaggaggtggagaagctgatcaccgcccagcagatcctgaagtggctgagcgagatgcaggaggaggaggtggagatcagcctgcccagattcaaggtggagcagaaggtggacttcaaggacgtgctgtacagcctgaacatcaccgagatcttcagcggcggctgcgacctgagcggcatcaccgacagcagcgaggtgtacgtgagccaggtgacccagaaggtgttcttcgagatcaacgaggacggcagcgaggccgccaccagcaccggcatccacatccccgtgatcatgagcctggcccagagccagttcatcgccaaccaccccttcctgttcatcatgaagcacaaccccaccgagagcatcctgttcatgggcagagtgaccaaccccgacacccaggagatcaagggcagagacctggacagcctgtag

SEQ ID NO: 3602 - DNA, 3687 bp, synthetic construct
  misc_feature 1..3687: note = source = /note="Description of Artificial Sequence: Synthetic coding sequence"
  source 1..3687: mol_type = other DNA
atgaagggcgccagactgttcgtgctgctgagcagcctgtggagcggcggcatcggcctgaacaacagcaagcacagctggaccatccccgaggacggcaacagccagaagaccatgcccagcgccagcgtgccccccaacaagatccagagcctgcagatcctgcccaccaccagagtgatgagcgccgagatcgccaccacccccgaggccagaaccagcgaggacagcctgctgaagagcaccctgccccccagcgagaccagcgcccccgccgagggcgtgagaaaccagaccctgaccagcaccgagaaggccgagggcgtggtgaagctgcagaacctgaccctgcccaccaacgccagcatcaagttcaaccccggcgccgagagcgtggtgctgagcaacagcaccctgaagttcctgcagagcttcgccagaaagagcaacgagcaggccaccagcctgaacaccgtgggcggcaccggcggcatcggcggcgtgggcggcaccggcggcgtgggcaacagagcccccagagagacctacctgagcagaggcgacagcagcagcagccagagaaccgactaccagaagagcaacttcgagaccaccagaggcaagaactggtgcgcctacgtgcacaccagactgagccccaccgtgatcctggacaaccaggtgacctacgtgcccggcggcaagggcccctgcggctggaccggcggcagctgcccccagagaagccagaagatcagcaaccccgtgtacagaatgcagcacaagatcgtgaccagcctggactggagatgctgccccggctacagcggccccaagtgccagctgagagcccaggagcagcagagcctgatccacaccaaccaggccgagagccacaccgccgtgggcagaggcgtggccgagcagcagcagcagcagggctgcggcgaccccgaggtgatgcagaagatgaccgaccaggtgaactaccaggccatgaagctgaccctgctgcagaagaagatcgacaacatcagcctgaccgtgaacgacgtgagaaacacctacagcagcctggagggcaaggtgagcgaggacaagagcagagagttccagagcctgctgaagggcctgaagagcaagagcatcaacgtgctgatcagagacatcgtgagagagcagttcaagatcttccagaacgacatgcaggagaccgtggcccagctgttcaagaccgtgagcagcctgagcgaggacctggagagcaccagacagatcatccagaaggtgaacgagagcgtggtgagcatcgccgcccagcagaagttcgtgctggtgcaggagaacagacccaccctgaccgacatcgtggagctgagaaaccacatcgtgaacgtgagacaggagatgaccctgacctgcgagaagcccatcaaggagctggaggtgaagcagacccacctggagggcgccctggagcaggagcacagcagaagcatcctgtactacgagagcctgaacaagaccctgagcaagctgaaggaggtgcacgagcagctgctgagcaccgagcaggtgagcgaccagaagaacgcccccgccgccgagagcgtgagcaacaacgtgaccgagtacatgagcaccctgcacgagaacatcaagaagcagagcctgatgatgctgcagatgttcgaggacctgcacatccaggagagcaagatcaacaacctgaccgtgagcctggagatggagaaggagagcctgagaggcgagtgcgaggacatgctgagcaagtgcagaaacgacttcaagttccagctgaaggacaccgaggagaacctgcacgtgctgaaccagaccctggccgaggtgctgttccccatggacaacaagatggacaagatgagcgagcagctgaacgacctgacctacgacatggagatcctgcagcccctgctggagcagggcgccagcctgagacagaccatgacctacgagcagcccaaggaggccatcgtgatcagaaagaagatcgagaacctgaccagcgccgtgaacagcctgaacttcatcatcaaggagctgaccaagagacacaacctgctgagaaacgaggtgcagggcagagacgacgccctggagagaagaatcaacgagtacgccctggagatggaggacggcctgaacaagaccatgaccatcatcaacaacgccatcgacttcatccaggacaactacgccctgaaggagaccctgagcaccatcaaggacaacagcgagatccaccacaagtgcaccagcgacatggagaccatcctgaccttcatcccccagttccacagactgaacgacagcatccagaccctggtgaacgacaaccagagatacaacttcgtgctgcaggtggccaagaccctggccggcatccccagagacgagaagctgaaccagagcaacttccagaagatgtaccagatgttcaacgagaccaccagccaggtgagaaagtaccagcagaacatgagccacctggaggagaagctgctgctgaccaccaagatcagcaagaacttcgagaccagactgcaggacatcgagagcaaggtgacccagaccctgatcccctactacatcagcgtgaagaagggcagcgtggtgaccaacgagagagaccaggccctgcagctgcaggtgctgaacagcagattcaaggccctggaggccaagagcatccacctgagcatcaacttcttcagcctgaacaagaccctgcacgaggtgctgaccatgtgccacaacgccagcaccagcgtgagcgagctgaacgccaccatccccaagtggatcaagcacagcctgcccgacatccagctgctgcagaagggcctgaccgagttcgtggagcccatcatccagatcaagacccaggccgccctgagcaacctgacctgctgcatcgacagaagcctgcccggcagcctggccaacgtggtgaagagccagaagcaggtgaagagcctgcccaagaagatcaacgccctgaagaagcccaccgtgaacctgaccaccgtgctgatcggcagaacccagagaaacaccgacaacatcatctaccccgaggagtacagcagctgcagcagacacccctgccagaacggcggcacctgcatcaacggcagaaccagcttcacctgcgcctgcagacaccccttcaccggcgacaactgcaccatcaagctggtggaggagaacgccctggcccccgacttcagcaagggcagctacagatacgcccccatggtggccttcttcgccagccacacctacggcatgaccatccccggccccatcctgttcaacaacctggacgtgaactacggcgccagctacacccccagaaccggcaagttcagaatcccctacctgggcgtgtacgtgttcaagtacaccatcgagagcttcagcgcccacatcagcggcttcctggtggtggacggcatcgacaagctggccttcgagagcgagaacatcaacagcgagatccactgcgacagagtgctgaccggcgacgccctgctggagctgaactacggccaggaggtgtggctgagactggccaagggcaccatccccgccaagttcccccccgtgaccaccttcagcggctacctgctgtacagaacctag

SEQ ID NO: 3603 - DNA, 1365 bp, synthetic construct
  misc_feature 1..1365: note = source = /note="Description of Artificial Sequence: Synthetic coding sequence"
  source 1..1365: mol_type = other DNA
atgtggcccctgaccgtgcccccccccctgctgctgctgctgtgcagcggcctggccggccagaccctgttccagaaccccgaggagggctggcagctgtacaccagcgcccaggcccccgacggcaagtgcatctgcaccgccgtgatccccgcccagagcacctgcagcagagacggcagaagcagagagctgagacagctgatggagaaggtgcagaacgtgagccagagcatggaggtgctggagctgagaacctacagagacctgcagtacgtgagaggcatggagaccctgatgagaagcctggacgccagactgagagccgccgacggcagcctgagcgccaagagcttccaggagctgaaggacagaatgaccgagctgctgcccctgagcagcgtgctggagcagtacaaggccgacaccagaaccatcgtgagactgagagaggaggtgagaaacctgagcggcagcctggccgccatccaggaggagatgggcgcctacggctacgaggacctgcagcagagagtgatggccctggaggccagactgcacgcctgcgcccagaagctgggctgcggcaagctgaccggcgtgagcaaccccatcaccgtgagagccatgggcagcagattcggcagctggatgaccgacaccatggcccccagcgccgacagcagagtgtggtacatggacggctactacaagggcagaagagtgctggagttcagaaccctgggcgacttcatcaagggccagaacttcatccagcacctgctgccccagccctgggccggcaccggccacgtggtgtacaacggcagcctgttctacaacaagtaccagagcaacgtggtggtgaagtaccacttcagaagcagaagcgtgctggtgcagagaagcctgcccggcgccggctacaacaacaccttcccctacagctggggcggcttcagcgacatggacttcatggtggacgagagcggcctgtgggccgtgtacaccaccaaccagaacgccggcaacatcgtggtgagcagactggacccccacaccctggaggtgatgagaagctgggacaccggctaccccaagagaagcgccggcgaggccttcatgatctgcggcgtgctgtacgtgaccaacagccacctggccggcgccaaggtgtacttcgcctacttcaccaacaccagcagctacgagtacaccgacgtgcccttccacaaccagtacagccacatcagcatgctggactacaaccccagagagagagccctgtacacctggaacaacggccaccaggtgctgtacaacgtgaccctgttccacgtgatcagcaccagcggcgacccctag

SEQ ID NO: 3604 - DNA, 909 bp, synthetic construct
  misc_feature 1..909: note = source = /note="Description of Artificial Sequence: Synthetic coding sequence"
  source 1..909: mol_type = other DNA
atgtgcgccgagagactgggccagttcatgaccctggccctggtgctggccaccttcgaccccgccagaggcaccgacgccaccaacccccccgagggcccccaggacagaagcagccagcagaagggcagactgagcctgcagaacaccgccgagatccagcactgcctggtgaacgccggcgacgtgggctgcggcgtgttcgagtgcttcgagaacaacagctgcgagatcagaggcctgcacggcatctgcatgaccttcctgcacaacgccggcaagttcgacgcccagggcaagagcttcatcaaggacgccctgaagtgcaaggcccacgccctgagacacagattcggctgcatcagcagaaagtgccccgccatcagagagatggtgagccagctgcagagagagtgctacctgaagcacgacctgtgcgccgccgcccaggagaacaccagagtgatcgtggagatgatccacttcaaggacctgctgctgcacgagccctacgtggacctggtgaacctgctgctgacctgcggcgaggaggtgaaggaggccatcacccacagcgtgcaggtgcagtgcgagcagaactggggcagcctgtgcagcatcctgagcttctgcaccagcgccatccagaagccccccaccgccccccccgagagacagccccaggtggacagaaccaagctgagcagagcccaccacggcgaggccggccaccacctgcccgagcccagcagcagagagaccggcagaggcgccaagggcgagagaggcagcaagagccaccccaacgcccacgccagaggcagagtgggcggcctgggcgcccagggccccagcggcagcagcgagtgggaggacgagcagagcgagtacagcgacatcagaagatag

SEQ ID NO: 3605 - DNA, 2529 bp, synthetic construct
  misc_feature 1..2529: note = source = /note="Description of Artificial Sequence: Synthetic coding sequence"
  source 1..2529: mol_type = other DNA
atgaagcccggcggcttctggctgcacctgaccctgctgggcgccagcctgcccgccgccctgggctggatggaccccggcaccagcagaggccccgacgtgggcgtgggcgagagccaggccgaggagcccagaagcttcgaggtgaccagaagagagggcctgagcagccacaacgagctgctggccagctgcggcaagaagttctgcagcagaggcagcagatgcgtgctgagcagaaagaccggcgagcccgagtgccagtgcctggaggcctgcagacccagctacgtgcccgtgtgcggcagcgacggcagattctacgagaaccactgcaagctgcacagagccgcctgcctgctgggcaagagaatcaccgtgatccacagcaaggactgcttcctgaagggcgacacctgcaccatggccggctacgccagactgaagaacgtgctgctggccctgcagaccagactgcagcccctgcaggagggcgacagcagacaggaccccgccagccagaagagactgctggtggagagcctgttcagagacctggacgccgacggcaacggccacctgagcagcagcgagctggcccagcacgtgctgaagaagcaggacctggacgaggacctgctgggctgcagccccggcgacctgctgagattcgacgactacaacagcgacagcagcctgaccctgagagagttctacatggccttccaggtggtgcagctgagcctggcccccgaggacagagtgagcgtgaccaccgtgaccgtgggcctgagcaccgtgctgacctgcgccgtgcacggcgacctgagaccccccatcatctggaagagaaacggcctgaccctgaacttcctggacctggaggacatcaacgacttcggcgaggacgacagcctgtacatcaccaaggtgaccaccatccacatgggcaactacacctgccacgccagcggccacgagcagctgttccagacccacgtgctgcaggtgaacgtgccccccgtgatcagagtgtaccccgagagccaggcccaggagcccggcgtggccgccagcctgagatgccacgccgagggcatccccatgcccagaatcacctggctgaagaacggcgtggacgtgagcacccagatgagcaagcagctgagcctgctggccaacggcagcgagctgcacatcagcagcgtgagatacgaggacaccggcgcctacacctgcatcgccaagaacgaggtgggcgtggacgaggacatcagcagcctgttcatcgaggacagcgccagaaagaccctggccaacatcctgtggagagaggagggcctgagcgtgggcaacatgttctacgtgttcagcgacgacggcatcatcgtgatccaccccgtggactgcgagatccagagacacctgaagcccaccgagaagatcttcatgagctacgaggagatctgcccccagagagagaagaacgccacccagccctgccagtgggtgagcgccgtgaacgtgagaaacagatacatctacgtggcccagcccgccctgagcagagtgctggtggtggacatccaggcccagaaggtgctgcagagcatcggcgtggaccccctgcccgccaagctgagctacgacaagagccacgaccaggtgtgggtgctgagctggggcgacgtgcacaagagcagacccagcctgcaggtgatcaccgaggccagcaccggccagagccagcacctgatcagaacccccttcgccggcgtggacgacttcttcatcccccccaccaacctgatcatcaaccacatcagattcggcttcatcttcaacaagagcgaccccgccgtgcacaaggtggacctggagaccatgatgcccctgaagaccatcggcctgcaccaccacggctgcgtgccccaggccatggcccacacccacctgggcggctacttcttcatccagtgcagacaggacagccccgccagcgccgccagacagctgctggtggacagcgtgaccgacagcgtgctgggccccaacggcgacgtgaccggcaccccccacaccagccccgacggcagattcatcgtgagcgccgccgccgacagcccctggctgcacgtgcaggagatcaccgtgagaggcgagatccagaccctgtacgacctgcagatcaacagcggcatcagcgacctggccttccagagaagcttcaccgagagcaaccagtacaacatctacgccgccctgcacaccgagcccgacctgctgttcctggagctgagcaccggcaaggtgggcatgctgaagaacctgaaggagccccccgccggccccgcccagccctggggcggcacccacagaatcatgagagacagcggcctgttcggccagtacctgctgacccccgccagagagagcctgttcctgatcaacggcagacagaacaccctgagatgcgaggtgagcggcatcaagggcggcaccaccgtggtgtgggtgggcgaggtgtag

SEQ ID NO: 3606 - DNA, 2256 bp, synthetic construct
  misc_feature 1..2256: note = source = /note="Description of Artificial Sequence: Synthetic coding sequence"
  source 1..2256: mol_type = other DNA
atggccttcagaaccatctgcgtgctggtgggcgtgttcatctgcagcatctgcgtgaagggcagcagccagccccaggccagagtgtacctgaccttcgacgagctgagagagaccaagaccagcgagtacttcagcctgagccaccaccccctggactacagaatcctgctgatggacgaggaccaggacagaatctacgtgggcagcaaggaccacatcctgagcctgaacatcaacaacatcagccaggaggccctgagcgtgttctggcccgccagcaccatcaaggtggaggagtgcaagatggccggcaaggaccccacccacggctgcggcaacttcgtgagagtgatccagaccttcaacagaacccacctgtacgtgtgcggcagcggcgccttcagccccgtgtgcacctacctgaacagaggcagaagaagcgaggaccaggtgttcatgatcgacagcaagtgcgagagcggcaagggcagatgcagcttcaaccccaacgtgaacaccgtgagcgtgatgatcaacgaggagctgttcagcggcatgtacatcgacttcatgggcaccgacgccgccatcttcagaagcctgaccaagagaaacgccgtgagaaccgaccagcacaacagcaagtggctgagcgagcccatgttcgtggacgcccacgtgatccccgacggcaccgaccccaacgacgccaaggtgtacttcttcttcaaggagaagctgaccgacaacaacagaagcaccaagcagatccacagcatgatcgccagaatctgccccaacgacaccggcggcctgagaagcctggtgaacaagtggaccaccttcctgaaggccagactggtgtgcagcgtgaccgacgaggacggccccgagacccacttcgacgagctggaggacgtgttcctgctggagaccgacaaccccagaaccaccctggtgtacggcatcttcaccaccagcagcagcgtgttcaagggcagcgccgtgtgcgtgtaccacctgagcgacatccagaccgtgttcaacggccccttcgcccacaaggagggccccaaccaccagctgatcagctaccagggcagaatcccctaccccagacccggcacctgccccggcggcgccttcacccccaacatgagaaccaccaaggagttccccgacgacgtggtgaccttcatcagaaaccaccccctgatgtacaacagcatctaccccatccacaagagacccctgatcgtgagaatcggcaccgactacaagtacaccaagatcgccgtggacagagtgaacgccgccgacggcagataccacgtgctgttcctgggcaccgacagaggcaccgtgcagaaggtggtggtgctgcccaccaacaacagcgtgagcggcgagctgatcctggaggagctggaggtgttcaagaaccacgcccccatcaccaccatgaagatcagcagcaagaagcagcagctgtacgtgagcagcaacgagggcgtgagccaggtgagcctgcacagatgccacatctacggcaccgcctgcgccgactgctgcctggccagagacccctactgcgcctgggacggccacagctgcagcagattctaccccaccggcaagagaagaagcagaagacaggacgtgagacacggcaaccccctgacccagtgcagaggcttcaacctgaaggcctacagaaacgccgccgagatcgtgcagtacggcgtgaagaacaacaccaccttcctggagtgcgcccccaagagcccccaggccagcatcaagtggctgctgcagaaggacaaggacagaagaaaggaggtgaagctgaacgagagaatcatcgccaccagccagggcctgctgatcagaagcgtgcagggcagcgaccagggcctgtaccactgcatcgccaccgagaacagcttcaagcagaccatcgccaagatcaacttcaaggtgctggacagcgagatggtggccgtggtgaccgacaagtggagcccctggacctgggccagcagcgtgagagccctgcccttccaccccaaggacatcatgggcgccttcagccacagcgagatgcagatgatcaaccagtactgcaaggacaccagacagcagcaccagcagggcgacgagagccagaagatgagaggcgactacggcaagctgaaggccctgatcaacagcagaaagagcagaaacagaagaaaccagctgcccgagagctag

SEQ ID NO: 3607 - DNA, 2316 bp, synthetic construct
  misc_feature 1..2316: note = source = /note="Description of Artificial Sequence: Synthetic coding sequence"
  source 1..2316: mol_type = other DNA
atgggctggctgaccagaatcgtgtgcctgttctggggcgtgctgctgaccgccagagccaactaccagaacggcaagaacaacgtgcccagactgaagctgagctacaaggagatgctggagagcaacaacgtgatcaccttcaacggcctggccaacagcagcagctaccacaccttcctgctggacgaggagagaagcagactgtacgtgggcgccaaggaccacatcttcagcttcgacctggtgaacatcaaggacttccagaagatcgtgtggcccgtgagctacaccagaagagacgagtgcaagtgggccggcaaggacatcctgaaggagtgcgccaacttcatcaaggtgctgaaggcctacaaccagacccacctgtacgcctgcggcaccggcgccttccaccccatctgcacctacatcgagatcggccaccaccccgaggacaacatcttcaagctggagaacagccacttcgagaacggcagaggcaagagcccctacgaccccaagctgctgaccgccagcctgctgatcgacggcgagctgtacagcggcaccgccgccgacttcatgggcagagacttcgccatcttcagaaccctgggccaccaccaccccatcagaaccgagcagcacgacagcagatggctgaacgaccccaagttcatcagcgcccacctgatcagcgagagcgacaaccccgaggacgacaaggtgtacttcttcttcagagagaacgccatcgacggcgagcacagcggcaaggccacccacgccagaatcggccagatctgcaagaacgacttcggcggccacagaagcctggtgaacaagtggaccaccttcctgaaggccagactgatctgcagcgtgcccggccccaacggcatcgacacccacttcgacgagctgcaggacgtgttcctgatgaacttcaaggaccccaagaaccccgtggtgtacggcgtgttcaccaccagcagcaacatcttcaagggcagcgccgtgtgcatgtacagcatgagcgacgtgagaagagtgttcctgggcccctacgcccacagagacggccccaactaccagtgggtgccctaccagggcagagtgccctaccccagacccggcacctgccccagcaagaccttcggcggcttcgacagcaccaaggacctgcccgacgacgtgatcaccttcgccagaagccaccccgccatgtacaaccccgtgttccccatgaacaacagacccatcgtgatcaagaccgacgtgaactaccagttcacccagatcgtggtggacagagtggacgccgaggacggccagtacgacgtgatgttcatcggcaccgacgtgggcaccgtgctgaaggtggtgagcatccccaaggagacctggtacgacctggaggaggtgctgctggaggagatgaccgtgttcagagagcccaccgccatcagcgccatggagctgagcaccaagcagcagcagctgtacatcggcagcaccgccggcgtggcccagctgcccctgcacagatgcgacatctacggcaaggcctgcgccgagtgctgcctggccagagacccctactgcgcctgggacggcagcgcctgcagcagatacttccccaccgccaagagaagaaccagaagacaggacatcagaaacggcgaccccctgacccactgcagcgacctgcaccacgacaaccaccacggccacagccccgaggagagaatcatctacggcgtggagaacagcagcaccttcctggagtgcagccccaagagccagagagccctggtgtactggcagttccagagaagaaacgaggagagaaaggaggagatcagagtggacgaccacatcatcagaaccgaccagggcctgctgctgagaagcctgcagcagaaggacagcggcaactacctgtgccacgccgtggagcacggcttcatccagaccctgctgaaggtgaccctggaggtgatcgacaccgagcacctggaggagctgctgcacaaggacgacgacggcgacggcagcaagaccaaggagatgagcaacagcatgacccccagccagaaggtgtggtacagagacttcatgcagctgatcaaccaccccaacctgaacaccatggacgagttctgcgagcaggtgtggaagagagacagaaagcagagaagacagagacccggccacacccccggcaacagcaacaagtggaagcacctgcaggagaacaagaagggcagaaacagaagaacccacgagttcgagagagcccccagaagcgtgtag

SEQ ID NO: 3608 - DNA, 4605 bp, synthetic construct
  misc_feature 1..4605: note = source = /note="Description of Artificial Sequence: Synthetic coding sequence"
  source 1..4605: mol_type = other DNA
atggccctgacccccggctggggcagcagcgccggccccgtgagacccgagctgtggctgctgctgtgggccgccgcctggagactgggcgccagcgcctgccccgccctgtgcacctgcaccggcaccaccgtggactgccacggcaccggcctgcaggccatccccaagaacatccccagaaacaccgagagactggagctgaacggcaacaacatcaccagaatccacaagaacgacttcgccggcctgaagcagctgagagtgctgcagctgatggagaaccagatcggcgccgtggagagaggcgccttcgacgacatgaaggagctggagagactgagactgaacagaaaccagctgcacatgctgcccgagctgctgttccagaacaaccaggccctgagcagactggacctgagcgagaacgccatccaggccatccccagaaaggccttcagaggcgccaccgacctgaagaacctgcagctggacaagaaccagatcagctgcatcgaggagggcgccttcagagccctgagaggcctggaggtgctgaccctgaacaacaacaacatcaccaccatccccgtgagcagcttcaaccacatgcccaagctgagaaccttcagactgcacagcaaccacctgttctgcgactgccacctggcctggctgagccagtggctgagacagagacccaccatcggcctgttcacccagtgcagcggccccgccagcctgagaggcctgaacgtggccgaggtgcagaagagcgagttcagctgcagcggccagggcgaggccggcagagtgcccacctgcaccctgagcagcggcagctgccccgccatgtgcacctgcagcaacggcatcgtggactgcagaggcaagggcctgaccgccatccccgccaacctgcccgagaccatgaccgagatcagactggagctgaacggcatcaagagcatcccccccggcgccttcagcccctacagaaagctgagaagaatcgacctgagcaacaaccagatcgccgagatcgcccccgacgccttccagggcctgagaagcctgaacagcctggtgctgtacggcaacaagatcaccgacctgcccagaggcgtgttcggcggcctgtacaccctgcagctgctgctgctgaacgccaacaagatcaactgcatcagacccgacgccttccaggacctgcagaacctgagcctgctgagcctgtacgacaacaagatccagagcctggccaagggcaccttcaccagcctgagagccatccagaccctgcacctggcccagaaccccttcatctgcgactgcaacctgaagtggctggccgacttcctgagaaccaaccccatcgagaccagcggcgccagatgcgccagccccagaagactggccaacaagagaatcggccagatcaagagcaagaagttcagatgcagcgccaaggagcagtacttcatccccggcaccgaggactaccagctgaacagcgagtgcaacagcgacgtggtgtgcccccacaagtgcagatgcgaggccaacgtggtggagtgcagcagcctgaagctgaccaagatccccgagagaatcccccagagcaccgccgagctgagactgaacaacaacgagatcagcatcctggaggccaccggcatgttcaagaagctgacccacctgaagaagatcaacctgagcaacaacaaggtgagcgagatcgaggacggcgccttcgagggcgccgccagcgtgagcgagctgcacctgaccgccaaccagctggagagcatcagaagcggcatgttcagaggcctggacggcctgagaaccctgatgctgagaaacaacagaatcagctgcatccacaacgacagcttcaccggcctgagaaacgtgagactgctgagcctgtacgacaaccagatcaccaccgtgagccccggcgccttcgacaccctgcagagcctgagcaccctgaacctgctggccaaccccttcaactgcaactgccagctggcctggctgggcggctggctgagaaagagaaagatcgtgaccggcaaccccagatgccagaaccccgacttcctgagacagatccccctgcaggacgtggccttccccgacttcagatgcgaggagggccaggaggagggcggctgcctgcccagaccccagtgcccccaggagtgcgcctgcctggacaccgtggtgagatgcagcaacaagcacctgagagccctgcccaagggcatccccaagaacgtgaccgagctgtacctggacggcaaccagttcaccctggtgcccggccagctgagcaccttcaagtacctgcagctggtggacctgagcaacaacaagatcagcagcctgagcaacagcagcttcaccaacatgagccagctgaccaccctgatcctgagctacaacgccctgcagtgcatcccccccctggccttccagggcctgagaagcctgagactgctgagcctgcacggcaacgacatcagcaccctgcaggagggcatcttcgccgacgtgaccagcctgagccacctggccatcggcgccaaccccctgtactgcgactgccacctgagatggctgagcagctgggtgaagaccggctacaaggagcccggcatcgccagatgcgccggcccccaggacatggagggcaagctgctgctgaccacccccgccaagaagttcgagtgccagggcccccccaccctggccgtgcaggccaagtgcgacctgtgcctgagcagcccctgccagaaccagggcacctgccacaacgaccccctggaggtgtacagatgcgcctgccccagcggctacaagggcagagactgcgaggtgagcctggacagctgcagcagcggcccctgcgagaacggcggcacctgccacgcccaggagggcgaggacgcccccttcacctgcagctgccccaccggcttcgagggccccacctgcggcgtgaacaccgacgactgcgtggaccacgcctgcgccaacggcggcgtgtgcgtggacggcgtgggcaactacacctgccagtgccccctgcagtacgagggcaaggcctgcgagcagctggtggacctgtgcagccccgacctgaacccctgccagcacgaggcccagtgcgtgggcacccccgacggccccagatgcgagtgcatgcccggctacgccggcgacaactgcagcgagaaccaggacgactgcagagaccacagatgccagaacggcgcccagtgcatggacgaggtgaacagctacagctgcctgtgcgccgagggctacagcggccagctgtgcgagatccccccccacctgcccgcccccaagagcccctgcgagggcaccgagtgccagaacggcgccaactgcgtggaccagggcaacagacccgtgtgccagtgcctgcccggcttcggcggccccgagtgcgagaagctgctgagcgtgaacttcgtggacagagacacctacctgcagttcaccgacctgcagaactggcccagagccaacatcaccctgcaggtgagcaccgccgaggacaacggcatcctgctgtacaacggcgacaacgaccacatcgccgtggagctgtaccagggccacgtgagagtgagctacgaccccggcagctaccccagcagcgccatctacagcgccgagaccatcaacgacggccagttccacaccgtggagctggtggccttcgaccagatggtgaacctgagcatcgacggcggcagccccatgaccatggacaacttcggcaagcactacaccctgaacagcgaggcccccctgtacgtgggcggcatgcccgtggacgtgaacagcgccgccttcagactgtggcagatcctgaacggcaccggcttccacggctgcatcagaaacctgtacatcaacaacgagctgcaggacttcaccaagacccagatgaagcccggcgtggtgcccggctgcgagccctgcagaaagctgtactgcctgcacggcatctgccagcccaacgccacccccggccccatgtgccactgcgaggccggctgggtgggcctgcactgcgaccagcccgccgacggcccctgccacggccacaagtgcgtgcacggccagtgcgtgcccctggacgccctgagctacagctgccagtgccaggacggctacagcggcgccctgtgcaaccaggccggcgccctggccgagccctgcagaggcctgcagtgcctgcacggccactgccaggccagcggcaccaagggcgcccactgcgtgtgcgaccccggcttcagcggcgagctgtgcgagcaggagagcgagtgcagaggcgaccccgtgagagacttccaccaggtgcagagaggctacgccatctgccagaccaccagacccctgagctgggtggagtgcagaggcagctgccccggccagggctgctgccagggcctgagactgaagagaagaaagttcaccttcgagtgcagcgacggcaccagcttcgccgaggaggtggagaagcccaccaagtgcggctgcgccctgtgcgcctag

SEQ ID NO: 3609 - DNA, 342 bp, synthetic construct
  misc_feature 1..342: note = source = /note="Description of Artificial Sequence: Synthetic coding sequence"
  source 1..342: mol_type = other DNA
atggacagcagacaggccgccgccctgctggtgctgctgctgctgatcgacggcggctgcgccgagggccccggcggccagcaggaggaccagctgagcgccgaggaggacagcgagcccctgcccccccaggacgcccagaccagcggcagcctgctgcactacctgctgcaggccatggagagacccggcagaagccaggccttcctgttccagccccagagattcggcagaaacacccagggcagctggagaaacgagtggctgagccccagagccggcgagggcctgaacagccagttctggagcctggccgccccccagagattcggcaagaagtag

SEQ ID NO: 3610 - DNA, 2568 bp, synthetic construct
  misc_feature 1..2568: note = source = /note="Description of Artificial Sequence: Synthetic coding sequence"
  source 1..2568: mol_type = other DNA
atggccagacacctgctgctgcccctggtgatgctggtgatcagccccatccccggcgccttccaggacagcgccctgagccccacccaggaggagcccgaggacctggactgcggcagacccgagcccagcgccagaatcgtgggcggcagcaacgcccagcccggcacctggccctggcaggtgagcctgcaccacggcggcggccacatctgcggcggcagcctgatcgcccccagctgggtgctgagcgccgcccactgcttcatgaccaacggcaccctggagcccgccgccgagtggagcgtgctgctgggcgtgcacagccaggacggccccctggacggcgcccacaccagagccgtggccgccatcgtggtgcccgccaactacagccaggtggagctgggcgccgacctggccctgctgagactggccagccccgccagcctgggccccgccgtgtggcccgtgtgcctgcccagagccagccacagattcgtgcacggcaccgcctgctgggccaccggctggggcgacgtgcaggaggccgaccccctgcccctgccctgggtgctgcaggaggtggagctgagactgctgggcgaggccacctgccagtgcctgtacagccagcccggccccttcaacctgaccctgcagatcctgcccggcatgctgtgcgccggctaccccgagggcagaagagacacctgccagggcgacagcggcggccccctggtgtgcgaggagggcggcagatggttccaggccggcatcaccagcttcggcttcggctgcggcagaagaaacagacccggcgtgttcaccgccgtggccacctacgaggcctggatcagagagcaggtgatgggcagcgagcccggccccgccttccccacccagccccagaagacccagagcgacccccaggagcccagagaggagaactgcaccatcgccctgcccgagtgcggcaaggcccccagacccggcgcctggccctgggaggcccaggtgatggtgcccggcagcagaccctgccacggcgccctggtgagcgagagctgggtgctggcccccgccagctgcttcctggaccccaacagcagcgacagcccccccagagacctggacgcctggagagtgctgctgcccagcagacccagagccgagagagtggccagactggtgcagcacgagaacgccagctgggacaacgccagcgacctggccctgctgcagctgagaacccccgtgaacctgagcgccgccagcagacccgtgtgcctgccccaccccgagcactacttcctgcccggcagcagatgcagactggccagatggggcagaggcgagcccgccctgggccccggcgccctgctggaggccgagctgctgggcggctggtggtgccactgcctgtacggcagacagggcgccgccgtgcccctgcccggcgaccccccccacgccctgtgccccgcctaccaggagaaggaggaggtgggcagctgctggaacgacagcagatggagcctgctgtgccaggaggagggcacctggttcctggccggcatcagagacttccccagcggctgcctgagacccagagccttcttccccctgcagacccacggcccctggatcagccacgtgaccagaggcgcctacctggaggaccagctggcctgggactggggccccgacggcgaggagaccgagacccagacctgccccccccacaccgagcacggcgcctgcggcctgagactggaggccgcccccgtgggcgtgctgtggccctggctggccgaggtgcacgtggccggcgacagagtgtgcaccggcatcctgctggcccccggctgggtgctggccgccacccactgcgtgctgagacccggcagcaccaccgtgccctacatcgaggtgtacctgggcagagccggcgccagcagcctgccccagggccaccaggtgagcagactggtgatcagcatcagactgccccagcacctgggcctgagaccccccctggccctgctggagctgagcagcagagtggagcccagccccagcgccctgcccatctgcctgcaccccgccggcatcccccccggcgccagctgctgggtgctgggctggaaggagccccaggacagagtgcccgtggccgccgccgtgagcatcctgacccagagaatctgcgactgcctgtaccagggcatcctgccccccggcaccctgtgcgtgctgtacgccgagggccaggagaacagatgcgagatgaccagcgccccccccctgctgtgccagatgaccgagggcagctggatcctggtgggcatggccgtgcagggcagcagagagctgttcgccgccatcggccccgaggaggcctggatcagccagaccgtgggcgaggccaacttcctgccccccagcggcagcccccactggcccaccggcggcagcaacctgtgcccccccgagctggccaaggccagcggcagcccccacgccgtgtacttcctgctgctgctgaccctgctgatccagagctag

SEQ ID NO: 3611 - DNA, 912 bp, synthetic construct
  misc_feature 1..912: note = source = /note="Description of Artificial Sequence: Synthetic coding sequence"
  source 1..912: mol_type = other DNA
atgctgcaccccgagaccagccccggcagaggccacctgctggccgtgctgctggccctgctgggcaccacctgggccgaggtgtggcccccccagctgcaggagcaggcccccatggccggcgccctgaacagaaaggagagcttcctgctgctgagcctgcacaacagactgagaagctgggtgcagccccccgccgccgacatgagaagactggactggagcgacagcctggcccagctggcccaggccagagccgccctgtgcggcatccccacccccagcctggccagcggcctgtggagaaccctgcaggtgggctggaacatgcagctgctgcccgccggcctggccagcttcgtggaggtggtgagcctgtggttcgccgagggccagagatacagccacgccgccggcgagtgcgccagaaacgccacctgcacccactacacccagctggtgtgggccaccagcagccagctgggctgcggcagacacctgtgcagcgccggccagaccgccatcgaggccttcgtgtgcgcctacagccccagaggcaactgggaggtgaacggcaagaccatcatcccctacaagaagggcgcctggtgcagcctgtgcaccgccagcgtgagcggctgcttcaaggcctgggaccacgccggcggcctgtgcgaggtgcccagaaacccctgcagaatgagctgccagaaccacggcagactgaacatcagcacctgccactgccactgcccccccggctacaccggcagatactgccaggtgagatgcagcctgcagtgcgtgcacggcagattcagagaggaggagtgcagctgcgtgtgcgacatcggctacggcgagcccagcgtgccccccagatgcatcttccccagcacccccgtgacctag

SEQ ID NO: 3612 - DNA, 1158 bp, synthetic construct
  misc_feature 1..1158: note = source = /note="Description of Artificial Sequence: Synthetic coding sequence"
  source 1..1158: mol_type = other DNA
atgaagatgctgcccggcgtgggcgtgttcggcaccggcagcagcgccagagtgctggtgcccctgctgagagccgagggcttcaccgtggaggccctgtggggcaagaccgaggaggaggccaagcagctggccgaggagatgaacatcgccttctacaccagcagaaccgacgacatcctgctgcaccaggacgtggacctggtgtgcatcagcatccccccccccctgaccagacagatcagcgtgaaggccctgggcatcggcaagaacgtggtgtgcgagaaggccgccaccagcgtggacgccttcagaatggtgaccgccagcagatactacccccagctgatgagcctggtgggcaacgtgctgagattcctgcccgccttcgtgagaatgaagcagctgatcagcgagcactacgtgggcgccgtgatgatctgcgacgccagaatctacagcggcagcctgctgagccccagctacggctggatctgcgacgagctgatgggcggcggcggcctgcacaccatgggcacctacatcgtggacctgctgacccacctgaccggcagaagagccgagaaggtgcacggcctgctgaagaccttcgtgagacagaacgccgccatcagaggcatcagacacgtgaccagcgacgacttctgcttcttccagatgctgatgggcggcggcgtgtgcagcaccgtgaccctgaacttcaacatgcccggcgccttcgtgcacgaggtgatggtggtgggcagcgccggcagactggtggccagaggcgccgacctgtacggccagaagaacagcgccacccaggaggagctgctgctgagagacagcctggccgtgggcgccggcctgcccgagcagggcccccaggacgtgcccctgctgtacctgaagggcatggtgtacatggtgcaggccctgagacagagcttccagggccagggcgacagaagaacctgggacagaacccccgtgagcatggccgccagcttcgaggacggcctgtacatgcagagcgtggtggacgccatcaagagaagcagcagaagcggcgagtgggaggccgtggaggtgctgaccgaggagcccgacaccaaccagaacctgtgcgaggccctgcagagaaacaacctgtag

SEQ ID NO: 3613 - DNA, 1470 bp, synthetic construct
  misc_feature 1..1470: note = source = /note="Description of Artificial Sequence: Synthetic coding sequence"
  source 1..1470: mol_type = other DNA
atgcccgtgaccttcgccctgctgctgctgctgggccaggccaccgccgacccctgctacgacccccagggcagaccccagttctgcctgccccccgtgacccagctggccgccgtggccgccagctgcccccaggcctgcgccctgagccccggcaaccacctgggcgccagagagacctgcaacggcagcctgaccctggccctgggcggccccttcctgctgaccagcgtgagcctgagattctgcacccccggcccccccgccctgatcctgagcgccgcctgggccagcggcggcccctggagactgctgtggcacagacccgcctggcccggcgccctgggcggccccgagagagtgaccttccacagcacccccggccccaaggccaccgtggccgccagccacctgagagtggagttcggcggccaggccggcctggccgccgccggcctgagaggcagatgccagtgccacggccacgccgccagatgcgccgccagagccagaccccccagatgccactgcagacaccacaccaccggccccggctgcgagagctgcagacccagccacagagactggccctggagacccgccacccccagacacccccacccctgcctgccctgcagctgcaaccagcacgccagaagatgcagattcaacagcgagctgttcagactgagcggcggcagaagcggcggcgtgtgcgagagatgcagacaccacaccgccggcagacactgccactactgccagcccggcttctggagagaccccagccagcccatcttcagcagaagagcctgcagagcctgccagtgccaccccatcggcgccaccggcggcacctgcaaccagaccagcggccagtgcacctgcaagctgggcgtgaccggcctgacctgcaacagatgcggccccggctaccagcagagcagaagccccagaatgccctgccagagaatccccgaggccaccaccaccctggccaccacccccggcgcctacagcagcgacccccagtgccagaactactgcaacatgagcgacaccagagtgcacatgagcctgagaagatactgccagcaggaccacgtgctgagagcccaggtgctggccagcgaggccgccggccccgcctggcagagactggccgtgagagtgctggccgtgtacaagcagagagcccagcccgtgagaagaggcgaccaggacgcctgggtgcccagagccgacctgacctgcggctgcctgagactgcagcccggcaccgactacctgctgctgggcagcgccgtgggcgaccccgaccccaccagactgatcctggacagacacggcctggccctgccctggagacccagatgggccagacccctgaagagactgcagcaggaggagagagccggcggctgcagaggcgtgagagcccccacccccagccccagacccgagcactag

SEQ ID NO: 3614 - DNA, 8430 bp, synthetic construct
  misc_feature 1..8430: note = source = /note="Description of Artificial Sequence: Synthetic coding sequence"
  source 1..8430: mol_type = other DNA
atgaccctggagggcctgtacctggccagaggccccctggccagactgctgctggcctggagcgccctgctgtgcatggccggcggccagggcagatgggacggcgccctggaggccgccggccccggcagagtgagaagaagaggcagccccggcatcctgcagggccccaacgtgtgcggcagcagattccacgcctactgctgccccggctggagaaccttccccggcagaagccagtgcgtggtgcccatctgcagaagagcctgcggcgagggcttctgcagccagcccaacctgtgcacctgcgccgacggcaccctggcccccagctgcggcgtgagcagaggcagcggctgcagcgtgagctgcatgaacggcggcacctgcagaggcgccagctgcctgtgccagaagggctacaccggcaccgtgtgcggccagcccatctgcgacagaggctgccacaacggcggcagatgcatcggccccaacagatgcgcctgcgtgtacggcttcatgggcccccagtgcgagagagactacagaaccggcccctgcttcggccaggtgggccccgagggctgccagcaccagctgaccggcctggtgtgcaccaaggccctgtgctgcgccaccgtgggcagagcctggggcctgccctgcgagctgtgccccgcccagccccacccctgcagaagaggcttcatccccaacatccacaccggcgcctgccaggacgtggacgagtgccaggccgtgcccggcctgtgccagggcggcagctgcgtgaacatggtgggcagcttccactgcagatgccccgtgggccacagactgagcgacagcagcgccgcctgcgaggactacagagccggcgcctgcttcagcgtgctgttcggcggcagatgcgccggcgacctggccggccactacaccagaagacagtgctgctgcgacagaggcagatgctgggccgccggccccgtgcccgagctgtgcccccccagaggcagcaacgagttccagcagctgtgcgcccagagactgcccctgctgcccggccaccccggcctgttccccggcctgctgggcttcggcagcaacggcatgggcccccccctgggccccgccagactgaacccccacggcagcgacgccagaggcatccccagcctgggccccggcaacagcaacatcggcaccgccaccctgaaccagaccatcgacatctgcagacacttcaccaacctgtgcctgaacggcagatgcctgcccacccccagcagctacagatgcgagtgcaacgtgggctacacccaggacgtgagaggcgagtgcatcgacgtggacgagtgcaccagcagcccctgccaccacggcgactgcgtgaacatccccggcacctaccactgcagatgctaccccggcttccaggccacccccaccagacaggcctgcgtggacgtggacgagtgcatcgtgagcggcggcctgtgccacctgggcagatgcgtgaacaccgagggcagcttccagtgcgtgtgcaacgccggcttcgagctgagccccgacggcaagaactgcgtggaccacaacgagtgcgccaccagcaccatgtgcgtgaacggcgtgtgcctgaacgaggacggcagcttcagctgcctgtgcaagcccggcttcctgctggcccccggcggccactactgcatggacatcgacgagtgccagacccccggcatctgcgtgaacggccactgcaccaacaccgagggcagcttcagatgccagtgcctgggcggcctggccgtgggcaccgacggcagagtgtgcgtggacacccacgtgagaagcacctgctacggcgccatcgagaagggcagctgcgccagacccttccccggcaccgtgaccaagagcgagtgctgctgcgccaaccccgaccacggcttcggcgagccctgccagctgtgccccgccaaggacagcgccgagttccaggccctgtgcagcagcggcctgggcatcaccaccgacggcagagacatcaacgagtgcgccctggaccccgaggtgtgcgccaacggcgtgtgcgagaacctgagaggcagctacagatgcgtgtgcaacctgggctacgaggccggcgccagcggcaaggactgcaccgacgtggacgagtgcgccctgaacagcctgctgtgcgacaacggctggtgccagaacagccccggcagctacagctgcagctgcccccccggcttccacttctggcaggacaccgagatctgcaaggacgtggacgagtgcctgagcagcccctgcgtgagcggcgtgtgcagaaacctggccggcagctacacctgcaagtgcggccccggcagcagactggaccccagcggcaccttctgcctggacagcaccaagggcacctgctggctgaagatccaggagagcagatgcgaggtgaacctgcagggcgccagcctgagaagcgagtgctgcgccaccctgggcgccgcctggggcagcccctgcgagagatgcgagatcgaccccgcctgcgccagaggcttcgccagaatgaccggcgtgacctgcgacgacgtgaacgagtgcgagagcttccccggcgtgtgccccaacggcagatgcgtgaacaccgccggcagcttcagatgcgagtgccccgagggcctgatgctggacgccagcggcagactgtgcgtggacgtgagactggagccctgcttcctgagatgggacgaggacgagtgcggcgtgaccctgcccggcaagtacagaatggacgtgtgctgctgcagcatcggcgccgtgtggggcgtggagtgcgaggcctgccccgaccccgagagcctggagttcgccagcctgtgccccagaggcctgggcttcgccagcagagacttcctgagcggcagacccttctacaaggacgtgaacgagtgcaaggtgttccccggcctgtgcacccacggcacctgcagaaacaccgtgggcagcttccactgcgcctgcgccggcggcttcgccctggacgcccaggagagaaactgcaccgacatcgacgagtgcagaatcagccccgacctgtgcggccagggcacctgcgtgaacacccccggcagcttcgagtgcgagtgcttccccggctacgagagcggcttcatgctgatgaagaactgcatggacgtggacgagtgcgccagagaccccctgctgtgcagaggcggcacctgcaccaacaccgacggcagctacaagtgccagtgcccccccggccacgagctgaccgccaagggcaccgcctgcgaggacatcgacgagtgcagcctgagcgacggcctgtgcccccacggccagtgcgtgaacgtgatcggcgccttccagtgcagctgccacgccggcttccagagcacccccgacagacagggctgcgtggacatcaacgagtgcagagtgcagaacggcggctgcgacgtgcactgcatcaacaccgagggcagctacagatgcagctgcggccagggctacagcctgatgcccgacggcagagcctgcgccgacgtggacgagtgcgaggagaaccccagagtgtgcgaccagggccactgcaccaacatgcccggcggccacagatgcctgtgctacgacggcttcatggccacccccgacatgagaacctgcgtggacgtggacgagtgcgacctgaacccccacatctgcctgcacggcgactgcgagaacaccaagggcagcttcgtgtgccactgccagctgggctacatggtgagaaagggcgccaccggctgcagcgacgtggacgagtgcgaggtgggcggccacaactgcgacagccacgccagctgcctgaacatccccggcagcttcagctgcagatgcctgcccggctgggtgggcgacggcttcgagtgccacgacctggacgagtgcgtgagccaggagcacagatgcagccccagaggcgactgcctgaacgtgcccggcagctacagatgcacctgcagacagggcttcgccggcgacggcttcttctgcgaggacagagacgagtgcgccgagaacgtggacctgtgcgacaacggccagtgcctgaacgcccccggcggctacagatgcgagtgcgagatgggcttcgaccccaccgaggaccacagagcctgccaggacgtggacgagtgcgcccagggcaacctgtgcgccttcggcagctgcgagaacctgcccggcatgttcagatgcatctgcaacggcggctacgagctggacagaggcggcggcaactgcaccgacatcaacgagtgcgccgaccccgtgaactgcatcaacggcgtgtgcatcaacacccccggcagctacctgtgcagctgcccccaggacttcgagctgaaccccagcggcgtgggctgcgtggacaccagagccggcaactgcttcctggagacccacgacagaggcgacagcggcatcagctgcagcgccgagatcggcgtgggcgtgaccagagccagctgctgctgcagcctgggcagagcctggggcaacccctgcgagctgtgccccatggccaacaccaccgagtacagaaccctgtgccccggcggcgagggcttccagcccaacagaatcaccgtgatcctggaggacatcgacgagtgccaggagctgcccggcctgtgccagggcggcgactgcgtgaacaccttcggcagcttccagtgcgagtgcccccccggctaccacctgagcgagcacaccagaatctgcgaggacatcgacgagtgcagcacccacagcggcatctgcggccccggcacctgctacaacaccctgggcaactacacctgcgtgtgccccgccgagtacctgcaggtgaacggcggcaacaactgcatggacatgagaaagagcgtgtgcttcagacactacaacggcacctgccagaacgagctggccttcaacgtgaccagaaagatgtgctgctgcagctacaacatcggccaggcctggaacagaccctgcgaggcctgccccacccccatcagccccgactaccagatcctgtgcggcaaccaggcccccggcttcctgaccgacatccacaccggcaagcccctggacatcgacgagtgcggcgagatccccgccatctgcgccaacggcatctgcatcaaccagatcggcagcttcagatgcgagtgccccgccggcttcaactacaacagcatcctgctggcctgcgaggacgtggacgagtgcggcagcagagagagcccctgccagcagaacgccgactgcatcaacatccccggcagctacagatgcaagtgcaccagaggctacaagctgagccccggcggcgcctgcgtgggcagaaacgagtgcagagagatccccaacgtgtgcagccacggcgactgcatggacaccgagggcagctacatgtgcctgtgccacagaggcttccaggccagcgccgaccagaccctgtgcatggacatcgacgagtgcgacagacagccctgcggcaacggcacctgcaagaacatcatcggcagctacaactgcctgtgcttccccggcttcgtggtgacccacaacggcgactgcgtggacttcgacgagtgcaccaccctggtgggccaggtgtgcagattcggccactgcctgaacaccgccggcagcttccactgcctgtgccaggacggcttcgagctgaccgccgacggcaagaactgcgtggacaccaacgagtgcctgagcctggccggcacctgcctgcccggcacctgccagaacctggagggcagcttcagatgcatctgcccccccggcttccaggtgcagagcgaccactgcatcgacatcgacgagtgcagcgaggagcccaacctgtgcctgttcggcacctgcaccaacagccccggcagcttccagtgcctgtgcccccccggcttcgtgctgagcgacaacggccacagatgcttcgacaccagacagagcttctgcttcaccagattcgaggccggcaagtgcagcgtgcccaaggccttcaacaccaccaagaccagatgctgctgcagcaagagacccggcgagggctggggcgacccctgcgagctgtgcccccaggagggcagcgccgccttccaggagctgtgccccttcggccacggcgccgtgcccggccccgacgacagcagagaggacgtgaacgagtgcgccgagaaccccggcgtgtgcaccaacggcgtgtgcgtgaacaccgacggcagcttcagatgcgagtgccccttcggctacagcctggacttcaccggcatcaactgcgtggacaccgacgagtgcagcgtgggccacccctgcggccagggcacctgcaccaacgtgatcggcggcttcgagtgcgcctgcgccgacggcttcgagcccggcctgatgatgacctgcgaggacatcgacgagtgcagcctgaaccccctgctgtgcgccttcagatgccacaacaccgagggcagctacctgtgcacctgccccgccggctacaccctgagagaggacggcgccatgtgcagagacgtggacgagtgcgccgacggccagcaggactgccacgccagaggcatggagtgcaagaacctgatcggcaccttcgcctgcgtgtgcccccccggcatgagacccctgcccggcagcggcgagggctgcaccgacgacaacgagtgccacgcccagcccgacctgtgcgtgaacggcagatgcgtgaacaccgccggcagcttcagatgcgactgcgacgagggcttccagcccagccccaccctgaccgagtgccacgacatcagacagggcccctgcttcgccgaggtgctgcagaccatgtgcagaagcctgagcagcagcagcgaggccgtgaccagagccgagtgctgctgcggcggcggcagaggctggggccccagatgcgagctgtgccccctgcccggcaccagcgcctacagaaagctgtgcccccacggcagcggctacaccgccgagggcagagacgtggacgagtgcagaatgctggcccacctgtgcgcccacggcgagtgcatcaacagcctgggcagcttcagatgccactgccaggccggctacacccccgacgccaccgccaccacctgcctggacatggacgagtgcagccaggtgcccaagccctgcaccttcctgtgcaagaacaccaagggcagcttcctgtgcagctgccccagaggctacctgctggaggaggacggcagaacctgcaaggacctggacgagtgcaccagcagacagcacaactgccagttcctgtgcgtgaacaccgtgggcgccttcacctgcagatgcccccccggcttcacccagcaccaccaggcctgcttcgacaacgacgagtgcagcgcccagcccggcccctgcggcgcccacggccactgccacaacacccccggcagcttcagatgcgagtgccaccagggcttcaccctggtgagcagcggccacggctgcgaggacgtgaacgagtgcgacggcccccacagatgccagcacggctgccagaaccagctgggcggctacagatgcagctgcccccagggcttcacccagcacagccagtgggcccagtgcgtggacgagaacgagtgcgccctgagcccccccacctgcggcagcgccagctgcagaaacaccctgggcggcttcagatgcgtgtgccccagcggcttcgacttcgaccaggccctgggcggctgccaggaggtggacgagtgcgccggcagaagaggcccctgcagctacagctgcgccaacacccccggcggcttcctgtgcggctgcccccagggctacttcagagccggccagggccactgcgtgagcggcctgggcttcagccccggcccccaggacacccccgacaaggaggagctgctgagcagcgaggcctgctacgagtgcaagatcaacggcctgagccccagagacagacccagaagaagcgcccacagagaccaccaggtgaacctggccaccctggacagcgaggccctgctgaccctgggcctgaacctgagccacctgggcagagccgagagaatcctggagctgagacccgccctggagggcctggagggcagaatcagatacgtgatcgtgagaggcaacgagcagggcttcttcagaatgcaccacctgagaggcgtgagcagcctgcagctgggcagaagaagacccggccccggcacctacagactggaggtggtgagccacatggccggcccctggggcgtgcagcccgagggccagcccggcccctggggccaggccctgagactgaaggtgcagctgcagctgctgtag

SEQ ID NO: 3615 - DNA, 303 bp, synthetic construct
  misc_feature 1..303: note = source = /note="Description of Artificial Sequence: Synthetic coding sequence"
  source 1..303: mol_type = other DNA
atggagaccagacaggtgagcagaagccccagagtgagactgctgctgctgctgctgctgctgctggtggtgccctggggcgtgagaaccgccagcggcgtggccctgccccccgtgggcgtgctgagcctgagaccccccggcagagcctgggccgaccccgccacccccagacccagaagaagcctggccctggccgacgacgccgccttcagagagagagccagactgctggccgccctggagagaagacactggctgaacagctacatgcacaagctgctggtgctggacgccccctag

SEQ ID NO: 3616 - DNA, 1404 bp, synthetic construct
  misc_feature 1..1404: note = source = /note="Description of Artificial Sequence: Synthetic coding sequence"
  source 1..1404: mol_type = other DNA
atgtggagatgccccctgggcctgctgctgctgctgcccctggccggccacctggccctgggcgcccagcagggcagaggcagaagagagctggcccccggcctgcacctgagaggcatcagagacgccggcggcagatactgccaggagcaggacctgtgctgcagaggcagagccgacgactgcgccctgccctacctgggcgccatctgctactgcgacctgttctgcaacagaaccgtgagcgactgctgccccgacttctgggacttctgcctgggcgtgcccccccccttcccccccatccagggctgcatgcacggcggcagaatctaccccgtgctgggcacctactgggacaactgcaacagatgcacctgccaggagaacagacagtggcagtgcgaccaggagccctgcctggtggaccccgacatgatcaaggccatcaaccagggcaactacggctggcaggccggcaaccacagcgccttctggggcatgaccctggacgagggcatcagatacagactgggcaccatcagacccagcagcagcgtgatgaacatgcacgagatctacaccgtgctgaaccccggcgaggtgctgcccaccgccttcgaggccagcgagaagtggcccaacctgatccacgagcccctggaccagggcaactgcgccggcagctgggccttcagcaccgccgccgtggccagcgacagagtgagcatccacagcctgggccacatgacccccgtgctgagcccccagaacctgctgagctgcgacacccaccagcagcagggctgcagaggcggcagactggacggcgcctggtggttcctgagaagaagaggcgtggtgagcgaccactgctaccccttcagcggcagagagagagacgaggccggccccgcccccccctgcatgatgcacagcagagccatgggcagaggcaagagacaggccaccgcccactgccccaacagctacgtgaacaacaacgacatctaccaggtgacccccgtgtacagactgggcagcaacgacaaggagatcatgaaggagctgatggagaacggccccgtgcaggccctgatggaggtgcacgaggacttcttcctgtacaagggcggcatctacagccacacccccgtgagcctgggcagacccgagagatacagaagacacggcacccacagcgtgaagatcaccggctggggcgaggagaccctgcccgacggcagaaccctgaagtactggaccgccgccaacagctggggccccgcctggggcgagagaggccacttcagaatcgtgagaggcgtgaacgagtgcgacatcgagagcttcgtgctgggcgtgtggggcagagtgggcatggaggacatgggccaccactag

SEQ ID NO: 3617 - DNA, 2205 bp, synthetic construct
  misc_feature 1..2205: note = source = /note="Description of Artificial Sequence: Synthetic coding sequence"
  source 1..2205: mol_type = other DNA
atgttctacgtgtgcagcagctgcgtgttcctgtgcggcagcaacttccccaacttccccttccaggtggccagcgccaagagcgcccccgagatccccaccatcgaccaggcctacagcaagctgagcaacagcatcaccgtggagtgggccaccgtgcccggcgccaccagctacctgctgaccgccgaggacggcgacaccgtgatcgagaccaccgtggccaacagccccggcaccgtgaccggcctgaaggccgccacctggtacgagatcaccatcagaagcatcagcgccgccggcagaagccaggccagcccccccaagcaggccaagaccgtgctggccgcccccatcctggaggtgagcagccccagcagcgacagcatcctggtgcagtgggaggccgtgtacatggccatcgccttcagcgtgagcatcatgagagccaacggcctgggcagcatctggaaggagaacaccaccaacaccagcctgaccttcaccagcctggaggccggcaccctgtacaccatcaaggcctacgcctggaacgccaacagaatccccggcgacgacagcacctgcaaccagagaaccagccccagagcccccgccaacatccaggtgagcttcgacagcggcgccctgaaggccagcttcagctgggccagagccgagggcgccttcaactacaccgtgatggccctgagcgacagcagcgagctgacctgcagcaccaccttcagcagctgcaccatcagcagcctgcagtgcggcaccgagtacctgatcagcgtgctggccagcaacgacgccggcagcagcaagagcagcagcgccatgaccctgaagaccgtggcctgcgcccccggcagagtgaccatccaggaggacccccccggccacctgagcgtggcctggagcagcgtggacctgggcgactactacgtggtgttcgtgaagagcgacgacggcctggaggtgcactgcaacaccagcctgacccagtgcaacttcctgagcgagtgcggcttcacctacttcatcagcgtgttcgtgtacaacaaggccggccagagccccctgggcgacatcttcaactacaccaccgccccctgctgccccagcgacatcaaccccgtgctggtgagcagcgacagagtggagatcgtgtggagccccgtgagaggcgccgagctgtacgagaccaaggccgtggacggctacaacatggtggagtgcaacgacaccacccccgcctgcaccctgagcgccctggagtgcgacaccaagtacaacatcaccgtgtacagcttcaacgaggtgagaggcagcaacatgagctgcaccccccagttcatcaccaccgccccctgcagccccgagatcaagaacgtgagcagagacgccttcagcatgatcaacgtgcactggagaagcaccaacgacgacgccacctacaccgtgaccgcccagggcgagaagggcctgtaccagtgcagcagcaccggcgagagctgcaccatgagaggcctgccctgcggcagcgtgttcagcgtgaccgccgtggccgagacccaggccggcagaagcctgcccagctacagcgtgcccctggagaccgtgccctgctgccccaccggcctgaccgtgacccagatcacccagagcgtgatcaacgtgagctggaccatcggcagagtggcccagacccacgtggccgtgctggagagccacaccggccagagcaagtgccacacccaccagaaccactgcctgctgggctgcatcacctgcggcatcaactacaccgtgaccctgaaggccatcagcgccaccggcctgaccgccgactgcagctaccagagctacttcagcggcgcctgctgccccctgggcgtgaagctgtacagactgggccccaacggcatcagaatctactggcaggccagcagaggcagcgccaactacagcaccgacctgtacggcagcaagggcatcttcacctgcacccccagcgccggcctgagcttctgcgacgtgaccgagatcccctgcggcgacgtgtacaccgtgatggtgagccccgtggccaagaccggcctgaagctgaccttctgccccaagaagatctacagcgtgacctgcagcggcagcaccctgggcatggtgatctacagaggcaagagaaacgaggagtag

SEQ ID NO: 3618 - DNA, 1098 bp, synthetic construct
  misc_feature 1..1098: note = source = /note="Description of Artificial Sequence: Synthetic coding sequence"
  source 1..1098: mol_type = other DNA
atgctggacggcagccccctggccagatggctggccgccgccttcggcctgaccctgctgctggccgccctgagacccagcgccgcctacttcggcctgaccggcagcgagcccctgaccatcctgcccctgaccctggagcccgaggccgccgcccaggcccactacaaggcctgcgacagactgaagctggagagaaagcagagaagaatgtgcagaagagaccccggcgtggccgagaccctggtggaggccgtgagcatgagcgccctggagtgccagttccagttcagattcgagagatggaactgcaccctggagggcagatacagagccagcctgctgaagagaggcttcaaggagaccgccttcctgtacgccatcagcagcgccggcctgacccacgccctggccaaggcctgcagcgccggcagaatggagagatgcacctgcgacgaggcccccgacctggagaacagagaggcctggcagtggggcggctgcggcgacaacctgaagtacagcagcaagttcgtgaaggagttcctgggcagaagaagcagcaaggacctgagagccagagtggacttccacaacaacctggtgggcgtgaaggtgatcaaggccggcgtggagaccacctgcaagtgccacggcgtgagcggcagctgcaccgtgagaacctgctggagacagctggcccccttccacgaggtgggcaagcacctgaagcacaagtacgagaccgccctgaaggtgggcagcaccaccaacgaggccgccggcgaggccggcgccatcagcccccccagaggcagagccagcggcgccggcggcagcgaccccctgcccagaacccccgagctggtgcacctggacgacagccccagcttctgcctggccggcagattcagccccggcaccgccggcagaagatgccacagagagaagaactgcgagagcatctgctgcggcagaggccacaacacccagagcagagtggtgaccagaccctgccagtgccaggtgagatggtgctgctacgtggagtgcagacagtgcacccagagagaggaggtgtacacctgcaagggctag

SEQ ID NO: 3619 - DNA, 795 bp, synthetic construct
  misc_feature 1..795: note = source = /note="Description of Artificial Sequence: Synthetic coding sequence"
  source 1..795: mol_type = other DNA
atgagactgagacccctgcccctggtggtggtgcccggcctgctgcagctgctgttctgcgacagcaaggaggtggtgcacgccaccgagggcctggactgggaggacaaggacgcccccggcaccctggtgggcaacgtggtgcacagcagaatcatcagccccctgagactgttcgtgaagcagagccccgtgcccaagcccggccccatggcctacgccgacagcatggagaacttctgggactggctggccaacatcaccgagatccaggagcccctggccagaaccaagagaagacccatcgtgaagaccggcaagttcaagaagatgttcggctggggcgacttccacagcaacatcaagaccgtgaagctgaacctgctgatcaccggcaagatcgtggaccacggcaacggcaccttcagcgtgtacttcagacacaacagcaccggcctgggcaacgtgagcgtgagcctggtgccccccagcaaggtggtggagttcgaggtgagcccccagagcaccctggagaccaaggagagcaagagcttcaactgcagaatcgagtacgagaagaccgacagagccaagaagaccgccctgtgcaacttcgaccccagcaagatctgctaccaggagcagacccagagccacgtgagctggctgtgcagcaagcccttcaaggtgatctgcatctacatcgccttctacagcgtggactacaagctggtgcagaaggtgtgccccgactacaactaccacagcgagaccccctacctgagcagcggctag

SEQ ID NO: 3620 - DNA, 1125 bp, synthetic construct
  misc_feature 1..1125: note = source = /note="Description of Artificial Sequence: Synthetic coding sequence"
  source 1..1125: mol_type = other DNA
atgaagcccctgctggagaccctgtacctgctgggcatgctggtgcccggcggcctgggctacgacagaagcctggcccagcacagacaggagatcgtggacaagagcgtgagcccctggagcctggagacctacagctacaacatctaccaccccatgggcgagatctacgagtggatgagagagatcagcgagaagtacaaggaggtggtgacccagcacttcctgggcgtgacctacgagacccaccccatgtactacctgaagatcagccagcccagcggcaaccccaagaagatcatctggatggactgcggcatccacgccagagagtggatcgcccccgccttctgccagtggttcgtgaaggagatcctgcagaaccacaaggacaacagcagcatcagaaagctgctgagaaacctggacttctacgtgctgcccgtgctgaacatcgacggctacatctacacctggaccaccgacagactgtggagaaagagcagaagcccccacaacaacggcacctgcttcggcaccgacctgaacagaaacttcaacgccagctggtgcagcatcggcgccagcagaaactgccaggaccagaccttctgcggcaccggccccgtgagcgagcccgagaccaaggccgtggccagcttcatcgagagcaagaaggacgacatcctgtgcttcctgaccatgcacagctacggccagctgatcctgaccccctacggctacaccaagaacaagagcagcaaccaccccgagatgatccaggtgggccagaaggccgccaacgccctgaaggccaagtacggcaccaactacagagtgggcagcagcgccgacatcctgtacgccagcagcggcagcagcagagactgggccagagacatcggcatccccttcagctacaccttcgagctgagagacagcggcacctacggcttcgtgctgcccgaggcccagatccagcccacctgcgaggagaccatggaggccgtgctgagcgtgctggacgacgtgtacgccaagcactggcacagcgacagcgccggcagagtgaccagcgccaccatgctgctgggcctgctggtgagctgcatgagcctgctgtag

SEQ ID NO: 3621 - DNA, 1728 bp, synthetic construct
  misc_feature 1..1728: note = source = /note="Description of Artificial Sequence: Synthetic coding sequence"
  source 1..1728: mol_type = other DNA
atggccagctggctgagaagaaagctgagaggcaagagaagacccgtgatcgccttctgcctgctgatgatcctgagcgccatggccgtgaccagattccccccccagagacccagcgccggccccgaccccggccccatggagccccagggcgtgaccggcgcccccgccacccacatcagacaggccctgagcagcagcagaagacagagagccagaaacatgggcttctggagaagcagagccctgcccagaaacagcatcctggtgtgcgccgaggagcagggccacagagccagagtggacagaagcagagagagccccggcggcgacctgagacaccccggcagagtgagaagagacatcaccctgagcggccaccccagactgagcacccagcacgtggtgctgctgagagaggacgaggtgggcgaccccggcaccaaggacctgggccacccccagcacggcagccccatccaggagacccagagcgaggtggtgaccctggtgagccccctgcccggcagcgacatggccgccctgcccgcctggagagccaccagcggcctgaccctgtggccccacaccgccgagggcagagacctgctgggcgccgagaacagagccctgaccggcggccagcaggccgaggaccccaccctggccagcggcgcccaccagtggcccggcagcgtggagaagctgcagggcagcgtgtggtgcgacgccgagaccctgctgagcagcagcagaaccggcggccaggcccccccctggctgaccgaccacgacgtgcagatgctgagactgctggcccagggcgaggtggtggacaaggccagagtgcccgcccacggccaggtgctgcaggtgggcttcagcaccgaggccgccctgcaggacctgagcagccccagactgagccagctgtgcagccagggcctgtgcggcctgatcaagagacccggcgacctgcccgaggtgctgagcttccacgtggacagagtgctgggcctgagaagaagcctgcccgccgtggccagaagattccacagccccctgctgccctacagatacaccgacggcggcgccagacccgtgatctggtgggcccccgacgtgcagcacctgagcgaccccgacgaggaccagaacagcctggccctgggctggctgcagtaccaggccctgctggcccacagctgcaactggcccggccaggccccctgccccggcatccaccacaccgagtgggccagactggccctgttcgacttcctgctgcaggtgcacgacagactggacagatactgctgcggcttcgagcccgagcccagcgacccctgcgtggaggagagactgagagagaagtgccagaaccccgccgagctgagactggtgcacatcctggtgagaagcagcgaccccagccacctggtgtacatcgacaacgccggcaacctgcagcaccccgaggacaagctgaacttcagactgctggagggcatcgacggcttccccgagagcgccgtgaaggtgctggccagcggctgcctgcagaacatgctgctgaagagcctgcagatggaccccgtgttctgggagagccagggcggcgcccagggcctgaagcaggtgctgcagaccctggagcagagaggccaggtgctgctgggccacatccagaagcacaacctgaccctgttcagagacgaggacccctag

SEQ ID NO: 3622 - DNA, 1680 bp, synthetic construct
  misc_feature 1..1680: note = source = /note="Description of Artificial Sequence: Synthetic coding sequence"
  source 1..1680: mol_type = other DNA
atgtggaccaacttcttcaagctgagactgttctgctgcctgctggccgtgctgatggtggtggtgctggtgatcaacgtgacccaggtggagtacctggaccacgagaccgtgagcgccaccttcatcgacagcagcggccagttcgtgagcagccaggtgaccggcatcagcagaaacccctactgcggctacgaccagcagaccctgagcagccaggagagaatggaggaggacagcctgctggccgccctgcacagacaggtgcccgacgtgggccccgtgcccttcgtgaagagcaccgaccccagcagcagctacttcgtgatcctgaacagcgccgccttcttcaaggtgggcagccagctggaggtgctggtgcacgtgcaggacttccagagaaagcccaagaagtacggcggcgactacctgcaggccagaatccacagcctgaagctgcaggccggcgccgtgggcagagtggtggactaccagaacggcttctacaaggtgttcttcaccctgctgtggcccggcaaggtgaaggtgagcgtgagcctggtgcaccccagcgagggcatcagagtgctgcagagactgcaggaggacaagcccgacagagtgtacttcaagagcctgttcagaagcggcagaatcagcgagaccaccgagtgcaacgtgtgcctgcccggcaacctgcccctgtgcaacttcaccgacctgtacaccggcgagccctggttctgcttcaagcccaagaagctgccctgcagcagcagaatcacccacttcaagggcggctacctgaagggcctgctgaccgccgccgagagcgccttcttccagagcggcgtgaacatcaagatgcccgtgaacagcagcggccccgactgggtgaccgtgatccccagaagaatcaaggagaccaacagcctggagctgagccagggcagcggcaccttccccagcggctactactacaaggaccagtggagacccagaaagttcaagatgagacagttcaacgaccccgacaacatcaccgagtgcctgcagagaaaggtggtgcacctgttcggcgacagcaccatcagacagtggttcgagtacctgaccaccttcgtgcccgacctggtggagttcaacctgggcagccccaagaacgtgggccccttcctggccgtggaccagaagcacaacatcctgctgaagtacagatgccacggcccccccatcagattcaccaccgtgttcagcaacgagctgcactacgtggccaacgagctgaacggcatcgtgggcggcaagaacaccgtggtggccatcgccgtgtggagccacttcagcaccttccccctggaggtgtacatcagaagactgagaaacatcagaagagccgtggtgagactgctggacagaagccccaagaccgtggtggtgatcagaaccgccaacgcccaggagctgggccccgaggtgagcctgttcaacagcgactggtacaacttccagctggacaccatcctgagaagaatgttcagcggcgtgggcgtgtacctggtggacgcctgggagatgaccctggcccactacctgccccacaagctgcaccccgacgaggtgatcgtgaagaaccagctggacatgttcctgagcttcgtgtgccccctggagacctag

SEQ ID NO: 3623 - DNA, 3624 bp, synthetic construct
  misc_feature 1..3624: note = source = /note="Description of Artificial Sequence: Synthetic coding sequence"
  source 1..3624: mol_type = other DNA
atgagactgacccacatctgctgctgctgcctgctgtaccagctgggcttcctgagcaacggcatcgtgagcgagctgcagttcgcccccgacagagaggagtgggaggtggtgttccccgccctgtggagaagagagcccgtggaccccgccggcggcagcggcggcagcgccgaccccggctgggtgagaggcgtgggcggcggcggcagcgccagagcccaggccgccggcagcagcagagaggtgagaagcgtggcccccgtgcccctggaggagcccgtggagggcagaagcgagagcagactgagaccccccccccccagcgagggcgaggaggacgaggagctggagagccaggagctgcccagaggcagcagcggcgccgccgccctgagccccggcgcccccgccagctggcagccccccccccccccccagcccccccccagccccccccccgcccagcacgccgagcccgacggcgacgaggtgctgctgagaatccccgccttcagcagagacctgtacctgctgctgagaagagacggcagattcctggcccccagattcgccgtggagcagagacccaaccccggccccggccccaccggcgccgccagcgccccccagccccccgccccccccgacgccggctgcttctacaccggcgccgtgctgagacaccccggcagcctggccagcttcagcacctgcggcggcggcctgatgggcttcatccagctgaacgaggacttcatcttcatcgagcccctgaacgacaccatggccatcaccggccacccccacagagtgtacagacagaagagaagcatggaggagaaggtgaccgagaagagcgccctgcacagccactactgcggcatcatcagcgacaagggcagacccagaagcagaaagatcgccgagagcggcagaggcaagagatacagctacaagctgccccaggagtacaacatcgagaccgtggtggtggccgaccccgccatggtgagctaccacggcgccgacgccgccagaagattcatcctgaccatcctgaacatggtgttcaacctgttccagcacaagagcctgagcgtgcaggtgaacctgagagtgatcaagctgatcctgctgcacgagaccccccccgagctgtacatcggccaccacggcgagaagatgctggagagcttctgcaagtggcagcacgaggagttcggcaagaagaacgacatccacctggagatgagcaccaactggggcgaggacatgaccagcgtggacgccgccatcctgatcaccagaaaggacttctgcgtgcacaaggacgagccctgcgacaccgtgggcatcgcctacctgagcggcatgtgcagcgagaagagaaagtgcatcatcgccgaggacaacggcctgaacctggccttcaccatcgcccacgagatgggccacaacatgggcatcaaccacgacaacgaccaccccagctgcgccgacggcctgcacatcatgagcggcgagtggatcaagggccagaacctgggcgacgtgagctggagcagatgcagcaaggaggacctggagagattcctgagaagcaaggccagcaactgcctgctgcagaccaacccccagagcgtgaacagcgtgatggtgcccagcaagctgcccggcatgacctacaccgccgacgagcagtgccagatcctgttcggccccctggccagcttctgccaggagatgcagcacgtgatctgcaccggcctgtggtgcaaggtggagggcgagaaggagtgcagaaccaagctggacccccccatggacggcaccgactgcgacctgggcaagtggtgcaaggccggcgagtgcaccagcagaaccagcgcccccgagcacctggccggcgagtggagcctgtggagcccctgcagcagaacctgcagcgccggcatcagcagcagagagagaaagtgccccggcctggacagcgaggccagagactgcaacggccccagaaagcagtacagaatctgcgagaaccccccctgccccgccggcctgcccggcttcagagactggcagtgccaggcctacagcgtgagaaccagcagccccaagcacatcctgcagtggcaggccgtgctggacgaggagaagccctgcgccctgttctgcagccccgtgggcaaggagcagcccatcctgctgagcgagaaggtgatggacggcaccagctgcggctaccagggcctggacatctgcgccaacggcagatgccagaaggtgggctgcgacggcctgctgggcagcctggccagagaggaccactgcggcgtgtgcaacggcaacggcaagagctgcaagatcatcaagggcgacttcaaccacaccagaggcgccggctacgtggaggtgctggtgatccccgccggcgccagaagaatcaaggtggtggaggagaagcccgcccacagctacctggccctgagagacgccggcaagcagagcatcaacagcgactggaagatcgagcacagcggcgccttcaacctggccggcaccaccgtgcactacgtgagaagaggcctgtgggagaagatcagcgccaagggccccaccaccgcccccctgcacctgctggtgctgctgttccaggaccagaactacggcctgcactacgagtacaccatccccagcgaccccctgcccgagaaccagagcagcaaggcccccgagcccctgttcatgtggacccacaccagctgggaggactgcgacgccacctgcggcggcggcgagagaaagaccaccgtgagctgcaccaagatcatgagcaagaacatcagcatcgtggacaacgagaagtgcaagtacctgaccaagcccgagccccagatcagaaagtgcaacgagcagccctgccagaccagatggatgatgaccgagtggaccccctgcagcagaacctgcggcaagggcatgcagagcagacaggtggcctgcacccagcagctgagcaacggcaccctgatcagagccagagagagagactgcatcggccccaagcccgccagcgcccagagatgcgagggccaggactgcatgaccgtgtgggaggccggcgtgtggagcgagtgcagcgtgaagtgcggcaagggcatcagacacagaaccgtgagatgcaccaaccccagaaagaagtgcgtgctgagcaccagacccagagaggccgaggactgcgaggactacagcaagtgctacgtgtggagaatgggcgactggagcaagtgcagcatcacctgcggcaagggcatgcagagcagagtgatccagtgcatgcacaagatcaccggcagacacggcaacgagtgcttcagcagcgagaagcccgccgcctacagaccctgccacctgcagccctgcaacgagaagatcaacgtgaacaccatcaccagccccagactggccgccctgaccttcaagtgcctgggcgaccagtggcccgtgtactgcagagtgatcagagagaagaacctgtgccaggacatgagatggtaccagagatgctgcgagacctgcagagacttctacgcccagaagctgcagcagaagagctag

SEQ ID NO: 3624 - DNA, 258 bp, synthetic construct
  misc_feature 1..258: note = source = /note="Description of Artificial Sequence: Synthetic coding sequence"
  source 1..258: mol_type = other DNA
atgaagatcaccggcggcctgctgctgctgtgcaccgtggtgtacttctgcagcagcagcgaggccgccagcctgagccccaagaaggtggactgcagcatctacaagaagtaccccgtggtggccatcccctgccccatcacctacctgcccgtgtgcggcagcgactacatcacctacggcaacgagtgccacctgtgcaccgagagcctgaagagcaacggcagagtgcagttcctgcacgacggcagctgctag

SEQ ID NO: 3625 - DNA, 2982 bp, synthetic construct
  misc_feature 1..2982: note = source = /note="Description of Artificial Sequence: Synthetic coding sequence"
  source 1..2982: mol_type = other DNA
atgggcagcggcagagtgcccggcctgtgcctgctggtgctgctggtgcacgccagagccgcccagtacagcaaggccgcccaggacgtggacgagtgcgtggagggcaccgacaactgccacatcgacgccatctgccagaacacccccagaagctacaagtgcatctgcaagagcggctacaccggcgacggcaagcactgcaaggacgtggacgagtgcgagagagaggacaacgccggctgcgtgcacgactgcgtgaacatccccggcaactacagatgcacctgctacgacggcttccacctggcccacgacggccacaactgcctggacgtggacgagtgcgccgagggcaacggcggctgccagcagagctgcgtgaacatgatgggcagctacgagtgccactgcagagagggcttcttcctgagcgacaaccagcacacctgcatccagagacccgaggagggcatgaactgcatgaacaagaaccacggctgcgcccacatctgcagagagacccccaagggcggcatcgcctgcgagtgcagacccggcttcgagctgaccaagaaccagagagactgcaagctgacctgcaactacggcaacggcggctgccagcacacctgcgacgacaccgagcagggccccagatgcggctgccacatcaagttcgtgctgcacaccgacggcaagacctgcatcgagacctgcgccgtgaacaacggcggctgcgacagcaagtgccacgacgccgccaccggcgtgcactgcacctgccccgtgggcttcatgctgcagcccgacagaaagacctgcaaggacatcgacgagtgcagactgaacaacggcggctgcgaccacatctgcagaaacaccgtgggcagcttcgagtgcagctgcaagaagggctacaagctgctgatcaacgagagaaactgccaggacatcgacgagtgcagcttcgacagaacctgcgaccacatctgcgtgaacacccccggcagcttccagtgcctgtgccacagaggctacctgctgtacggcatcacccactgcggcgacgtggacgagtgcagcatcaacagaggcggctgcagattcggctgcatcaacacccccggcagctaccagtgcacctgccccgccggccagggcagactgcactggaacggcaaggactgcaccgagcccctgaagtgccagggcagccccggcgccagcaaggccatgctgagctgcaacagaagcggcaagaaggacacctgcgccctgacctgccccagcagagccagattcctgcccgagagcgagaacggcttcaccgtgagctgcggcacccccagccccagagccgcccccgccagagccggccacaacggcaacagcaccaacagcaaccactgccacgaggccgccgtgctgagcatcaagcagagagccagcttcaagatcaaggacgccaagtgcagactgcacctgagaaacaagggcaagaccgaggaggccggcagaatcaccggccccggcggcgccccctgcagcgagtgccaggtgaccttcatccacctgaagtgcgacagcagcagaaagggcaagggcagaagagccagaaccccccccggcaaggaggtgaccagactgaccctggagctggaggccgaggtgagagccgaggagaccaccgccagctgcggcctgccctgcctgagacagagaatggagagaagactgaagggcagcctgaagatgctgagaaagagcatcaaccaggacagattcctgctgagactggccggcctggactacgagctggcccacaagcccggcctggtggccggcgagagagccgagcccatggagagctgcagacccggccagcacagagccggcaccaagtgcgtgagctgcccccagggcacctactaccacggccagaccgagcagtgcgtgccctgccccgccggcaccttccaggagagagagggccagctgagctgcgacctgtgccccggcagcgacgcccacggccccctgggcgccaccaacgtgaccacctgcgccggccagtgcccccccggccagcacagcgtggacggcttcaagccctgccagccctgccccagaggcacctaccagcccgaggccggcagaaccctgtgcttcccctgcggcggcggcctgaccaccaagcacgagggcgccatcagcttccaggactgcgacaccaaggtgcagtgcagccccggccactactacaacaccagcatccacagatgcatcagatgcgccatgggcagctaccagcccgacttcagacagaacttctgcagcagatgccccggcaacaccagcaccgacttcgacggcagcaccagcgtggcccagtgcaagaacagacagtgcggcggcgagctgggcgagttcaccggctacatcgagagccccaactaccccggcaactaccccgccggcgtggagtgcatctggaacatcaaccccccccccaagagaaagatcctgatcgtggtgcccgagatcttcctgcccagcgaggacgagtgcggcgacgtgctggtgatgagaaagaacagcagccccagcagcatcaccacctacgagacctgccagacctacgagagacccatcgccttcaccgccagaagcagaaagctgtggatcaacttcaagaccagcgaggccaacagcgccagaggcttccagatcccctacgtgacctacgacgaggactacgagcagctggtggaggacatcgtgagagacggcagactgtacgccagcgagaaccaccaggagatcctgaaggacaagaagctgatcaaggccttcttcgaggtgctggcccacccccagaactacttcaagtacaccgagaagcacaaggagatgctgcccaagagcttcatcaagctgctgagaagcaaggtgagcagcttcctgagaccctacaagtag

SEQ ID NO: 3626 - DNA, 4773 bp, synthetic construct
  misc_feature 1..4773: note = source = /note="Description of Artificial Sequence: Synthetic coding sequence"
  source 1..4773: mol_type = other DNA
atgcccggcggcgcctgcgtgctggtgatcgccctgatgttcctggcctggggcgaggcccaggagtgcagccccggcggccaccagttcctgagaagcccctacagaagcgtgagattcgacagctggcacctgcagcagagcgccgtgcaggacctgatctgcgaccacagcctgagccccggctggtacagattcctgatcctggacagacccgccgagatgcccaccaagtgcgtggagatgaaccactgcggcacccaggcccccatctggctgagcctgagagacagcgagaccctgcccagccccggcgagatcaagcagctgaccgcctgcgccacctggcagttcctgttcagcaccaccaaggactgctgcctgttccagatccccgtgagcgtgagaaactgcggcaacttcagcgtgtacctgctgcagcccacccagggctgcatgggctactgcgccgaggccatcagcgacgccagactgcacccctgcggcagcgacgagaccgagaccggcggcgactgcgtgagacagctggccgccagcctgccccccccccccgccggcagacccgaggtgctggtggagctgatcgagagcagactgttctgcagatgcagcttcgacgtgcccgccaccaagaacagcgtgggcttccacatcgcctggagcagactgagcagccaggaggtgaaggaggagctgacccaggagaccaccgtgcaggccttcagcctgctggagctggacggcatcaacctgagactgggcgacagaatcttctgcagcgccagcgtgttcttcctggagaacccccacgtgcagagcgtggccatcgagagccaggagttcttcgccggcttcaagctgcagcccgagctgagcaccatcagcgaggacggcaaggagtactacctgagaatcgagagcaccgtgcccatcatctgcagcgagttcagcgagctggaccaggagtgcaagatcagcctgaagctgaagaccatcggccagggcagagagcacctgggcctgaacctggccctgagcagctgccacgtggacctgctgcagaccagcagctgcgccaacggcacctgcagccacaccttcgtgtactacaccgccgtgaccgacttcagcagagacggcgacagagtgagcaacatcgtggtgcagcccatcgtgaacgaggacttcctgtggaacaactacatccccgacagcatccagatcaaggtgaaggacgtgcccaccgcctactgctacaccttcaccgacccccacatcatcaccttcgacggcagagtgtacgacaacttcaagaccggcaccttcgtgctgtacaagagcatgagcagagacttcgaggtgcacgtgagacagtgggactgcagaagcctgcactaccccgtgagctgcaactgcggcttcgtggcccaggagggcggcgacatcgtgaccttcgacatgtgcaacggccagctgagagagagccagccctacctgttcatcaagagccaggacgtgaccagaaacatcaagatcagcgagagctacctgggcagaaaggtgaccatctggttcagcagcggcgccttcatcagagccgacctgggcgagtggggcatgagcctgaccatcagagcccccagcgtggactacagaaacaccctgggcctgtgcggcaccttcgacgagaaccccgagaacgacttccacgacaagaacggcatgcagatcgaccagaacttcaacaactacgtggccttcatcaacgagtggagaatcctgcccggcaagagcatgagcgacaccctgcccgtgagcatgaccagccccggcaagcccagctactgcagctgcagcctggacaccgccgcctaccccagcagcgaggacctggacagcgtgagcagaagcgagatcgccctgggctgcaaggacctgaaccacgtgagcctgagcagcctgatccccgagctggacgtgaccagcgagtacatcaacagcgacaccctggtgagagagatcaacaagcacaccagccccgaggagtacaacctgaacctgttcctgcaggagaagaagcacatcaacctgaccaagctgggcctgaacgtgcagaagcaccccggcaacgagaaggaggacagcctgcagtacctggccaacaagaagtacacccagggcagaggcagccacagccaggagatgagatacaacagacagaacagatggaagagacagaacttccacgagttcccccccctgttcgccttccccagcctgagccagaccgacctggaggagctgacctacttcttccccgaggaccacgccgaggacgtgcagcaggagttcttccccagctggcccacccccagcggcctgaccgagtacagcaccctgaccctgtgccaggagaccctggccaacagcagcatcggcagactgtgcctggccttcctgggcaagagactggacagcgtgatcgagatgtgcgtgaaggacgtgctgctgaaggacgacctgagctgggccgaggccggcgtggccctgctggagaacgagtgcgagaagagaatcgtggaggagggcaagtacaacaccgaggagtacggcaccagcatcgaggacatcctgagcgtgctgaagtgccccaacctgtgcagcggcaacggccagtgcatggagtggggctgcgcctgcagccccagcttcagcagctacgactgcagcgacagctacgacaaggcccccgagatcaccgagctgggcaacgccggcttctgcgacgtgcagaagtacaactgcatgatggtgagagtgttcggcaagggcttcaaggagctgcccagcatcaagtgcgaggtgaccaagctgcagtacaacagcagcgagtggatgcccggcgagcccatctacacccagaccgtgttccacaacagcagagccgtggactgccagctgcccaccgacgtgcagcagttcgacaccatggacctggtgggcggcaagcccaccggcaagtggcagctgaaggtgagcaacgacggctacaagttcagcaaccccaagatcaccgtgatctacgacggcgcctgccaggtgtgcggcctgtacaagaacgacagctgcaccatcaaggagaacgtgtgcatcatcgacggcctgtgctacgtggagggcgacaagaaccccaccagcccctgcctgatctgcagacccaagatcagcagattcacctggagcttcctggagaacaaccagccccccgtgatccaggccctgcaggacaagctgcagaccttctacggcgagaacttcgagtaccagttcgtggccttcgaccccgagggcagcgacatccacttcaccctggacagcggccccgagggcgccagcgtgagcagcgccggcctgttcatgtggaagaccgacctgctgaccacccagcagatcaccgtgagactgaacgacgactgcgacgccgagaccagagtgaccatcgaggtgaccgtgaagagctgcgactgcctgaacggcggcagctgcgtgagcgacagaaacttcagccccggcagcggcgtgtacctgtgcgtgtgcctgcccggcttccacggcagcctgtgcgaggtggacatcagcggctgccagagcaacccctgcggcctgggcagctacatcagcggcttccacagctacagctgcgactgcccccccgagctgaaggtggagacccagttcgtgaaccagttcaccacccagaccgtggtgctgaccagaagcgacaagagcgtgaacaaggaggaggacgacaagaacgcccagggcagaaagagacacgtgaagcccaccagcggcaacgccttcaccatctgcaagtacccctgcggcaagagcagagagtgcgtggcccccaacatctgcaagtgcaagcccggctacatcggcagcaactgccagaccgccctgtgcgaccccgactgcaagaaccacggcaagtgcatcaagcccaacatctgccagtgcctgcccggccacggcggcgccacctgcgacgaggagcactgcaaccccccctgccagcacggcggcacctgcctggccggcaacctgtgcacctgcccctacggcttcgtgggccccagatgcgagaccatggtgtgcaacagacactgcgagaacggcggccagtgcctgacccccgacatctgccagtgcaagcccggctggtacggccccacctgcagcaccgccctgtgcgaccccgtgtgcctgaacggcggcagctgcaacaagcccaacacctgcctgtgccccaacggcttcttcggcgagcactgccagaacgccttctgccaccccccctgcaagaacggcggccactgcatgagaaacaacgtgtgcgtgtgcagagagggctacaccggcagaagattccagaagagcatctgcgaccccacctgcatgaacggcggcaagtgcgtgggccccagcacctgcagctgccccagcggctggagcggcaagagatgcaacacccccatctgcctgcagaagtgcaagaacggcggcgagtgcatcgcccccagcatctgccactgccccagcagctgggagggcgtgagatgccagatccccatctgcaaccccaagtgcctgtacggcggcagatgcatcttccccaacgtgtgcagctgcagaaccgagtacagcggcgtgaagtgcgagaagaagatccagatcagaagacactag

SEQ ID NO: 3627 - DNA, 624 bp, synthetic construct
  misc_feature 1..624: note = source = /note="Description of Artificial Sequence: Synthetic coding sequence"
  source 1..624: mol_type = other DNA
atgagcaccaagcccgacatgatccagaagtgcctgtggctggagatcctgatgggcatcttcatcgccggcaccctgagcctggactgcaacctgctgaacgtgcacctgagaagagtgacctggcagaacctgagacacctgagcagcatgagcaacagcttccccgtggagtgcctgagagagaacatcgccttcgagctgccccaggagttcctgcagtacacccagcccatgaagagagacatcaagaaggccttctacgagatgagcctgcaggccttcaacatcttcagccagcacaccttcaagtactggaaggagagacacctgaagcagatccagatcggcctggaccagcaggccgagtacctgaaccagtgcctggaggaggacaagaacgagaacgaggacatgaaggagatgaaggagaacgagatgaagcccagcgaggccagagtgccccagctgagcagcctggagctgagaagatacttccacagaatcgacaacttcctgaaggagaagaagtacagcgactgcgcctgggagatcgtgagagtggagatcagaagatgcctgtactacttctacaagttcaccgccctgttcagaagaaagtag

SEQ ID NO: 3628 - DNA, 939 bp, synthetic construct
  misc_feature 1..939: note = source = /note="Description of Artificial Sequence: Synthetic coding sequence"
  source 1..939: mol_type = other DNA
atggagagcgccctgcccgccgccggcttcctgtactgggtgggcgccggcaccgtggcctacctggccctgagaatcagctacagcctgttcaccgccctgagagtgtggggcgtgggcaacgaggccggcgtgggccccggcctgggcgagtgggccgtggtgaccggcagcaccgacggcatcggcaagagctacgccgaggagctggccaagcacggcatgaaggtggtgctgatcagcagaagcaaggacaagctggaccaggtgagcagcgagatcaaggagaagttcaaggtggagaccagaaccatcgccgtggacttcgccagcgaggacatctacgacaagatcaagaccggcctggccggcctggagatcggcatcctggtgaacaacgtgggcatgagctacgagtaccccgagtacttcctggacgtgcccgacctggacaacgtgatcaagaagatgatcaacatcaacatcctgagcgtgtgcaagatgacccagctggtgctgcccggcatggtggagagaagcaagggcgccatcctgaacatcagcagcggcagcggcatgctgcccgtgcccctgctgaccatctacagcgccaccaagaccttcgtggacttcttcagccagtgcctgcacgaggagtacagaagcaagggcgtgttcgtgcagagcgtgctgccctacttcgtggccaccaagctggccaagatcagaaagcccaccctggacaagcccagccccgagaccttcgtgaagagcgccatcaagaccgtgggcctgcagagcagaaccaacggctacctgatccacgccctgatgggcagcatcatcagcaacctgcccagctggatctacctgaagatcgtgatgaacatgaacaagagcaccagagcccactacctgaagaagaccaagaagaactag

SEQ ID NO: 3629 - DNA, 2214 bp, synthetic construct
  misc_feature 1..2214: note = source = /note="Description of Artificial Sequence: Synthetic coding sequence"
  source 1..2214: mol_type = other DNA
atggagctgggctgctggacccagctgggcctgaccttcctgcagctgctgctgatcagcagcctgcccagagagtacaccgtgatcaacgaggcctgccccggcgccgagtggaacatcatgtgcagagagtgctgcgagtacgaccagatcgagtgcgtgtgccccggcaagagagaggtggtgggctacaccatcccctgctgcagaaacgaggagaacgagtgcgacagctgcctgatccaccccggctgcaccatcttcgagaactgcaagagctgcagaaacggcagctggggcggcaccctggacgacttctacgtgaagggcttctactgcgccgagtgcagagccggctggtacggcggcgactgcatgagatgcggccaggtgctgagagcccccaagggccagatcctgctggagagctaccccctgaacgcccactgcgagtggaccatccacgccaagcccggcttcgtgatccagctgagattcgtgatgctgagcctggagttcgactacatgtgccagtacgactacgtggaggtgagagacggcgacaacagagacggccagatcatcaagagagtgtgcggcaacgagagacccgcccccatccagagcatcggcagcagcctgcacgtgctgttccacagcgacggcagcaagaacttcgacggcttccacgccatctacgaggagatcaccgcctgcagcagcagcccctgcttccacgacggcacctgcgtgctggacaaggccggcagctacaagtgcgcctgcctggccggctacaccggccagagatgcgagaacctgctggaggccggcaagagcaagatcaaggccagcgaggacagcctgagcgtgctggaggagagaaactgcagcgaccccggcggccccgtgaacggctaccagaagatcaccggcggccccggcctgatcaacggcagacacgccaagatcggcaccgtggtgagcttcttctgcaacaacagctacgtgctgagcggcaacgagaagagaacctgccagcagaacggcgagtggagcggcaagcagcccatctgcatcaaggcctgcagagagcccaagatcagcgacctggtgagaagaagagtgctgcccatgcaggtgcagagcagagagacccccctgcaccagctgtacagcgccgccttcagcaagcagaagctgcagagcgcccccaccaagaagcccgccctgcccttcggcgacctgcccatgggctaccagcacctgcacacccagctgcagtacgagtgcatcagccccttctacagaagactgggcagcagcagaagaacctgcctgagaaccggcaagtggagcggcagagcccccagctgcatccccatctgcggcaagatcgagaacatcaccgcccccaagacccagggcctgagatggccctggcaggccgccatctacagaagaaccagcggcgtgcacgacggcagcctgcacaagggcgcctggttcctggtgtgcagcggcgccctggtgaacgagagaaccgtggtggtggccgcccactgcgtgaccgacctgggcaaggtgaccatgatcaagaccgccgacctgaaggtggtgctgggcaagttctacagagacgacgacagagacgagaagaccatccagagcctgcagatcagcgccatcatcctgcaccccaactacgaccccatcctgctggacgccgacatcgccatcctgaagctgctggacaaggccagaatcagcaccagagtgcagcccatctgcctggccgccagcagagacctgagcaccagcttccaggagagccacatcaccgtggccggctggaacgtgctggccgacgtgagaagccccggcttcaagaacgacaccctgagaagcggcgtggtgagcgtggtggacagcctgctgtgcgaggagcagcacgaggaccacggcatccccgtgagcgtgaccgacaacatgttctgcgccagctgggagcccaccgcccccagcgacatctgcaccgccgagaccggcggcatcgccgccgtgagcttccccggcagagccagccccgagcccagatggcacctgatgggcctggtgagctggagctacgacaagacctgcagccacagactgagcaccgccttcaccaaggtgctgcccttcaaggactggatcgagagaaacatgaagtag

SEQ ID NO: 3630 - DNA, 1503 bp, synthetic construct
  misc_feature 1..1503: note = source = /note="Description of Artificial Sequence: Synthetic coding sequence"
  source 1..1503: mol_type = other DNA
atgggcaccgccagatggctggccctgggcagcctgttcgccctggccggcctgctggagggcagactggtgggcgaggaggaggccggcttcggcgagtgcgacaagttcttctacgccggcaccccccccgccggcctggccgccgacagccacgtgaagatctgccagagagccgagggcgccgagagattcgccaccctgtacagcaccagagacagaatccccgtgtacagcgccttcagagcccccagacccgcccccggcggcgccgagcagagatggctggtggagccccagatcgacgaccccaacagcaacctggaggaggccatcaacgaggccgaggccatcaccagcgtgaacagcctgggcagcaagcaggccctgaacaccgactacctggacagcgactaccagagaggccagctgtaccccttcagcctgagcagcgacgtgcaggtggccaccttcaccctgaccaacagcgcccccatgacccagagcttccaggagagatggtacgtgaacctgcacagcctgatggacagagccctgaccccccagtgcggcagcggcgaggacctgtacatcctgaccggcaccgtgcccagcgactacagagtgaaggacaaggtggccgtgcccgagttcgtgtggctggccgcctgctgcgccgtgcccggcggcggctgggccatgggcttcgtgaagcacaccagagacagcgacatcatcgaggacgtgatggtgaaggacctgcagaagctgctgcccttcaacccccagctgttccagaacaactgcggcgagaccgagcaggacaccgagaagatgaagaagatcctggaggtggtgaaccagatccaggacgaggagagaatggtgcagagccagaagagcagcagccccctgagcagcaccagaagcaagagaagcaccctgctgccccccgaggccagcgagggcagcagcagcttcctgggcaagctgatgggcttcatcgccacccccttcatcaagctgttccagctgatctactacctggtggtggccatcctgaagaacatcgtgtacttcctgtggtgcgtgaccaagcaggtgatcaacggcatcgagagctgcctgtacagactgggcagcgccaccatcagctacttcatggccatcggcgaggagctggtgagcatcccctggaaggtgctgaaggtggtggccaaggtgatcagagccctgctgagaatcctgtgctgcctgctgaaggccatctgcagagtgctgagcatccccgtgagagtgctggtggacgtggccaccttccccgtgtacaccatgggcgccatccccatcgtgtgcaaggacatcgccctgggcctgggcggcaccgtgagcctgctgttcgacaccgccttcggcaccctgggcggcctgttccaggtggtgttcagcgtgtgcaagagaatcggctacaaggtgaccttcgacaacagcggcgagctgtag

SEQ ID NO: 3631 - DNA, 300 bp, synthetic construct
  misc_feature 1..300: note = source = /note="Description of Artificial Sequence: Synthetic coding sequence"
  source 1..300: mol_type = other DNA
atgaagagcgccaagctgggcttcctgctgagattcttcatcttctgcagcctgaacaccctgctgctgggcggcgtgaacaagatcgccgagaagatctgcggcgacctgaaggacccctgcaagctggacatgaacttcggcagctgctacgaggtgcacttcagatacttctacaacagaaccagcaagagatgcgagaccttcgtgttcagcggctgcaacggcaacctgaacaacttcaagctgaagatcgagagagaggtggcctgcgtggccaagtacaagccccccagatag

SEQ ID NO: 3632 - DNA, 390 bp, synthetic construct
  misc_feature 1..390: note = source = /note="Description of Artificial Sequence: Synthetic coding sequence"
  source 1..390: mol_type = other DNA
atgcccatggccagcccccagaccctggtgctgtacctgctggtgctggccgtgaccgaggcctggggccaggaggccgtgatccccggctgccacctgcaccccttcaacgtgaccgtgagaagcgacagacagggcacctgccagggcagccacgtggcccaggcctgcgtgggccactgcgagagcagcgccttccccagcagatacagcgtgctggtggccagcggctacagacacaacatcaccagcgtgagccagtgctgcaccatcagcggcctgaagaaggtgaaggtgcagctgcagtgcgtgggcagcagaagagaggagctggagatcttcaccgccagagcctgccagtgcgacatgtgcagactgagcagatactag

SEQ ID NO: 3633 - DNA, 1965 bp, synthetic construct
  misc_feature 1..1965: note = source = /note="Description of Artificial Sequence: Synthetic coding sequence"
  source 1..1965: mol_type = other DNA
atggccaagttcggcgtgcacagaatcctgctgctggccatcagcctgaccaagtgcctggagagcaccaagctgctggccgacctgaagaagtgcggcgacctggagtgcgaggccctgatcaacagagtgagcgccatgagagactacagaggccccgactgcagatacctgaacttcaccaagggcgaggagatcagcgtgtacgtgaagctggccggcgagagagaggacctgtgggccggcagcaagggcaaggagttcggctacttccccagagacgccgtgcagatcgaggaggtgttcatcagcgaggagatccagatgagcaccaaggagagcgacttcctgtgcctgctgggcgtgagctacaccttcgacaacgaggacagcgagctgaacggcgactacggcgagaacatctacccctacgaggaggacaaggacgagaagagcagcatctacgagagcgacttccagatcgagcccggcttctacgccacctacgagagcaccctgttcgaggaccaggtgcccgccctggaggcccccgaggacatcggcagcaccagcgagagcaaggactgggaggaggtggtggtggagagcatggagcaggacagaatccccgaggtgcacgtgccccccagcagcgccgtgagcggcgtgaaggagtggttcggcctgggcggcgagcaggccgaggagaaggccttcgagagcgtgatcgagcccgtgcaggagagcagcttcagaagcagaaagatcgccgtggaggacgagaacgacctggaggagctgaacaacggcgagccccagaccgagcaccagcaggagagcgagagcgagatcgacagcgtgcccaagacccagagcgagctggccagcgagagcgagcacatccccaagccccagagcaccggctggttcggcggcggcttcaccagctacctgggcttcggcgacgaggacaccggcctggagctgatcgccgaggagagcaacccccccctgcaggacttccccaacagcatcagcagcgacaaggaggccaccgtgccctgcaccgagatcctgaccgagaagaaggacaccatcaccaacgacagcctgagcctgaagcccagctggttcgacttcggcttcgccatcctgggcttcgcctacgccaaggaggacaagatcatgctggacgacagaaagaacgaggaggacggcggcgccgacgagcacgagcaccccctgaccagcgagctggaccccgagaaggagcaggagatcgagaccatcaagatcatcgagaccgaggaccagatcgacaagaagcccgtgagcgagaagaccgacgagagcgacaccatcccctacctgaagaagttcctgtacaacttcgacaacccctggaacttccagaacatccccaaggagaccgagctgcccttccccaagcagatcctggaccagaacaacgtgatcgagaacgaggagaccggcgagttcagcatcgacaactaccccaccgacaacaccaaggtgatgatcttcaagagcagctacagcctgagcgacatggtgagcaacatcgagctgcccaccagaatccacgaggaggtgtacttcgagcccagcagcagcaaggacagcgacgagaacagcaagcccagcgtggacaccgagggccccgccctggtggagatcgacagaagcgtggagaacaccctgctgaacagccagatggtgagcaccgacaacagcctgagcagccagaactacatcagccagaaggaggacgccagcgagttccagatcctgaagtacctgttccagatcgacgtgtacgacttcatgaacagcgccttcagccccatcgtgatcctgaccgagagagtgagcctgcccttcaagcccttcgccatcatcctgcccatcctgctgaacatcagagtggccaccaagtacgtgtag

SEQ ID NO: 3634 - DNA, 1152 bp, synthetic construct
  misc_feature 1..1152: note = source = /note="Description of Artificial Sequence: Synthetic coding sequence"
  source 1..1152: mol_type = other DNA
atggccggcatccccggcctgctgttcctgctgttcttcctgctgtgcgccgtgggccaggtgagcccctacagcgccccctggaagcccacctggcccgcctacagactgcccgtggtgctgccccagagcaccctgaacctggccaagcccgacttcggcgccgaggccaagctggaggtgagcagcagctgcggcccccagtgccacaagggcacccccctgcccacctacgaggaggccaagcagtacctgagctacgagaccctgtacgccaacggcagcagaaccgagacccaggtgggcatctacatcctgagcagcagcggcgacggcgcccagcacagagacagcggcagcagcggcaagagcagaagaaagagacagatctacggctacgacagcagattcagcatcttcggcaaggacttcctgctgaactaccccttcagcaccagcgtgaagctgagcaccggctgcaccggcaccctggtggccgagaagcacgtgctgaccgccgcccactgcatccacgacggcaagacctacgtgaagggcacccagaagctgagagtgggcttcctgaagcccaagttcaaggacggcggcagaggcgccaacgacagcaccagcgccatgcccgagcagatgaagttccagtggatcagagtgaagagaacccacgtgcccaagggctggatcaagggcaacgccaacgacatcggcatggactacgactacgccctgctggagctgaagaagccccacaagagaaagttcatgaagatcggcgtgagcccccccgccaagcagctgcccggcggcagaatccacttcagcggctacgacaacgacagacccggcaacctggtgtacagattctgcgacgtgaaggacgagacctacgacctgctgtaccagcagtgcgacgcccagcccggcgccagcggcagcggcgtgtacgtgagaatgtggaagagacagcagcagaagtgggagagaaagatcatcggcatcttcagcggccaccagtgggtggacatgaacggcagcccccaggacttcaacgtggccgtgagaatcacccccctgaagtacgcccagatctgctactggatcaagggcaactacctggactgcagagagggctag

SEQ ID NO: 3635 - DNA, 1662 bp, synthetic construct
  misc_feature 1..1662: note = source = /note="Description of Artificial Sequence: Synthetic coding sequence"
  source 1..1662: mol_type = other DNA
atgaagtggtgctggggccccgtgctgctgatcgccggcgccaccgtgctgatggagggcctgcaggccgcccagagagcctgcggccagagaggccccggcccccccaagccccaggagggcaacaccgtgcccggcgagtggccctggcaggccagcgtgagaagacagggcgcccacatctgcagcggcagcctggtggccgacacctgggtgctgaccgccgcccactgcttcgagaaggccgccgccaccgagctgaacagctggagcgtggtgctgggcagcctgcagagagagggcctgagccccggcgccgaggaggtgggcgtggccgccctgcagctgcccagagcctacaaccactacagccagggcagcgacctggccctgctgcagctggcccaccccaccacccacacccccctgtgcctgccccagcccgcccacagattccccttcggcgccagctgctgggccaccggctgggaccaggacaccagcgacgcccccggcaccctgagaaacctgagactgagactgatcagcagacccacctgcaactgcatctacaaccagctgcaccagagacacctgagcaaccccgccagacccggcatgctgtgcggcggcccccagcccggcgtgcagggcccctgccagggcgacagcggcggccccgtgctgtgcctggagcccgacggccactgggtgcaggccggcatcatcagcttcgccagcagctgcgcccaggaggacgcccccgtgctgctgaccaacaccgccgcccacagcagctggctgcaggccagagtgcagggcgccgccttcctggcccagagccccgagacccccgagatgagcgacgaggacagctgcgtggcctgcggcagcctgagaaccgccggcccccaggccggcgcccccagcccctggccctgggaggccagactgatgcaccagggccagctggcctgcggcggcgccctggtgagcgaggaggccgtgctgaccgccgcccactgcttcatcggcagacaggcccccgaggagtggagcgtgggcctgggcaccagacccgaggagtggggcctgaagcagctgatcctgcacggcgcctacacccaccccgagggcggctacgacatggccctgctgctgctggcccagcccgtgaccctgggcgccagcctgagacccctgtgcctgccctaccccgaccaccacctgcccgacggcgagagaggctgggtgctgggcagagccagacccggcgccggcatcagcagcctgcagaccgtgcccgtgaccctgctgggccccagagcctgcagcagactgcacgccgcccccggcggcgacggcagccccatcctgcccggcatggtgtgcaccagcgccgtgggcgagctgcccagctgcgagggcctgagcggcgcccccctggtgcacgaggtgagaggcacctggttcctggccggcctgcacagcttcggcgacgcctgccagggccccgccagacccgccgtgttcaccgccctgcccgcctacgaggactgggtgagcagcctggactggcaggtgtacttcgccgaggagcccgagcccgaggccgagcccggcagctgcctggccaacatcagccagcccaccagctgctag

SEQ ID NO: 3636 - DNA, 936 bp, synthetic construct
  misc_feature 1..936: note = source = /note="Description of Artificial Sequence: Synthetic coding sequence"
  source 1..936: mol_type = other DNA
atgggcatcatccagagcatcctggccaccagcagagactgctacagcttcaagaagaagcccatccccaagaagcccaccatgctggccctggccaagatcctgctgatcagcaccctgttctacagcctgctgagcggcagccacggcaaggagaaccaggacatcaacaccacccagaacatcgccgaggtgttcaagaccatggagaacaagcccatcagcctggagagcgaggccaacctgaacagcgacaaggagaacatcaccaccagcaacctgaaggccagccacagcccccccctgaacctgcccaacaacagccacggcatcaccgacttcagcagcaacagcagcgccgagcacagcctgggcagcctgaagcccaccagcaccatcagcaccagcccccccctgatccacagcttcgtgagcaaggtgccctggaacgcccccatcgccgacgaggacctgctgcccatcagcgcccaccccaacgccacccccgccctgagcagcgagaacttcacctggagcctggtgaacgacaccgtgaagacccccgacaacagcagcatcaccgtgagcatcctgagcagcgagcccaccagccccagcgtgacccccctgatcgtggagcccagcggctggctgaccaccaacagcgacagcttcaccggcttcaccccctaccaggagaagaccaccctgcagcccaccctgaagttcaccaacaacagcaagctgttccccaacaccagcgacccccagaaggtgctgagactggacaacgcccccgagccctacgacgtgagcttcggcaacagcagctactacaaccccaccctgaacgacagcgccatgcccgagagcgaggagaacgccagagacggcatccccatggacgacatcccccccctgagaaccagcgtgtag

SEQ ID NO: 3637 - DNA, 3120 bp, synthetic construct
  misc_feature 1..3120: note = source = /note="Description of Artificial Sequence: Synthetic coding sequence"
  source 1..3120: mol_type = other DNA
atgcagagcagactgctgctgctgggcgcccccggcggccacggcggccccgccagcagaagaatgagactgctgctgagacaggtggtgcagagaagacccggcggcgacagacagagacccgaggtgagactgctgcacgccggcagcggcgccgacaccggcgacaccgtgaacatcggcgacgtgagctacaagctgaagatccccaagaaccccgagctggtgccccagaactacatcagcgacagcctggcccagagcgtggtgcagcacctgagatggatcatgcagaaggacctgctgggccaggacgtgttcctgatcggcccccccggccccctgagaagaagcatcgccatgcagtacctggagctgaccaagagagaggtggagtacatcgccctgagcagagacaccaccgagaccgacctgaagcagagaagagagatcagagccggcaccgccttctacatcgaccagtgcgccgtgagagccgccaccgagggcagaaccctgatcctggagggcctggagaaggccgagagaaacgtgctgcccgtgctgaacaacctgctggagaacagagagatgcagctggaggacggcagattcctgatgagcgccgagagatacgacaagctgctgagagaccacaccaagaaggagctggacagctggaagatcgtgagagtgagcgagaacttcagagtgatcgccctgggcctgcccgtgcccagatacagcggcaaccccctggacccccccctgagaagcagattccaggccagagacatctactacctgcccttcaaggaccagctgaagctgctgtacagcatcggcgccaacgtgagcgccgagaaggtgagccagctgctgagcttcgccaccaccctgtgcagccaggagagcagcaccctgggcctgcccgacttccccctggacagcctggccgccgccgtgcagatcctggacagcttccccatgatgcccatcaagcacgccatccagtggctgtacccctacagcatcctgctgggccacgagggcaagatggccgtggagggcgtgctgaagagattcgagctgcaggacagcggcagcagcctgctgcccaaggagatcgtgaaggtggagaagatgatggagaaccacgtgagccaggccagcgtgaccatcagaatcgccgacaaggaggtgaccatcaaggtgcccgccggcaccagactgctgagccagccctgcgccagcgacagattcatccagaccctgagccacaagcagctgcaggccgagatgatgcagagccacatggtgaaggacatctgcctgatcggcggcaagggctgcggcaagaccgtgatcgccaagaacttcgccgacaccctgggctacaacatcgagcccatcatgctgtaccaggacatgaccgccagagacctgctgcagcagagatacaccctgcccaacggcgacaccgcctggagaagcagccccctggtgaacgccgccctggagggcaagctggtgctgctggacggcatccacagagtgaacgccggcaccctggccgtgctgcagagactgatccacgacagagagctgagcctgtacgacggcagcagactgctgagagaggacagatacatgagactgaaggaggagctgcagctgagcgacgagcagctgcagaagagaagcatcttccccatccaccccagcttcagaatcatcgccctggccgagccccccgtgatcggcagcaccgcccaccagtggctgggccccgagttcctgaccatgttcttcttccactacatgaagcccctggtgaagagcgaggagatccaggtgatcaaggagaaggtgcccaacgtgccccaggaggccctggacaagctgctgagcttcacccacaagctgagagagacccaggaccccaccgcccagagcctggccgccagcctgagcaccagacagctgctgagaatcagcagaagactgagccagtaccccaacgagaacctgcacagcgccgtgaccaaggcctgcctgagcagattcctgcccagcctggccagaagcgccctggagaagaacctggccgacgccaccatcgagatcaacaccgacgacaacctggagcccgagctgaaggactacaagtgcgaggtgaccagcggcaccctgagaatcggcgccgtgagcgcccccatctacaacgcccacgagaagatgaaggtgcccgacgtgctgttctacgacaacatccagcacgtgatcgtgatggaggacatgctgaaggacttcctgctgggcgagcacctgctgctggtgggcaaccagggcgtgggcaagaacaagatcgtggacagattcctgcacctgctgaacagacccagagagtacatccagctgcacagagacaccaccgtgcagaccctgaccctgcagcccagcgtgaaggacggcctgatcgtgtacgaggacagccccctggtgaaggccgtgaagctgggccacatcctggtggtggacgaggccgacaaggcccccaccaacgtgacctgcatcctgaagaccctggtggagaacggcgagatgatcctggccgacggcagaagaatcgtggccaacagcgccaacgtgaacggcagagagaacgtggtggtgatccaccccgacttcagaatgatcgtgctggccaacagacccggcttccccttcctgggcaacgacttcttcggcaccctgggcgacatcttcagctgccacgccgtggacaaccccaagccccacagcgagctggagatgctgagacagtacggccccaacgtgcccgagcccatcctgcagaagctggtggccgccttcggcgagctgagaagcctggccgaccagggcatcatcaactacccctacagcaccagagaggtggtgaacatcgtgaagcacctgcagaagttccccaccgagggcctgagcagcgtggtgagaaacgtgttcgacttcgacagctacaacaacgacatgagagagatcctgatcaacaccctgcacaagtacggcatccccatcggcgccaagcccaccagcgtgcagctggccaaggagtag

SEQ ID NO: 3638 - DNA, 801 bp, synthetic construct
  misc_feature 1..801: note = source = /note="Description of Artificial Sequence: Synthetic coding sequence"
  source 1..801: mol_type = other DNA
atgagactgctgttcctggccgtgctgagaccccacaccggcaacgccgtgaccgcccagagagtgagagcccacctggaggccgccggccacgtgtgcgtgctgaaggacgccttcgacttcgagagcagaagcgagatcgccaacctgatcctggccgagaactgcgaggccgccctggccctgcacctgtacagaggcggcagactgctgcagggccacagaatccccttcggcgtgatcttcggcggcaccgacgtgaacgaggacgccaaccaggccgagaagaacaccgtgatgggcagagtgctggaggaggccagattcgccgtggccttcaccgagagcatgaaggagatggcccaggcccagtgggtggaccccgtgttcaccagagaggtgaaggccaaggtgaagagagccgccggcgtgagactgatcggcgagatgccccaggaggacctgcacgccgtggtgaagaactgcttcgccgtggtgaacagcagcgtgagcgagggcatgagcgccgccatcctggaggccatggacctggaggtgcccgtgctggccagaaacatccccggcaacgccgccgtggtgaagcacgaggtgaccggcctgctgttcagcaacccccaggagttcgtgcacctggccaagagactggtgagcgaccccgccctggagaaggagatcgtggtgaacggcagagagtacgtgagaatgtaccacagctggcaggtggagagagacacctaccagcagctgatcagaaagctggagggcagcaccgaggactag

SEQ ID NO: 3639 - DNA, 2478 bp, synthetic construct
  misc_feature 1..2478: note = source = /note="Description of Artificial Sequence: Synthetic coding sequence"
  source 1..2478: mol_type = other DNA
atgttcagcggcttcaacgtgttcagagtgggcatcagcttcgtgatcatgtgcatcttctacatgcccaccgtgaacagcctgcccgagctgagcccccagaagtacttcagcaccctgcagcccggcaaggccagcctggcctacttctgccaggccgacagccccagaaccagcgtgttcctggaggagctgaacgaggccgtgagacccctgcaggactacggcatcagcgtggccaaggtgaactgcgtgaaggaggagatcagcagatactgcggcaaggagaaggacctgatgaaggcctacctgttcaagggcaacatcctgctgagagagttccccaccgacaccctgttcgacgtgaacgccatcgtggcccacgtgctgttcgccctgctgttcagcgaggtgaagtacatcaccaacctggaggacctgcagaacatcgagaacgccctgaagggcaaggccaacatcatcttcagctacgtgagagccatcggcatccccgagcacagagccgtgatggaggccgccttcgtgtacggcaccacctaccagttcgtgctgaccaccgagatcgccctgctggagagcatcggcagcgaggacgtggagtacgcccacctgtacttcttccactgcaagctggtgctggacctgacccagcagtgcagaagaaccctgatggagcagcccctgaccaccctgaacatccacctgttcatcaagaccatgaaggcccccctgctgaccgaggtggccgaggacccccagcaggtgagcaccgtgcacctgcagctgggcctgcccctggtgttcatcgtgagccagcaggccacctacgaggccgacagaagaaccgccgagtgggtggcctggagactgctgggcaaggccggcgtgctgctgctgctgagagacagcctggaggtgaacatcccccaggacgccaacgtggtgttcaagagagccgaggagggcgtgcccgtggagttcctggtgctgcacgacgtggacctgatcatcagccacgtggagaacaacatgcacatcgaggagatccaggaggacgaggacaacgacatggagggccccgacatcgacgtgcaggacgacgaggtggccgagaccgtgttcagagacagaaagagaaagctgcccctggagctgaccgtggagctgaccgaggagaccttcaacgccaccgtgatggccagcgacagcatcgtgctgttctacgccggctggcaggccgtgagcatggccttcctgcagagctacatcgacgtggccgtgaagctgaagggcaccagcaccatgctgctgaccagaatcaactgcgccgactggagcgacgtgtgcaccaagcagaacgtgaccgagttccccatcatcaagatgtacaagaagggcgagaaccccgtgagctacgccggcatgctgggcaccgaggacctgctgaagttcatccagctgaacagaatcagctaccccgtgaacatcaccagcatccaggaggccgaggagtacctgagcggcgagctgtacaaggacctgatcctgtacagcagcgtgagcgtgctgggcctgttcagccccaccatgaagaccgccaaggaggacttcagcgaggccggcaactacctgaagggctacgtgatcaccggcatctacagcgaggaggacgtgctgctgctgagcaccaagtacgccgccagcctgcccgccctgctgctggccagacacaccgagggcaagatcgagagcatccccctggccagcacccacgcccaggacatcgtgcagatcatcaccgacgccctgctggagatgttccccgagatcaccgtggagaacctgcccagctacttcagactgcagaagcccctgctgatcctgttcagcgacggcaccgtgaacccccagtacaagaaggccatcctgaccctggtgaagcagaagtacctggacagcttcaccccctgctggctgaacctgaagaacacccccgtgggcagaggcatcctgagagcctacttcgaccccctgccccccctgcccctgctggtgctggtgaacctgcacagcggcggccaggtgttcgccttccccagcgaccaggccatcatcgaggagaacctggtgctgtggctgaagaagctggaggccggcctggagaaccacatcaccatcctgcccgcccaggagtggaagccccccctgcccgcctacgacttcctgagcatgatcgacgccgccaccagccagagaggcaccagaaaggtgcccaagtgcatgaaggagaccgacgtgcaggagaacgacaaggagcagcacgaggacaagagcgccgtgagaaaggagcccatcgagaccctgagaatcaagcactggaacagaagcaactggttcaaggaggccgagaagagcttcagaagagacaaggagctgggctgcagcaaggtgaactag

SEQ ID NO: 3640 - DNA, 672 bp, synthetic construct
  misc_feature 1..672: note = source = /note="Description of Artificial Sequence: Synthetic coding sequence"
  source 1..672: mol_type = other DNA
atgacctggagacaccacgtgagactgctgttcaccgtgagcctggccctgcagatcatcaacctgggcaacagctaccagagagagaagcacaacggcggcagagaggaggtgaccaaggtggccacccagaagcacagacagagccccctgaactggaccagcagccacttcggcgaggtgaccggcagcgccgagggctggggccccgaggagcccctgccctacagctgggccttcggcgagggcgccagcgccagacccagatgctgcagaaacggcggcacctgcgtgctgggcagcttctgcgtgtgccccgcccacttcaccggcagatactgcgagcacgaccagagaagaagcgagtgcggcgccctggagcacggcgcctggaccctgagagcctgccacctgtgcagatgcatcttcggcgccctgcactgcctgcccctgcagacccccgacagatgcgaccccaaggacttcctggccagccacgcccacggccccagcgccggcggcgcccccagcctgctgctgctgctgccctgcgccctgctgcacagactgctgagacccgacgcccccgcccaccccagaagcctggtgcccagcgtgctgcagagagagagaagaccctgcggcagacccggcctgggccacagactgtag

SEQ ID NO: 3641 - DNA, 1320 bp, synthetic construct
  misc_feature 1..1320: note = source = /note="Description of Artificial Sequence: Synthetic coding sequence"
  source 1..1320: mol_type = other DNA
atgcccgccatcgccgtgctggccgccgccgccgccgcctggtgcttcctgcaggtggagagcagacacctggacgccctggccggcggcgccggccccaaccacggcaacttcctggacaacgaccagtggctgagcaccgtgagccagtacgacagagacaagtactggaacagattcagagacgacgactacttcagaaactggaaccccaacaagcccttcgaccaggccctggaccccagcaaggacccctgcctgaaggtgaagtgcagcccccacaaggtgtgcgtgacccaggactaccagaccgccctgtgcgtgagcagaaagcacctgctgcccagacagaagaagggcaacgtggcccagaagcactgggtgggccccagcaacctggtgaagtgcaagccctgccccgtggcccagagcgccatggtgtgcggcagcgacggccacagctacaccagcaagtgcaagctggagttccacgcctgcagcaccggcaagagcctggccaccctgtgcgacggcccctgcccctgcctgcccgagcccgagccccccaagcacaaggccgagagaagcgcctgcaccgacaaggagctgagaaacctggccagcagactgaaggactggttcggcgccctgcacgaggacgccaacagagtgatcaagcccaccagcagcaacaccgcccagggcagattcgacaccagcatcctgcccatctgcaaggacagcctgggctggatgttcaacaagctggacatgaactacgacctgctgctggaccccagcgagatcaacgccatctacctggacaagtacgagccctgcatcaagcccctgttcaacagctgcgacagcttcaaggacggcaagctgagcaacaacgagtggtgctactgcttccagaagcccggcggcctgccctgccagaacgagatgaacagaatccagaagctgagcaagggcaagagcctgctgggcgccttcatccccagatgcaacgaggagggctactacaaggccacccagtgccacggcagcaccggccagtgctggtgcgtggacaagtacggcaacgagctggccggcagcagaaagcagggcgccgtgagctgcgaggaggagcaggagaccagcggcgacttcggcagcggcggcagcgtggtgctgctggacgacctggagtacgagagagagctgggccccaaggacaaggagggcaagctgagagtgcacaccagagccgtgaccgaggacgacgaggacgaggacgacgacaaggaggacgaggtgggctacatctggtag

SEQ ID NO: 3642 - DNA, 7872 bp, synthetic construct
  misc_feature 1..7872: note = source = /note="Description of Artificial Sequence: Synthetic coding sequence"
  source 1..7872: mol_type = other DNA
atgaaggtgaagggcagaggcatcacctgcctgctggtgagcttcgccgtgatctgcctggtggccacccccggcggcaaggcctgccccagaagatgcgcctgctacatgcccaccgaggtgcactgcaccttcagatacctgaccagcatccccgacagcatcccccccaacgtggagagaatcaacctgggctacaacagcctggtgagactgatggagaccgacttcagcggcctgaccaagctggagctgctgatgctgcacagcaacggcatccacaccatccccgacaagaccttcagcgacctgcaggccctgcaggtgctgaagatgagctacaacaaggtgagaaagctgcagaaggacaccttctacggcctgagaagcctgaccagactgcacatggaccacaacaacatcgagttcatcaaccccgaggtgttctacggcctgaacttcctgagactggtgcacctggagggcaaccagctgaccaagctgcaccccgacaccttcgtgagcctgagctacctgcagatcttcaagatcagcttcatcaagttcctgtacctgagcgacaacttcctgaccagcctgccccaggagatggtgagctacatgcccgacctggacagcctgtacctgcacggcaacccctggacctgcgactgccacctgaagtggctgagcgactggatccaggagaagcccgacgtgatcaagtgcaagaaggacagaagccccagcagcgcccagcagtgccccctgtgcatgaaccccagaaccagcaagggcaagcccctggccatggtgagcgccgccgccttccagtgcgccaagcccaccatcgacagcagcctgaagagcaagagcctgaccatcctggaggacagcagcagcgccttcatcagcccccagggcttcatggcccccttcggcagcctgaccctgaacatgaccgaccagagcggcaacgaggccaacatggtgtgcagcatccagaagcccagcagaaccagccccatcgccttcaccgaggagaacgactacatcgtgctgaacaccagcttcagcaccttcctggtgtgcaacatcgactacggccacatccagcccgtgtggcagatcctggccctgtacagcgacagccccctgatcctggagagaagccacctgctgagcgagaccccccagctgtactacaagtacaagcaggtggcccccaagcccgaggacatcttcaccaacatcgaggccgacctgagagccgaccccagctggctgatgcaggaccagatcagcctgcagctgaacagaaccgccaccaccttcagcaccctgcagatccagtacagcagcgacgcccagatcaccctgcccagagccgagatgagacccgtgaagcacaagtggaccatgatcagcagagacaacaacaccaagctggagcacaccgtgctggtgggcggcaccgtgggcctgaactgccccggccagggcgaccccaccccccacgtggactggctgctggccgacggcagcaaggtgagagccccctacgtgagcgaggacggcagaatcctgatcgacaagagcggcaagctggagctgcagatggccgacagcttcgacaccggcgtgtaccactgcatcagcagcaactacgacgacgccgacatcctgacctacagaatcaccgtggtggagcccctggtggaggcctaccaggagaacggcatccaccacaccgtgttcatcggcgagaccctggacctgccctgccacagcaccggcatccccgacgccagcatcagctgggtgatccccggcaacaacgtgctgtaccagagcagcagagacaagaaggtgctgaacaacggcaccctgagaatcctgcaggtgacccccaaggaccagggctactacagatgcgtggccgccaaccccagcggcgtggacttcctgatcttccaggtgagcgtgaagatgaagggccagagacccctggagcacgacggcgagaccgagggcagcggcctggacgagagcaaccccatcgcccacctgaaggagccccccggcgcccagctgagaaccagcgccctgatggaggccgaggtgggcaagcacaccagcagcaccagcaagagacacaactacagagagctgaccctgcagagaagaggcgacagcacccacagaagattcagagagaacagaagacacttcccccccagcgccagaagaatcgacccccagcactgggccgccctgctggagaaggccaagaagaacgccatgcccgacaagagagagaacaccaccgtgagccccccccccgtggtgacccagctgcccaacatccccggcgaggaggacgacagcagcggcatgctggccctgcacgaggagttcatggtgcccgccaccaaggccctgaacctgcccgccagaaccgtgaccgccgacagcagaaccatcagcgacagccccatgaccaacatcaactacggcaccgagttcagccccgtggtgaacagccagatcctgccccccgaggagcccaccgacttcaagctgagcaccgccatcaagaccaccgccatgagcaagaacatcaaccccaccatgagcagccagatccagggcaccaccaaccagcacagcagcaccgtgttccccctgctgctgggcgccaccgagttccaggacagcgaccagatgggcagaggcagagagcacttccagagcagaccccccatcaccgtgagaaccatgatcaaggacgtgaacgtgaagatgctgagcagcaccaccaacaagctgctgctggagagcgtgaacaccaccaacagccaccagaccagcgtgagagaggtgagcgagcccagacacaaccacttctacagccacaccacccagatcctgagcaccagcaccttccccagcgacccccacaccgccgcccacagccagttccccatccccagaaacagcaccgtgaacatccccctgttcagaagattcggcagacagagaaagatcggcggcagaggcagaatcatcagcccctacagaacccccgtgctgagaagacacagatacagcatcttcagaagcaccaccagaggcagcagcgagaagagcaccaccgccttcagcgccaccgtgctgaacgtgacctgcctgagctgcctgcccagagagagactgaccaccgccaccgccgccctgagcttccccagcgccgcccccatcaccttccccaaggccgacatcgccagagtgcccagcgaggagagcaccaccctggtgcagaaccccctgctgctgctggagaacaagcccagcgtggagaagaccacccccaccatcaagtacttcagaaccgagatcagccaggtgacccccaccggcgccgtgatgacctacgcccccaccagcatccccatggagaagacccacaaggtgaacgccagctaccccagagtgagcagcaccaacgaggccaagagagacagcgtgatcaccagcagcctgagcggcgccatcaccaagccccccatgaccatcatcgccatcaccagattcagcagaagaaagatcccctggcagcagaacttcgtgaacaaccacaaccccaagggcagactgagaaaccagcacaaggtgagcctgcagaagagcaccgccgtgatgctgcccaagaccagccccgccctgcccagagacaaggtgagccccttccacttcaccaccctgagcaccagcgtgatgcagatccccagcaacaccctgaccaccgcccaccacaccaccaccaagacccacaaccccggcagcctgcccaccaagaaggagctgcccttcccccccctgaaccccatgctgcccagcatcatcagcaaggacagcagcaccaagagcatcatcagcacccagaccgccatccccgccaccacccccaccttccccgccagcgtgatcacctacgagacccagaccgagagaagcagagcccagaccatccagagagagcaggagccccagaagaagaacagaaccgaccccaacatcagccccgaccagagcagcggcttcaccacccccaccgccatgaccccccccgtgctgaccaccgccgagaccagcgtgaagcccagcgtgagcgccttcacccacagcccccccgagaacaccaccggcatcagcagcaccatcagcttccacagcagaaccctgaacctgaccgacgtgatcgaggagctggcccaggccagcacccagaccctgaagagcaccatcgccagcgagaccaccctgagcagcaagagccaccagagcaccaccaccagaaaggccatcatcagacacagcaccatcccccccttcctgagcagcagcgccaccctgatgcccgtgcccatcagcccccccttcacccagagagccgtgaccgacaacgtggccacccccatcagcggcctgatgaccaacaccgtggtgaagctgcacgagagcagcagacacaacgccaagccccagcagctggtggccgaggtggccaccagccccaaggtgcaccccaacgccaagttcaccatcggcaccacccacttcatctacagcaacctgctgcacagcacccccatgcccgccctgaccaccgtgaagagccagaacagcaagctgacccccagcccctgggccgagaaccagttctggcacaagccctacagcgagatcgccgagaagggcaagaagcccgaggtgagcatgctggccaccaccggcctgagcgaggccaccaccctggtgagcgactgggacggccagaagaacaccaagaagagcgacttcgacaagaagcccgtgcaggaggccaccaccagcaagctgctgcccttcgacagcctgagcagatacatcttcgagaagcccagaatcgtgggcggcaaggccgccagcttcaccatccccgccaacagcgacgccttcctgccctgcgaggccgtgggcaaccccctgcccaccatccactggaccagagtgcccagcggcctggacctgagcaagagaaagcagaacagcagagtgcaggtgctgcccaacggcaccctgagcatccagagagtggagatccaggacagaggccagtacctgtgcagcgccagcaacctgttcggcaccgaccacctgcacgtgaccctgagcgtggtgagctacccccccagaatcctggagagaagaaccaaggagatcaccgtgcacagcggcagcaccgtggagctgaagtgcagagccgagggcagacccagccccaccgtgacctggatcctggccaaccagaccgtggtgagcgagagcagccagggcagcagacaggccgtggtgaccgtggacggcaccctggtgctgcacaacctgagcatctacgacagaggcttctacaagtgcgtggccagcaaccccggcggccaggacagcctgctggtgaagatccaggtgatcgccgccccccccgtgatcctggagcagagaagacaggtgatcgtgggcacctggggcgagagcctgaagctgccctgcaccgccaagggcaccccccagcccagcgtgtactgggtgctgagcgacggcaccgaggtgaagcccctgcagttcaccaacagcaagctgttcctgttcagcaacggcaccctgtacatcagaaacctggccagcagcgacagaggcacctacgagtgcatcgccaccagcagcaccggcagcgagagaagagtggtgatgctgaccatggaggagagagtgaccagccccagaatcgaggccgccagccagaagagaaccgaggtgaacttcggcgacaagctgctgctgaactgcagcgccaccggcgagcccaagccccagatcatgtggagactgcccagcaaggccgtggtggaccagcagcacagagtgggcagctggatccacgtgtaccccaacggcagcctgttcatcggcagcgtgaccgagaaggacagcggcgtgtacctgtgcgtggccagaaacaagatgggcgacgacctgatcctgatgcacgtgagcctgagactgaagcccgccaagatcgaccacaagcagtacttcagaaagcaggtgctgcacggcaaggacttccaggtggactgcaaggccagcggcagccccgtgcccgagatcagctggagcctgcccgacggcaccatgatcaacaacgccatgcaggccgacgacagcggccacagaaccagaagatacaccctgttcaacaacggcaccctgtacttcaacaaggtgggcgtggccgaggagggcgactacacctgctacgcccagaacaccctgggcaaggacgagatgaaggtgcacctgaccgtgatcaccgccgcccccagaatcagacagagcaacaagaccaacaagagaatcaaggccggcgacaccgccgtgctggactgcgaggtgaccggcgaccccaagcccaagatcttctggctgctgcccagcaacgacatgatcagcttcagcatcgacagatacaccttccacgccaacggcagcctgaccatcaacaaggtgaagctgctggacagcggcgagtacgtgtgcgtggccagaaaccccagcggcgacgacaccaagatgtacaagctggacgtggtgagcaagccccccctgatcaacggcctgtacaccaacagaaccgtgatcaaggccaccgccgtgagacacagcaagaagcacttcgactgcagagccgagggcacccccagccccgaggtgatgtggatcatgcccgacaacatcttcctgaccgccccctactacggcagcagaatcaccgtgcacaagaacggcaccctggagatcagaaacgtgagactgagcgacagcgccgacttcatctgcgtggccagaaacgagggcggcgagagcgtgctggtggtgcagctggaggtgctggagatgctgagaagacccaccttcagaaaccccttcaacgagaagatcgtggcccagctgggcaagagcaccgccctgaactgcagcgtggacggcaaccccccccccgagatcatctggatcctgcccaacggcaccagattcagcaacggcccccagagctaccagtacctgatcgccagcaacggcagcttcatcatcagcaagaccaccagagaggacgccggcaagtacagatgcgccgccagaaacaaggtgggctacatcgagaagctggtgatcctggagatcggccagaagcccgtgatcctgacctacgcccccggcaccgtgaagggcatcagcggcgagagcctgagcctgcactgcgtgagcgacggcatccccaagcccaacatcaagtggaccatgcccagcggctacgtggtggacagaccccagatcaacggcaagtacatcctgcacgacaacggcaccctggtgatcaaggaggccaccgcctacgacagaggcaactacatctgcaaggcccagaacagcgtgggccacaccctgatcaccgtgcccgtgatgatcgtggcctacccccccagaatcaccaacagaccccccagaagcatcgtgaccagaaccggcgccgccttccagctgcactgcgtggccctgggcgtgcccaagcccgagatcacctgggagatgcccgaccacagcctgctgagcaccgccagcaaggagagaacccacggcagcgagcagctgcacctgcagggcaccctggtgatccagaacccccagaccagcgacagcggcatctacaagtgcaccgccaagaaccccctgggcagcgactacgccgccacctacatccaggtgatctag

SEQ ID NO: 3643 - DNA, 1995 bp, synthetic construct
  misc_feature 1..1995: note = source = /note="Description of Artificial Sequence: Synthetic coding sequence"
  source 1..1995: mol_type = other DNA
atgaagaccggcctgttcttcctgtgcctgctgggcaccgccgccgccatccccaccaacgccagactgctgagcgaccacagcaagcccaccgccgagaccgtggcccccgacaacaccgccatccccagcctgagagccgaggccgaggagaacgagaaggagaccgccgtgagcaccgaggacgacagccaccacaaggccgagaagagcagcgtgctgaagagcaaggaggagagccacgagcagagcgccgagcagggcaagagcagcagccaggagctgggcctgaaggaccaggaggacagcgacggccacctgagcgtgaacctggagtacgcccccaccgagggcaccctggacatcaaggaggacatgagcgagccccaggagaagaagctgagcgagaacaccgacttcctggcccccggcgtgagcagcttcaccgacagcaaccagcaggagagcatcaccaagagagaggagaaccaggagcagcccagaaactacagccaccaccagctgaacagaagcagcaagcacagccagggcctgagagaccagggcaaccaggagcaggaccccaacatcagcaacggcgaggaggaggaggagaaggagcccggcgaggtgggcacccacaacgacaaccaggagagaaagaccgagctgcccagagagcacgccaacagcaagcaggaggaggacaacacccagagcgacgacatcctggaggagagcgaccagcccacccaggtgagcaagatgcaggaggacgagttcgaccagggcaaccaggagcaggaggacaacagcaacgccgagatggaggaggagaacgccagcaacgtgaacaagcacatccaggagaccgagtggcagagccaggagggcaagaccggcctggaggccatcagcaaccacaaggagaccgaggagaagaccgtgagcgaggccctgctgatggagcccaccgacgacggcaacaccacccccagaaaccacggcgtggacgacgacggcgacgacgacggcgacgacggcggcaccgacggccccagacacagcgccagcgacgactacttcatccccagccaggccttcctggaggccgagagagcccagagcatcgcctaccacctgaagatcgaggagcagagagagaaggtgcacgagaacgagaacatcggcaccaccgagcccggcgagcaccaggaggccaagaaggccgagaacagcagcaacgaggaggagaccagcagcgagggcaacatgagagtgcacgccgtggacagctgcatgagcttccagtgcaagagaggccacatctgcaaggccgaccagcagggcaagccccactgcgtgtgccaggaccccgtgacctgcccccccaccaagcccctggaccaggtgtgcggcaccgacaaccagacctacgccagcagctgccacctgttcgccaccaagtgcagactggagggcaccaagaagggccaccagctgcagctggactacttcggcgcctgcaagagcatccccacctgcaccgacttcgaggtgatccagttccccctgagaatgagagactggctgaagaacatcctgatgcagctgtacgaggccaacagcgagcacgccggctacctgaacgagaagcagagaaacaaggtgaagaagatctacctggacgagaagagactgctggccggcgaccaccccatcgacctgctgctgagagacttcaagaagaactaccacatgtacgtgtaccccgtgcactggcagttcagcgagctggaccagcaccccatggacagagtgctgacccacagcgagctggcccccctgagagccagcctggtgcccatggagcactgcatcaccagattcttcgaggagtgcgaccccaacaaggacaagcacatcaccctgaaggagtggggccactgcttcggcatcaaggaggaggacatcgacgagaacctgctgttctag

SEQ ID NO: 3644 - DNA, 1254 bp, synthetic construct
  misc_feature 1..1254: note = source = /note="Description of Artificial Sequence: Synthetic coding sequence"
  source 1..1254: mol_type = other DNA
atgctggccctgctggtgctggtgaccgtggccctggccagcgcccaccacggcggcgagcacttcgagggcgagaaggtgttcagagtgaacgtggaggacgagaaccacatcaacatcatcagagagctggccagcaccacccagatcgacttctggaagcccgacagcgtgacccagatcaagccccacagcaccgtggacttcagagtgaaggccgaggacaccgtgaccgtggagaacgtgctgaagcagaacgagctgcagtacaaggtgctgatcagcaacctgagaaacgtggtggaggcccagttcgacagcagagtgagagccaccggccacagctacgagaagtacaacaagtgggagaccatcgaggcctggacccagcaggtggccaccgagaaccccgccctgatcagcagaagcgtgatcggcaccaccttcgagggcagagccatctacctgctgaaggtgggcaaggccggccagaacaagcccgccatcttcatggactgcggcttccacgccagagagtggatcagccccgccttctgccagtggttcgtgagagaggccgtgagaacctacggcagagagatccaggtgaccgagctgctggacaagctggacttctacgtgctgcccgtgctgaacatcgacggctacatctacacctggaccaagagcagattctggagaaagaccagaagcacccacaccggcagcagctgcatcggcaccgaccccaacagaaacttcgacgccggctggtgcgagatcggcgccagcagaaacccctgcgacgagacctactgcggccccgccgccgagagcgagaaggagaccaaggccctggccgacttcatcagaaacaagctgagcagcatcaaggcctacctgaccatccacagctacagccagatgatgatctacccctacagctacgcctacaagctgggcgagaacaacgccgagctgaacgccctggccaaggccaccgtgaaggagctggccagcctgcacggcaccaagtacacctacggccccggcgccaccaccatctaccccgccgccggcggcagcgacgactgggcctacgaccagggcatcagatacagcttcaccttcgagctgagagacaccggcagatacggcttcctgctgcccgagagccagatcagagccacctgcgaggagaccttcctggccatcaagtacgtggccagctacgtgctggagcacctgtactag

SEQ ID NO: 3645 - DNA, 588 bp, synthetic construct
  misc_feature 1..588: note = source = /note="Description of Artificial Sequence: Synthetic coding sequence"
  source 1..588: mol_type = other DNA
atggccgtgagccagggcgacggcaccctgtgcttcgtgctgctgctgtgctgctggcaggagaccgagctgagacccagaaccgtgatccccggcagccccaccgagatccccttcagcagcaagcaggaggacatgagcgagctgctggacgagatcctggtgcaggagatcctggacctgaacaagaccacccccagcgagatgcccagcaccgccagcaccctgagcacccccctgcacgccggcatcgacgagaactaccaggccggcggcagcgagaactaccacgagctgctggagaacctgcagttcagccccggcatcgaggtgaagatcagcaacgacgaggccaacgccaacgccaacctgcacggcgaccccagcgagaactacagaggcccccaggtgagccccggcagcgagaagagcgtgagcagcaaggagaagaacagcaagaacacccagtacgagaacctgagcatcctggaccagatcctgcagaacatcggcagaagcagcggcaacatcttccacaaggagcagcagagaaccagcgcccagagaagaagccagggcagccagtag

SEQ ID NO: 3646 - DNA, 2334 bp, synthetic construct
  misc_feature 1..2334: note = source = /note="Description of Artificial Sequence: Synthetic coding sequence"
  source 1..2334: mol_type = other DNA
atgaacgccaacaaggacgagagactgaaggccagaagccaggacttccacctgttccccgccctgatgatgctgagcatgaccatgctgttcctgcccgtgaccggcaccctgaagcagaacatccccagactgaagctgacctacaaggacctgctgctgagcaacagctgcatccccttcctgggcagcagcgagggcctggacttccagaccctgctgctggacgaggagagaggcagactgctgctgggcgccaaggaccacatcttcctgctgagcctggtggacctgaacaagaacttcaagaagatctactggcccgccgccaaggagagagtggagctgtgcaagctggccggcaaggacgccaacaccgagtgcgccaacttcatcagagtgctgcagccctacaacaagacccacatctacgtgtgcggcaccggcgccttccaccccatctgcggctacatcgacctgggcgtgtacaaggaggacatcatcttcaagctggacacccacaacctggagagcggcagactgaagtgccccttcgacccccagcagcccttcgccagcgtgatgaccgacgagtacctgtacagcggcaccgccagcgacttcctgggcaaggacaccgccttcaccagaagcctgggccccacccacgaccaccactacatcagaaccgacatcagcgagcactactggctgaacggcgccaagttcatcggcaccttcttcatccccgacacctacaaccccgacgacgacaagatctacttcttcttcagagagagcagccaggagggcagcaccagcgacaagaccatcctgagcagagtgggcagagtgtgcaagaacgacgtgggcggccagagaagcctgatcaacaagtggaccaccttcctgaaggccagactgatctgcagcatccccggcagcgacggcgccgacacctacttcgacgagctgcaggacatctacctgctgcccaccagagacgagagaaaccccgtggtgtacggcgtgttcaccaccaccagcagcatcttcaagggcagcgccgtgtgcgtgtacagcatggccgacatcagagccgtgttcaacggcccctacgcccacaaggagagcgccgaccacagatgggtgcagtacgacggcagaatcccctaccccagacccggcacctgccccagcaagacctacgaccccctgatcaagagcaccagagacttccccgacgacgtgatcagcttcatcaagagacacagcgtgatgtacaagagcgtgtaccccgtggccggcggccccaccttcaagagaatcaacgtggactacagactgacccagatcgtggtggaccacgtgatcgccgaggacggccagtacgacgtgatgttcctgggcaccgacatcggcaccgtgctgaaggtggtgagcatcagcaaggagaagtggaacatggaggaggtggtgctggaggagctgcagatcttcaagcacagcagcatcatcctgaacatggagctgagcctgaagcagcagcagctgtacatcggcagcagagacggcctggtgcagctgagcctgcacagatgcgacacctacggcaaggcctgcgccgactgctgcctggccagagacccctactgcgcctgggacggcaacgcctgcagcagatacgcccccaccagcaagagaagagccagaagacaggacgtgaagtacggcgaccccatcacccagtgctgggacatcgaggacagcatcagccacgagaccgccgacgagaaggtgatcttcggcatcgagttcaacagcaccttcctggagtgcatccccaagagccagcaggccaccatcaagtggtacatccagagaagcggcgacgagcacagagaggagctgaagcccgacgagagaatcatcaagaccgagtacggcctgctgatcagaagcctgcagaagaaggacagcggcatgtactactgcaaggcccaggagcacaccttcatccacaccatcgtgaagctgaccctgaacgtgatcgagaacgagcagatggagaacacccagagagccgagcacgaggagggcaaggtgaaggacctgctggccgagagcagactgagatacaaggactacatccagatcctgagcagccccaacttcagcctggaccagtactgcgagcagatgtggcacagagagaagagaagacagagaaacaagggcggccccaagtggaagcacatgcaggagatgaagaagaagagaaacagaagacaccacagagacctggacgagctgcccagagccgtggccacctag

SEQ ID NO: 3647 - DNA, 1332 bp, synthetic construct
  misc_feature 1..1332: note = source = /note="Description of Artificial Sequence: Synthetic coding sequence"
  source 1..1332: mol_type = other DNA
atgcagcccagcgagatggtgatgaaccccaagcaggtgttcctgagcgtgctgatcttcggcgtggccggcctgctgctgttcatgtacctgcaggtgtggatcgaggagcagcacaccggcagagtggagaagagaagagagcagaaggtgaccagcggctggggccccgtgaagtacctgagacccgtgcccagaatcatgagcaccgagaagatccaggagcacatcaccaaccagaaccccaagttccacatgcccgaggacgtgagagagaagaaggagaacctgctgctgaacagcgagagaagcaccagactgctgaccaagaccagccacagccagggcggcgaccaggccctgagcaagagcaccggcagccccaccgagaagctgatcgagaagagacagggcgccaagaccgtgttcaacaagttcagcaacatgaactggcccgtggacatccaccccctgaacaagagcctggtgaaggacaacaagtggaagaagaccgaggagacccaggagaagagaagaagcttcctgcaggagttctgcaagaagtacggcggcgtgagccaccaccagagccacctgttccacaccgtgagcagaatctacgtggaggacaagcacaagatcctgtactgcgaggtgcccaaggccggctgcagcaactggaagagaatcctgatggtgctgaacggcctggccagcagcgcctacaacatcagccacaacgccgtgcactacggcaagcacctgaagaagctggacagcttcgacctgaagggcatctacaccagactgaacacctacaccaaggccgtgttcgtgagagaccccatggagagactggtgagcgccttcagagacaagttcgagcaccccaacagctactaccaccccgtgttcggcaaggccatcatcaagaagtacagacccaacgcctgcgaggaggccctgatcaacggcagcggcgtgaagttcaaggagttcatccactacctgctggacagccacagacccgtgggcatggacatccactgggagaaggtgagcaagctgtgctacccctgcctgatcaactacgacttcgtgggcaagttcgagaccctggaggaggacgccaactacttcctgcagatgatcggcgcccccaaggagctgaagttccccaacttcaaggacagacacagcagcgacgagagaaccaacgcccaggtggtgagacagtacctgaaggacctgaccagaaccgagagacagctgatctacgacttctactacctggactacctgatgttcaactacaccacccccttcctgtag

SEQ ID NO: 3648 - DNA, 3228 bp, synthetic construct
  misc_feature 1..3228: note = source = /note="Description of Artificial Sequence: Synthetic coding sequence"
  source 1..3228: mol_type = other DNA
atgagaggcggcaagtgcaacatgctgagcagcctgggctgcctgctgctgtgcggcagcatcaccctggccctgggcaacgcccagaagctgcccaagggcaagagacccaacctgaaggtgcacatcaacaccaccagcgacagcatcctgctgaagttcctgagacccagccccaacgtgaagctggagggcctgctgctgggctacggcagcaacgtgagccccaaccagtacttccccctgcccgccgagggcaagttcaccgaggccatcgtggacgccgagcccaagtacctgatcgtggtgagacccgcccccccccccagccagaagaagagctgcagcggcaagaccagaagcagaaagcccctgcagctggtggtgggcaccctgacccccagcagcgtgttcctgagctggggcttcctgatcaacccccaccacgactggaccctgcccagccactgccccaacgacagattctacaccatcagatacagagagaaggacaaggagaagaagtggatcttccagatctgccccgccaccgagaccatcgtggagaacctgaagcccaacaccgtgtacgagttcggcgtgaaggacaacgtggagggcggcatctggagcaagatcttcaaccacaagaccgtggtgggcagcaagaaggtgaacggcaagatccagagcacctacgaccaggaccacaccgtgcccgcctacgtgcccagaaagctgatccccatcaccatcatcaagcaggtgatccagaacgtgacccacaaggacagcgccaagagccccgagaaggcccccctgggcggcgtgatcctggtgcacctgatcatccccggcctgaacgagaccaccgtgaagctgcccgccagcctgatgttcgagatcagcgacgccctgaagacccagctggccaagaacgagaccctggccctgcccgccgagagcaagacccccgaggtggagaagatcagcgccagacccaccaccgtgacccccgagaccgtgcccagaagcaccaagcccaccaccagcagcgccctggacgtgagcgagaccaccctggccagcagcgagaagccctggatcgtgcccaccgccaagatcagcgaggacagcaaggtgctgcagccccagaccgccacctacgacgtgttcagcagccccaccaccagcgacgagcccgagatcagcgacagctacaccgccaccagcgacagaatcctggacagcatcccccccaagaccagcagaaccctggagcagcccagagccaccctggcccccagcgagacccccttcgtgccccagaagctggagatcttcaccagccccgagatgcagcccaccacccccgccccccagcagaccaccagcatccccagcacccccaagagaagacccagacccaagccccccagaaccaagcccgagagaaccaccagcgccggcaccatcacccccaagatcagcaagagccccgagcccacctggaccacccccgcccccggcaagacccagttcatcagcctgaagcccaagatccccctgagccccgaggtgacccacaccaagcccgcccccaagcagacccccagagccccccccaagcccaagaccagccccagacccagaatcccccagacccagcccgtgcccaaggtgccccagagagtgaccgccaagcccaagaccagccccagccccgaggtgagctacaccacccccgcccccaaggacgtgctgctgccccacaagccctaccccgaggtgagccagagcgagcccgcccccctggagaccagaggcatccccttcatccccatgatcagccccagccccagccaggaggagctgcagaccaccctggaggagaccgaccagagcacccaggagcccttcaccaccaagatccccagaaccaccgagctggccaagaccacccaggccccccacagattctacaccaccgtgagacccagaaccagcgacaagccccacatcagacccggcgtgaagcaggcccccagacccagcggcgccgacagaaacgtgagcgtggacagcacccaccccaccaagaagcccggcaccagaagaccccccctgccccccagacccacccaccccagaagaaagcccctgccccccaacaacgtgaccggcaagcccggcagcgccggcatcatcagcagcggccccatcaccaccccccccctgagaagcacccccagacccaccggcacccccctggagagaatcgagaccgacatcaagcagcccaccgtgcccgccagcggcgaggagctggagaacatcaccgacttcagcagcagccccaccagagagaccgaccccctgggcaagcccagattcaagggcccccacgtgagatacatccagaagcccgacaacagcccctgcagcatcaccgacagcgtgaagagattccccaaggaggaggccaccgagggcaacgccaccagccccccccagaacccccccaccaacctgaccgtggtgaccgtggagggctgccccagcttcgtgatcctggactgggagaagcccctgaacgacaccgtgaccgagtacgaggtgatcagcagagagaacggcagcttcagcggcaagaacaagagcatccagatgaccaaccagaccttcagcaccgtggagaacctgaagcccaacaccagctacgagttccaggtgaagcccaagaaccccctgggcgagggccccgtgagcaacaccgtggccttcagcaccgagagcgccgaccccagagtgagcgagcccgtgagcgccggcagagacgccatctggaccgagagacccttcaacagcgacagctacagcgagtgcaagggcaagcagtacgtgaagagaacctggtacaagaagttcgtgggcgtgcagctgtgcaacagcctgagatacaagatctacctgagcgacagcctgaccggcaagttctacaacatcggcgaccagagaggccacggcgaggaccactgccagttcgtggacagcttcctggacggcagaaccggccagcagctgaccagcgaccagctgcccatcaaggagggctacttcagagccgtgagacaggagcccgtgcagttcggcgagatcggcggccacacccagatcaactacgtgcagtggtacgagtgcggcaccaccatccccggcaagtggtag

SEQ ID NO: 3649 - DNA, 483 bp, synthetic construct
  misc_feature 1..483: note = source = /note="Description of Artificial Sequence: Synthetic coding sequence"
  source 1..483: mol_type = other DNA
atgctgcccttcctgttcttcagcaccctgttcagcagcatcttcaccgaggcccagaagcagtactgggtgtgcaacagcagcgacgccagcatcagctacacctactgcgacaagatgcagtaccccatcagcatcaacgtgaacccctgcatcgagctgaagagaagcaagggcctgctgcacatcttctacatccccagaagagacctgaagcagctgtacttcaacctgtacatcaccgtgaacaccatgaacctgcccaagagaaaggaggtgatctgcagaggcagcgacgacgactacagcttctgcagagccctgaagggcgagaccgtgaacaccaccatcagcttcagcttcaagggcatcaagttcagcaagggcaagtacaagtgcgtggtggaggccatcagcggcagccccgaggagatgctgttctgcctggagttcgtgatcctgcaccagcccaacagcaactag

SEQ ID NO: 3650 - DNA, 780 bp, synthetic construct
  misc_feature 1..780: note = source = /note="Description of Artificial Sequence: Synthetic coding sequence"
  source 1..780: mol_type = other DNA
atggccgccctgatgagaagcaaggacagcagctgctgcctgctgctgctggccgccgtgctgatggtggagagcagccagatcggcagcagcagagccaagctgaacagcatcaagagcagcctgggcggcgagacccccggccaggccgccaacagaagcgccggcatgtaccagggcctggccttcggcggcagcaagaagggcaagaacctgggccaggcctacccctgcagcagcgacaaggagtgcgaggtgggcagatactgccacagcccccaccagggcagcagcgcctgcatggtgtgcagaagaaagaagaagagatgccacagagacggcatgtgctgccccagcaccagatgcaacaacggcatctgcatccccgtgaccgagagcatcctgaccccccacatccccgccctggacggcaccagacacagagacagaaaccacggccactacagcaaccacgacctgggctggcagaacctgggcagaccccacaccaagatgagccacatcaagggccacgagggcgacccctgcctgagaagcagcgactgcatcgagggcttctgctgcgccagacacttctggaccaagatctgcaagcccgtgctgcaccagggcgaggtgtgcaccaagcagagaaagaagggcagccacggcctggagatcttccagagatgcgactgcgccaagggcctgagctgcaaggtgtggaaggacgccacctacagcagcaaggccagactgcacgtgtgccagaagatctag

SEQ ID NO: 3651 - DNA, 3030 bp, synthetic construct
  misc_feature 1..3030: note = source = /note="Description of Artificial Sequence: Synthetic coding sequence"
  source 1..3030: mol_type = other DNA
atgggccagctgtgctggctgcccctgctggcccccctgctgctgctgagaccccccggcgtgcagagcgccggccccatcagagccttcgtggtgccccacagccacatggacgtgggctgggtgtacaccgtgcaggagagcatgagagcctacgccgccaacgtgtacaccagcgtggtggaggagctggccagaggccagcagagaagattcatcgccgtggagcaggagttcttcagactgtggtgggacggcgtggccagcgaccagcagaagtaccaggtgagacagctgctggaggagggcagactggagttcgtgatcggcggccaggtgatgcacgacgaggccgtgacccacctggacgaccagatcctgcagctgaccgagggccacggcttcctgtacgagaccttcggcatcagaccccagttcagctggcacgtggaccccttcggcgccagcgccaccacccccaccctgttcgccctggccggcttcaacgcccacctgggcagcagaatcgactacgacctgaaggccgccatgcaggaggccagaggcctgcagttcgtgtggagaggcagccccagcctgagcgagagacaggagatcttcacccacatcatggaccagtacagctactgcacccccagccacatccccttcagcaacagaagcggcttctactggaacggcgtggccgtgttccccaagcccccccaggacggcgtgtaccccaacatgagcgagcccgtgacccccgccaacatcaacctgtacgccgaggccctggtggccaacgtgaagcagagagccgcctggttcagaaccccccacgtgctgtggccctggggctgcgacaagcagttcttcaacgccagcgtgcagttcgccaacatggaccccctgctggaccacatcaacagccacgccgccgagctgggcgtgagcgtgcagtacgccaccctgggcgactacttcagagccctgcacgccctgaacgtgacctggagagtgagagaccaccacgacttcctgccctacagcaccgagcccttccaggcctggaccggcttctacaccagcagaagcagcctgaagggcctggccagaagagccagcgccctgctgtacgccggcgagagcatgttcaccagatacctgtggcccgcccccagaggccacctggaccccacctgggccctgcagcagctgcagcagctgagatgggccgtgagcgaggtgcagcaccacgacgccatcaccggcaccgagagccccaaggtgagagacatgtacgccacccacctggccagcggcatgctgggcatgagaaagctgatggccagcatcgtgctggacgagctgcagccccaggcccccatggccgccagcagcgacgccggccccgccggccacttcgccagcgtgtacaaccccctggcctggaccgtgaccaccatcgtgaccctgaccgtgggcttccccggcgtgagagtgaccgacgaggccggccaccccgtgcccagccagatccagaacagcaccgagacccccagcgcctacgacctgctgatcctgaccaccatccccggcctgagctacagacactacaacatcagacccaccgccggcgcccaggagggcacccaggagcccgccgccaccgtggccagcaccctgcagttcggcagaagactgagaagaagaaccagccacgccggcagatacctggtgcccgtggccaacgactgctacatcgtgctgctggaccaggacaccaacctgatgcacagcatctgggagagacagagcaacagaaccgtgagagtgacccaggagttcctggagtaccacgtgaacggcgacgtgaagcagggccccatcagcgacaactacctgttcacccccggcaaggccgccgtgcccgcctgggaggccgtggagatggagatcgtggccggccagctggtgaccgagatcagacagtacttctacagaaacatgaccgcccagaactacacctacgccatcagaagcagactgacccacgtgccccagggccacgacggcgagctgctgtgccacagaatcgagcaggagtaccaggccggccccctggagctgaacagagaggccgtgctgagaaccagcaccaacctgaacagccagcaggtgatctacagcgacaacaacggctaccagatgcagagaagaccctacgtgagctacgtgaacaacagcatcgccagaaactactaccccatggtgcagagcgccttcatggaggacggcaagagcagactggtgctgctgagcgagagagcccacggcatcagcagccagggcaacggccaggtggaggtgatgctgcacagaagactgtggaacaacttcgactgggacctgggctacaacctgaccctgaacgacaccagcgtggtgcaccccgtgctgtggctgctgctgggcagctggagcctgaccaccgccctgagacagagaagcgccctggccctgcagcacagacccgtggtgctgttcggcgacctggccggcaccgcccccaagctgcccggcccccagcagcaggaggccgtgaccctgccccccaacctgcacctgcagatcctgagcatccccggctggagatacagcagcaaccacaccgagcacagccagaacctgagaaagggccacagaggcgaggcccaggccgacctgagaagagtgctgctgagactgtaccacctgtacgaggtgggcgaggaccccgtgctgagccagcccgtgaccgtgaacctggaggccgtgctgcaggccctgggcagcgtggtggccgtggaggagagaagcctgaccggcacctgggacctgagcatgctgcacagatggagctggagaaccggccccggcagacacagaggcgacaccaccagccccagcagaccccccggcggccccatcatcaccgtgcaccccaaggagatcagaaccttcttcatccacttccagcagcagtag

SEQ ID NO: 3652 - DNA, 1443 bp, synthetic construct
  misc_feature 1..1443: note = source = /note="Description of Artificial Sequence: Synthetic coding sequence"
  source 1..1443: mol_type = other DNA
atgctgttcagaaacagattcctgctgctgctggccctggccgccctgctggccttcgtgagcctgagcctgcagttcttccacctgatccccgtgagcacccccaagaacggcatgagcagcaagagcagaaagagaatcatgcccgaccccgtgaccgagccccccgtgaccgaccccgtgtacgaggccctgctgtactgcaacatccccagcgtggccgagagaagcatggagggccacgccccccaccacttcaagctggtgagcgtgcacgtgttcatcagacacggcgacagataccccctgtacgtgatccccaagaccaagagacccgagatcgactgcaccctggtggccaacagaaagccctaccaccccaagctggaggccttcatcagccacatgagcaagggcagcggcgccagcttcgagagccccctgaacagcctgcccctgtaccccaaccaccccctgtgcgagatgggcgagctgacccagaccggcgtggtgcagcacctgcagaacggccagctgctgagagacatctacctgaagaagcacaagctgctgcccaacgactggagcgccgaccagctgtacctggagaccaccggcaagagcagaaccctgcagagcggcctggccctgctgtacggcttcctgcccgacttcgactggaagaagatctacttcagacaccagcccagcgccctgttctgcagcggcagctgctactgccccgtgagaaaccagtacctggagaaggagcagagaagacagtacctgctgagactgaagaacagccagctggagaagacctacggcgagatggccaagatcgtggacgtgcccaccaagcagctgagagccgccaaccccatcgacagcatgctgtgccacttctgccacaacgtgagcttcccctgcaccagaaacggctgcgtggacatggagcacttcaaggtgatcaagacccaccagatcgaggacgagagagagagaagagagaagaagctgtacttcggctacagcctgctgggcgcccaccccatcctgaaccagaccatcggcagaatgcagagagccaccgagggcagaaaggaggagctgttcgccctgtacagcgcccacgacgtgaccctgagccccgtgctgagcgccctgggcctgagcgaggccagattccccagattcgccgccagactgatcttcgagctgtggcaggacagagagaagcccagcgagcacagcgtgagaatcctgtacaacggcgtggacgtgaccttccacaccagcttctgccaggaccaccacaagagaagccccaagcccatgtgccccctggagaacctggtgagattcgtgaagagagacatgttcgtggccctgggcggcagcggcaccaactactacgacgcctgccacagagagggcttctag

SEQ ID NO: 3653 - DNA, 1341 bp, synthetic construct
  misc_feature 1..1341: note = source = /note="Description of Artificial Sequence: Synthetic coding sequence"
  source 1..1341: mol_type = other DNA
atgctgcaccccgagaccagccccggcagaggccacctgctggccgtgctgctggccctgctgggcaccgcctgggccgaggtgtggcccccccagctgcaggagcaggcccccatggccggcgccctgaacagaaaggagagcttcctgctgctgagcctgcacaacagactgagaagctgggtgcagccccccgccgccgacatgagaagactggactggagcgacagcctggcccagctggcccaggccagagccgccctgtgcggcacccccacccccagcctggccagcggcctgtggagaaccctgcaggtgggctggaacatgcagctgctgcccgccggcctggtgagcttcgtggaggtggtgagcctgtggttcgccgagggccagagatacagccacgccgccggcgagtgcgccagaaacgccacctgcacccactacacccagctggtgtgggccaccagcagccagctgggctgcggcagacacctgtgcagcgccggccaggccgccatcgaggccttcgtgtgcgcctacagccccagaggcaactgggaggtgaacggcaagaccatcgtgccctacaagaagggcgcctggtgcagcctgtgcaccgccagcgtgagcggctgcttcaaggcctgggaccacgccggcggcctgtgcgaggtgcccagaaacccctgcagaatgagctgccagaaccacggcagactgaacatcagcacctgccactgccactgcccccccggctacaccggcagatactgccaggtgagatgcagcctgcagtgcgtgcacggcagattcagagaggaggagtgcagctgcgtgtgcgacatcggctacggcggcgcccagtgcgccaccaaggtgcacttccccttccacacctgcgacctgagaatcgacggcgactgcttcatggtgagcagcgaggccgacacctactacagagccagaatgaagtgccagagaaagggcggcgtgctggcccagatcaagagccagaaggtgcaggacatcctggccttctacctgggcagactggagaccaccaacgaggtgatcgacagcgacttcgagaccagaaacttctggatcggcctgacctacaagaccgccaaggacagcttcagatgggccaccggcgagcaccaggccttcaccagcttcgccttcggccagcccgacaaccacggcttcggcaactgcgtggagctgcaggccagcgccgccttcaactggaacgaccagagatgcaagaccagaaacagatacatctgccagttcgcccaggagcacatcagcagatggggccccggcagctag

SEQ ID NO: 3654 - DNA, 2313 bp, synthetic construct
  misc_feature 1..2313: note = source = /note="Description of Artificial Sequence: Synthetic coding sequence"
  source 1..2313: mol_type = other DNA
atggtggagagcgccggcagagccggccagaagagacccggcttcctggagggcggcctgctgctgctgctgctgctggtgaccgccgccctggtggccctgggcgtgctgtacgccgacagaagaggcaagcagctgcccagactggccagcagactgtgcttcctgcaggaggagagaaccttcgtgaagagaaagcccagaggcatccccgaggcccaggaggtgagcgaggtgtgcaccacccccggctgcgtgatcgccgccgccagaatcctgcagaacatggaccccaccaccgagccctgcgacgacttctaccagttcgcctgcggcggctggctgagaagacacgtgatccccgagaccaacagcagatacagcatcttcgacgtgctgagagacgagctggaggtgatcctgaaggccgtgctggagaacagcaccgccaaggacagacccgccgtggagaaggccagaaccctgtacagaagctgcatgaaccagagcgtgatcgagaagagaggcagccagcccctgctggacatcctggaggtggtgggcggctggcccgtggccatggacagatggaacgagaccgtgggcctggagtgggagctggagagacagctggccctgatgaacagccagttcaacagaagagtgctgatcgacctgttcatctggaacgacgaccagaacagcagcagacacatcatctacatcgaccagcccaccctgggcatgcccagcagagagtactacttcaacggcggcagcaacagaaaggtgagagaggcctacctgcagttcatggtgagcgtggccaccctgctgagagaggacgccaacctgcccagagacagctgcctggtgcaggaggacatggtgcaggtgctggagctggagacccagctggccaaggccaccgtgccccaggaggagagacacgacgtgatcgccctgtaccacagaatgggcctggaggagctgcagagccagttcggcctgaagggcttcaactggaccctgttcatccagaccgtgctgagcagcgtgaagatcaagctgctgcccgacgaggaggtggtggtgtacggcatcccctacctgcagaacctggagaacatcatcgacacctacagcgccagaaccatccagaactacctggtgtggagactggtgctggacagaatcggcagcctgagccagagattcaaggacaccagagtgaactacagaaaggccctgttcggcaccatggtggaggaggtgagatggagagagtgcgtgggctacgtgaacagcaacatggagaacgccgtgggcagcctgtacgtgagagaggccttccccggcgacagcaagagcatggtgagagagctgatcgacaaggtgagaaccgtgttcgtggagaccctggacgagctgggctggatggacgaggagagcaagaagaaggcccaggagaaggccatgagcatcagagagcagatcggccaccccgactacatcctggaggagatgaacagaagactggacgaggagtacagcaacctgaacttcagcgaggacctgtacttcgagaacagcctgcagaacctgaaggtgggcgcccagagaagcctgagaaagctgagagagaaggtggaccccaacctgtggatcatcggcgccgccgtggtgaacgccttctacagccccaacagaaaccagatcgtgttccccgccggcatcctgcagccccccttcttcagcaaggagcagccccaggccctgaacttcggcggcatcggcatggtgatcggccacgagatcacccacggcttcgacgacaacggcagaaacttcgacaagaacggcaacatgatggactggtggagcaacttcagcacccagcacttcagagagcagagcgagtgcatgatctaccagtacggcaactacagctgggacctggccgacgagcagaacgtgaacggcttcaacaccctgggcgagaacatcgccgacaacggcggcgtgagacaggcctacaaggcctacctgaagtggatggccgagggcggcaaggaccagcagctgcccggcctggacctgacccacgagcagctgttcttcatcaactacgcccaggtgtggtgcggcagctacagacccgagttcgccatccagagcatcaagaccgacgtgcacagccccctgaagtacagagtgctgggcagcctgcagaacctggccgccttcgccgacaccttccactgcgccagaggcacccccatgcaccccaaggagagatgcagagtgtggtag

SEQ ID NO: 3655 - DNA, 1317 bp, synthetic construct
  misc_feature 1..1317: note = source = /note="Description of Artificial Sequence: Synthetic coding sequence"
  source 1..1317: mol_type = other DNA
atgagcaagagagacaaggccggcaaggacaccgccagaggcaagggcaaggacatcagcaagtacggcagcgtgcagaagagcttcgccgacagaggcctgcccaagccccccaaggagaagctgctgcaggtggagaagctgagaaaggagagcggcaagggcagcttcctgcagcccaccgccaagcccagagccctggcccagcagcaggccgtgatcagaggcttcacctactacaaggccggcaagcaggaggtgaccgaggccgtggccgacaacaccctgcagggcaccagctggctggagcagctgccccccaaggtggagggcagaagcaacagcgccgagcccaacagcgccgagcaggacgaggccgagcccagaagcagcgagagagtggacctggccagcggcacccccaccagcatccccgccaccaccaccaccgccaccaccacccccacccccaccaccagcctgctgcccaccgagccccccagcggccccgaggtgagcagccagggcagagaggccagctgcgagggcaccctgagagccgtggacccccccgtgagacaccacagctacggcagacacgagggcgcctggatgaaggaccccgccgccagagacgacagaatctacgtgaccaactactactacggcaacagcctggtggagttcagaaacctggagaacttcaagcagggcagatggagcaacatgtacaagctgccctacaactggatcggcaccggccacgtggtgtaccagggcgccttctactacaacagagccttcaccaagaacatcatcaagtacgacctgagacagagattcgtggccagctgggccctgctgcccgacgtggtgtacgaggacaccaccccctggaagtggagaggccacagcgacatcgacttcgccgtggacgagagcggcctgtgggtgatctaccccgccgtggacgacagagacgaggcccagcccgaggtgatcgtgctgagcagactggaccccggcgacctgagcgtgcacagagagaccacctggaagaccagactgagaagaaacagctacggcaactgcttcctggtgtgcggcatcctgtacgccgtggacacctacaaccagcaggagggccaggtggcctacgccttcgacacccacaccggcaccgacgccagaccccagctgcccttcctgaacgagcacgcctacaccacccagatcgactacaaccccaaggagagagtgctgtacgcctgggacaacggccaccagctgacctacaccctgcacttcgtggtgtag

SEQ ID NO: 3656 - DNA, 3570 bp, synthetic construct
  misc_feature 1..3570: note = source = /note="Description of Artificial Sequence: Synthetic coding sequence"
  source 1..3570: mol_type = other DNA
atgcccggcctgctgaactggatcaccggcgccgccctgcccctgaccgccagcgacgtgaccagctgcgtgagcggctacgccctgggcctgaccgccagcctgacctacggcaacctggaggcccagcccttccagggcctgttcgtgtaccccctggacgagtgcaccaccgtgatcggcttcgaggccgtgatcgccgacagagtggtgaccgtgcagatcaaggacaaggccaagctggagagcggccacttcgacgccagccacgtgagaagccccaccgtgaccggcaacatcctgcaggacggcgtgagcatcgccccccacagctgcacccccggcaaggtgaccctggacgaggacctggagagaatcctgttcgtggccaacctgggcaccatcgcccccatggagaacgtgaccatcttcatcagcaccagcagcgagctgcccaccctgcccagcggcgccgtgagagtgctgctgcccgccgtgtgcgcccccaccgtgccccagttctgcaccaagagcaccggcaccagcaaccagcaggcccagggcaaggacagacactgcttcggcgcctgggcccccggcagctggaacaagctgtgcctggccaccctgctgaacaccgaggtgagcaaccccatggagtacgagttcaacttccagctggagatcagaggcccctgcctgctggccggcgtggagagccccacccacgagatcagagccgacgccgcccccagcgccagaagcgccaagagcatcatcatcaccctggccaacaagcacaccttcgacagacccgtggagatcctgatccaccccagcgagccccacatgccccacgtgctgatcgagaagggcgacatgaccctgggcgagttcgaccagcacctgaagggcagaaccgacttcatcaagggcatgaagaagaagagcagagccgagagaaagaccgagatcatcagaaagagactgcacaaggacatcccccaccacagcgtgatcatgctgaacttctgccccgacctgcagagcgtgcagccctgcctgagaaaggcccacggcgagttcatcttcctgatcgacagaagcagcagcatgagcggcatcagcatgcacagagtgaaggacgccatgctggtggccctgaagagcctgatgcccgcctgcctgttcaacatcatcggcttcggcagcaccttcaagagcctgttccccagcagccagacctacagcgaggacagcctggccatggcctgcgacgacatccagagaatgaaggccgacatgggcggcaccaacatcctgagccccctgaagtgggtgatcagacagcccgtgcacagaggccaccccagactgctgttcgtgatcaccgacggcgccgtgaacaacaccggcaaggtgctggagctggtgagaaaccacgccttcagcaccagatgctacagcttcggcatcggccccaacgtgtgccacagactggtgaagggcctggccagcgtgagcgagggcagcgccgagctgctgatggagggcgagagactgcagcccaagatggtgaagagcctgaagaaggccatggcccccgtgctgagcgacgtgaccgtggagtggatcttccccgagaccaccgaggtgctggtgagccccgtgagcgccagcagcctgttccccggcgagagactggtgggctacggcatcgtgtgcgacgccagcctgcacatcagcaaccccagaagcgacaagagaagaagatacagcatgctgcacagccaggagagcggcagcagcgtgttctaccacagccaggacgacggccccggcctggagggcggcgactgcgccaagaacagcggcgcccccttcatcctgggccaggccaagaacgccagactggccagcggcgacagcaccaccaagcacgacctgaacctgagccagagaagaagagcctacagcaccaaccagatcaccaaccacaagcccctgcccagagccaccatggccagcgaccccatgcccgccgccaagagataccccctgagaaaggccagactgcaggacctgaccaaccagaccagcctggacgtgcagagatggcagatcgacctgcagcccctgctgaacagcggccaggacctgaaccagggccccaagctgagaggccccggcgccagaagacccagcctgctgccccagggctgccagcccttcctgccctggggccaggagacccaggcctggagccccgtgagagagagaaccagcgacagcagaagccccggcgacctggagcccagccaccaccccagcgccttcgagaccgagaccagcagcgactgggacccccccgccgagagccaggagagagccagccccagcagacccgccacccccgcccccgtgctgggcaaggccctggtgaagggcctgcacgacagccagagactgcagtgggaggtgagcttcgagctgggcacccccggccccgagagaggcggcgcccaggacgccgacctgtggagcgagaccttccaccacctggccgccagagccatcatcagagacttcgagcagctggccgagagagagggcgagatcgagcagggcagcaacagaagataccaggtgagcgccctgcacaccagcaaggcctgcaacatcatcagcaagtacaccgccttcgtgcccgtggacgtgagcaagagcagatacctgcccaccgtggtggagtaccccaacagcgccgccctgagaatgctgggcagcagagccctggcccagcagtggagaggcaccagcagcggcttcggcagaccccagaccatgctgggcgaggacagcgcccccggcaacggcccccagagaagcctggccaccaacaccctgagcagcatgaaggccagcgagaacctgttcggcagctggctgaacctgaacaagagcagactgctgaccagagccgccaagggcttcctgagcaagcccctgatcaaggccgtggagagcaccagcggcaaccagagcttcgactacatccccctggtgagcctgcagctggccagcggcgccttcctgctgaacgaggccttctgcgaggccacccacatccccatggagaagctgaagtggaccagccccttcacctgccacagagtgagcctgaccaccagacccagcgagagcaagacccccagcccccagctgtgcaccagcagcccccccagacaccccagctgcgacagcttcagcctggagcccctggccaagggcaagctgggcctggagcccagagccgtggtggagcacaccggcaagctgtgggccaccgtggtgggcctggcctggctggagcacagcagcgccagctacttcaccgagtgggagctggtggccgccaaggccaacagctggctggagcagcaggaggtgcccgagggcagaacccagggcaccctgaaggccgccgccagacagctgttcgtgctgctgagacactgggacgagaacctggagttcaacatgctgtgctacaaccccaactacgtgtag

SEQ ID NO: 3657 - DNA, 1344 bp, synthetic construct
  misc_feature 1..1344: note = source = /note="Description of Artificial Sequence: Synthetic coding sequence"
  source 1..1344: mol_type = other DNA
atgccccacgtgctgatcgagaagggcgacatgaccctgggcgagttcgaccagcacctgaagggcagaaccgacttcatcaagggcatgaagaagaagagcagagccgagagaaagaccgagatcatcagaaagagactgcacaaggacatcccccaccacagcgtgatcatgctgaacttctgccccgacctgcagagcgtgcagccctgcctgagaaaggcccacggcgagttcatcttcctgatcgacagaagcagcagcatgagcggcatcagcatgcacagagtgaaggacgccatgctggtggccctgaagagcctgatgcccgcctgcctgttcaacatcatcggcttcggcagcaccttcaagagcctgttccccagcagccagacctacagcgaggacagcctggccatggcctgcgacgacatccagagaatgaaggccgacatgggcggcaccaacatcctgagccccctgaagtgggtgatcagacagcccgtgcacagaggccaccccagactgctgttcgtgatcaccgacggcgccgtgaacaacaccggcaaggtgctggagctggtgagaaaccacgccttcagcaccagatgctacagcttcggcatcggccccaacgtgtgccacagactggtgaagggcctggccagcgtgagcgagggcagcgccgagctgctgatggagggcgagagactgcagcccaagatggtgaagagcctgaagaaggccatggcccccgtgctgagcgacgtgaccgtggagtggatcttccccgagaccaccgaggtgctggtgagccccgtgagcgccagcagcctgttccccggcgagagactggtgggctacggcatcgtgtgcgacgccagcctgcacatcagcaaccccagaagcgacaagagaagaagatacagcatgctgcacagccaggagagcggcagcagcgtgttctaccacagccaggacgacggccccggcctggagggcggcgactgcgccaagaacagcggcgcccccttcatcctgggccaggccaagaacgccagactggccagcggcgacagcaccaccaagcacgacctgaacctgagccagagaagaagagcctacagcaccaaccagatcaccaaccacaagcccctgcccagagccaccatggccagcgaccccatgcccgccgccaagagataccccctgagaaaggccagactgcaggacctgaccaaccagaccagcctggacgtgcagagatggcagatcgacctgcaggccttcatctgcctgaccagcgaggacaccttccagatcagaacccccaccggccagtag

SEQ ID NO: 3658 - DNA, 726 bp, synthetic construct
  misc_feature 1..726: note = source = /note="Description of Artificial Sequence: Synthetic coding sequence"
  source 1..726: mol_type = other DNA
atgtggaccgtgagaaccgagggcggccacttccccctgcacagccccaccttcagctggagaaacgtggccttcctgctgctgctgagcctggccctggagtggaccagcgccatgctgaccaagaagatcaagcacaagcccggcctgtgccccaaggagagactgacctgcaccaccgagctgcccgacagctgcaacaccgacttcgactgcaaggagtaccagaagtgctgcttcttcgcctgccagaagaagtgcatggaccccttccaggagccctgcatgctgcccgtgagacacggcaactgcaaccacgaggcccagagatggcacttcgacttcaagaactacagatgcacccccttcaagtacagaggctgcgagggcaacgccaacaacttcctgaacgaggacgcctgcagaaccgcctgcatgctgatcgtgaaggacggccagtgccccctgttccccttcaccgagagaaaggagtgcccccccagctgccacagcgacatcgactgcccccagaccgacaagtgctgcgagagcagatgcggcttcgtgtgcgccagagcctggaccgtgaagaagggcttctgccccagaaagcccctgctgtgcaccaagatcgacaagcccaagtgcctgcaggacgaggagtgccccctggtggagaagtgctgcagccactgcggcctgaagtgcatggaccccagaagatag

SEQ ID NO: 3659 - DNA, 1074 bp, synthetic construct
  misc_feature 1..1074: note = source = /note="Description of Artificial Sequence: Synthetic coding sequence"
  source 1..1074: mol_type = other DNA
atgagacccccccccgccctggccctggccggcctgtgcctgctggccctgcccgccgccgccgccagctacttcggcctgaccggcagagaggtgctgacccccttccccggcctgggcaccgccgccgcccccgcccagggcggcgcccacctgaagcagtgcgacctgctgaagctgagcagaagacagaagcagctgtgcagaagagagcccggcctggccgagaccctgagagacgccgcccacctgggcctgctggagtgccagttccagttcagacacgagagatggaactgcagcctggagggcagaatgggcctgctgaagagaggcttcaaggagaccgccttcctgtacgccgtgagcagcgccgccctgacccacaccctggccagagcctgcagcgccggcagaatggagagatgcacctgcgacgacagccccggcctggagagcagacaggcctggcagtggggcgtgtgcggcgacaacctgaagtacagcaccaagttcctgagcaacttcctgggcagcaagagaggcaacaaggacctgagagccagagccgacgcccacaacacccacgtgggcatcaaggccgtgaagagcggcctgagaaccacctgcaagtgccacggcgtgagcggcagctgcgccgtgagaacctgctggaagcagctgagccccttcagagagaccggccaggtgctgaagctgagatacgacagcgccgtgaaggtgagcagcgccaccaacgaggccctgggcagactggagctgtgggcccccgccagacagggcagcctgaccaagggcctggcccccagaagcggcgacctggtgtacatggaggacagccccagcttctgcagacccagcaagtacagccccggcaccgccggcagagtgtgcagcagagaggccagctgcagcagcctgtgctgcggcagaggctacgacacccagagcagactggtggccttcagctgccactgccaggtgcagtggtgctgctacgtggagtgccagcagtgcgtgcaggaggagctggtgtacacctgcaagcactag

SEQ ID NO: 3660 - DNA, 810 bp, synthetic construct
  misc_feature 1..810: note = source = /note="Description of Artificial Sequence: Synthetic coding sequence"
  source 1..810: mol_type = other DNA
atggtgagatgcctgggccccgccctgctgctgctgctgctgctgggcagcgccagcagcgtgggcggcaacagatgcgtggacgccgccgaggcctgcaccgccgacgccagatgccagagactgagaagcgagtacgtggcccagtgcctgggcagagccgcccagggcggctgccccagagccagatgcagaagagccctgagaagattcttcgccagaggcccccccgccctgacccacgccctgctgttctgcccctgcgccggccccgcctgcgccgagagaagaagacagaccttcgtgcccagctgcgccttcagcggccccggccccgccccccccagctgcctggagcccctgaacttctgcgagagaagcagagtgtgcagacccagactgctggccttccaggtgagctgcacccccgcccccagcgcccccgacggctgcctgctggaccagggcgccagatgcctgagagcctacgccggcctggtgggcaccgccgtgacccccaactacgtggacaacgtgagcgccagagtggccccctggtgcgactgcggcgccagcggcaacagaagagaggactgcgaggccttcagaggcctgttcaccagaaacagatgcctggacggcgccatccaggccttcgccagcggctggccccccgtgctgctggaccagctgaacccccagggcgaccccgagcacagcctgctgcaggtgagcagcaccggcagagccctggagagaagaagcctgctgagcatcctgcccgtgctggccctgcccgccctgctgtag

SEQ ID NO: 3661 - DNA, 1728 bp, synthetic construct
  misc_feature 1..1728: note = source = /note="Description of Artificial Sequence: Synthetic coding sequence"
  source 1..1728: mol_type = other DNA
atgagcggcaactgggtgcaccccggccagatcctgatctgggccatctgggtgctggccgcccccaccaagggccccagcgccgagggcccccagagaaacaccagactgggctggatccagggcaagcaggtgaccgtgctgggcagccccgtgcccgtgaacgtgttcctgggcgtgcccttcgccgccccccccctgggcagcctgagattcaccaacccccagcccgccagcccctgggacaacctgagagaggccaccagctaccccaacctgtgcctgcagaacagcgagtggctgctgctggaccagcacatgctgaaggtgcactaccccaagttcggcgtgagcgaggactgcctgtacctgaacatctacgcccccgcccacgccgacaccggcagcaagctgcccgtgctggtgtggttccccggcggcgccttcaagaccggcagcgccagcatcttcgacggcagcgccctggccgcctacgaggacgtgctggtggtggtggtgcagtacagactgggcatcttcggcttcttcaccacctgggaccagcacgcccccggcaactgggccttcaaggaccaggtggccgccctgagctgggtgcagaagaacatcgagttcttcggcggcgaccccagcagcgtgaccatcttcggcgagagcgccggcgccatcagcgtgagcagcctgatcctgagccccatggccaagggcctgttccacaaggccatcatggagagcggcgtggccatcatcccctacctggaggcccacgactacgagaagagcgaggacctgcaggtggtggcccacttctgcggcaacaacgccagcgacagcgaggccctgctgagatgcctgagaaccaagcccagcaaggagctgctgaccctgagccagaagaccaagagcttcaccagagtggtggacggcgccttcttccccaacgagcccctggacctgctgagccagaaggccttcaaggccatccccagcatcatcggcgtgaacaaccacgagtgcggcttcctgctgcccatgaaggaggcccccgagatcctgagcggcagcaacaagagcctggccctgcacctgatccagaacatcctgcacatccccccccagtacctgcacctggtggccaacgagtacttccacgacaagcacagcctgaccgagatcagagacagcctgctggacctgctgggcgacgtgttcttcgtggtgcccgccctgatcaccgccagataccacagagacgccggcgcccccgtgtacttctacgagttcagacacagaccccagtgcttcgaggacaccaagcccgccttcgtgaaggccgaccacgccgacgaggtgagattcgtgttcggcggcgccttcctgaagggcgacatcgtgatgttcgagggcgccaccgaggaggagaagctgctgagcagaaagatgatgaagtactgggccaccttcgccagaaccggcaaccccaacggcaacgacctgagcctgtggcccgcctacaacctgaccgagcagtacctgcagctggacctgaacatgagcctgggccagagactgaaggagcccagagtggacttctggaccagcaccatccccctgatcctgagcgccagcgacatgctgcacagccccctgagcagcctgaccttcctgagcctgctgcagcccttcttcttcttctgcgccccctag

SEQ ID NO: 3662 - DNA, 1026 bp, synthetic construct
  misc_feature 1..1026: note = source = /note="Description of Artificial Sequence: Synthetic coding sequence"
  source 1..1026: mol_type = other DNA
atgggcaccctgccctggctgctggccttcttcatcctgggcctgcaggcctgggacacccccaccatcgtgagcagaaaggagtggggcgccagacccctggcctgcagagccctgctgaccctgcccgtggcctacatcatcaccgaccagctgcccggcatgcagtgccagcagcagagcgtgtgcagccagatgctgagaggcctgcagagccacagcgtgtacaccatcggctggtgcgacgtggcctacaacttcctggtgggcgacgacggcagagtgtacgagggcgtgggctggaacatccagggcctgcacacccagggctacaacaacatcagcctgggcatcgccttcttcggcaacaagatcggcagcagccccagccccgccgccctgagcgccgccgagggcctgatcagctacgccatccagaagggccacctgagccccagatacatccagcccctgctgctgaaggaggagacctgcctggacccccagcaccccgtgatgcccagaaaggtgtgccccaacatcatcaagagaagcgcctgggaggccagagagacccactgccccaagatgaacctgcccgccaagtacgtgatcatcatccacaccgccggcaccagctgcaccgtgagcaccgactgccagaccgtggtgagaaacatccagagcttccacatggacaccagaaacttctgcgacatcggctaccacttcctggtgggccaggacggcggcgtgtacgagggcgtgggctggcacatccagggcagccacacctacggcttcaacgacatcgccctgggcatcgccttcatcggctacttcgtggagaagccccccaacgccgccgccctggaggccgcccaggacctgatccagtgcgccgtggtggagggctacctgacccccaactacctgctgatgggccacagcgacgtggtgaacatcctgagccccggccaggccctgtacaacatcatcagcacctggccccacttcaagcactag

SEQ ID NO: 3663 - DNA, 897 bp, synthetic construct
  misc_feature 1..897: note = source = /note="Description of Artificial Sequence: Synthetic coding sequence"
  source 1..897: mol_type = other DNA
atgggcatcgtgtgcgcccagtgcagcttcatcctgctgctgagcatcatcagagccagacccccccccttcctgttctgccccctgagcagccagagaaccgagagcccctacaagcccgtgcacctgggcctgggccccaccgacaaggtggccgccatcgccatggccagaatcatcgacctggtgccctgggacgacggcagcacccacgtgtacgccagccccgccatcctgctgcccatggagagacagagaaaccagctggccggcgtgaagcagcagctgtaccaccccgccctgcccaccctgagacacatggacagagacaccgtgaaggcctgcctgcccgacgagcactgccagagcaccacctactgcagaaaggacgagttcgacaacgcccacttcaccctgctgggcgtgcccaacaagcccctgcagtgcctggacatcaccgccaccggccagaagctgagaaacagataccacgagggcaagctggcccccatcgcccccggcatcaacagagtggactggccctgcttcaccagagccatcgaggactggagccacttcgtgagcagcgccggcgagttcaagctgccctgcctgagaaagagagccgagggcctgagcggctacgccgtgagatacctgaagcccgacgtgacccagacctggagacaggaggccctgtgcggcgcctgggccggcagaccctgcagccccgacagccccagaccctacccctgctgccccccccagtactgcctgagccagaaccccagcctggacagatacggccagaagcccctgcccttcgacagcctgaacaccttcagaagcttcggcagcagctacagcagagtgaactacctgaccccctggcactag

SEQ ID NO: 3664 - DNA, 5799 bp, synthetic construct
  misc_feature 1..5799: note = source = /note="Description of Artificial Sequence: Synthetic coding sequence"
  source 1..5799: mol_type = other DNA
atggcccccggcgccctgagaggcggctgcgagcagagagcccccggcggcggcgccagaaccgccgccctgggcccctggccctggcccagccccggccccgcccccagccccggcgccgccccccccagaagcagaaagatgagcggcgccctgctgtggcccctgctgcccctgctgctgctgctgctgagcgccagagacggcgtgagagccgcccagccccaggcccccggctacctgatcgccgcccccagcgtgttcagagccggcgtggaggaggtgatcagcgtgaccatcttcaacagccccagagaggtgaccgtgcaggcccagctggtggcccagggcgagcccgtggtgcagagccagggcgccatcctggacaagggcaccatcaagctgaaggtgcccaccggcctgagaggccaggccctgctgaaggtgtggggcagaggctggcaggccgaggagggccccctgttccacaaccagaccagcgtgaccgtggacggcagaggcgccagcgtgttcatccagaccgacaagcccgtgtacagaccccagcacagagtgctgatcagcatcttcaccgtgagccccaacctgagacccgtgaacgagaagctggaggcctacatcctggaccccagaggcagcagaatgatcgagtggagacacctgaagcccttctgctgcggcatcaccaacatgagcttccccctgagcgaccagcccgtgctgggcgagtggttcatcttcgtggagatgcagggccacgcctacaacaagagcttcgaggtgcagaagtacgtgctgcccaagttcgagctgctgatcgacccccccagatacatccaggacctggacgcctgcgagaccggcaccgtgagagccagatacaccttcggcaagcccgtggccggcgccctgatgatcaacatgaccgtgaacggcgtgggctactacagccacgaggtgggcagacccgtgctgagaaccaccaagatcctgggcagcagagacttcgacatctgcgtgagagacatgatccccgccgacgtgcccgagcacttcagaggcagagtgagcatctgggccatggtgaccagcgtggacggcagccagcaggtggccttcgacgacagcacccccgtgcagagacagctggtggacatcagatacagcaaggacaccagaaagcagttcaagcccggcctggcctacgtgggcaaggtggagctgagctaccccgacggcagccccgccgagggcgtgaccgtgcagatcaaggccgagctgacccccaaggacaacatctacaccagcgaggtggtgagccagagaggcctggtgggcttcgagatccccagcatccccaccagcgcccagcacgtgtggctggagaccaaggtgatggccctgaacggcaagcccgtgggcgcccagtacctgcccagctacctgagcctgggcagctggtacagccccagccagtgctacctgcagctgcagccccccagccaccccctgcaggtgggcgaggaggcctacttcagcgtgaagagcacctgcccctgcaacttcaccctgtactacgaggtggccgccagaggcaacatcgtgctgagcggccagcagcccgcccacaccacccagcagagaagcaagagagccgcccccgccctggagaagcccatcagactgacccacctgagcgagaccgagcccccccccgcccccgaggccgaggtggacgtgtgcgtgaccagcctgcacctggccgtgacccccagcatggtgcccctgggcagactgctggtgttctacgtgagagagaacggcgagggcgtggccgacagcctgcagttcgccgtggagaccttcttcgagaaccaggtgagcgtgacctacagcgccaacgagacccagcccggcgaggtggtggacctgagaatcagagccgccagaggcagctgcgtgtgcgtggccgccgtggacaagagcgtgtacctgctgagaagcggcttcagactgacccccgcccaggtgttccaggagctggaggactacgacgtgagcgacagcttcggcgtgagcagagaggacggccccttctggtgggccggcctgaccgcccagagaagaagaagaagcagcgtgttcccctggccctggggcatcaccaaggacagcggcttcgccttcaccgagaccggcctggtggtgatgaccgacagagtgagcctgaaccacagacaggacggcggcctgtacaccgacgaggccgtgcccgccttccagccccacaccggcagcctggtggccgtggcccccagcagacacccccccagaaccgagaagagaaagagaaccttcttccccgagacctggatctggcactgcctgaacatcagcgaccccagcggcgagggcaccctgagcgtgaaggtgcccgacagcatcaccagctgggtgggcgaggccgtggccctgagcaccagccagggcctgggcatcgccgagcccagcctgctgaagaccttcaagcccttcttcgtggacttcatgctgcccgccctgatcatcagaggcgagcaggtgaagatccccctgagcgtgtacaactacatgggcacctgcgccgaggtgtacatgaagctgagcgtgcccaagggcatccagttcgtgggccaccccggcaagagacacgtgaccaagaagatgtgcgtggcccccggcgaggccgagcccatctgggtggtgctgagcttcagcgacctgggcctgaacaacatcaccgccaaggccctggcctacggcgacaccaactgctgcagagacggcagaagcagcaagcaccccgaggagaaccacgccgacagaagagtgcccatcggcgtggaccacgtgagaagaagcgtgatggtggaggccgagggcgtgcccagagcctacacctacagcgccttcttctgccccagcgagagagtgcacatcagcacccccaacaagtacgagttccagtacgtgcagagacccctgagactgaccagattcgacgtggccgtgagagcccacaacgacgccagagtggccctgagcagcggcccccaggacaccgccggcatgatcgagatcgtgctgggcggccaccagaacaccagaagctggatcagcaccagcaagatgggcgagcccgtggccagcgcccacaccgccaagatcctgagctgggacgagttcagaaccttctggatcagctggagaggcggcctgatccaggtgggccacggccccgagcccagcaacgagagcgtgatcgtggcctggaccctgcccagaccccccgaggtgcagttcatcggcttcagcaccggctggggcagcatgggcgagttcagaatctggagaaagatggaggtggacgagagctacagcgaggccttcaccctgggcgtgccccacggcgccatccccggcagcgagagagccaccgccagcatcatcggcgacgtgatgggccccaccctgaaccacctgaacaacctgctgagactgcccttcggctgcggcgagcagaacatgatccacttcgcccccaacgtgttcgtgctgaagtacctgcagaagacccagcagctgagccccgaggtggagagagagaccaccgactacctggtgcagggctaccagagacagctgacctacaagagacaggacggcagctacagcgccttcggcgagagagacgccagcggcagcatgtggctgaccgccttcgtgctgaagagcttcgcccaggccagaagcttcatcttcgtggaccccagagagctggccgccgccaagagctggatcatccagcagcagcaggccgacggcagcttcctggccgtgggcagagtgctgaacaaggacatccagggcggcatccacggcaccgtgcccctgaccgcctacgtggtggtggccctgctggagaccggcaccgccagcgaggaggagagaggcagcaccgacaaggccagacacttcctggagagcgccgcccccctggccatggacccctacagctgcgccctgaccacctacgccctgaccctgctgagaagccccgccgcccccgaggccctgagaaagctgagaagcctggccatcatgagagacggcgtgacccactggagcctgagcaacagctgggacgtggacaagggcaccttcctgagcttcagcgacagagtgagccagagcgtggtgagcgccgaggtggagatgaccgcctacgccctgctgacctacaccctgctgggcgacgtggccgccgccctgcccgtggtgaagtggctgagccagcagagaaacgccctgggcggcttcagcagcacccaggacacctgcgtggccctgcaggccctggccgagtacgccatcctgagctacgccggcggcatcaacctgaccgtgagcctggccagcaccaacctggactaccaggagaccttcgagctgcacagaaccaaccagaaggtgctgcagaccgccgccatccccagcctgcccaccggcctgttcgtgagcgccaagggcgacggctgctgcctgatgcagatcgacgtgacctacaacgtgcccgaccccgtggccaagcccgccttccagctgctggtgagcctgcaggagcccgaggcccagggcagacccccccccatgcccgccagcgccgccgagggcagcagaggcgactggccccccgccgacgacgacgaccccgccgccgaccagcaccaccaggagtacaaggtgatgctggaggtgtgcaccagatggctgcacgccggcagcagcaacatggccgtgctggaggtgcccctgctgagcggcttcagagccgacatcgagagcctggagcagctgctgctggacaagcacatgggcatgaagagatacgaggtggccggcagaagagtgctgttctacttcgacgagatccccagcagatgcctgacctgcgtgagattcagagccctgagagagtgcgtggtgggcagaaccagcgccctgcccgtgagcgtgtacgactactacgagcccgccttcgaggccaccagattctacaacgtgagcacccacagccccctggccagagagctgtgcgccggccccgcctgcaacgaggtggagagagcccccgccagaggccccggctggttccccggcgagagcggccccgccgtggcccccgaggagggcgccgccatcgccagatgcggctgcgaccacgactgcggcgcccagggcaaccccgtgtgcggcagcgacggcgtggtgtacgccagcgcctgcagactgagagaggccgcctgcagacaggccgcccccctggagcccgccccccccagctgctgcgccctggagcagagactgcccgccagcagcagcagcacctacggcgacgacctggccagcgtggcccccggccccctgcagcaggacgtgaagctgaacggcgccggcctggaggtggaggacagcgaccccgagcccgagggcgaggccgaggacagagtgaccgccggccccagaccccccgtgagcagcggcaacctggagagcagcacccagagcgccagccccttccacagatggggccagacccccgccccccagagacacagcggcagagtggtgggcgcccacagacccggcctgctgagccccgtgttcgtgtacagccccgccttccagagcggcggcgaggagggcctgtggatgagcaacacctgcaccctgagatag

SEQ ID NO: 3665 - DNA, 1209 bp, synthetic construct
  misc_feature 1..1209: note = source = /note="Description of Artificial Sequence: Synthetic coding sequence"
  source 1..1209: mol_type = other DNA
atggtgtgcgccagagccgccctgggccccggcgccctgtgggccgccgcctggggcgtgctgctgctgaccgcccccgccggcgcccagagaggcagaaagaaggtggtgcacgtgctggagggcgagagcggcagcgtggtggtgcagaccgcccccggccaggtggtgagccacagaggcggcaccatcgtgctgccctgcagataccactacgaggccgccgcccacggccacgacggcgtgagactgaagtggaccaaggtggtggaccccctggccttcaccgacgtgttcgtggccctgggcccccagcacagagccttcggcagctacagaggcagagccgagctgcagggcgacggccccggcgacgccagcctggtgctgagaaacgtgaccctgcaggactacggcagatacgagtgcgaggtgaccaacgagctggaggacgacgccggcatggtgaagctggacctggagggcgtggtgttcccctaccaccccagaggcggcagatacaagctgaccttcgccgaggcccagagagcctgcgccgagcaggacggcatcctggccagcgccgagcagctgcacgccgcctggagagacggcctggactggtgcaacgccggctggctgagagacggcagcgtgcagtaccccgtgaacagacccagagagccctgcggcggcctgggcggcaccggcagcgccggcggcggcggcgacgccaacggcggcctgagaaactacggctacagacacaacgccgaggagagatacgacgccttctgcttcaccagcaacctgcccggcagagtgttcttcctgaagcccctgagacccgtgcccttcagcggcgccgccagagcctgcgccgccagaggcgccgccgtggccaaggtgggccagctgttcgccgcctggaagctgcagctgctggacagatgcaccgccggctggctggccgacggcagcgccagataccccatcgtgaaccccagagccagatgcggcggcagaagacccggcgtgagaagcctgggcttccccgacgccaccagaagactgttcggcgtgtactgctacagagcccccggcgcccccgaccccgcccccggcggctggggctggggctgggccggcggcggcggctgggccggcggcgccagagaccccgccgcctggacccccctgcacgtgtag

SEQ ID NO: 3666 - DNA, 1740 bp, synthetic construct
  misc_feature 1..1740: note = source = /note="Description of Artificial Sequence: Synthetic coding sequence"
  source 1..1740: mol_type = other DNA
atgagcgccctgagacccctgctgctgctgctgctgcccctgtgccccggccccggccccggccccggcagcgaggccaaggtgaccagaagctgcgccgagaccagacaggtgctgggcgccagaggctacagcctgaacctgatcccccccgccctgatcagcggcgagcacctgagagtgtgcccccaggagtacacctgctgcagcagcgagaccgagcagagactgatcagagagaccgaggccaccttcagaggcctggtggaggacagcggcagcttcctggtgcacaccctggccgccagacacagaaagttcgacgagttcttcctggagatgctgagcgtggcccagcacagcctgacccagctgttcagccacagctacggcagactgtacgcccagcacgccctgatcttcaacggcctgttcagcagactgagagacttctacggcgagagcggcgagggcctggacgacaccctggccgacttctgggcccagctgctggagagagtgttccccctgctgcacccccagtacagcttcccccccgactacctgctgtgcctgagcagactggccagcagcaccgacggcagcctgcagcccttcggcgacagccccagaagactgagactgcagatcaccagaaccctggtggccgccagagccttcgtgcagggcctggagaccggcagaaacgtggtgagcgaggccctgaaggtgcccgtgagcgagggctgcagccaggccctgatgagactgatcggctgccccctgtgcagaggcgtgcccagcctgatgccctgccagggcttctgcctgaacgtggtgagaggctgcctgagcagcagaggcctggagcccgactggggcaactacctggacggcctgctgatcctggccgacaagctgcagggccccttcagcttcgagctgaccgccgagagcatcggcgtgaagatcagcgagggcctgatgtacctgcaggagaacagcgccaaggtgagcgcccaggtgttccaggagtgcggcccccccgaccccgtgcccgccagaaacagaagagcccccccccccagagaggaggccggcagactgtggagcatggtgaccgaggaggagagacccaccaccgccgccggcaccaacctgcacagactggtgtgggagctgagagagagactggccagaatgagaggcttctgggccagactgagcctgaccgtgtgcggcgacagcagaatggccgccgacgccagcctggaggccgccccctgctggaccggcgccggcagaggcagatacctgccccccgtggtgggcggcagccccgccgagcaggtgaacaaccccgagctgaaggtggacgccagcggccccgacgtgcccaccagaagaagaagactgcagctgagagccgccaccgccagaatgaagaccgccgccctgggccacgacctggacggccaggacgccgacgaggacgccagcggcagcggcggcggccagcagtacgccgacgactggatggccggcgccgtggccccccccgccagaccccccagacccccctacccccccagaagagacggcagcggcggcaagggcggcggcggcagcgccagatacaaccagggcagaagcagaagcggcggcgccagcatcggcttccacacccagaccatcctgatcctgagcctgagcgccctggccctgctgggccccagatag

SEQ ID NO: 3667 - DNA, 498 bp, synthetic construct
  misc_feature 1..498: note = source = /note="Description of Artificial Sequence: Synthetic coding sequence"
  source 1..498: mol_type = other DNA
atggccctgctggccctgctgctggtggtggccctgcccagagtgtggaccgacgccaacctgaccgccagacagagagaccccgaggacagccagagaaccgacgagggcgacaacagagtgtggtgccacgtgtgcgagagagagaacaccttcgagtgccagaaccccagaagatgcaagtggaccgagccctactgcgtgatcgccgccgtgaagatcttccccagattcttcatggtggccaagcagtgcagcgccggctgcgccgccatggagagacccaagcccgaggagaagagattcctgctggaggagcccatgcccttcttctacctgaagtgctgcaagatcagatactgcaacctggagggcccccccatcaacagcagcgtgttcaaggagtacgccggcagcatgggcgagagctgcggcggcctgtggctggccatcctgctgctgctggccagcatcgccgccggcctgagcctgagctag

SEQ ID NO: 3668 - DNA, 933 bp, synthetic construct
  misc_feature 1..933: note = source = /note="Description of Artificial Sequence: Synthetic coding sequence"
  source 1..933: mol_type = other DNA
atgaacggcctgagcctgagcgagctgtgctgcctgttctgctgccccccctgccccggcagaatcgccgccaagctggccttcctgccccccgaggccacctacagcctggtgcccgagcccgagcccggccccggcggcgccggcgccgcccccctgggcaccctgagagccagcagcggcgcccccggcagatggaagctgcacctgaccgagagagccgacttccagtacagccagagagagctggacaccatcgaggtgttccccaccaagagcgccagaggcaacagagtgagctgcatgtacgtgagatgcgtgcccggcgccagatacaccgtgctgttcagccacggcaacgccgtggacctgggccagatgagcagcttctacatcggcctgggcagcagactgcactgcaacatcttcagctacgactacagcggctacggcgccagcagcggcagacccagcgagagaaacctgtacgccgacatcgacgccgcctggcaggccctgagaaccagatacggcatcagccccgacagcatcatcctgtacggccagagcatcggcaccgtgcccaccgtggacctggccagcagatacgagtgcgccgccgtggtgctgcacagccccctgaccagcggcatgagagtggccttccccgacaccaagaagacctactgcttcgacgccttccccaacatcgagaaggtgagcaagatcaccagccccgtgctgatcatccacggcaccgaggacgaggtgatcgacttcagccacggcctggccctgtacgagagatgccccaaggccgtggagcccctgtgggtggagggcgccggccacaacgacatcgagctgtacagccagtacctggagagactgagaagattcatcagccaggagctgcccagccagagagcctag

SEQ ID NO: 3669 - DNA, 1905 bp, synthetic construct
  misc_feature 1..1905: note = source = /note="Description of Artificial Sequence: Synthetic coding sequence"
  source 1..1905: mol_type = other DNA
atggcccagggcgtgctgtggatcctgctgggcctgctgctgtggagcgaccccggcaccgccagcctgcccctgctgatggacagcgtgatccaggccctggccgagctggagcagaaggtgcccgccgccaagaccagacacaccgccagcgcctggctgatgagcgcccccaacagcggcccccacaacagactgtaccacttcctgctgggcgcctggagcctgaacgccaccgagctggacccctgccccctgagccccgagctgctgggcctgaccaaggaggtggccagacacgacgtgagagagggcaaggagtacggcgtggtgctggcccccgacggcagcaccgtggccgtggagcccctgctggccggcctggaggccggcctgcagggcagaagagtgatcaacctgcccctggacagcatggccgccccctgggagaccggcgacaccttccccgacgtggtggccatcgcccccgacgtgagagccaccagcagccccggcctgagagacggcagccccgacgtgaccaccgccgacatcggcgccaacacccccgacgccaccaagggctgccccgacgtgcaggccagcctgcccgacgccaaggccaagagcccccccaccatggtggacagcctgctggccgtgaccctggccggcaacctgggcctgaccttcctgagaggcagccagacccagagccaccccgacctgggcaccgagggctgctgggaccagctgagcgcccccagaaccttcaccctgctggaccccaaggccagcctgctgaccatggccttcctgaacggcgccctggacggcgtgatcctgggcgactacctgagcagaacccccgagcccagacccagcctgagccacctgctgagccagtactacggcgccggcgtggccagagaccccggcttcagaagcaacttcagaagacagaacggcgccgccctgaccagcgccagcatcctggcccagcaggtgtggggcaccctggtgctgctgcagagactggagcccgtgcacctgcagctgcagtgcatgagccaggagcagctggcccaggtggccgccaacgccaccaaggagttcaccgaggccttcctgggctgccccgccatccaccccagatgcagatggggcgccgccccctacagaggcagacccaagctgctgcagctgcccctgggcttcctgtacgtgcaccacacctacgtgcccgcccccccctgcaccgacttcaccagatgcgccgccaacatgagaagcatgcagagataccaccaggacacccagggctggggcgacatcggctacagcttcgtggtgggcagcgacggctacgtgtacgagggcagaggctggcactgggtgggcgcccacaccctgggccacaacagcagaggcttcggcgtggccatcgtgggcaactacaccgccgccctgcccaccgaggccgccctgagaaccgtgagagacaccctgcccagctgcgccgtgagagccggcctgctgagacccgactacgccctgctgggccacagacagctggtgagaaccgactgccccggcgacgccctgttcgacctgctgagaacctggccccacttcaccgccgtgagcctgagaagcctgcactacaccgccagaagacccagcgtgtacaccagcagcaccagacccctgccccccgcctgcaacagctgcgccagaaccgccagcgccagaccccccaccagcagaagacacgtgtacagcggcaacctgggccccgccttcgccggccacagcgccggcaacatccccgaccccgtgaccagcgcctacgccgccagcgcccagccccagacccagcccgcctgccccttccccagcagctag

SEQ ID NO: 3670 - DNA, 777 bp, synthetic construct
  misc_feature 1..777: note = source = /note="Description of Artificial Sequence: Synthetic coding sequence"
  source 1..777: mol_type = other DNA
atgctggtgctgtacggccacagcacccaggacctgcccgagaccaacgccagagtggtgggcggcaccgaggccggcagaaacagctggcccagccagatcagcctgcagtacagaagcggcggcagcagataccacacctgcggcggcaccctgatcagacagaactgggtgatgaccgccgcccactgcgtggactaccagaagaccttcagagtggtggccggcgaccacaacctgagccagaacgacggcaccgagcagtacgtgagcgtgcagaagatcgtggtgcacccctactggaacagcgacaacgtggccgccggctacgacatcgccctgctgagactggcccagagcgtgaccctgaacagctacgtgcagctgggcgtgctgccccaggagggcgccatcctggccaacaacagcccctgctacatcaccggctggggcaagaccaagaccaacggccagctggcccagaccctgcagcaggcctacctgcccagcgtggactacgccatctgcagcagcagcagctactggggcagcaccgtgaagaacaccatggtgtgcgccggcggcgacggcgtgagaagcggctgccagggcgacagcggcggccccctgcactgcctggtgaacggcaagtacagcgtgcacggcgtgaccagcttcgtgagcagcagaggctgcaacgtgagcagaaagcccaccgtgttcacccaggtgagcgcctacatcagctggatcaacaacgtgatcgccagcaactag

SEQ ID NO: 3671 - DNA, 993 bp, synthetic construct
  misc_feature 1..993: note = source = /note="Description of Artificial Sequence: Synthetic coding sequence"
  source 1..993: mol_type = other DNA
atggccgccagaagaagccagagaagaagaggcagaagaggcgagcccggcaccgccctgctggtgcccctggccctgggcctgggcctggccctggcctgcctgggcctgctgctggccgtggtgagcctgggcagcagagccagcctgagcgcccaggagcccgcccaggaggagctggtggccgaggaggaccaggaccccagcgagctgaacccccagaccgaggagagccaggaccccgcccccttcctgaacagactggtgagacccagaagaagcgcccccaagggcagaaagaccagagccagaagagccatcgccgcccactacgaggtgcaccccagacccggccaggacggcgcccaggccggcgtggacggcaccgtgagcggctgggaggaggccagaatcaacagcagcagccccctgagatacaacagacagatcggcgagttcatcgtgaccagagccggcctgtactacctgtactgccagagcagcgacgccctggaggcctgggagaacggcgagagaagcagaaagagaagagccgtgctgacccagaagcagaagaagcagcacagcgtgctgcacctggtgcccatcaacgccaccagcaaggacgacagcgacgtgaccgaggtgatgtggcagcccgccctgagaagaggcagaggcctgcaggcccagggctacggcgtgagaatccaggacgccggcgtgtacctgctgtacagccaggtgctgttccaggacgtgaccttcaccatgggccaggtggtgagcagagagggccagggcagacaggagaccctgttcagatgcatcagaagcatgcccagccaccccgacagagcctacaacagctgctacagcgccggcgtgttccacctgcaccagggcgacatcctgagcgtgatcatccccagagccagagccaagctgaacctgagcccccacggcaccttcctgggcttcgtgaagctgtag

SEQ ID NO: 3672 - DNA, 2253 bp, synthetic construct
  misc_feature 1..2253: note = source = /note="Description of Artificial Sequence: Synthetic coding sequence"
  source 1..2253: mol_type = other DNA
atggccaagcccagactgctggtgctgtacttcgccctgatcgtggtgcccgcctgggtgagcagcatcgtgctgaccggcaccagcgagccccccgacgcccagaccgtggcccccgccgaggacgagaccctgcagaacgaggccgacaaccaggagaacgtgctgagccagctgctgggcgactacgacaaggtgaaggccatgagcgagggcagcgactgccagtgcaagtgcgtggtgagacccctgggcagagacgcctgccagagaatcaacgccggcgccagcagaaaggaggacttctacaccgtggagaccatcaccagcggcagcagctgcaagtgcgcctgcgtggccccccccagcgccctgaacccctgcgagggcgacttcagactgcagaagctgagagaggccgacagccaggacctgaagctgagcaccatcatcgacatgctggagggcgccttctacggcctggacctgctgaagctgcacagcgtgaccaccaagctggtgggcagagtggacaagctggaggaggaggtgagcaagaacctgaccaaggagaacgagcagatcaaggaggacatggaggagatcagaaccgagatgaacaagagaggcaaggagaactgcagcgagaacatcctggacagcatgcccgacatcagaagcgccctgcagagagacgccgccgccgcctacgcccaccccgagtacgaggagagattcctgcaggaggagaccgtgagccagcagatcaacagcatcgagctgctgcagaccagacccctggccctgcccgaggtggtgaagagccagagacccctgcagagacaggtgcacctgagaggcagacccgccagccagcccaccgtgatcagaggcatcacctactacaaggccaaggtgagcgaggaggagaacgacatcgaggagcagcaggacgagttcttcagcggcgacaacggcgtggacctgctgatcgaggaccagctgctgagacacaacggcctgatgaccagcgtgaccagaagacccgccgccaccagacagggccacagcaccgccgtgaccagcgacctgaacgccagaaccgccccctggagcagcgccctgccccagcccagcaccagcgaccccagcatcgccaaccacgccagcgtgggccccaccctgcagaccaccagcgtgagccccgaccccaccagagagagcgtgctgcagcccagcccccaggtgcccgccaccaccgtggcccacaccgccacccagcagcccgccgcccccgccccccccgccgtgagccccagagaggccctgatggaggccatgcacaccgtgcccgtgccccccaccaccgtgagaaccgacagcctgggcaaggacgcccccgccggctggggcaccacccccgccagccccaccctgagccccgaggaggaggacgacatcagaaacgtgatcggcagatgcaaggacaccctgagcaccatcaccggccccaccacccagaacacctacggcagaaacgagggcgcctggatgaaggaccccctggccaaggacgagagaatctacgtgaccaactactactacggcaacaccctggtggagttcagaaacctggagaacttcaagcagggcagatggagcaacagctacaagctgccctacagctggatcggcaccggccacgtggtgtacaacggcgccttctactacaacagagccttcaccagaaacatcatcaagtacgacctgaagcagagatacgtggccgcctgggccatgctgcacgacgtggcctacgaggaggccaccccctggagatggcagggccacagcgacgtggacttcgccgtggacgagaacggcctgtggctgatctaccccgccctggacgacgagggcttcagccaggaggtgatcgtgctgagcaagctgaacgccgccgacctgagcacccagaaggagaccacctggagaaccggcctgagaagaaacttctacggcaactgcttcgtgatctgcggcgtgctgtacgccgtggacagctacaaccagagaaacgccaacatcagctacgccttcgacacccacaccaacacccagatcgtgcccagactgctgttcgagaacgagtacagctacaccacccagatcgactacaaccccaaggacagactgctgtacgcctgggacaacggccaccaggtgacctaccacgtgatcttcgcctactag

SEQ ID NO: 3673 - DNA, 678 bp, synthetic construct
  misc_feature 1..678: note = source = /note="Description of Artificial Sequence: Synthetic coding sequence"
  source 1..678: mol_type = other DNA
atgaagctgggctgcgtgctgatggcctgggccctgtacctgagcctgggcgtgctgtgggtggcccagatgctgctggccgccggctgccacgccgagctgttccccgcccccatcctgagagccgtgcccagcgccgagccccaggccggcagccccatgaccctgagctgccagaccaagctgcccctgcagagaagcgccgccagactgctgttcagcttctacaaggacggcagaatcgtgcagagcagaggcctgagcagcgagttccagatccccaccgccagcgaggaccacagcggcagctactggtgcgaggccgccaccgaggacaaccaggtgtggaagcagagcccccagctggagatcagagtgcagggcgccagcagcagcgccgccccccccaccctgaaccccgccccccagaagagcgccgcccccggcaccgcccccgaggaggcccccggccccctgccccccccccccacccccagcagcgaggaccccggcttcagcagccccctgggcatgcccgacccccacctgtaccaccagatgggcctgctgctgaagcacatgcaggacgtgagagtgctgctgggccacctgctgatggagctgagagagctgagcggccacagaaagcccggcaccaccaaggccaccgccgagtag

SEQ ID NO: 3674 - DNA, 891 bp, synthetic construct
  misc_feature 1..891: note = source = /note="Description of Artificial Sequence: Synthetic coding sequence"
  source 1..891: mol_type = other DNA
atgagcagacaggagcccaagatgttcgtgctgctgtacgtgaccagcttcgccatctgcgccagcggccagcccagaggcaaccagctgaagggcgagaactacagccccagatacatctgcagcatccccggcctgcccggcccccccggcccccccggcgccaacggcagccccggcccccacggcagaatcggcctgcccggcagagacggcagagacggcagaaagggcgagaagggcgagaagggcaccgccggcctgagaggcaagaccggccccctgggcctggccggcgagaagggcgaccagggcgagaccggcaagaagggccccatcggccccgagggcgagaagggcgaggtgggccccatcggcccccccggccccaagggcgacagaggcgagcagggcgaccccggcctgcccggcgtgtgcagatgcggcagcatcgtgctgaagagcgccttcagcgtgggcatcaccaccagctaccccgaggagagactgcccatcatcttcaacaaggtgctgttcaacgagggcgagcactacaaccccgccaccggcaagttcatctgcgccttccccggcatctactacttcagctacgacatcaccctggccaacaagcacctggccatcggcctggtgcacaacggccagtacagaatcaagaccttcgacgccaacaccggcaaccacgacgtggccagcggcagcaccgtgatctacctgcagcccgaggacgaggtgtggctggagatcttcttcaccgaccagaacggcctgttcagcgaccccggctgggccgacagcctgttcagcggcttcctgctgtacgtggacaccgactacctggacagcatcagcgaggacgacgagctgtag

SEQ ID NO: 3675 - DNA, 1275 bp, synthetic construct
  misc_feature 1..1275: note = source = /note="Description of Artificial Sequence: Synthetic coding sequence"
  source 1..1275: mol_type = other DNA
atgggcagcctggtgctgaccctgtgcgccctgttctgcctggccgcctacctggtgagcggcagccccatcatgaacctggagcagagccccctggaggaggacatgagcctgttcggcgacgtgttcagcgagcaggacggcgtggacttcaacaccctgctgcagagcatgaaggacgagttcctgaagaccctgaacctgagcgacatccccacccaggacagcgccaaggtggacccccccgagtacatgctggagctgtacaacaagttcgccaccgacagaaccagcatgcccagcgccaacatcatcagaagcttcaagaacgaggacctgttcagccagcccgtgagcttcaacggcctgagaaagtaccccctgctgttcaacgtgagcatcccccaccacgaggaggtgatcatggccgagctgagactgtacaccctggtgcagagagacagaatgatctacgacggcgtggacagaaagatcaccatcttcgaggtgctggagagcaagggcgacaacgagggcgagagaaacatgctggtgctggtgagcggcgagatctacggcaccaacagcgagtgggagaccttcgacgtgaccgacgccatcagaagatggcagaagagcggcagcagcacccaccagctggaggtgcacatcgagagcaagcacgacgaggccgaggacgccagcagcggcagactggagatcgacaccagcgcccagaacaagcacaaccccctgctgatcgtgttcagcgacgaccagagcagcgacaaggagagaaaggaggagctgaacgagatgatcagccacgagcagctgcccgagctggacaacctgggcctggacagcttcagcagcggccccggcgaggaggccctgctgcagatgagaagcaacatcatctacgacagcaccgccagaatcagaagaaacgccaagggcaactactgcaagagaacccccctgtacatcgacttcaaggagatcggctgggacagctggatcatcgccccccccggctacgaggcctacgagtgcagaggcgtgtgcaactaccccctggccgagcacctgacccccaccaagcacgccatcatccaggccctggtgcacctgaagaacagccagaaggccagcaaggcctgctgcgtgcccaccaagctggagcccatcagcatcctgtacctggacaagggcgtggtgacctacaagttcaagtacgagggcatggccgtgagcgagtgcggctgcagatag

SEQ ID NO: 3676 - DNA, 381 bp, synthetic construct
  misc_feature 1..381: note = source = /note="Description of Artificial Sequence: Synthetic coding sequence"
  source 1..381: mol_type = other DNA
atgcacctgagccagctgctggcctgcgccctgctgctgaccctgctgagcctgagacccagcgaggccaagcccggcgccccccccaaggtgcccagaaccccccccgccgaggagctggccgagccccaggccgccggcggcggccagaagaagggcgacaaggcccccggcggcggcggcgccaacctgaagggcgacagaagcagactgctgagagacctgagagtggacaccaagagcagagccgcctgggccagactgctgcaggagcaccccaacgccagaaagtacaagggcgccaacaagaagggcctgagcaagggctgcttcggcctgaagctggacagaatcggcagcatgagcggcctgggctgctag

SEQ ID NO: 3677 - DNA, 423 bp, synthetic construct
  misc_feature 1..423: note = source = /note="Description of Artificial Sequence: Synthetic coding sequence"
  source 1..423: mol_type = other DNA
atgagaagccccagaatgagagtgtgcgccaagagcgtgctgctgagccactggctgttcctggcctacgtgctgatggtgtgctgcaagctgatgagcgccagcagccagcacctgagaggccacgccggccaccaccagatcaagcagggcacctgcgaggtggtggccgtgcacagatgctgcaacaagaacagaatcgaggagagaagccagaccgtgaagtgcagctgcttccccggccaggtggccggcaccaccagagcccagcccagctgcgtggaggccagcatcgtgatccagaagtggtggtgccacatgaacccctgcctggagggcgaggactgcaaggtgctgcccgactacagcggctggagctgcagcagcggcaacaaggtgaagaccaccaaggtgaccagatag

SEQ ID NO: 3678 - DNA, 1332 bp, synthetic construct
  misc_feature 1..1332: note = source = /note="Description of Artificial Sequence: Synthetic coding sequence"
  source 1..1332: mol_type = other DNA
atgctgatgctgttcgtgttcggcgtgctgctgcacgaggtgagcctgagcggccagaacgaggccccccccaacacccacagcatccccggcgagcccctgtacaactacgccagcatcagactgcccgaggagcacatccccttcttcctgcacaacaacagacacatcgccaccgtgtgcagaaaggacagcctgtgcccctacaagaagcacctggagaagctgaagtactgctggggctacgagaagagctgcaagcccgagttcagattcggctaccccgtgtgcagctacgtggacatgggctggaccgacaccctggagagcgccgaggacatcttctggaagcaggccgacttcggctacgccagagagagactggaggagatgcacgtgctgtgccagcccaaggagaccagcgacagcagcctggtgtgcagcagatacctgcagtactgcagagccaccaacctgtacctggacctgagaaacatcaagagaaaccacgacagattcaaggaggacttcttccagagcggcgagatcggcggccactgcaagctggacatcagaaccctgaccagcgagggccagagaaagagccccctgcagagctggttcgccgagctgcagagctacacccagctgaacttcagacccatcgaggacgccaagtgcgacatcgtgatcgagaagcccacctacttcatgaagctggacgccggcgtgaacatgtaccaccacttctgcgacttcatcaacctgtacatcacccagcacgtgaacaacagcttcagcaccgacgtgtacatcgtgatgtgggacaccgacggcaagatcagagtgaccatcctggccagaagcaccgagtacagaaagatcctgaaccagaacgagctggtgaacgccctgaagaccgtgagcaccttcgaggtgcagatcgtggactacaagtacagagagctgggcttcctggaccagctgagaatcacccacaacaccgacatcttcatcggcatgcacggcgccggcctgacccacctgctgttcctgcccgactgggccgccgtgttcgagctgtacaactgcgaggacgagagatgctacctggacctggccagactgagaggcgtgcactacatcacctggagaagacagaacaaggtgttcccccaggacaagggccaccaccccaccctgggcgagcaccccaagttcaccaactacagcttcgacgtggaggagttcatgtacctggtgctgcaggccgccgaccacgtgctgcagcaccccaagtggcccttcaagaagaagcacgacgagctgtag

SEQ ID NO: 3679 - DNA, 336 bp, synthetic construct
  misc_feature 1..336: note = source = /note="Description of Artificial Sequence: Synthetic coding sequence"
  source 1..336: mol_type = other DNA
atgggccccagcagctgcctgctgctgatcctgatccccctgctgcagctgatcaaccccggcagcacccagtgcagcctggacagcgtgatggacaagaagatcaaggacgtgctgaacagcctggagtacagccccagccccatcagcaagaagctgagctgcgccagcgtgaagagccagggcagacccagcagctgccccgccggcatggccgtgaccggctgcgcctgcggctacggctgcggcagctgggacgtgcagctggagaccacctgccactgccagtgcagcgtggtggactggaccaccgccagatgctgccacctgacctag

SEQ ID NO: 3680 - DNA, 1965 bp, synthetic construct
  misc_feature 1..1965: note = source = /note="Description of Artificial Sequence: Synthetic coding sequence"
  source 1..1965: mol_type = other DNA
atggcccccaagaagctgagctgcctgagaagcctgctgctgcccctgagcctgaccctgctgctgccccaggccgacaccagaagcttcgtggtggacagaggccacgacagattcctgctggacggcgcccccttcagatacgtgagcggcagcctgcactacttcagagtgcccagagtgctgtgggccgacagactgctgaagatgagatggagcggcctgaacgccatccagttctacgtgccctggaactaccacgagccccagcccggcgtgtacaacttcaacggcagcagagacctgatcgccttcctgaacgaggccgccctggccaacctgctggtgatcctgagacccggcccctacatctgcgccgagtgggagatgggcggcctgcccagctggctgctgagaaagcccgagatccacctgagaaccagcgaccccgacttcctggccgccgtggacagctggttcaaggtgctgctgcccaagatctacccctggctgtaccacaacggcggcaacatcatcagcatccaggtggagaacgagtacggcagctacagagcctgcgacttcagctacatgagacacctggccggcctgttcagagccctgctgggcgagaagatcctgctgttcaccaccgacggccccgagggcctgaagtgcggcagcctgagaggcctgtacaccaccgtggacttcggccccgccgacaacatgaccaagatcttcaccctgctgagaaagtacgagccccacggccccctggtgaacagcgagtactacaccggctggctggactactggggccagaaccacagcaccagaagcgtgagcgccgtgaccaagggcctggagaacatgctgaagctgggcgccagcgtgaacatgtacatgttccacggcggcaccaacttcggctactggaacggcgccgacaagaagggcagattcctgcccatcaccaccagctacgactacgacgcccccatcagcgaggccggcgaccccacccccaagctgttcgccctgagagacgtgatcagcaagttccaggaggtgcccctgggccccctgcccccccccagccccaagatgatgctgggccccgtgaccctgcacctggtgggccacctgctggccttcctggacctgctgtgccccagaggccccatccacagcatcctgcccatgaccttcgaggccgtgaagcaggaccacggcttcatgctgtacagaacctacatgacccacaccatcttcgagcccacccccttctgggtgcccaacaacggcgtgcacgacagagcctacgtgatggtggacggcgtgttccagggcgtggtggagagaaacatgagagacaagctgttcctgaccggcaagctgggcagcaagctggacatcctggtggagaacatgggcagactgagcttcggcagcaacagcagcgacttcaagggcctgctgaagccccccatcctgggccagaccatcctgacccagtggatgatgttccccctgaagatcgacaacctggtgaagtggtggttccccctgcagctgcccaagtggccctacccccaggcccccagcggccccaccttctacagcaagaccttccccatcctgggcagcgtgggcgacaccttcctgtacctgcccggctggaccaagggccaggtgtggatcaacggcttcaacctgggcagatactggaccaagcagggcccccagcagaccctgtacgtgcccagattcctgctgttccccagaggcgccctgaacaagatcaccctgctggagctggaggacgtgcccctgcagccccaggtgcagttcctggacaagcccatcctgaacagcaccagcaccctgcacagaacccacatcaacagcctgagcgccgacaccctgagcgccagcgagcccatggagctgagcggccactag

SEQ ID NO: 3681 - DNA, 2502 bp, synthetic construct
  misc_feature 1..2502: note = source = /note="Description of Artificial Sequence: Synthetic coding sequence"
  source 1..2502: mol_type = other DNA
atgaacatggagatcggccacccccacgagggcaaggacgacctgggcgacaagagagtgatcatgggcaccaagttccccatggagctgggcatcagagtgggcctgggcaaggaggacagcagatgcggcgagagccccgtggtgagcaacaagtgcgagggcagaatggccccccccgagaccaagttccccctgagcaagggcctggagatgggcctggagagacagaacatcagcagaaccgtgatgcagagaggcagcctgggcgtggacagcgtgagcgccagccagggcaccaagcccagcctgctgcccggcagaatgggcctggagaacgagagcctgctggccggctacacccacgagagaatcatccagccccccctgggcagagtgtgcggcagcagccaggccgccggcagcagaagagcccccctggccagcggccccgagggcgtggaggagctggtgggcaagcccgccttcgtgatggagcccagacaggagatggagaaggagagcacctgcgtgctgatgaagcccaacaccgagatcaagctgcccgtggaggtggacatcggcctgacccaggccgagggccccgacgagaccaagaacaccgagccccagatgggcctggtgatcgagcccccccagtgccagttcgcccagcagcacgagcagagaaaggaggccggcaacatcgagagcggcgtggagccccccgacagaatcagacccatctacagcggcaagttcttcgacagaaccccctgctggcccagcgccggcaaggtgatccccgtgggctacagagtggccacctgcctgaccgagaagctgcccagactgatcaccccccccgaggccaagaagtacttcaacttcagatacccccccgccggcgtggagagagtgttctacggcagagccaacgacccccagatcgccccctacctgacccacggcatcagaagcaagatcagcgtgctggccaacaccctgatcaacccccagcccatcaccaccttccagcagaagatcaaggacaagaaggagagcatctacctgagcaacagaagagcccccctgggcaagagccacgaccaggcccccggcctgcccaagggcatggacaccaccaacaccaccttcggcaccgccgtgatcaaggagtacagcgccaaggacgtggtgaacccccccaagagctacgaggaggtgttcaaggagggcaacgagggccacgacctgtacgtggtgagccacaacgactactacgccggcgaggccaagaacagaaagtacaaccccagcagcttccacagatgcagcgtgtacggcgtgcccaccccccacttcaacgacggcagagccatggccaagagcctgtactggctgcacgagctgcagatgaagagaggcgccaagttcgtgagcaagagagccgacgacttcaaggagaagttccagcacaagctgggcagagtgctggaccccatcgccgagaccatgaacgtgccccccgactgcaccttcggcgcctgcctgagacccgaggagtacggcgtgggcgacctgatccacaacagactgcccgacgagtacctgagaggcaaggacagacagagagccctgatcgccgccgtgagacaccacctgaagaaggtgaactaccagaagttcgacaccctgctggccgccttcagacactacgacaagaagggcgacggcatgatcgacaaggacgagctgcaggaggcctgcgaccaggccaacctgagcctggacgacaagctgctggaccagctgttcgactactgcgacgtggacaacgacggcttcatcaactacctggagttcgccaacttcctgaactggaaggacaagatgctgctgaaggagtacgaggagagagtgatcatcaagggcagaaagcccgactgcgtgaaccccaccgaggccaacgtggaggagcccgagcagaccctgctgatcaagcccgaggacatcgtgctgaaggaggccggcagcaccgagaagaccctgagaaccctgctgagacccagcgacaaggtgagcaactactacaagaccaccagcagcgagatcaacgccatcgtgggcgccatccccagcacctgctaccccatctgcggcgtgcccaccatcagaagcgacatccccgcccccagaatcagaagaatcagcgacagaaccaactacggcgaggagggcagcgcctacagcctgctgtaccccaccatcttcgccagaaagggcgtgttcgagagagacttcttcaagaccagaagcaaggaggagatcgccgagatcctgtgcaacatcggcgtgaagctgagcgacgaggagttcgagaacgtgtggaacctggccagcaagaagcaccacagaggcgaggtgtgcgtggagaacatcagaaacgtgctggacgagctgagacacgccgacagaatcaagtgcaagaccctgatgtag

SEQ ID NO: 3682 - DNA, 2004 bp, synthetic construct
  misc_feature 1..2004: note = source = /note="Description of Artificial Sequence: Synthetic coding sequence"
  source 1..2004: mol_type = other DNA
atgggcagcagcagactggccgccctgctgctgcccctgctgctgatcgtgatcgacctgagcgacagcgccggcatcggcttcagacacctgccccactggaacaccagatgccccctggccagccacaccgacgacagcttcaccggcagcagcgcctacatcccctgcagaacctggtgggccctgttcagcaccaagccctggtgcgtgagagtgtggcactgcagcagatgcctgtgccagcacctgctgagcggcggcagcggcctgcagagaggcctgttccacctgctggtgcagaagagcaagaagagcagcaccttcaagttctacagaagacacaagatgcccgcccccgcccagagaaagctgctgcccagaagacacctgagcgagaagagccaccacatcagcatccccagccccgacatcagccacaagggcctgagaagcaagagaacccagcccagcgaccccgagacctgggagagcctgcccagactggacagccagagacacggcggccccgagttcagcttcgacctgctgcccgaggccagagccatcagagtgaccatcagcagcggccccgaggtgagcgtgagactgtgccaccagtgggccctggagtgcgaggagctgagcagcccctacgacgtgcagaagatcgtgagcggcggccacaccgtggagctgccctacgagttcctgctgccctgcctgtgcatcgaggccagctacctgcaggaggacaccgtgagaagaaagaagtgccccttccagagctggcccgaggcctacggcagcgacttctggaagagcgtgcacttcaccgactacagccagcacacccagatggtgatggccctgaccctgagatgccccctgaagctggaggccgccctgtgccagagacacgactggcacaccctgtgcaaggacctgcccaacgccaccgccagagagagcgacggctggtacgtgctggagaaggtggacctgcacccccagctgtgcttcaagttcagcttcggcaacagcagccacgtggagtgcccccaccagaccggcagcctgaccagctggaacgtgagcatggacacccaggcccagcagctgatcctgcacttcagcagcagaatgcacgccaccttcagcgccgcctggagcctgcccggcctgggccaggacaccctggtgccccccgtgtacaccgtgagccaggccagaggcagcagccccgtgagcctggacctgatcatccccttcctgagacccggctgctgcgtgctggtgtggagaagcgacgtgcagttcgcctggaagcacctgctgtgccccgacgtgagctacagacacctgggcctgctgatcctggccctgctggccctgctgaccctgctgggcgtggtgctggccctgacctgcagaagaccccagagcggccccggccccgccagacccgtgctgctgctgcacgccgccgacagcgaggcccagagaagactggtgggcgccctggccgagctgctgagagccgccctgggcggcggcagagacgtgatcgtggacctgtgggagggcagacacgtggccagagtgggccccctgccctggctgtgggccgccagaaccagagtggccagagagcagggcaccgtgctgctgctgtggagcggcgccgacctgagacccgtgagcggccccgaccccagagccgcccccctgctggccctgctgcacgccgcccccagacccctgctgctgctggcctacttcagcagactgtgcgccaagggcgacatccccccccccctgagagccctgcccagatacagactgctgagagacctgcccagactgctgagagccctggacgccagacccttcgccgaggccaccagctggggcagactgggcgccagacagagaagacagagcagactggagctgtgcagcagactggagagagaggccgccagactggccgacctgggctag

SEQ ID NO: 3683 - DNA, 609 bp, synthetic construct
  misc_feature 1..609: note = source = /note="Description of Artificial Sequence: Synthetic coding sequence"
  source 1..609: mol_type = other DNA
atggagctgtggggcgcctacctgctgctgtgcctgttcagcctgctgacccaggtgaccaccgagccccccacccagaagcccaagaagatcgtgaacgccaagaaggacgtggtgaacaccaagatgttcgaggagctgaagagcagactggacaccctggcccaggaggtggccctgctgaaggagcagcaggccctgcagaccgtgtgcctgaagggcaccaaggtgcacatgaagtgcttcctggccttcacccagaccaagaccttccacgaggccagcgaggactgcatcagcagaggcggcaccctgggcaccccccagaccggcagcgagaacgacgccctgtacgagtacctgagacagagcgtgggcaacgaggccgagatctggctgggcctgaacgacatggccgccgagggcacctgggtggacatgaccggcgccagaatcgcctacaagaactgggagaccgagatcaccgcccagcccgacggcggcaagaccgagaactgcgccgtgctgagcggcgccgccaacggcaagtggttcgacaagagatgcagagaccagctgccctacatctgccagttcggcatcgtgtag

SEQ ID NO: 3684 - DNA, 1839 bp, synthetic construct
  misc_feature 1..1839: note = source = /note="Description of Artificial Sequence: Synthetic coding sequence"
  source 1..1839: mol_type = other DNA
atgctggagggcctgggcagccccgccagccccagagccgccgccagcgccagcgtggccggcagcagcggccccgccgcctgcagcccccccagcagcagcgcccccagaagccccgagagccccgcccccagaagaggcggcgtgagagccagcgtgccccagaagctggccgagatgctgagcagccagtacggcctgatcgtgttcgtggccggcctgctgctgctgctggcctgggccgtgcacgccgccggcgtgagcaagagcgacctgctgtgcttcctgaccgccctgatgctgctgcagctgctgtggatgctgtggtacgtgggcagaagcagcgcccacagaagactgttcagactgaaggacacccacgccggcgccggctggctgagaggcagcatcaccctgttcgccgtgatcaccgtgatcctgggctgcctgaagatcggctacttcatcggcttcagcgagtgcctgagcgccaccgagggcgtgttccccgtgacccacagcgtgcacaccctgctgcaggtgtacttcctgtggggccacgccaaggacatcatccagagcttcaagaccctggagagattcggcgtgatccacagcgtgttcaccaacctgctgctgtgggccaacggcgtgctgaacgagagcaagcaccagctgaacgagcacaaggagagactgatcaccctgggcttcggcaacatcaccaccgtgctggacgaccacaccccccagtgcaactgcaccccccccaccctgtgcaccgccatcagccacggcatctactacctgtaccccttcaacatcgagtaccagatcctggccagcaccatgctgtacgtgctgtggaagaacatcggcagaaaggtggacagccaccagcaccagaagatgcagttcaagagcgacggcgtgatggtgggcgccgtgctgggcctgaccgtgctggccgccaccatcgccgtggtggtggtgtacctgatccacatcggcagaagcaagaccaagagcgagagcgccctgatcatgttctacctgtacgccatcaccctgctgatgctgatgggcgccgccggcctggccggcatcagaatctacagaatcgacgagaagagcctggacgagagcaagaaccccgccagaaagctggacagcgacctgctggtgggcaccgccagcggcagctggctgatcagctggggcagcatcctggccatcctgtgcgccgagggccaccccagatacacctggtacaacctgccctacagcatcctggccatcgtggagaagtacatccagaacctgttcatcttcgagagcatccacagagagcccgagaagctgagcgaggacatccagaccctgagagtggtgaccgtgtgcaacggcaacaccatgcccctggccagcagctgccccaagagcggcggcgtggccagagacgtggccccccagggcaaggacatgccccccgccgccaacggcaacgtgtgcatgagagagagccacgacaaggaggaggagaagcaggaggagagcagctggggcggcagccccagccccgtgagactgcccagattcctgcagggcaacgccaagagaaaggtgctgagaaacatcgccgccttcctgttcctgtgcaacatcagcctgtggatcccccccgccttcggctgcagacccgagtacgacaacggcctggaggagatcgtgttcggcttcgagccctggatcatcgtggtgaacctggccatgcccttcagcatcttctacagaatgcacgccgccgccagcctgttcgaggtgtactgcaagatctag

SEQ ID NO: 3685 - DNA, 786 bp, synthetic construct
  misc_feature 1..786: note = source = /note="Description of Artificial Sequence: Synthetic coding sequence"
  source 1..786: mol_type = other DNA
atggagctgctgcaggtgaccatcctgttcctgctgcccagcatctgcagcagcaacagcaccggcgtgctggaggccgccaacaacagcctggtggtgaccaccaccaagcccagcatcaccacccccaacaccgagagcctgcagaagaacgtggtgacccccaccaccggcaccacccccaagggcaccatcaccaacgagctgctgaagatgagcctgatgagcaccgccaccttcctgaccagcaaggacgagggcctgaaggccaccaccaccgacgtgagaaagaacgacagcatcatcagcaacgtgaccgtgaccagcgtgaccctgcccaacgccgtgagcaccctgcagagcagcaagcccaagaccgagacccagagcagcatcaagaccaccgagatccccggcagcgtgctgcagcccgacgccagccccagcaagaccggcaccctgaccagcatccccgtgaccatccccgagaacaccagccagagccaggtgatcggcaccgagggcggcaagaacgccagcaccagcgccaccagcagaagctacagcagcatcatcctgcccgtggtgatcgccctgatcgtgatcaccctgagcgtgttcgtgctggtgggcctgtacagaatgtgctggaaggccgaccccggcacccccgagaacggcaacgaccagccccagagcgacaaggagagcgtgaagctgctgaccgtgaagaccatcagccacgagagcggcgagcacagcgcccagggcaagaccaagaactag

SEQ ID NO: 3686 - DNA, 6408 bp, synthetic construct
  misc_feature 1..6408: note = source = /note="Description of Artificial Sequence: Synthetic coding sequence"
  source 1..6408: mol_type = other DNA
atgcccgccctgggccccgccctgctgcaggccctgtgggccggctgggtgctgaccctgcagcccctgccccccaccgccttcacccccaacggcacctacctgcagcacctggccagagaccccaccagcggcaccctgtacctgggcgccaccaacttcctgttccagctgagccccggcctgcagctggaggccaccgtgagcaccggccccgtgctggacagcagagactgcctgccccccgtgatgcccgacgagtgcccccaggcccagcccaccaacaaccccaaccagctgctgctggtgagccccggcgccctggtggtgtgcggcagcgtgcaccagggcgtgtgcgagcagagaagactgggccagctggagcagctgctgctgagacccgagagacccggcgacacccagtacgtggccgccaacgaccccgccgtgagcaccgtgggcctggtggcccagggcctggccggcgagcccctgctgttcgtgggcagaggctacaccagcagaggcgtgggcggcggcatcccccccatcaccaccagagccctgtggccccccgacccccaggccgccttcagctacgaggagaccgccaagctggccgtgggcagactgagcgagtacagccaccacttcgtgagcgccttcgccagaggcgccagcgcctacttcctgttcctgagaagagacctgcaggcccagagcagagccttcagagcctacgtgagcagagtgtgcctgagagaccagcactactacagctacgtggagctgcccctggcctgcgagggcggcagatacggcctgatccaggccgccgccgtggccaccagcagagaggtggcccacggcgaggtgctgttcgccgccttcagcagcgccgccccccccaccgtgggcagaccccccagcgccgccgccggcgccagcggcgccagcgccctgtgcgccttccccctggacgaggtggacagactggccaacagaaccagagacgcctgctacaccagagagggcagagccgaggacggcaccgaggtggcctacatcgagtacgacgtgaacagcgactgcgcccagctgcccgtggacaccctggacgcctacccctgcggcagcgaccacacccccagccccatggccagcagagtgcccctggaggccacccccatcctggagtggcccggcatccagctgaccgccgtggccgtgaccatggaggacggccacaccatcgccttcctgggcgacagccagggccagctgcacagagtgtacctgggccccggcagcgacggccacccctacagcacccagagcatccagcagggcagcgccgtgagcagagacctgaccttcgacggcaccttcgagcacctgtacgtgatgacccagagcaccctgctgaaggtgcccgtggccagctgcgcccagcacctggactgcgccagctgcctggcccacagagacccctactgcggctggtgcgtgctgctgggcagatgcagcagaagaagcgagtgcagcagaggccagggccccgagcagtggctgtggagcttccagcccgagctgggctgcctgcaggtggccgccatgagccccgccaacatcagcagagaggagaccagagaggtgttcctgagcgtgcccgacctgccccccctgtggcccggcgagagctacagctgccacttcggcgagcaccagagccccgccctgctgaccggcagcggcgtgatgtgccccagccccgaccccagcgaggcccccgtgctgcccagaggcgccgactacgtgagcgtgagcgtggagctgagattcggcgccgtggtgatcgccaagaccagcctgagcttctacgactgcgtggccgtgaccgagctgagacccagcgcccagtgccaggcctgcgtgagcagcagatggggctgcaactggtgcgtgtggcagcacctgtgcacccacaaggccagctgcgacgccggccccatggtggccagccaccagagccccctggtgagccccgacccccccgccagaggcggccccagccccagcccccccaccgcccccaaggccctggccacccccgcccccgacaccctgcccgtggagcccggcgcccccagcaccgccaccgccagcgacatcagccccggcgccagccccagcctgctgagcccctggggcccctgggccggcagcggcagcatcagcagccccggcagcaccggcagccccctgcacgaggagcccagcccccccagcccccagaacggccccggcaccgccgtgcccgcccccaccgacttcagacccagcgccacccccgaggacctgctggccagccccctgagccccagcgaggtggccgccgtgccccccgccgaccccggccccgaggccctgcaccccaccgtgcccctggacctgccccccgccaccgtgcccgccaccaccttccccggcgccatgggcagcgtgaagcccgccctggactggctgaccagagagggcggcgagctgcccgaggccgacgagtggaccggcggcgacgcccccgccttcagcaccagcaccctgctgagcggcgacggcgacagcgccgagctggagggcccccccgcccccctgatcctgcccagcagcctggactaccagtacgacacccccggcctgtgggagctggaggaggccaccctgggcgccagcagctgcccctgcgtggagagcgtgcagggcagcaccctgatgcccgtgcacgtggagagagagatcagactgctgggcagaaacctgcacctgttccaggacggccccggcgacaacgagtgcgtgatggagctggagggcctggaggtggtggtggaggccagagtggagtgcgagcccccccccgacacccagtgccacgtgacctgccagcagcaccagctgagctacgaggccctgcagcccgagctgagagtgggcctgttcctgagaagagccggcagactgagagtggacagcgccgagggcctgcacgtggtgctgtacgactgcagcgtgggccacggcgactgcagcagatgccagaccgccatgccccagtacggctgcgtgtggtgcgagggcgagagacccagatgcgtgaccagagaggcctgcggcgaggccgaggccgtggccacccagtgccccgcccccctgatccacagcgtggagcccctgaccggccccgtggacggcggcaccagagtgaccatcagaggcagcaacctgggccagcacgtgcaggacgtgctgggcatggtgaccgtggccggcgtgccctgcgccgtggacgcccaggagtacgaggtgagcagcagcctggtgtgcatcaccggcgccagcggcgaggaggtggccggcgccaccgccgtggaggtgcccggcagaggcagaggcgtgagcgagcacgacttcgcctaccaggaccccaaggtgcacagcatcttccccgccagaggccccagagccggcggcaccagactgaccctgaacggcagcaagctgctgaccggcagactggaggacatcagagtggtggtgggcgaccagccctgccacctgctgcccgagcagcagagcgagcagctgagatgcgagaccagccccagacccacccccgccaccctgcccgtggccgtgtggttcggcgccaccgagagaagactgcagagaggccagttcaagtacaccctggaccccaacatcaccagcgccggccccaccaagagcttcctgagcggcggcagagagatctgcgtgagaggccagaacctggacgtggtgcagacccccagaatcagagtgaccgtggtgagcagaatgctgcagcccagccagggcctgggcagaagaagaagagtggtgcccgagaccgcctgcagcctgggccccagctgcagcagccagcagttcgaggagccctgccacgtgaacagcagccagctgatcacctgcagaacccccgccctgcccggcctgcccgaggacccctgggtgagagtggagttcatcctggacaacctggtgttcgacttcgccaccctgaaccccacccccttcagctacgaggccgaccccaccctgcagcccctgaaccccgaggaccccaccatgcccttcagacacaagcccggcagcgtgttcagcgtggagggcgagaacctggacctggccatgagcaaggaggaggtggtggccatgatcggcgacggcccctgcgtggtgaagaccctgaccagacaccacctgtactgcgagccccccgtggagcagcccctgcccagacaccacgccctgagagaggcccccgacagcctgcccgagttcaccgtgcagatgggcaacctgagattcagcctgggccacgtgcagtacgacggcgagagccccggcgccttccccgtggccgcccaggtgggcctgggcgtgggcaccagcctgctggccctgggcgtgatcatcatcgtgctgatgtacagaagaaagagcaagcaggccctgagagactacaagaaggtgcagatccagctggagaacctggagagcagcgtgagagacagatgcaagaaggagttcaccgacctgatgaccgagatgaccgacctgaccagcgacctgctgggcagcggcatccccttcctggactacaaggtgtacgccgagagaatcttcttccccggccacagagagagccccctgcacagagacctgggcgtgcccgagagcagaagacccaccgtggagcagggcctgggccagctgagcaacctgctgaacagcaagctgttcctgaccaagttcatccacaccctggagagccagagaaccttcagcgccagagacagagcctacgtggccagcctgctgaccgtggccctgcacggcaagctggagtacttcaccgacatcctgagaaccctgctgagcgacctggtggcccagtacgtggccaagaaccccaagctgatgctgagaagaaccgagaccgtggtggagaagctgctgaccaactggatgagcatctgcctgtacaccttcgtgagagacagcgtgggcgagcccctgtacatgctgttcagaggcatcaagcaccaggtggacaagggccccgtggacagcgtgaccggcaaggccaagtacaccctgaacgacaacagactgctgagagaggacgtggagtacagacccctgaccctgaacgccctgctggccgtgggccccggcgccggcgaggcccagggcgtgcccgtgaaggtgctggactgcgacaccatcagccaggccaaggagaagatgctggaccagctgtacaagggcgtgcccctgacccagagacccgaccccagaaccctggacgtggagtggagaagcggcgtggccggccacctgatcctgagcgacgaggacgtgaccagcgaggtgcagggcctgtggagaagactgaacaccctgcagcactacaaggtgcccgacggcgccaccgtggccctggtgccctgcctgaccaagcacgtgctgagagagaaccaggactacgtgcccggcgagagaacccccatgctggaggacgtggacgagggcggcatcagaccctggcacctggtgaagcccagcgacgagcccgagccccccagacccagaagaggcagcctgagaggcggcgagagagagagagccaaggccatccccgagatctacctgaccagactgctgagcatgaagggcaccctgcagaagttcgtggacgacctgttccaggtgatcctgagcaccagcagacccgtgcccctggccgtgaagtacttcttcgacctgctggacgagcaggcccagcagcacggcatcagcgaccaggacaccatccacatctggaagaccaacagcctgcccctgagattctggatcaacatcatcaagaacccccagttcgtgttcgacgtgcagaccagcgacaacatggacgccgtgctgctggtgatcgcccagaccttcatggacgcctgcaccctggccgaccacaagctgggcagagacagccccatcaacaagctgctgtacgccagagacatccccagatacaagagaatggtggagagatactacgccgacatcagacagaccgtgcccgccagcgaccaggagatgaacagcgtgctggccgagctgagctggaactacagcggcgacctgggcgccagagtggccctgcacgagctgtacaagtacatcaacaagtactacgaccagatcatcaccgccctggaggaggacggcaccgcccagaagatgcagctgggctacagactgcagcagatcgccgccgccgtggagaacaaggtgaccgacctgtag

SEQ ID NO: 3687 - DNA, 297 bp, synthetic construct
  misc_feature 1..297: note = source = /note="Description of Artificial Sequence: Synthetic coding sequence"
  source 1..297: mol_type = other DNA
atgaagctgatggtgctggtgttcaccatcggcctgaccctgctgctgggcgtgcaggccatgcccgccaacagactgagctgctacagaaagatcctgaaggaccacaactgccacaacctgcccgagggcgtggccgacctgacccagatcgacgtgaacgtgcaggaccacttctgggacggcaagggctgcgagatgatctgctactgcaacttcagcgagctgctgtgctgccccaaggacgtgttcttcggccccaagatcagcttcgtgatcccctgcaacaaccagtag

SEQ ID NO: 3688 - DNA, 1443 bp, synthetic construct
  misc_feature 1..1443: note = source = /note="Description of Artificial Sequence: Synthetic coding sequence"
  source 1..1443: mol_type = other DNA
atgaagagaagcgtggccgtgtggctgctggtgggcctgagcctgggcgtgccccagttcggcaagggcgacatctgcgaccccaacccctgcgagaacggcggcatctgcctgcccggcctggccgacggcagcttcagctgcgagtgccccgacggcttcaccgaccccaactgcagcagcgtggtggaggtggccagcgacgaggaggagcccaccagcgccggcccctgcacccccaacccctgccacaacggcggcacctgcgagatcagcgaggcctacagaggcgacaccttcatcggctacgtgtgcaagtgccccagaggcttcaacggcatccactgccagcacaacatcaacgagtgcgaggtggagccctgcaagaacggcggcatctgcaccgacctggtggccaactacagctgcgagtgccccggcgagttcatgggcagaaactgccagtacaagtgcagcggccccctgggcatcgagggcggcatcatcagcaaccagcagatcaccgccagcagcacccacagagccctgttcggcctgcagaagtggtacccctactacgccagactgaacaagaagggcctgatcaacgcctggaccgccgccgagaacgacagatggccctggatccagatcaacctgcagagaaagatgagagtgaccggcgtgatcacccagggcgccaagagaatcggcagccccgagtacatcaagagctacaagatcgcctacagcaacgacggcaagacctgggccatgtacaaggtgaagggcaccaacgaggacatggtgttcagaggcaacatcgacaacaacaccccctacgccaacagcttcaccccccccatcaaggcccagtacgtgagactgtacccccaggtgtgcagaagacactgcaccctgagaatggagctgctgggctgcgagctgagcggctgcagcgagcccctgggcatgaagagcggccacatccaggactaccagatcaccgccagcagcatcttcagaaccctgaacatggacatgttcacctgggagcccagaaaggccagactggacaagcagggcaaggtgaacgcctggaccagcggccacaacgaccagagccagtggctgcaggtggacctgctggtgcccaccaaggtgaccggcatcatcacccagggcgccaaggacttcggccacgtgcagttcgtgggcagctacaagctggcctacagcaacgacggcgagcactggaccgtgtaccaggacgagaagcagagaaaggacaaggtgttccagggcaacttcgacaacgacacccacagaaagaacgtgatcgacccccccatctacgccagacacatcagaatcctgccctggagctggtacggcagaatcaccctgagaagcgagctgctgggctgcaccgaggaggagtag

SEQ ID NO: 3689 - DNA, 1323 bp, synthetic construct
  misc_feature 1..1323: note = source = /note="Description of Artificial Sequence: Synthetic coding sequence"
  source 1..1323: mol_type = other DNA
atggccgtgaagctgggcaccctgctgctggccctggccctgggcctggcccagcccgccagcgccagaagaaagctgctggtgttcctgctggacggcttcagaagcgactacatcagcgacgaggccctggagagcctgcccggcttcaaggagatcgtgagcagaggcgtgaaggtggactacctgacccccgacttccccagcctgagctaccccaactactacaccctgatgaccggcagacactgcgaggtgcaccagatgatcggcaactacatgtgggaccccaccaccaacaagagcttcgacatcggcgtgaacaaggacagcctgatgcccctgtggtggaacggcagcgagcccctgtgggtgaccctgaccaaggccaagagaaaggtgtacatgtactactggcccggctgcgaggtggagatcctgggcgtgagacccacctactgcctggagtacaagaacgtgcccaccgacatcaacttcgccaacgccgtgagcgacgccctggacagcttcaagagcggcagagccgacctggccgccatctaccacgagagaatcgacgtggagggccaccactacggccccgccagcccccagagaaaggacgccctgaaggccgtggacaccgtgctgaagtacatgaccaagtggatccaggagagaggcctgcaggacagactgaacgtgatcatcttcagcgaccacggcatgaccgacatcttctggatggacaaggtgatcgagctgaacaagtacatcagcctgaacgacctgcagcaggtgaaggacagaggccccgtggtgagcctgtggcccgcccccggcaagcacagcgagatctacaacaagctgagcaccgtggagcacatgaccgtgtacgagaaggaggccatccccagcagattctactacaagaagggcaagttcgtgagccccctgaccctggtggccgacgagggctggttcatcaccgagaacagagagatgctgcccttctggatgaacagcaccggcagaagagagggctggcagagaggctggcacggctacgacaacgagctgatggacatgagaggcatcttcctggccttcggccccgacttcaagagcaacttcagagccgcccccatcagaagcgtggacgtgtacaacgtgatgtgcaacgtggtgggcatcacccccctgcccaacaacggcagctggagcagagtgatgtgcatgctgaagggcagagccagcaccgccccccccgtgtggcccagccactgcgccctggccctgatcctgctgttcctgctggcctag

SEQ ID NO: 3690 - DNA, 351 bp, synthetic construct
  misc_feature 1..351: note = source = /note="Description of Artificial Sequence: Synthetic coding sequence"
  source 1..351: mol_type = other DNA
atggagagcagcagagtgagactgctgcccctgctgggcgccgccctgctgctgatgctgcccctgctgggcaccagagcccaggaggacgccgagctgcagcccagagccctggacatctacagcgccgtggacgacgccagccacgagaaggagctgatcgaggccctgcaggaggtgctgaagaagctgaagagcaagagagtgcccatctacgagaagaagtacggccaggtgcccatgtgcgacgccggcgagcagtgcgccgtgagaaagggcgccagaatcggcaagctgtgcgactgccccagaggcaccagctgcaacagcttcctgctgaagtgcctgtag

SEQ ID NO: 3691 - DNA, 1365 bp, synthetic construct
  misc_feature 1..1365: note = source = /note="Description of Artificial Sequence: Synthetic coding sequence"
  source 1..1365: mol_type = other DNA
atggccagacccaacaagttcctgctgtggttctgctgcttcgcctggctgtgcttccccatcagcctgggcagccaggccagcggcggcgaggcccagatcgccgccagcgccgagctggagagcggcgccatgccctggagcctgctgcagcacatcgacgagagagacagagccggcctgctgcccgccctgttcaaggtgctgagcgtgggcagaggcggcagccccagactgcagcccgacagcagagccctgcactacatgaagaagctgtacaagacctacgccaccaaggagggcatccccaagagcaacagaagccacctgtacaacaccgtgagactgttcaccccctgcaccagacacaagcaggcccccggcgaccaggtgaccggcatcctgcccagcgtggagctgctgttcaacctggacagaatcaccaccgtggagcacctgctgaagagcgtgctgctgtacaacatcaacaacagcgtgagcttcagcagcgccgtgaagtgcgtgtgcaacctgatgatcaaggagcccaagagcagcagcagaaccctgggcagagccccctacagcttcaccttcaacagccagttcgagttcggcaagaagcacaagtggatccagatcgacgtgaccagcctgctgcagcccctggtggccagcaacaagagaagcatccacatgagcatcaacttcacctgcatgaaggaccagctggagcaccccagcgcccagaacggcctgttcaacatgaccctggtgagccccagcctgatcctgtacctgaacgacaccagcgcccaggcctaccacagctggtacagcctgcactacaagagaagacccagccagggccccgaccaggagagaagcctgagcgcctaccccgtgggcgaggaggccgccgaggacggcagaagcagccaccacagacacagaagaggccaggagaccgtgagcagcgagctgaagaagcccctgggccccgccagcttcaacctgagcgagtacttcagacagttcctgctgccccagaacgagtgcgagctgcacgacttcagactgagcttcagccagctgaagtgggacaactggatcgtggccccccacagatacaaccccagatactgcaagggcgactgccccagagccgtgggccacagatacggcagccccgtgcacaccatggtgcagaacatcatctacgagaagctggacagcagcgtgcccagacccagctgcgtgcccgccaagtacagccccctgagcgtgctgaccatcgagcccgacggcagcatcgcctacaaggagtacgaggacatgatcgccaccaagtgcacctgcagatag

SEQ ID NO: 3692 - DNA, 234 bp, synthetic construct
  misc_feature 1..234: note = source = /note="Description of Artificial Sequence: Synthetic coding sequence"
  source 1..234: mol_type = other DNA
atgtggcacctgaagctgtgcgccgtgctgatgatcttcctgctgctgctgggccagatcgacggcagccccatccccgaggtgagcagcgccaagagaagacccagaagaatgacccccttctggagaggcgtgagcctgagacccatcggcgccagctgcagagacgacagcgagtgcatcaccagactgtgcagaaagagaagatgcagcctgagcgtggcccaggagtag

SEQ ID NO: 3693 - DNA, 912 bp, synthetic construct
  misc_feature 1..912: note = source = /note="Description of Artificial Sequence: Synthetic coding sequence"
  source 1..912: mol_type = other DNA
atgagcgagccccagcccgacctggagcccccccagcacggcctgtacatgctgttcctgctggtgctggtgttcttcctgatgggcctggtgggcttcatgatctgccacgtgctgaagaagaagggctacagatgcagaaccagcagaggcagcgagcccgacgacgcccagctgcagccccccgaggacgacgacatgaacgaggacaccgtggagagaatcgtgagatgcatcatccagaacgaggccaacgccgaggccctgaaggagatgctgggcgacagcgagggcgagggcaccgtgcagctgagcagcgtggacgccaccagcagcctgcaggacggcgcccccagccaccaccacaccgtgcacctgggcagcgccgccccctgcctgcactgcagcagaagcaagagaccccccctggtgagacagggcagaagcaaggagggcaagagcagacccagaaccggcgagaccaccgtgttcagcgtgggcagattcagagtgacccacatcgagaagagatacggcctgcacgagcacagagacggcagccccaccgacagaagctggggcagcggcggcggccaggaccccggcggcggccagggcagcggcggcggccagcccaaggccggcatgcccgccatggagagactgccccccgagagaccccagccccaggtgctggccagcccccccgtgcagaacggcggcctgagagacagcagcctgacccccagagccctggagggcaaccccagagccagcgccgagcccaccctgagagccggcggcagaggccccagccccggcctgcccacccaggaggccaacggccagcccagcaagcccgacaccagcgaccaccaggtgagcctgccccagggcgccggcagcatgtag

SEQ ID NO: 3694 - DNA, 795 bp, synthetic construct
  misc_feature 1..795: note = source = /note="Description of Artificial Sequence: Synthetic coding sequence"
  source 1..795: mol_type = other DNA
atgagaaccctgtggatggccctgtgcgccctgagcagactgtggcccggcgcccaggccggctgcgccgaggccggcagatgctgccccggcagagaccccgcctgcttcgccagaggctggagactggacagagtgtacggcacctgcttctgcgaccaggcctgcagattcaccggcgactgctgcttcgactacgacagagcctgccccgccagaccctgcttcgtgggcgagtggagcccctggagcggctgcgccgaccagtgcaagcccaccaccagagtgagaagaagaagcgtgcagcaggagccccagaacggcggcgccccctgcccccccctggaggagagagccggctgcctggagtacagcaccccccagggccaggactgcggccacacctacgtgcccgccttcatcaccaccagcgccttcaacaaggagagaaccagacaggccaccagcccccactggagcacccacaccgaggacgccggctactgcatggagttcaagaccgagagcctgaccccccactgcgccctggagaactggcccctgaccagatggatgcagtacctgagagagggctacaccgtgtgcgtggactgccagccccccgccatgaacagcgtgagcctgagatgcagcggcgacggcctggacagcgacggcaaccagaccctgcactggcaggccatcggcaaccccagatgccagggcacctggaagaaggtgagaagagtggaccagtgcagctgccccgccgtgcacagcttcatcttcatctag

SEQ ID NO: 3695 - DNA, 312 bp, synthetic construct
  misc_feature 1..312: note = source = /note="Description of Artificial Sequence: Synthetic coding sequence"
  source 1..312: mol_type = other DNA
atgagacagagactgctgcccagcgtgaccagcctgctgctggtggccctgctgttccccggcagcagccaggccagacacgtgaaccacagcgccaccgaggccctgggcgagctgagagagagagcccccggccagggcaccaacggcttccagctgctgagacacgccgtgaagagagacctgctgccccccagaacccccccctaccaggtgcacatcagccacagagaggccagaggccccagcttcagaatctgcgtggacttcctgggccccagatgggccagaggctgcagcaccggcaactag

SEQ ID NO: 3696 - DNA, 3867 bp, synthetic construct
  misc_feature 1..3867: note = source = /note="Description of Artificial Sequence: Synthetic coding sequence"
  source 1..3867: mol_type = other DNA
atggccagcgtggcctgggccgtgctgaaggtgctgctgctgctgcccacccagacctggagccccgtgggcgccggcaacccccccgactgcgacgcccccctggccagcgccctgcccagaagcagcttcagcagcagcagcgagctgagcagcagccacggccccggcttcagcagactgaacagaagagacggcgccggcggctggacccccctggtgagcaacaagtaccagtggctgcagatcgacctgggcgagagaatggaggtgaccgccgtggccacccagggcggctacggcagcagcgactgggtgaccagctacctgctgatgttcagcgacggcggcagaaactggaagcagtacagaagagaggagagcatctggggcttccccggcaacaccaacgccgacagcgtggtgcactacagactgcagccccccttcgaggccagattcctgagattcctgcccctggcctggaaccccagaggcagaatcggcatgagaatcgaggtgtacggctgcgcctacaagagcgaggtggtgtacttcgacggccagagcgccctgctgtacagactggacaagaagcccctgaagcccatcagagacgtgatcagcctgaagttcaaggccatgcagagcaacggcatcctgctgcacagagagggccagcacggcaaccacatcaccctggagctgatcaagggcaagctggtgttcttcctgaacagcggcaacgccaagctgcccagcaccatcgcccccgtgaccctgaccctgggcagcctgctggacgaccagcactggcacagcgtgctgatcgagctgctggacacccaggtgaacttcaccgtggacaagcacacccaccacttccaggccaagggcgacagcagctacctggacctgaacttcgagatcagcttcggcggcatccccacccccggcagaagcagagccttcagaagaaagagcttccacggctgcctggagaacctgtactacaacggcgtggacgtgaccgagctggccaagaagcacaagccccagatcctgatgatgggcaacgtgagcttcagctgcccccagccccagaccgtgcccgtgaccttcctgagcagcagaagctacctggccctgcccggcaacagcggcgaggacaaggtgagcgtgaccttccagttcagaacctggaacagagccggccacctgctgttcggcgagctgagaagaggcagcggcagcttcgtgctgttcctgaaggacggcaagctgaagctgagcctgttccagcccggccagagccccagaaacgtgaccgccggcgccggcctgaacgacggccagtggcacagcgtgagcttcagcgccaagtggagccacatgaacgtggtggtggacgacgacaccgccgtgcagcccctggtggccgtgctgatcgacagcggcgacacctactacttcggcggctgcctggacaacagcagcggcagcggctgcaagagccccctgggcggcttccagggctgcctgagactgatcaccatcggcgacaaggccgtggaccccatcctggtgcagcagggcgccctgggcagcttcagagacctgcagatcgacagctgcggcatcaccgacagatgcctgcccagctactgcgagcacggcggcgagtgcagccagagctgggacaccttcagctgcgactgcctgggcaccggctacaccggcgagacctgccacagcagcctgtacgagcagagctgcgaggcccacaagcacagaggcaaccccagcggcctgtactacatcgacgccgacggcagcggccccctgggccccttcctggtgtactgcaacatgaccgccgacgccgcctggaccgtggtgcagcacggcggccccgacgccgtgaccctgagaggcgcccccagcggccaccccagaagcgccgtgagcttcgcctacgccgccggcgccggccagctgagaagcgccgtgaacctggccgagagatgcgagcagagactggccctgagatgcggcaccgccagaagacccgacagcagagacggcacccccctgagctggtgggtgggcagaaccaacgagacccacaccagctggggcggcagcctgcccgacgcccagaagtgcacctgcggcctggagggcaactgcatcgacagccagtactactgcaactgcgacgccggcagaaacgagtggaccagcgacaccatcgtgctgagccagaaggagcacctgcccgtgacccagatcgtgatgaccgacgccggcagaccccacagcgaggccgcctacaccctgggccccctgctgtgcagaggcgaccagagcttctggaacagcgccagcttcaacaccgagaccagctacctgcacttccccgccttccacggcgagctgaccgccgacgtgtgcttcttcttcaagaccaccgtgagcagcggcgtgttcatggagaacctgggcatcaccgacttcatcagaatcgagctgagagcccccaccgaggtgaccttcagcttcgacgtgggcaacggcccctgcgaggtgaccgtgcagagccccacccccttcaacgacaaccagtggcaccacgtgagagccgagagaaacgtgaagggcgccagcctgcaggtggaccagctgccccagaagatgcagcccgcccccgccgacggccacgtgagactgcagctgaacagccagctgttcatcggcggcaccgccaccagacagagaggcttcctgggctgcatcagaagcctgcagctgaacggcgtggccctggacctggaggagagagccaccgtgacccccggcgtggagcccggctgcgccggccactgcagcacctacggccacctgtgcagaaacggcggcagatgcagagagaagagaagaggcgtgacctgcgactgcgccttcagcgcctacgacggccccttctgcagcaacgagatcagcgcctacttcgccaccggcagcagcatgacctaccacttccaggagcactacaccctgagcgagaacagcagcagcctggtgagcagcctgcacagagacgtgaccctgaccagagagatgatcaccctgagcttcagaaccaccagaacccccagcctgctgctgtacgtgagcagcttctacgaggagtacctgagcgtgatcctggccaacaacggcagcctgcagatcagatacaagctggacagacaccagaaccccgacgccttcaccttcgacttcaagaacatggccgacggccagctgcaccaggtgaagatcaacagagaggaggccgtggtgatggtggaggtgaaccagagcaccaagaagcaggtgatcctgagcagcggcaccgagttcaacgccgtgaagagcctgatcctgggcaaggtgctggaggccgccggcgccgaccccgacaccagaagagccgccaccagcggcttcaccggctgcctgagcgccgtgagattcggcagagccgcccccctgaaggccgccctgagacccagcggccccagcagagtgaccgtgagaggccacgtggcccccatggccagatgcgccgccggcgccgccagcggcagccccgccagagagctggcccccagactggccggcggcgccggcagaagcggccccgccgacgagggcgagcccctggtgaacgccgacagaagagacagcgccgtgatcggcggcgtgatcgccgtggtgatcttcatcctgctgtgcatcaccgccatcgccatcagaatctaccagcagagaaagctgagaaaggagaacgagagcaaggtgagcaagaaggaggagtgctag

SEQ ID NO: 3697 - DNA, 369 bp, synthetic construct
  misc_feature 1..369: note = source = /note="Description of Artificial Sequence: Synthetic coding sequence"
  source 1..369: mol_type = other DNA
atggtgcccggcccccccgagagcgtggtgagattcttcctgtggttctgcttcctgctgccccccaccagaaaggccagctgcgaccccagagacctgaagagctgcaacagaccctgcgtgtggagcagactgctgaagcccaacagcagcctgagcaacctggagaccgcctacttcccccagatcctgagattcctgagaccctggtacttcagcagaagccacctgaactaccaccagaaggcccccgccagatgggagtggctgtacagcatctacagaaagggcaccaaggcccagagaagaaacgtgctgagaagcccctgcgcccccccccagcccagctggccctgcagcgtgatctag

SEQ ID NO: 3698 - DNA, 1887 bp, synthetic construct
  misc_feature 1..1887: note = source = /note="Description of Artificial Sequence: Synthetic coding sequence"
  source 1..1887: mol_type = other DNA
atggcccccagcgccgaccccggcatgagcagaatgctgcccttcctgctgctgctgtggttcctgcccatcaccgagggcagccagagagccgagcccatgttcaccgccgtgaccaacagcgtgctgccccccgactacgacagcaaccccacccagctgaactacggcgtggccgtgaccgacgtggaccacgacggcgacttcgagatcgtggtggccggctacaacggccccaacctggtgctgaagtacgacagagcccagaagagactggtgaacatcgccgtggacgagagaagcagcccctactacgccctgagagacagacagggcaacgccatcggcgtgaccgcctgcgacatcgacggcgacggcagagaggagatctacttcctgaacaccaacaacgccttcagcggcgtggccacctacaccgacaagctgttcaagttcagaaacaacagatgggaggacatcctgagcgacgaggtgaacgtggccagaggcgtggccagcctgttcgccggcagaagcgtggcctgcgtggacagaaagggcagcggcagatacagcatctacatcgccaactacgcctacggcaacgtgggccccgacgccctgatcgagatggaccccgaggccagcgacctgagcagaggcatcctggccctgagagacgtggccgccgaggccggcgtgagcaagtacaccggcggcagaggcgtgagcgtgggccccatcctgagcagcagcgccagcgacatcttctgcgacaacgagaacggccccaacttcctgttccacaacagaggcgacggcaccttcgtggacgccgccgccagcgccggcgtggacgacccccaccagcacggcagaggcgtggccctggccgacttcaacagagacggcaaggtggacatcgtgtacggcaactggaacggcccccacagactgtacctgcagatgagcacccacggcaaggtgagattcagagacatcgccagccccaagttcagcatgcccagccccgtgagaaccgtgatcaccgccgacttcgacaacgaccaggagctggagatcttcttcaacaacatcgcctacagaagcagcagcgccaacagactgttcagagtgatcagaagagagcacggcgaccccctgatcgaggagctgaaccccggcgacgccctggagcccgagggcagaggcaccggcggcgtggtgaccgacttcgacggcgacggcatgctggacctgatcctgagccacggcgagagcatggcccagcccctgagcgtgttcagaggcaaccagggcttcaacaacaactggctgagagtggtgcccagaaccagattcggcgccttcgccagaggcgccaaggtggtgctgtacaccaagaagagcggcgcccacctgagaatcatcgacggcggcagcggctacctgtgcgagatggagcccgtggcccacttcggcctgggcaaggacgaggccagcagcgtggaggtgacctggcccgacggcaagatggtgagcagaaacgtggccagcggcgagatgaacagcgtgctggagatcctgtaccccagagacgaggacaccctgcaggaccccgcccccctggagacccccatgaacgccagcagcagccacagctgcgccctggagaccagcccctacgtgagcacccccatggaggccaccggcgccggccccaccagaagcgccgtgggcgccaccagccccaccagaatggcccagcccgcctggggcctgagcgccagccacagagcccccgcccccccccccccccccctgctgctgcccctgcccctgctgctgcccctgctggagctgcccctgctgcacagaagcagctag

SEQ ID NO: 3699 - DNA, 1008 bp, synthetic construct
  misc_feature 1..1008: note = source = /note="Description of Artificial Sequence: Synthetic coding sequence"
  source 1..1008: mol_type = other DNA
atgcagggccagggcagaagaagaggcacctgcaaggacatcttctgcagcaagatggccagctacctgtacggcgtgctgttcgccgtgggcctgtgcgcccccatctactgcgtgagccccgccaacgcccccagcgcctaccccagacccagcagcaccaagagcacccccgccagccaggtgtacagcctgaacaccgacttcgccttcagactgtacagaagactggtgctggagacccccagccagaacatcttcttcagccccgccagaatcaacagccacgtgaagaagaagacccagggcaaggtggtggacatcatccagggcctggacctgctgaccgccatggtgctggtgaaccacatcttcttcaaggccaagtgggagaagcccttccaccccgagtacaccagaaagaacttccccttcctggtgggcgagcaggtgaccgtgcacgtgcccatgatgcaccagaaggagcagttcgccttcggcgtggacaccgagctgaactgcttcgtgctgcagatggactacaagggcgacgccgtggccttcttcgtgctgcccagcaagggcaagatgagacagctggagcaggccctgagcgccagaaccctgagaaagtggagccacagcctgcagaagagatggatcgaggtgttcatccccagattcagcatcagcgccagctacaacctggagaccatcctgcccaagatgggcatccagaacgtgttcgacaagaacgccgacttcagcggcatcgccaagagagacagcctgcaggtgagcaaggccacccacaaggccgtgctggacgtgagcgaggagggcaccgaggccaccgccgccaccaccaccaagttcatcgtgagaagcaaggacggccccagctacttcaccgtgagcttcaacagaaccttcctgatgatgatcaccaacaaggccaccgacggcatcctgttcctgggcaaggtggagaaccccaccaagagctag

SEQ ID NO: 3700 - DNA, 768 bp, synthetic construct
  misc_feature 1..768: note = source = /note="Description of Artificial Sequence: Synthetic coding sequence"
  source 1..768: mol_type = other DNA
atggtgctgctgctggtgatcctgatccccgtgctggtgagcagcgccggcaccagcgcccactacgagatgctgggcacctgcagaatggtgtgcgacccctacggcggcaccaaggcccccagcaccgccgccacccccgacagaggcctgatgcagagcctgcccaccttcatccagggccccaagggcgaggccggcagacccggcaaggccggccccagaggcccccccggcgagcccggcccccccggccccatgggcccccccggcgagaagggcgagcccggcagacagggcctgcccggcccccccggcgcccccggcctgaacgccgccggcgccatcagcgccgccacctacagcaccgtgcccaagatcgccttctacgccggcctgaagagacagcacgagggctacgaggtgctgaagttcgacgacgtggtgaccaacctgggcaaccactacgaccccaccaccggcaagttcacctgcagcatccccggcatctacttcttcacctaccacgtgctgatgagaggcggcgacggcaccagcatgtgggccgacctgtgcaagaacaaccaggtgagagccagcgccatcgcccaggacgccgaccagaactacgactacgccagcaacagcgtggtgctgcacctggagcccggcgacgaggtgtacatcaagctggacggcggcaaggcccacggcggcaacaacaacaagtacagcaccttcagcggcttcatcatctacgccgactag

SEQ ID NO: 3701 - DNA, 1617 bp, synthetic construct
  misc_feature 1..1617: note = source = /note="Description of Artificial Sequence: Synthetic coding sequence"
  source 1..1617: mol_type = other DNA
atgagcttcagcgccaccatcctgttcagcccccccagcggcagcgaggccagatgctgctgctgcgcctgcaagagcgagaccaacggcggcaacaccggcagccagggcggcaaccccccccccagcacccccatcaccgtgaccggccacggcctggccgtgcagagcagcgagcagctgctgcacgtgatctaccagagagtggacaaggccgtgggcctggccgaggccgccctgggcctggccagagccaacaacgagctgctgaagagactgcaggaggaggtgggcgacctgagacagggcaaggtgagcatccccgacgaggacggcgagagcagagcccacagcagcccccccgaggagcccggccccctgaaggagagccccggcgaggccttcaaggccctgagcgccgtggaggaggagtgcgacagcgtgggcagcggcgtgcaggtggtgatcgaggagctgagacagctgggcgccgccagcgtgggccccggccccctgggcttccccgccacccagagagacatgagactgcccggctgcaccctggccgccagcgaggccgcccccctgctgaaccccctggtggacgactacgtggccagcgagggcgccgtgcagagagtgctggtgcccgcctacgccaagcagctgagccccgccacccagctggccatccagagagccacccccgagaccggccccgagaacggcaccaagctgcccccccccagacccgaggacatgctgaacgccgccgccgccctggacagcgccctggaggagagcggccccggcagcaccggcgagctgagacacagcctgggcctgaccgtgagcccctgcagaaccagaggcagcggccagaagaacagcagaagaaagagagacctggtgctgagcaagctggtgcacaacgtgcacaaccacatcaccaacgacaagagattcaacggcagcgagagcatcaagagcagctggaacatcagcgtggtgaagttcctgctggagaagctgaagcaggagctggtgaccagcccccacaactacaccgacaaggagctgaagggcgcctgcgtggcctacttcctgaccaagagaagagagtacagaaacagcctgaaccccttcaagggcctgaaggagaaggaggagaagaagctgagaagcagaagatacagactgttcgccaacagaagcagcatcatgagacacttcggccccgaggaccagagactgtggaacgacgtgaccgaggagctgatgagcgacgaggaggacagcctgaacgagcccggcgtgtgggtggccagaccccccagattcagagcccagagactgaccgagctgtgctaccacctggacgccaacagcaagcacggcaccaaggccaacagagtgtacggcccccccagcgacagactgcccagcgccgaggcccagctgctgccccccgagctgtacaaccccaacttccaggaggaggaggacgagggcggcgacgagaacgcccccggcagccccagcttcgaccagccccacaagacctgctgccccgacctgaacagcttcatcgagatcaaggtggagaaggacgagtag

SEQ ID NO: 3702 - DNA, 2853 bp, synthetic construct
  misc_feature 1..2853: note = source = /note="Description of Artificial Sequence: Synthetic coding sequence"
  source 1..2853: mol_type = other DNA
atgctgctgctgggcatcctgaccctggccttcgccggcagaaccgccggcggcagcgagcccgagagagaggtggtggtgcccatcagactggaccccgacatcaacggcagaagatactactggagaggccccgaggacagcggcgaccagggcctgatcttccagatcaccgccttccaggaggacttctacctgcacctgacccccgacgcccagttcctggcccccgccttcagcaccgagcacctgggcgtgcccctgcagggcctgaccggcggcagcagcgacctgagaagatgcttctacagcggcgacgtgaacgccgagcccgacagcttcgccgccgtgagcctgtgcggcggcctgagaggcgccttcggctacagaggcgccgagtacgtgatcagccccctgcccaacgccagcgcccccgccgcccagagaaacagccagggcgcccacctgctgcagagaagaggcgtgcccggcggccccagcggcgaccccaccagcagatgcggcgtggccagcggctggaaccccgccatcctgagagccctggacccctacaagcccagaagagccggcttcggcgagagcagaagcagaagaagaagcggcagagccaagagattcgtgagcatccccagatacgtggagaccctggtggtggccgacgagagcatggtgaagttccacggcgccgacctggagcactacctgctgaccctgctggccaccgccgccagactgtacagacaccccagcatcctgaaccccatcaacatcgtggtggtgaaggtgctgctgctgagagacagagacagcggccccaaggtgaccggcaacgccgccctgaccctgagaaacttctgcgcctggcagaagaagctgaacaaggtgagcgacaagcaccccgagtactgggacaccgccatcctgttcaccagacaggacctgtgcggcgccaccacctgcgacaccctgggcatggccgacgtgggcaccatgtgcgaccccaagagaagctgcagcgtgatcgaggacgacggcctgcccagcgccttcaccaccgcccacgagctgggccacgtgttcaacatgccccacgacaacgtgaaggtgtgcgaggaggtgttcggcaagctgagagccaaccacatgatgagccccaccctgatccagatcgacagagccaacccctggagcgcctgcagcgccgccatcatcaccgacttcctggacagcggccacggcgactgcctgctggaccagcccagcaagcccatcagcctgcccgaggacctgcccggcgccagctacaccctgagccagcagtgcgagctggccttcggcgtgggcagcaagccctgcccctacatgcagtactgcaccaagctgtggtgcaccggcaaggccaagggccagatggtgtgccagaccagacacttcccctgggccgacggcaccagctgcggcgagggcaagctgtgcctgaagggcgcctgcgtggagagacacaacctgaacaagcacagagtggacggcagctgggccaagtgggacccctacggcccctgcagcagaacctgcggcggcggcgtgcagctggccagaagacagtgcaccaaccccacccccgccaacggcggcaagtactgcgagggcgtgagagtgaagtacagaagctgcaacctggagccctgccccagcagcgccagcggcaagagcttcagagaggagcagtgcgaggccttcaacggctacaaccacagcaccaacagactgaccctggccgtggcctgggtgcccaagtacagcggcgtgagccccagagacaagtgcaagctgatctgcagagccaacggcaccggctacttctacgtgctggcccccaaggtggtggacggcaccctgtgcagccccgacagcaccagcgtgtgcgtgcagggcaagtgcatcaaggccggctgcgacggcaacctgggcagcaagaagagattcgacaagtgcggcgtgtgcggcggcgacaacaagagctgcaagaaggtgaccggcctgttcaccaagcccatgcacggctacaacttcgtggtggccatccccgccggcgccagcagcatcgacatcagacagagaggctacaagggcctgatcggcgacgacaactacctggccctgaagaacagccagggcaagtacctgctgaacggccacttcgtggtgagcgccgtggagagagacctggtggtgaagggcagcctgctgagatacagcggcaccggcaccgccgtggagagcctgcaggccagcagacccatcctggagcccctgaccgtggaggtgctgagcgtgggcaagatgaccccccccagagtgagatacagcttctacctgcccaaggagcccagagaggacaagagcagccaccccaaggaccccagaggccccagcgtgctgcacaacagcgtgctgagcctgagcaaccaggtggagcagcccgacgacagaccccccgccagatgggtggccggcagctggggcccctgcagcgccagctgcggcagcggcctgcagaagagagccgtggactgcagaggcagcgccggccagagaaccgtgcccgcctgcgacgccgcccacagacccgtggagacccaggcctgcggcgagccctgccccacctgggagctgagcgcctggagcccctgcagcaagagctgcggcagaggcttccagagaagaagcctgaagtgcgtgggccacggcggcagactgctggccagagaccagtgcaacctgcacagaaagccccaggagctggacttctgcgtgctgagaccctgctag

SEQ ID NO: 3703 - DNA, 1521 bp, synthetic construct
  misc_feature 1..1521: note = source = /note="Description of Artificial Sequence: Synthetic coding sequence"
  source 1..1521: mol_type = other DNA
atgaccagcaagccccacagcgactggatcccctacagcgtgctggacgacgagggcagaaacctgagacagcagaagctggacagacagagagccctgctggagcagaagcagaagaagaagagacaggagcccctgatggtgcaggccaacgccgacggcagacccagaagcagaagagccagacagagcgaggagcaggcccccctggtggagagctacctgagcagcagcggcagcaccagctaccaggtgcaggaggccgacagcctggccagcgtgcagctgggcgccaccagacccaccgcccccgccagcgccaagagaaccaaggccgccgccaccgccggcggccagggcggcgccgccagaaaggagaagaagggcaagcacaagggcaccagcggccccgccgccctggccgaggacaagagcgaggcccagggccccgtgcagatcctgaccgtgggccagagcgaccacgcccaggacgccggcgagaccgccgccggcggcggcgagagacccagcggccaggacctgagagccaccatgcagagaaagggcatcagcagcagcatgagcttcgacgaggacgaggaggacgaggaggagaacagcagcagcagcagccagctgaacagcaacaccagacccagcagcgccaccagcagaaagagcgtgagagaggccgccagcgcccccagccccaccgcccccgagcagcccgtggacgtggaggtgcaggacctggaggagttcgccctgagacccgccccccagggcatcaccatcaagtgcagaatcaccagagacaagaagggcatggacagaggcatgtaccccacctacttcctgcacctggacagagaggacggcaagaaggtgttcctgctggccggcagaaagagaaagaagagcaagaccagcaactacctgatcagcgtggaccccaccgacctgagcagaggcggcgacagctacatcggcaagctgagaagcaacctgatgggcaccaagttcaccgtgtacgacaacggcgtgaacccccagaaggccagcagcagcaccctggagagcggcaccctgagacaggagctggccgccgtgtgctacgagaccaacgtgctgggcttcaagggccccagaaagatgagcgtgatcgtgcccggcatgaacatggtgcacgagagagtgagcatcagacccagaaacgagcacgagaccctgctggccagatggcagaacaagaacaccgagagcatcatcgagctgcagaacaagacccccgtgtggaacgacgacacccagagctacgtgctgaacttccacggcagagtgacccaggccagcgtgaagaacttccagatcatccacggcaacgaccccgactacatcgtgatgcagttcggcagagtggccgaggacgtgttcaccatggactacaactaccccctgtgcgccctgcaggccttcgccatcgccctgagcagcttcgacagcaagctggcctgcgagtag

SEQ ID NO: 3704 - DNA, 594 bp, synthetic construct
  misc_feature 1..594: note = source = /note="Description of Artificial Sequence: Synthetic coding sequence"
  source 1..594: mol_type = other DNA
atggccaagaacggcctggtgatctgcatcctggtgatcaccctgctgctggaccagaccaccagccacaccagcagactgaaggccagaaagcacagcaagagaagagtgagagacaaggacggcgacctgaagacccagatcgagaagctgtggaccgaggtgaacgccctgaaggagatccaggccctgcagaccgtgtgcctgagaggcaccaaggtgcacaagaagtgctacctggccagcgagggcctgaagcacttccacgaggccaacgaggactgcatcagcaagggcggcatcctggtgatccccagaaacagcgacgagatcaacgccctgcaggactacggcaagagaagcctgcccggcgtgaacgacttctggctgggcatcaacgacatggtgaccgagggcaagttcgtggacgtgaacggcatcgccatcagcttcctgaactgggacagagcccagcccaacggcggcaagagagagaactgcgtgctgttcagccagagcgcccagggcaagtggagcgacgaggcctgcagaagcagcaagagatacatctgcgagttcaccatcccccagtag

SEQ ID NO: 3705 - DNA, 2424 bp, synthetic construct
  misc_feature 1..2424: note = source = /note="Description of Artificial Sequence: Synthetic coding sequence"
  source 1..2424: mol_type = other DNA
aagaagaagagaaagatcagcctgctgcccaagccccccaagcacgacgcccccctgaccatcgagttccccaacctggacaagaccagcgccgagtggctgaaggtgaacggcctgaaggccaagaagctgagcctgtaccaggtgctggcccccaacgccttcagccccgtggaggagttcgtgcccatcctgcagaagaccgtgagcagcaccatccacgagaaggccatgatccagttcgagtggcacgacggcaccgtgaagaacatccacgtggacccccccttcctgtacaagtaccagcagcagctgagcagagccatgagaatgtacgagagaagaatcgagtggctgagcctggccagcagaagaatctggggcaccgtgtgcgagaagagagtggtggtgctgctggacatcagcgccaccaacagcatgtacatcatccacatccagcacagcctgagactgctgctggaggagcagctgagcaacaaggactgcttcaacctgatcgccttcggcagcaccatcgagagctggagacccgagatggtgcccgtgagccacaacaacctgcagagcgcctggagatgggccctgaacctgagatgcagaggcagcagaaacgtgctgagcgccctgagaaaggccgtggaggtggacttcaaggacaaggacaagcaccagagccagggcatctacctgttcaccggcggcatccccgaccaggacatgcccaccctgagcgcctacatggccgaggcctgcggcggctgcgacctgcagctgaacgtgtgcctgttctacgtgggcgagcccaagatggacaccaccccccccgccagatacgccagccacaccgacaccgccgccgcctacaaggaggtgaccagagccgccggcggcagattccactggttcggcgacaccggcatctacgagagcgacgacatcaacagcatcatgagcgagatggagaaggccctgaactacagccagaagtgcgccttcctgatggccagcctgaagaaccacagcggcaaggtgctgggcagcagcgccctgcccaaggagaagcccaagaccctgcagctgagaagccagcccaagaagctgtgcccccccagacccaccgtgcccctgggcgccagaatgagcatcaaggacgaccccgacagagagaagagcccccccctgaagagcctgaagtggagacccctgagcagcagagtgggcatcagccccgccgccgcccagcccaccaaggagggcatgatggagctgagaagaaagaccaagagcagagaggccgagaccagcctgctgctgttctacaccgagaagggcaacgacgtgggcagcgtgtacaagaagtacccccagggcagaggcctgagaagaaccagcagcagcatcgacctgcccagaaaggacaccgtgtgcagcagccaggagtgggtggccaagtacggcctgaagaagctgaagctggagatcagcagatgcatgggccccaactgcacccaccagaagagcggccagagaagcgccagcgccaagcactgcagcatcttccccagcgtggagatccacggcgtggtgagacacatccagtggacccccagagagatggaggtgtacatcagacacctggagaaggtgctgagaagatacgtgcagagactgcagtggctgctgagcggcagcagaagactgttcggcaccgtgctggagagcaaggtgtgcatcctgctggacaccagcggcagcatgggcccctacctgcagcaggtgaagaccgagctggtgctgctgatctgggagcagctgagaaagtgctgcgacagcttcaacctgctgagcttcgccgagagcttccagagctggcaggacaccctggtggagaccaccgacgccgcctgccacgaggccatgcagtgggtgacccacctgcaggcccagggcagcaccagcatcctgcaggccctgctgaaggccttcagcttccacgacctggagggcctgtacctgctgaccgacggcaagcccgacaccagctgcagcctggtgctgaacgaggtgcagaagctgagagagaagagagacgtgaaggtgcacaccatcagcctgaactgcagcgacagagccgccgtggagttcctgagaaagctggccagcttcaccggcggcagataccactgccccgtgggcgaggacaccctgagcaagatccacagcctgctgaccaagggcttcatcaacgagaaggaccccaccctgccccccttcgagggcgacgacctgagaatcctggcccaggagatcaccaaggccagaagcttcctgtggcaggcccagagcttcagaagccagctgcagaagaagaacgacgccgagcccaaggtgaccctgagctag

SEQ ID NO: 3706 - DNA, 639 bp, synthetic construct
  misc_feature 1..639: note = source = /note="Description of Artificial Sequence: Synthetic coding sequence"
  source 1..639: mol_type = other DNA
atggtgagcagaatggtgagcaccatgctgagcggcctgctgttctggctggccagcggctggacccccgccttcgcctacagccccagaacccccgacagagtgagcgaggccgacatccagagactgctgcacggcgtgatggagcagctgggcatcgccagacccagagtggagtaccccgcccaccaggccatgaacctggtgggcccccagagcatcgagggcggcgcccacgagggcctgcagcacctgggccccttcggcaacatccccaacatcgtggccgagctgaccggcgacaacatccccaaggacttcagcgaggaccagggctaccccgacccccccaacccctgccccgtgggcaagaccgccgacgacggctgcctggagaacacccccgacaccgccgagttcagcagagagttccagctgcaccagcacctgttcgaccccgagcacgactaccccggcctgggcaagtggaacaagaagctgctgtacgagaagatgaagggcggcgagagaagaaagagaagaagcgtgaacccctacctgcagggccagagactggacaacgtggtggccaagaagagcgtgccccacttcagcgacgaggacaaggaccccgagtag

SEQ ID NO: 3707 - DNA, 1524 bp, synthetic construct
  misc_feature 1..1524: note = source = /note="Description of Artificial Sequence: Synthetic coding sequence"
  source 1..1524: mol_type = other DNA
atgtgcaccaagaccatccccgtgctgtggggctgcttcctgctgtggaacctgtacgtgagcagcagccagaccatctaccccggcatcaaggccagaatcacccagagagccctggactacggcgtgcaggccggcatgaagatgatcgagcagatgctgaaggagaagaagctgcccgacctgagcggcagcgagagcctggagttcctgaaggtggactacgtgaactacaacttcagcaacatcaagatcagcgccttcagcttccccaacaccagcctggccttcgtgcccggcgtgggcatcaaggccctgaccaaccacggcaccgccaacatcagcaccgactggggcttcgagagccccctgttccaggacaccggcggcgccgacctgttcctgagcggcgtgtacttcaccggcatcatcatcctgaccagaaacgacttcggccaccccaccctgaagctgcaggactgctacgcccagctgagccacgcccacgtgagcttcagcggcgagctgagcgtgctgtacaacagcttcgccgagcccatggagaagcccatcctgaagaacctgaacgagatgctgtgccccatcatcgccagcgaggtgaaggccctgaacgccaacctgagcaccctggaggtgctgaccaagatcgacaactacaccctgctggactacagcctgatcagcagccccgagatcaccgagaactacctggacctgaacctgaagggcgtgttctaccccctggagaacctgaccgacccccccttcagccccgtgcccttcgtgctgcccgagagaagcaacagcatgctgtacatcggcatcgccgagtacttcttcaagagcgccagcttcgcccacttcaccgccggcgtgttcaacgtgaccctgagcaccgaggagatcagcaaccacttcgtgcagaacagccagggcctgggcaacgtgctgagcagaatcgccgagatctacatcctgagccagcccttcatggtgagaatcatggccaccgagccccccatcatcaacctgcagcccggcaacttcaccctggacatccccgccagcatcatgatgctgacccagcccaagaacagcaccgtggagaccatcgtgagcatggacttcgtggccagcaccagcgtgggcctggtgatcctgggccagagactggtgtgcagcctgagcctgaacagattcagactggccctgcccgagagcaacagaagcaacatcgaggtgctgagattcgagaacatcctgagcagcatcctgcacttcggcgtgctgcccctggccaacgccaagctgcagcagggcttccccctgagcaacccccacaagttcctgttcgtgaacagcgacatcgaggtgctggagggcttcctgctgatcagcaccgacctgaagtacgagaccagcagcaagcagcagcccagcttccacgtgtgggagggcctgaacctgatcagcagacagtggagaggcaagagcgccccctag

SEQ ID NO: 3708 - DNA, 474 bp, synthetic construct
  misc_feature 1..474: note = source = /note="Description of Artificial Sequence: Synthetic coding sequence"
  source 1..474: mol_type = other DNA
atgcacccctggctgggcagcgccctgggcttccccaagtgcagaggcatccacctgtgcgcctgcggcaacggctggacccccggcgagaccctgagccagaacaagaccgagatcaccaagaacaaggtgacctgctggagaccccacggctgcgagcccaacaccggcctgggctaccagggcagccacaccagcaagtacaccctgctgccctggaacctgctgaagaccaagcccctgccccccagccacggcaaggagggcggcaaggaggccaaggtgcccagcggcgacaacagcggcagaggcgaggtgcccagagcccaggagggccaggccgcctgcggcagagccgccagcggcgacagccaggagggcatgagaagaggctacgaggagagagccaccgcccagagacccgccgtgagaagcgccgagaccaccgcccacggcacctggatctacccctag

SEQ ID NO: 3709 - DNA, 213 bp, synthetic construct
  misc_feature 1..213: note = source = /note="Description of Artificial Sequence: Synthetic coding sequence"
  source 1..213: mol_type = other DNA
atgagcaacaacatggccaagatcgccgaggccagaaagaccgtggagcagctgaagctggaggtgaacatcgacagaatgaaggtgagccaggccgccgccgagctgctggccttctgcgagacccacgccaaggacgaccccctggtgacccccgtgcccgccgccgagaaccccttcagagacaagagactgttctgcgtgctgctgtag

SEQ ID NO: 3710 - DNA, 645 bp, synthetic construct
  misc_feature 1..645: note = source = /note="Description of Artificial Sequence: Synthetic coding sequence"
  source 1..645: mol_type = other DNA
atggccctgctgctgtgcctggtgtgcctgaccgccgccctggcccacggctgcctgcactgccacagcaacttcagcaagaagttcagcttctacagacaccacgtgaacttcaagagctggtgggtgggcgacatccccgtgagcggcgccctgctgaccgactggagcgacgacaccatgaaggagctgcacctggccatccccgccaagatcaccagagagaagctggaccaggtggccaccgccgtgtaccagatgatggaccagctgtaccagggcaagatgtacttccccggctacttccccaacgagctgagaaacatcttcagagagcaggtgcacctgatccagaacgccatcatcgagagcagaatcgactgccagcacagatgcggcatcttccagtacgagaccatcagctgcaacaactgcaccgacagccacgtggcctgcttcggctacaactgcgagagcagcgcccagtggaagagcgccgtgcagggcctgctgaactacatcaacaactggcacaagcaggacaccagcatgagcctggtgagccccgccctgagatgcctggagcccccccacctggccaacctgaccctggaggacgccgccgagtgcctgaagcagcactag

SEQ ID NO: 3711 - DNA, 459 bp, synthetic construct
  misc_feature 1..459: note = source = /note="Description of Artificial Sequence: Synthetic coding sequence"
  source 1..459: mol_type = other DNA
atgagcccccacctgaccgccctgctgggcctggtgctgtgcctggcccagaccatccacacccaggagggcgccctgcccagacccagcatcagcgccgagcccggcaccgtgatcagccccggcagccacgtgaccttcatgtgcagaggccccgtgggcgtgcagaccttcagactggagagagaggacagagccaagtacaaggacagctacaacgtgttcagactgggccccagcgagagcgaggccagattccacatcgacagcgtgagcgagggcaacgccggcctgtacagatgcctgtactacaagccccccggctggagcgagcacagcgacttcctggagctgctggtgaaggagagcagcggcggccccgacagccccgacaccgagcccggcagcagcgccggcaccgtgcccggcaccgaggccagcggcttcgacgccccctag

SEQ ID NO: 3712 - DNA, 900 bp, synthetic construct
  misc_feature 1..900: note = source = /note="Description of Artificial Sequence: Synthetic coding sequence"
  source 1..900: mol_type = other DNA
atggccccctggagccaccccagcgcccagctgcagcccgtgggcggcgacgccgtgagccccgccctgatggtgctgctgtgcctgggcctgagcctgggccccagaacccacgtgcaggccggcaacctgagcaaggccaccctgtgggccgagcccggcagcgtgatcagcagaggcaacagcgtgaccatcagatgccagggcaccctggaggcccaggagtacagactggtgaaggagggcagccccgagccctgggacacccagaaccccctggagcccaagaacaaggccagattcagcatccccagcatgaccgagcaccacgccggcagatacagatgctactactacagccccgccggctggagcgagcccagcgaccccctggagctggtggtgaccggcttctacaacaagcccaccctgagcgccctgcccagccccgtggtgaccagcggcgagaacgtgaccctgcagtgcggcagcagactgagattcgacagattcatcctgaccgaggagggcgaccacaagctgagctggaccctggacagccagctgacccccagcggccagttccaggccctgttccccgtgggccccgtgacccccagccacagatggatgctgagatgctacggcagcagaagacacatcctgcaggtgtggagcgagcccagcgacctgctggagatccccgtgagcggcgccgccgacaacctgagccccagccagaacaagagcgacagcggcaccgccagccacctgcaggactacgccgtggagaacctgatcagaatgggcatggccggcctgatcctggtggtgctgggcatcctgatcttccaggactggcacagccagagaagcccccaggccgccgccggcagatag

SEQ ID NO: 3713 - DNA, 618 bp, synthetic construct
  misc_feature 1..618: note = source = /note="Description of Artificial Sequence: Synthetic coding sequence"
  source 1..618: mol_type = other DNA
atgaaggtgctgctgctgaccggcctgggcgccctgttcttcgcctactactgggacgacaacttcgaccccggcggcctggactacctggtgctgaaccacatcggcggcgcccccgccggcaccagagccagaagcccccaggccaccagatggctgatgcaggtgaacttcgtgagctacgtgcagctgaccagcagagccctgcccagcctgaccgacagcaagggcagcctggtggtggtgagcagcctgctgggcagagtgcccaccagcttcagcaccccctacagcgccgccaagttcgccctggacggcttcttcggcagcctgagaagagagctggacgtgcaggacgtgaacgtggccatcaccatgtgcgtgctgggcctgagagacagagccagcgccgccgaggccgtgagaggcgtgaccagagtgaaggccgcccccggccccaaggccgccctggccgtgatcagaggcggcgccaccagagccgccggcgtgttctacccctggagattcagactgctgtgcctgctgagaagatggctgcccagacccagagcctggttcatcagacaggagctgaacgtgaccgccgccgccgcctag

SEQ ID NO: 3714 - DNA, 795 bp, synthetic construct
  misc_feature 1..795: note = source = /note="Description of Artificial Sequence: Synthetic coding sequence"
  source 1..795: mol_type = other DNA
atgctgagatgcggcggcagaggcctgctgctgggcctggccgtggccgccgccgccgtgatggccgccagactgatgggctggtggggccccagagccggcttcagactgttcatccccgaggagctgagcagatacagaggcggccccggcgaccccggcctgtacctggccctgctgggcagagtgtacgacgtgagcagcggcagaagacactacgagcccggcagccactacagcggcttcgccggcagagacgccagcagagccttcgtgaccggcgactgcagcgaggccggcctggtggacgacgtgagcgacctgagcgccgccgagatgctgaccctgcacaactggctgagcttctacgagaagaactacgtgtgcgtgggcagagtgaccggcagattctacggcgaggacggcctgcccacccccgccctgacccaggtggaggccgccatcaccagaggcctggaggccaacaagctgcagctgcaggagaagcagaccttccccccctgcaacgccgagtggagcagcgccagaggcagcagactgtggtgcagccagaagagcggcggcgtgagcagagactggatcggcgtgcccagaaagctgtacaagcccggcgccaaggagcccagatgcgtgtgcgtgagaaccaccggcccccccagcggccagatgcccgacaaccccccccacagaaacagaggcgacctggaccaccccaacctggccgagtacaccggctgcccccccctggccatcacctgcagcttccccctgtag

SEQ ID NO: 3715 - DNA, 468 bp, synthetic construct
  misc_feature 1..468: note = source = /note="Description of Artificial Sequence: Synthetic coding sequence"
  source 1..468: mol_type = other DNA
atgagcaagagactgctgctgctgctgctgctgagcatgggcggcacctgggccagcaaggagcccctgagacccagatgcagacccatcaacgccaccctggccgtggagaaggagggctgccccgtgtgcatcaccgtgaacaccaccatctgcgccggctactgccccaccatgaccagagtgctgcagggcgtgctgcccgccctgccccaggtggtgtgcaactacagagacgtgagattcgagagcatcagactgcccggctgccccagaggcgtgaaccccgtggtgagctacgccgtggccctgagctgccagtgcgccctgtgcagaagaagcaccaccgactgcggcggccccaaggaccaccccctgacctgcgacgaccccagattccaggacagcagcagcagcaaggcccccccccccagcctgcccagccccagcagactgcccggcccctag

SEQ ID NO: 3716 - DNA, 498 bp, synthetic construct
  misc_feature 1..498: note = source = /note="Description of Artificial Sequence: Synthetic coding sequence"
  source 1..498: mol_type = other DNA
atggagatgttccagggcctgctgctgctgctgctgctgagcatgggcggcacctgggccagcaaggagcccctgagacccagatgcagacccatcaacgccaccctggccgtggagaaggagggctgccccgtgtgcatcaccgtgaacaccaccatctgcgccggctactgccccaccatgaccagagtgctgcagggcgtgctgcccgccctgccccaggtggtgtgcaactacagagacgtgagattcgagagcatcagactgcccggctgccccagaggcgtgaaccccgtggtgagctacgccgtggccctgagctgccagtgcgccctgtgcagaagaagcaccaccgactgcggcggccccaaggaccaccccctgacctgcgacgaccccagattccaggacagcagcagcagcaaggcccccccccccagcctgcccagccccagcagactgcccggccccagcgacacccccatcctgccccagtag

SEQ ID NO: 3717 - DNA, 990 bp, synthetic construct
  misc_feature 1..990: note = source = /note="Description of Artificial Sequence: Synthetic coding sequence"
  source 1..990: mol_type = other DNA
atgctgcccctgctgctgggcctgctgggccccgccgcctgctgggccctgggccccacccccggccccggcagcagcgagctgagaagcgccttcagcgccgccagaaccacccccctggagggcaccagcgagatggccgtgaccttcgacaaggtgtacgtgaacatcggcggcgacttcgacgtggccaccggccagttcagatgcagagtgcccggcgcctacttcttcagcttcaccgccggcaaggccccccacaagagcctgagcgtgatgctggtgagaaacagagacgaggtgcaggccctggccttcgacgagcagagaagacccggcgccagaagagccgccagccagagcgccatgctgcagctggactacggcgacaccgtgtggctgagactgcacggcgccccccagtacgccctgggcgcccccggcgccaccttcagcggctacctggtgtacgccgacgccgacgccgacgcccccgccagaggcccccccgccccccccgagcccagaagcgccttcagcgccgccagaaccagaagcctggtgggcagcgacgccggccccggccccagacaccagcccctggccttcgacaccgagttcgtgaacatcggcggcgacttcgacgccgccgccggcgtgttcagatgcagactgcccggcgcctacttcttcagcttcaccctgggcaagctgcccagaaagaccctgagcgtgaagctgatgaagaacagagacgaggtgcaggccatgatctacgacgacggcgccagcagaagaagagagatgcagagccagagcgtgatgctggccctgagaagaggcgacgccgtgtggctgctgagccacgaccacgacggctacggcgcctacagcaaccacggcaagtacatcaccttcagcggcttcctggtgtaccccgacctggcccccgccgccccccccggcctgggcgccagcgagctgctgtag

SEQ ID NO: 3718 - DNA, 873 bp, synthetic construct
  misc_feature 1..873: note = source = /note="Description of Artificial Sequence: Synthetic coding sequence"
  source 1..873: mol_type = other DNA
atgagaagacccgccgccgtgcccctgctgctgctgctgtgcttcggcagccagagagccaaggccgccaccgcctgcggcagacccagaatgctgaacagaatggtgggcggccaggacacccaggagggcgagtggccctggcaggtgagcatccagagaaacggcagccacttctgcggcggcagcctgatcgccgagcagtgggtgctgaccgccgcccactgcttcagaaacaccagcgagaccagcctgtaccaggtgctgctgggcgccagacagctggtgcagcccggcccccacgccatgtacgccagagtgagacaggtggagagcaaccccctgtaccagggcaccgccagcagcgccgacgtggccctggtggagctggaggcccccgtgcccttcaccaactacatcctgcccgtgtgcctgcccgaccccagcgtgatcttcgagaccggcatgaactgctgggtgaccggctggggcagccccagcgaggaggacctgctgcccgagcccagaatcctgcagaagctggccgtgcccatcatcgacacccccaagtgcaacctgctgtacagcaaggacaccgagttcggctaccagcccaagaccatcaagaacgacatgctgtgcgccggcttcgaggagggcaagaaggacgcctgcaagggcgacagcggcggccccctggtgtgcctggtgggccagagctggctgcaggccggcgtgatcagctggggcgagggctgcgccagacagaacagacccggcgtgtacatcagagtgaccgcccaccacaactggatccacagaatcatccccaagctgcagttccagcccgccagactgggcggccagaagtag

SEQ ID NO: 3719 - DNA, 792 bp, synthetic construct
  misc_feature 1..792: note = source = /note="Description of Artificial Sequence: Synthetic coding sequence"
  source 1..792: mol_type = other DNA
atggccttcctgtggctgctgagctgctgggccctgctgggcaccaccttcggctgcggcgtgcccgccatccaccccgtgctgagcggcctgagcagaatcgtgaacggcgaggacgccgtgcccggcagctggccctggcaggtgagcctgcaggacaagaccggcttccacttctgcggcggcagcctgatcagcgaggactgggtggtgaccgccgcccactgcggcgtgagaaccagcgacgtggtggtggccggcgagttcgaccagggcagcgacgaggagaacatccaggtgctgaagatcgccaaggtgttcaagaaccccaagttcagcatcctgaccgtgaacaacgacatcaccctgctgaagctggccacccccgccagattcagccagaccgtgagcgccgtgtgcctgcccagcgccgacgacgacttccccgccggcaccctgtgcgccaccaccggctggggcaagaccaagtacaacgccaacaagacccccgacaagctgcagcaggccgccctgcccctgctgagcaacgccgagtgcaagaagagctggggcagaagaatcaccgacgtgatgatctgcgccggcgccagcggcgtgagcagctgcatgggcgacagcggcggccccctggtgtgccagaaggacggcgcctggaccctggtgggcatcgtgagctggggcagcagaacctgcagcaccaccacccccgccgtgtacgccagagtggccaagctgatcccctgggtgcagaagatcctggccgccaactag

SEQ ID NO: 3720 - DNA, 228 bp, synthetic construct
  misc_feature 1..228: note = source = /note="Description of Artificial Sequence: Synthetic coding sequence"
  source 1..228: mol_type = other DNA
atgggcgccgccatcagccagggcgccctgatcgccatcgtgtgcaacggcctggtgggcttcctgctgctgctgctgtgggtgatcctgtgctgggcctgccacagcagaagcgccgacgtggacagcctgagcgagagcagaacccaggagagcgcctgcctggagctggaccccgccgcccagagcctggccagcctggcccccatcggcgcccagtggccctag

SEQ ID NO: 3721 - DNA, 762 bp, synthetic construct
  misc_feature 1..762: note = source = /note="Description of Artificial Sequence: Synthetic coding sequence"
  source 1..762: mol_type = other DNA
atggccagaagcctgctgctgcccctgcagatcctgctgctgagcctggccctggagaccgccggcgaggaggcccagggcgacaagatcatcgacggcgccccctgcgccagaggcagccacccctggcaggtggccctgctgagcggcaaccagctgcactgcggcggcgtgctggtgaacgagagatgggtgctgaccgccgcccactgcaagatgaacgagtacaccgtgcacctgggcagcgacaccctgggcgacagaagagcccagagaatcaaggccagcaagagcttcagacaccccggctacagcacccagacccacgtgaacgacctgatgctggtgaagctgaacagccaggccagactgagcagcatggtgaagaaggtgagactgcccagcagatgcgagccccccggcaccacctgcaccgtgagcggctggggcaccaccaccagccccgacgtgaccttccccagcgacctgatgtgcgtggacgtgaagctgatcagcccccaggactgcaccaaggtgtacaaggacctgctggagaacagcatgctgtgcgccggcatccccgacagcaagaagaacgcctgcaacggcgacagcggcggccccctggtgtgcagaggcaccctgcagggcctggtgagctggggcaccttcccctgcggccagcccaacgaccccggcgtgtacacccaggtgtgcaagttcaccaagtggatcaacgacaccatgaagaagcacagatag

SEQ ID NO: 3722 - DNA, 480 bp, synthetic construct
  misc_feature 1..480: note = source = /note="Description of Artificial Sequence: Synthetic coding sequence"
  source 1..480: mol_type = other DNA
atgaaggcctggggcaccgtggtggtgaccctggccaccctgatggtggtgaccgtggacgccaagatctacgagagatgcgagctggccgccagactggagagagccggcctgaacggctacaagggctacggcgtgggcgactggctgtgcatggcccactacgagagcggcttcgacaccgccttcgtggaccacaaccccgacggcagcagcgagtacggcatcttccagctgaacagcgcctggtggtgcgacaacggcatcacccccaccaagaacctgtgccacatggactgccacgacctgctgaacagacacatcctggacgacatcagatgcgccaagcagatcgtgagcagccagaacggcctgagcgcctggaccagctggagactgcactgcagcggccacgacctgagcgagtggctgaagggctgcgacatgcacgtgaagatcgaccccaagatccacccctag

SEQ ID NO: 3723 - DNA, 501 bp, synthetic construct
  misc_feature 1..501: note = source = /note="Description of Artificial Sequence: Synthetic coding sequence"
  source 1..501: mol_type = other DNA
atggcccagaccaacagcttcttcatgctgatcagcagcctgatgttcctgagcctgagccagggccaggagagccagaccgagctgcccaaccccagaatcagctgccccgagggcaccaacgcctacagaagctactgctactacttcaacgaggaccccgagacctgggtggacgccgacctgtactgccagaacatgaacagcggcaacctggtgagcgtgctgacccaggccgagggcgccttcgtggccagcctgatcaaggagagcagcaccgacgacagcaacgtgtggatcggcctgcacgaccccaagaagaacagaagatggcactggagcagcggcagcctggtgagctacaagagctgggacaccggcagccccagcagcgccaacgccggctactgcgccagcctgaccagctgcagcggcttcaagaagtggaaggacgagagctgcgagaagaagttcagcttcgtgtgcaagttcaagaactag

SEQ ID NO: 3724 - DNA, 528 bp, synthetic construct
  misc_feature 1..528: note = source = /note="Description of Artificial Sequence: Synthetic coding sequence"
  source 1..528: mol_type = other DNA
atgctgccccccatggccctgcccagcgtgagctggatgctgctgagctgcctgatgctgctgagccaggtgcagggcgaggagccccagagagagctgcccagcgccagaatcagatgccccaagggcagcaaggcctacggcagccactgctacgccctgttcctgagccccaagagctggaccgacgccgacctggcctgccagaagagacccagcggcaacctggtgagcgtgctgagcggcgccgagggcagcttcgtgagcagcctggtgaagagcatcggcaacagctacagctacgtgtggatcggcctgcacgaccccacccagggcaccgagcccaacggcgagggctgggagtggagcagcagcgacgtgatgaactacttcgcctgggagagaaaccccagcaccatcagcagccccggccactgcgccagcctgagcagaagcaccgccttcctgagatggaaggactacaactgcaacgtgagactgccctacgtgtgcaagttcaccgactag

SEQ ID NO: 3725 - DNA, 1686 bp, synthetic construct
  misc_feature 1..1686: note = source = /note="Description of Artificial Sequence: Synthetic coding sequence"
  source 1..1686: mol_type = other DNA
atgggcgccagaacccccctgcccagcttctgggtgagcttcttcgccgagaccggcatcctgttccccggcggcaccccctggcccatgggcagccagcacagcaagcagcacagaaagcccggccccctgaagagaggccacagaagagacagaagaaccaccagaagaaagtactggaaggagggcagagagatcgccagagtgctggacgacgagggcagaaacctgagacagcagaagctggacagacagagagccctgctggagcagaagcagaagaagaagagacaggagcccctgatggtgcaggccaacgccgacggcagacccagaagcagaagagccagacagagcgaggagcaggcccccctggtggagagctacctgagcagcagcggcagcaccagctaccaggtgcaggaggccgacagcctggccagcgtgcagctgggcgccaccagacccaccgcccccgccagcgccaagagaaccaaggccgccgccaccgccggcggccagggcggcgccgccagaaaggagaagaagggcaagcacaagggcaccagcggccccgccgccctggccgaggacaagagcgaggcccagggccccgtgcagatcctgaccgtgggccagagcgaccacgcccaggacgccggcgagaccgccgccggcggcggcgagagacccagcggccaggacctgagagccaccatgcagagaaagggcatcagcagcagcatgagcttcgacgaggacgaggaggacgaggaggagaacagcagcagcagcagccagctgaacagcaacaccagacccagcagcgccaccagcagaaagagcgtgagagaggccgccagcgcccccagccccaccgcccccgagcagcccgtggacgtggaggtgcaggacctggaggagttcgccctgagacccgccccccagggcatcaccatcaagtgcagaatcaccagagacaagaagggcatggacagaggcatgtaccccacctacttcctgcacctggacagagaggacggcaagaaggtgttcctgctggccggcagaaagagaaagaagagcaagaccagcaactacctgatcagcgtggaccccaccgacctgagcagaggcggcgacagctacatcggcaagctgagaagcaacctgatgggcaccaagttcaccgtgtacgacaacggcgtgaacccccagaaggccagcagcagcaccctggagagcggcaccctgagacaggagctggccgccgtgtgctacgagaccaacgtgctgggcttcaagggccccagaaagatgagcgtgatcgtgcccggcatgaacatggtgcacgagagagtgagcatcagacccagaaacgagcacgagaccctgctggccagatggcagaacaagaacaccgagagcatcatcgagctgcagaacaagacccccgtgtggaacgacgacacccagagctacgtgctgaacttccacggcagagtgacccaggccagcgtgaagaacttccagatcatccacggcaacgaccccgactacatcgtgatgcagttcggcagagtggccgaggacgtgttcaccatggactacaactaccccctgtgcgccctgcaggccttcgccatcgccctgagcagcttcgacagcaagctggcctgcgagtag

SEQ ID NO: 3726 - DNA, 1272 bp, synthetic construct
  misc_feature 1..1272: note = source = /note="Description of Artificial Sequence: Synthetic coding sequence"
  source 1..1272: mol_type = other DNA
atgatgtacagacccgacgtggtgagagccagaaagagagtgtgctgggagccctgggtgatcggcctggtgatcttcatcagcctgatcgtgctggccgtgtgcatcggcctgaccgtgcactacgtgagatacaaccagaagaagacctacaactactacagcaccctgagcttcaccaccgacaagctgtacgccgagttcggcagagaggccagcaacaacttcaccgagatgagccagagactggagagcatggtgaagaacgccttctacaagagccccctgagagaggagttcgtgaagagccaggtgatcaagttcagccagcagaagcacggcgtgctggcccacatgctgctgatctgcagattccacagcaccgaggaccccgagaccgtggacaagatcgtgcagctggtgctgcacgagaagctgcaggacgccgtgggcccccccaaggtggacccccacagcgtgaagatcaagaagatcaacaagaccgagaccgacagctacctgaaccactgctgcggcaccagaagaagcaagaccctgggccagagcctgagaatcgtgggcggcaccgaggtggaggagggcgagtggccctggcaggccagcctgcagtgggacggcagccacagatgcggcgccaccctgatcaacgccacctggctggtgagcgccgcccactgcttcaccacctacaagaaccccgccagatggaccgccagcttcggcgtgaccatcaagcccagcaagatgaagagaggcctgagaagaatcatcgtgcacgagaagtacaagcaccccagccacgactacgacatcagcctggccgagctgagcagccccgtgccctacaccaacgccgtgcacagagtgtgcctgcccgacgccagctacgagttccagcccggcgacgtgatgttcgtgaccggcttcggcgccctgaagaacgacggctacagccagaaccacctgagacaggcccaggtgaccctgatcgacgccaccacctgcaacgagccccaggcctacaacgacgccatcacccccagaatgctgtgcgccggcagcctggagggcaagaccgacgcctgccagggcgacagcggcggccccctggtgagcagcgacgccagagacatctggtacctggccggcatcgtgagctggggcgacgagtgcgccaagcccaacaagcccggcgtgtacaccagagtgaccgccctgagagactggatcaccagcaagaccggcatctag

SEQ ID NO: 3727 - DNA, 282 bp, synthetic construct
  misc_feature 1..282: note = source = /note="Description of Artificial Sequence: Synthetic coding sequence"
  source 1..282: mol_type = other DNA
atgaagcccgtgctgcccctgcagttcctggtggtgttctgcctggccctgcagctggtgcccggcagccccaagcagagagtgctgaagtacatcctggagccccccccctgcatcagcgcccccgagaactgcacccacctgtgcaccatgcaggaggactgcgagaagggcttccagtgctgcagcagcttctgcggcatcgtgtgcagcagcgagaccttccagaagagaaacagaatcaagcacaagggcagcgaggtgatcatgcccgccaactag

SEQ ID NO: 3728 - DNA, 1530 bp, synthetic construct
  misc_feature 1..1530: note = source = /note="Description of Artificial Sequence: Synthetic coding sequence"
  source 1..1530: mol_type = other DNA
atggacttcctgctggccctggtgctggtgagcagcctgtacctgcaggccgccgccgagttcgacggcagatggcccagacagatcgtgagcagcatcggcctgtgcagatacggcggcagaatcgactgctgctggggctgggccagacagagctggggccagtgccagcccgtgtgccagcccagatgcaagcacggcgagtgcatcggccccaacaagtgcaagtgccaccccggctacgccggcaagacctgcaaccaggacctgaacgagtgcggcctgaagcccagaccctgcaagcacagatgcatgaacacctacggcagctacaagtgctactgcctgaacggctacatgctgatgcccgacggcagctgcagcagcgccctgacctgcagcatggccaactgccagtacggctgcgacgtggtgaagggccagatcagatgccagtgccccagccccggcctgcagctggcccccgacggcagaacctgcgtggacgtggacgagtgcgccaccggcagagccagctgccccagattcagacagtgcgtgaacaccttcggcagctacatctgcaagtgccacaagggcttcgacctgatgtacatcggcggcaagtaccagtgccacgacatcgacgagtgcagcctgggccagtaccagtgcagcagcttcgccagatgctacaacatcagaggcagctacaagtgcaagtgcaaggagggctaccagggcgacggcctgacctgcgtgtacatccccaaggtgatgatcgagcccagcggccccatccacgtgcccaagggcaacggcaccatcctgaagggcgacaccggcaacaacaactggatccccgacgtgggcagcacctggtggccccccaagaccccctacatcccccccatcatcaccaacagacccaccagcaagcccaccaccagacccacccccaagcccacccccatccccaccccccccccccccccccccctgcccaccgagctgagaacccccctgccccccaccacccccgagagacccaccaccggcctgaccaccatcgcccccgccgccagcaccccccccggcggcatcaccgtggacaacagagtgcagaccgacccccagaagcccagaggcgacgtgttcagcgtgctggtgcacagctgcaacttcgaccacggcctgtgcggctggatcagagagaaggacaacgacctgcactgggagcccatcagagaccccgccggcggccagtacctgaccgtgagcgccgccaaggcccccggcggcaaggccgccagactggtgctgcccctgggcagactgatgcacagcggcgacctgtgcctgagcttcagacacaaggtgaccggcctgcacagcggcaccctgcaggtgttcgtgagaaagcacggcgcccacggcgccgccctgtggggcagaaacggcggccacggctggagacagacccagatcaccctgagaggcgccgacatcaagagcgagagccagagatag

SEQ ID NO: 3729 - DNA, 381 bp, synthetic construct
  misc_feature 1..381: note = source = /note="Description of Artificial Sequence: Synthetic coding sequence"
  source 1..381: mol_type = other DNA
atggacaagagcctgctgctggagctgcccatcctgctgtgctgcttcagagccctgagcggcagcctgagcatgagaaacgacgccgtgaacgagatcgtggccgtgaagaacaacttccccgtgatcgagatcgtgcagtgcagaatgtgccacctgcagttccccggcgagaagtgcagcagaggcagaggcatctgcaccgccaccaccgaggaggcctgcatggtgggcagaatgttcaagagagacggcaacccctggctgaccttcatgggctgcctgaagaactgcgccgacgtgaagggcatcagatggagcgtgtacctggtgaacttcagatgctgcagaagccacgacctgtgcaacgaggacctgtag

SEQ ID NO: 3730 - DNA, 537 bp, synthetic construct
  misc_feature 1..537: note = source = /note="Description of Artificial Sequence: Synthetic coding sequence"
  source 1..537: mol_type = other DNA
atggagctgctgcaggtgaccatcctgttcctgctgcccagcatctgcagcagcaacagcaccggcgtgctggaggccgccaacaacagcctggtggtgaccaccaccaagcccagcatcaccacccccaacaccgagagcctgcagaagaacgtggtgacccccaccaccggcaccacccccaagggcaccatcaccaacgagctgctgaagatgagcctgatgagcaccgccaccttcctgaccagcaaggacgagggcctgaaggccaccaccaccgacgtgagaaagaacgacagcatcatcagcaacgtgaccgtgaccagcgtgaccctgcccaacgccgtgagcaccctgcagagcagcaagcccaagaccgagacccagagcagcatcaagaccaccgagatccccggcacccccgagaacggcaacgaccagccccagagcgacaaggagagcgtgaagctgctgaccgtgaagaccatcagccacgagagcggcgagcacagcgcccagggcaagaccaagaactag

SEQ ID NO: 3731 - DNA, 2544 bp, synthetic construct
  misc_feature 1..2544: note = source = /note="Description of Artificial Sequence: Synthetic coding sequence"
  source 1..2544: mol_type = other DNA
atgttcaagtgctggagcgtggtgctggtgctgggcttcatcttcctggagagcgagggcagacccaccaaggagggcggctacggcctgaagagctaccagcccctgatgagactgagacacaagcaggagaagaaccaggagagcagcagagtgaagggcttcatgatccaggacggccccttcggcagctgcgagaacaagtactgcggcctgggcagacactgcgtgaccagcagagagaccggccaggccgagtgcgcctgcatggacctgtgcaagagacactacaagcccgtgtgcggcagcgacggcgagttctacgagaaccactgcgaggtgcacagagccgcctgcctgaagaagcagaagatcaccatcgtgcacaacgaggactgcttcttcaagggcgacaagtgcaagaccaccgagtacagcaagatgaagaacatgctgctggacctgcagaaccagaagtacatcatgcaggagaacgagaaccccaacggcgacgacatcagcagaaagaagctgctggtggaccagatgttcaagtacttcgacgccgacagcaacggcctggtggacatcaacgagctgacccaggtgatcaagcaggaggagctgggcaaggacctgttcgactgcaccctgtacgtgctgctgaagtacgacgacttcaacgccgacaagcacctggccctggaggagttctacagagccttccaggtgatccagctgagcctgcccgaggaccagaagctgagcatcaccgccgccaccgtgggccagagcgccgtgctgagctgcgccatccagggcaccctgagaccccccatcatctggaagagaaacaacatcatcctgaacaacctggacctggaggacatcaacgacttcggcgacgacggcagcctgtacatcaccaaggtgaccaccacccacgtgggcaactacacctgctacgccgacggctacgagcaggtgtaccagacccacatcttccaggtgaacgtgccccccgtgatcagagtgtaccccgagagccaggccagagagcccggcgtgaccgccagcctgagatgccacgccgagggcatccccaagccccagctgggctggctgaagaacggcatcgacatcacccccaagctgagcaagcagctgaccctgcaggccaacggcagcgaggtgcacatcagcaacgtgagatacgaggacaccggcgcctacacctgcatcgccaagaacgaggccggcgtggacgaggacatcagcagcctgttcgtggaggacagcgccagaaagaccctggccaacatcctgtggagagaggagggcctgggcatcggcaacatgttctacgtgttctacgaggacggcatcaaggtgatccagcccatcgagtgcgagttccagagacacatcaagcccagcgagaagctgctgggcttccaggacgaggtgtgccccaaggccgagggcgacgaggtgcagagatgcgtgtgggccagcgccgtgaacgtgaaggacaagttcatctacgtggcccagcccaccctggacagagtgctgatcgtggacgtgcagagccagaaggtggtgcaggccgtgagcaccgaccccgtgcccgtgaagctgcactacgacaagagccacgaccaggtgtgggtgctgagctggggcaccctggagaagaccagccccaccctgcaggtgatcaccctggccagcggcaacgtgccccaccacaccatccacacccagcccgtgggcaagcagttcgacagagtggacgacttcttcatccccaccaccaccctgatcatcacccacatgagattcggcttcatcctgcacaaggacgaggccgccctgcagaagatcgacctggagaccatgagctacatcaagaccatcaacctgaaggactacaagtgcgtgccccagagcctggcctacacccacctgggcggctactacttcatcggctgcaagcccgacagcaccggcgccgtgagcccccaggtgatggtggacggcgtgaccgacagcgtgatcggcttcaacagcgacgtgaccggcaccccctacgtgagccccgacggccactacctggtgagcatcaacgacgtgaagggcctggtgagagtgcagtacatcaccatcagaggcgagatccaggaggccttcgacatctacaccaacctgcacatcagcgacctggccttccagcccagcttcaccgaggcccaccagtacaacatctacggcagcagcagcacccagaccgacgtgctgttcgtggagctgagcagcggcaaggtgaagatgatcaagagcctgaaggagcccctgaaggccgaggagtggccctggaacagaaagaacagacagatccaggacagcggcctgttcggccagtacctgatgacccccagcaaggacagcctgttcatcctggacggcagactgaacaagctgaactgcgagatcaccgaggtggagaagggcaacaccgtgatctgggtgggcgacgcctag

SEQ ID NO: 3732 - DNA, 273 bp, synthetic construct
  misc_feature 1..273: note = source = /note="Description of Artificial Sequence: Synthetic coding sequence"
  source 1..273: mol_type = other DNA
atgagactgagcgtgtgcctgctgctgctgaccctggccctgtgctgctacagagccaacgccgtggtgtgccaggccctgggcagcgagatcaccggcttcctgctggccggcaagcccgtgttcaagttccagctggccaagttcaaggcccccctggaggccgtggccgccaagatggaggtgaagaagtgcgtggacaccatggcctacgagaagagagtgctgatcaccaagaccctgggcaagatcgccgagaagtgcgacagatag

SEQ ID NO: 3733 - DNA, 1044 bp, synthetic construct
  misc_feature 1..1044: note = source = /note="Description of Artificial Sequence: Synthetic coding sequence"
  source 1..1044: mol_type = other DNA
atgagcagctggagcagacagagacccaagagccccggcggcatccagccccacgtgagcagaaccctgttcctgctgctgctgctggccgccagcgcctggggcgtgaccctgagccccaaggactgccaggtgttcagaagcgaccacggcagcagcatcagctgccagccccccgccgagatccccggctacctgcccgccgacaccgtgcacctggccgtggagttcttcaacctgacccacctgcccgccaacctgctgcagggcgccagcaagctgcaggagctgcacctgagcagcaacggcctggagagcctgagccccgagttcctgagacccgtgccccagctgagagtgctggacctgaccagaaacgccctgaccggcctgccccccggcctgttccaggccagcgccaccctggacaccctggtgctgaaggagaaccagctggaggtgctggaggtgagctggctgcacggcctgaaggccctgggccacctggacctgagcggcaacagactgagaaagctgccccccggcctgctggccaacttcaccctgctgagaaccctggacctgggcgagaaccagctggagaccctgccccccgacctgctgagaggccccctgcagctggagagactgcacctggagggcaacaagctgcaggtgctgggcaaggacctgctgctgccccagcccgacctgagatacctgttcctgaacggcaacaagctggccagagtggccgccggcgccttccagggcctgagacagctggacatgctggacctgagcaacaacagcctggccagcgtgcccgagggcctgtgggccagcctgggccagcccaactgggacatgagagacggcttcgacatcagcggcaacccctggatctgcgaccagaacctgagcgacctgtacagatggctgcaggcccagaaggacaagatgttcagccagaacgacaccagatgcgccggccccgaggccgtgaagggccagaccctgctggccgtggccaagagccagtag

SEQ ID NO: 3734 - DNA, 1407 bp, synthetic construct
  misc_feature 1..1407: note = source = /note="Description of Artificial Sequence: Synthetic coding sequence"
  source 1..1407: mol_type = other DNA
atgcccccctggggcgccgccctggccctgatcctggccgtgctggccctgctgggcctgctgggccccagactgagaggcccctggggcagagccgtgggcgagagaaccctgcccggcgcccaggacagagacgacggcgaggaggccgacggcggcggccccgccgaccagttcagcgacggcagagagcccctgcccggcggctgcagcctggtgtgcaagcccagcgccctggcccagtgcctgctgagagccctgagaagaagcgaggccctggaggccggccccagaagctggttcagcggcccccacctgcagaccctgtgccacttcgtgctgcccgtggcccccggccccgagctggccagagagtacctgcagctggccgacgacggcctggtggccctggactgggtggtgggcccctgcgtgagaggcagaagaatcaccagcgccggcggcctgcccgccgtgctgctggtgatccccaacgcctggggcagactgaccagaaacgtgctgggcctgtgcctgctggccctggagagaggctactaccccgtgatcttccacagaagaggccaccacggctgccccctggtgagccccagactgcagcccttcggcgaccccagcgacctgaaggaggccgtgacctacatcagattcagacaccccgccgcccccctgttcgccgtgagcgagggcagcggcagcgccctgctgctgagctacctgggcgagtgcggcagcagcagctacgtgaccggcgccgcctgcatcagccccgtgctgagatgcagagagtggttcgaggccggcctgccctggccctacgagagaggcttcctgctgcaccagaagatcgccctgagcagatacgccaccgccctggaggacaccgtggacaccagcagactgttcagaagcagaagcctgagagagttcgaggaggccctgttctgccacaccaagagcttccccatcagctgggacacctactgggacagaaacgaccccctgagagacgtggacgaggccgccgtgcccgtgctgtgcatctgcagcgccgacgaccccgtgtgcggcccccccgaccacaccctgaccaccgagctgttccacagcaacccctacttcttcctgctgctgagcagacacggcggccactgcggcttcctgagacaggagcccctgcccgcctggagccacgaggtgatcctggagagcttcagagccctgaccgagttcttcagaaccgaggagagaatcaagggcctgagcagacacagagccagcttcctgggcggcagaagaagaggcggcgccctgcagagaagagaggtgagcagcagcagcaacctggaggagatcttcaactggaagagaagctacaccagatag

SEQ ID NO: 3735 - DNA, 423 bp, synthetic construct
  misc_feature 1..423: note = source = /note="Description of Artificial Sequence: Synthetic coding sequence"
  source 1..423: mol_type = other DNA
atgttcttcaccatcagcagaaagaacatgagccagaagctgagcctgctgctgctggtgttcggcctgatctggggcctgatgctgctgcactacaccttccagcagcccagacaccagagcagcgtgaagctgagagagcagatcctggacctgagcaagagatacgtgaaggccctggccgaggagaacaagaacaccgtggacgtggagaacggcgccagcatggccggctacgccgacctgaagagaaccatcgccgtgctgctggacgacatcctgcagagactggtgaagctggagaacaaggtggactacatcgtggtgaacggcagcgccgccaacaccaccaacggcaccagcggcaacctggtgcccgtgaccaccaacaagagaaccaacgtgagcggcagcatcagatag

SEQ ID NO: 3736 - DNA, 993 bp, synthetic construct
  misc_feature 1..993: note = source = /note="Description of Artificial Sequence: Synthetic coding sequence"
  source 1..993: mol_type = other DNA
agaggcgccctggtgggcgcccccagaagcgccagagccagctgcctgagaggcagaagacccggcagaagacagccctgcggcagatgccccgacccccccagaagcggccccggccaggccggcagagccagatgcgccagagacgtggccgcccagaccgccctggcccccagagccctggccctgggcgccggcgccgccggccccggctggagaggcgccgtgcccagaagacccgccgccagagtgagcagagccgcccagagacaggagcaggagctggtgagactgcacagagagcaggagtgcgagctgcagcccgagcccgccccccccagacccagcggccccgccaccgccgaggaccccggcagaagacccgtgctgccccagagaccccccgaggagagacccccccagccccccggcagcaccggcgtgatcgccgagaccggccaggccggcccccccgccggcgccggcgtgagcggctaccccaagagcccccccgtggccagccccggcgcccccgtgcccagcctggtgagcttcagcgccggcctgacccagaagcccttccccagcgacggcggcgtggtgctgttcaacaaggtgctggtgaacgacggcgacgtgtacaaccccagcaccggcgtgttcaccgccccctacgacggcagatacctgatcaccgccaccctgacccccgagagagacgcctacgtggaggccgtgctgagcgtgagcaacgccagcgtggcccagctgcacaccgccggctacagaagagagttcctggagtaccacagaccccccggcgccctgcacacctgcggcggccccggcgccttccacctgatcgtgcacctgaaggccggcgacgccgtgaacgtggtggtgaccggcggcaagctggcccacaccgacttcgacgagatgtacagcaccttcagcggcgtgttcctgtaccccttcctgagccacctgtag

SEQ ID NO: 3737 - DNA, 585 bp, synthetic construct
  misc_feature 1..585: note = source = /note="Description of Artificial Sequence: Synthetic coding sequence"
  source 1..585: mol_type = other DNA
atgagcgccctgtggctgctgctgggcctgctggccctgatggacctgagcgagagcagcaactggggctgctacggcaacatccagagcctggacacccccggcgccagctgcggcatcggcagaagacacggcctgaactactgcggcgtgagagccagcgagagactggccgagatcgacatgccctacctgctgaagtaccagcccatgatgcagaccatcggccagaagtactgcatggaccccgccgtgatcgccggcgtgctgagcagaaagagccccggcgacaagatcctggtgaacatgggcgacagaaccagcatggtgcaggaccccggcagccaggcccccaccagctggatcagcgagagccaggtgagccagaccaccgaggtgctgaccaccagaatcaaggagatccagagaagattccccacctggacccccgaccagtacctgagaggcggcctgtgcgcctacagcggcggcgccggctacgtgagaagcagccaggacctgagctgcgacttctgcaacgacgtgctggccagagccaagtacctgaagagacacggcttctag

SEQ ID NO: 3738 - DNA, 273 bp, synthetic construct
  misc_feature 1..273: note = source = /note="Description of Artificial Sequence: Synthetic coding sequence"
  source 1..273: mol_type = other DNA
atgaagttcctggccgtgctggtgctgctgggcgtgagcatcttcctggtgagcgcccagaaccccaccaccgccgcccccgccgacacctaccccgccaccggccccgccgacgacgaggcccccgacgccgagaccaccgccgccgccaccaccgccaccaccgccgcccccaccaccgccaccaccgccgccagcaccaccgccagaaaggacatccccgtgctgcccaagtgggtgggcgacctgcccaacggcagagtgtgcccctag

SEQ ID NO: 3739 - DNA, 1914 bp, synthetic construct
  misc_feature 1..1914: note = source = /note="Description of Artificial Sequence: Synthetic coding sequence"
  source 1..1914: mol_type = other DNA
atgagcagaatgctgcccttcctgctgctgctgtggttcctgcccatcaccgagggcagccagagagccgagcccatgttcaccgccgtgaccaacagcgtgctgccccccgactacgacagcaaccccacccagctgaactacggcgtggccgtgaccgacgtggaccacgacggcgacttcgagatcgtggtggccggctacaacggccccaacctggtgctgaagtacgacagagcccagaagagactggtgaacatcgccgtggacgagagaagcagcccctactacgccctgagagacagacagggcaacgccatcggcgtgaccgcctgcgacatcgacggcgacggcagagaggagatctacttcctgaacaccaacaacgccttcagcggcgtggccacctacaccgacaagctgttcaagttcagaaacaacagatgggaggacatcctgagcgacgaggtgaacgtggccagaggcgtggccagcctgttcgccggcagaagcgtggcctgcgtggacagaaagggcagcggcagatacagcatctacatcgccaactacgcctacggcaacgtgggccccgacgccctgatcgagatggaccccgaggccagcgacctgagcagaggcatcctggccctgagagacgtggccgccgaggccggcgtgagcaagtacaccggcggcagaggcgtgagcgtgggccccatcctgagcagcagcgccagcgacatcttctgcgacaacgagaacggccccaacttcctgttccacaacagaggcgacggcaccttcgtggacgccgccgccagcgccggcgtggacgacccccaccagcacggcagaggcgtggccctggccgacttcaacagagacggcaaggtggacatcgtgtacggcaactggaacggcccccacagactgtacctgcagatgagcacccacggcaaggtgagattcagagacatcgccagccccaagttcagcatgcccagccccgtgagaaccgtgatcaccgccgacttcgacaacgaccaggagctggagatcttcttcaacaacatcgcctacagaagcagcagcgccaacagactgttcagagtgatcagaagagagcacggcgaccccctgatcgaggagctgaaccccggcgacgccctggagcccgagggcagaggcaccggcggcgtggtgaccgacttcgacggcgacggcatgctggacctgatcctgagccacggcgagagcatggcccagcccctgagcgtgttcagaggcaaccagggcttcaacaacaactggctgagagtggtgcccagaaccagattcggcgccttcgccagaggcgccaaggtggtgctgtacaccaagaagagcggcgcccacctgagaatcatcgacggcggcagcggctacctgtgcgagatggagcccgtggcccacttcggcctgggcaaggacgaggccagcagcgtggaggtgacctggcccgacggcaagatggtgagcagaaacgtggccagcggcgagatgaacagcgtgctggagatcctgtaccccagagacgaggacaccctgcaggaccccgcccccctggagtgcggccagggcttcagccagcaggagaacggccactgcatggacaccaacgagtgcatccagttccccttcgtgtgccccagagacaagcccgtgtgcgtgaacacctacggcagctacagatgcagaaccaacaagaagtgcagcagaggctacgagcccaacgaggacggcaccgcctgcgtggcccaggtggccttcctgggcggctacagcagcgccgccagcagaatcagcgagcccctgagcagagccagctacctgagcctgggcctgggcctgtgcctgcagctgtacgccctgtag

SEQ ID NO: 3740 - DNA, 600 bp, synthetic construct
  misc_feature 1..600: note = source = /note="Description of Artificial Sequence: Synthetic coding sequence"
  source 1..600: mol_type = other DNA
atggccctgaacggcgccgaggtggacgacttcagctgggagccccccaccgaggccgagaccaaggtgctgcaggccagaagagagagacaggacagaatcagcagactgatgggcgactacctgctgagaggctacagaatgctgggcgagacctgcgccgactgcggcaccatcctgctgcaggacaagcagagaaagatctactgcgtggcctgccaggagctggacagcgacgtggacaaggacaaccccgccctgaacgcccaggccgccctgagccaggccagagagcaccagctggccagcgccagcgagctgcccctgggcagcagacccgccccccagccccccgtgcccagacccgagcactgcgagggcgccgccgccggcctgaaggccgcccagggcccccccgcccccgccgtgccccccaacaccgacgtgatggcctgcacccagaccgccctgctgcagaagctgacctgggccagcgccgagctgggcagcagcaccagcctggagaccagcatccagctgtgcggcctgatcagagcctgcgccgaggccctgagaagcctgcagcagctgcagcactag

SEQ ID NO: 3741 - DNA, 813 bp, synthetic construct
  misc_feature 1..813: note = source = /note="Description of Artificial Sequence: Synthetic coding sequence"
  source 1..813: mol_type = other DNA
atgaagctgggctgcgtgctgatggcctgggccctgtacctgagcctgggcgtgctgtgggtggcccagatgctgctggccgccagcttcgagaccctgcagtgcgagggccccgtgtgcaccgaggagagcagctgccacaccgaggacgacctgaccgacgccagagaggccggcttccaggtgaaggcctacaccttcagcgagcccttccacctgatcgtgagctacgagctgttccccgcccccatcctgagagccgtgcccagcgccgagccccaggccggcagccccatgaccctgagctgccagaccaagctgcccctgcagagaagcgccgccagactgctgttcagcttctacaaggacggcagaatcgtgcagagcagaggcctgagcagcgagttccagatccccaccgccagcgaggaccacagcggcagctactggtgcgaggccgccaccgaggacaaccaggtgtggaagcagagcccccagctggagatcagagtgcagggcgccagcagcagcgccgccccccccaccctgaaccccgccccccagaagagcgccgcccccggcaccgcccccgaggaggcccccggccccctgccccccccccccacccccagcagcgaggaccccggcttcagcagccccctgggcatgcccgacccccacctgtaccaccagatgggcctgctgctgaagcacatgcaggacgtgagagtgctgctgggccacctgctgatggagctgagagagctgagcggccacagaaagcccggcaccaccaaggccaccgccgagtag

SEQ ID NO: 3742 - DNA, 2421 bp, synthetic construct
  misc_feature 1..2421: note = source = /note="Description of Artificial Sequence: Synthetic coding sequence"
  source 1..2421: mol_type = other DNA
atgagactgagccccgcccccctgaagctgagcagaacccccgccctgctggccctggccctgcccctggccgccgccctggccttcagcgacgagaccctggacaaggtgcccaagagcgagggctactgcagcagaatcctgagagcccagggcaccagaagagagggctacaccgagttcagcctgagagtggagggcgaccccgacttctacaagcccggcaccagctacagagtgaccctgagcgccgccccccccagctacttcagaggcttcaccctgatcgccctgagagagaacagagagggcgacaaggaggaggaccacgccggcaccttccagatcatcgacgaggaggagacccagttcatgagcaactgccccgtggccgtgaccgagagcacccccagaagaagaaccagaatccaggtgttctggatcgccccccccgccggcaccggctgcgtgatcctgaaggccagcatcgtgcagaagagaatcatctacttccaggacgagggcagcctgaccaagaagctgtgcgagcaggacagcaccttcgacggcgtgaccgacaagcccatcctggactgctgctgcggcaccgccaagtacagactgaccttctacggcaactggagcgagaagacccaccccaaggactaccccagaagagccaaccactggagcgccatcatcggcggcagccacagcaagaactacgtgctgtgggagtacggcggctacgccagcgagggcgtgaagcaggtggccgagctgggcagccccgtgaagatggaggaggagatcagacagcagagcgacgaggtgctgaccgtgatcaaggccaaggcccagtggcccgcctggcagcccctgaacgtgagagccgcccccagcgccgagttcagcgtggacagaaccagacacctgatgagcttcctgaccatgatgggccccagccccgactggaacgtgggcctgagcgccgaggacctgtgcaccaaggagtgcggctgggtgcagaaggtggtgcaggacctgatcccctgggacgccggcaccgacagcggcgtgacctacgagagccccaacaagcccaccatcccccaggagaagatcagacccctgaccagcctggaccacccccagagccccttctacgaccccgagggcggcagcatcacccaggtggccagagtggtgatcgagagaatcgccagaaagggcgagcagtgcaacatcgtgcccgacaacgtggacgacatcgtggccgacctggcccccgaggagaaggacgaggacgacacccccgagacctgcatctacagcaactggagcccctggagcgcctgcagcagcagcacctgcgacaagggcaagagaatgagacagagaatgctgaaggcccagctggacctgagcgtgccctgccccgacacccaggacttccagccctgcatgggccccggctgcagcgacgaggacggcagcacctgcaccatgagcgagtggatcacctggagcccctgcagcatcagctgcggcatgggcatgagaagcagagagagatacgtgaagcagttccccgaggacggcagcgtgtgcaccctgcccaccgaggagaccgagaagtgcaccgtgaacgaggagtgcagccccagcagctgcctgatgaccgagtggggcgagtgggacgagtgcagcgccacctgcggcatgggcatgaagaagagacacagaatgatcaagatgaaccccgccgacggcagcatgtgcaaggccgagaccagccaggccgagaagtgcatgatgcccgagtgccacaccatcccctgcctgctgagcccctggagcgagtggagcgactgcagcgtgacctgcggcaagggcatgagaaccagacagagaatgctgaagagcctggccgagctgggcgactgcaacgaggacctggagcaggtggagaagtgcatgctgcccgagtgccccatcgactgcgagctgaccgagtggagccagtggagcgagtgcaacaagagctgcggcaagggccacgtgatcagaaccagaatgatccagatggagccccagttcggcggcgccccctgccccgagaccgtgcagagaaagaagtgcagaatcagaaagtgcctgagaaaccccagcatccagaagctgagatggagagaggccagagagagcagaagaagcgagcagctgaaggaggagagcgagggcgagcagttccccggctgcagaatgagaccctggaccgcctggagcgagtgcaccaagctgtgcggcggcggcatccaggagagatacatgaccgtgaagaagagattcaagagcagccagttcaccagctgcaaggacaagaaggagatcagagcctgcaacgtgcacccctgctag

SEQ ID NO: 3743 - DNA, 4242 bp, synthetic construct
  misc_feature 1..4242: note = source = /note="Description of Artificial Sequence: Synthetic coding sequence"
  source 1..4242: mol_type = other DNA
atgagacacggcgtggcctgggccctgctggtggccgccgccctgggcctgggcgccagaggcgtgagaggcgccgtggccctggccgacttctaccccttcggcgccgagagaggcgacgccgtgacccccaagcaggacgacggcggcagcggcctgagacccctgagcgtgcccttccccttcttcggcgccgagcacagcggcctgtacgtgaacaacaacggcatcatcagcttcctgaaggaggtgagccagttcacccccgtggccttccccatcgccaaggacagatgcgtggtggccgccttctgggccgacgtggacaacagaagagccggcgacgtgtactacagagaggccaccgaccccgccatgctgagaagagccaccgaggacgtgagacactacttccccgagctgctggacttcaacgccacctgggtgttcgtggccacctggtacagagtgaccttcttcggcggcagcagcagcagccccgtgaacaccttccagaccgtgctgatcaccgacggcaagctgagcttcaccatcttcaactacgagagcatcgtgtggaccaccggcacccacgccagcagcggcggcaacgccaccggcctgggcggcatcgccgcccaggccggcttcaacgccggcgacggccagagatacttcagcatccccggcagcagaaccgccgacatggccgaggtggagaccaccaccaacgtgggcgtgcccggcagatgggccttcagaatcgacgacgcccaggtgagagtgggcggctgcggccacaccaccagcgtgtgcctggccctgagaccctgcctgaacggcggcaagtgcatcgacgactgcgtgaccggcaaccccagctacacctgcagctgcctgagcggcttcaccggcagaagatgccacctggacgtgaacgagtgcgccagccagccctgccagaacggcggcacctgcacccacggcatcaacagcttcagatgccagtgccccgccggcttcggcggccccacctgcgagaccgcccagagcccctgcgacaccaaggagtgccagcacggcggccagtgccaggtggagaacggcagcgccgtgtgcgtgtgccaggccggctacaccggcgccgcctgcgagatggacgtggacgactgcagccccgacccctgcctgaacggcggcagctgcgtggacctggtgggcaactacacctgcctgtgcgccgagcccttcaagggcctgagatgcgagaccggcgaccaccccgtgcccgacgcctgcctgagcgccccctgccacaacggcggcacctgcgtggacgccgaccagggctacgtgtgcgagtgccccgagggcttcatgggcctggactgcagagagagagtgcccgacgactgcgagtgcagaaacggcggcagatgcctgggcgccaacaccaccctgtgccagtgccccctgggcttcttcggcctgctgtgcgagttcgagatcaccgccatgccctgcaacatgaacacccagtgccccgacggcggctactgcatggagcacggcggcagctacctgtgcgtgtgccacaccgaccacaacgccagccacagcctgcccagcccctgcgacagcgacccctgcttcaacggcggcagctgcgacgcccacgacgacagctacacctgcgagtgccccagaggcttccacggcaagcactgcgagaaggccagaccccacctgtgcagcagcggcccctgcagaaacggcggcacctgcaaggaggccggcggcgagtaccactgcagctgcccctacagattcaccggcagacactgcgagatcggcaagcccgacagctgcgccagcggcccctgccacaacggcggcacctgcttccactacatcggcaagtacaagtgcgactgcccccccggcttcagcggcagacactgcgagatcgcccccagcccctgcttcagaagcccctgcgtgaacggcggcacctgcgaggacagagacaccgacttcttctgccactgccaggccggctacatgggcagaagatgccaggccgaggtggactgcggcccccccgaggaggtgaagcacgccaccctgagattcaacggcaccagactgggcgccgtggccctgtacgcctgcgacagaggctacagcctgagcgcccccagcagaatcagagtgtgccagccccacggcgtgtggagcgagcccccccagtgcctggagatcgacgagtgcagaagccagccctgcctgcacggcggcagctgccaggacagagtggccggctacctgtgcctgtgcagcaccggctacgagggcgcccactgcgagctggagagagacgagtgcagagcccacccctgcagaaacggcggcagctgcagaaacctgcccggcgcctacgtgtgcagatgccccgccggcttcgtgggcgtgcactgcgagaccgaggtggacgcctgcgacagcagcccctgccagcacggcggcagatgcgagagcggcggcggcgcctacctgtgcgtgtgccccgagagcttcttcggctaccactgcgagaccgtgagcgacccctgcttcagcagcccctgcggcggcagaggctactgcctggccagcaacggcagccacagctgcacctgcaaggtgggctacaccggcgaggactgcgccaaggagctgttcccccccaccgccctgaagatggagagagtggaggagagcggcgtgagcatcagctggaacccccccaacggccccgccgccagacagatgctggacggctacgccgtgacctacgtgagcagcgacggcagctacagaagaaccgacttcgtggacagaaccagaagcagccaccagctgcaggccctggccgccggcagagcctacaacatcagcgtgttcagcgtgaagagaaacagcaacaacaagaacgacatcagcagacccgccgtgctgctggccagaaccagacccagacccgtggagggcttcgaggtgaccaacgtgaccgccagcaccatcagcgtgcagtgggccctgcacagaatcagacacgccaccgtgagcggcgtgagagtgagcatcagacaccccgaggccctgagagaccaggccaccgacgtggacagaagcgtggacagattcaccttcagagccctgctgcccggcaagagatacaccatccagctgaccaccctgagcggcctgagaggcgaggagcaccccaccgagagcctggccaccgcccccacccacgtgtggaccagacccctgccccccgccaacctgaccgccgccagagtgaccgccaccagcgcccacgtggtgtgggacgcccccacccccggcagcctgctggaggcctacgtgatcaacgtgaccaccagccagagcaccaagagcagatacgtgcccaacggcaagctggccagctacaccgtgagagacctgctgcccggcagaagataccagctgagcgtgatcgccgtgcagagcaccgagctgggcccccagcacagcgagcccgcccacctgtacatcatcaccagccccagagacggcgccgacagaagatggcaccagggcggccaccaccccagagtgctgaagaacagacccccccccgccagactgcccgagctgagactgctgaacgaccacagcgcccccgagacccccacccagccccccagattcagcgagctggtggacggcagaggcagagtgagcgccagattcggcggcagccccagcaaggccgccaccgtgagaagccagcccaccgccagcgcccagctggagaacatggaggaggcccccaagagagtgagcctggccctgcagctgcccgagcacggcagcaaggacatcggcaacgtgcccggcaactgcagcgagaacccctgccagaacggcggcacctgcgtgcccggcgccgacgcccacagctgcgactgcggccccggcttcaagggcagaagatgcgagctggcctgcatcaaggtgagcagaccctgcaccagactgttcagcgagaccaaggccttccccgtgtgggagggcggcgtgtgccaccacgtgtacaagagagtgtacagagtgcaccaggacatctgcttcaaggagagctgcgagagcaccagcctgaagaagacccccaacagaaagcagagcaagagccagaccctggagaagagctag

SEQ ID NO: 3744 - DNA, 1008 bp, synthetic construct
  misc_feature 1..1008: note = source = /note="Description of Artificial Sequence: Synthetic coding sequence"
  source 1..1008: mol_type = other DNA
atgttcctggccaccctgagcttcctgctgcccttcgcccaccccttcggcaccgtgagctgcgagtacatgctgggcagccccctgagcagcctggcccaggtgaacctgagccccttcagccaccccaaggtgcacatggaccccaactactgccaccccagcaccagcctgcacctgtgcagcctggcctggagcttcaccagactgctgcacccccccctgagccccggcatcagccaggtggtgaaggaccacgtgaccaagcccaccgccatggcccagggcagagtggcccacctgatcgagtggaagggctggagcaagcccagcgacagccccgccgccctggagagcgccttcagcagctacagcgacctgagcgagggcgagcaggaggccagattcgccgccggcgtggccgagcagttcgccatcgccgaggccaagctgagagcctggagcagcgtggacggcgaggacagcaccgacgacagctacgacgaggacttcgccggcggcatggacaccgacatggccggccagctgcccctgggcccccacctgcaggacctgttcaccggccacagattcagcagacccgtgagacagggcagcgtggagcccgagagcgactgcagccagaccgtgagccccgacaccctgtgcagcagcctgtgcagcctggaggacggcctgctgggcagccccgccagactggccagccagctgctgggcgacgagctgctgctggccaagctgccccccagcagagagagcgccttcagaagcctgggccccctggaggcccaggacagcctgtacaacagccccctgaccgagagctgcctgagccccgccgaggaggagcccgccccctgcaaggactgccagcccctgtgcccccccctgaccggcagctgggagagacagagacaggccagcgacctggccagcagcggcgtggtgagcctggacgaggacgaggccgagcccgaggagcagtag

SEQ ID NO: 3745 - DNA, 828 bp, synthetic construct
  misc_feature 1..828: note = source = /note="Description of Artificial Sequence: Synthetic coding sequence"
  source 1..828: mol_type = other DNA
atgcagccccccggccccagagaccccctgatcagactgtgcttcttcagagaggagggcaccaacgtggtgcagaagatctgcttcagcacccagatcatcagacacttcgagagcaagctgagcgacaccatcgaggtgtaccaggagagaatccagtggctgaccgagaacagcaagaaggccttcggcctgatcaagggcgccagagtgagcatcctgatcgacgtgagcgccatcagcagcggcccccagaaggaggagttccagaaggacctgatgagcctgatcgacgagcagctgagccacaaggagaagctgttcgtgctgagcttcggcaccaacgccggcagcctgtggcccgaccccatggaggtgagcgccagcaccctgcaggagctgaagctgtgggtgaagaccctgcagcccgacggcggcagcaacctgctgcaggccctgaagaagatcttcaccctgaagggcctggacagcctggtggccatcatgagaagctgccccgaccagcccagcgagatcctgagcgactacatccagcagagcaccatgggcagagacctgatcatccacttcatcacctacagatgcgacgaccagatgccccccgccgtgctgaagaacctggccgaggccgtgagaggctactaccactgctacagccccaagatggagcactacaccagcagagacatggacgagctgctggccgagatccagaaggcccagagcctgctgagccacgtgcaggccctgcagcacagcagcccctgcgaggccctgacctgcaccatggaggagcccagaaactag

SEQ ID NO: 3746 - DNA, 438 bp, synthetic construct
  misc_feature 1..438: note = source = /note="Description of Artificial Sequence: Synthetic coding sequence"
  source 1..438: mol_type = other DNA
atgctgaccagactggtgctgagcgcccacctgagcagcaccaccagccccccctggacccacgccgccatcagctgggagctggacaacgtgctgatgcccagccccagaatctggccccaggtgacccccaccggcagaagcgccagcgtgagaagcgagggcaacaccagcagcctgtggaacttcagcgccggccaggacgtgcacgccatcgtgaccagaacctgcgagagcgtgctgagcagcgccgtgtacacccacggctgcggctgcgtgagaagcgccaccaacatcacctgccagagcagcggccagcagagacaggccgccagacaggaggaggagaacagcatctgcaaggcccacgacagcagagagggcagactgggctaccccctgagcgcccaccagcccggcagcggcggccccaactag

SEQ ID NO: 3747 - DNA, 777 bp, synthetic construct
  misc_feature 1..777: note = source = /note="Description of Artificial Sequence: Synthetic coding sequence"
  source 1..777: mol_type = other DNA
atgaccccccccaagctgagagccagcctgagccccagcctgctgctgctgctgagcggctgcctgctggccgccgccagaagagagaagggcgccgccagcaacgtggccgagcccgtgcccggccccaccggcggcagcagcggcagattcctgagccccgagcagcacgcctgcagctggcagctgctgctgcccgcccccgaggccgccgccggcagcgagctggccctgagatgccagagccccgacggcgccagacaccagtgcgcctacagaggccaccccgagagatgcgccgcctacgccgccagaagagcccacttctggaagcaggtgctgggcggcctgagaaagaagagaagaccctgccacgaccccgcccccctgcaggccagactgtgcgccggcaagaagggccacggcgccgagctgagactggtgcccagagccagcccccccgccagacccaccgtggccggcttcgccggcgagagcaagcccagagccagaaacagaggcagaaccagagagagagccagcggccccgccgccggcaccccccccccccagagcgccccccccaaggagaaccccagcgagagaaagaccaacgagggcaagagaaaggccgccctggtgcccaacgaggagagacccatgggcaccggccccgaccccgacggcctggacggcaacgccgagctgaccgagacctactgcgccgagaagtggcacagcctgtgcaacttcttcgtgaacttctggaacggctag

SEQ ID NO: 3748 - DNA, 393 bp, synthetic construct
  misc_feature 1..393: note = source = /note="Description of Artificial Sequence: Synthetic coding sequence"
  source 1..393: mol_type = other DNA
atggccagaagacactgcttcagctactggctgctggtgtgctggctggtggtgaccgtggccgagggccaggaggaggtgttcaccccccccggcgacagccagaacaacgccgacgccaccgactgccagatcttcaccctgacccccccccccgcccccagaagccccgtgaccagagcccagcccatcaccaagacccccagatgccccttccacttcttccccagaagacccagaatccacttcagattccccaacagacccttcgtgcccagcagatgcaaccacagattccccttccagcccttctactggccccacagatacctgacctacagatacttccccagaagaagactgcagagaggcagcagcagcgaggagagctag

SEQ ID NO: 3749 - DNA, 600 bp, synthetic construct
  misc_feature 1..600: note = source = /note="Description of Artificial Sequence: Synthetic coding sequence"
  source 1..600: mol_type = other DNA
atgtaccccgccaccgccgtgccccagatcaacatcaccatcctgaagggcgagaagggcgacagaggcgacagaggcctgcagggcaagtacggcaagaccggcagcgccggcgccagaggccacaccggccccaagggccagaagggcagcatgggcgcccccggcgagagatgcaagagccactacgccgccttcagcgtgggcagaaagaagcccatgcacagcaaccactactaccagaccgtgatcttcgacaccgagttcgtgaacctgtacgaccacttcaacatgttcaccggcaagttctactgctacgtgcccggcctgtacttcttcagcctgaacgtgcacacctggaaccagaaggagacctacctgcacatcatgaagaacgaggaggaggtggtgatcctgttcgcccaggtgggcgacagaagcatcatgcagagccagagcctgatgctggagctgagagagcaggaccaggtgtgggtgagactgtacaagggcgagagagagaacgccatcttcagcgaggagctggacacctacatcaccttcagcggctacctggtgaagcacgccaccgagccctag

SEQ ID NO: 3750 - DNA, 702 bp, synthetic construct
  misc_feature 1..702: note = source = /note="Description of Artificial Sequence: Synthetic coding sequence"
  source 1..702: mol_type = other DNA
atggccctgaagaacaagttcagctgcctgtggatcctgggcctgtgcctggtggccaccaccagcagcaagatccccagcatcaccgacccccacttcatcgacaactgcatcgaggcccacaacgagtggagaggcaaggtgaacccccccgccgccgacatgaagtacatgatctgggacaagggcctggccaagatggccaaggcctgggccaaccagtgcaagttcgagcacaacgactgcctggacaagagctacaagtgctacgccgccttcgagtacgtgggcgagaacatctggctgggcggcatcaagagcttcacccccagacacgccatcaccgcctggtacaacgagacccagttctacgacttcgacagcctgagctgcagcagagtgtgcggccactacacccagctggtgtgggccaacagcttctacgtgggctgcgccgtggccatgtgccccaacctgggcggcgccagcaccgccatcttcgtgtgcaactacggccccgccggcaacttcgccaacatgcccccctacgtgagaggcgagagctgcagcctgtgcagcaaggaggagaagtgcgtgaagaacctgtgcaagaaccccttcctgaagcccaccggcagagccccccagcagaccgccttcaaccccttcagcctgggcttcctgctgctgagaatcttctag

SEQ ID NO: 3751 - DNA, 669 bp, synthetic construct
  misc_feature 1..669: note = source = /note="Description of Artificial Sequence: Synthetic coding sequence"
  source 1..669: mol_type = other DNA
atggccctgcacatccacgaggcctgcatcctgctgctggtgatccccggcctggtgaccagcgccgccatcagccacgaggactaccccgccgacgagggcgaccagatcagcagcaacgacaacctgatcttcgacgactacagaggcaagggctgcgtggacgacagcggcttcgtgtacaagctgggcgagagattcttccccggccacagcaactgcccctgcgtgtgcgccctggacggccccgtgtgcgaccagcccgagtgccccaagatccaccccaagtgcaccaaggtggagcacaacggctgctgccccgagtgcaaggaggtgaagaacttctgcgagtaccacggcaagaactacaagatcctggaggagttcaagcccagcccctgcgagtggtgcagatgcgagcccagcaacgaggtgcactgcgtggtggccgactgcgccgtgcccgagtgcgtgaaccccgtgtacgagcccgagcagtgctgccccgtgtgcaagaacggccccaactgcttcgccggcaccaccatcatccccgccggcatcgaggtgaaggtggacgagtgcaacatctgccactgccacaacggcgactggtggaagcccgcccagtgcagcaagagagagtgccagggcaagcagaccgtgtag

SEQ ID NO: 3752 - DNA, 957 bp, synthetic construct
  misc_feature 1..957: note = source = /note="Description of Artificial Sequence: Synthetic coding sequence"
  source 1..957: mol_type = other DNA
atgctgcccctgaccatgaccgtgctgatcctgctgctgctgcccaccggccaggccgcccccaaggacggcgtgaccagacccgacagcgaggtgcagcaccagctgctgcccaaccccttccagcccggccaggagcagctgggcctgctgcagagctacctgaagggcctgggcagaaccgaggtgcagctggagcacctgagcagagagcaggtgctgctgtacctgttcgccctgcacgactacgaccagagcggccagctggacggcctggagctgctgagcatgctgaccgccgccctggcccccggcgccgccaacagccccaccaccaaccccgtgatcctgatcgtggacaaggtgctggagacccaggacctgaacggcgacggcctgatgacccccgccgagctgatcaacttccccggcgtggccctgagacacgtggagcccggcgagcccctggcccccagcccccaggagccccaggccgtgggcagacagagcctgctggccaagagccccctgagacaggagacccaggaggcccccggccccagagaggaggccaagggccaggtggaggccagaagagagagcctggaccccgtgcaggagcccggcggccaggccgaggccgacggcgacgtgcccggccccagaggcgaggccgagggccaggccgaggccaagggcgacgcccccggccccagaggcgaggccggcggccaggccgaggccgagggcgacgcccccggccccagaggcgaggccggcggccaggccgaggccgagggcgacgcccccggccccagaggcgaggccggcggccaggccgaggccagagagaacggcgaggaggccaaggagctgcccggcgagaccctggagagcaagaacacccagaacgacttcgaggtgcacatcgtgcaggtggagaacgacgagatctag

SEQ ID NO: 3753 - DNA, 393 bp, synthetic construct
  misc_feature 1..393: note = source = /note="Description of Artificial Sequence: Synthetic coding sequence"
  source 1..393: mol_type = other DNA
atgctggcccccctgttcctgtgctgcctgagaaacctgttcagaaagctgatcagcttccagcccccccagctgggcagaaccaacatgcactacagcaagctgcccagaaccgccatcgagaccgagttcaagcagaacgtgggccccccccccaaggacctgaccgccgaggtgtacttccccagcatcaagagcagaagccacctgcccgccgtgttctacaaccagtacttcaagcaccccaagtgcgtgggcgagtacggccccaagaacggcgccgagagacagatcgaggagagaaaggtgctgcccaccaccatgatgttcagcatgctggccgactgcgtgctgaagagcacccccatccccatcctgggcgtggccatgtag

SEQ ID NO: 3754 - DNA, 4362 bp, synthetic construct
  misc_feature 1..4362: note = source = /note="Description of Artificial Sequence: Synthetic coding sequence"
  source 1..4362: mol_type = other DNA
atgatgctgccccagaacagctggcacatcgacttcggcagatgctgctgccaccagaacctgttcagcgccgtggtgacctgcatcctgctgctgaacagctgcttcctgatcagcagcttcaacggcaccgacctggagctgagactggtgaacggcgacggcccctgcagcggcaccgtggaggtgaagttccagggccagtggggcaccgtgtgcgacgacggctggaacaccaccgccagcaccgtggtgtgcaagcagctgggctgccccttcagcttcgccatgttcagattcggccaggccgtgaccagacacggcaagatctggctggacgacgtgagctgctacggcaacgagagcgccctgtgggagtgccagcacagagagtggggcagccacaactgctaccacggcgaggacgtgggcgtgaactgctacggcgaggccaacctgggcctgagactggtggacggcaacaacagctgcagcggcagagtggaggtgaagttccaggagagatggggcaccatctgcgacgacggctggaacctgaacaccgccgccgtggtgtgcagacagctgggctgccccagcagcttcatcagcagcggcgtggtgaacagccccgccgtgctgagacccatctggctggacgacatcctgtgccagggcaacgagctggccctgtggaactgcagacacagaggctggggcaaccacgactgcagccacaacgaggacgtgaccctgacctgctacgacagcagcgacctggagctgagactggtgggcggcaccaacagatgcatgggcagagtggagctgaagatccagggcagatggggcaccgtgtgccaccacaagtggaacaacgccgccgccgacgtggtgtgcaagcagctgggctgcggcaccgccctgcacttcgccggcctgccccacctgcagagcggcagcgacgtggtgtggctggacggcgtgagctgcagcggcaacgagagcttcctgtgggactgcagacacagcggcaccgtgaacttcgactgcctgcaccagaacgacgtgagcgtgatctgcagcgacggcgccgacctggagctgagactggccgacggcagcaacaactgcagcggcagagtggaggtgagaatccacgagcagtggtggaccatctgcgaccagaactggaagaacgagcaggccctggtggtgtgcaagcagctgggctgccccttcagcgtgttcggcagcagaagagccaagcccagcaacgaggccagagacatctggatcaacagcatcagctgcaccggcaacgagagcgccctgtgggactgcacctacgacggcaaggccaagagaacctgcttcagaagaagcgacgccggcgtgatctgcagcgacaaggccgacctggacctgagactggtgggcgcccacagcccctgctacggcagactggaggtgaagtaccagggcgagtggggcaccgtgtgccacgacagatggagcaccagaaacgccgccgtggtgtgcaagcagctgggctgcggcaagcccctgcacgtgttcggcatgacctacttcaaggaggccagcggccccatctggctggacgacgtgagctgcatcggcaacgagagcaacatctgggactgcgagcacagcggctggggcaagcacaactgcgtgcacagagaggacgtgatcgtgacctgcagcggcgacgccacctggggcctgagactggtgggcggcagcaacagatgcagcggcagactggaggtgtacttccagggcagatggggcaccgtgtgcgacgacggctggaacagcaaggccgccgccgtggtgtgcagccagctggactgccccagcagcatcatcggcatgggcctgggcaacgccagcaccggctacggcaagatctggctggacgacgtgagctgcgacggcgacgagagcgacctgtggagctgcagaaacagcggctggggcaacaacgactgcagccacagcgaggacgtgggcgtgatctgcagcgacgccagcgacatggagctgagactggtgggcggcagcagcagatgcgccggcaaggtggaggtgaacgtgcagggcgccgtgggcatcctgtgcgccaacggctggggcatgaacatcgccgaggtggtgtgcagacagctggagtgcggcagcgccatcagagtgagcagagagccccacttcaccgagagaaccctgcacatcctgatgagcaacagcggctgcaccggcggcgaggccagcctgtgggactgcatcagatgggagtggaagcagaccgcctgccacctgaacatggaggccagcctgatctgcagcgcccacagacagcccagactggtgggcgccgacatgccctgcagcggcagagtggaggtgaagcacgccgacacctggagaagcgtgtgcgacagcgacttcagcctgcacgccgccaacgtgctgtgcagagagctgaactgcggcgacgccatcagcctgagcgtgggcgaccacttcggcaagggcaacggcctgacctgggccgagaagttccagtgcgagggcagcgagacccacctggccctgtgccccatcgtgcagcaccccgaggacacctgcatccacagcagagaggtgggcgtggtgtgcagcagatacaccgacgtgagactggtgaacggcaagagccagtgcgacggccaggtggagatcaacgtgctgggccactggggcagcctgtgcgacacccactgggaccccgaggacgccagagtgctgtgcagacagctgagctgcggcaccgccctgagcaccaccggcggcaagtacatcggcgagagaagcgtgagagtgtggggccacagattccactgcctgggcaacgagagcctgctggacaactgccagatgaccgtgctgggcgcccccccctgcatccacggcaacaccgtgagcgtgatctgcaccggcagcctgacccagcccctgttcccctgcctggccaacgtgagcgacccctacctgagcgccgtgcccgagggcagcgccctgatctgcctggaggacaagagactgagactggtggacggcgacagcagatgcgccggcagagtggagatctaccacgacggcttctggggcaccatctgcgacgacggctgggacctgagcgacgcccacgtggtgtgccagaagctgggctgcggcgtggccttcaacgccaccgtgagcgcccacttcggcgagggcagcggccccatctggctggacgacctgaactgcaccggcatggagagccacctgtggcagtgccccagcagaggctggggccagcacgactgcagacacaaggaggacgccggcgtgatctgcagcgagttcaccgccctgagactgtacagcgagaccgagaccgagagctgcgccggcagactggaggtgttctacaacggcacctggggcagcgtgggcagaagaaacatcaccaccgccatcgccggcatcgtgtgcagacagctgggctgcggcgagaacggcgtggtgagcctggcccccctgagcaagaccggcagcggcttcatgtgggtggacgacatccagtgccccaagacccacatcagcatctggcagtgcctgagcgccccctgggagagaagaatcagcagccccgccgaggagacctggatcacctgcgaggacagaatcagagtgagaggcggcgacaccgagtgcagcggcagagtggagatctggcacgccggcagctggggcaccgtgtgcgacgacagctgggacctggccgaggccgaggtggtgtgccagcagctgggctgcggcagcgccctggccgccctgagagacgccagcttcggccagggcaccggcaccatctggctggacgacatgagatgcaagggcaacgagagcttcctgtgggactgccacgccaagccctggggccagagcgactgcggccacaaggaggacgccggcgtgagatgcagcggccagagcctgaagagcctgaacgccagcagcggccacctggccctgatcctgagcagcatcttcggcctgctgctgctggtgctgttcatcctgttcctgacctggtgcagagtgcagaagcagaagcacctgcccctgagagtgagcaccagaagaagaggcagcctggaggagaacctgttccacgagatggagacctgcctgaagagagaggacccccacggcaccagaaccagcgacgacacccccaaccacggctgcgaggacgccagcgacaccagcctgctgggcgtgctgcccgccagcgaggccaccaagtag

SEQ ID NO: 3755 - DNA, 759 bp, synthetic construct
  misc_feature 1..759: note = source = /note="Description of Artificial Sequence: Synthetic coding sequence"
  source 1..759: mol_type = other DNA
atgctgcccccccccagacccgccgccgccctggccctgcccgtgctgctgctgctgctggtggtgctgacccccccccccaccggcgccagacccagccccggccccgactacctgagaagaggctggatgagactgctggccgagggcgagggctgcgccccctgcagacccgaggagtgcgccgcccccagaggctgcctggccggcagagtgagagacgcctgcggctgctgctgggagtgcgccaacctggagggccagctgtgcgacctggaccccagcgcccacttctacggccactgcggcgagcagctggagtgcagactggacaccggcggcgacctgagcagaggcgaggtgcccgagcccctgtgcgcctgcagaagccagagccccctgtgcggcagcgacggccacacctacagccagatctgcagactgcaggaggccgccagagccagacccgacgccaacctgaccgtggcccaccccggcccctgcgagagcggcccccagatcgtgagccacccctacgacacctggagaggccccagactgcagaccctgggcaccgaggacaccctgaccaccctggtgggcgccggcggcatggccagagccgtggcctgcggcgaggcccccggcgagcacctggccctgcaggtgctgtgcctgagcggcaagagaagacacctgtggcaggtgggcagcaccggcagcagcgagggcgtgcccagcggcggcagcttctggtag

SEQ ID NO: 3756 - DNA, 1323 bp, synthetic construct
  misc_feature 1..1323: note = source = /note="Description of Artificial Sequence: Synthetic coding sequence"
  source 1..1323: mol_type = other DNA
atgaagctggccctgctgctgccctgggcctgctgctgcctgtgcggcagcgccctggccaccggcttcctgtaccccttcagcgccgccgccctgcagcagcacggctaccccgagcccggcgccggcagccccggcagcggctacgccagcagaagacactggtgccaccacaccgtgaccagaaccgtgagctgccaggtgcagaacggcagcgagaccgtggtgcagagagtgtaccagagctgcagatggcccggcccctgcgccaacctggtgagctacagaaccctgatcagacccacctacagagtgagctacagaaccgtgaccgtgctggagtggagatgctgccccggcttcaccggcagcaactgcgacgaggagtgcatgaactgcaccagactgagcgacatgagcgagagactgaccaccctggaggccaaggtgctgctgctggaggccgccgagagacccagcagccccgacaacgacctgcccgcccccgagagcaccccccccacctggaacgaggacttcctgcccgacgccatccccctggcccaccccgtgcccagacagagaagacccaccggccccgccggcccccccggccagaccggcccccccggccccgccggcccccccggcagcaagggcgacagaggccagaccggcgagaagggccccgccggcccccccggcctgctgggcccccccggccccagaggcctgcccggcgagatgggcagacccggcccccccggcccccccggccccgccggcaaccccggccccagccccaacagcccccagggcgccctgtacagcctgcagccccccaccgacaaggacaacggcgacagcagactggccagcgccatcgtggacaccgtgctggccggcgtgcccggccccagaggcccccccggcccccccggcccccccggccccagaggcccccccggcccccccggcacccccggcagccagggcctggccggcgagagaggcaccgtgggccccagcggcgagcccggcgtgaagggcgaggagggcgagaaggccgccaccgccgagggcgagggcgtgcagcagctgagagaggccctgaagatcctggccgagagagtgctgatcctggagcacatgatcggcatccacgaccccctggccagccccgagggcagcggccaggacgccgccctgagagccaacctgaagatgaagagaggcggcgcccagcccgacggcgtgctggccgccctgctgggccccgaccccggccagaagagcgtggaccaggccagcagcagaaagtag

SEQ ID NO: 3757 - DNA, 1341 bp, synthetic construct
  misc_feature 1..1341: note = source = /note="Description of Artificial Sequence: Synthetic coding sequence"
  source 1..1341: mol_type = other DNA
atgctgcaccccgagaccagccccggcagaggccacctgctggccgtgctgctggccctgctgggcaccgcctgggccgaggtgtggcccccccagctgcaggagcaggcccccatggccggcgccctgaacagaaaggagagcttcctgctgctgagcctgcacaacagactgagaagctgggtgcagccccccgccgccgacatgagaagactggactggagcgacagcctggcccagctggcccaggccagagccgccctgtgcggcatccccacccccagcctggccagcggcctgtggagaaccctgcaggtgggctggaacatgcagctgctgcccgccggcctggccagcttcgtggaggtggtgagcctgtggttcgccgagggccagagatacagccacgccgccggcgagtgcgccagaaacgccacctgcacccactacacccagctggtgtgggccaccagcagccagctgggctgcggcagacacctgtgcagcgccggccaggccgccatcgaggccttcgtgtgcgcctacagccccagaggcaactgggaggtgaacggcaagaccatcgtgccctacaagaagggcgcctggtgcagcctgtgcaccgccagcgtgagcggctgcttcaaggcctgggaccacgccggcggcctgtgcgaggtgcccagaaacccctgcagaatgagctgccagaaccacggcagactgaacatcagcacctgccactgccactgcccccccggctacaccggcagatactgccaggtgagatgcagcctgcagtgcgtgcacggcagattcagagaggaggagtgcagctgcgtgtgcgacatcggctacggcggcgcccagtgcgccaccaaggtgcacttccccttccacacctgcgacctgagaatcgacggcgactgcttcatggtgagcagcgaggccgacacctactacagagccagaatgaagtgccagagaaagggcggcgtgctggcccagatcaagagccagaaggtgcaggacatcctggccttctacctgggcagactggagaccaccaacgaggtgatcgacagcgacttcgagaccagaaacttctggatcggcctgacctacaagaccgccaaggacagcttcagatgggccaccggcgagcaccaggccttcaccagcttcgccttcggccagcccgacaaccacggcttcggcaactgcgtggagctgcaggccagcgccgccttcaactggaacaaccagagatgcaagaccagaaacagatacatctgccagttcgcccaggagcacatcagcagatggggccccggcagctag

SEQ ID NO: 3758 - DNA, 219 bp, synthetic construct
  misc_feature 1..219: note = source = /note="Description of Artificial Sequence: Synthetic coding sequence"
  source 1..219: mol_type = other DNA
atgcagagactggtgctgctgctggccatcagcctgctgctgtaccaggacctgcccgtgagaagcgagttcgagctggacagaatctgcggctacggcaccgccagatgcagaaagaagtgcagaagccaggagtacagaatcggcagatgccccaacacctacgcctgctgcctgagaaagtgggacgagagcctgctgaacagaaccaagccctag

SEQ ID NO: 3759 - DNA, 2349 bp, synthetic construct
  misc_feature 1..2349: note = source = /note="Description of Artificial Sequence: Synthetic coding sequence"
  source 1..2349: mol_type = other DNA
ctgtggctgctgctgtgggccgccgcctggagactgggcgccagcgcctgccccgccctgtgcacctgcaccggcaccaccgtggactgccacggcaccggcctgcaggccatccccaagaacatccccagaaacaccgagagactggagctgaacggcaacaacatcaccagaatccacaagaacgacttcgccggcctgaagcagctgagagtgctgcagctgatggagaaccagatcggcgccgtggagagaggcgccttcgacgacatgaaggagctggagagactgagactgaacagaaaccagctgcacatgctgcccgagctgctgttccagaacaaccaggccctgagcagactggacctgagcgagaacgccatccaggccatccccagaaaggccttcagaggcgccaccgacctgaagaacctgcagctggacaagaaccagatcagctgcatcgaggagggcgccttcagagccctgagaggcctggaggtgctgaccctgaacaacaacaacatcaccaccatccccgtgagcagcttcaaccacatgcccaagctgagaaccttcagactgcacagcaaccacctgttctgcgactgccacctggcctggctgagccagtggctgagacagagacccaccatcggcctgttcacccagtgcagcggccccgccagcctgagaggcctgaacgtggccgaggtgcagaagagcgagttcagctgcagcggccagggcgaggccggcagagtgcccacctgcaccctgagcagcggcagctgccccgccatgtgcacctgcagcaacggcatcgtggactgcagaggcaagggcctgaccgccatccccgccaacctgcccgagaccatgaccgagatcagactggagctgaacggcatcaagagcatcccccccggcgccttcagcccctacagaaagctgagaagaatctgccccctgagcttctgcagcccctgcagagacctgagcaacaaccagatcgccgagatcgcccccgacgccttccagggcctgagaagcctgaacagcctggtgctgtacggcaacaagatcaccgacctgcccagaggcgtgttcggcggcctgtacaccctgcagctgctgctgctgaacgccaacaagatcaactgcatcagacccgacgccttccaggacctgcagaacctgagcctgctgagcctgtacgacaacaagatccagagcctggccaagggcaccttcaccagcctgagagccatccagaccctgcacctggcccagaaccccttcatctgcgactgcaacctgaagtggctggccgacttcctgagaaccaaccccatcgagaccagcggcgccagatgcgccagccccagaagactggccaacaagagaatcggccagatcaagagcaagaagttcagatgcagcgccaaggagcagtacttcatccccggcaccgaggactaccagctgaacagcgagtgcaacagcgacgtggtgtgcccccacaagtgcagatgcgaggccaacgtggtggagtgcagcagcctgaagctgaccaagatccccgagagaatcccccagagcaccgccgagctgagactgaacaacaacgagatcagcatcctggaggccaccggcatgttcaagaagctgacccacctgaagaagatcaacctgagcaacaacaaggtgagcgagatcgaggacggcgccttcgagggcgccgccagcgtgagcgagctgcacctgaccgccaaccagctggagagcatcagaagcggcatgttcagaggcctggacggcctgagaaccctgatgctgagaaacaacagaatcagctgcatccacaacgacagcttcaccggcctgagaaacgtgagactgctgagcctgtacgacaaccagatcaccaccgtgagccccggcgccttcgacaccctgcagagcctgagcaccctgaacctgctggccaaccccttcaactgcaactgccagctggcctggctgggcggctggctgagaaagagaaagatcgtgaccggcaaccccagatgccagaaccccgacttcctgagacagatccccctgcaggacgtggccttccccgacttcagatgcgaggagggccaggaggagggcggctgcctgcccagaccccagtgcccccaggagtgcgcctgcctggacaccgtggtgagatgcagcaacaagcacctgagagccctgcccaagggcatccccaagaacgtgaccgagctgtacctggacggcaaccagttcaccctggtgcccggccagctgagcaccttcaagtacctgcagctggtgtag

SEQ ID NO: 3760 - DNA, 411 bp, synthetic construct
  misc_feature 1..411: note = source = /note="Description of Artificial Sequence: Synthetic coding sequence"
  source 1..411: mol_type = other DNA
atgagcaacgtgccccacaagagcagcctgcccgagggcatcagacccggcaccgtgctgagaatcagaggcctggtgccccccaacgccagcagattccacgtgaacctgctgtgcggcgaggagcagggcagcgacgccgccctgcacttcaaccccagactggacaccagcgaggtggtgttcaacagcaaggagcagggcagctggggcagagaggagagaggccccggcgtgcccttccagagaggccagcccttcgaggtgctgatcatcgccagcgacgacggcttcaaggccgtggtgggcgacgcccagtaccaccacttcagacacagactgcccctggccagagtgagactggtggaggtgggcggcgacgtgcagctggacagcgtgagaatcttctag

SEQ ID NO: 3761 - DNA, 1926 bp, synthetic construct
  misc_feature 1..1926: note = source = /note="Description of Artificial Sequence: Synthetic coding sequence"
  source 1..1926: mol_type = other DNA
atgcccccccccctgcccctgctgctgctgaccgtgctggtggtggccgccgccagacccggctgcgagttcgagagaaaccccgccgccacctgcgtggacctgcagctgagaacctgcagcgacgccgcctacaaccacaccaccttccccaacctgctgcagcacagaagctgggaggtggtggaggccagcagcgagtacatcctgctgagcgtgctgcaccagctgctggagggccagtgcaaccccgacctgagactgctgggctgcgccgtgctggcccccagatgcgagggcggctgggtgagaagaccctgcagacacatctgcgagggcctgagagaggtgtgccagcccgccttcgacgccatcgacatggcctggccctacttcctggactgccacagatacttcaccagagaggacgagggctgctacgaccccctggagaagctgagaggcggcctggaggccgacgaggccctgcccagcggcctgccccccaccttcatcagattcagccaccacagctacgcccagatggtgagagtgctgagaagaaccgccagcagatgcgcccacgtggccagaacctacagcatcggcagaagcttcgacggcagagagctgctggtgatcgagttcagcagcagacccggccagcacgagctgatggagcccgaggtgaagctgatcggcaacatccacggcaacgaggtggccggcagagagatgctgatctacctggcccagtacctgtgcagcgagtacctgctgggcaaccccagaatccagagactgctgaacaccaccagaatccacctgctgcccagcatgaaccccgacggctacgaggtggccgccgccgagggcgccggctacaacggctggaccagcggcagacagaacgcccagaacctggacctgaacagaaacttccccgacctgaccagcgagtactacagactggccgagaccagaggcgccagaagcgaccacatccccatcccccagcactactggtggggcaaggtggcccccgagaccaaggccatcatgaagtggatgcagaccatccccttcgtgctgagcgccagcctgcacggcggcgacctggtggtgagctaccccttcgacttcagcaagcacccccaggaggagaagatgttcagccccacccccgacgagaagatgttcaagctgctgagcagagcctacgccgacgtgcaccccatgatgatggacagaagcgagaacagatgcggcggcaacttcctgaagagaggcagcatcatcaacggcgccgactggtacagcttcaccggcggcatgagcgacttcaactacctgcacaccaactgcttcgagatcaccgtggagctgggctgcgtgaagttcccccccgaggaggccctgtacatcctgtggcagcacaacaaggagagcctgctgaacttcgtggagaccgtgcacagaggcatcaagggcgtggtgaccgacaagttcggcaagcccgtgaagaacgccagaatcagcgtgaagggcatcagacacgacatcaccaccgcccccgacggcgactactggagactgctgccccccggcatccacatcgtgatcgcccaggcccccggctacgccaaggtgatcaagaaggtgatcatccccgccagaatgaagagagccggcagagtggacttcatcctgcagcccctgggcatgggccccaagaacttcatccacggcctgagaagaaccggcccccacgaccccctgggcggcgccagcagcctgggcgaggccaccgagcccgaccccctgagagccagaagacagcccagcgccgacggcagcaagccctggtggtggagctacttcaccagcctgagcacccacagacccagatggctgctgaagtactag

SEQ ID NO: 3762 - DNA, 1305 bp, synthetic construct
  misc_feature 1..1305: note = source = /note="Description of Artificial Sequence: Synthetic coding sequence"
  source 1..1305: mol_type = other DNA
atggccagcctgggcctgctgctgctgctgctgctgaccgccctgccccccctgtggagcagcagcctgcccggcctggacaccgccgagagcaaggccaccatcgccgacctgatcctgagcgccctggagagagccaccgtgttcctggagcagagactgcccgagatcaacctggacggcatggtgggcgtgagagtgctggaggagcagctgaagagcgtgagagagaagtgggcccaggagcccctgctgcagcccctgagcctgagagtgggcatgctgggcgagaagctggaggccgccatccagagaagcctgcactacctgaagctgagcgaccccaagtacctgagagagttccagctgaccctgcagcccggcttctggaagctgccccacgcctggatccacaccgacgccagcctggtgtaccccaccttcggcccccaggacagcttcagcgaggagagaagcgacgtgtgcctggtgcagctgctgggcaccggcaccgacagcagcgagccctgcggcctgagcgacctgtgcagaagcctgatgaccaagcccggctgcagcggctactgcctgagccaccagctgctgttcttcctgtgggccagaatgagaggctgcacccagggccccctgcagcagagccaggactacatcaacctgttctgcgccaacatgatggacctgaacagaagagccgaggccatcggctacgcctaccccaccagagacatcttcatggagaacaacgtgaccggccaccccgtgttctacctgcccctgtgcgacagcttcctgccccccaaggccgcccccgtgaccgagctgtacaccgacggccccgtgatgttctgcggcatgggcggcttcagcgacttctacaagctgagatggctggaggccatcctgagctggcagaagcagcaggagggctgcttcggcgagcccgacgccgaggacgaggagctgagcaaggccatccagtaccagcagcacttcagcagaagagtgaagagaagagagaagcagttccccgacagcagaagcgtggcccaggccggcgtgcagtggagaaacctgggcagcctgcagcccctgccccccggcttcaagcagttcagctgcctgatcctgcccagcagctgggactacagaagcgtgcccccctacctggccaacttctacatcttcctggtggagaccggcttccaccacgtggcccacgccggcctggagctgctgatcagcagagacccccccaccagcggcagccagagcgtgggcctgtag

SEQ ID NO: 3763 - DNA, 555 bp, synthetic construct
  misc_feature 1..555: note = source = /note="Description of Artificial Sequence: Synthetic coding sequence"
  source 1..555: mol_type = other DNA
atgatgagcttcctgctgggcgccatcctgaccctgctgtgggcccccaccgcccaggccgaggtgctgctgcagcccgacttcaacgccgagaagttcagcggcctgtggtacgtggtgagcatggccagcgactgcagagtgttcctgggcaagaaggaccacctgagcatgagcaccagagccatcagacccaccgaggagggcggcctgcacgtgcacatggagttccccggcgccgacggctgcaaccaggtggacgccgagtacctgaaggtgggcagcgagggccacttcagagtgcccgccctgggctacctggacgtgagaatcgtggacaccgactacagcagcttcgccgtgctgtacatctacaaggagctggagggcgccctgagcaccatggtgcagctgtacagcagaacccaggacgtgagcccccaggccctgaagagcttccaggacttctaccccaccctgggcctgcccaaggacatgatggtgatgctgccccagagcgacgcctgcaaccccgagagcaaggaggccccctag

SEQ ID NO: 3764 - DNA, 219 bp, synthetic construct; identical to SEQ ID NO: 3758
  misc_feature 1..219: note = source = /note="Description of Artificial Sequence: Synthetic coding sequence"
  source 1..219: mol_type = other DNA

SEQ ID NO: 3765 - DNA, 2247 bp, synthetic construct
  misc_feature 1..2247: note = source = /note="Description of Artificial Sequence: Synthetic coding sequence"
  source 1..2247: mol_type = other DNA
atgggcagagccggcgccgccgccgtgatccccggcctggccctgctgtgggccgtgggcctgggcagcgccgcccccccccccagactgagactgagcttccaggagctgcaggcctggcacggcctgcagaccttcagcctggagagaacctgctgctaccaggccctgctggtggacgaggagagaggcagactgttcgtgggcgccgagaaccacgtggccagcctgaacctggacaacatcagcaagagagccaagaagctggcctggcccgcccccgtggagtggagagaggagtgcaactgggccggcaaggacatcggcaccgagtgcatgaacttcgtgaagctgctgcacgcctacaacagaacccacctgctggcctgcggcaccggcgccttccaccccacctgcgccttcgtggaggtgggccacagagccgaggagcccgtgctgagactggaccccggcagaatcgaggacggcaagggcaagagcccctacgaccccagacacagagccgccagcgtgctggtgggcgaggagctgtacagcggcgtggccgccgacctgatgggcagagacttcaccatcttcagaagcctgggccagagacccagcctgagaaccgagccccacgacagcagatggctgaacgagcccaagttcgtgaaggtgttctggatccccgagagcgagaaccccgacgacgacaagatctacttcttcttcagagagaccgccgtggaggccgcccccgccctgggcagactgagcgtgagcagagtgggccagatctgcagaaacgacgtgggcggccagagaagcctggtgaacaagtggaccaccttcctgaaggccagactggtgtgcagcgtgcccggcgtggagggcgacacccacttcgaccagctgcaggacgtgttcctgctgagcagcagagaccacagaacccccctgctgtacgccgtgttcagcaccagcagcagcatcttccagggcagcgccgtgtgcgtgtacagcatgaacgacgtgagaagagccttcctgggccccttcgcccacaaggagggccccatgcaccagtgggtgagctaccagggcagagtgccctaccccagacccggcatgtgccccagcaagaccttcggcaccttcagcagcaccaaggacttccccgacgacgtgatccagttcgccagaaaccaccccctgatgtacaacagcgtgctgcccaccggcggcagacccctgttcctgcaggtgggcgccaactacaccttcacccagatcgccgccgacagagtggccgccgccgacggccactacgacgtgctgttcatcggcaccgacgtgggcaccgtgctgaaggtgatcagcgtgcccaagggcagcagacccagcgccgagggcctgctgctggaggagctgcacgtgttcgaggacagcgccgccgtgaccagcatgcagatcagcagcaagagacaccagctgtacgtggccagcagaagcgccgtggcccagatcgccctgcacagatgcgccgcccacggcagagtgtgcaccgagtgctgcctggccagagacccctactgcgcctgggacggcgtggcctgcaccagattccagcccagcgccaagagaagattcagaagacaggacgtgagaaacggcgaccccagcaccctgtgcagcggcgacagcagcagacccgccctgctggagcacaaggtgttcggcgtggagggcagcagcgccttcctggagtgcgagcccagaagcctgcaggccagagtggagtggaccttccagagagccggcgtgaccgcccacacccaggtgctggccgaggagagaaccgagagaaccgccagaggcctgctgctgagaagactgagaagaagagacagcggcgtgtacctgtgcgccgccgtggagcagggcttcacccagcccctgagaagactgagcctgcacgtgctgagcgccacccaggccgagagactggccagagccgaggaggccgcccccgccgccccccccggccccaagctgtggtacagagacttcctgcagctggtggagcccggcggcggcggcagcgccaacagcctgagaatgtgcagaccccagcccgccctgcagagcctgcccctggagagcagaagaaagggcagaaacagaagaacccacgcccccgagcccagagccgagagaggccccagaagcgccacccactggtag

SEQ ID NO: 3766 - DNA, 369 bp, synthetic construct
  misc_feature 1..369: note = source = /note="Description of Artificial Sequence: Synthetic coding sequence"
  source 1..369: mol_type = other DNA
atggtgctgctgtgcctgttcctggccagcctggccgccacccccagagccggcgtgaccggcgcctggcccaccagcggcctgagcatcctggcccagctgcagcccagctgcgagctgagatggacccagctgagcagaagcagctggagagacctggtgatgaccaccagcctgtggagcctggcctacttccagcacttcagccaggagaccaccacccaggagcagctggacgagatggaggagatccccagagagagccagtgcggcagacaggacttccacgccctgagctgccccaccgccagccccagagacagagtgctgctgtgctgccccggctggagagccatggtgcccagctag

SEQ ID NO: 3767 - DNA, 570 bp, synthetic construct
  misc_feature 1..570: note = source = /note="Description of Artificial Sequence: Synthetic coding sequence"
  source 1..570: mol_type = other DNA
atgctgctgggccagctgagcaccctgctgtgcctgctgagcggcgccctgcccaccggcagcggcagacccgagccccagagccccagaccccagagctgggccgccgccaaccagacctgggccctgggccccggcgccctgccccccctggtgcccgccagcgccctgggcagctggaaggccttcctgggcctgcagaaggccagacagctgggcatgggcagactgcagagaggccaggacgaggtggccgccgtgaccctgcccctgaacccccaggaggtgatccagggcatgtgcaaggccgtgcccttcgtgcaggtgttcagcagacccggctgcagcgccatcagactgagaaaccacctgtgcttcggccactgcagcagcctgtacatccccggcagcgaccccacccccctggtgctgtgcaacagctgcatgcccgccagaaagagatgggcccccgtggtgctgtggtgcctgaccggcagcagcgccagcagaagaagagtgaagatcagcaccatgctgatcgagggctgccactgcagccccaaggcctag

SEQ ID NO: 3768 - DNA, 2505 bp, synthetic construct
  misc_feature 1..2505: note = source = /note="Description of Artificial Sequence: Synthetic coding sequence"
  source 1..2505: mol_type = other DNA
atgaagcacaccctggccctgctggcccccctgctgggcctgggcctgggcctggccctgagccagctggccgccggcgccaccgactgcaagttcctgggccccgccgagcacctgaccttcacccccgccgccagagccagatggctggcccccagagtgagagcccccggcctgctggacagcctgtacggcaccgtgagaagattcctgagcgtggtgcagctgaaccccttccccagcgagctggtgaaggccctgctgaacgagctggccagcgtgaaggtgaacgaggtggtgagatacgaggccggctacgtggtgtgcgccgtgatcgccggcctgtacctgctgctggtgcccaccgccggcctgtgcttctgctgctgcagatgccacagaagatgcggcggcagagtgaagaccgagcacaaggccctggcctgcgagagagccgccctgatggtgttcctgctgctgaccaccctgctgctgctgatcggcgtggtgtgcgccttcgtgaccaaccagagaacccacgagcagatgggccccagcatcgaggccatgcccgagaccctgctgagcctgtggggcctggtgagcgacgtgccccaggagctgcaggccgtggcccagcagttcagcctgccccaggagcaggtgagcgaggagctggacggcgtgggcgtgagcatcggcagcgccatccacacccagctgagaagcagcgtgtaccccctgctggccgccgtgggcagcctgggccaggtgctgcaggtgagcgtgcaccacctgcagaccctgaacgccaccgtggtggagctgcaggccggccagcaggacctggagcccgccatcagagagcacagagacagactgctggagctgctgcaggaggccagatgccagggcgactgcgccggcgccctgagctgggccagaaccctggagctgggcgccgacttcagccaggtgcccagcgtggaccacgtgctgcaccagctgaagggcgtgcccgaggccaacttcagcagcatggtgcaggaggagaacagcaccttcaacgccctgcccgccctggccgccatgcagaccagcagcgtggtgcaggagctgaagaaggccgtggcccagcagcccgagggcgtgagaaccctggccgagggcttccccggcctggaggccgccagcagatgggcccaggccctgcaggaggtggaggagagcagcagaccctacctgcaggaggtgcagagatacgagacctacagatggatcgtgggctgcgtgctgtgcagcgtggtgctgttcgtggtgctgtgcaacctgctgggcctgaacctgggcatctggggcctgagcgccagagacgaccccagccaccccgaggccaagggcgaggccggcgccagattcctgatggccggcgtgggcctgagcttcctgttcgccgcccccctgatcctgctggtgttcgccaccttcctggtgggcggcaacgtgcagaccctggtgtgccagagctgggagaacggcgagctgttcgagttcgccgacacccccggcaacctgccccccagcatgaacctgagccagctgctgggcctgagaaagaacatcagcatccaccaggcctaccagcagtgcaaggagggcgccgccctgtggaccgtgctgcagctgaacgacagctacgacctggaggagcacctggacatcaaccagtacaccaacaagctgagacaggagctgcagagcctgaaggtggacacccagagcctggacctgctgagcagcgccgccagaagagacctggaggccctgcagagcagcggcctgcagagaatccactaccccgacttcctggtgcagatccagagacccgtggtgaagaccagcatggagcagctggcccaggagctgcagggcctggcccaggcccaggacaacagcgtgctgggccagagactgcaggaggaggcccagggcctgagaaacctgcaccaggagaaggtggtgccccagcagagcctggtggccaagctgaacctgagcgtgagagccctggagagcagcgcccccaacctgcagctggagaccagcgacgtgctggccaacgtgacctacctgaagggcgagctgcccgcctgggccgccagaatcctgagaaacgtgagcgagtgcttcctggccagagagatgggctacttcagccagtacgtggcctgggtgagagaggaggtgacccagagaatcgccacctgccagcccctgagcggcgccctggacaacagcagagtgatcctgtgcgacatgatggccgacccctggaacgccttctggttctgcctggcctggtgcaccttcttcctgatccccagcatcatcttcgccgtgaagaccagcaagtacttcagacccatcagaaagagactgagcagcaccagcagcgaggagacccagctgttccacatccccagagtgaccagcctgaagctgtag

SEQ ID NO: 3769 - DNA, 2505 bp, synthetic construct; identical to SEQ ID NO: 3768
  misc_feature 1..2505: note = source = /note="Description of Artificial Sequence: Synthetic coding sequence"
  source 1..2505: mol_type = other DNA

SEQ ID NO: 3770 - DNA, 216 bp, synthetic construct
  misc_feature 1..216: note = source = /note="Description of Artificial Sequence: Synthetic coding sequence"
  source 1..216: mol_type = other DNA
atgacccagctgctgctgttcctggtggccctgctggtgctgggccacgtgcccagcggcagaagcgagttcaagagatgctggaagggccagggcgcctgccagacctactgcaccagacaggagacctacatgcacctgtgccccgacgccagcctgtgctgcctgagctacgccctgaagcccccccccgtgcccaagcacgagtacgagtag

SEQ ID NO: 3771 - DNA, 1377 bp, synthetic construct
  misc_feature 1..1377: note = source = /note="Description of Artificial Sequence: Synthetic coding sequence"
  source 1..1377: mol_type = other DNA
atggaggccaccggcaccgacgaggtggacaagctgaagaccaagttcatcagcgcctggaacaacatgaagtacagctgggtgctgaagaccaagacctacttcagcagaaacagccccgtgctgctgctgggcaagtgctaccacttcaagtacgaggacgaggacaagaccctgcccgccgagagcggctgcaccatcgaggaccacgtgatcgccggcaacgtggaggagttcagaaaggacttcatcagcagaatctggctgacctacagagaggagttcccccagatcgagggcagcgccctgaccaccgactgcggctggggctgcaccctgagaaccggccagatgctgctggcccagggcctgatcctgcacttcctgggcagagcctggacctggcccgacgccctgaacatcgagaacagcgacagcgagagctggaccagccacaccgtgaagaagttcaccgccagcttcgaggccagcctgagcggcgagagagagttcaagacccccaccatcagcctgaaggagaccatcggcaagtacagcgacgaccacgagatgagaaacgaggtgtaccacagaaagatcatcagctggttcggcgacagccccctggccctgttcggcctgcaccagctgatcgagtacggcaagaagagcggcaagaaggccggcgactggtacggccccgccgtggtggcccacatcctgagaaaggccgtggaggaggccagacaccccgacctgcagggcatcaccatctacgtggcccaggactgcaccgtgtacaacagcgacgtgatcgacaagcagagcgccagcatgaccagcgacaacgccgacgacaaggccgtgatcatcctggtgcccgtgagactgggcggcgagagaaccaacaccgactacctggagttcgtgaagggcatcctgagcctggagtactgcgtgggcatcatcggcggcaagcccaagcagagctactacttcgccggcttccaggacgacagcctgatctacatggacccccactactgccagagcttcgtggacgtgagcatcaaggacttccccctggagaccttccactgccccagccccaagaagatgagcttcagaaagatggaccccagctgcaccatcggcttctactgcagaaacgtgcaggacttcaagagagccagcgaggagatcaccaagatgctgaagttcagcagcaaggagaagtaccccctgttcaccttcgtgaacggccacagcagagactacgacttcaccagcaccaccaccaacgaggaggacctgttcagcgaggacgagaagaagcagctgaagagattcagcaccgaggagttcgtgctgctgtag

SEQ ID NO: 3772 - DNA, 342 bp, synthetic construct
  misc_feature 1..342: note = source = /note="Description of Artificial Sequence: Synthetic coding sequence"
  source 1..342: mol_type = other DNA
atgagacagagactgctgcccagcgtgaccagcctgctgctggtggccctgctgttccccggcagcagccaggccagacacgtgaaccacagcgccaccgaggccctgggcgagctgagagagagagcccccggccagggcaccaacggcttccagctgctgagacacgccgtgaagagagacctgctgccccccagaacccccccctaccaggagcccgccagcgacctgaaggtggtggactgcagaagaagcgagggcttctgccaggagtactgcaactacatggagacccaggtgggctactgcagcaagaagaaggacgcctgctgcctgcactag

SEQ ID NO: 3773 - DNA, 258 bp, synthetic construct
  misc_feature 1..258: note = source = /note="Description of Artificial Sequence: Synthetic coding sequence"
  source 1..258: mol_type = other DNA
atgaagaaggtgctgctgctgatcaccgccatcctggccgtggccgtgggcttccccgtgagccaggaccaggagagagagaagagaagcatcagcgacagcgacgagctggccagcggcttcttcgtgttcccctacccctaccccttcagacccctgccccccatccccttccccagattcccctggttcagaagaaacttccccatccccatccccgagagcgcccccaccacccccctgcccagcgagaagtag

SEQ ID NO: 3774 - DNA, 264 bp, synthetic construct
  misc_feature 1..264: note = source = /note="Description of Artificial Sequence: Synthetic coding sequence"
  source 1..264: mol_type = other DNA
atggccgtgagcgtgctgagactgaccgtggtgctgggcctgctggtgctgttcctgacctgctacgccgacgacaagcccgacaagcccgacgacaagcccgacgacagcggcaaggaccccaagcccgacttccccaagttcctgagcctgctgggcaccgagatcatcgagaacgccgtggagttcatcctgagaagcatgagcagaagcaccggcttcatggagttcgacgacaacgagggcaagcacagcagcaagtag

SEQ ID NO: 3775 - DNA, 945 bp, synthetic construct
  misc_feature 1..945: note = source = /note="Description of Artificial Sequence: Synthetic coding sequence"
  source 1..945: mol_type = other DNA
atgagcagcgaggccgagacccagcagccccccgccgccccccccgccgcccccgccctgagcgccgccgacaccaagcccggcaccaccggcgcccagggcgccgtggccagagcccacatcggcggcgccggcggcgacaagaaggtgatcgccaccaaggtgctgggcaccgtgaagtggttcaacgtgagaaacggctacggcttcatcaacagaaacgacaccaaggaggacgtgttcgtgcaccagaccgccatcaagaagaacaaccccagaaagtacctgagaagcgtgggcgacggcgagaccgtggagttcgacgtggtggagggcgagaagggcgccgaggccgccaacgtgaccggccccggcggcgtgcccgtgcagggcagcaagtacgccgccgacagaaaccactacagaagataccccagaagaagaggcccccccagaaactaccagcagaactaccagaacagcgagagcggcgagaagaacgagggcagcgagagcgcccccgagagacccaacaacgccggcccccaggccaaggtgcccaccctgctgcacgccgagtacggcagaagaccccagtacagcaacccccccgtgcagggcgaggtgatggagggcgccgacaaccagggcgccggcgagcagggcagacccgtgagacagtgcatcggcgacatcgaccacgacagcgccggcgccctgctggccagacagcccagagaggacggcaacgaggaggacaaggagaaccagggcgacgagacccagggccagcagcccccccagagaagatacagaagaaacttcaactacagaagaagaagacccgagaaccccaagccccaggacggcaaggagaccaaggccgccgacccccccgccgagaacagcagcgcccccgaggccgagcagggcggcgccgagtag

SEQ ID NO: 3776 - DNA, 636 bp, synthetic construct
  misc_feature 1..636: note = source = /note="Description of Artificial Sequence: Synthetic coding sequence"
  source 1..636: mol_type = other DNA
atggtgttcctgaagttcttctgcatgagcttcttctgccacctgtgccagggctacttcgacggccccctgtaccccgagatgagcaacggcaccctgcaccactacttcgtgcccgacggcgactacgaggagaacgacgaccccgagaagtgccagctgctgttcagagtgagcgaccacagaagatgcagccagggcgagggcagccaggtgggcagcctgctgagcctgaccctgagagaggagttcaccgtgctgggcagacaggtggaggacgccggcagagtgctggagggcatcagcaagagcatcagctacgacctggacggcgaggagagctacggcaagtacctgagaagagagagccaccagatcggcgacgcctacagcaacagcgacaagagcctgaccgagctggagagcaagttcaagcagggccaggagcaggacagcagacaggagagcagactgaacgaggacttcctgggcatgctggtgcacaccagaagcctgctgaaggagaccctggacatcagcgtgggcctgagagacaagtacgagctgctggccctgaccatcagaagccacggcaccagactgggcagactgaagaacgactacctgaaggtgtag

SEQ ID NO: 3777 - DNA, 1566 bp, synthetic construct
  misc_feature 1..1566: note = source = /note="Description of Artificial Sequence: Synthetic coding sequence"
  source 1..1566: mol_type = other DNA
atgctgtgcgccctgctgctgctgcccagcctgctgggcgccaccagagccagccccaccagcggcccccaggagtgcgccaagggcagcaccgtgtggtgccaggacctgcagaccgccgccagatgcggcgccgtgggctactgccagggcgccgtgtggaacaagcccaccgccaagagcctgccctgcgacgtgtgccaggacatcgccgccgccgccggcaacggcctgaaccccgacgccaccgagagcgacatcctggccctggtgatgaagacctgcgagtggctgcccagccaggagagcagcgccggctgcaagtggatggtggacgcccacagcagcgccatcctgagcatgctgagaggcgcccccgacagcgcccccgcccaggtgtgcaccgccctgagcctgtgcgagcccctgcagagacacctggccaccctgagacccctgagcaaggaggacaccttcgaggccgtggcccccttcatggccaacggccccctgaccttccaccccagacaggcccccgagggcgccctgtgccaggactgcgtgagacaggtgagcagactgcaggaggccgtgagaagcaacctgaccctggccgacctgaacatccaggagcagtgcgagagcctgggccccggcctggccgtgctgtgcaagaactacctgttccagttcttcgtgcccgccgaccaggccctgagactgctgcccccccaggagctgtgcagaaagggcggcttctgcgaggagctgggcgcccccgccagactgacccaggtggtggccatggacggcgtgcccagcctggagctgggcctgcccagaaagcagagcgagatgcagatgaaggccggcgtgacctgcgaggtgtgcatgaacgtggtgcagaagctggaccactggctgatgagcaacagcagcgagctgatgatcacccacgccctggagagagtgtgcagcgtgatgcccgccagcatcaccaaggagtgcatcatcctggtggacacctacagccccagcctggtgcagctggtggccaagatcacccccgagaaggtgtgcaagttcatcagactgtgcggcaacagaagaagagccagagccgtgcacgacgcctacgccatcgtgcccagccccgagtgggacgccgagaaccagggcagcttctgcaacggctgcaagagactgctgaccgtgagcagccacaacctggagagcaagagcaccaagagagacatcctggtggccttcaagggcggctgcagcatcctgcccctgccctacatgatccagtgcaagcacttcgtgacccagtacgagcccgtgctgatcgagagcctgaaggacatgatggaccccgtggccgtgtgcaagaaggtgggcgcctgccacggccccagaacccccctgctgggcaccgaccagtgcgccctgggccccagcttctggtgcagaagccaggaggccgccaagctgtgcaacgccgtgcagcactgccagaagcacgtgtggaaggagatgcacctgcacgccggcgagcacgcctag

SEQ ID NO: 3778 - DNA, 2127 bp, synthetic construct
  misc_feature 1..2127: note = source = /note="Description of Artificial Sequence: Synthetic coding sequence"
  source 1..2127: mol_type = other DNA
atggccgccgccgccgtggccgccgccgccgccgccgccgccgccgccagcctgcaggtgctggagatggagagcatggagaccgccgccgccggcagcgccggcctggccgccgaggtgagaggcagcggcaccgtggacttcggccccggccccggcatcagcgccatggaggccagcggcggcgaccccggccccgaggccgaggacttcgagtgcagcagccactgcagcgagctgagctggagacagaacgagcagagaagacagggcctgttctgcgacatcaccctgtgcttcggcggcgccggcggcagagagttcagagcccacagaagcgtgctggccgccgccaccgagtacttcacccccctgctgagcggccagttcagcgagagcagaagcggcagagtggagatgagaaagtggagcagcgagcccggccccgagcccgacaccgtggaggccgtgatcgagtacatgtacaccggcagaatcagagtgagcaccggcagcgtgcacgaggtgctggagctggccgacagattcctgctgatcagactgaaggagttctgcggcgagttcctgaagaagaagctgcacctgagcaactgcgtggccatccacagcctggcccacatgtacaccctgagccagctggccctgaaggccgccgacatgatcagaagaaacttccacaaggtgatccaggacgaggagttctacaccctgcccttccacctgatcagagactggctgagcgacctggagatcaccgtggacagcgaggaggtgctgttcgagaccgtgctgaagtgggtgcagagaaacgccgaggagagagagagatacttcgaggagctgttcaagctgctgagactgagccagatgaagcccacctacctgaccagacacgtgaagcccgagagactggtggccaacaacgaggtgtgcgtgaagctggtggccgacgccgtggagagacacgccctgagagccgagaacatccagagcggcacctgccagcaccccaccagccacgtgagcctgctgcccagatacggccagaacatggacgtgatcatggtgatcggcggcgtgagcgagggcggcgactacctgagcgagtgcgtgggctacttcgtggacgaggacagatgggtgaacctgccccacatccacaaccacctggacggccacgccgtggccgtgaccgagagctacgtgtacgtggccggcagcatggagcccggcttcgccaagaccgtggagagatacaaccccaacctgaacacctgggagcacgtgtgcagcctgatgaccagaaagcacagcttcggcctgaccgaggtgaagggcaagctgtacagcatcggcggccacggcaacttcagccccggcttcaaggacgtgaccgtgtacaaccccgagctggacaagtggcacaacctggagagcgcccccaagatcctgagagacgtgaaggccctggccatcgaggacagattcgtgtacatcgccgccagaacccccgtggacagagacaccgaggacggcctgaaggccgtgatcacctgctacgacaccgagaccagacagtggcaggacgtggagagcctgcccctgatcgacaactactgcttcttccagatgagcgtggtgaacagcaacttctaccagaccgccagctgctgccccaagagctactgcctggagaacgaggaggccgtgagaaagatcgccagccaggtgagcgacgagatcctggagagcctgccccccgaggtgctgagcatcgagggcgccgccatctgctactacaaggacgacgtgttcatcatcggcggctggaagaacagcgacgacatcgacaagcagtacagaaaggaggcctacagatactgcgccgagagaaagagatggatgctgctgccccccatgccccagcccagatgcagagccaccgcctgccacgtgagaatcccctacagatacctgcacggcacccagagataccccatgccccagaacctgatgtggcagaaggacagaatcagacagatgcaggagatccacagacacgccctgaacatgagaagagtgcccagcagccagatcgagtgctag

SEQ ID NO: 3779 - DNA, 1578 bp, synthetic construct
  misc_feature 1..1578: note = source = /note="Description of Artificial Sequence: Synthetic coding sequence"
  source 1..1578: mol_type = other DNA
atgagcggcaactgggtgcaccccggccagatcctgatctgggccatctgggtgctggccgcccccaccaagggccccagcgccgagggcccccagagaaacaccagactgggctggatccagggcaagcaggtgaccgtgctgggcagccccgtgcccgtgaacgtgttcctgggcgtgcccttcgccgccccccccctgggcagcctgagattcaccaacccccagcccgccagcccctgggacaacctgagagaggccaccagctaccccaacctgtgcctgcagaacagcgagtggctgctgctggaccagcacatgctgaaggtgcactaccccaagttcggcgtgagcgaggactgcctgtacctgaacatctacgcccccgcccacgccgacaccggcagcaagctgcccgtgctggtgtggttccccggcggcgccttcaagaccggcagcgccagcatcttcgacggcagcgccctggccgcctacgaggacgtgctggtggtggtggtgcagtacagactgggcatcttcggcttcttcaccacctgggaccagcacgcccccggcaactgggccttcaaggaccaggtggccgccctgagctgggtgcagaagaacatcgagttcttcggcggcgaccccagcagcgtgaccatcttcggcgagagcgccggcgccatcagcgtgagcagcctgatcctgagccccatggccaagggcctgttccacaaggccatcatggagagcggcgtggccatcatcccctacctggaggcccacgactacgagaagagcgaggacctgcaggtggtggcccacttctgcggcaacaacgccagcgacagcgaggccctgctgagatgcctgagaaccaagcccagcaaggagctgctgaccctgagccagaagaccaagagcttcaccagagtggtggacggcgccttcttccccaacgagcccctggacctgctgagccagaaggccttcaaggccatccccagcatcatcggcgtgaacaaccacgagtgcggcttcctgctgcccatgaaggaggcccccgagatcctgagcggcagcaacaagagcctggccctgcacctgatccagaacatcctgcacatccccccccagtacctgcacctggtggccaacgagtacttccacgacaagcacagcctgaccgagatcagagacagcctgctggacctgctgggcgacgtgttcttcgtggtgcccgccctgatcaccgccagataccacagagagggcgccaccgaggaggagaagctgctgagcagaaagatgatgaagtactgggccaccttcgccagaaccggcaaccccaacggcaacgacctgagcctgtggcccgcctacaacctgaccgagcagtacctgcagctggacctgaacatgagcctgggccagagactgaaggagcccagagtggacttctggaccagcaccatccccctgatcctgagcgccagcgacatgctgcacagccccctgagcagcctgaccttcctgagcctgctgcagcccttcttcttcttctgcgccccctag

SEQ ID NO: 3780 - DNA, 900 bp, synthetic construct
  misc_feature 1..900: note = source = /note="Description of Artificial Sequence: Synthetic coding sequence"
  source 1..900: mol_type = other DNA
atggtgagatgcctgggccccgccctgctgctgctgctgctgctgggcagcgccagcagcgtgggcggcaacagatgcgtggacgccgccgaggcctgcaccgccgacgccagatgccagagactgagaagcgagtacgtggcccagtgcctgggcagagccgcccagggcggctgccccagagccagatgcagaagagccctgagaagattcttcgccagaggcccccccgccctgacccacgccctgctgttctgcccctgcgccggccccgcctgcgccgagagaagaagacagaccttcgtgcccagctgcgccttcagcggccccggccccgccccccccagctgcctggagcccctgaacttctgcgagagaagcagagtgtgcagatgcgccagagccgccgccggcccctggagaggctggggcagaggcctgagccccgcccacagaccccccgccgcccaggccagcccccccggcctgagcggcctggtgcaccccagcgcccagagacccagaagactgcccgccggccccggcagacccctgcccgccagactgagaggccccagaggcgtgcccgccggcaccgccgtgacccccaactacgtggacaacgtgagcgccagagtggccccctggtgcgactgcggcgccagcggcaacagaagagaggactgcgaggccttcagaggcctgttcaccagaaacagatgcctggacggcgccatccaggccttcgccagcggctggccccccgtgctgctggaccagctgaacccccagggcgaccccgagcacagcctgctgcaggtgagcagcaccggcagagccctggagagaagaagcctgctgagcatcctgcccgtgctggccctgcccgccctgctgtag

SEQ ID NO: 3781 - DNA, 270 bp, synthetic construct
  misc_feature 1..270: note = source = /note="Description of Artificial Sequence: Synthetic coding sequence"
  source 1..270: mol_type = other DNA
atgcaggcctgcatggtgcccggcctggccctgtgcctgctgctgggccccctggccggcgccaagcccgtgcaggaggagggcgacccctacgccgagctgcccgccatgccctactggcccttcagcaccagcgacttctggaactacgtgcagcacttccaggccctgggcgcctacccccagatcgaggacatggccagaaccttcttcgcccacttccccctgggcagcaccctgggcttccacgtgccctaccaggaggactag

SEQ ID NO: 3782 - DNA, 663 bp, synthetic construct
  misc_feature 1..663: note = source = /note="Description of Artificial Sequence: Synthetic coding sequence"
  source 1..663: mol_type = other DNA
atggccagcgagagactgcccaacagacccgcctgcctgctggtggccagcggcgccgccgagggcgtgagcgcccagagcttcctgcactgcttcaccatggccagcaccgccttcaacctgcaggtggccacccccggcggcaaggccatggagttcgtggacgtgaccgagagcaacgccagatgggtgcaggacttcagactgaaggcctacgccagccccgccaagctggagagcatcgacggcgccagataccacgccctgctgatccccagctgccccggcgccctgaccgacctggccagcagcggcagcctggccagaatcctgcagcacttccacagcgagagcaagcccatctgcgccgtgggccacggcgtggccgccctgtgctgcgccaccaacgaggacagaagctgggtgttcgacagctacagcctgaccggccccagcgtgtgcgagctggtgagagcccccggcttcgccagactgcccctggtggtggaggacttcgtgaaggacagcggcgcctgcttcagcgccagcgagcccgacgccgtgcacgtggtgctggacagacacctggtgaccggccagaacgccagcagcaccgtgcccgccgtgcagaacctgctgttcctgtgcggcagcagaaagtag

SEQ ID NO: 3783 - DNA, 1158 bp, synthetic construct
  misc_feature 1..1158: note = source = /note="Description of Artificial Sequence: Synthetic coding sequence"
  source 1..1158: mol_type = other DNA
atgtggggcttcagactgctgagaagcccccccctgctgctgctgctgccccagctgggcatcggcaacgccagcagctgcagccaggccagaaccatgaaccccggcggcagcggcggcgccagatgcagcctgagcgccgaggtgagaagaagacagtgcctgcagctgagcaccgtgcccggcgccgacccccagagaagcaacgagctgctgctgctggccgccgccggcgagggcctggagagacaggacctgcccggcgaccccgccaaggaggagccccagccccccccccagcaccacgtgctgtacttccccggcgacgtgcagaactaccacgagatcatgaccagacaccccgagaactaccagtgggagaactggagcctggagaacgtggccaccatcctggcccacagattccccaacagctacatctgggtgatcaagtgcagcagaatgcacctgcacaagttcagctgctacgacaacttcgtgaagagcaacatgttcggcgcccccgagcacaacaccgacttcggcgccttcaagcacctgtacatgctgctggtgaacgccttcaacctgagccagaacagcctgagcaagaagagcctgaacgtgtggaacaaggacagcatcgccagcaactgcagaagcagccccagccacaccaccaacggctgccagggcgagaaggtgagaacctgcgagaagagcgacgagagcgccatgagcttctacccccccagcctgaacgacgccagcttcaccctgatcggcttcagcaagggctgcgtggtgctgaaccagctgctgttcgagctgaaggaggccaagaaggacaagaacatcgacgccttcatcaagagcatcagaaccatgtactggctggacggcggccacagcggcggcagcaacacctgggtgacctaccccgaggtgctgaaggagttcgcccagaccggcatcatcgtgcacacccacgtgaccccctaccaggtgagagaccccatgagaagctggatcggcaaggagcacaagaagttcgtgcagatcctgggcgacctgggcatgcaggtgaccagccagatccacttcaccaaggaggcccccagcatcgagaaccacttcagagtgcacgaggtgttctag

SEQ ID NO: 3784 - DNA, 936 bp, synthetic construct
  misc_feature 1..936: note = source = /note="Description of Artificial Sequence: Synthetic coding sequence"
  source 1..936: mol_type = other DNA
atgagaggcgccgccagagccgcctggggcagagccggccagccctggcccagaccccccgcccccggccccccccccccccccctgcccctgctgctgctgctgctggccggcctgctgggcggcgccggcgcccagtacagcagcgacagatgcagctggaagggcagcggcctgacccacgaggcccacagaaaggaggtggagcaggtgtacctgagatgcgccgccggcgccgtggagtggatgtaccccaccggcgccctgatcgtgaacctgagacccaacaccttcagccccgccagacacctgaccgtgtgcatcagaagcttcaccgacagcagcggcgccaacatctacctggagaagaccggcgagctgagactgctggtgcccgacggcgacggcagacccggcagagtgcagtgcttcggcctggagcagggcggcctgttcgtggaggccaccccccagcaggacatcggcagaagaaccaccggcttccagtacgagctggtgagaagacacagagccagcgacctgcacgagctgagcgccccctgcagaccctgcagcgacaccgaggtgctgctggccgtgtgcaccagcgacttcgccgtgagaggcagcatccagcaggtgacccacgagcccgagagacaggacagcgccatccacctgagagtgagcagactgtacagacagaagagcagagtgttcgagcccgtgcccgagggcgacggccactggcagggcagagtgagaaccctgctggagtgcggcgtgagacccggccacggcgacttcctgttcaccggccacatgcacttcggcgaggccagactgggctgcgcccccagattcaaggacttccagagaatgtacagagacgcccaggagagaggcctgaacccctgcgaggtgggcaccgactag

SEQ ID NO: 3785 - DNA, 1221 bp, synthetic construct
  misc_feature 1..1221: note = source = /note="Description of Artificial Sequence: Synthetic coding sequence"
  source 1..1221: mol_type = other DNA
atgggccccagcacccccctgctgatcctgttcctgctgagctggagcggccccctgcagggccagcagcaccacctggtggagtacatggagagaagactggccgccctggaggagagactggcccagtgccaggaccagagcagcagacacgccgccgagctgagagacttcaagaacaagatgctgcccctgctggaggtggccgagaaggagagagaggccctgagaaccgaggccgacaccatcagcggcagagtggacagactggagagagaggtggactacctggagacccagaaccccgccctgccctgcgtggagttcgacgagaaggtgaccggcggccccggcaccaagggcaagggcagaagaaacgagaagtacgacatggtgaccgactgcggctacaccatcagccaggtgagaagcatgaagatcctgaagagattcggcggccccgccggcctgtggaccaaggaccccctgggccagaccgagaagatctacgtgctggacggcacccagaacgacaccgccttcgtgttccccagactgagagacttcaccctggccatggccgccagaaaggccagcagagtgagagtgcccttcccctgggtgggcaccggccagctggtgtacggcggcttcctgtacttcgccagaagaccccccggcagacccggcggcggcggcgagatggagaacaccctgcagctgatcaagttccacctggccaacagaaccgtggtggacagcagcgtgttccccgccgagggcctgatccccccctacggcctgaccgccgacacctacatcgacctggccgccgacgaggagggcctgtgggccgtgtacgccaccagagaggacgacagacacctgtgcctggccaagctggacccccagaccctggacaccgagcagcagtgggacaccccctgccccagagagaacgccgaggccgccttcgtgatctgcggcaccctgtacgtggtgtacaacaccagacccgccagcagagccagaatccagtgcagcttcgacgccagcggcaccctgacccccgagagagccgccctgccctacttccccagaagatacggcgcccacgccagcctgagatacaaccccagagagagacagctgtacgcctgggacgacggctaccagatcgtgtacaagctggagatgagaaagaaggaggaggaggtgtag

SEQ ID NO: 3786 - DNA, 900 bp, synthetic construct
  misc_feature 1..900: note = source = /note="Description of Artificial Sequence: Synthetic coding sequence"
  source 1..900: mol_type = other DNA
atgggcggccccagagccctgctggccgccctgtgggccctggaggccgccggcaccgccgccctgagaatcggcgccttcaacatccagagcttcggcgacagcaaggtgagcgaccccgcctgcggcagcatcatcgccaagatcctggccggctacgacctggccctggtgcaggaggtgagagaccccgacctgagcgccgtgagcgccctgatggagcagatcaacagcgtgagcgagcacgagtacagcttcgtgagcagccagcccctgggcagagaccagtacaaggagatgtacctgttcgtgtacagaaaggacgccgtgagcgtggtggacacctacctgtaccccgaccccgaggacgtgttcagcagagagcccttcgtggtgaagttcagcgcccccggcaccggcgagagagccccccccctgcccagcagaagagccctgacccccccccccctgcccgccgccgcccagaacctggtgctgatccccctgcacgccgccccccaccaggccgtggccgagatcgacgccctgtacgacgtgtacctggacgtgatcgacaagtggggcaccgacgacatgctgttcctgggcgacttcaacgccgactgcagctacgtgagagcccaggactgggccgccatcagactgagaagcagcgaggtgttcaagtggctgatccccgacagcgccgacaccaccgtgggcaacagcgactgcgcctacgacagaatcgtggcctgcggcgccagactgagaagaagcctgaagccccagagcgccaccgtgcacgacttccaggaggagttcggcctggaccagacccaggccctggccatcagcgaccacttccccgtggaggtgaccctgaagttccacagatag

SEQ ID NO: 3787 - DNA, 1617 bp, synthetic construct
  misc_feature 1..1617: note = source = /note="Description of Artificial Sequence: Synthetic coding sequence"
  source 1..1617: mol_type = other DNA
atgggctgcctgtggggcctggccctgcccctgttcttcttctgctgggaggtgggcgtgagcggcagcagcgccggccccagcaccagaagagccgacaccgccatgaccaccgacgacaccgaggtgcccgccatgaccctggcccccggccacgccgccctggagacccagaccctgagcgccgagaccagcagcagagccagcacccccgccggccccatccccgaggccgagaccagaggcgccaagagaatcagccccgccagagagaccagaagcttcaccaagaccagccccaacttcatggtgctgatcgccaccagcgtggagaccagcgccgccagcggcagccccgagggcgccggcatgaccaccgtgcagaccatcaccggcagcgaccccagagaggccatcttcgacaccctgtgcaccgacgacagcagcgaggaggccaagaccctgaccatggacatcctgaccctggcccacaccagcaccgaggccaagggcctgagcagcgagagcagcgccagcagcgacagcccccaccccgtgatcacccccagcagagccagcgagagcagcgccagcagcgacggcccccaccccgtgatcacccccagcagagccagcgagagcagcgccagcagcgacggcccccaccccgtgatcacccccagctggagccccggcagcgacgtgaccctgctggccgaggccctggtgaccgtgaccaacatcgaggtgatcaactgcagcatcaccgagatcgagaccaccaccagcagcatccccggcgccagcgacaccgacctgatccccaccgagggcgtgaaggccagcagcaccagcgacccccccgccctgcccgacagcaccgaggccaagccccacatcaccgaggtgaccgccagcgccgagaccctgagcaccgccggcaccaccgagagcgccgcccccgacgccaccgtgggcacccccctgcccaccaacagcgccaccgagagagaggtgaccgcccccggcgccaccaccctgagcggcgccctggtgaccgtgagcagaaaccccctggaggagaccagcgccctgagcgtggagacccccagctacgtgaaggtgagcggcgccgcccccgtgagcatcgaggccggcagcgccgtgggcaagaccaccagcttcgccggcagcagcgccagcagctacagccccagcgaggccgccctgaagaacttcacccccagcgagacccccaccatggacatcgccaccaagggccccttccccaccagcagagaccccctgcccagcgtgccccccaccaccaccaacagcagcagaggcaccaacagcaccctggccaagatcaccaccagcgccaagaccaccatgaagccccccaccgccacccccaccaccgccagaaccagacccaccaccgacgtgagcgccggcgagaacggcggcttcctgctgctgagactgagcgtggccagccccgaggacctgaccgaccccagagtggccgagagactgatgcagcagctgcacagagagctgcacgcccacgccccccacttccaggtgagcctgctgagagtgagaagaggctag

SEQ ID NO: 3788 - DNA, 975 bp, synthetic construct
  misc_feature 1..975: note = source = /note="Description of Artificial Sequence: Synthetic coding sequence"
  source 1..975: mol_type = other DNA
atgagcagcgaggccgagacccagcagccccccgccgccccccccgccgcccccgccctgagcgccgccgacaccaagcccggcaccaccggcagcggcgccggcagcggcggccccggcggcctgaccagcgccgcccccgccggcggcgacaagaaggtgatcgccaccaaggtgctgggcaccgtgaagtggttcaacgtgagaaacggctacggcttcatcaacagaaacgacaccaaggaggacgtgttcgtgcaccagaccgccatcaagaagaacaaccccagaaagtacctgagaagcgtgggcgacggcgagaccgtggagttcgacgtggtggagggcgagaagggcgccgaggccgccaacgtgaccggccccggcggcgtgcccgtgcagggcagcaagtacgccgccgacagaaaccactacagaagataccccagaagaagaggcccccccagaaactaccagcagaactaccagaacagcgagagcggcgagaagaacgagggcagcgagagcgcccccgagggccaggcccagcagagaagaccctacagaagaagaagattccccccctactacatgagaagaccctacggcagaagaccccagtacagcaacccccccgtgcagggcgaggtgatggagggcgccgacaaccagggcgccggcgagcagggcagacccgtgagacagaacatgtacagaggctacagacccagattcagaagaggcccccccagacagagacagcccagagaggacggcaacgaggaggacaaggagaaccagggcgacgagacccagggccagcagcccccccagagaagatacagaagaaacttcaactacagaagaagaagacccgagaaccccaagccccaggacggcaaggagaccaaggccgccgacccccccgccgagaacagcagcgcccccgaggccgagcagggcggcgccgagtag

SEQ ID NO: 3789 - DNA, 210 bp, synthetic construct
  misc_feature 1..210: note = source = /note="Description of Artificial Sequence: Synthetic coding sequence"
  source 1..210: mol_type = other DNA
atgagaatcttctactacctgcacttcctgtgctacgtgaccttcatcctgcccgccacctgcaccctggtgaacgccgacagatgcaccaagagatacggcagatgcaagagagactgcctggagagcgagaagcagatcgacatctgcagcctgcccagaaagatctgctgcaccgagaagctgtacgaggaggacgacatgttctag

SEQ ID NO: 3790 - DNA, 342 bp, synthetic construct
  misc_feature 1..342: note = source = /note="Description of Artificial Sequence: Synthetic coding sequence"
  source 1..342: mol_type = other DNA
atgaagctgctgaccaccatctgcagactgaagctggagaagatgtacagcaagaccaacaccagcagcaccatcttcgagaaggccagacacggcaccgagaagatcagcaccgccagaagcgagggccaccacatcaccttcagcagatggaagagctgcaccgccatcggcggcagatgcaagaaccagtgcgacgacagcgagttcagaatcagctactgcgccagacccaccacccactgctgcgtgaccgagtgcgaccccaccgaccccaacaactggatccccaaggacagcgtgggcacccaggagtggtaccccaaggacagcagacactag

SEQ ID NO: 3791 - DNA, 3030 bp, synthetic construct
  misc_feature 1..3030: note = source = /note="Description of Artificial Sequence: Synthetic coding sequence"
  source 1..3030: mol_type = other DNA
atggacctgatcagaggcgtgctgctgagactgctgctgctggccagcagcctgggccccggcgccgtgagcctgagagccgccatcagaaagcccggcaaggtgggcccccccctggacatcaagctgggcgccctgaactgcaccgccttcagcatccagtggaagatgcccagacaccccggcagccccatcctgggctacaccgtgttctacagcgaggtgggcgccgacaagagcctgcaggagcagctgcacagcgtgcccctgagcagagacatccccaccaccgaggaggtgatcggcgacctgaagcccggcaccgagtacagagtgagcatcgccgcctacagccaggccggcaagggcagactgagcagccccagacacgtgaccaccctgagccaggacagctgcctgccccccgccgccccccagcagccccacgtgatcgtggtgagcgacagcgaggtggccctgagctggaagcccggcgccagcgagggcagcgcccccatccagtactacagcgtggagttcatcagacccgacttcgacaagaagtggaccagcatccacgagagaatccagatggacagcatggtgatcaagggcctggaccccgacaccaactaccagttcgccgtgagagccatgaacagccacggccccagccccagaagctggcccagcgacatcatcagaaccctgtgccccgaggaggccggcagcggcagatacggccccagatacatcaccgacatgggcgccggcgaggacgacgagggcttcgaggacgacctggacctggacatcagcttcgaggaggtgaagcccctgcccgccaccaagggcggcaacaagaagttcctggtggagagcaagaagatgagcatcagcaaccccaagaccatcagcagactgatcccccccaccagcgccagcctgcccgtgaccaccgtggccccccagcccatccccatccagagaaagggcaagaacggcgtggccatcatgagcagactgttcgacatgccctgcgacgagaccctgtgcagcgccgacagcttctgcgtgaacgactacacctggggcggcagcagatgccagtgcaccctgggcaagggcggcgagagctgcagcgaggacatcgtgatccagtacccccagttcttcggccacagctacgtgaccttcgagcccctgaagaacagctaccaggccttccagatcaccctggagttcagagccgaggccgaggacggcctgctgctgtactgcggcgagaacgagcacggcagaggcgacttcatgagcctggccatcatcagaagaagcctgcagttcagattcaactgcggcaccggcgtggccatcatcgtgagcgagaccaagatcaagctgggcggctggcacaccgtgatgctgtacagagacggcctgaacggcctgctgcagctgaacaacggcacccccgtgaccggccagagccagggccagtacagcaagatcaccttcagaacccccctgtacctgggcggcgcccccagcgcctactggctggtgagagccaccggcaccaacagaggcttccagggctgcgtgcagagcctggccgtgaacggcagaagaatcgacatgagaccctggcccctgggcaaggccctgagcggcgccgacgtgggcgagtgcagcagcggcatctgcgacgaggccagctgcatccacggcggcacctgcaccgccatcaaggccgacagctacatctgcctgtgccccctgggcttcaagggcagacactgcgaggacgccttcaccctgaccatcccccagttcagagagagcctgagaagctacgccgccaccccctggcccctggagccccagcactacctgagcttcatggagttcgagatcaccttcagacccgacagcggcgacggcgtgctgctgtacagctacgacaccggcagcaaggacttcctgagcatcaacctggccggcggccacgtggagttcagattcgactgcggcagcggcaccggcgtgctgagaagcgaggaccccctgaccctgggcaactggcacgagctgagagtgagcagaaccgccaagaacggcatcctgcaggtggacaagcagaagatcgtggagggcatggccgagggcggcttcacccagatcaagtgcaacaccgacatcttcatcggcggcgtgcccaactacgacgacgtgaagaagaacagcggcgtgctgaagcccttcagcggcagcatccagaagatcatcctgaacgacagaaccatccacgtgaagcacgacttcaccagcggcgtgaacgtggagaacgccgcccacccctgcgtgagagccccctgcgcccacggcggcagctgcagacccagaaaggagggctacgactgcgactgccccctgggcttcgagggcctgcactgccagaaggccatcatcgaggccatcgagatcccccagttcatcggcagaagctacctgacctacgacaaccccgacatcctgaagagagtgagcggcagcagaagcaacgtgttcatgagattcaagaccaccgccaaggacggcctgctgctgtggagaggcgacagccccatgagacccaacagcgacttcatcagcctgggcctgagagacggcgccctggtgttcagctacaacctgggcagcggcgtggccagcatcatggtgaacggcagcttcaacgacggcagatggcacagagtgaaggccgtgagagacggccagagcggcaagatcaccgtggacgactacggcgccagaaccggcaagagccccggcatgatgagacagctgaacatcaacggcgccctgtacgtgggcggcatgaaggagatcgccctgcacaccaacagacagtacatgagaggcctggtgggctgcatcagccacttcaccctgagcaccgactaccacatcagcctggtggaggacgccgtggacggcaagaacatcaacacctgcggcgccaagtag

SEQ ID NO: 3792 - DNA, 1272 bp, synthetic construct
  misc_feature 1..1272: note = source = /note="Description of Artificial Sequence: Synthetic coding sequence"
  source 1..1272: mol_type = other DNA
atgagcgtgagaggcatcctgagactgggcacccaggagtaccccagccccctggaccccgaggtgggcccctactgcgacacccccaccatgagaaccctgttcaacctgctgtggctggccctggcctgcagccccgtgcacaccaccctgagcaagagcgacgccaagaaggccgccagcaagaccctgctggagaagagccagttcagcgacaagcccgtgcaggacagaggcctggtggtgaccgacctgaaggccgagagcgtggtgctggagcacagaagctactgcagcgccaaggccagagacagacacttcgccggcgacgtgctgggctacgtgaccccctggaacagccacggctacgacgtgaccaaggtgttcggcagcaagttcacccagatcagccccgtgtggctgcagctgaagagaagaggcagagagatgttcgaggtgaccggcctgcacgacgtggaccagggctggatgagagccgtgagaaagcacgccaagggcctgcacatcgtgcccagactgctgttcgaggactggacctacgacgacttcagaaacgtgctggacagcgaggacgagatcgaggagctgagcaagaccgtggtgcaggtggccaagaaccagcacttcgacggcttcgtggtggaggtgtggaaccagctgctgagccagaagagagtgggcctgatccacatgctgacccacctggccgaggccctgcaccaggccagactgctggccctgctggtgatcccccccgccatcacccccggcaccgaccagctgggcatgttcacccacaaggagttcgagcagctggcccccgtgctggacggcttcagcctgatgacctacgactacagcaccgcccaccagcccggccccaacgcccccctgagctgggtgagagcctgcgtgcaggtgctggaccccaagagcaagtggagaagcaagatcctgctgggcctgaacttctacggcatggactacgccaccagcaaggacgccagagagcccgtggtgggcgccagatacatccagaccctgaaggaccacagacccagaatggtgtgggacagccaggccagcgagcacttcttcgagtacaagaagagcagaagcggcagacacgtggtgttctaccccaccctgaagagcctgcaggtgagactggagctggccagagagctgggcgtgggcgtgagcatctgggagctgggccagggcctggactacttctacgacctgctgtag

SEQ ID NO: 3793 - DNA, 1182 bp, synthetic construct
  misc_feature 1..1182: note = source = /note="Description of Artificial Sequence: Synthetic coding sequence"
  source 1..1182: mol_type = other DNA
atgagaaccctgttcaacctgctgtggctggccctggcctgcagccccgtgcacaccaccctgagcaagagcgacgccaagaaggccgccagcaagaccctgctggagaagagccagttcagcgacaagcccgtgcaggacagaggcctggtggtgaccgacctgaaggccgagagcgtggtgctggagcacagaagctactgcagcgccaaggccagagacagacacttcgccggcgacgtgctgggctacgtgaccccctggaacagccacggctacgacgtgaccaaggtgttcggcagcaagttcacccagatcagccccgtgtggctgcagctgaagagaagaggcagagagatgttcgaggtgaccggcctgcacgacgtggaccagggctggatgagagccgtgagaaagcacgccaagggcctgcacatcgtgcccagactgctgttcgaggactggacctacgacgacttcagaaacgtgctggacagcgaggacgagatcgaggagctgagcaagaccgtggtgcaggtggccaagaaccagcacttcgacggcttcgtggtggaggtgtggaaccagctgctgagccagaagagagtgggcctgatccacatgctgacccacctggccgaggccctgcaccaggccagactgctggccctgctggtgatcccccccgccatcacccccggcaccgaccagctgggcatgttcacccacaaggagttcgagcagctggcccccgtgctggacggcttcagcctgatgacctacgactacagcaccgcccaccagcccggccccaacgcccccctgagctgggtgagagcctgcgtgcaggtgctggaccccaagagcaagtggagaagcaagatcctgctgggcctgaacttctacggcatggactacgccaccagcaaggacgccagagagcccgtggtgggcgccagatacatccagaccctgaaggaccacagacccagaatggtgtgggacagccaggccagcgagcacttcttcgagtacaagaagagcagaagcggcagacacgtggtgttctaccccaccctgaagagcctgcaggtgagactggagctggccagagagctgggcgtgggcgtgagcatctgggagctgggccagggcctggactacttctacgacctgctgtag

SEQ ID NO: 3794 - DNA, 1959 bp, synthetic construct
  misc_feature 1..1959: note = source = /note="Description of Artificial Sequence: Synthetic coding sequence"
  source 1..1959: mol_type = other DNA
atggccagcgtggcctgggccgtgctgaaggtgctgctgctgctgcccacccagacctggagccccgtgggcgccggcaacccccccgactgcgacgcccccctggccagcgccctgcccagaagcagcttcagcagcagcagcgagctgagcagcagccacggccccggcttcagcagactgaacagaagagacggcgccggcggctggacccccctggtgagcaacaagtaccagtggctgcagatcgacctgggcgagagaatggaggtgaccgccgtggccacccagggcggctacggcagcagcgactgggtgaccagctacctgctgatgttcagcgacggcggcagaaactggaagcagtacagaagagaggagagcatctggggcttccccggcaacaccaacgccgacagcgtggtgcactacagactgcagccccccttcgaggccagattcctgagattcctgcccctggcctggaaccccagaggcagaatcggcatgagaatcgaggtgtacggctgcgcctacaagagcgaggtggtgtacttcgacggccagagcgccctgctgtacagactggacaagaagcccctgaagcccatcagagacgtgatcagcctgaagttcaaggccatgcagagcaacggcatcctgctgcacagagagggccagcacggcaaccacatcaccctggagctgatcaagggcaagctggtgttcttcctgaacagcggcaacgccaagctgcccagcaccatcgcccccgtgaccctgaccctgggcagcctgctggacgaccagcactggcacagcgtgctgatcgagctgctggacacccaggtgaacttcaccgtggacaagcacacccaccacttccaggccaagggcgacagcagctacctggacctgaacttcgagatcagcttcggcggcatccccacccccggcagaagcagagccttcagaagaaagagcttccacggctgcctggagaacctgtactacaacggcgtggacgtgaccgagctggccaagaagcacaagccccagatcctgatgatgggcaacgtgagcttcagctgcccccagccccagaccgtgcccgtgaccttcctgagcagcagaagctacctggccctgcccggcaacagcggcgaggacaaggtgagcgtgaccttccagttcagaacctggaacagagccggccacctgctgttcggcgagctgagaagaggcagcggcagcttcgtgctgttcctgaaggacggcaagctgaagctgagcctgttccagcccggccagagccccagaaacgtgaccgccggcgccggcctgaacgacggccagtggcacagcgtgagcttcagcgccaagtggagccacatgaacgtggtggtggacgacgacaccgccgtgcagcccctggtggccgtgctgatcgacagcggcgacacctactacttcggcgccctgtacgagcagagctgcgaggcccacaagcacagaggcaaccccagcggcctgtactacatcgacgccgacggcagcggccccctgggccccttcctggtgtactgcaacatgaccgacgccgcctggaccgtggtgcagcacggcggccccgacgccgtgaccctgagaggcgcccccagcggccaccccagaagcgccgtgagcttcgcctacgccgccggcgccggccagctgagaagcgccgtgaacctggccgagagatgcgagcagagactggccctgagatgcggcaccgccagaagacccgacagcagagacggcacccccctgagctggtgggtgggcagaaccaacgagacccacaccagctggggcggcagcctgcccgacgcccagaagtgcacctgcggcctggagggcaactgcatcgacagccagtactactgcaactgcgacgccggcagaaacgagtggtag

SEQ ID NO: 3795 - DNA, 1455 bp, synthetic construct
  misc_feature 1..1455: note = source = /note="Description of Artificial Sequence: Synthetic coding sequence"
  source 1..1455: mol_type = other DNA
atgtggtacgtgagcaccagaggcgtggcccccagagtgaacttcgagggcgccctgttcagcggctacgcccccgacggcggcctgttcatgcccgaggagctgccccagctggacagaggcaccctgtgccagtggagcaccctgagctaccccggcctggtgaaggagctgtgcgccctgttcatcggcagcgagctgctgcccaaggacgagctgaacgacctgatcgacagagccttcagcagattcagacacagagaggtggtgcacctgagcagactgagaaacggcctgaacgtgctggagctgtggcacggcgtgacctacgccttcaaggacctgagcctgagctgcaccacccagttcctgcagtacttcctggagaagagagagaagcacgtgaccgtggtggtgggcaccagcggcgacaccggcagcgccgccatcgagagcgtgcagggcgccaagaacatggacatcatcgtgctgctgcccaagggccactgcaccaagatccaggagctgcagatgaccaccgtgctgaagcagaacgtgcacgtgttcggcgtggagggcaacagcgacgagctggacgagcccatcaagaccgtgttcgccgacgtggccttcgtgaagaagcacaacctgatgagcctgaacagcatcaactggagcagagtgctggtgcagatggcccaccacttcttcgcctacttccagtgcacccccagcctggacacccaccccctgcccctggtggaggtggtggtgcccaccggcgccgccggcaacctggccgccggctacatcgcccagaagatcggcctgcccatcagactggtggtggccgtgaacagaaacgacatcatccacagaaccgtgcagcagggcgacttcagcctgagcgaggccgtgaagagcaccctggccagcgccatggacatccaggtgccctacaacatggagagagtgttctggctgctgagcggcagcgacagccaggtgaccagagccctgatggagcagttcgagagaacccagagcgtgaacctgcccaaggagctgcacagcaagctgagcgaggccgtgaccagcgtgagcgtgagcgacgaggccatcacccagaccatgggcagatgctgggacgagaaccagtacctgctgtgcccccacagcgccgtggccgtgaactaccactaccagcagatcgacagacagcagcccagcacccccagatgctgcctggcccccgccagcgccgccaagttccccgaggccgtgctggccgccggcctgacccccgagacccccgccgagatcgtggccctggagcacaaggagaccagatgcaccctgatgagaagaggcgacaactggatgctgatgctgagagacaccatcgaggacctgagcagacagtggagaagccacgccctgaacaccagccagtag

SEQ ID NO: 3796 - DNA, 264 bp, synthetic construct
  misc_feature 1..264: note = source = /note="Description of Artificial Sequence: Synthetic coding sequence"
  source 1..264: mol_type = other DNA
atggtgagcctgatgaagctgtggatccccatgctgatgaccttcttctgcaccgtgctgctgagcgtgctgggcgagatgagaaagaagagatacgacagaaaggagctgctgctggaggagtgctggggcaagcccaacgtgaaggagtgcaccaacaagtgcagcaaggccttcagatgcaaggacaagaactacacctgctgctggacctactgcggcaacatctgctggatcaacgtggagaccagcggcgactactag

SEQ ID NO: 3797 - DNA, 453 bp, synthetic construct
  misc_feature 1..453: note = source = /note="Description of Artificial Sequence: Synthetic coding sequence"
  source 1..453: mol_type = other DNA
atgagattcatggccggccccgccggcagccagagcctgggccccctgtgcttccacagcagcccccaggccctgtacaccgtgctgctgatcgtgctggtgatgatgagcctggtgttcggcaagttcgtgcccgtgaactgggagcccccccagcccctgcccttccccaagtacctgagatgctacagatgcctgctggagaccaaggagctgggctgcctgctgggcagcgacatctgcctgacccccgccggcagcagctgcatcaccctgcacaagaagaacagcagcggcagcgacgtgatggtgagcgactgcagaagcaaggagcagatgagcgactgcagcaacaccagaaccagccccgtgagcggcttctggatcttcagccagtactgcttcctggacttctgcaacgacccccagaacagaggcctgtacaccccctag

SEQ ID NO: 3798 - DNA, 873 bp, synthetic construct
  misc_feature 1..873: note = source = /note="Description of Artificial Sequence: Synthetic coding sequence"
  source 1..873: mol_type = other DNA
atgagcgtgagaagaggcagaagacccgccagacccggcaccagactgagctggctgctgtgctgcagcgccctgctgagccccgccgccggctacgtgatcgtgagcagcgtgagctgggccgtgaccaacgaggtggacgaggagctggacagcgccagcaccgaggaggccatgcccgccctgctggaggacagcggcagcatctggcagcagagcttccccgccagcgcccacaaggaggacgcccacctgagacccagagccggcgccgccagagccagacccccccccgccccccccggcatgttcagctacagaagagagggcggccagaccgccagcgccccccccggccccagactgagagccgccaccgccagaagcctggcccacgccagcgtgtggggctgcctggccaccgtgagcacccacaagaagatccagggcctgcccttcggcaactgcctgcccgtgagcgacggccccttcaacaacagcaccggcatccccttcttctacatgaccgccaaggaccccgtggtggccgacctgatgaagaaccccatggccagcctgatgctgcccgagagcgagggcgagttctgcagaaagaacatcgtggaccccgaggaccccagatgcgtgcagctgaccctgaccggccagatgatcgccgtgagccccgaggaggtggagttcgccaagcaggccatgttcagcagacaccccggcatgagaaagtggcccagacagtacgagtggttcttcatgaagatgagaatcgagcacatctggctgcagaagtggtacggcggcgccagcagcatcagcagagaggagtacttcaaggccgtgcccagaaaggcctag

SEQ ID NO: 3799 - DNA, 2742 bp, synthetic construct
  misc_feature 1..2742: note = source = /note="Description of Artificial Sequence: Synthetic coding sequence"
  source 1..2742: mol_type = other DNA
atgggccccgaggccctgagcagcctgctgctgctgctgctggtggccagcggcgacgccgacatgaagggccacttcgaccccgccaagtgcagatacgccctgggcatgcaggacagaaccatccccgacagcgacatcagcgccagcagcagctggagcgacagcaccgccgccagacacagcagactggagagcagcgacggcgacggcgcctggtgccccgccggcagcgtgttccccaaggaggaggagtacctgcaggtggacctgcagagactgcacctggtggccctggtgggcacccagggcagacacgccggcggcctgggcaaggagttcagcagaagctacagactgagatacagcagagacggcagaagatggatgggctggaaggacagatggggccaggaggtgatcagcggcaacgaggaccccgagggcgtggtgctgaaggacctgggcccccccatggtggccagactggtgagattctaccccagagccgacagagtgatgagcgtgtgcctgagagtggagctgtacggctgcctgtggagagacggcctgctgagctacaccgcccccgtgggccagaccatgtacctgagcgaggccgtgtacctgaacgacagcacctacgacggccacaccgtgggcggcctgcagtacggcggcctgggccagctggccgacggcgtggtgggcctggacgacttcagaaagagccaggagctgagagtgtggcccggctacgactacgtgggctggagcaaccacagcttcagcagcggctacgtggagatggagttcgagttcgacagactgagagccttccaggccatgcaggtgcactgcaacaacatgcacaccctgggcgccagactgcccggcggcgtggagtgcagattcagaagaggccccgccatggcctgggagggcgagcccatgagacacaacctgggcggcaacctgggcgaccccagagccagagccgtgagcgtgcccctgggcggcagagtggccagattcctgcagtgcagattcctgttcgccggcccctggctgctgttcagcgagatcagcttcatcagcgacgtggtgaacaacagcagccccgccctgggcggcaccttcccccccgccccctggtggccccccggccccccccccaccaacttcagcagcctggagctggagcccagaggccagcagcccgtggccaaggccgagggcagccccaccgccatcctgatcggctgcctggtggccatcatcctgctgctgctgctgatcatcgccctgatgctgtggagactgcactggagaagactgctgagcaaggccgagagaagagtgctggaggaggagctgaccgtgcacctgagcgtgcccggcgacaccatcctgatcaacaacagacccggccccagagagccccccccctaccaggagcccagacccagaggcaaccccccccacagcgccccctgcgtgcccaacggcagcgccctgctgctgagcaaccccgcctacagactgctgctggccacctacgccagaccccccagaggccccggcccccccacccccgcctgggccaagcccaccaacacccaggcctacagcggcgactacatggagcccgagaagcccggcgcccccctgctgcccccccccccccagaacagcgtgccccactacgccgaggccgacatcgtgaccctgcagggcgtgaccggcggcaacacctacgccgtgcccgccctgccccccggcgccgtgggcgacggcccccccagagtggacttccccagaagcagactgagattcaaggagaagctgggcgagggccagttcggcgaggtgcacctgtgcgaggtggacagcccccaggacctggtgagcctggacttccccctgaacgtgagaaagggccaccccctgctggtggccgtgaagatcctgagacccgacgccaccaagaacgccagaaacgacttcctgaaggaggtgaagatcatgagcagactgaaggaccccaacatcatcagactgctgggcgtgtgcgtgcaggacgaccccctgtgcatgatcaccgactacatggagaacggcgacctgaaccagttcctgagcgcccaccagctggaggacaaggccgccgagggcgcccccggcgacggccaggccgcccagggccccaccatcagctaccccatgctgctgcacgtggccgcccagatcgccagcggcatgagatacctggccaccctgaacttcgtgcacagagacctggccaccagaaactgcctggtgggcgagaacttcaccatcaagatcgccgacttcggcatgagcagaaacctgtacgccggcgactactacagagtgcagggcagagccgtgctgcccatcagatggatggcctgggagtgcatcctgatgggcaagttcaccaccgccagcgacgtgtgggccttcggcgtgaccctgtgggaggtgctgatgctgtgcagagcccagcccttcggccagctgaccgacgagcaggtgatcgagaacgccggcgagttcttcagagaccagggcagacaggtgtacctgagcagaccccccgcctgcccccagggcctgtacgagctgatgctgagatgctggagcagagagagcgagcagagaccccccttcagccagctgcacagattcctggccgaggacgccctgaacaccgtgtag

SEQ ID NO: 3800 - DNA, 243 bp, synthetic construct
  misc_feature 1..243: note = source = /note="Description of Artificial Sequence: Synthetic coding sequence"
  source 1..243: mol_type = other DNA
atgaagctgagcggcatgttcctgctgctgagcctggccctgttctgcttcctgaccggcgtgttcagccagggcggccaggtggactgcggcgagttccaggaccccaaggtgtactgcaccagagagagcaacccccactgcggcagcgacggccagacctacggcaacaagtgcgccttctgcaaggccatcgtgaagagcggcggcaagatcagcctgaagcaccccggcaagtgctag

SEQ ID NO: 3801 - DNA, 270 bp, synthetic construct
  misc_feature 1..270: note = source = /note="Description of Artificial Sequence: Synthetic coding sequence"
  source 1..270: mol_type = other DNA
atgaagccctggatcctgctgctggtgatgttcatcagcggcgtggtgatgctgctgcccgtgctgggcagcttctggaacaaggaccccttcctggacatgatcagagagaccgagcagtgctgggtgcagcccccctacaagtactgcgagaagagatgcaccaagatcatgacctgcgtgagacccaaccacacctgctgctggacctactgcggcaacatctgcctggacaacgaggagcccctgaagagcatgctgaacccctag

SEQ ID NO: 3802 - DNA, 264 bp, synthetic construct
  misc_feature 1..264: note = source = /note="Description of Artificial Sequence: Synthetic coding sequence"
  source 1..264: mol_type = other DNA
atgctgccctgcctggccctgctgctgctgatggagctgagcgtgtgcaccgtggccggcgacggcggcgaggagcagaccctgagcaccgaggccgagacctgggagggcgccggccccagcatccagctgcagctgcaggaggtgaagaccggcaaggccagccagttcttcggcctgatgggcaagagagtgggcggcagacccctgatccagcccagaagaaagaagggcagagaggacgaggcccagggcagcgagtag

SEQ ID NO: 3803 - DNA, 285 bp, synthetic construct
  misc_feature 1..285: note = source = /note="Description of Artificial Sequence: Synthetic coding sequence"
  source 1..285: mol_type = other DNA
atgcagcacagcctggtgttcttcttcgccgtgatcctgcacctgagccacctgctgcacctggacgccagcatccaccccttcagactgcccttcagcagcaagcccttcctgctgatccccatgagcaacaccaccctgccccacaccgcctggcccctgagcttcctgcaccagaccgtgagcaccctgaaggccgtggccgtgacccacagcctgtggcacctgcagatccccgtggactgccaggcctgcaacagaaagagcaagaagatctactgctag

SEQ ID NO: 3804 - DNA, 327 bp, synthetic construct
  misc_feature 1..327: note = source = /note="Description of Artificial Sequence: Synthetic coding sequence"
  source 1..327: mol_type = other DNA
atgagacagagactgctgcccagcgtgaccagcctgctgctggtggccctgctgttccccggcagcagccaggccagacacgtgaaccacagcgccaccgaggccctgggcgagctgagagagagagcccccggccagggcaccaacggcttccagctgctgagacacgccgtgaagagagacctgctgccccccagaacccccccctaccagggcgacgtgcccctgggcatcagaaacaccatctgcagaatgcagcagggcatctgcagactgttcttctgccacagcggcaccggccagcagcacagacagagatgcggctag

SEQ ID NO: 3805 - DNA, 807 bp, synthetic construct
  misc_feature 1..807: note = source = /note="Description of Artificial Sequence: Synthetic coding sequence"
  source 1..807: mol_type = other DNA
atgctgctgctggccgccgccttcctggtggccttcgtgctgctgctgtacatggtgagccccctgatcagccccaagcccctggccctgcccggcgcccacgtggtggtgaccggcggcagcagcggcatcggcaagtgcatcgccatcgagtgctacaagcagggcgccttcatcaccctggtggccagaaacgaggacaagctgctgcaggccaagaaggagatcgagatgcacagcatcaacgacaagcaggtggtgctgtgcatcagcgtggacgtgagccaggactacaaccaggtggagaacgtgatcaagcaggcccaggagaagctgggccccgtggacatgctggtgaactgcgccggcatggccgtgagcggcaagttcgaggacctggaggtgagcaccttcgaggtgaagccctacaacgtgtacatcaccgtggcctacccccccgacaccgacacccccggcttcgccgaggagaacagaaccaagcccctggagaccagactgatcagcgagaccaccagcgtgtgcaagcccgagcaggtggccaagcagatcgtgaaggacgccatccagggcaacttcaacagcagcctgggcagcgacggctacatgctgagcgccctgacctgcggcatggcccccgtgaccagcatcaccgagggcctgcagcaggtggtgaccatgggcctgttcagaaccatcgccctgttctacctgggcagcttcgacagcatcgtgagaagatgcatgatgcagagagagaagagcgagaacgccgacaagaccgcctag

SEQ ID NO: 3806 - DNA, 1686 bp, synthetic construct
  misc_feature 1..1686: note = source = /note="Description of Artificial Sequence: Synthetic coding sequence"
  source 1..1686: mol_type = other DNA
atgagatggatcctgtgctggagcctgaccctgtgcctgatggcccagaccgccctgggcgccctgcacaccaagagaccccaggtggtgaccaagtacggcaccctgcagggcaagcagatgcacgtgggcaagacccccatccaggtgttcctgggcgtgcccttcagcagaccccccctgggcatcctgagattcgccccccccgagccccccgagccctggaagggcatcagagacgccaccacctacccccccggctgcctgcaggagagctggggccagctggccagcatgtacgtgagcaccagagagagatacaagtggctgagattcagcgaggactgcctgtacctgaacgtgtacgcccccgccagagcccccggcgacccccagctgcccgtgatggtgtggttccccggcggcgccttcatcgtgggcgccgccagcagctacgagggcagcgacctggccgccagagagaaggtggtgctggtgttcctgcagcacagactgggcatcttcggcttcctgagcaccgacgacagccacgccagaggcaactggggcctgctggaccagatggccgccctgagatgggtgcaggagaacatcgccgccttcggcggcgaccccggcaacgtgaccctgttcggccagagcgccggcgccatgagcatcagcggcctgatgatgagccccctggccagcggcctgttccacagagccatcagccagagcggcaccgccctgttcagactgttcatcaccagcaaccccctgaaggtggccaagaaggtggcccacctggccggctgcaaccacaacagcacccagatcctggtgaactgcctgagagccctgagcggcaccaaggtgatgagagtgagcaacaagatgagattcctgcagctgaacttccagagagaccccgaggagatcatctggagcatgagccccgtggtggacggcgtggtgatccccgacgaccccctggtgctgctgacccagggcaaggtgagcagcgtgccctacctgctgggcgtgaacaacctggagttcaactggctgctgccctacatcatgaagttccccctgaacagacaggccatgagaaaggagaccatcaccaagatgctgtggagcaccagaaccctgctgaacatcaccaaggagcaggtgcccctggtggtggaggagtacctggacaacgtgaacgagcacgactggaagatgctgagaaacagaatgatggacatcgtgcaggacgccaccttcgtgtacgccaccctgcagaccgcccactaccacagagacgccggcctgcccgtgtacctgtacgagttcgagcaccacgccagaggcatcatcgtgaagcccagaaccgacggcgccgaccacggcgacgagatgtacttcctgttcggcggccccttcgccaccggcctgagcatgggcaaggagaaggccctgagcctgcagatgatgaagtactgggccaacttcgccagaaccggcaaccccaacgacggcaacctgccctgctggcccagatacaacaaggacgagaagtacctgcagctggacttcaccaccagagtgggcatgaagctgaaggagaagaagatggccttctggatgagcctgtaccagagccagagacccgagaagcagagacagttctag

SEQ ID NO: 3807 - DNA, 444 bp, synthetic construct
  misc_feature 1..444: note = source = /note="Description of Artificial Sequence: Synthetic coding sequence"
  source 1..444: mol_type = other DNA
atggccagcagcctgaagatctggggcaccctgctggccctgctgtgcatcctgtgcaccctgctggtgcagagcaaggaggtgagctggagagagttcatgaagcagcactacctgagccccagcagagagttcagagagtacaagtgcgacgtgctgatgagagagaacgaggccctgaaggacaagagcagccacatgttcatctacatcagctggtacaagatcgagcacatctgcaccagcgacaactggatggacagattcagaaacgcctacgtgtgggtgcagaaccccctgaaggtgctgaagtgccaccaggagaacagcaagaacagctacaccgagagcagaagcttcaactacatcgagttccactgcagcatggacggctacgtggacagcatcgaggacctgaagatggtggagcccatcggcaactag

SEQ ID NO: 3808 - DNA, 444 bp, synthetic construct
  misc_feature 1..444: note = source = /note="Description of Artificial Sequence: Synthetic coding sequence"
  source 1..444: mol_type = other DNA
atgaccagcagcctgaagatctggggcatcctgctggccctgctgtgcatcctgtgcagactgtgcgtgtacagcaacaacatctactggagagagttcatcaagctgcactacctgagccccagcagagagttcaaggagtacaagtgcgacgtgctgatgagagagaaggaggccctgaagggcaagagcttccacatgttcatctacagcctgtggttcaagatccagagagcctgcatcaacgagaagggcagcgacagatacagaaacgcctacgtgtgggcccccggcgccctgaaggtgctggagtgccactgggagaagtacaacaacagatacaccgagagcagaagcttcagctacatcgagttccactgcggcgtggacggctacgtggacaacatcgaggacctgagaatcatcgagcccatcagcaactag

SEQ ID NO: 3809 - DNA, 1248 bp, synthetic construct
  misc_feature 1..1248: note = source = /note="Description of Artificial Sequence: Synthetic coding sequence"
  source 1..1248: mol_type = other DNA
atgagccccttcctgtacctggtgctgctggtgctgggcctgcacgccaccatccactgcgccagccccgagggcaaggtgaccgcctgccacagcagccagcccaacgccaccctgtacaagatgagcagcatcaacgccgacttcgccttcaacctgtacagaagattcaccgtggagacccccgacaagaacatcttcttcagccccgtgagcatcagcgccgccctggtgatgctgagcttcggcgcctgctgcagcacccagaccgagatcgtggagaccctgggcttcaacctgaccgacacccccatggtggagatccagcacggcttccagcacctgatctgcagcctgaacttccccaagaaggagctggagctgcagatcggcaacgccctgttcatcggcaagcacctgaagcccctggccaagttcctgaacgacgtgaagaccctgtacgagaccgaggtgttcagcaccgacttcagcaacatcagcgccgccaagcaggagatcaacagccacgtggagatgcagaccaagggcaaggtggtgggcctgatccaggacctgaagcccaacaccatcatggtgctggtgaactacatccacttcaaggcccagtgggccaaccccttcgaccccagcaagaccgaggacagcagcagcttcctgatcgacaagaccaccaccgtgcaggtgcccatgatgcaccagatggagcagtactaccacctggtggacatggagctgaactgcaccgtgctgcagatggactacagcaagaacgccctggccctgttcgtgctgcccaaggagggccagatggagagcgtggaggccgccatgagcagcaagaccctgaagaagtggaacagactgctgcagaagggctgggtggacctgttcgtgcccaagttcagcatcagcgccacctacgacctgggcgccaccctgctgaagatgggcatccagcacgcctacagcgagaacgccgacttcagcggcctgaccgaggacaacggcctgaagctgagcaacgccgcccacaaggccgtgctgcacatcggcgagaagggcaccgaggccgccgccgtgcccgaggtggagctgagcgaccagcccgagaacaccttcctgcaccccatcatccagatcgacagaagcttcatgctgctgatcctggagagaagcaccagaagcatcctgttcctgggcaaggtggtgaaccccaccgaggcctag

SEQ ID NO: 3810 - DNA, 285 bp, synthetic construct
  misc_feature 1..285: note = source = /note="Description of Artificial Sequence: Synthetic coding sequence"
  source 1..285: mol_type = other DNA
atgagaaccctggccatcctggccgccatcctgctggtggccctgcaggcccaggccgagcccctgcaggccagagccgacgaggtggccgccgcccccgagcagatcgccgccgacatccccgaggtggtggtgagcctggcctgggacgagagcctggcccccaagcaccccggcagcagaaagaacatggactgctactgcagaatccccgcctgcatcgccggcgagagaagatacggcacctgcatctaccagggcagactgtgggccttctgctgctag

SEQ ID NO: 3811 - DNA, 1062 bp, synthetic construct
  misc_feature 1..1062: note = source = /note="Description of Artificial Sequence: Synthetic coding sequence"
  source 1..1062: mol_type = other DNA
atgagactgcccagaagagccgccctgggcctgctgcccctgctgctgctgctgccccccgcccccgaggccgccaagaagcccaccccctgccacagatgcagaggcctggtggacaagttcaaccagggcatggtggacaccgccaagaagaacttcggcggcggcaacaccgcctgggaggagaagaccctgagcaagtacgagagcagcgagatcagactgctggagatcctggagggcctgtgcgagagcagcgacttcgagtgcaaccagatgctggaggcccaggaggagcacctggaggcctggtggctgcagctgaagagcgagtaccccgacctgttcgagtggttctgcgtgaagaccctgaaggtgtgctgcagccccggcacctacggccccgactgcctggcctgccagggcggcagccagagaccctgcagcggcaacggccactgcagcggcgacggcagcagacagggcgacggcagctgcagatgccacatgggctaccagggccccctgtgcaccgactgcatggacggctacttcagcagcctgagaaacgagacccacagcatctgcaccgcctgcgacgagagctgcaagacctgcagcggcctgaccaacagagactgcggcgagtgcgaggtgggctgggtgctggacgagggcgcctgcgtggacgtggacgagtgcgccgccgagccccccccctgcagcgccgcccagttctgcaagaacgccaacggcagctacacctgcgaggagtgcgacagcagctgcgtgggctgcaccggcgagggccccggcaactgcaaggagtgcatcagcggctacgccagagagcacggccagtgcgccgacgtggacgagtgcagcctggccgagaagacctgcgtgagaaagaacgagaactgctacaacacccccggcagctacgtgtgcgtgtgccccgacggcttcgaggagaccgaggacgcctgcgtgccccccgccgaggccgaggccaccgagggcgagagccccacccagctgcccagcagagaggacctgtag

SEQ ID NO: 3812 - DNA, 651 bp, synthetic construct
  misc_feature 1..651: note = source = /note="Description of Artificial Sequence: Synthetic coding sequence"
  source 1..651: mol_type = other DNA
atgaagctgaacctggtgcagatcttcttcatgctgctgatgctgctgctgggcctgggcatgggcctgggcctgggcctgcacatggccaccgccgtgctggaggagagcgaccagcccctgaacgagttctggagcagcgacagccaggacaaggccgaggccaccgaggagggcgacggcacccagaccaccgagaccctggtgctgagcaacaaggaggtggtgcagcccggctggcccgaggaccccatcctgggcgaggacgaggtgggcggcaacaagatgctgagagccagcgccctgttccagagcaacaaggactacctgagactggaccagaccgacagagagtgcaacgacatgatggcccacaagatgaaggagcccagccagagctgcatcgcccagtacgccttcatccacgaggacctgaacaccgtgaaggccgtgtgcaacagccccgtgatcgcctgcgagctgaagggcggcaagtgccacaagagcagcagacccttcgacctgaccctgtgcgagctgagccagcccgaccaggtgacccccaactgcaactacctgaccagcgtgatcaagaagcacatcatcatcacctgcaacgacatgaagagacagctgcccaccggccagtag

SEQ ID NO: 3813 - DNA, 222 bp, synthetic construct
  misc_feature 1..222: note = source = /note="Description of Artificial Sequence: Synthetic coding sequence"
  source 1..222: mol_type = other DNA
atgagaatcgccgtgctgctgttcgccatcttcttcttcatgagccaggtgctgcccgccagaggcaagttcaaggagatctgcgagagacccaacggcagctgcagagacttctgcctggagaccgagatccacgtgggcagatgcctgaacagccagccctgctgcctgcccctgggccaccagcccagaatcgagagcaccacccccaagaaggactag

SEQ ID NO: 3814 - DNA, 609 bp, synthetic construct
  misc_feature 1..609: note = source = /note="Description of Artificial Sequence: Synthetic coding sequence"
  source 1..609: mol_type = other DNA
atggagagaggcgccggcgccaagctgctgcccctgctgctgctgctgagagccaccggcttcacctgcgcccagaccgacggcagaaacggctacaccgccgtgatcgaggtgaccagcggcggcccctggggcgactgggcctggcccgagatgtgccccgacggcttcttcgccagcggcttcagcctgaaggtggagcccccccagggcatccccggcgacgacaccgccctgaacggcatcagactgcactgcgccagaggcaacgtgctgggcaacacccacgtggtggagagccagagcggcagctggggcgagtggagcgagcccctgtggtgcagaggcggcgcctacctggtggccttcagcctgagagtggaggcccccaccaccctgggcgacaacaccgccgccaacaacgtgagattcagatgcagcgacggcgaggagctgcagggccccggcctgagctggggcgacttcggcgactggagcgaccactgccccaagggcgcctgcggcctgcagaccaagatccagggccccagaggcctgggcgacgacaccgccctgaacgacgccagactgttctgctgcagaagctag

SEQ ID NO: 3815 - DNA, 759 bp, synthetic construct
  misc_feature 1..759: note = source = /note="Description of Artificial Sequence: Synthetic coding sequence"
  source 1..759: mol_type = other DNA
atgcagctgaccagatgctgcttcgtgttcctggtgcagggcagcctgtacctggtgatctgcggccaggacgacggcccccccggcagcgaggaccccgagagagacgaccacgagggccagcccagacccagagtgcccagaaagagaggccacatcagccccaagagcagacccatggccaacagcaccctgctgggcctgctggccccccccggcgaggcctggggcatcctgggccagccccccaacagacccaaccacagccccccccccagcgccaaggtgaagaagatcttcggctggggcgacttctacagcaacatcaagaccgtggccctgaacctgctggtgaccggcaagatcgtggaccacggcaacggcaccttcagcgtgcacttccagcacaacgccaccggccagggcaacatcagcatcagcctggtgccccccagcaaggccgtggagttccaccaggagcagcagatcttcatcgaggccaaggccagcaagatcttcaactgcagaatggagtgggagaaggtggagagaggcagaagaaccagcctgtgcacccacgaccccgccaagatctgcagcagagaccacgcccagagcagcgccacctggagctgcagccagcccttcaaggtggtgtgcgtgtacatcgccttctacagcaccgactacagactggtgcagaaggtgtgccccgactacaactaccacagcgacaccccctactaccccagcggctag

SEQ ID NO: 3816 - DNA, 555 bp, synthetic construct
  misc_feature 1..555: note = source = /note="Description of Artificial Sequence: Synthetic coding sequence"
  source 1..555: mol_type = other DNA
atgaagatcctggtggccttcctggtggtgctgaccatcttcggcatccagagccacggctacgaggtgttcaacatcatcagccccagcaacaacggcggcaacgtgcaggagaccgtgaccatcgacaacgagaagaacaccgccatcatcaacatccacgccggcagctgcagcagcaccaccatcttcgactacaagcacggctacatcgccagcagagtgctgagcagaagagcctgcttcatcctgaagatggaccaccagaacatcccccccctgaacaacctgcagtggtacatctacgagaagcaggccctggacaacatgttcagcagcaagtacacctgggtgaagtacaaccccctggagagcctgatcaaggacgtggactggttcctgctgggcagccccatcgagaagctgtgcaagcacatccccctgtacaagggcgaggtggtggagaacacccacaacgtgggcgccggcggctgcgccaaggccggcctgctgggcatcctgggcatcagcatctgcgccgacatccacgtgtag

SEQ ID NO: 3817 - DNA, 651 bp, synthetic construct
  misc_feature 1..651: note = source = /note="Description of Artificial Sequence: Synthetic coding sequence"
  source 1..651: mol_type = other DNA
atgggcgccgtgatgggcaccttcagcagcctgcagaccaagcagagaagacccagcaaggacaagatcgaggacgagctggagatgaccatggtgtgccacagacccgagggcctggagcagctggaggcccagaccaacttcaccaagagagagctgcaggtgctgtacagaggcttcaagaacgagtgccccagcggcgtggtgaacgaggacaccttcaagcagatctacgcccagttcttcccccacggcgacgccagcacctacgcccactacctgttcaacgccttcgacaccacccagaccggcagcgtgaagttcgaggacttcgtgaccgccctgagcatcctgctgagaggcaccgtgcacgagaagctgagatggaccttcaacctgtacgacatcaacaaggacggctacatcaacaaggaggagatgatggacatcgtgaaggccatctacgacatgatgggcaagtacacctaccccgtgctgaaggaggacacccccagacagcacgtggacgtgttcttccagaagatggacaagaacaaggacggcatcgtgaccctggacgagttcctggagagctgccaggaggacgacaacatcatgagaagcctgcagctgttccagaacgtgatgtag

SEQ ID NO: 3818 - DNA, 2736 bp, synthetic construct
  misc_feature 1..2736: note = source = /note="Description of Artificial Sequence: Synthetic coding sequence"
  source 1..2736: mol_type = other DNA
atggcccagctgttcctgcccctgctggccgccctggtgctggcccaggcccccgccgccctggccgacgtgctggagggcgacagcagcgaggacagagccttcagagtgagaatcgccggcgacgcccccctgcagggcgtgctgggcggcgccctgaccatcccctgccacgtgcactacctgagacccccccccagcagaagagccgtgctgggcagccccagagtgaagtggaccttcctgagcagaggcagagaggccgaggtgctggtggccagaggcgtgagagtgaaggtgaacgaggcctacagattcagagtggccctgcccgcctaccccgccagcctgaccgacgtgagcctggccctgagcgagctgagacccaacgacagcggcatctacagatgcgaggtgcagcacggcatcgacgacagcagcgacgccgtggaggtgaaggtgaagggcgtggtgttcctgtacagagagggcagcgccagatacgccttcagcttcagcggcgcccaggaggcctgcgccagaatcggcgcccacatcgccacccccgagcagctgtacgccgcctacctgggcggctacgagcagtgcgacgccggctggctgagcgaccagaccgtgagataccccatccagacccccagagaggcctgctacggcgacatggacggcttccccggcgtgagaaactacggcgtggtggaccccgacgacctgtacgacgtgtactgctacgccgaggacctgaacggcgagctgttcctgggcgacccccccgagaagctgaccctggaggaggccagagcctactgccaggagagaggcgccgagatcgccaccaccggccagctgtacgccgcctgggacggcggcctggaccactgcagccccggctggctggccgacggcagcgtgagataccccatcgtgacccccagccagagatgcggcggcggcctgcccggcgtgaagaccctgttcctgttccccaaccagaccggcttccccaacaagcacagcagattcaacgtgtactgcttcagagacagcgcccagcccagcgccatccccgaggccagcaaccccgccagcaaccccgccagcgacggcctggaggccatcgtgaccgtgaccgagaccctggaggagctgcagctgccccaggaggccaccgagagcgagagcagaggcgccatctacagcatccccatcatggaggacggcggcggcggcagcagcacccccgaggaccccgccgaggcccccagaaccctgctggagttcgagacccagagcatggtgccccccaccggcttcagcgaggaggagggcaaggccctggaggaggaggagaagtacgaggacgaggaggagaaggaggaggaggaggaggaggaggaggtggaggacgaggccctgtgggcctggcccagcgagctgagcagccccggccccgaggccagcctgcccaccgagcccgccgcccaggaggagagcctgagccaggcccccgccagagccgtgctgcagcccggcgccagccccctgcccgacggcgagagcgaggccagcagaccccccagagtgcacggcccccccaccgagaccctgcccacccccagagagagaaacctggccagccccagccccagcaccctggtggaggccagagaggtgggcgaggccaccggcggccccgagctgagcggcgtgcccagaggcgagagcgaggagaccggcagcagcgagggcgcccccagcctgctgcccgccaccagagcccccgagggcaccagagagctggaggcccccagcgaggacaacagcggcagaaccgcccccgccggcaccagcgtgcaggcccagcccgtgctgcccaccgacagcgccagcagaggcggcgtggccgtggtgcccgccagcggcgactgcgtgcccagcccctgccacaacggcggcacctgcctggaggaggaggagggcgtgagatgcctgtgcctgcccggctacggcggcgacctgtgcgacgtgggcctgagattctgcaaccccggctgggacgccttccagggcgcctgctacaagcacttcagcaccagaagaagctgggaggaggccgagacccagtgcagaatgtacggcgcccacctggccagcatcagcacccccgaggagcaggacttcatcaacaacagatacagagagtaccagtggatcggcctgaacgacagaaccatcgagggcgacttcctgtggagcgacggcgtgcccctgctgtacgagaactggaaccccggccagcccgacagctacttcctgagcggcgagaactgcgtggtgatggtgtggcacgaccagggccagtggagcgacgtgccctgcaactaccacctgagctacacctgcaagatgggcctggtgagctgcggccccccccccgagctgcccctggcccaggtgttcggcagacccagactgagatacgaggtggacaccgtgctgagatacagatgcagagagggcctggcccagagaaacctgcccctgatcagatgccaggagaacggcagatgggaggccccccagatcagctgcgtgcccagaagacccgccagagccctgcaccccgaggaggaccccgagggcagacagggcagactgctgggcagatggaaggccctgctgatcccccccagcagccccatgcccggcccctag

SEQ ID NO: 3819 - DNA, 852 bp, synthetic construct
  misc_feature 1..852: note = source = /note="Description of Artificial Sequence: Synthetic coding sequence"
  source 1..852: mol_type = other DNA
atgggcctgggcctgagaggctggggcagacccctgctgaccgtggccaccgccctgatgctgcccgtgaagccccccgccggcagctggggcgcccagatcatcggcggccacgaggtgaccccccacagcagaccctacatggccagcgtgagattcggcggccagcaccactgcggcggcttcctgctgagagccagatgggtggtgagcgccgcccactgcttcagccacagagacctgagaaccggcctggtggtgctgggcgcccacgtgctgagcaccgccgagcccacccagcaggtgttcggcatcgacgccctgaccacccaccccgactaccaccccatgacccacgccaacgacatctgcctgctgagactgaacggcagcgccgtgctgggccccgccgtgggcctgctgagaccccccggcagaagagccagaccccccaccgccggcaccagatgcagagtggccggctggggcttcgtgagcgacttcgaggagctgccccccggcctgatggaggccaaggtgagagtgctggaccccgacgtgtgcaacagcagctggaagggccacctgaccctgaccatgctgtgcaccagaagcggcgacagccacagaagaggcttctgcagcgccgacagcggcggccccctggtgtgcagaaacagagcccacggcctggtgagcttcagcggcctgtggtgcggcgaccccaagacccccgacgtgtacacccaggtgagcgccttcgtggcctggatctgggacgtggtgagaagaagcagcccccagcccggccccctgcccggcaccaccagaccccccggcgaggccgcctag

SEQ ID NO: 3820 - DNA, 1209 bp, synthetic construct
  misc_feature 1..1209: note = source = /note="Description of Artificial Sequence: Synthetic coding sequence"
  source 1..1209: mol_type = other DNA
atgatggtggccctgagaggcgccagcgccctgctggtgctgttcctggccgccttcctgccccccccccagtgcacccaggaccccgccatggtgcactacatctaccagagattcagagtgctggagcagggcctggagaagtgcacccaggccaccagagcctacatccaggagttccaggagttcagcaagaacatcagcgtgatgctgggcagatgccagacctacaccagcgagtacaagagcgccgtgggcaacctggccctgagagtggagagagcccagagagagatcgactacatccagtacctgagagaggccgacgagtgcatcgagagcgaggacaagaccctggccgagatgctgctgcaggaggccgaggaggagaagaagatcagaaccctgctgaacgccagctgcgacaacatgctgatgggcatcaagagcctgaagatcgtgaagaagatgatggacacccacggcagctggatgaaggacgccgtgtacaacagccccaaggtgtacctgctgatcggcagcagaaacaacaccgtgtgggagttcgccaacatcagagccttcatggaggacaacaccaagcccgcccccagaaagcagatcctgaccctgagctggcagggcaccggccaggtgatctacaagggcttcctgttcttccacaaccaggccaccagcaacgagatcatcaagtacaacctgcagaagagaaccgtggaggacagaatgctgctgcccggcggcgtgggcagagccctggtgtaccagcacagccccagcacctacatcgacctggccgtggacgagcacggcctgtgggccatccacagcggccccggcacccacagccacctggtgctgaccaagatcgagcccggcaccctgggcgtggagcacagctgggacaccccctgcagaagccaggacgccgaggccagcttcctgctgtgcggcgtgctgtacgtggtgtacagcaccggcggccagggcccccacagaatcacctgcatctacgaccccctgggcaccatcagcgaggaggacctgcccaacctgttcttccccaagagacccagaagccacagcatgatccactacaaccccagagacaagcagctgtacgcctggaacgagggcaaccagatcatctacaagctgcagaccaagagaaagctgcccctgaagtag

SEQ ID NO: 3821 - DNA, 1221 bp, synthetic construct
  misc_feature 1..1221: note = source = /note="Description of Artificial Sequence: Synthetic coding sequence"
  source 1..1221: mol_type = other DNA
atgcagctgttcctgctgctgtgcctggtgctgctgagcccccagggcgccagcctgcacagacaccaccccagagagatgaagaagagagtggaggacctgcacgtgggcgccaccgtggcccccagcagcagaagagacttcaccttcgacctgtacagagccctggccagcgccgcccccagccagagcatcttcttcagccccgtgagcatcagcatgagcctggccatgctgagcctgggcgccggcagcagcaccaagatgcagatcctggagggcctgggcctgaacctgcagaagagcagcgagaaggagctgcacagaggcttccagcagctgctgcaggagctgaaccagcccagagacggcttccagctgagcctgggcaacgccctgttcaccgacctggtggtggacctgcaggacaccttcgtgagcgccatgaagaccctgtacctggccgacaccttccccaccaacttcagagacagcgccggcgccatgaagcagatcaacgactacgtggccaagcagaccaagggcaagatcgtggacctgctgaagaacctggacagcaacgccgtggtgatcatggtgaactacatcttcttcaaggccaagtgggagaccagcttcaaccacaagggcacccaggagcaggacttctacgtgaccagcgagaccgtggtgagagtgcccatgatgagcagagaggaccagtaccactacctgctggacagaaacctgagctgcagagtggtgggcgtgccctaccagggcaacgccaccgccctgttcatcctgcccagcgagggcaagatgcagcaggtggagaacggcctgagcgagaagaccctgagaaagtggctgaagatgttcaagaagagacagctggagctgtacctgcccaagttcagcatcgagggcagctaccagctggagaaggtgctgcccagcctgggcatcagcaacgtgttcaccagccacgccgacctgagcggcatcagcaaccacagcaacatccaggtgagcgagatggtgcacaaggccgtggtggaggtggacgagagcggcaccagagccgccgccgccaccggcaccatcttcaccttcagaagcgccagactgaacagccagagactggtgttcaacagacccttcctgatgttcatcgtggacaacaacatcctgttcctgggcaaggtgaacagaccctag

SEQ ID NO: 3822 - DNA, 1626 bp, synthetic construct
  misc_feature 1..1626: note = source = /note="Description of Artificial Sequence: Synthetic coding sequence"
  source 1..1626: mol_type = other DNA
atgagactgagccccttccacctgcagctggagttccacatgaaggagaagagagaggacctgcagatcagctggagcttcatcagcgtgcccgagatggccgtgaacatccagcccaaggccctgggcgaggaccaggtggccgagaccagcgccatgagcgacgtgctgaaggacatcctgaagcacctggccggcagcgccagccccagcgtggtgctgatcaccaagcccaccaccgtgaaggaggcccagaacctgcagtgcgccgccagcaccgcccaggagagctgcccccccaagccccccagagcccacgagctgaagctgctggtgagaaacatccacgtgctgctgctgagcgagcccggcgccagcggccacatcaacgccgtgtgcgtggtgcagctgaacgaccccgtgcagagattcagcagcaccctgaccaagaacacccccgacctgatgtgggaggaggagttcaccttcgagctgaacgccaagagcaaggagctgcacctgcagatcagcgaggccggcagaagcagcgagggcctgctggccaccgccaccgtgcccctggacctgttcaagaagcagcccagcggcccccagagcttcaccctgaccagcggcagcgcctgcggcagcagcgtgctgggcagcgtgaccgccgagttcagctacatggagcccggcgagctgaagagctggcccatccccccccccgtgcccgccgccaagatcgagaaggacagaaccgtgatgccctgcggcaccgtggtgaccaccgtgaccgccgtgaagaccaagcccagagtggacgtgggcagagccagccccctgagcagcgacagccccgtgaagacccccatcaaggtgaaggtgatcgagaaggacatcagcgtgcaggccatcgcctgcagaagcgcccccgtgagcaagaccctgagcagcagcgacaccgagctgctggtgctgaacggcagcgaccccgtggccgaggtggccatcagacagctgagcgagagcagcaagctgaagctgaagagccccagaaagaagagcaccatcatcatcagcggcatcagcaagaccagcctgagccaggaccacgacgccgccctgatgcagggctacaccgccagcgtggacagcacccaccaggaggacgcccccagccaccccgagagagccgccgccagcgccccccccgaggaggccgagagcgcccaggccagcctggcccccaagccccaggaggacgagctggacagctgggacctggagaaggagccccaggccgccgcctggagcagccaggtgctgctggaccccgacggcgacgagctgagcgagagcagcatgagcgtgctggagcccggcaccgccaagaagcacaagggcggcatcctgagaaagggcgccaagctgttcttcagaagaagacaccagcagaaggaccccggcatgagccagagccacaacgacctggtgttcctggagcagcccgagggcagcagaagaaagggcatcaccctgaccagaatcctgaacaagaagctgctgagcagacacagaaacaagaacaccatgaacggcgcccccgtggagccctgcacctag

SEQ ID NO: 3823 - DNA, 993 bp, synthetic construct
  misc_feature 1..993: note = source = /note="Description of Artificial Sequence: Synthetic coding sequence"
  source 1..993: mol_type = other DNA
atggccttcctgcccagctgggtgtgcgtgctggtgggcagcttcagcgccagcctggccggcaccagcaacctgagcgagaccgagccccccctgtggaaggagagccccggccagctgagcgactacagagtggagaacagcatgtacatcatcaacccctgggtgtacctggagagaatgggcatgtacaagatcatcctgaaccagaccgccagatacttcgccaagttcgcccccgacaacgagcagaacatcctgtggggcctgcccctgcagtacggctggcagtacagaaccggcagactggccgaccccaccagaagaaccaactgcggctacgagagcggcgaccacatgtgcatcagcgtggacagctggtgggccgacctgaactacttcctgagcagcctgcccttcctggccgccgtggacagcggcgtgatgggcatcagcagcgaccaggtgagactgctgcccccccccaagaacgagagaaagttctgctacgacgtgagcagctgcagaagcagcttccccgagaccatgaacaagtggaacaccttctaccagtacctgcagagccccttcagcaagttcgacgacctgctgaagtacctgtgggccgcccacaccagcaccctggccgacaacatcaagagcttcgaggacagatacgactactacagcaaggccgaggcccacttcgagagaagctgggtgctggccgtggaccacctggccgccgtgctgttccccaccaccctgatcagaagctacaagttccagaagggcatgccccccagaatcctgctgaacaccgacgtggcccccttcatcagcgacttcaccgccttccagaacgtggtgctggtgctgctgaacatgctggacaacgtggacaagagcatcggctacctgtgcaccgagaagagcaacgtgtacagagaccacagcgagagcagcagcagaagctacggcaacaacagctag

SEQ ID NO: 3824 - DNA, 813 bp, synthetic construct
  misc_feature 1..813: note = source = /note="Description of Artificial Sequence: Synthetic coding sequence"
  source 1..813: mol_type = other DNA
atggacagcctggagtggaactgggccctggtgtacgagctgagcggcgagcaccacgacgaggagtggagcgtgaagacctaccaggaggtggcccagaagttcgtggagacccaccccgagttcatcggcatcaagatcatctacagcgaccacagaagcaaggacgtggccgtgatcgccgagagcatcagaatggccatgggcctgagaatcaagttccccaccgtggtggccggcttcgacctggtgggccacgaggacaccggccacagcctgcacgactacaaggaggccctgatgatccccgccaaggacggcgtgaagctgccctacttcttccacgccggcgagaccgactggcagggcaccagcatcgacagaaacatcctggacgccctgatgctgaacaccaccagaatcggccacggcttcgccctgagcaagcaccccgccgtgagaacctacagctggaagaaggacatccccatcgaggtgtgccccatcagcaaccaggtgctgaagctggtgagcgacctgagaaaccaccccgtggccaccctgatggccaccggccaccccatggtgatcagcagcgacgaccccgccatgttcggcgccaagggcctgagctacgacttctacgaggtgttcatgggcatcggcggcatgaaggccgacctgagaaccctgaagcagctggccatgaacagcatcaagtacagcaccctgctggagagcgagaagaacaccttcatggagatctggaagaagagatgggacaagttcatcgccgacgtggccaccaagtag

SEQ ID NO: 3825 - DNA, 939 bp, synthetic construct
  misc_feature 1..939: note = source = /note="Description of Artificial Sequence: Synthetic coding sequence"
  source 1..939: mol_type = other DNA
atgggcgtgatggccatgctgatgctgcccctgctgctgctgggcatcagcggcctgctgttcatctaccaggaggtgagcagactgtggagcaagagcgccgtgcagaacaaggtggtggtgatcaccgacgccatcagcggcctgggcaaggagtgcgccagagtgttccacaccggcggcgccagactggtgctgtgcggcaagaactgggagagactggagaacctgtacgacgccctgatcagcgtggccgaccccagcaagcagaccttcacccccaagctggtgctgctggacctgagcgacatcagctgcgtgcccgacgtggccaaggaggtgctggactgctacggctgcgtggacatcctgatcaacaacgccagcgtgaaggtgaagggccccgcccacaagatcagcctggagctggacaagaagatcatggacgccaactacttcggccccatcaccctgaccaaggccctgctgcccaacatgatcagcagaagaaccggccagatcgtgctggtgaacaacatccagggcaagttcggcatccccttcagaaccacctacgccgccagcaagcacgccgccctgggcttcttcgactgcctgagagccgaggtggaggagtacgacgtggtgatcagcaccgtgagccccaccttcatcagaagctaccacgtgtaccccgagcagggcaactgggaggccagcatctggaagttcttcttcagaaagctgacctacggcgtgcaccccgtggaggtggccgaggaggtgatgagaaccgtgagaagaaagaagcaggaggtgttcatggccaaccccatccccaaggccgccgtgtacgtgagaaccttcttccccgagttcttcttcgccgtggtggcctgcggcgtgaaggagaagctgaacgtgcccgaggagggctag

SEQ ID NO: 3826 - DNA, 738 bp, synthetic construct
  misc_feature 1..738: note = source = /note="Description of Artificial Sequence: Synthetic coding sequence"
  source 1..738: mol_type = other DNA
atggccagcaccgccctgctggccctgtgcagcaccggcgccttcagcggcctggccgtggaggccggcgccggcgtgtgccacgccacccccatctacgccggccacagctggcaccaggccaccttcagactgaacgtggccggcagcaccctgagcagatacctgagagacctgctggtggccgccaaccccgacctgctgcagcaggccctgcccagaaaggccatcacccacctgaagaagagaagctgctacgtgagcctggacttcgagggcgacctgagagaccccgccagacaccaccccgccagcttcagcgtgggcaacggctgctgcgtgtgcctgagcagcgagagattcagatgccccgagcccatcttccagcccggcctgctgggccaggccgagcagggcctgcccgccctggccttcagagccctgcagaagatgcccaagaccctgagaaccagactggccgacaccgtggtgctggccggcggcagcaccctgttccccggcttcgccgagagactggacaaggagctggaggcccagtgcagaagacacggctacgccgccctgagaccccacctggtggccaagcacggcagaggcatggccgtgtggaccggcggcagcatggtggccagcctgcacagcttccagagaagatggatcaccagagccatgtaccaggagtgcggcagcagactgctgtacgacgtgttcaactag

SEQ ID NO: 3827 - DNA, 909 bp, synthetic construct
  misc_feature 1..909: note = source = /note="Description of Artificial Sequence: Synthetic coding sequence"
  source 1..909: mol_type = other DNA
atgagaagatgggcctgggccgccgtggtggtgctgctgggcccccagctggtgctgctgggcggcgtgggcgccagaagagaggcccagagaacccagcagcccggccagagagccgacccccccaacgccaccgccagcgccagcagcagagagggcctgcccgaggcccccaagcccagccaggccagcggccccgagttcagcgacgcccacatgacctggctgaacttcgtgagaagacccgacgacggcgccctgagaaagagatgcggcagcagagacaagaagcccagagacctgttcggcccccccggcccccccggcgccgaggtgaccgccgagaccctgctgcacgagttccaggagctgctgaaggaggccaccgagagaagattcagcggcctgctggaccccctgctgccccagggcgccggcctgagactggtgggcgaggccttccactgcagactgcagggccccagaagagtggacaagagaaccctggtggagctgcacggcttccaggcccccgccgcccagggcgccttcctgagaggcagcggcctgagcctggccagcggcagattcaccgcccccgtgagcggcatcttccagttcagcgccagcctgcacgtggaccacagcgagctgcagggcaaggccagactgagagccagagacgtggtgtgcgtgctgatctgcatcgagagcctgtgccagagacacacctgcctggaggccgtgagcggcctggagagcaacagcagagtgttcaccctgcaggtgcagggcctgctgcagctgcaggccggccagtacgccagcgtgttcgtggacaacggcagcggcgccgtgctgaccatccaggccggcagcagcttcagcggcctgctgctgggcacctag

SEQ ID NO: 3828 - DNA, 1416 bp, synthetic construct
  misc_feature 1..1416: note = source = /note="Description of Artificial Sequence: Synthetic coding sequence"
  source 1..1416: mol_type = other DNA
atggacagcgcccccctgttccccagaccccacctgttccagaacctgctgctgttcctgtgggccctgctgaactgcggcctgggcgtgagcgcccagggccccggcgagtggaccccctgggtgagctggaccagatgcagcagcagctgcggcagaggcgtgagcgtgagaagcagaagatgcctgagactgcccggcgaggagccctgctggggcgacagccacgagtacagactgtgccagctgcccgactgcccccccggcgccgtgcccttcagagacctgcagtgcgccctgtacaacggcagacccgtgctgggcacccagaagacctaccagtgggtgcccttccacggcgcccccaaccagtgcgacctgaactgcctggccgagggccacgccttctaccacagcttcggcagagtgctggacggcaccgcctgcagccccggcgcccagggcgtgtgcgtggccggcagatgcctgagcgccggctgcgacggcctgctgggcagcggcgccctggaggacagatgcggcagatgcggcggcgccaacgacagctgcctgttcgtgcagagagtgttcagagacgccggcgccttcgccggctactggaacgtgaccctgatccccgagggcgccagacacatcagagtggagcacagaagcagaaaccacctggccctgatgggcggcgacggcagatacgtgctgaacggccactgggtggtgagcccccccggcacctacgaggccgccggcacccacgtggtgtacaccagagacaccggcccccaggagaccctgcaggccgccggccccaccagccacgacctgctgctgcaggtgctgctgcaggagcccaaccccggcatcgagttcgagttctggctgcccagagagagatacagccccttccaggccagagtgcaggccctgggctggcccctgagacagccccagcccagaggcgtggagccccagccccccgccgcccccgccgtgacccccgcccagacccccaccctggcccccgacccctgccccccctgccccgacaccagaggcagagcccacagactgctgcactactgcggcagcgacttcgtgttccaggccagagtgctgggccaccaccaccaggcccaggagaccagatacgaggtgagaatccagctggtgtacaagaacagaagccccctgagagccagagagtacgtgtgggcccccggccactgcccctgccccatgctggccccccacagagactacctgatggccgtgcagagactggtgagccccgacggcacccaggaccagctgctgctgccccacgccggctacgccagaccctggagccccgccgaggacagcagaatcagactgaccgccagaagatgccccggctag

SEQ ID NO: 3829 - DNA, 222 bp, synthetic construct
  misc_feature 1..222: note = source = /note="Description of Artificial Sequence: Synthetic coding sequence"
  source 1..222: mol_type = other DNA
atggccccccagaccctgctgctggtgctggtgctgtgcgtgctgctgctgcaggcccagggcggctacagagacaagatgagaatgcagagaatcaaggtgtgcgagaagagacccagcatcgacctgtgcatccaccactgcagctacttccagaagtgcgagaccaacaagatctgctgcagcgccttctgcggcaacatctgcatgagcatcctgtag

SEQ ID NO: 3830 - DNA, 2349 bp, synthetic construct
  misc_feature 1..2349: note = source = /note="Description of Artificial Sequence: Synthetic coding sequence"
  source 1..2349: mol_type = other DNA
atggccagagccagagccggcgccctgctggccctgtgggtgctgggcgccgccgcccacccccagtgcctggacttcagaccccccttcagacccacccagcccctgagactgtgcgcccagtacagcgacttcggctgctgcgacgagggcagagacgccgagctgaccagaagattctgggccctggccagcagagtggacgccgccgagtgggccgcctgcgccggctacgccagagacctgctgtgccaggagtgcagcccctacgccgcccacctgtacgacgccgaggaccccttcacccccctgagaaccgtgcccggcctgtgccaggactactgcctggacatgtggcacaagtgcagaggcctgttcagacacctgagcaccgaccaggagctgtgggccctggagggcaacctggccagattctgcagatacctgagcctggacgacaccgactactgcttcccctacctgctggtgaacaagaacctgaacagcaacctgggccacgtggtggccgacgccaagggctgcctgcagctgtgcctggaggaggtggccaacggcctgagaaaccccgtggccatggtgcacgccagagacggcacccacagattcttcgtggccgagcaggtgggcctggtgtgggcctacctgcccgacagaagcagactgggcaagcccttcctgaacatcagcagagtggtgctgaccagcccctgggagggcgacgagagaggcttcctgggcatcgccttccaccccagcttccagcacaacagaagactgtacgtgtactacagcgtgggcatcagaagcagcgagtggatcagaatcagcgagttcagagtgagcgaggacgacgagaacgccgtggaccacagcagcgagagaatcatcctggaggtgaaggagcccgccagcaaccacaacggcggccagctgctgttcggcgacgacggctacctgtacatcttcaccggcgacggcggcatggccggcgaccccttcggcaccttcggcaacgcccagaacaagagcgccctgctgggcaaggtgctgagaatcgacgtggacagaaaggagagaggcctgccctacggcatcccccccgacaaccccttcgtgggcgaccccgccgcccagcccgaggtgtacgccctgggcgtgagaaacatgtggagatgcagcttcgacagaggcgaccccagcagcggcaccggcagaggcagactgttctgcggcgacgtgggccagaacaagttcgaggaggtggacgtggtggagagaggcggcaactacggctggagagccagagagggcttcgagtgctacgacagaagcctgtgcgccaacaccagcctgaacgacctgctgcccatcttcgcctacccccacaccgtgggcaagagcgtgaccggcggctacgtgtacagaggctgcgagtaccccaacctgaacggcctgtacatcttcggcgacttcatgagcggcagactgatgagcctgcaggagaaccccggcaccggccagtggcagtacagcgagatctgcatgggccacggccagacctgcgagttccccggcctgatcaacaactactacccctacatcatcagcttcggcgaggacgaggccggcgagctgtacttcatgagcaccggcgagcccagcgccaccgcccccagaggcgtggtgtacaagatcatcgacgccagcagaagagccccccccggcaagtgccagatccagcccgcccaggtgaagatcagaagcagactgatccccttcgtgcccaaggagaagttcatccccaagaccagaagcacccccagacccaccgccagagcccccaccagagcccccagaagaggcagacccaccgccgccccccccgcccccacccccagacccgccagacccacccagcagcccggcagcagaagaggcggcggcagaagaagaggcagactgaacagcgccagcagagccttcagagacggcgaggtgagactggtgagacccgccggcctgagcagcggcagcggcagagtggaggtgttcgtgggcggcagatggggcaccgtgtgcgacgacagctggaacatcagcggcgccgccgtggtgtgcagacagctgggcttcgcctacgccgtgagagccgtgaagagagccgagttcggccagggcggcagcctgcccatcctgctggacgacgtgagatgcgccggctgggagagaaacctgctggagtgccagcacaacggcgtgggcacccacaactgcgagcacgacgaggacgccggcgtggtgtgcagccaccagaaccccgacctgtag

SEQ ID NO: 3831 - DNA, 1317 bp, synthetic construct
  misc_feature 1..1317: note = source = /note="Description of Artificial Sequence: Synthetic coding sequence"
  source 1..1317: mol_type = other DNA
atgcaccccctgcccggctactggagctgctactgcctgctgctgctgttcagcctgggcgtgcagggcagcctgggcgcccccagcgccgcccccgagcaggtgcacctgagctaccccggcgagcccggcagcatgaccgtgacctggaccacctgggtgcccaccagaagcgaggtgcagttcggcctgcagcccagcggccccctgcccctgagagcccagggcaccttcgtgcccttcgtggacggcggcatcctgagaagaaagctgtacatccacagagtgaccctgagaaagctgctgcccggcgtgcagtacgtgtacagatgcggcagcgcccagggctggagcagaagattcagattcagagccctgaagaacggcgcccactggagccccagactggccgtgttcggcgacctgggcgccgacaaccccaaggccgtgcccagactgagaagagacacccagcagggcatgtacgacgccgtgctgcacgtgggcgacttcgcctacaacctggaccaggacaacgccagagtgggcgacagattcatgagactgatcgagcccgtggccgccagcctgccctacatgacctgccccggcaaccacgaggagagatacaacttcagcaactacaaggccagattcagcatgcccggcgacaacgagggcctgtggtacagctgggacctgggccccgcccacatcatcagcttcagcaccgaggtgtacttcttcctgcactacggcagacacctggtgcagagacagttcagatggctggagagcgacctgcagaaggccaacaagaacagagccgccagaccctggatcatcaccatgggccacagacccatgtactgcagcaacgccgacctggacgactgcaccagacacgagagcaaggtgagaaagggcctgcagggcaagctgtacggcctggaggacctgttctacaagtacggcgtggacctgcagctgtgggcccacgagcacagctacgagagactgtggcccatctacaactaccaggtgttcaacggcagcagagagatgccctacaccaaccccagaggccccgtgcacatcatcaccggcagcgccggctgcgaggagagactgacccccttcgccgtgttccccagaccctggagcgccgtgagagtgaaggagtacggctacaccagactgcacatcctgaacggcacccacatccacatccagcaggtgagcgacgaccaggacggcaagatcgtggacgacgtgtgggtggtgagacccctgttcggcagaagaatgtacctgtag

SEQ ID NO: 3832 - DNA, 411 bp, synthetic construct
  misc_feature 1..411: note = source = /note="Description of Artificial Sequence: Synthetic coding sequence"
  source 1..411: mol_type = other DNA
atggccagaaccaagcagaccgccagaaagagcaccggcggcaaggcccccagaaagcagctggccaccaaggccgccagaaagagcgcccccgccaccggcggcgtgaagaagccccacagatacagacccggcaccgtggccctgagagagatcagaagataccagaagagcaccgagctgctgatcagaaagctgcccttccagagactggtgagagagatcgcccaggacttcaagaccgacctgagattccagagcagcgccgtgatggccctgcaggaggccagcgaggcctacctggtgggcctgttcgaggacaccaacctgtgcgccatccacgccaagagagtgaccatcatgcccaaggacatccagctggccagaagaatcagaggcgagagagcctag

SEQ ID NO: 3833 - DNA, 1209 bp, synthetic construct
  misc_feature 1..1209: note = source = /note="Description of Artificial Sequence: Synthetic coding sequence"
  source 1..1209: mol_type = other DNA
atggccgccagacccggccccctgtggctgctgggcctgaccctgtgcgccctgggcggcggcggccccggcctgagacccccccccggctgcccccagagaagactgggcgccagagagagaagagacgtgcagagagagatcctggccgtgctgggcctgcccggcagacccagacccagagccccccccgccgccagcagactgcccgccagcgcccccctgttcatgctggacctgtaccacgccatggccggcgacgacgacgaggacggcgcccccgccgagcagagactgggcagagccgacctggtgatgagcttcgtgaacatggtggagagagacagagccctgggccaccaggagccccactggaaggagttcagattcgacctgacccagatccccgccggcgaggccgtgaccgccgccgagttcagaatctacaaggtgcccagcatccacctgctgaacagaaccctgcacgtgagcatgttccaggtggtgcaggagcagagcaacagagagagcgacctgttcttcctggacctgcagaccctgagagccggcgacgagggctggctggtgctggacgtgaccgccgccagcgactgctggctgctgaagagacacaaggacctgggcctgagactgtacgtggagaccgaggacggccacagcgtggaccccggcctggccggcctgctgggccagagagcccccagaagccagcagcccttcgtggtgaccttcttcagagccagccccagccccatcagaacccccagagccgtgagacccctgagaagaagacagcccaagaagagcaacgagctgccccaggccaacagactgcccggcatcttcgacgacgtgagaggcagccacggcagacaggtgtgcagaagacacgagctgtacgtgagcttccaggacctgggctggctggactgggtgatcgccccccagggctacagcgcctactactgcgagggcgagtgcagcttccccctggacagctgcatgaacgccaccaaccacgccatcctgcagagcctggtgcacctgatgaagcccaacgccgtgcccaaggcctgctgcgcccccaccaagctgagcgccaccagcgtgctgtactacgacagcagcaacaacgtgatcctgagaaagcacagaaacatggtggtgaaggcctgcggctgccactag

SEQ ID NO: 3834 - DNA, 957 bp, synthetic construct
  misc_feature 1..957: note = source = /note="Description of Artificial Sequence: Synthetic coding sequence"
  source 1..957: mol_type = other DNA
atggccgccgccgccctgccccccagacccctgctgctgctgcccctggtgctgctgctgagcggcagacccaccagagccgacagcaaggtgttcggcgacctggaccaggtgagaatgaccagcgagggcagcgactgcagatgcaagtgcatcatgagacccctgagcaaggacgcctgcagcagagtgagaagcggcagagccagagtggaggacttctacaccgtggagaccgtgagcagcggcaccgactgcagatgcagctgcaccgccccccccagcagcctgaacccctgcgagaacgagtggaagatggagaagctgaagaagcaggcccccgagctgctgaagagcatcaaggccaacctgagcagagagaacgaggtggtgaaggacagcgtgagacacctgagcgagcagctgagacactacgagaaccacagcgccatcatgctgggcatcaagaaggagctgagcagactgggcctgcagctgctgcagaaggacgccgccgccgcccccgccacccccgccaccggcaccggcagcaaggcccaggacaccgccagaggcaagggcaaggacatcagcaagtacggcagcgtgcagaagagcttcgccgacagaggcctgcccaagccccccaaggagaagctgctgcaggtggagaagctgagaaaggagagcggcaagggcagcttcctgcagcccaccgccaagcccagagccctggcccagcagcaggccgtgatcagaggcttcacctactacaaggccggcaagcaggaggtgaccgaggccgtggccgacaacaccctgcagggcaccagctggctggagcagctgccccccaaggtggagggcagaagcaacagcgccgagcccaacagcgccgagcaggacgaggccgagcccagaagcagcgagagagtggacctggccagcggcacctag

SEQ ID NO: 3835 - DNA, 402 bp, synthetic construct
  misc_feature 1..402: note = source = /note="Description of Artificial Sequence: Synthetic coding sequence"
  source 1..402: mol_type = other DNA
atggccctgggcgtgcccatcagcgtgtacctgctgttcaacgccatgaccgccctgaccgaggaggccgccgtgaccgtgaccccccccatcaccgcccagcaggccgacaacatcgagggccccatcgccctgaagttcagccacctgtgcctggaggaccacaacagctactgcatcaacggcgcctgcgccttccaccacgagctggagaaggccatctgcagatgcttcaccggctacaccggcgagagatgcgagcacctgaccctgaccagctacgccgtggacagctacgagaagtacatcgccatcggcatcggcgtgggcctgctgctgagcggcttcctggtgatcttctactgctacatcagaaagagatacgagaaggacaagatctag

SEQ ID NO: 3836 - DNA, 651 bp, synthetic construct
  misc_feature 1..651: note = source = /note="Description of Artificial Sequence: Synthetic coding sequence"
  source 1..651: mol_type = other DNA
atgagcagcgaggccgagacccagcagccccccgccgccccccccgccgcccccgccctgagcgccgccgacaccaagcccggcaccaccggcagcggcgccggcagcggcggccccggcggcctgaccagcgccgcccccgccggcggcgacaagaaggtgatcgccaccaaggtgctgggcaccgtgaagtggttcaacgtgagaaacggctacggcttcatcaacagaaacgacaccaaggaggacgtgttcgtgcaccagggcgccgaggccgccaacgtgaccggccccggcggcgtgcccgtgcagggcagcaagtacgccgccgacagaaaccactacagaagataccccagaagaagaggcccccccagaaactaccagcagaactaccagaacagcgagagcggcgagaagaacgagggcagcgagagcgcccccgagggccaggcccagcagagaagaccctacagaagaagaagattccccccctactacatgagaagaccctacggcagaagaccccagtacagcaacccccccgtgcagggcgaggtgatggagggcgccgacaaccagggcgccggcgagcagggcagacccgtgagacagaacatgtacagaggctacagacccagattcagatag

SEQ ID NO: 3837 - DNA, 756 bp, synthetic construct
  misc_feature 1..756: note = source = /note="Description of Artificial Sequence: Synthetic coding sequence"
  source 1..756: mol_type = other DNA
aacgactggagcgccgaccagctgtacctggagaccaccggcaagagcagaaccctgcagagcggcctggccctgctgtacggcttcctgcccgacttcgactggaagaagatctacttcagacaccagcccagcgccctgttctgcagcggcagctgctactgccccgtgagaaaccagtacctggagaaggagcagagaagacagtacctgctgagactgaagaacagccagctggagaagacctacggcgagatggccaagatcgtggacgtgcccaccaagcagctgagagccgccaaccccatcgacagcatgctgtgccacttctgccacaacgtgagcttcccctgcaccagaaacggctgcgtggacatggagcacttcaaggtgatcaagacccaccagatcgaggacgagagagagagaagagagaagaagctgtacttcggctacagcctgctgggcgcccaccccatcctgaaccagaccatcggcagaatgcagagagccaccgagggcagaaaggaggagctgttcgccctgtacagcgcccacgacgtgaccctgagccccgtgctgagcgccctgggcctgagcgaggccagattccccagattcgccgccagagtgaacatccccagcggcttcttcaccatggccagcatgagccacagcacccccctgagcgccaagaccaccaccagcgtgctgcccagcccctgcgccagactgaagacctggagcgccctgtag

SEQ ID NO: 3838 - DNA, 576 bp, synthetic construct
  misc_feature 1..576: note = source = /note="Description of Artificial Sequence: Synthetic coding sequence"
  source 1..576: mol_type = other DNA
atggccgcccccagaggcagagccgccccctggaccaccgccctgctgctgctgctggccagccaggtgctgagccccggcagctgcgccgacgaggaggaggtgcccgaggagtgggtgctgctgcacgtggtgcagggccagatcggcgccggcaactacagctacctgagactgaaccacgagggcaagatcgtgctgagaatgagaagcctgaagggcgacgccgacctgtacgtgagcgccagcagcctgcaccccagcttcgacgactacgagctgcagagcgccacctgcggccccgacgccgtgagcatccccgcccacttcagaagacccgtgggcatcggcgtgtacggccaccccagccacctggagagcgagttcgagatgaaggtgtactacgacggcaccgtggagcagcaccccttcggcgaggccgcctaccccgccgacggcgccgacgccggccagaagcacgccggcgcccccgaggacgccagccaggaggaggagagcgtgctgtggaccatcctgatcagcatcctgaagctggtgctggagatcctgttctag

SEQ ID NO: 3839 - DNA, 2301 bp, synthetic construct
  misc_feature 1..2301: note = source = /note="Description of Artificial Sequence: Synthetic coding sequence"
  source 1..2301: mol_type = other DNA
atgggcagaagaagactgctggtgtggctgtgcgccgtggccgccctgctgagcggcgcccaggccagaggcacccccctgctggccagacccgccccccccggcgccagcagatacagcctgtacaccaccggctggagacccagactgagacccggcccccacaaggccctgtgcgcctacgtggtgcacagaaacgtgacctgcatcctgcaggagggcgccgagagctacgtgaaggccgagtacagacagtgcagatggggccccaagtgccccggcaccgtgacctacagaaccgtgctgagacccaagtacaaggtgggctacaagaccgtgaccgacctggcctggagatgctgccccggcttcaccggcaagagatgccccgagcacctgaccgaccacggcgccgccagcccccagctggagcccgagccccagatccccagcggccagctggaccccggccccagaccccccagctacagcagagccgcccccagcccccacggcagaaagggccccggcctgttcggcgagagactggagagactggagggcgacgtgcagagactggcccagacctacggcaccctgagcggcctggtggccagccacgaggaccccaacagaatgaccggcggccccagagcccccgccgtgcccgtgggcttcggcgtgatccccgagggcctggtgggccccggcgacagagccagaggccccctgaccccccccctggacgagatcctgagcaaggtgaccgaggtgagcaacaccctgcagaccaaggtgcagctgctggacaaggtgcacggcctggccctgggccacgaggcccacctgcagagactgagagaggccccccccagccccctgaccagcctggccctgctggaggagtacgtggacagaagactgcacagactgtggggcagcctgctggacggcttcgagcagaagctgcagggcgtgcagagcgagtgcgacctgagagtgcaggaggtgagaagacagtgcgaggagggccaggccgccagcagaagactgcaccagagcctggacggcagagagctggccctgagacaggagctgagccagctgggcagccagctgcagggcctgagcgtgagcggcagaggcagctgctgcggccagctggccctgatcaacgccagaatggacggcctggagagagccctgcaggccgtgaccgagacccagagaggccccggcgcccccgccggcgacgagctgaccagactgagcgccgccatgctggagggcggcgtggacggcctgctggagggcctggagaccctgaacggcaccgagggcggcgccagaggctgctgcctgagactggacatgggcggctggggcgtgggcggcttcggcaccatgctggaggagagagtgcagagcctggaggagagactggccaccctggccggcgagctgagccacgacagcgccagccccggcagaagcgccagacccctggtgcagaccgagctggccgtgctggagcagagactggtgagcctggagaccagctgcacccccagcaccaccagcgccatcctggacagcctggtggccgaggtgaaggcctggcagagcagaagcgaggccctgctgagacaggtggccagccacgccgccctgctgcagcagctgaacggcaccgtggccgaggtgcagggccagctggccgagggcaccggcagcagcctgcagggcgagatcaccctgctgaaggtgaacctgaacagcgtgagcaagagcctgaccggcctgagcgacagcgtgagccagtacagcgacgccttcctggccgccaacaccagcctggacgagagagagagaaaggtggaggccgaggtgcaggccatccaggagcaggtgagcagccagggcagcagactgcaggccggccacagacaggtgctgaacctgagaggcgagctggagcagctgaaggccggcgtggccaaggtggccagcggcctgagcagatgccaggacaccgcccagaagctgcagcacaccgtgggccacttcgaccagagagtggcccaggtggagggcgcctgcagaagactgggcctgctggccgccggcctggacagcctgcccaccgagcccctgagacccagagagggcctgtggagccacgtggaccagctgaacagaaccctggcccagcacacccaggacatcgccagactgagagacgacctgctggactgccaggcccagctggccgagcaggtgagacccggccaggccaactag

SEQ ID NO: 3840 - DNA, 1251 bp, synthetic construct
  misc_feature 1..1251: note = source = /note="Description of Artificial Sequence: Synthetic coding sequence"
  source 1..1251: mol_type = other DNA
atgtacagacacggcatcagcagccagagaagctggcccctgtggaccaccatcttcatcttcctgggcgtggccgccatcctgggcgtgaccatcggcctgctggtgcacttcctggccgtggagaagacctactactaccagggcgacttccacatcagcggcgtgacctacaacgacaactgcgagaacgccgccagccaggccagcaccaacctgagcaaggacatcgagaccaagatgctgaacgccttccagaacagcagcatctacaaggagtacgtgaagagcgaggtgatcaagctgctgcccaacgccaacggcagcaacgtgcagctgcagctgaagttcaagttcccccccgccgagggcgtgagcatgagaaccaagatcaaggccaagctgcaccagatgctgaagaacaacatggccagctggaacgccgtgcccgccagcatcaagctgatggagatcagcaaggccgccagcgagatgctgaccaacaactgctgcggcagacaggtggccaacagcatcatcaccggcaacaagatcgtgaacggcaagagcagcctggagggcgcctggccctggcaggccagcatgcagtggaagggcagacactactgcggcgccagcctgatcagcagcagatggctgctgagcgccgcccactgcttcgccaagaagaacaacagcaaggactggaccgtgaacttcggcatcgtggtgaacaagccctacatgaccagaaaggtgcagaacatcatcttccacgagaactacagcagccccggcctgcacgacgacatcgccctggtgcagctggccgaggaggtgagcttcaccgagtacatcagaaagatctgcctgcccgaggccaagatgaagctgagcgagaacgacaacgtggtggtgaccggctggggcaccctgtacatgaacggcagcttccccgtgatcctgcaggaggacttcctgaagatcatcgacaacaagatctgcaacgccagctacgcctacagcggcttcgtgaccgacaccatgctgtgcgccggcttcatgagcggcgaggccgacgcctgccagaacgacagcggcggccccctggcctaccccgacagcagaaacatctggcacctggtgggcatcgtgagctggggcgacggctgcggcaagaagaacaagcccggcgtgtacaccagagtgaccagctacagaaactggatcaccagcaagaccggcctgtag

SEQ ID NO: 3841 - DNA, 639 bp, synthetic construct
  misc_feature 1..639: note = source = /note="Description of Artificial Sequence: Synthetic coding sequence"
  source 1..639: mol_type = other DNA
atgctgagcagcgtggtgttctggggcctgatcgccctgatcggcaccagcagaggcagctaccccttcagccacagcatgaagccccacctgcaccccagactgtaccacggctgctacggcgacatcatgaccatgaagaccagcggcgccacctgcgacgccaacagcgtgatgaactgcggcatcagaggcagcgagatgttcgccgagatggacctgagagccatcaagccctaccagaccctgatcaaggaggtgggccagagacactgcgtggaccccgccgtgatcgccgccatcatcagcagagagagccacggcggcagcgtgctgcaggacggctgggaccacagaggcctgaagttcggcctgatgcagctggacaagcagacctaccaccccgtgggcgcctgggacagcaaggagcacctgagccaggccaccggcatcctgaccgagagaatcaaggccatccagaagaagttccccacctggagcgtggcccagcacctgaagggcggcctgagcgccttcaagagcggcatcgaggccatcgccacccccagcgacatcgacaacgacttcgtgaacgacatcatcgccagagccaagttctacaagagacagagcttctag

SEQ ID NO: 3842 - DNA, 378 bp, synthetic construct
  misc_feature 1..378: note = source = /note="Description of Artificial Sequence: Synthetic coding sequence"
  source 1..378: mol_type = other DNA
atggccagaagcgccaccctggccgccgccgccctggccctgtgcctgctgctggccccccccggcctggcctggtacaagcccgccgccggccacagcagctacagcgtgggcagagccgccggcctgctgagcggcctgagaagaagcccctacgccagaagaagccagccctacagaggcgccgagccccccggcggcgccggcgccagccccgagctgcagctgcaccccagactgagaagcctggccgtgtgcgtgcaggacgtggcccccaacctgcagagatgcgagagactgcccgacggcagaggcacctaccagtgcaaggccaacgtgttcctgagcctgagagccgccgactgcctggccgcctag

SEQ ID NO: 3843 - DNA, 867 bp, synthetic construct
  misc_feature 1..867: note = source = /note="Description of Artificial Sequence: Synthetic coding sequence"
  source 1..867: mol_type = other DNA
atgaacaacctgagcttcagcgagctgtgctgcctgttctgctgccccccctgccccggcaagatcgccagcaagctggccttcctgccccccgaccccacctacaccctgatgtgcgacgagagcggcagcagatggaccctgcacctgagcgagagagccgactggcagtacagcagcagagagaaggacgccatcgagtgcttcatgaccagaaccagcaagggcaacagaatcgcctgcatgttcgtgagatgcagccccaacgccaagtacaccctgctgttcagccacggcaacgccgtggacctgggccagatgagcagcttctacatcggcctgggcagcagaatcaactgcaacatcttcagctacgactacagcggctacggcgccagcagcggcaagcccaccgagaagaacctgtacgccgacatcgaggccgcctggctggccctgagaaccagatacggcatcagacccgagaacgtgatcatctacggccagagcatcggcaccgtgcccagcgtggacctggccgccagatacgagagcgccgccgtgatcctgcacagccccctgaccagcggcatgagagtggccttccccgacaccaagaagacctactgcttcgacgccttccccaacatcgacaagatcagcaagatcaccagccccgtgctgatcatccacggcaccgaggacgaggtgatcgacttcagccacggcctggccctgttcgagagatgccagagacccgtggagcccctgtgggtggagggcgccggccacaacgacgtggagctgtacggccagtacctggagagactgaagcagttcgtgagccaggagctggtgaacctgtag

SEQ ID NO: 3844 - DNA, 417 bp, synthetic construct
  misc_feature 1..417: note = source = /note="Description of Artificial Sequence: Synthetic coding sequence"
  source 1..417: mol_type = other DNA
atggtggcccccgccgccagagtgttcctgagagccgtgagagccgccctgaccagcaccgtgcccgacctgctgtgcctgctggccagaggcagccccagaggcctggccagcggcagactgcccctggccgtgcacagcgcccagcacggccccggcagcggcgccccctggctgagaatcgccagaagagccctgagattcgtgctgagcaagcactggggcgacgactgctacctgaccaacagactgtggcaggacctgaagccccccagccacgtggagaacggccaggagctgagactggccccccccgtgcagtgggccctgcaggtgcagggcaaccagctgcagaccgccgtgctgtgcctgagaatggccccccccgagcccgccggcagcagacagagaatctag

SEQ ID NO: 3845 - DNA, 1332 bp, synthetic construct
  misc_feature 1..1332: note = source = /note="Description of Artificial Sequence: Synthetic coding sequence"
  source 1..1332: mol_type = other DNA
atgggcggccccagagcctgggccctgctgtgcctgggcctgctgctgcccggcggcggcgccgcctggagcatcggcgccgcccccttcagcggcagaagaaactggtgcagctacgtggtgaccagaaccatcagctgccacgtgcagaacggcacctacctgcagagagtgctgcagaactgcccctggcccatgagctgccccggcagcagctacagaaccgtggtgagacccacctacaaggtgatgtacaagatcgtgaccgccagagagtggagatgctgccccggccacagcggcgtgagctgcgaggaggtggccgccagcagcgccagcctggagcccatgtggagcggcagcaccatgagaagaatggccctgagacccaccgccttcagcggctgcctgaactgcagcaaggtgagcgagctgaccgagagactgaaggtgctggaggccaagatgaccatgctgaccgtgatcgagcagcccgtgccccccacccccgccacccccgaggaccccgcccccctgtggggccccccccccgcccagggcagccccggcgacggcggcctgcaggaccaggtgggcgcctggggcctgcccggccccaccggccccaagggcgacgccggcagcagaggccccatgggcatgagaggcccccccggcccccagggcccccccggcagccccggcagagccggcgccgtgggcacccccggcgagagaggcccccccggcccccccggcccccccggcccccccggcccccccgcccccgtgggccccccccacgccagaatcagccagcacggcgaccccctgctgagcaacaccttcaccgagaccaacaaccactggccccagggccccaccggcccccccggcccccccggccccatgggcccccccggcccccccggccccaccggcgtgcccggcagccccggccacatcggcccccccggccccaccggccccaagggcatcagcggccaccccggcgagaagggcgagagaggcctgagaggcgagcccggcccccagggcagcgccggccagagaggcgagcccggccccaagggcgaccccggcgagaagagccactggggcgagggcctgcaccagctgagagaggccctgaagatcctggccgagagagtgctgatcctggagaccatgatcggcctgtacgagcccgagctgggcagcggcgccggccccgccggcaccggcacccccagcctgctgagaggcaagagaggcggccacgccaccaactacagaatcgtggcccccagaagcagagacgagagaggctag

SEQ ID NO: 3846 - DNA, 717 bp, synthetic construct
  misc_feature 1..717: note = source = /note="Description of Artificial Sequence: Synthetic coding sequence"
  source 1..717: mol_type = other DNA
atggtgctgctgctgctggtggccatccccctgctggtgcacagcagcagaggccccgcccactacgagatgctgggcagatgcagaatggtgtgcgacccccacggccccagaggccccggccccgacggcgcccccgccagcgtgccccccttcccccccggcgccaagggcgaggtgggcagaagaggcaaggccggcctgagaggcccccccggcccccccggccccagaggcccccccggcgagcccggcagacccggcccccccggcccccccggccccggccccggcggcgtggcccccgccgccggctacgtgcccagaatcgccttctacgccggcctgagaagaccccacgagggctacgaggtgctgagattcgacgacgtggtgaccaacgtgggcaacgcctacgaggccgccagcggcaagttcacctgccccatgcccggcgtgtacttcttcgcctaccacgtgctgatgagaggcggcgacggcaccagcatgtgggccgacctgatgaagaacggccaggtgagagccagcgccatcgcccaggacgccgaccagaactacgactacgccagcaacagcgtgatcctgcacctggacgtgggcgacgaggtgttcatcaagctggacggcggcaaggtgcacggcggcaacaccaacaagtacagcaccttcagcggcttcatcatctaccccgactag

SEQ ID NO: 3847 - DNA, 282 bp, synthetic construct
  misc_feature 1..282: note = source = /note="Description of Artificial Sequence: Synthetic coding sequence"
  source 1..282: mol_type = other DNA
atgaagctgttcctggtgctgatcatcctgctgttcgaggtgctgaccgacggcgccagactgaagaagtgcttcaacaaggtgaccggctactgcagaaagaagtgcaaggtgggcgagagatacgagatcggctgcctgagcggcaagctgtgctgcgccaacgacgaggaggagaagaagcacgtgagcttcaagaagccccaccagcacagcggcgagaagctgagcgtgctgcaggactacatcatcctgcccaccatcaccatcttcaccgtgtag

SEQ ID NO: 3848 - DNA, 609 bp, synthetic construct
  misc_feature 1..609: note = source = /note="Description of Artificial Sequence: Synthetic coding sequence"
  source 1..609: mol_type = other DNA
atggtgagaatctggaccaccatcatgatcgtgctgatcctgctgctgagaatcggccccaacaagcccagcctgagcggcagacaggcccccgcccaggcccagaccagcgacctggtgcccagcctgttccccctgggcctgtgggcccccggcttctgcacctggagcagccccgacgaggacaaggtgtggagacccgcctgggagcagggccccaagggcgagcccgaccccagaggcctgagacccagaaagcccgtgcccggcaccggcaacagagacagcggcaccagaagaagactgcaggacgccaccgagcaggaccccagacccggcaacgacgtggccagcgccgagaccgccggcccccccagccccagcggcatcagagcccaggacagagcccccagacacagaagagccccccccgccagaatgcccgtggcccccgcccccagcgccgacggcgagcccctgcaggagcagggcggcggcctgttccacagaaccagaagcgtgtacaacggcctggagctgaacacctggatgaaggtggagagactgttcgtggagaagttccaccagagcttcagcctggacaactag

SEQ ID NO: 3849 - DNA, 342 bp, synthetic construct
  misc_feature 1..342: note = source = /note="Description of Artificial Sequence: Synthetic coding sequence"
  source 1..342: mol_type = other DNA
atgctgccctgcctggccctgctgctgctgatggagctgagcgtgtgcaccgtggccggcgacggcggcgaggagcagaccctgagcaccgaggccgagacctgggtgatcgtggccctggaggagggcgccggccccagcatccagctgcagctgcaggaggtgaagaccggcaaggccagccagttcttcggcctgatgggcaagagagtgggcggcagacccctgatccagcccagaagaaagaaggcctaccagctggagcacaccttccagggcctgctgggcaagagaagcctgttcaccgagggcagagaggacgaggcccagggcagcgagtag

SEQ ID NO: 3850 - DNA, 1269 bp, synthetic construct
  misc_feature 1..1269: note = source = /note="Description of Artificial Sequence: Synthetic coding sequence"
  source 1..1269: mol_type = other DNA
atgggccccgcctggctgtggctgctgggcaccggcatcctggccagcgtgcactgccagcccctgctggcccacggcgacaagagcctgcagggcccccagccccccagacaccagctgagcgagcccgcccccgcctaccacagaatcacccccaccatcaccaacttcgccctgagactgtacaaggagctggccgccgacgcccccggcaacatcttcttcagccccgtgagcatcagcaccaccctggccctgctgagcctgggcgcccaggccaacaccagcgccctgatcctggagggcctgggcttcaacctgaccgagacccccgaggccgacatccaccagggcttcagaagcctgctgcacaccctggccctgcccagccccaagctggagctgaaggtgggcaacagcctgttcctggacaagagactgaagcccagacagcactacctggacagcatcaaggagctgtacggcgccttcgccttcagcgccaacttcaccgacagcgtgaccaccggcagacagatcaacgactacctgagaagacagacctacggccaggtggtggactgcctgcccgagttcagccaggacaccttcatggtgctggccaactacatcttcttcaaggccaagtggaagcaccccttcagcagataccagacccagaagcaggagagcttcttcgtggacgagagaaccagcctgcaggtgcccatgatgcaccagaaggagatgcacagattcctgtacgaccaggacctggcctgcaccgtgctgcagatcgagtacagaggcaacgccctggccctgctggtgctgcccgaccccggcaagatgaagcaggtggaggccgccctgcagccccagaccctgagaaagtggggccagctgctgctgcccagcctgctggacctgcacctgcccagattcagcatcagcggcacctacaacctggaggacatcctgccccagatcggcctgaccaacatcctgaacctggaggccgacttcagcggcgtgaccggccagctgaacaagaccatcagcaaggtgagccacaaggccatggtggacatgagcgagaagggcaccgaggccggcgccgccagcggcctgctgagccagccccccagcctgaacaccatgagcgacccccacgcccacttcaacagacccttcctgctgctgctgtgggaggtgaccacccagagcctgctgttcctgggcaaggtggtgaaccccgtggccggctag

SEQ ID NO: 3851 - DNA, 237 bp, synthetic construct
  misc_feature 1..237: note = source = /note="Description of Artificial Sequence: Synthetic coding sequence"
  source 1..237: mol_type = other DNA
atggccctgatcagaaagaccttctacttcctgttcgccatgttcttcatcctggtgcagctgcccagcggctgccaggccggcctggacttcagccagcccttccccagcggcgagttcgccgtgtgcgagagctgcaagctgggcagaggcaagtgcagaaaggagtgcctggagaacgagaagcccgacggcaactgcagactgaacttcctgtgctgcagacagagaatctag

SEQ ID NO: 3852 - DNA, 2139 bp, synthetic construct
  misc_feature 1..2139: note = source = /note="Description of Artificial Sequence: Synthetic coding sequence"
  source 1..2139: mol_type = other DNA
atggccgccgccggcctggtggccgtggccgccgccgccgagtacagcggcaccgtggccagcggcggcaacctgcccggcgtgcactgcggccccagcagcggcgccggccccggcttcggccccggcagctggagcagaagcctggacagagccctggaggaggccgccgtgaccggcgtgctgagcctgagcggcagaaagctgagagagttccccagaggcgccgccaaccacgacctgaccgacaccaccagagccgacctgagcagaaacagactgagcgagatccccatcgaggcctgccacttcgtgagcctggagaacctgaacctgtaccagaactgcatcagatacatccccgaggccatcctgaacctgcaggccctgaccttcctgaacatcagcagaaaccagctgagcaccctgcccgtgcacctgtgcaacctgcccctgaaggtgctgatcgccagcaacaacaagctggtgagcctgcccgaggagatcggccacctgagacacctgatggagctggacgtgagctgcaacgagatccagaccatccccagccagatcggcaacctggaggccctgagagacctgaacgtgagaagaaaccacctggtgcacctgcccgaggagctggccgagctgcccctgatcagactggacttcagctgcaacaagatcaccaccatccccgtgtgctacagaaacctgagacacctgcagaccatcaccctggacaacaaccccctgcagagcccccccgcccagatctgcatcaagggcaaggtgcacatcttcaagtacctgaacatccaggcctgcaagatcgcccccgacctgcccgactacgacagaagacccctgggcttcggcagctgccacgaggagctgtacagcagcagaccctacggcgccctggacagcggcttcaacagcgtggacagcggcgacaagagatggagcggcaacgagcccaccgacgagttcagcgacctgcccctgagagtggccgagatcaccaaggagcagagactgagaagagagagccagtaccaggagaacagaggcagcctggtggtgaccaacggcggcgtggagcacgacctggaccagatcgactacatcgacagctgcaccgccgaggaggaggaggccgaggtgagacagcccaagggccccgaccccgacagcctgagcagccagttcatggcctacatcgagcagagaagaatcagccacgagggcagccccgtgaagcccgtggccatcagagagttccagaagaccgaggacatgagaagatacctgcaccagaacagagtgcccgccgagcccagcagcctgctgagcctgagcgccagccacaaccagctgagccacaccgacctggagctgcaccagagaagagagcagctggtggagagaaccagaagagaggcccagctggccgccctgcagtacgaggaggagaagatcagaaccaagcagatccagagagacgccgtgctggacttcgtgaagcagaaggccagccagagcccccagaagcagcaccccctgctggacggcgtggacggcgagtgccccttccccagcagaagaagccagcacaccgacgacagcgccctgtgcatgagcctgagcggcctgaaccaggtgggctgcgccgccaccctgccccacagcagcgccttcacccccctgaagagcgacgacagacccaacgccctgctgagcagccccgccaccgagaccgtgcaccacagccccgcctacagcttccccgccgccatccagagaaaccagccccagagacccgagagcttcctgttcagagccggcgtgagagccgagaccaacaagggccacgccagccccctgccccccagcgccgcccccaccaccgacagcaccgacagcatcaccggccagaacagcagacagagagaggaggagctggagctgatcgaccagctgagaaagcacatcgagtacagactgaaggtgagcctgccctgcgacctgggcgccgccctgaccgacggcgtggtgctgtgccacctggccaaccacgtgagacccagaagcgtgcccagcatccacgtgcccagccccgccgtggtgagctag

SEQ ID NO: 3853 - DNA, 213 bp, synthetic construct
  misc_feature 1..213: note = source = /note="Description of Artificial Sequence: Synthetic coding sequence"
  source 1..213: mol_type = other DNA
atgagagtgctgttcttcgtgttcggcgtgctgagcctgatgttcaccgtgccccccgccagaagcttcatcagcaacgacgagtgccccagcgagtactaccactgcagactgaagtgcaacgccgacgagcacgccatcagatactgcgccgacttcagcatctgctgcaagctgaagatcatcgagatcgacggccagaagaagtggtag

SEQ ID NO: 3854 - DNA, 789 bp, synthetic construct
  misc_feature 1..789: note = source = /note="Description of Artificial Sequence: Synthetic coding sequence"
  source 1..789: mol_type = other DNA
atggccgccgccagcgccggcgccaccagactgctgctgctgctgctgatggccgtggccgcccccagcagagccagaggcagcggctgcagagccggcaccggcgccagaggcgccggcgccgagggcagagagggcgaggcctgcggcaccgtgggcctgctgctggagcacagcttcgagatcgacgacagcgccaacttcagaaagagaggcagcctgctgtggaaccagcaggacggcaccctgagcctgagccagagacagctgagcgaggaggagagaggcagactgagagacgtggccgccctgaacggcctgtacagagtgagaatccccagaagacccggcgccctggacggcctggaggccggcggctacgtgagcagcttcgtgcccgcctgcagcctggtggagagccacctgagcgaccagctgaccctgcacgtggacgtggccggcaacgtggtgggcgtgagcgtggtgacccaccccggcggctgcagaggccacgaggtggaggacgtggacctggagctgttcaacaccagcgtgcagctgcagccccccaccaccgcccccggccccgagaccgccgccttcatcgagagactggagatggagcaggcccagaaggccaagaacccccaggagcagaagagcttcttcgccaagtactggatgtacatcatccccgtggtgctgttcctgatgatgagcggcgcccccgacaccggcggccagggcggcggcggcggcggcggcggcggcggcggcagcggcagatag

SEQ ID NO: 3855 - DNA, 150 bp, synthetic construct
  misc_feature 1..150: note = source = /note="Description of Artificial Sequence: Synthetic coding sequence"
  source 1..150: mol_type = other DNA
atggacagcagcagagagcccaccctgggcagactggacgccgccggcttctggcaggtgtggcagagattcgacgccgacggccacggccacgagagcaagttcgcccagggcgagaccgccgtgtacgactaccccagatgcctgtag

SEQ ID NO: 3856 - DNA, 213 bp, synthetic construct
  misc_feature 1..213: note = source = /note="Description of Artificial Sequence: Synthetic coding sequence"
  source 1..213: mol_type = other DNA
atgcccggcgccatgaagatcttcgtgttcatcctggccgccctgatcctgctggcccagatcttccaggccagaaccgccatccacagagccctgatcagcaagagaatggagggccactgcgaggccgagtgcctgaccttcgaggtgaagatcggcggctgcagagccgagctggcccccttctgctgcaagaacagaaagaagcactag

SEQ ID NO: 3857 - DNA, 711 bp, synthetic construct
  misc_feature 1..711: note = source = /note="Description of Artificial Sequence: Synthetic coding sequence"
  source 1..711: mol_type = other DNA
atgatgcccgccgagagaagactgcccctgagcttcgtgctggacgtgctggagggcagagcccagcaccccggcgtgctgtacgtgcagaagcagtgcagcaacctgcccagcgagctgccccagctgctgcccgacctggagagccacgtgccctgggccagcgaggccctgggcaagatgcccgacgccgtgaacttctggctgggcgaggccgccgccgtgaccagcctgcacaaggaccactacgagaacctgtactgcgtggtgagcggcgagaagcacttcctgttccacccccccagcgacagacccttcatcccctacggcctgagagtgcccggctgcctgcagttcccccacaccctgctgccctgggcccccgagctgtacacccccgccacctaccagctgaccgaggagggcaccttcaaggtggtggacgaggaggccatggagaaggtgccctggatccccctggaccccctggcccccgacctggccagataccccagctacagccaggcccaggccctgagatgcaccgtgagagccggcgagatgctgtacctgcccgccctgtggttccaccacgtgcagcagagccagggctgcatcgccgtgaacttctggtacgacatggagtacgacctgaagtacagctacttccagctgctggacagcctgaccaaggccagcggcctggactag

SEQ ID NO: 3858 - DNA, 1098 bp, synthetic construct
  misc_feature 1..1098: note = source = /note="Description of Artificial Sequence: Synthetic coding sequence"
  source 1..1098: mol_type = other DNA
atggcccccaagctgatcaccgtgctgtgcctgggcttctgcctgaaccagaagatctgcccccacgccggcgcccaggacaagttcagcctgagcgcctggcccagccccgtggtgcccctgggcggcagagtgaccctgagctgccacagccacctgagattcgtgatctggaccatcttccagaccaccggcaccagaagccacgagctgcacaccggcctgagcaacaacatcaccatcagccccgtgacccccgagcacgccggcacctacagatgcgtgggcatctacaagcacgccagcaagtggagcgccgagagcaacagcctgaagatcatcgtgaccggcctgttcaccaagcccagcatcagcgcccaccccagcagcctggtgcacgccggcgccagagtgagcctgagatgccacagcgagctggccttcgacgagttcatcctgtacaaggagggccacatccagcacagccagcagctggaccagggcatggaggccggcatccactacgtggaggccgtgttcagcatgggccccgtgacccccgcccacgccggcgcctacagatgctgcggctgcttcagccacagcagatacgagtggagcgcccccagcgaccccctggacatcgtgatcaccggcaagtacaagaagcccagcctgagcacccaggtggaccccatgatgagactgggcgagaagctgaccctgttctgcagcagcgagatcagcttcgaccagtaccacctgttcagacacggcgtggcccacggccagtggctgagcggcggccagagacacagagaggccttccaggccaacttcagcgtgggcagagccacccccgtgcccggcggcacctacagatgctacggcagcttcaacgacagcccctacaagccccccgtgaccagatgcaacttcaccccccaggagaccctgagagtgctgctgtgccacagccagaacccccccctgaacctgacccccccctggcagacccagagccccagaaaggccaacggcagaatgaagagaagcctgcagcagaagagacacagaagaagctacatgcccagctag

SEQ ID NO: 3859 - DNA, 198 bp, synthetic construct
  misc_feature 1..198: note = source = /note="Description of Artificial Sequence: Synthetic coding sequence"
  source 1..198: mol_type = other DNA
atgagaaccttcctgttcctgttcgccgtgctgttcttcctgacccccgccaagaacgccttcttcgacgagaagtgcaacaagctgaagggcacctgcaagaacaactgcggcaagaacgaggagctgatcgccctgtgccagaagagcctgaagtgctgcagaaccatccagccctgcggcagcatcatcgactag

SEQ ID NO: 3860 - DNA, 198 bp, synthetic construct; identical to SEQ ID NO: 3859
  misc_feature 1..198: note = source = /note="Description of Artificial Sequence: Synthetic coding sequence"
  source 1..198: mol_type = other DNA

SEQ ID NO: 3861 - DNA, 237 bp, synthetic construct; identical to SEQ ID NO: 3851
  misc_feature 1..237: note = source = /note="Description of Artificial Sequence: Synthetic coding sequence"
  source 1..237: mol_type = other DNA

SEQ ID NO: 3862 - DNA, 2868 bp, synthetic construct
  misc_feature 1..2868: note = source = /note="Description of Artificial Sequence: Synthetic coding sequence"
  source 1..2868: mol_type = other DNA
atgtgggccggcctgctgctgagagccgcctgcgtggccctgctgctgcccggcgcccccgccagaggctacaccggcagaaagccccccggccacttcgccgccgagagaagaagactgggcccccacgtgtgcctgagcggcttcggcagcggctgctgccccggctgggcccccagcatgggcggcggccactgcaccctgcccctgtgcagcttcggctgcggcagcggcatctgcatcgcccccaacgtgtgcagctgccaggacggcgagcagggcgccacctgccccgagacccacggcccctgcggcgagtacggctgcgacctgacctgcaaccacggcggctgccaggaggtggccagagtgtgccccgtgggcttcagcatgaccgagaccgccgtgggcatcagatgcaccgacatcgacgagtgcgtgaccagcagctgcgagggccactgcgtgaacaccgagggcggcttcgtgtgcgagtgcggccccggcatgcagctgagcgccgacagacacagctgccaggacaccgacgagtgcctgggcaccccctgccagcagagatgcaagaacagcatcggcagctacaagtgcagctgcagaaccggcttccacctgcacggcaacagacacagctgcgtggacgtgaacgagtgcagaagacccctggagagaagagtgtgccaccacagctgccacaacaccgtgggcagcttcctgtgcacctgcagacccggcttcagactgagagccgacagagtgagctgcgaggccttccccaaggccgtgctggcccccagcgccatcctgcagcccagacagcaccccagcaagatgctgctgctgctgcccgaggccggcagacccgccctgagccccggccacagcccccccagcggcgcccccggcccccccgccggcgtgagaaccaccagactgcccagccccacccccagactgcccaccagcagccccagcgcccccgtgtggctgctgagcaccctgctggccacccccgtgcccaccgccagcctgctgggcaacctgagaccccccagcctgctgcagggcgaggtgatgggcacccccagcagccccagaggccccgagagccccagactggccgccggccccagcccctgctggcacctgggcgccatgcacgagagcagaagcagatggaccgagcccggctgcagccagtgctggtgcgaggacggcaaggtgacctgcgagaaggtgagatgcgaggccgcctgcagccaccccatccccagcagagacggcggctgctgccccagctgcaccggctgcttccacagcggcgtggtgagagccgagggcgacgtgttcagcccccccaacgagaactgcaccgtgtgcgtgtgcctggccggcaacgtgagctgcatcagccccgagtgccccagcggcccctgccagacccccccccagaccgactgctgcacctgcgtgcccgtgagatgctacttccacggcagatggtacgccgacggcgccgtgttcagcggcggcggcgacgagtgcaccacctgcgtgtgccagaacggcgaggtggagtgcagcttcatgccctgccccgagctggcctgccccagagaggagtggagactgggccccggccagtgctgcttcacctgccaggagcccacccccagcaccggctgcagcctggacgacaacggcgtggagttccccatcggccagatctggagccccggcgacccctgcgagctgtgcatctgccaggccgacggcagcgtgagctgcaagagaaccgactgcgtggacagctgcccccaccccatcagaatccccggccagtgctgccccgactgcagcgccggctgcacctacaccggcagaatcttctacaacaacgagaccttccccagcgtgctggacccctgcctgagctgcatctgcctgctgggcagcgtggcctgcagccccgtggactgccccatcacctgcacctaccccttccaccccgacggcgagtgctgccccgtgtgcagagactgcaactacgagggcagaaaggtggccaacggccaggtgttcaccctggacgacgagccctgcaccagatgcacctgccagctgggcgaggtgagctgcgagaaggtgccctgccagagagcctgcgccgaccccgccctgctgcccggcgactgctgcagcagctgccccgacagcctgagccccctggaggagaagcagggcctgagcccccacggcaacgtggccttcagcaaggccggcagaagcctgcacggcgacaccgaggcccccgtgaactgcagcagctgccccggcccccccaccgccagccccagcagacccgtgctgcacctgctgcagctgctgctgagaaccaacctgatgaagacccagaccctgcccaccagccccgccggcgcccacggcccccacagcctggccctgggcctgaccgccaccttccccggcgagcccggcgccagccccagactgagccccggccccagcaccccccccggcgcccccaccctgcccctggccagccccggcgccccccagcccccccccgtgacccccgagagaagcttcagcgccagcggcgcccagatcgtgagcagatggccccccctgcccggcaccctgctgaccgaggccagcgccctgagcatgatggaccccagccccagcaagacccccatcaccctgctgggccccagagtgctgagccccaccaccagcagactgagcaccgccctggccgccaccacccaccccggcccccagcagccccccgtgggcgccagcagaggcgaggagagcaccatgtag

SEQ ID NO: 3863 - DNA, 270 bp, synthetic construct
  misc_feature 1..270: note = source = /note="Description of Artificial Sequence: Synthetic coding sequence"
  source 1..270: mol_type = other DNA
atggtgagctgcgagagaagagccagcaagagcgtgggccagatcctgctgtgggacttcggctacacctgcagactgagccacagaagaagaaacagcaccgagatcctgagcagaaacctgcccgccctgtacaccggcatcaaggtgtgcgagaagagacccagcatcgacctgtgcatccaccactgcagctacttccagaagtgcgagaccaacaagatctgctgcagcgccttctgcggcaacatctgcatgagcatcctgtag

SEQ ID NO: 3864 - DNA, 600 bp, synthetic construct
  misc_feature 1..600: note = source = /note="Description of Artificial Sequence: Synthetic coding sequence"
  source 1..600: mol_type = other DNA
atggagaccttccccctgctgctgctgagcctgggcctggtgctggccgaggccagcgagagcaccatgaagatcatcaaggaggagttcaccgacgaggagatgcagtacgacatggccaagagcggccaggagaagcagaccatcgagatcctgatgaaccccatcctgctggtgaagaacaccagcctgagcatgagcaaggacgacatgagcagcaccctgctgaccttcagaagcctgcactacaacgaccccaagggcaacagcagcggcaacgacaaggagtgctgcaacgacatgaccgtgtggagaaaggtgagcgaggccaacggcagctgcaagtggagcaacaacttcatcagaagcagcaccgaggtgatgagaagagtgcacagagcccccagctgcaagttcgtgcagaaccccggcatcagctgctgcgagagcctggagctggagaacaccgtgtgccagttcaccaccggcaagcagttccccagatgccagtaccacagcgtgaccagcctggagaagatcctgaccgtgctgaccggccacagcctgatgagctggctggtgtgcggcagcaagctgtag

SEQ ID NO: 3865 - DNA, 729 bp, synthetic construct
  misc_feature 1..729: note = source = /note="Description of Artificial Sequence: Synthetic coding sequence"
  source 1..729: mol_type = other DNA
atggccgccgccaccagaggctgcagaccctggggcagcctgctgggcctgctgggcctggtgagcgccgccgccgccgcctgggacctggccagcctgagatgcaccctgggcgccttctgcgagtgcgacttcagacccgacctgcccggcctggagtgcgacctggcccagcacctggccggccagcacctggccaaggccctggtggtgaaggccctgaaggccttcgtgagagaccccgcccccaccaagcccctggtgctgagcctgcacggctggaccggcaccggcaagagctacgtgagcagcctgctggcccactacctgttccagggcggcctgagaagccccagagtgcaccacttcagccccgtgctgcacttcccccaccccagccacatcgagagatacaagaaggacctgaagagctgggtgcagggcaacctgaccgcctgcggcagaagcctgttcctgttcgacgagatggacaagatgccccccggcctgatggaggtgctgagacccttcctgggcagcagctgggtggtgtacggcaccaactacagaaaggccatcttcatcttcatcagatggctgctgaagctgggccaccacggcagagccccccccagaagaagcggcgccctgccccccgcccccgccgcccccagacccgccctgagagcccagagagccggccccgccggccccggcgccaagggctag

SEQ ID NO: 3866 - DNA, 627 bp, synthetic construct
  misc_feature 1..627: note = source = /note="Description of Artificial Sequence: Synthetic coding sequence"
  source 1..627: mol_type = other DNA
atgctgggcctgctggtggccctgctggccctgggcctggccgtgttcgccctgctggacgtgtggtacctggtgagactgccctgcgccgtgctgagagccagactgctgcagcccagagtgagagacctgctggccgagcagagattccccggcagagtgctgcccagcgacctggacctgctgctgcacatgaacaacgccagatacctgagagaggccgacttcgccagagtggcccacctgaccagatgcggcgtgctgggcgccctgagagagctgagagcccacaccgtgctggccgccagctgcgccagacacagaagaagcctgagactgctggagcccttcgaggtgagaaccagactgctgggctgggacgacagagccttctacctggaggccagattcgtgagcctgagagacggcttcgtgtgcgccctgctgagattcagacagcacctgctgggcaccagccccgagagagtggtgcagcacctgtgccagagaagagtggagccccccgagctgcccgccgacctgcagcactggatcagctacaacgaggccagcagccagctgctgagaatggagagcggcctgagcgacgtgaccaaggaccagtag

SEQ ID NO: 3867 - DNA, 423 bp, synthetic construct
  misc_feature 1..423: note = source = /note="Description of Artificial Sequence: Synthetic coding sequence"
  source 1..423: mol_type = other DNA
atgctggtgaagctgaacagccaggccagactgagcagcatggtgaagaaggtgagactgcccagcagatgcgagccccccggcaccacctgcaccgtgagcggctggggcaccaccaccagccccgacgtgaccttccccagcgacctgatgtgcgtggacgtgaagctgatcagcccccaggactgcaccaaggtgtacaaggacctgctggagaacagcatgctgtgcgccggcatccccgacagcaagaagaacgcctgcaacggcgacagcggcggccccctggtgtgcagaggcaccctgcagggcctggtgagctggggcaccttcccctgcggccagcccaacgaccccggcgtgtacacccaggtgtgcaagttcaccaagtggatcaacgacaccatgaagaagcacagatag

SEQ ID NO: 3868 - DNA, 354 bp, synthetic construct
  misc_feature 1..354: note = source = /note="Description of Artificial Sequence: Synthetic coding sequence"
  source 1..354: mol_type = other DNA
atgctgagcaaggcccacggctgcaagaccgccctgagcctgggcagatgccccaagatcagagaggagtgcgagttccaggagagagacgtgtgcaccaaggacagacagtgccaggacaacaagaagtgctgcgtgttcagctgcggcaagaagtgcctggacctgaagcaggacgtgtgcgagatgcccaaggagaccggcccctgcctggcctacttcctgcactggtggtacgacaagaaggacaacacctgcagcatgttcgtgtacggcggctgccagggcaacaacaacaacttccagagcaaggccaactgcctgaacacctgcaagaacaagagattcccctag

SEQ ID NO: 3869 - DNA, 2328 bp, synthetic construct
  misc_feature 1..2328: note = source = /note="Description of Artificial Sequence: Synthetic coding sequence"
  source 1..2328: mol_type = other DNA
atgcaccccggccccgaggaggccggcagcggcagatacggccccagatacatcaccgacatgggcgccggcgaggacgacgagggcttcgaggacgacctggacctggacatcagcttcgaggaggtgaagcccctgcccgccaccaagggcggcaacaagaagttcctggtggagagcaagaagatgagcatcagcaaccccaagaccatcagcagactgatcccccccaccagcgccagcctgcccgtgaccaccgtggccccccagcccatccccatccagagaaagggcaagaacggcgtggccatcatgagcagactgttcgacatgccctgcgacgagaccctgtgcagcgccgacagcttctgcgtgaacgactacacctggggcggcagcagatgccagtgcaccctgggcaagggcggcgagagctgcagcgaggacatcgtgatccagtacccccagttcttcggccacagctacgtgaccttcgagcccctgaagaacagctaccaggccttccagatcaccctggagttcagagccgaggccgaggacggcctgctgctgtactgcggcgagaacgagcacggcagaggcgacttcatgagcctggccatcatcagaagaagcctgcagttcagattcaactgcggcaccggcgtggccatcatcgtgagcgagaccaagatcaagctgggcggctggcacaccgtgatgctgtacagagacggcctgaacggcctgctgcagctgaacaacggcacccccgtgaccggccagagccagggccagtacagcaagatcaccttcagaacccccctgtacctgggcggcgcccccagcgcctactggctggtgagagccaccggcaccaacagaggcttccagggctgcgtgcagagcctggccgtgaacggcagaagaatcgacatgagaccctggcccctgggcaaggccctgagcggcgccgacgtgggcgagtgcagcagcggcatctgcgacgaggccagctgcatccacggcggcacctgcaccgccatcaaggccgacagctacatctgcctgtgccccctgggcttcaagggcagacactgcgaggacgccttcaccctgaccatcccccagttcagagagagcctgagaagctacgccgccaccccctggcccctggagccccagcactacctgagcttcatggagttcgagatcaccttcagacccgacagcggcgacggcgtgctgctgtacagctacgacaccggcagcaaggacttcctgagcatcaacctggccggcggccacgtggagttcagattcgactgcggcagcggcaccggcgtgctgagaagcgaggaccccctgaccctgggcaactggcacgagctgagagtgagcagaaccgccaagaacggcatcctgcaggtggacaagcagaagatcgtggagggcatggccgagggcggcttcacccagatcaagtgcaacaccgacatcttcatcggcggcgtgcccaactacgacgacgtgaagaagaacagcggcgtgctgaagcccttcagcggcagcatccagaagatcatcctgaacgacagaaccatccacgtgaagcacgacttcaccagcggcgtgaacgtggagaacgccgcccacccctgcgtgagagccccctgcgcccacggcggcagctgcagacccagaaaggagggctacgactgcgactgccccctgggcttcgagggcctgcactgccagaaggccatcatcgaggccatcgagatcccccagttcatcggcagaagctacctgacctacgacaaccccgacatcctgaagagagtgagcggcagcagaagcaacgtgttcatgagattcaagaccaccgccaaggacggcctgctgctgtggagaggcgacagccccatgagacccaacagcgacttcatcagcctgggcctgagagacggcgccctggtgttcagctacaacctgggcagcggcgtggccagcatcatggtgaacggcagcttcaacgacggcagatggcacagagtgaaggccgtgagagacggccagagcggcaagatcaccgtggacgactacggcgccagaaccggcaagagccccggcatgatgagacagctgaacatcaacggcgccctgtacgtgggcggcatgaaggagatcgccctgcacaccaacagacagtacatgagaggcctggtgggctgcatcagccacttcaccctgagcaccgactaccacatcagcctggtggaggacgccgtggacggcaagaacatcaacacctgcggcgccaagtag

SEQ ID NO: 3870 - DNA, 1257 bp, synthetic construct
  misc_feature 1..1257: note = source = /note="Description of Artificial Sequence: Synthetic coding sequence"
  source 1..1257: mol_type = other DNA
atgagaaccctgttcaacctgctgtggctggccctggcctgcagccccgtgcacaccaccctgagcaagagcgacgccaagaaggccgccagcaagaccctgctggagaaggtgaagttctgcagctgctgccccggctggagcgccatggccagaagctggctgaccgccaccagcgccacccagagccagttcagcgacaagcccgtgcaggacagaggcctggtggtgaccgacctgaaggccgagagcgtggtgctggagcacagaagctactgcagcgccaaggccagagacagacacttcgccggcgacgtgctgggctacgtgaccccctggaacagccacggctacgacgtgaccaaggtgttcggcagcaagttcacccagatcagccccgtgtggctgcagctgaagagaagaggcagagagatgttcgaggtgaccggcctgcacgacgtggaccagggctggatgagagccgtgagaaagcacgccaagggcctgcacatcgtgcccagactgctgttcgaggactggacctacgacgacttcagaaacgtgctggacagcgaggacgagatcgaggagctgagcaagaccgtggtgcaggtggccaagaaccagcacttcgacggcttcgtggtggaggtgtggaaccagctgctgagccagaagagagtgggcctgatccacatgctgacccacctggccgaggccctgcaccaggccagactgctggccctgctggtgatcccccccgccatcacccccggcaccgaccagctgggcatgttcacccacaaggagttcgagcagctggcccccgtgctggacggcttcagcctgatgacctacgactacagcaccgcccaccagcccggccccaacgcccccctgagctgggtgagagcctgcgtgcaggtgctggaccccaagagcaagtggagaagcaagatcctgctgggcctgaacttctacggcatggactacgccaccagcaaggacgccagagagcccgtggtgggcgccagatacatccagaccctgaaggaccacagacccagaatggtgtgggacagccaggccagcgagcacttcttcgagtacaagaagagcagaagcggcagacacgtggtgttctaccccaccctgaagagcctgcaggtgagactggagctggccagagagctgggcgtgggcgtgagcatctgggagctgggccagggcctggactacttctacgacctgctgtag

SEQ ID NO: 3871 - DNA, 813 bp, synthetic construct
  misc_feature 1..813: note = source = /note="Description of Artificial Sequence: Synthetic coding sequence"
  source 1..813: mol_type = other DNA
atgatgctgagactgctgagcagcctgctgctggtggccgtggccagcggctacggcccccccagcagcagacccagcagcagagtggtgaacggcgaggacgccgtgccctacagctggccctggcaggtgagcctgcagtacgagaagagcggcagcttctaccacacctgcggcggcagcctgatcgcccccgactgggtggtgaccgccggccactgcatcagcagcagcagaacctaccaggtggtgctgggcgagtacgacagagccgtgaaggagggccccgagcaggtgatccccatcaacagcggcgacctgttcgtgcaccccctgtggaacagaagctgcgtggcctgcggcaacgacatcgccctgatcaagctgagcagaagcgcccagctgggcgacgccgtgcagctggccagcctgccccccgccggcgacatcctgcccaacgagaccccctgctacatcaccggctggggcagactgtacaccaacggccccctgcccgacaagctgcaggaggccctgctgcccgtggtggactacgagcactgcagcagatggaactggtggggcagcagcgtgaagaagaccatggtgtgcgccggcggcgacatcagaagcggctgcaacggcgacagcggcggccccctgaactgccccaccgaggacggcggctggcaggtgcacggcgtgaccagcttcgtgagcgccttcggctgcaacaccagaagaaagcccaccgtgttcaccagagtgagcgccttcatcgactggatcgaggagaccatcgccagccactag

SEQ ID NO: 3872 - DNA, 585 bp, synthetic construct; identical to SEQ ID NO: 3585
  misc_feature 1..585: note = source = /note="Description of Artificial Sequence: Synthetic coding sequence"
  source 1..585: mol_type = other DNA

SEQ ID NO: 3873 - DNA, 1308 bp, synthetic construct
  misc_feature 1..1308: note = source = /note="Description of Artificial Sequence: Synthetic coding sequence"
  source 1..1308: mol_type = other DNA
atgcagggccagggcagaagaagaggcacctgcaaggacatcttctgcagcaagatggccagctacctgtacggcgtgctgttcgccgtgggcctgtgcgcccccatctactgcgtgagccccgccaacgcccccagcgcctaccccagacccagcagcaccaagagcacccccgccagccaggtgtacagcctgaacaccgacttcgccttcagactgtacagaagactggtgctggagacccccagccagaacatcttcttcagccccgtgagcgtgagcaccagcctggccatgctgagcctgggcgcccacagcgtgaccaagacccagatcctgcagggcctgggcttcaacctgacccacacccccgagagcgccatccaccagggcttccagcacctggtgcacagcctgaccgtgcccagcaaggacctgaccctgaagatgggcagcgccctgttcgtgaagaaggagctgcagctgcaggccaacttcctgggcaacgtgaagagactgtacgaggccgaggtgttcagcaccgacttcagcaaccccagcatcgcccaggccagaatcaacagccacgtgaagaagaagacccagggcaaggtggtggacatcatccagggcctggacctgctgaccgccatggtgctggtgaaccacatcttcttcaaggccaagtgggagaagcccttccaccccgagtacaccagaaagaacttccccttcctggtgggcgagcaggtgaccgtgcacgtgcccatgatgcaccagaaggagcagttcgccttcggcgtggacaccgagctgaactgcttcgtgctgcagatggactacaagggcgacgccgtggccttcttcgtgctgcccagcaagggcaagatgagacagctggagcaggccctgagcgccagaaccctgagaaagtggagccacagcctgcagaagagatggatcgaggtgttcatccccagattcagcatcagcgccagctacaacctggagaccatcctgcccaagatgggcatccagaacgtgttcgacaagaacgccgacttcagcggcatcgccaagagagacagcctgcaggtgagcaaggccacccacaaggccgtgctggacgtgagcgaggagggcaccgaggccaccgccgccaccaccaccaagttcatcgtgagaagcaaggacggccccagctacttcaccgtgagcttcaacagaaccttcctgatgatgatcaccaacaaggccaccgacggcatcctgttcctgggcaaggtggagaaccccaccaagagctag

SEQ ID NO: 3874 - DNA, 393 bp, synthetic construct
  misc_feature 1..393: note = source = /note="Description of Artificial Sequence: Synthetic coding sequence"
  source 1..393: mol_type = other DNA
atggccagcgacctgatcagaaccatcctggccgtggccctgatcagcaagctgggcaccgccgtggacgccgagctgatgcccagcggcgccatcctgcagaacaagagagagaacctgcccagagtgtgccacgccctggccttcctgggcatggccagatgccaggacctgttcctggtgagactgcagggctggaagctgggcaccagattccaggacggccccagaagcaccccccaggaggagggcggcagcccccagagaaagagaggcatgcccgtgcagatccacttcctgctgaagagcttcctgagcagccccatcaccttcgccttcatcagcctggccagaaccgtgagcctggccaccgccatctgcaagatcgtgtag

SEQ ID NO: 3875 - DNA, 837 bp, synthetic construct
  misc_feature 1..837: note = source = /note="Description of Artificial Sequence: Synthetic coding sequence"
  source 1..837: mol_type = other DNA
atgcagtggctgagagtgagagagagccccggcgaggccaccggccacagagtgaccatgggcaccgccgccctgggccccgtgtgggccgccctgctgctgttcctgctgatgtgcgagatccccatggtggagctgaccttcgacagagccgtggccagcggctgccagagatgctgcgacagcgaggaccccctggaccccgcccacgtgagcagcgccagcagcagcggcagaccccacgccctgcccgagatcagaccctacatcaacatcaccatcctgaagggcgacaagggcgaccccggccccatgggcctgcccggctacatgggcagagagggcccccagggcgagcccggcccccagggcagcaagggcgacaagggcgagatgggcagccccggcgccccctgccagaagagattcttcgccttcagcgtgggcagaaagaccgccctgcacagcggcgaggacttccagaccctgctgttcgagagagtgttcgtgaacctggacggctgcttcgacatggccaccggccagttcgccgcccccctgagaggcatctacttcttcagcctgaacgtgcacagctggaactacaaggagacctacgtgcacatcatgcacaaccagaaggaggccgtgatcctgtacgcccagcccagcgagagaagcatcatgcagagccagagcgtgatgctggacctggcctacggcgacagagtgtgggtgagactgttcaagagacagagagagaacgccatctacagcaacgacttcgacacctacatcaccttcagcggccacctgatcaaggccgaggacgactag

SEQ ID NO: 3876 - DNA, 1635 bp, synthetic construct
  misc_feature 1..1635: note = source = /note="Description of Artificial Sequence: Synthetic coding sequence"
  source 1..1635: mol_type = other DNA
atgtgcaccgtggtggaccccagaatcgtgagaagatacctgctgagaagacagctgggccagggcgcctacggcatcgtgtggaaggccgtggacagaagaaccggcgaggtggtggccatcaagaagatcttcgacgccttcagagacaagaccgacgcccagagaaccttcagagagatcaccctgctgcaggagttcggcgaccaccccaacatcatcagcctgctggacgtgatcagagccgagaacgacagagacatctacctggtgttcgagttcatggacaccgacctgaacgccgtgatcagaaagggcggcctgctgcaggacgtgcacgtgagaagcatcttctaccagctgctgagagccaccagattcctgcacagcggccacgtggtgcacagagaccagaagcccagcaacgtgctgctggacgccaactgcaccgtgaagctgtgcgacttcggcctggccagaagcctgggcgacctgcccgagggccccgaggaccaggccgtgaccgagtacgtggccaccagatggtacagagcccccgaggtgctgctgagcagccacagatacaccctgggcgtggacatgtggagcctgggctgcatcctgggcgagatgctgagaggcagacccctgttccccggcaccagcaccctgcaccagctggagctgatcctggagaccatccccccccccagcgaggaggacctgctggccctgggcagcggctgcagagccagcgtgctgcaccagctgggcagcagacccagacagaccctggacgccctgctgccccccgacaccagccccgaggccctggacctgctgagaagactgctggtgttcgcccccgacaagagactgagcgccacccaggccctgcagcacccctacgtgcagagattccactgccccagcgacgagtgggccagagaggccgacgtgagacccagagcccacgagggcgtgcagctgagcgtgcccgagtacagaagcagagtgtaccagatgatcctggagtgcggcggcagcagcggcaccagcagagagaagggccccgagggcgtgagccccagccaggcccacctgcacaagcccagagccgacccccagctgcccagcagaacccccgtgcagggccccagacccagaccccagagcagccccggccacgaccccgccgagcacgagagccccagagccgccaagaacgtgcccagacagaacagcgcccccctgctgcagaccgccctgctgggcaacggcgagagaccccccggcgccaaggaggccccccccctgaccctgagcctggtgaagcccagcggcagaggcgccgcccccagcctgaccagccaggccgccgcccaggtggccaaccaggccctgatcagaggcgactggaacagaggcggcggcgtgagagtggccagcgtgcagcaggtgccccccagactgccccccgaggccagacccggcagaagaatgttcagcaccagcgccctgcagggcgcccagggcggcgccagagccctgctgggcggctacagccaggcctacggcaccgtgtgccacagcgccctgggccacctgcccctgctggagggccaccacgtgtag

SEQ ID NO: 3877 - DNA, 399 bp, synthetic construct
  misc_feature 1..399: note = source = /note="Description of Artificial Sequence: Synthetic coding sequence"
  source 1..399: mol_type = other DNA
atgaagagcagcggcctgttccccttcctggtgctgctggccctgggcaccctggccccctgggccgtggagggcagcggcaagagcttcaaggccggcgtgtgcccccccaagaagagcgcccagtgcctgagatacaagaagcccgagtgccagagcgactggcagtgccccggcaagaagagatgctgccccgacacctgcggcatcaagtgcctggaccccgtggacacccccaaccccaccagaagaaagcccggcaagtgccccgtgacctacggccagtgcctgatgctgaacccccccaacttctgcgagatggacggccagtgcaagagagacctgaagtgctgcatgggcatgtgcggcaagagctgcgtgagccccgtgaaggcctag

SEQ ID NO: 3878 - DNA, 1401 bp, synthetic construct
  misc_feature 1..1401: note = source = /note="Description of Artificial Sequence: Synthetic coding sequence"
  source 1..1401: mol_type = other DNA
atgaagccccccctgctggtgttcatcgtgtgcctgctgtggctgaaggacagccactgcgcccccacctggaaggacaagaccgccatcagcgagaacctgaagagcttcagcgaggtgggcgagatcgacgccgacgaggaggtgaagaaggccctgaccggcatcaagcagatgaagatcatgatggagagaaaggagaaggagcacaccaacctgatgagcaccctgaagaagtgcagagaggagaagcaggaggccctgaagctgctgaacgaggtgcaggagcacctggaggaggaggagagactgtgcagagagagcctggccgacagctggggcgagtgcagaagctgcctggagaacaactgcatgagaatctacaccacctgccagcccagctggagcagcgtgaagaacaagatcgagagattcttcagaaagatctaccagttcctgttccccttccacgaggacaacgagaaggacctgcccatcagcgagaagctgatcgaggaggacgcccagctgacccagatggaggacgtgttcagccagctgaccgtggacgtgaacagcctgttcaacagaagcttcaacgtgttcagacagatgcagcaggagttcgaccagaccttccagagccacttcatcagcgacaccgacctgaccgagccctacttcttccccgccttcagcaaggagcccatgaccaaggccgacctggagcagtgctgggacatccccaacttcttccagctgttctgcaacttcagcgtgagcatctacgagagcgtgagcgagaccatcaccaagatgctgaaggccatcgaggacctgcccaagcaggacaaggcccccgaccacggcggcctgatcagcaagatgctgcccggccaggacagaggcctgtgcggcgagctggaccagaacctgagcagatgcttcaagttccacgagaagtgccagaagtgccaggcccacctgagcgaggactgccccgacgtgcccgccctgcacaccgagctggacgaggccatcagactggtgaacgtgagcaaccagcagtacggccagatcctgcagatgaccagaaagcacctggaggacaccgcctacctggtggagaagatgagaggccagttcggctgggtgagcgagctggccaaccaggcccccgagaccgagatcatcttcaacagcatccaggtggtgcccagaatccacgagggcaacatcagcaagcaggacgagaccatgatgaccgacctgagcatcctgcccagcagcaacttcaccctgaagatccccctggaggagagcgccgagagcagcaacttcatcggctacgtggtggccaaggccctgcagcacttcaaggagcacttcaagacctggtag

SEQ ID NO: 3879 - DNA, 522 bp, synthetic construct
  misc_feature 1..522: note = source = /note="Description of Artificial Sequence: Synthetic coding sequence"
  source 1..522: mol_type = other DNA
atgcactggaagatgctgctgctgctgctgctgtactacaacgccgaggccagcatgtgccacagatggagcagagccgtgctgttccccgccgcccacagacccaagagaagcagcagcctgcccctgaaccccgtgctgcagaccagcctggaggaggtggagctgctgtacgagttcctgctggccgagctggagatcagccccgacctgcagatcagcatcaaggacgaggagctggccagcctgagaaaggccagcgacttcagaaccgtgtgcaacaacgtgatccccaagagcatccccgacatcagaagactgagcgccagcctgagcagccaccccggcatcctgaagaaggaggacttcgagagaaccgtgctgaccctggcctacaccgcctacagaaccgccctgagccacggccaccagaaggacatctgggcccagagcctggtgagcctgttccaggccctgagacacgacctgatgagaagcagccagcccggcgtgcccccctag

SEQ ID NO: 3880 - DNA, 1473 bp, synthetic construct
  misc_feature 1..1473: note = source = /note="Description of Artificial Sequence: Synthetic coding sequence"
  source 1..1473: mol_type = other DNA
atggaggacagcgacagcgccgccaagcagctgggcctggccgaggccgccgccgtggccgccgccgccgccgtggccgccgccgccgccgccgccgccggcggcgaggccgaggagcccgtgctgagcagagacgaggacagcgaggaggacgccgacagcgaggccgagagagagacccccagagtgaccgccgtggccgtgatggccgccgagcccggccacatggacatgggcgccgaggccctgcccggccccgacgaggccgccgccgccgccgccttcgccgaggtgaccaccgtgaccgtggccaacgtgggcgccgccgccgacaacgtgttcaccaccagcgtggccaacgccgccagcatcagcggccacgtgctgagcggcagaaccgccctgcagatcggcgacagcctgaacaccgagaaggccaccctgatcgtggtgcacaccgacggcagcatcgtggagaccaccggcctgaagggccccgccgcccccctgacccccggcccccagagcccccccacccccctggcccccggccaggagaagggcggcaccaagtacaactgggaccccagcgtgtacgacagcgagctgcccgtgagatgcagaaacatcagcggcaccctgtacaagaacagactgggcagcggctgggacctgaagcccagcagatgcctgctgcacctgtgctgcctgctgagaagacacgacctgatcaccgtgacccccagcggccagatcaccaccagcggcgccctgaccttcgacagagccagcaccgtggaggccaccgccgtgatcagcgagagccccgcccagggcgacgtgttcgccggcgccaccgtgcaggaggccagcgtgcagcccccctgcagagccagccaccccgagccccactaccccggctaccaggacagctgccagatcgcccccttccccgaggccgccctgcccaccagccaccccaagatcgtgctgaccagcctgcccgccctggccgtgcccccccccacccccaccaaggccgccccccccgccctggtgaacggcctggagctgagcgagcccagaagctggctgtacctggaggagatggtgaacagcctgctgaacaccgcccagcagctgaagaccctgttcgagcaggccaagcacgccagcacctacagagaggccgccaccaaccaggccaagatccacgccgacgccgagagaaaggaggtgatccacccccccagactgcccaaggtgctgggcctgcagcagagctgcgtgaactgcggcagagaggccatgagcgagtgcaccggctgccacaaggtgaactactgcagcaccttctgccagagaaaggactggaaggaccaccagcacatctgcggccagagcgccgccgtgaccgtgcaggccgacgaggtgcacgtggccgagagcgtgatggagaaggtgaccgtgtag

SEQ ID NO: 3881 - DNA, 1476 bp, synthetic construct
  misc_feature 1..1476: note = source = /note="Description of Artificial Sequence: Synthetic coding sequence"
  source 1..1476: mol_type = other DNA
atgcccagcaccgtgctgcccagcaccgtgctgcccagcctgctgcccaccgccggcgccggctggagcatgagatggatcctgtgctggagcctgaccctgtgcctgatggcccagaccgccctgggcgccctgcacaccaagagaccccaggtggtgaccaagtacggcaccctgcagggcaagcagatgcacgtgggcaagacccccatccaggtgttcctgggcgtgcccttcagcagaccccccctgggcatcctgagattcgccccccccgagccccccgagccctggaagggcatcagagacgccaccacctacccccccggctgcctgcaggagagctggggccagctggccagcatgtacgtgagcaccagagagagatacaagtggctgagattcagcgaggactgcctgtacctgaacgtgtacgcccccgccagagcccccggcgacccccagctgcccgtgatggtgtggttccccggcggcgccttcatcgtgggcgccgccagcagctacgagggcagcgacctggccgccagagagaaggtggtgctggtgttcctgcagcacagactgggcatcttcggcttcctgagcaccgacgacagccacgccagaggcaactggggcctgctggaccagatggccgccctgagatgggtgcaggagaacatcgccgccttcggcggcgaccccggcaacgtgaccctgttcggccagagcgccggcgccatgagcatcagcggcctgatgatgagccccctggccagcggcctgttccacagagccatcagccagagcggcaccgccctgttcagactgttcatcaccagcaaccccctgaaggtggccaagaaggtggcccacctggccggctgcaaccacaacagcacccagatcctggtgaactgcctgagagccctgagcggcaccaaggtgatgagagtgagcaacaagatgagattcctgcagctgaacttccagagagaccccgaggagatcatctggagcatgagccccgtggtggacggcgtggtgatccccgacgaccccctggtgctgctgacccagggcaaggtgagcagcgtgccctacctgctgggcgtgaacaacctggagttcaactggctgctgccctacatcatgaagttccccctgaacagacaggccatgagaaaggagaccatcaccaagatgctgtggagcaccagaaccctgctgaacatcaccaaggagcaggtgcccctggtggtggaggagtacctggacaacgtgaacgagcacgactggaagatgctgagaaacagaatgatggacatcgtgcaggacgccaccttcgtgtacgccaccctgcagaccgcccactaccacagagagacccccatgatgggcatctgccccgccggccacgccaccaccagaatgaagagcacctgcagctggatcctgccccaggagtgggcctag

SEQ ID NO: 3882 - DNA, 753 bp, synthetic construct
  misc_feature 1..753: note = source = /note="Description of Artificial Sequence: Synthetic coding sequence"
  source 1..753: mol_type = other DNA
atgcccgccagcagccccttcctgctggcccccaagggcccccccggcaacatgggcggccccgtgagagagcccgccctgagcgtggccctgtggctgagctggggcgccgccctgggcgccgtggcctgcgccatggccctgctgacccagcagaccgagctgcagagcctgagaagagaggtgagcagactgcagggcaccggcggccccagccagaacggcgagggctacccctggcagagcctgcccgagcagagcagcgacgccctggaggcctgggagaacggcgagagaagcagaaagagaagagccgtgctgacccagaagcagaagaagcagcacagcgtgctgcacctggtgcccatcaacgccaccagcaaggacgacagcgacgtgaccgaggtgatgtggcagcccgccctgagaagaggcagaggcctgcaggcccagggctacggcgtgagaatccaggacgccggcgtgtacctgctgtacagccaggtgctgttccaggacgtgaccttcaccatgggccaggtggtgagcagagagggccagggcagacaggagaccctgttcagatgcatcagaagcatgcccagccaccccgacagagcctacaacagctgctacagcgccggcgtgttccacctgcaccagggcgacatcctgagcgtgatcatccccagagccagagccaagctgaacctgagcccccacggcaccttcctgggcttcgtgaagctgtag

SEQ ID NO: 3883 - DNA, 1437 bp, synthetic construct
  misc_feature 1..1437: note = source = /note="Description of Artificial Sequence: Synthetic coding sequence"
  source 1..1437: mol_type = other DNA
atgagcccccccctgctgaagctgggcgccgtgctgagcaccatggccatgatcagcaactggatgagccagaccctgcccagcctggtgggcctgaacaccaccagactgagcacccccgacaccctgacccagatcagccccaaggagggctggcaggtgtacagcagcgcccaggaccccgacggcagatgcatctgcaccgtggtggcccccgagcagaacctgtgcagcagagacgccaagagcagacagctgagacagctgctggagaaggtgcagaacatgagccagagcatcgaggtgctgaacctgagaacccagagagacttccagtacgtgctgaagatggagacccagatgaagggcctgaaggccaagttcagacagatcgaggacgacagaaagaccctgatgaccaagcacttccaggagctgaaggagaagatggacgagctgctgcccctgatccccgtgctggagcagtacaagaccgacgccaagctgatcacccagttcaaggaggagatcagaaacctgagcgccgtgctgaccggcatccaggaggagatcggcgcctacgactacgaggagctgcaccagagagtgctgagcctggagaccagactgagagactgcatgaagaagctgacctgcggcaagctgatgaagatcaccggccccgtgaccgtgaagaccagcggcaccagattcggcgcctggatgaccgaccccctggccagcgagaagaacaacagagtgtggtacatggacagctacaccaacaacaagatcgtgagagagtacaagagcatcgccgacttcgtgagcggcgccgagagcagaacctacaacctgcccttcaagtgggccggcaccaaccacgtggtgtacaacggcagcctgtacttcaacaagtaccagagcaacatcatcatcaagtacagcttcgacatgggcagagtgctggcccagagaagcctggagtacgccggcttccacaacgtgtacccctacacctggggcggcttcagcgacatcgacctgatggccgacgagatcggcctgtgggccgtgtacgccaccaaccagaacgccggcaacatcgtgatcagccagctgaaccaggacaccctggaggtgatgaagagctggagcaccggctaccccaagagaagcgccggcgagagcttcatgatctgcggcaccctgtacgtgaccaacagccacctgaccggcgccaaggtgtactacagctacagcaccaagaccagcacctacgagtacaccgacatccccttccacaaccagtacttccacatcagcatgctggactacaacgccagagacagagccctgtacgcctggaacaacggccaccaggtgctgttcaacgtgaccctgttccacatcatcaagaccgaggacgacacctag

SEQ ID NO: 3884 - DNA, 1101 bp, synthetic construct
  misc_feature 1..1101: note = source = /note="Description of Artificial Sequence: Synthetic coding sequence"
  source 1..1101: mol_type = other DNA
atggccagagagagaccccccggcagaggctgcggcgtgctgagaagatgcctgctgggcgccgtgctgctgttcggcctgagactgtgcgccgagctgagaagagccggccccggcagccccaccagaagcgccccccccggccccgcctggagaccccccggcccccacctgccccccgcccccggccagcccagaggcgccagcagaagacaggtgacctacgtgagaagcggcagaagagccccccccggcggcggcggcagcggcacccccgagcccggctgctgcgcccccagaggcagacccagaagaaagggccccagatggcacatcgacctgcagccctgggccggcagcgcccagagcctggacgaggaggcctggagattcctgagatacatcagcaccacccagatcgcctgcaaccacatgaacaccgacagcctggccaccgacagcagccccacccacaagccctggagcgtgtgcctggacgacagattcaacctggcccaccagatcagaaacaagcagtgcagactgtacagcctgggcctgggcagcgacgacacccacttcgaggtgagcatggccaacaacggctgcgaggtgcacagattcgaccccagcgtgaagagcgcccacatcctggagagccagcacctgtggtaccacagactgagcatcgactggagagacccccaccccgccgtggccgcccagaagccccacagcaacaccagaaagctgggcagcatcctgaacgagttcggccaccacaagatcgacgtgctgaaggccgacctggagagcgccgagtggaaggtgctggagaacctgatcctggaggacgtgctggagcagatcggccagctgatcttcgagatccacctgcactggcccggcttcgaggtgagcggcagcgacagcagcgtggtgagattctggtacagcctgctgaaggagctggagcagaaggacttcagactgttccacagctacaaggacctgagcaagccccagctgttcctgaagaaggacatcttcaacgccagcagctgctacaccctgagctgggtgaacaccagatggaagtag

SEQ ID NO: 3885 - DNA, 300 bp, synthetic construct
  misc_feature 1..300: note = source = /note="Description of Artificial Sequence: Synthetic coding sequence"
  source 1..300: mol_type = other DNA
atgaagatccccgtgctgcccgccgtggtgctgctgagcctgctggtgctgcacagcgcccagggcgccaccctgggcggccccgaggaggagagcaccatcgagaactacgccagcagacccgaggccttcaacacccccttcctgaacatcgacaagctgagaagcgccttcaaggccgacgagttcctgaactggcacgccctgttcgagagcatcaagagaaagctgcccttcctgaactgggacgccttccccaagctgaagggcctgagaagcgccacccccgacgcccagtag

SEQ ID NO: 3886 - DNA, 618 bp, synthetic construct
  misc_feature 1..618: note = source = /note="Description of Artificial Sequence: Synthetic coding sequence"
  source 1..618: mol_type = other DNA
atgatgagaaccctgatcaccacccaccccctgcccctgctgctgctgccccagcagctgctgcagctggtgcagttccaggaggtggacaccgacttcgacttccccgaggaggacaagaaggaggagttcgaggagtgcctggagaagttcttcagcaccggccccgccagaccccccaccaaggagaaggtgaagagaagagtgctgatcgagcccggcatgcccctgaaccacatcgagtactgcaaccacgagatcatgggcaagaacgtgtactacaagcacagatgggtggccgagcactacttcctgctgatgcagtacgacgagctgcagaagatctgctacaacagattcgtgccctgcaagaacggcatcagaaagtgcaacagaagcaagggcctggtggagggcgtgtactgcaacctgaccgaggccttcgagatccccgcctgcaagtacgagagcctgtacagaaagggctacgtgctgatcacctgcagctggcagaacgagatgcagaagagaatcccccacaccatcaacgacctggtggagccccccgagcacagaagcttcctgagcgaggacggcgtgttcgtgatcagcccctag

SEQ ID NO: 3887 - DNA, 402 bp, synthetic construct
  misc_feature 1..402: note = source = /note="Description of Artificial Sequence: Synthetic coding sequence"
  source 1..402: mol_type = other DNA
atgctggactggagactggccagcgcccacttcatcctggccgtgaccctgaccctgtggagcagcggcaaggtgctgagcgtggacgtgaccaccaccgaggccttcgacagcggcgtgatcgacgtgcagagcacccccaccgtgagagaggagaagagcgccaccgacctgaccgccaagctgctgctgctggacgagctggtgagcctggagaacgacgtgatcgagaccaagaagaagagaagcttcagcggcttcggcagccccctggacagactgagcgccggcagcgtggaccacaagggcaagcagagaaaggtggtggaccaccccaagagaagattcggcatccccatggacagaatcggcagaaacagactgagcaacagcagaggctag

SEQ ID NO: 3888 - DNA, 846 bp, synthetic construct
  misc_feature 1..846: note = source = /note="Description of Artificial Sequence: Synthetic coding sequence"
  source 1..846: mol_type = other DNA
atgggcagcagaggccagggcctgctgctggcctactgcctgctgctggccttcgccagcggcctggtgctgagcagagtgccccacgtgcagggcgagcagcaggagtgggagggcaccgaggagctgcccagcccccccgaccacgccgagagagccgaggagcagcacgagaagtacagacccagccaggaccagggcctgcccgccagcagatgcctgagatgctgcgaccccggcaccagcatgtaccccgccaccgccgtgccccagatcaacatcaccatcctgaagggcgagaagggcgacagaggcgacagaggcctgcagggcaagtacggcaagaccggcagcgccggcgccagaggccacaccggccccaagggccagaagggcagcatgggcgcccccggcgagagatgcaagagccactacgccgccttcagcgtgggcagaaagaagcccatgcacagcaaccactactaccagaccgtgatcttcgacaccgagttcgtgaacctgtacgaccacttcaacatgttcaccggcaagttctactgctacgtgcccggcctgtacttcttcagcctgaacgtgcacacctggaaccagaaggagacctacctgcacatcatgaagaacgaggaggaggtggtgatcctgttcgcccaggtgggcgacagaagcatcatgcagagccagagcctgatgctggagctgagagagcaggaccaggtgtgggtgagactgtacaagggcgagagagagaacgccatcttcagcgaggagctggacacctacatcaccttcagcggctacctggtgaagcacgccaccgagccctag

SEQ ID NO: 3889 - DNA, 132 bp, synthetic construct
  misc_feature 1..132: note = source = /note="Description of Artificial Sequence: Synthetic coding sequence"
  source 1..132: mol_type = other DNA
atgaagctgctgtacctgttcctggccatcctgctggccatcgaggagcccgtgatcagcgccctggtgagaaccgtgggctgctgcctggacaccgccagacagaccccccaccccagcatgcacggctag

SEQ ID NO: 3890 - DNA, 861 bp, synthetic construct
  misc_feature 1..861: note = source = /note="Description of Artificial Sequence: Synthetic coding sequence"
  source 1..861: mol_type = other DNA
atgaaggtgctgctgctgaccggcctgggcgccctgttcttcgcctactactgggacgacaacttcgaccccgccagcctgcagggcgccagagtgctgctgaccggcgccaacgccggcgtgggcgaggagctggcctaccactacgccagactgggcagccacctggtgctgaccgcccacaccgaggccctgctgcagaaggtggtgggcaactgcagaaagctgggcgcccccaaggtgttctacatcgccgccgacatggccagccccgaggcccccgagagcgtggtgcagttcgccctggacaagctgggcggcctggactacctggtgctgaaccacatcggcggcgcccccgccggcaccagagccagaagcccccaggccaccagatggctgatgcaggtgaacttcgtgagctacgtgcagctgaccagcagagccctgcccagcctgaccgacagcaagggcagcctggtggtggtgagcagcctgctgggcagagtgcccaccagcttcagcaccccctacagcgccgccaagttcgccctggacggcttcttcggcagcctgagaagagagctggacgtgcaggacgtgaacgtggccatcaccatgtgcgtgctgggcctgagagacagagccagcgccgccgaggccgtgagaggcgtgaccagagtgaaggccgcccccggccccaaggccgccctggccgtgatcagaggcggcgccaccagagccgccggcgtgttctacccctggagattcagactgctgtgcctgctgagaagatggctgcccagacccagagcctggttcatcagacaggagctgaacgtgaccgccgccgccgcctag

SEQ ID NO: 3891 - DNA, 1326 bp, synthetic construct
  misc_feature 1..1326: note = source = /note="Description of Artificial Sequence: Synthetic coding sequence"
  source 1..1326: mol_type = other DNA
atgagagtggtgaccatcgtgatcctgctgtgcttctgcaaggccgccgagctgagaaaggccagccccggcagcgtgagaagcagagtgaaccacggcagagccggcggcggcagaagaggcagcaaccccgtgaagagatacgcccccggcctgccctgcgacgtgtacacctacctgcacgagaagtacctggactgccaggagagaaagctggtgtacgtgctgcccggctggccccaggacctgctgcacatgctgctggccagaaacaagatcagaaccctgaagaacaacatgttcagcaagttcaagaagctgaagagcctggacctgcagcagaacgagatcagcaagatcgagagcgaggccttcttcggcctgaacaagctgaccaccctgctgctgcagcacaaccagatcaaggtgctgaccgaggaggtgttcatctacacccccctgctgagctacctgagactgtacgacaacccctggcactgcacctgcgagatcgagaccctgatcagcatgctgcagatccccagaaacagaaacctgggcaactacgccaagtgcgagagcccccaggagcagaagaacaagaagctgagacagatcaagagcgagcagctgtgcaacgaggaggagaaggagcagctggaccccaagccccaggtgagcggcagaccccccgtgatcaagcccgaggtggacagcaccttctgccacaactacgtgttccccatccagaccctggactgcaagagaaaggagctgaagaaggtgcccaacaacatcccccccgacatcgtgaagctggacctgagctacaacaagatcaaccagctgagacccaaggagttcgaggacgtgcacgagctgaagaagctgaacctgagcagcaacggcatcgagttcatcgaccccgccgccttcctgggcctgacccacctggaggagctggacctgagcaacaacagcctgcagaacttcgactacggcgtgctggaggacctgtacttcctgaagctgctgtggctgagagacaacccctggagatgcgactacaacatccactacctgtactactggctgaagcaccactacaacgtgcacttcaacggcctggagtgcaagacccccgaggagtacaagggctggagcgtgggcaagtacatcagaagctactacgaggagtgccccaaggacaagctgcccgcctaccccgagagcttcgaccaggacaccgaggacgacgagtgggagaagaagcacagagaccacaccgccaagaagcagagcgtgatcatcaccatcgtgggctag

SEQ ID NO: 3892 - DNA, 1539 bp, synthetic construct
  misc_feature 1..1539: note = source = /note="Description of Artificial Sequence: Synthetic coding sequence"
  source 1..1539: mol_type = other DNA
atggccgagagcggcctggccatgtggcccagcctgctgctgctgctgctgctgcccggccccccccccgtggccggcctggaggacgccgccttcccccacctgggcgagagcctgcagcccctgcccagagcctgccccctgagatgcagctgccccagagtggacaccgtggactgcgacggcctggacctgagagtgttccccgacaacatcaccagagccgcccagcacctgagcctgcagaacaaccagctgcaggagctgccctacaacgagctgagcagactgagcggcctgagaaccctgaacctgcacaacaacctgatcagcagcgagggcctgcccgacgaggccttcgagagcctgacccagctgcagcacctgtgcgtggcccacaacaagctgagcgtggccccccagttcctgcccagaagcctgagagtggccgacctggccgccaaccaggtgatggagatcttccccctgaccttcggcgagaagcccgccctgagaagcgtgtacctgcacaacaaccagctgagcaacgccggcctgccccccgacgccttcagaggcagcgaggccatcgccaccctgagcctgagcaacaaccagctgagctacctgccccccagcctgccccccagcctggagagactgcacctgcagaacaacctgatcagcaaggtgcccagaggcgccctgagcagacagacccagctgagagagctgtacctgcagcacaaccagctgaccgacagcggcctggacgccaccaccttcagcaagctgcacagcctggagtacctggacctgagccacaaccagctgaccaccgtgcccgccggcctgcccagaaccctggccatcctgcacctgggcagaaacagaatcagacaggtggaggccgccagactgcacggcgccagaggcctgagatacctgctgctgcagcacaaccagctgggcagcagcggcctgcccgccggcgccctgagacccctgagaggcctgcacaccctgcacctgtacggcaacggcctggacagagtgccccccgccctgcccagaagactgagagccctggtgctgccccacaaccacgtggccgccctgggcgccagagacctggtggccacccccggcctgaccgagctgaacctggcctacaacagactggccagcgccagagtgcaccacagagccttcagaagactgagagccctgagaagcctggacctggccggcaaccagctgaccagactgcccatgggcctgcccaccggcctgagaaccctgcagctgcagagaaaccagctgagaatgctggagcccgagcccctggccggcctggaccagctgagagagctgagcctggcccacaacagactgagagtgggcgacatcggccccggcacctggcacgagctgcaggccctgcaggtgagacacagactggtgagccacaccgtgcccagagccccccccagcccctgcctgccctgccacgtgcccaacatcctggtgagctggtag

SEQ ID NO: 3893 - DNA, 2328 bp, synthetic construct
  misc_feature 1..2328: note = source = /note="Description of Artificial Sequence: Synthetic coding sequence"
  source 1..2328: mol_type = other DNA
atgaaggagggccccgaggaggccggcagcggcagatacggccccagatacatcaccgacatgggcgccggcgaggacgacgagggcttcgaggacgacctggacctggacatcagcttcgaggaggtgaagcccctgcccgccaccaagggcggcaacaagaagttcctggtggagagcaagaagatgagcatcagcaaccccaagaccatcagcagactgatcccccccaccagcgccagcctgcccgtgaccaccgtggccccccagcccatccccatccagagaaagggcaagaacggcgtggccatcatgagcagactgttcgacatgccctgcgacgagaccctgtgcagcgccgacagcttctgcgtgaacgactacacctggggcggcagcagatgccagtgcaccctgggcaagggcggcgagagctgcagcgaggacatcgtgatccagtacccccagttcttcggccacagctacgtgaccttcgagcccctgaagaacagctaccaggccttccagatcaccctggagttcagagccgaggccgaggacggcctgctgctgtactgcggcgagaacgagcacggcagaggcgacttcatgagcctggccatcatcagaagaagcctgcagttcagattcaactgcggcaccggcgtggccatcatcgtgagcgagaccaagatcaagctgggcggctggcacaccgtgatgctgtacagagacggcctgaacggcctgctgcagctgaacaacggcacccccgtgaccggccagagccagggccagtacagcaagatcaccttcagaacccccctgtacctgggcggcgcccccagcgcctactggctggtgagagccaccggcaccaacagaggcttccagggctgcgtgcagagcctggccgtgaacggcagaagaatcgacatgagaccctggcccctgggcaaggccctgagcggcgccgacgtgggcgagtgcagcagcggcatctgcgacgaggccagctgcatccacggcggcacctgcaccgccatcaaggccgacagctacatctgcctgtgccccctgggcttcaagggcagacactgcgaggacgccttcaccctgaccatcccccagttcagagagagcctgagaagctacgccgccaccccctggcccctggagccccagcactacctgagcttcatggagttcgagatcaccttcagacccgacagcggcgacggcgtgctgctgtacagctacgacaccggcagcaaggacttcctgagcatcaacctggccggcggccacgtggagttcagattcgactgcggcagcggcaccggcgtgctgagaagcgaggaccccctgaccctgggcaactggcacgagctgagagtgagcagaaccgccaagaacggcatcctgcaggtggacaagcagaagatcgtggagggcatggccgagggcggcttcacccagatcaagtgcaacaccgacatcttcatcggcggcgtgcccaactacgacgacgtgaagaagaacagcggcgtgctgaagcccttcagcggcagcatccagaagatcatcctgaacgacagaaccatccacgtgaagcacgacttcaccagcggcgtgaacgtggagaacgccgcccacccctgcgtgagagccccctgcgcccacggcggcagctgcagacccagaaaggagggctacgactgcgactgccccctgggcttcgagggcctgcactgccagaaggccatcatcgaggccatcgagatcccccagttcatcggcagaagctacctgacctacgacaaccccgacatcctgaagagagtgagcggcagcagaagcaacgtgttcatgagattcaagaccaccgccaaggacggcctgctgctgtggagaggcgacagccccatgagacccaacagcgacttcatcagcctgggcctgagagacggcgccctggtgttcagctacaacctgggcagcggcgtggccagcatcatggtgaacggcagcttcaacgacggcagatggcacagagtgaaggccgtgagagacggccagagcggcaagatcaccgtggacgactacggcgccagaaccggcaagagccccggcatgatgagacagctgaacatcaacggcgccctgtacgtgggcggcatgaaggagatcgccctgcacaccaacagacagtacatgagaggcctggtgggctgcatcagccacttcaccctgagcaccgactaccacatcagcctggtggaggacgccgtggacggcaagaacatcaacacctgcggcgccaagtag

SEQ ID NO: 3894 - DNA, 1431 bp, synthetic construct
  misc_feature 1..1431: note = source = /note="Description of Artificial Sequence: Synthetic coding sequence"
  source 1..1431: mol_type = other DNA
atgaagttccagggccccctggcctgcctgctgctggccctgtgcctgggcagcggcgaggccggccccctgcagagcggcgaggagagcaccggcaccaacatcggcgaggccctgggccacggcctgggcgacgccctgagcgagggcgtgggcaaggccatcggcaaggaggccggcggcgccgccggcagcaaggtgagcgaggccctgggccagggcaccagagaggccgtgggcaccggcgtgagacaggtgcccggcttcggcgtggccgacgccctgggcaacagagtgggcgaggccgcccacgccctgggcaacaccggccacgagatcggcagacaggccgaggacgtgatcagacacggcgccgacgccgtgagaggcagctggcagggcgtgcccggccacaacggcgcctgggagaccagcggcggccacggcatcttcggcagccagggcggcctgggcggccagggccagggcaaccccggcggcctgggcaccccctgggtgcacggctaccccggcaacagcgccggcagcttcggcatgaacccccagggcgccccctggggccagggcggcaacggcggcccccccaacttcggcaccaacacccagggcgccgtggcccagcccggctacggcagcgtgagagccagcaaccagaacgagggctgcaccaaccccccccccagcggcagcggcggcggcagcagcaacagcggcggcggcagcggcagccagagcggcagcagcggcagcggcagcaacggcgacaacaacaacggcagcagcagcggcggcagcagcagcggcagcagcagcggcggcagcagcggcggcagcagcggcggcagcagcggcaacagcggcggcagcagaggcgacagcggcagcgagagcagctggggcagcagcaccggcagcagcagcggcaaccacggcggcagcggcggcggcaacggccacaagcccggctgcgagaagcccggcaacgaggccagaggcagcggcgagagcggcatccagaacagcgagaccagccccggcatgttcaacttcgacaccttctggaagaacttcaagagcaagctgggcttcatcaactgggacgccatcaacaagaaccaggtgcccccccccagcaccagagccctgctgtacttcagcagactgtgggaggacttcaagcagaacacccccttcctgaactggaaggccatcatcgagggcgccgacgccagcagcctgcagaagagagccggcagagacgaccagaactacaactacaaccagcacgcctaccccaccgcctacggcggcaagtacagcgtgaagacccccgccaagggcggcgtgagccccagcagcagcgccagcagagtgcagcccggcctgctgcagtgggtgaagttctggtag

SEQ ID NO: 3895 - DNA, 1911 bp, synthetic construct
  misc_feature 1..1911: note = source = /note="Description of Artificial Sequence: Synthetic coding sequence"
  source 1..1911: mol_type = other DNA
atgaccacctggagcctgagaagaagacccgccagaaccctgggcctgctgctgctggtggtgctgggcttcctggtgctgagaagactggactggagcaccctggtgcccctgagactgagacacagacagctgggcctgcaggccaagggctggaacttcatgctggaggacagcaccttctggatcttcggcggcagcatccactacttcagagtgcccagagagtactggagagacagactgctgaagatgaaggcctgcggcctgaacaccctgaccacctacgtgccctggaacctgcacgagcccgagagaggcaagttcgacttcagcggcaacctggacctggaggccttcgtgctgatggccgccgagatcggcctgtgggtgatcctgagacccggcccctacatctgcagcgagatggacctgggcggcctgcccagctggctgctgcaggaccccggcatgagactgagaaccacctacaagggcttcaccgaggccgtggacctgtacttcgaccacctgatgagcagagtggtgcccctgcagtacaagagaggcggccccatcatcgccgtgcaggtggagaacgagtacggcagctacaacaaggaccccgcctacatgccctacgtgaagaaggccctggaggacagaggcatcgtggagctgctgctgaccagcgacaacaaggacggcctgagcaagggcatcgtgcagggcgtgctggccaccatcaacctgcagagcacccacgagctgcagctgctgaccaccttcctgttcaacgtgcagggcacccagcccaagatggtgatggagtactggaccggctggttcgacagctggggcggcccccacaacatcctggacagcagcgaggtgctgaagaccgtgagcgccatcgtggacgccggcagcagcatcaacctgtacatgttccacggcggcaccaacttcggcttcatgaacggcgccatgcacttccacgactacaagagcgacgtgaccagctacgactacgacgccgtgctgaccgaggccggcgactacaccgccaagtacatgaagctgagagacttcttcggcagcatcagcggcatccccctgccccccccccccgacctgctgcccaagatgccctacgagcccctgacccccgtgctgtacctgagcctgtgggacgccctgaagtacctgggcgagcccatcaagagcgagaagcccatcaacatggagaacctgcccgtgaacggcggcaacggccagagcttcggctacatcctgtacgagaccagcatcaccagcagcggcatcctgagcggccacgtgcacgacagaggccaggtgttcgtgaacaccgtgagcatcggcttcctggactacaagaccaccaagatcgccgtgcccctgatccagggctacaccgtgctgagaatcctggtggagaacagaggcagagtgaactacggcgagaacatcgacgaccagagaaagggcctgatcggcaacctgtacctgaacgacagccccctgaagaacttcagaatctacagcctggacatgaagaagagcttcttccagagattcggcctggacaagtggagcagcctgcccgagacccccaccctgcccgccttcttcctgggcagcctgagcatcagcagcaccccctgcgacaccttcctgaagctggagggctgggagaagggcgtggtgttcatcaacggccagaacctgggcagatactggaacatcggcccccagaagaccctgtacctgcccggcccctggctgagcagcggcatcaaccaggtgatcgtgttcgaggagaccatggccggccccgccctgcagttcaccgagaccccccacctgggcagaaaccagtacatcaagtag

SEQ ID NO: 3896 - DNA, 672 bp, synthetic construct
  misc_feature 1..672: note = source = /note="Description of Artificial Sequence: Synthetic coding sequence"
  source 1..672: mol_type = other DNA
atgaccagatggagcagctacctgctgggctggaccaccttcctgctgtacagctacgagagcagcggcggcatgcacgaggagtgcgtgttccccttcacctacaagggcagcgtgtacttcacctgcacccacatccacagcctgagcccctggtgcgccaccagagccgtgtacaacggccagtggaagtactgccagagcgaggactaccccagatgcatcttccccttcatctacagaggcaaggcctacaacagctgcatcagccagggcagcttcctgggcagcctgtggtgcagcgtgaccagcgtgttcgacgagaagcagcagtggaagttctgcgagaccaacgagtacggcggcaacagcctgagaaagccctgcatcttccccagcatctacagaaacaacgtggtgagcgactgcatggaggacgagagcaacaagctgtggtgccccaccaccgagaacatggacaaggacggcaagtggagcttctgcgccgacaccagaatcagcgccctggtgcccggcttcccctgccacttccccttcaactacaagaacaagaactacttcaactgcaccaacgagggcagcaaggagaacctggtgtggtgcgccaccagctacaactacgaccaggaccacacctgggtgtactgctag

SEQ ID NO: 3897 - DNA, 1368 bp, synthetic construct
  misc_feature 1..1368: note = source = /note="Description of Artificial Sequence: Synthetic coding sequence"
  source 1..1368: mol_type = other DNA
atgctgcaccccgagaccagccccggcagaggccacctgctggccgtgctgctggccctgctgggcaccacctgggccgaggtgtggcccccccagctgcaggagcaggcccccatggccggcgccctgaacagaaaggagagcttcctgctgctgagcctgcacaacagactgagaagctgggtgcagccccccgccgccgacatgagaagactggactggagcgacagcctggcccagctggcccaggccagagccgccctgtgcggcatccccacccccagcctggccagcggcctgtggagaaccctgcaggtgggctggaacatgcagctgctgcccgccggcctggccagcttcgtggaggtggtgagcctgtggttcgccgagggccagagatacagccacgccgccggcgagtgcgccagaaacgccacctgcacccactacacccagctggtgtgggccaccagcagccagctgggctgcggcagacacctgtgcagcgccggccagaccgccatcgaggccttcgtgtgcgcctacagccccggcggcaactgggaggtgaacggcaagaccatcatcccctacaagaagggcgcctggtgcagcctgtgcaccgccagcgtgagcggctgcttcaaggcctgggaccacgccggcggcctgtgcgaggtgcccagaaacccctgcagaatgagctgccagaaccacggcagactgaacatcagcacctgccactgccactgcccccccggctacaccggcagatactgccaggtgagatgcagcctgcagtgcgtgcacggcagattcagagaggaggagtgcagctgcgtgtgcgacatcggctacggcggcgcccagtgcgccaccaaggtgcacttccccttccacacctgcgacctgagaatcgacggcgactgcttcatggtgagcagcgaggccgacacctactacagagccagaatgaagtgccagagaaagggcggcgtgctggcccagatcaagagccagaaggtgcaggacatcctggccttctacctgggcagactggagaccaccaacgaggtgatcgacagcgacttcgagaccagaaacttctggatcggcctgacctacaagaccgccaaggacagcttcagatgggccaccggcgagcaccaggccttcaccagcttcgccttcggccagcccgacaaccacggcctggtgtggctgagcgccgccatgggcttcggcaactgcgtggagctgcaggccagcgccgccttcaactggaacgaccagagatgcaagaccagaaacagatacatctgccagttcgcccaggagcacatcagcagatggggccccggcagctag

SEQ ID NO: 3898 - DNA, 1425 bp, synthetic construct
  misc_feature 1..1425: note = source = /note="Description of Artificial Sequence: Synthetic coding sequence"
  source 1..1425: mol_type = other DNA
atggccgacatgcagaacctggtggagagactggagagagccgtgggcagactggaggccgtgagccacaccagcgacatgcacagaggctacgccgacagccccagcaagggcgccgccccctacgtgcaggccttcgacagcctgctggccggccccgtggccgagtacctgaagatcagcaaggagatcggcggcgacgtgcagaagcacgccgagatggtgcacaccggcctgaagctggagagagccctgctggtgaccgccagccagtgccagcagcccgccgagaacaagctgagcgacctgctggcccccatcagcgagcagatcaaggaggtgatcaccttcagagagaagaacagaggcagcaagctgttcaaccacctgagcgccgtgagcgagagcatccaggccctgggctgggtggccatggcccccaagcccggcccctacgtgaaggagatgaacgacgccgccatgttctacaccaacagagtgctgaaggagtacaaggacgtggacaagaagcacgtggactgggtgaaggcctacctgagcatctggaccgagctgcaggcctacatcaaggagttccacaccaccggcctggcctggagcaagaccggccccgtggccaaggagctgagcggcctgcccagcggccccagcgccggcagctgccccccccccccccccccctgccccccccccccccccgtgagcaccatcagctgcagctacgagagcgccagcagaagcagcctgttcgcccagatcaaccagggcgagagcatcacccacgccctgaagcacgtgagcgacgacatgaagacccacaagaaccccgccctgaaggcccagagcggccccgtgagaagcggccccaagcccttcagcgcccccaagccccagaccagccccagccccaagagagccaccaagaaggagcccgccgtgctggagctggagggcaagaagtggagagtggagaaccaggagaacgtgagcaacctggtgatcgaggacaccgagctgaagcaggtggcctacatctacaagtgcgtgaacaccaccctgcagatcaagggcaagatcaacagcatcaccgtggacaactgcaagaagctgggcctggtgttcgacgacgtggtgggcatcgtggagatcatcaacagcaaggacgtgaaggtgcaggtgatgggcaaggtgcccaccatcagcatcaacaagaccgacggctgccacgcctacctgagcaagaacagcctggactgcgagatcgtgagcgccaagagcagcgagatgaacgtgctgatccccaccgagggcggcgacttcaacgagttccccgtgcccgagcagttcaagaccctgtggaacggccagaagctggtgaccaccgtgaccgagatcgccggctag

SEQ ID NO: 3899 - DNA, 360 bp, synthetic construct
  misc_feature 1..360: note = source = /note="Description of Artificial Sequence: Synthetic coding sequence"
  source 1..360: mol_type = other DNA
atgaacaagatcctgagcagcaccgtgtgcttcggcctgctgaccctgctgagcgtgctgagcttcctgcagagcgtgcacggcagaccctacctgacccagggcaacgagatcttccccgacaagaagtacaccaacagagaggagctgctgctggccctgctgaacaagaacttcgacttccagagacccttcaacaccgacctggccctgcccaacaagctggaggagctgaaccagctggagaagctgaaggagcagctggtggaggagaaggacagcgagaccagctacgccgtggacggcctgttcagcagccaccccagcaagagagcctgcttctggaagtactgcgtgtag

SEQ ID NO: 3900 - DNA, 3756 bp, synthetic construct
  misc_feature 1..3756: note = source = /note="Description of Artificial Sequence: Synthetic coding sequence"
  source 1..3756: mol_type = other DNA
atgagactgctgctgctggtgcccctgctgctggcccccgcccccggcagcagcgcccccaaggtgagaagacagagcgacacctggggcccctggagccagtggagcccctgcagcagaacctgcggcggcggcgtgagcttcagagagagaccctgctacagccagagaagagacggcggcagcagctgcgtgggccccgccagaagccacagaagctgcagaaccgagagctgccccgacggcgccagagacttcagagccgagcagtgcgccgagttcgacggcgccgagttccagggcagaagatacagatggctgccctactacagcgcccccaacaagtgcgagctgaactgcatccccaagggcgagaacttctactacaagcacagagaggccgtggtggacggcaccccctgcgagcccggcaagagagacgtgtgcgtggacggcagctgcagagtggtgggctgcgaccacgagctggacagcagcaagcaggaggacaagtgcctgagatgcggcggcgacggcaccacctgctaccccgtggccggcaccttcgacgccaacgacctgagcagagccgtgaagaacgtgagaggcgagtactacctgaacggccactggaccatcgaggccgccagagccctgcccgccgccagcaccatcctgcactacgagagaggcgccgagggcgacctggcccccgagagactgcacgccagaggccccaccagcgagcccctggtgatcgagctgatcagccaggagcccaaccccggcgtgcactacgagtaccacctgcccctgagaagacccagccccggcttcagctggagccacggcagctggagcgactgcagcgccgagtgcggcggcggccaccagagcagactggtgttctgcaccatcgaccacgaggcctaccccgaccacatgtgccagagacagcccagacccgccgacagaagaagctgcaacctgcacccctgccccgagaccaagagatggaaggccggcccctgggccccctgcagcgccagctgcggcggcggcagccagagcagaagcgtgtactgcatcagcagcgacggcgccggcatccaggaggccgtggaggaggccgagtgcgccggcctgcccggcaagccccccgccatccaggcctgcaacctgcagagatgcgccgcctggagccccgagccctggggcgagtgcagcgtgagctgcggcgtgggcgtgagaaagagaagcgtgacctgcagaggcgagagaggcagcctgctgcacaccgccgcctgcagcctggaggacagaccccccctgaccgagccctgcgtgcacgaggactgccccctgctgagcgaccaggcctggcacgtgggcacctggggcctgtgcagcaagagctgcagcagcggcaccagaagaagacaggtgatctgcgccatcggcccccccagccactgcggcagcctgcagcacagcaagcccgtggacgtggagccctgcaacacccagccctgccacctgccccaggaggtgcccagcatgcaggacgtgcacacccccgccagcaacccctggatgcccctgggcccccaggagagccccgccagcgacagcagaggccagtggtgggccgcccaggagcaccccagcgccagaggcgaccacagaggcgagagaggcgaccccagaggcgaccagggcacccacctgagcgccctgggccccgcccccagcctgcagcagcccccctaccagcagcccctgagaagcggcagcggcccccacgactgcagacacagcccccacggctgctgccccgacggccacaccgccagcctgggcccccagtggcagggctgccccggcgccccctgccagcagagcagatacggctgctgccccgacagagtgagcgtggccgagggcccccaccacgccggctgcaccaagagctacggcggcgacagcaccggcggcatgcccagaagcagagccgtggccagcaccgtgcacaacacccaccagccccaggcccagcagaacgagcccagcgagtgcagaggcagccagttcggctgctgctacgacaacgtggccaccgccgccggccccctgggcgagggctgcgtgggccagcccagccacgcctaccccgtgagatgcctgctgcccagcgcccacggcagctgcgccgactgggccgccagatggtacttcgtggccagcgtgggccagtgcaacagattctggtacggcggctgccacggcaacgccaacaacttcgccagcgagcaggagtgcatgagcagctgccagggcagcctgcacggccccagaagaccccagcccggcgccagcggcagaagcacccacaccgacggcggcggcagcagccccgccggcgagcaggagcccagccagcacagaaccggcgccgccgtgcagagaaagccctggcccagcggcggcctgtggagacaggaccagcagcccggccccggcgaggccccccacacccaggccttcggcgagtggccctggggccaggagctgggcagcagagcccccggcctgggcggcgacgccggcagccccgccccccccttccacagcagcagctacagaatcagcctggccggcgtggagcccagcctggtgcaggccgccctgggccagctggtgagactgagctgcagcgacgacaccgcccccgagagccaggccgcctggcagaaggacggccagcccatcagcagcgacagacacagactgcagttcgacggcagcctgatcatccaccccctgcaggccgaggacgccggcacctacagctgcggcagcaccagacccggcagagacagccagaagatccagctgagaatcatcggcggcgacatggccgtgctgagcgaggccgagctgagcagattcccccagcccagagaccccgcccaggacttcggccaggccggcgccgccggccccctgggcgccatccccagcagccacccccagcccgccaacagactgagactggaccagaaccagcccagagtggtggacgccagccccggccagagaatcagaatgacctgcagagccgagggcttccccccccccgccatcgagtggcagagagacggccagcccgtgagcagccccagacaccagctgcagcccgacggcagcctggtgatcagcagagtggccgtggaggacggcggcttctacacctgcgtggccttcaacggccaggacagagaccagagatgggtgcagctgagagtgctgggcgagctgaccatcagcggcctgccccccaccgtgaccgtgcccgagggcgacaccgccagactgctgtgcgtggtggccggcgagagcgtgaacatcagatggagcagaaacggcctgcccgtgcaggccgacggccacagagtgcaccagagccccgacggcaccctgctgatctacaacctgagagccagagacgagggcagctacacctgcagcgcctaccagggcagccaggccgtgagcagaagcaccgaggtgaaggtggtgagccccgcccccaccgcccagcccagagaccccggcagagactgcgtggaccagcccgagctggccaactgcgacctgatcctgcaggcccagctgtgcggcaacgagtactacagcagcttctgctgcgccagctgcagcagattccagccccacgcccagcccatctggcagtag

SEQ ID NO: 3901 - DNA, 1731 bp, synthetic construct
  misc_feature 1..1731: note = source = /note="Description of Artificial Sequence: Synthetic coding sequence"
  source 1..1731: mol_type = other DNA
atggcccagggcgtgctgtggatcctgctgggcctgctgctgtggagcgaccccggcaccgccagcctgcccctgctgatggacagcgtgatccaggccctggccgagctggagcagaaggtgcccgccgccaagaccagacacaccgccagcgcctggctgatgagcgcccccaacagcggcccccacaacagactgtaccacttcctgctgggcgcctggagcctgaacgccaccgagctggacccctgccccctgagccccgagctgctgggcctgaccaaggaggtggccagacacgacgtgagagagggcaaggagtacggcgtggtgctggcccccgacggcagcaccgtggccgtggagcccctgctggccggcctggaggccggcctgcagggcagaagagtgatcaacctgcccctggacagcatggccgccccctgggagaccggcgacaccttccccgacgtggtggccatcgcccccgacgtgagagccaccagcagccccggcctgagagacggcagccccgacgtgaccaccgccgacatcggcgccaacacccccgacgccaccaagggctgccccgacgtgcaggccagcctgcccgacgccaaggccaagagcccccccaccatggtggacagcctgctggccgtgaccctggccggcaacctgggcctgaccttcctgagaggcagccagacccagagccaccccgacctgggcaccgagggctgctgggaccagctgagcgcccccagaaccttcaccctgctggaccccaaggccagcctgctgaccatggccttcctgaacggcgccctggacggcgtgatcctgggcgactacctgagcagaacccccgagcccagacccagcctgagccacctgctgagccagtactacggcgccggcgtggccagagaccccggcttcagaagcaacttcagaagacagaacggcgccgccctgaccagcgccagcatcctggcccagcaggtgtggggcaccctggtgctgctgcagagactggagcccgtgcacctgcagctgcagtgcatgagccaggagcagctggcccaggtggccgccaacgccaccaaggagttcaccgaggccttcctgggctgccccgccatccaccccagatgcagatggggcgccgccccctacagaggcagacccaagctgctgcagctgcccctgggcttcctgtacgtgcaccacacctacgtgcccgcccccccctgcaccgacttcaccagatgcgccgccaacatgagaagcatgcagagataccaccaggacacccagggctggggcgacatcggctacagcttcgtggtgggcagcgacggctacgtgtacgagggcagaggctggcactgggtgggcgcccacaccctgggccacaacagcagaggcttcggcgtggccatcgtgggcaactacaccgccgccctgcccaccgaggccgccctgagaaccgtgagagacaccctgcccagctgcgccgtgagagccggcctgctgagacccgactacgccctgctgggccacagacagctggtgagaaccgactgccccggcgacgccctgttcgacctgctgagaacctggccccacttcaccgccaccgtgaagcccagacccgccagaagcgtgagcaagagaagcagaagagagcccccccccagaaccctgcccgccaccgacctgcagtag

SEQ ID NO: 3902 - DNA, 846 bp, synthetic construct
  misc_feature 1..846: note = source = /note="Description of Artificial Sequence: Synthetic coding sequence"
  source 1..846: mol_type = other DNA
atgctgcccaagagcagaagagccctgaccatccaggagatcgccgccctggccagaagcagcctgcacggcatcagccaggtggtgaaggaccacgtgaccaagcccaccgccatggcccagggcagagtggcccacctgatcgagtggaagggctggagcaagcccagcgacagccccgccgccctggagagcgccttcagcagctacagcgacctgagcgagggcgagcaggaggccagattcgccgccggcgtggccgagcagttcgccatcgccgaggccaagctgagagcctggagcagcgtggacggcgaggacagcaccgacgacagctacgacgaggacttcgccggcggcatggacaccgacatggccggccagctgcccctgggcccccacctgcaggacctgttcaccggccacagattcagcagacccgtgagacagggcagcgtggagcccgagagcgactgcagccagaccgtgagccccgacaccctgtgcagcagcctgtgcagcctggaggacggcctgctgggcagccccgccagactggccagccagctgctgggcgacgagctgctgctggccaagctgccccccagcagagagagcgccttcagaagcctgggccccctggaggcccaggacagcctgtacaacagccccctgaccgagagctgcctgagccccgccgaggaggagcccgccccctgcaaggactgccagcccctgtgcccccccctgaccggcagctgggagagacagagacaggccagcgacctggccagcagcggcgtggtgagcctggacgaggacgaggccgagcccgaggagcagtag

SEQ ID NO: 3903 - DNA, 2619 bp, synthetic construct
  misc_feature 1..2619: note = source = /note="Description of Artificial Sequence: Synthetic coding sequence"
  source 1..2619: mol_type = other DNA
atgggcatcgtgtggatcctgatgagcgtgctgccctggtggggcagatgcgccgacctggccatcgccagcacccagctggtgcccagcaccgccagcgccagaatggccctgagcagccagctgatgggcagaaccgtgtggacccccatgagcgccagcgccctgcaggagcccgcctaccccgccctggccagaaccagcagagcccccagcgccgccagcgtgcccctggccagcagatgcagagtgaccaccgccctgatcagcaccagcgcccagagaagccccaccagcgccagcctggcccccgtgcccaccgccctgggcgccagcagcgccagcgcccacctggccctgagcagcctgaccatgggcaccgtggccctgacccacggcagagtgagcgccagccccgtgctgagactgggcagcgccagatgccccaagctgagcaccccccccagacccgccgccgccgccgtgagaggcctgggcagagccggcgagacccccgccaactgcgtgcccagaagagccgtgcccggccccgacgacagcagagaggacgtgaacgagtgcgccgagaaccccggcgtgtgcaccaacggcgtgtgcgtgaacaccgacggcagcttcagatgcgagtgccccttcggctacagcctggacttcaccggcatcaactgcgtggacaccgacgagtgcagcgtgggccacccctgcggccagggcacctgcaccaacgtgatcggcggcttcgagtgcgcctgcgccgacggcttcgagcccggcctgatgatgacctgcgaggacatcgacgagtgcagcctgaaccccctgctgtgcgccttcagatgccacaacaccgagggcagctacctgtgcacctgccccgccggctacaccctgagagaggacggcgccatgtgcagagacgtggacgagtgcgccgacggccagcaggactgccacgccagaggcatggagtgcaagaacctgatcggcaccttcgcctgcgtgtgcccccccggcatgagacccctgcccggcagcggcgagggctgcaccgacgacaacgagtgccacgcccagcccgacctgtgcgtgaacggcagatgcgtgaacaccgccggcagcttcagatgcgactgcgacgagggcttccagcccagccccaccctgaccgagtgccacgacatcagacagggcccctgcttcgccgaggtgctgcagaccatgtgcagaagcctgagcagcagcagcgaggccgtgaccagagccgagtgctgctgcggcggcggcagaggctggggccccagatgcgagctgtgccccctgcccggcaccagcgcctacagaaagctgtgcccccacggcagcggctacaccgccgagggcagagacgtggacgagtgcagaatgctggcccacctgtgcgcccacggcgagtgcatcaacagcctgggcagcttcagatgccactgccaggccggctacacccccgacgccaccgccaccacctgcctggacatggacgagtgcagccaggtgcccaagccctgcaccttcctgtgcaagaacaccaagggcagcttcctgtgcagctgccccagaggctacctgctggaggaggacggcagaacctgcaaggacctggacgagtgcaccagcagacagcacaactgccagttcctgtgcgtgaacaccgtgggcgccttcacctgcagatgcccccccggcttcacccagcaccaccaggcctgcttcgacgtgaacgagtgcgacggcccccacagatgccagcacggctgccagaaccagctgggcggctacagatgcagctgcccccagggcttcacccagcacagccagtgggcccagtgcgtggacgagaacgagtgcgccctgagcccccccacctgcggcagcgccagctgcagaaacaccctgggcggcttcagatgcgtgtgccccagcggcttcgacttcgaccaggccctgggcggctgccaggaggtggacgagtgcgccggcagaagaggcccctgcagctacagctgcgccaacacccccggcggcttcctgtgcggctgcccccagggctacttcagagccggccagggccactgcgtgagcggcctgggcttcagccccggcccccaggacacccccgacaaggaggagctgctgagcagcgaggcctgctacgagtgcaagatcaacggcctgagccccagagacagacccagaagaagcgcccacagagaccaccaggtgaacctggccaccctggacagcgaggccctgctgaccctgggcctgaacctgagccacctgggcagagccgagagaatcctggagctgagacccgccctggagggcctggagggcagaatcagatacgtgatcgtgagaggcaacgagcagggcttcttcagaatgcaccacctgagaggcgtgagcagcctgcagctgggcagaagaagacccggccccggcacctacagactggaggtggtgagccacatggccggcccctggggcgtgcagcccgagggccagcccggcccctggggccaggccctgagactgaaggtgcagctgcagctgctgtag

SEQ ID NO: 3904 - DNA, 1368 bp, synthetic construct
  misc_feature 1..1368: note = source = /note="Description of Artificial Sequence: Synthetic coding sequence"
  source 1..1368: mol_type = other DNA
atggccagaaaggccctgaagctggccagctggaccagcatggccctggccgccagcggcatctacttctacagcaacaagtacctggaccccaacgacttcggcgccgtgagagtgggcagagccgtggccaccaccgccgtgatcagctacgactacctgaccagcctgaagagcgtgccctacggcagcgaggagtacctgcagctgagaagcaagatccacgacctgttccagagcttcgacgacacccccctgggcaccgccagcctggcccaggtgcacaaggccgtgctgcacgacggcagaaccgtggccgtgaaggtgcagcaccccaaggtgagagcccagagcagcaaggacatcctgctgatggaggtgctggtgctggccgtgaagcagctgttccccgagttcgagttcatgtggctggtggacgaggccaagaagaacctgcccctggagctggacttcctgaacgagggcagaaacgccgagaaggtgagccagatgctgagacacttcgacttcctgaaggtgcccagaatccactgggacctgagcaccgagagagtgctgctgatggagttcgtggacggcggccaggtgaacgacagagactacatggagagaaacaagatcgacgtgaacgagatcagcagacacctgggcaagatgtacagcgagatgatcttcgtgaacggcttcgtgcactgcgacccccaccccggcaacgtgctggtgagaaagcaccccggcaccggcaaggccgagatcgtgctgctggaccacggcctgtaccagatgctgaccgaggagttcagactgaactactgccacctgtggcagagcctgatctggaccgacatgaagagagtgaaggagtacagccagagactgggcgccggcgacctgtaccccctgttcgcctgcatgctgaccgccagaagctgggacagcgtgaacagaggcatcagccaggcccccgtgaccgccaccgaggacctggagatcagaaacaacgccgccaactacctgccccagatcagccacctgctgaaccacgtgcccagacagatgctgctgatcctgaagaccaacgacctgctgagaggcatcgaggccgccctgggcaccagagccagcgccagcagcttcctgaacatgagcagatgctgcatcagagccctggccgagcacaagaagaagaacacctgcagcttcttcagaagaacccagatcagcttcagcgaggccttcaacctgtggcagatcaacctgcacgagctgatcctgagagtgaagggcctgaagctggccgacagagtgctggccctgatctgctggctgttccccgcccccctgtag

SEQ ID NO: 3905 - DNA, 1245 bp, synthetic construct
  misc_feature 1..1245: note = source = /note="Description of Artificial Sequence: Synthetic coding sequence"
  source 1..1245: mol_type = other DNA
atgaaccccaccctgggcctggccatcttcctggccgtgctgctgaccgtgaagggcctgctgaagcccagcttcagccccagaaactacaaggccctgagcgaggtgcagggctggaagcagagaatggccgccaaggagctggccagacagaacatggacctgggcttcaagctgctgaagaagctggccttctacaaccccggcagaaacatcttcctgagccccctgagcatcagcaccgccttcagcatgctgtgcctgggcgcccaggacagcaccctggacgagatcaagcagggcttcaacttcagaaagatgcccgagaaggacctgcacgagggcttccactacatcatccacgagctgacccagaagacccaggacctgaagctgagcatcggcaacaccctgttcatcgaccagagactgcagccccagagaaagttcctggaggacgccaagaacttctacagcgccgagaccatcctgaccaacttccagaacctggagatggcccagaagcagatcaacgacttcatcagccagaagacccacggcaagatcaacaacctgatcgagaacatcgaccccggcaccgtgatgctgctggccaactacatcttcttcagagccagatggaagcacgagttcgaccccaacgtgaccaaggaggaggacttcttcctggagaagaacagcagcgtgaaggtgcccatgatgttcagaagcggcatctaccaggtgggctacgacgacaagctgagctgcaccatcctggagatcccctaccagaagaacatcaccgccatcttcatcctgcccgacgagggcaagctgaagcacctggagaagggcctgcaggtggacaccttcagcagatggaagaccctgctgagcagaagagtggtggacgtgagcgtgcccagactgcacatgaccggcaccttcgacctgaagaagaccctgagctacatcggcgtgagcaagatcttcgaggagcacggcgacctgaccaagatcgccccccacagaagcctgaaggtgggcgaggccgtgcacaaggccgagctgaagatggacgagagaggcaccgagggcgccgccggcaccggcgcccagaccctgcccatggagacccccctggtggtgaagatcgacaagccctacctgctgctgatctacagcgagaagatccccagcgtgctgttcctgggcaagatcgtgaaccccatcggcaagtag

SEQ ID NO: 3906 - DNA, 942 bp, synthetic construct
  misc_feature 1..942: note = source = /note="Description of Artificial Sequence: Synthetic coding sequence"
  source 1..942: mol_type = other DNA
atgagcgacctgctgctgctgggcctgatcggcggcctgaccctgctgctgctgctgaccctgctggccttcgccggctacagcggcctgctggccggcgtggaggtgagcgccggcagcccccccatcagaaacgtgaccgtggcctacaagttccacatgggcctgtacggcgagaccggcagactgttcaccgagagctgcagcatcagccccaagctgagaagcatcgccgtgtactacgacaacccccacatggtgccccccgacaagtgcagatgcgccgtgggcagcatcctgagcgagggcgaggagagccccagccccgagctgatcgacctgtaccagaagttcggcttcaaggtgttcagcttccccgcccccagccacgtggtgaccgccaccttcccctacaccaccatcctgagcatctggctggccaccagaagagtgcaccccgccctggacacctacatcaaggagagaaagctgtgcgcctaccccagactggagatctaccaggaggaccagatccacttcatgtgccccctggccagacagggcgacttctacgtgcccgagatgaaggagaccgagtggaagtggagaggcctggtggaggccatcgacacccaggtggacggcaccggcgccgacaccatgagcgacaccagcagcgtgagcctggaggtgagccccggcagcagagagaccagcgccgccaccctgagccccggcgccagcagcagaggctgggacgacggcgacaccagaagcgagcacagctacagcgagagcggcgccagcggcagcagcttcgaggagctggacctggagggcgagggccccctgggcgagagcagactggaccccggcaccgagcccctgggcaccaccaagtggctgtgggagcccaccgcccccgagaagggcaaggagtag

SEQ ID NO: 3907 - DNA, 603 bp, synthetic construct
  misc_feature 1..603: note = source = /note="Description of Artificial Sequence: Synthetic coding sequence"
  source 1..603: mol_type = other DNA
atggcctggggcggcgtgcacacctgctgcttccacctgtgctgctgctgcagctggccccagggcgccgtgcccgaggagctgcacaagcaccccggccagaccctgctgctgcagtgccagtacagccccaagagaggcccctaccagcccaagagctggtgccagcagaccagccccagcagatgcaccctgctggtgaccagcagcaagccctggaccgccgtgcagaagagccactacaccatctgggacaagcccaacgccggcttcttcaacatcaccatgatccagctgacccagaacgacagcggcttctactggtgcggcatctacaacgccagcgagaacatcatcaccgtgctgagaaacatcagcctggtggtgagccccgcccccaccaccagccccatgtggaccctgccctggctgcccaccagcaccgtgctgatcaccagccccgagggcaccagcggccaccccagcatcaacggcagcgagaccagaaagagcagagcccccgcctgcctgggcagcggcggccccagattcctggtgctggtgctgtgcggcctgctgctggccaagggcctgatgctgtag

SEQ ID NO: 3908 - DNA, 1035 bp, synthetic construct
  misc_feature 1..1035: note = source = /note="Description of Artificial Sequence: Synthetic coding sequence"
  source 1..1035: mol_type = other DNA
accacccccagcagagccctgcccggctggagcaactgcagacccagatggagagccggccccaccccccagagccccaccccccagagcagaatgagactgagccccggcccccccagcgagtggacctggctgctgccccacttcaacccctgccaccaccaccacagacaccaccaccccaaccccaccaccagcctgctgcccaccgagccccccagcggccccgaggtgagcagccagggcagagaggccagctgcgagggcaccctgagagccgtggacccccccgtgagacaccacagctacggcagacacgagggcgcctggatgaaggaccccgccgccagagacgacagaatctacgtgaccaactactactacggcaacagcctggtggagttcagaaacctggagaacttcaagcagggcagatggagcaacatgtacaagctgccctacaactggatcggcaccggccacgtggtgtaccagggcgccttctactacaacagagccttcaccaagaacatcatcaagtacgacctgagacagagattcgtggccagctgggccctgctgcccgacgtggtgtacgaggacaccaccccctggaagtggagaggccacagcgacatcgacttcgccgtggacgagagcggcctgtgggtgatctaccccgccgtggacgacagagacgaggcccagcccgaggtgatcgtgctgagcagactggaccccggcgacctgagcgtgcacagagagaccacctggaagaccagactgagaagaaacagctacggcaactgcttcctggtgtgcggcatcctgtacgccgtggacacctacaaccagcaggagggccaggtggcctacgccttcgacacccacaccggcaccgacgccagaccccagctgcccttcctgaacgagcacgcctacaccacccagatcgactacaaccccaaggagagagtgctgtacgcctgggacaacggccaccagctgacctacaccctgcacttcgtggtgtag

SEQ ID NO: 3909 - DNA, 2682 bp, synthetic construct
  misc_feature 1..2682: note = source = /note="Description of Artificial Sequence: Synthetic coding sequence"
  source 1..2682: mol_type = other DNA
atggccgaggccgccctggaggccgtgagaagcgagctgagagagttccccgccgccgccagagagctgtgcgtgcccctggccgtgccctacctggacaagccccccacccccctgcacttctacagagactgggtgtgccccaacagaccctgcatcatcagaaacgccctgcagcactggcccgccctgcagaagtggagcctgccctacttcagagccaccgtgggcagcaccgaggtgagcgtggccgtgacccccgacggctacgccgacgccgtgagaggcgacagattcatgatgcccgccgagagaagactgcccctgagcttcgtgctggacgtgctggagggcagagcccagcaccccggcgtgctgtacgtgcagaagcagtgcagcaacctgcccagcgagctgccccagctgctgcccgacctggagagccacgtgccctgggccagcgaggccctgggcaagatgcccgacgccgtgaacttctggctgggcgaggccgccgccgtgaccagcctgcacaaggaccactacgagaacctgtactgcgtggtgagcggcgagaagcacttcctgttccacccccccagcgacagacccttcatcccctacgagctgtacacccccgccacctaccagctgaccgaggagggcaccttcaaggtggtggacgaggaggccatggagaaggccgaggtgagcagaacctgcctgctgaccgtgagagtgctgcaggcccacagactgcccagcaaggacctggtgacccccagcgactgctacgtgaccctgtggctgcccaccgcctgcagccacagactgcagaccagaaccgtgaagaacagcagcagccccgtgtggaaccagagcttccacttcagaatccacagacagctgaagaacgtgatggagctgaaggtgttcgaccaggacctggtgaccggcgacgaccccgtgctgagcgtgctgttcgacgccggcaccctgagagccggcgagttcagaagagagagcttcagcctgagcccccagggcgagggcagactggaggtggagttcagactgcagagcctggccgacagaggcgagtggctggtgagcaacggcgtgctggtggccagagagctgagctgcctgcacgtgcagctggaggagaccggcgaccagaagagcagcgagcacagagtgcagctggtggtgcccggcagctgcgagggcccccaggaggccagcgtgggcaccggcaccttcagattccactgccccgcctgctgggagcaggagctgagcatcagactgcaggacgcccccgaggagcagctgaaggcccccctgagcgccctgcccagcggccaggtggtgagactggtgttccccaccagccaggagcccctgatgagagtggagctgaagaaggaggccggcctgagagagctggccgtgagactgggcttcggcccctgcgccgaggagcaggccttcctgagcagaagaaagcaggtggtggccgccgccctgagacaggccctgcagctggacggcgacctgcaggaggacgagatccccgtggtggccatcatggccaccggcggcggcatcagagccatgaccagcctgtacggccagctggccggcctgaaggagctgggcctgctggactgcgtgagctacatcaccggcgccagcggcagcacctgggccctggccaacctgtacgaggaccccgagtggagccagaaggacctggccggccccaccgagctgctgaagacccaggtgaccaagaacaagctgggcgtgctggcccccagccagctgcagagatacagacaggagctggccgagagagccagactgggctaccccagctgcttcaccaacctgtgggccctgatcaacgaggccctgctgcacgacgagccccacgaccacaagctgagcgaccagagagaggccctgagccacggccagaaccccctgcccatctactgcgccctgaacaccaagggccagagcctgaccaccttcgagttcggcgagtggtgcgagttcagcccctacgaggtgggcttccccaagtacggcgccttcatccccagcgagctgttcggcagcgagttcttcatgggccagctgatgaagagactgcccgagagcagaatctgcttcctggagggcatctggagcaacctgtacgccgccaacctgcaggacagcctgtactgggccagcgagcccagccagttctgggacagatgggtgagaaaccaggccaacctggacaaggagcaggtgcccctgctgaagatcgaggagccccccagcaccgccggcagaatcgccgagttcttcaccgacctgctgacctggagacccctggcccaggccacccacaacttcctgagaggcctgcacttccacaaggactacttccagcacccccacttcagcacctggaaggccaccaccctggacggcctgcccaaccagctgacccccagcgagccccacctgtgcctgctggacgtgggctacctgatcaacaccagctgcctgcccctgctgcagcccaccagagacgtggacctgatcctgagcctggactacaacctgcacggcgccttccagggcagcggcggccaccccagaagaagacagctgggcagatag

SEQ ID NO: 3910 - DNA, 354 bp, synthetic construct
  misc_feature 1..354: note = source = /note="Description of Artificial Sequence: Synthetic coding sequence"
  source 1..354: mol_type = other DNA
atgatcatcgacagcagcagaatccccagcttcacccagctgcacagcaccatgaccagagcccccctgctgctgctgtgcgtggccctggtgctgctgggccacgtgaacggcgccaccgtgagaaacgaggacaagtggaagcccctgaacaaccccagaaacagagacctgttcttcagaagactgcaggcctacttcaagggcagaggcctggacctgggcaccttccccaaccccttccccaccaacgagaaccccagacccctgagcttccagagcgagctgaccgccagcgccagcgccgactacgaggagcagaagaacagcttccacaactacctgaagggctag

SEQ ID NO: 3911 - DNA, 4143 bp, synthetic construct
  misc_feature 1..4143: note = source = /note="Description of Artificial Sequence: Synthetic coding sequence"
  source 1..4143: mol_type = other DNA
atgagacacggcgtggcctgggccctgctggtggccgccgccctgggcctgggcgccagaggcgtgagaggcgccgtggccctggccgacttctaccccttcggcgccgagagaggcgacgccgtgacccccaagcaggacgacggcggcagcggcctgagacccctgagcgtgcccttccccttcttcggcgccgagcacagcggcctgtacgtgaacaacaacggcatcatcagcttcctgaaggaggtgagccagttcacccccgtggccttccccatcgccaaggacagatgcgtggtggccgccttctgggccgacgtggacaacagaagagccggcgacgtgtactacagagaggccaccgaccccgccatgctgagaagagccaccgaggacgtgagacactacttccccgagctgctggacttcaacgccacctgggtgttcgtggccacctggtacagagtgaccttcttcggcggcagcagcagcagccccgtgaacaccttccagaccgtgctgatcaccgacggcaagctgagcttcaccatcttcaactacgagagcatcgtgtggaccaccggcacccacgccagcagcggcggcaacgccaccggcctgggcggcatcgccgcccaggccggcttcaacgccggcgacggccagagatacttcagcatccccggcagcagaaccgccgacatggccgaggtggagaccaccaccaacgtgggcgtgcccggcagatgggccttcagaatcgacgacgcccaggtgagagtgggcggctgcggccacaccaccagcgtgtgcctggccctgagaccctgcctgaacggcggcaagtgcatcgacgactgcgtgaccggcaaccccagctacacctgcagctgcctgagcggcttcaccggcagaagatgccacctggacgtgaacgagtgcgccagccagccctgccagaacggcggcacctgcacccacggcatcaacagcttcagatgccagtgccccgccggcttcggcggccccacctgcgagaccgcccagagcccctgcgacaccaaggagtgccagcacggcggccagtgccaggtggagaacggcagcgccgtgtgcgtgtgccaggccggctacaccggcgccgcctgcgagatggacgtggacgactgcagccccgacccctgcctgaacggcggcagctgcgtggacctggtgggcaactacacctgcctgtgcgccgagcccttcaagggcctgagatgcgagaccggcgaccaccccgtgcccgacgcctgcctgagcgccccctgccacaacggcggcacctgcgtggacgccgaccagggctacgtgtgcgagtgccccgagggcttcatgggcctggactgcagagagagagtgcccgacgactgcgagtgcagaaacggcggcagatgcctgggcgccaacaccaccctgtgccagtgccccctgggcttcttcggcctgctgtgcgagttcgagatcaccgccatgccctgcaacatgaacacccagtgccccgacggcggctactgcatggagcacggcggcagctacctgtgcgtgtgccacaccgaccacaacgccagccacagcctgcccagcccctgcgacagcgacccctgcttcaacggcggcagctgcgacgcccacgacgacagctacacctgcgagtgccccagaggcttccacggcaagcactgcgagaaggccagaccccacctgtgcagcagcggcccctgcagaaacggcggcacctgcaaggaggccggcggcgagtaccactgcagctgcccctacagattcaccggcagacactgcgagatcggcaagcccgacagctgcgccagcggcccctgccacaacggcggcacctgcttccactacatcggcaagtacaagtgcgactgcccccccggcttcagcggcagacactgcgagatcgcccccagcccctgcttcagaagcccctgcgtgaacggcggcacctgcgaggacagagacaccgacttcttctgccactgccaggccggctacatgggcagaagatgccaggccgaggtggactgcggcccccccgaggaggtgaagcacgccaccctgagattcaacggcaccagactgggcgccgtggccctgtacgcctgcgacagaggctacagcctgagcgcccccagcagaatcagagtgtgccagccccacggcgtgtggagcgagcccccccagtgcctggagatcgacgagtgcagaagccagccctgcctgcacggcggcagctgccaggacagagtggccggctacctgtgcctgtgcagcaccggctacgagggcgcccactgcgagctggagagagacgagtgcagagcccacccctgcagaaacggcggcagctgcagaaacctgcccggcgcctacgtgtgcagatgccccgccggcttcgtgggcgtgcactgcgagaccgaggtggacgcctgcgacagcagcccctgccagcacggcggcagatgcgagagcggcggcggcgcctacctgtgcgtgtgccccgagagcttcttcggctaccactgcgagaccgtgagcgacccctgcttcagcagcccctgcggcggcagaggctactgcctggccagcaacggcagccacagctgcacctgcaaggtgggctacaccggcgaggactgcgccaaggagctgttcccccccaccgccctgaagatggagagagtggaggagagcggcgtgagcatcagctggaacccccccaacggccccgccgccagacagatgctggacggctacgccgtgacctacgtgagcagcgacggcagctacagaagaaccgacttcgtggacagaaccagaagcagccaccagctgcaggccctggccgccggcagagcctacaacatcagcgtgttcagcgtgaagagaaacagcaacaacaagaacgacatcagcagacccgccgtgctgctggccagaaccagacccagacccgtggagggcttcgaggtgaccaacgtgaccgccagcaccatcagcgtgcagtgggccctgcacagaatcagacacgccaccgtgagcggcgtgagagtgagcatcagacaccccgaggccctgagagaccaggccaccgacgtggacagaagcgtggacagattcaccttcagagccctgctgcccggcaagagatacaccatccagctgaccaccctgagcggcctgagaggcgaggagcaccccaccgagagcctggccaccgcccccacccacgtgtggaccagacccctgccccccgccaacctgaccgccgccagagtgaccgccaccagcgcccacgtggtgtgggacgcccccacccccggcagcctgctggaggcctacgtgatcaacgtgaccaccagccagagcaccaagagcagatacgtgcccaacggcaagctggccagctacaccgtgagagacctgctgcccggcagaagataccagctgagcgtgatcgccgtgcagagcaccgagctgggcccccagcacagcgagcccgcccacctgtacatcatcaccagccccagagacggcgccgacagaagatggcaccagggcggccaccaccccagagtgctgaagaacagacccccccccgccagactgcccgagctgagactgctgaacgaccacagcgcccccgagacccccacccagccccccagattcagcgagctggtggacggcagaggcagagtgagcgccagattcggcggcagccccagcaaggccgccaccgtgagaagccacgtgcccggcaactgcagcgagaacccctgccagaacggcggcacctgcgtgcccggcgccgacgcccacagctgcgactgcggccccggcttcaagggcagaagatgcgagctggcctgcatcaaggtgagcagaccctgcaccagactgttcagcgagaccaaggccttccccgtgtgggagggcggcgtgtgccaccacgtgtacaagagagtgtacagagtgcaccaggacatctgcttcaaggagagctgcgagagcaccagcctgaagaagacccccaacagaaagcagagcaagagccagaccctggagaagagctag

SEQ ID NO: 3912 - DNA, 474 bp, synthetic construct
  misc_feature 1..474: note = source = /note="Description of Artificial Sequence: Synthetic coding sequence"
  source 1..474: mol_type = other DNA
atggaggccctgagaagagcccacgaggtggccctgagactgctgctgtgcagaccctgggccagcagagccgccgccagacccaagcccagcgccagcgaggtgctgaccagacacctgctgcagagaagactgccccactggaccagcttctgcgtgccctacagcgccgtgagaaacgaccagttcggcctgagccacttcaactggcccgtgcagggcgccaactaccacgtgctgagaaccggctgcttccccttcatcaagtaccactgcagcaaggccccctggcaggacctggccagacagaacagattcttcaccgccctgaaggtggtgaacctgggcatccccaccctgctgtacggcctgggcagctggctgttcgccagagtgaccgagaccgtgcacaccagctacggccccatcaccgtgtacttcctgaacaaggaggacgagggcgccatgtactag

SEQ ID NO: 3913 - DNA, 288 bp, synthetic construct
  misc_feature 1..288: note = source = /note="Description of Artificial Sequence: Synthetic coding sequence"
  source 1..288: mol_type = other DNA
atgaagggcagcagagccctgctgctggtggccctgaccctgttctgcatctgcagaatggccaccggcgaggacaacgacgagttcttcatggacttcctgcagaccctgctggtgggcacccccgaggagctgtacgagggcaccctgggcaagtacaacgtgaacgaggacgccaaggccgccatgaccgagctgaagagctgcatcgacggcctgcagcccatgcacaaggccgagctggtgaagctgctggtgcaggtgctgggcagccaggacggcgcctag

SEQ ID NO: 3914 - DNA, 1053 bp, synthetic construct
  misc_feature 1..1053: note = source = /note="Description of Artificial Sequence: Synthetic coding sequence"
  source 1..1053: mol_type = other DNA
atgaagtgcagcctgagagtgtggttcctgagcgtggccttcctgctggtgttcatcatgagcctgctgttcacctacagccaccacagcatggccaccctgccctacctggacagcggcgccctggacggcacccacagagtgaagctggtgcccggctacgccggcctgcagagactgagcaaggagagactgagcggcaagagctgcgcctgcagaagatgcatgggcgacgccggcgccagcgactggttcgacagccacttcgacggcaacatcagccccgtgtggaccagagagaacatggacctgccccccgacgtgcagagatggtggatgatgctgcagccccagttcaagagccacaacaccaacgaggtgctggagaagctgttccagatcgtgcccggcgagaacccctacagattcagagacccccaccagtgcagaagatgcgccgtggtgggcaacagcggcaacctgagaggcagcggctacggccaggacgtggacggccacaacttcatcatgagaatgaaccaggcccccaccgtgggcttcgagcaggacgtgggcagcagaaccacccaccacttcatgtaccccgagagcgccaagaacctgcccgccaacgtgagcttcgtgctggtgcccttcaaggtgctggacctgctgtggatcgccagcgccctgagcaccggccagatcagattcacctacgcccccgtgaagagcttcctgagagtggacaaggagaaggtgcagatctacaaccccgccttcttcaagtacatccacgacagatggaccgagcaccacggcagataccccagcaccggcatgctggtgctgttcttcgccctgcacgtgtgcgacgaggtgaacgtgtacggcttcggcgccgacagcagaggcaactggcaccactactgggagaacaacagatacgccggcgagttcagaaagaccggcgtgcacgacgccgacttcgaggcccacatcatcgacatgctggccaaggccagcaagatcgaggtgtacagaggcaactag

SEQ ID NO: 3915 - DNA, 600 bp, synthetic construct
  misc_feature 1..600: note = source = /note="Description of Artificial Sequence: Synthetic coding sequence"
  source 1..600: mol_type = other DNA
atggccagccccgaggcccccgagagcgtggtgcagttcgccctggacaagctgggcggcctggactacctggtgctgaaccacatcggcggcgcccccgccggcaccagagccagaagcccccaggccaccagatggctgatgcaggtgaacttcgtgagctacgtgcagctgaccagcagagccctgcccagcctgaccgacagcaagggcagcctggtggtggtgagcagcctgctgggcagagtgcccaccagcttcagcaccccctacagcgccgccaagttcgccctggacggcttcttcggcagcctgagaagagagctggacgtgcaggacgtgaacgtggccatcaccatgtgcgtgctgggcctgagagacagagccagcgccgccgaggccgtgagaggcgtgaccagagtgaaggccgcccccggccccaaggccgccctggccgtgatcagaggcggcgccaccagagccgccggcgtgttctacccctggagattcagactgctgtgcctgctgagaagatggctgcccagacccagagcctggttcatcagacaggagctgaacgtgaccgccgccgccgcctag

SEQ ID NO: 3916 - DNA, 411 bp, synthetic construct
  misc_feature 1..411: note = source = /note="Description of Artificial Sequence: Synthetic coding sequence"
  source 1..411: mol_type = other DNA
atggtgagaccctaccccctgatctacttcctgttcctgcccctgggcgcctgcttccccctgctggacagaagagagcccaccgacgccatgggcggcctgggcgccggcgagagatgggccgacctggccatgggccccagaccccacagcgtgtggggcagcagcagatggctgagagccagccagccccaggccctgctggtgatcgccagaggcctgcagaccagcggcagagagcacgccggctgcagattcagattcggcagacaggacgagggcagcgaggccaccggcttcctgcccgccgccggcgagaagaccagcggccccctgggcaacctggccgaggagctgaacggctacagcagaaagaagggcggcttcagcttcagattcggcagaagatag

SEQ ID NO: 3917 - DNA, 663 bp, synthetic construct
  misc_feature 1..663: note = source = /note="Description of Artificial Sequence: Synthetic coding sequence"
  source 1..663: mol_type = other DNA
atgagaggccagggcagaaaggagagcctgagcgacagcagagacctggacggcagctacgaccagctgaccgacagcgtggacgacgagttcgagctgagcaccgtgtgccacagacccgagggcctggagcagctgcaggagcagaccaagttcaccagaaaggagctgcaggtgctgtacagaggcttcaagaacgagtgccccagcggcatcgtgaacgaggagaacttcaagcagatctacagccagttcttcccccagggcgacagcagcacctacgccaccttcctgttcaacgccttcgacaccaaccacgacggcagcgtgagcttcgaggacttcgtggccggcctgagcgtgatcctgagaggcaccgtggacgacagactgaactgggccttcaacctgtacgacctgaacaaggacggctgcatcaccaaggaggagatgctggacatcatgaagagcatctacgacatgatgggcaagtacacctaccccgccctgagagaggaggcccccagagagcacgtggagagcttcttccagaagatggacagaaacaaggacggcgtggtgaccatcgaggagttcatcgagagctgccagaaggacgagaacatcatgagaagcatgcagctgttcgacaacgtgatctag

SEQ ID NO: 3918 - DNA, 2175 bp, synthetic construct
  misc_feature 1..2175: note = source = /note="Description of Artificial Sequence: Synthetic coding sequence"
  source 1..2175: mol_type = other DNA
atgctgagaaccagcacccccaacctgtgcggcggcctgcactgcagagccccctggctgagcagcggcatcctgtgcctgtgcctgatcttcctgctgggccaggtgggcctgctgcagggccacccccagtgcctggactacggcccccccttccagccccccctgcacctggagttctgcagcgactacgagagcttcggctgctgcgaccagcacaaggacagaagaatcgccgccagatactgggacatcatggagtacttcgacctgaagagacacgagctgtgcggcgactacatcaaggacatcctgtgccaggagtgcagcccctacgccgcccacctgtacgacgccgagaacacccagacccccctgagaaacctgcccggcctgtgcagcgactactgcagcgccttccacagcaactgccacagcgccatcagcctgctgaccaacgacagaggcctgcaggagagccacggcagagacggcaccagattctgccacctgctggacctgcccgacaaggactactgcttccccaacgtgctgagaaacgactacctgaacagacacctgggcatggtggcccaggacccccagggctgcctgcagctgtgcctgagcgaggtggccaacggcctgagaaaccccgtgagcatggtgcacgccggcgacggcacccacagattcttcgtggccgagcaggtgggcgtggtgtgggtgtacctgcccgacggcagcagactggagcagcccttcctggacctgaagaacatcgtgctgaccaccccctggatcggcgacgagagaggcttcctgggcctggccttccaccccaagttcagacacaacagaaagttctacatctactacagctgcctggacaagaagaaggtggagaagatcagaatcagcgagatgaaggtgagcagagccgaccccaacaaggccgacctgaagagcgagagagtgatcctggagatcgaggagcccgccagcaaccacaacggcggccagctgctgttcggcctggacggctacatgtacatcttcaccggcgacggcggccaggccggcgaccccttcggcctgttcggcaacgcccagaacaagagcagcctgctgggcaaggtgctgagaatcgacgtgaacagagccggcagccacggcaagagatacagagtgcccagcgacaaccccttcgtgagcgagcccggcgcccaccccgccatctacgcctacggcatcagaaacatgtggagatgcgccgtggacagaggcgaccccatcaccagacagggcagaggcagaatcttctgcggcgacgtgggccagaacagattcgaggaggtggacctgatcctgaagggcggcaactacggctggagagccaaggagggcttcgcctgctacgacaagaagctgtgccacaacgccagcctggacgacgtgctgcccatctacgcctacggccacgccgtgggcaagagcgtgaccggcggctacgtgtacagaggctgcgagagccccaacctgaacggcctgtacatcttcggcgacttcatgagcggcagactgatggccctgcaggaggacagaaagaacaagaagtggaagaagcaggacctgtgcctgggcagcaccaccagctgcgccttccccggcctgatcagcacccacagcaagttcatcatcagcttcgccgaggacgaggccggcgagctgtacttcctggccaccagctaccccagcgcctacgcccccagaggcagcatctacaagttcgtggaccccagcagaagagccccccccggcaagtgcaagtacaagcccgtgcccgtgagaaccaagagcaagagaatccccttcagacccctggccaagaccgtgctggacctgctgaaggagcagagcgagaaggccgccagaaagagcagcagcgccaccctggccagcggccccgcccagggcctgagcgagaagggcagcagcaagaagctggccagccccaccagcagcaagaacaccctgagaggccccggcaccaagaagaaggccagagtgggcccccacgtgagacagggcaagagaagaaagagcctgaagagccacagcggcagaatgagacccagcgccgagcagaagagagccggcagaagcctgccctag

SEQ ID NO: 3919 - DNA, 1218 bp, synthetic construct
  misc_feature 1..1218: note = source = /note="Description of Artificial Sequence: Synthetic coding sequence"
  source 1..1218: mol_type = other DNA
atgtggtacgtgagcaccagaggcgtggcccccagagtgaacttcgagggcgccctgttcagcggctacgcccccgacggcggcctgttcatgcccgaggagctgccccagctggacagaggcaccctgtgccagtggagcaccctgagctaccccggcctggtgaaggagctgtgcgccctgttcatcggcagcgagctgctgcccaaggacgagctgaacgacctgatcgacagagccttcagcagattcagacacagagaggtggtgcacctgagcagactgagaaacggcctgaacgtgctggagctgtggcacggcgtgacctacgccttcaaggacctgagcctgagctgcaccacccagttcctgcagtacttcctggagaagagagagaagcacgtgaccgtggtggtgggcaccagcggcgacaccggcagcgccgccatcgagagcgtgcagggcgccaagaacatggacatcatcgtgctgctgcccaagggccactgcaccaagatccaggagctgcagatgaccaccgtgctgaagcagaacgtgcacgtgttcggcgtggagggcaacagcgacgagctggacgagcccatcaagaccgtgttcgccgacgtggccttcgtgaagaagcacaacctgatgagcctgaacagcatcaactggagcagagtgctggtgcagatggcccaccacttcttcgcctacttccagtgcacccccagcctggacacccaccccctgcccctggtggaggtggtggtgcccaccggcgccgccggcaacctggccgccggctacatcgcccagaagatcggcctgcccatcagactggtggtggccgtgaacagaaacgacatcatccacagaaccgtgcagcagggcgacttcagcctgagcgaggccgtgaagagcaccctggccagcgccatggacatccaggtgccctacaacatggagagagtgttctggctgctgagcggcagcgacagccaggtgaccagagccctgatggagcagttcgagagaacccagagcgtgaacctgcccaaggagctgcacagcaagtgggagagacaggactacgagaagatggccgtgatggagtgcgacggctgctgcgtggagctgtgcctgggcaactgcggccccagaagaggcagcgtgaccgacatccccggcaccgccatggtgagaggcggcggctag

SEQ ID NO: 3920 - DNA, 492 bp, synthetic construct
  misc_feature 1..492: note = source = /note="Description of Artificial Sequence: Synthetic coding sequence"
  source 1..492: mol_type = other DNA
atgaccatgagacacaactggacccccgacctgagccccctgtgggtgctgctgctgtgcgcccacgtggtgaccctgctggtgagagccacccccgtgagccagaccaccaccgccgccaccgccagcgtgagaagcaccaaggacccctgccccagccagccccccgtgttccccgccgccaagcagtgccccgccctggaggtgacctggcccgaggtggaggtgcccctgaacggcaccctgagcctgagctgcgtggcctgcagcagattccccaacttcagcatcctgtactggctgggcaacggcagcttcatcgagcacctgcccggcagactgtgggagggcagcaccagcagagagagaggcagcaccggctgggccgagggcaacctggccccccaccccagaagccccgccctgcagccccagcagagcaccgccgccggcctgagactgagcaccggccccgccgccgcccagccctag

SEQ ID NO: 3921 - DNA, 1590 bp, synthetic construct
  misc_feature 1..1590: note = source = /note="Description of Artificial Sequence: Synthetic coding sequence"
  source 1..1590: mol_type = other DNA
atggcccccgccagaaccatggccagagccagactggcccccgccggcatccccgccgtggccctgtggctgctgtgcaccctgggcctgcagggcacccaggccggccccccccccgccccccccggcctgcccgccggcgccgactgcctgaacagcttcaccgccggcgtgcccggcttcgtgctggacaccaacgccagcgtgagcaacggcgccaccttcctggagagccccaccgtgagaagaggctgggactgcgtgagagcctgctgcaccacccagaactgcaacctggccctggtggagctgcagcccgacagaggcgaggacgccatcgccgcctgcttcctgatcaactgcctgtacgagcagaacttcgtgtgcaagttcgcccccagagagggcttcatcaactacctgaccagagaggtgtacagaagctacagacagctgagaacccagggcttcggcggcagcggcatccccaaggcctgggccggcatcgacctgaaggtgcagccccaggagcccctggtgctgaaggacgtggagaacaccgactggagactgctgagaggcgacaccgacgtgagagtggagagaaaggaccccaaccaggtggagctgtggggcctgaaggagggcacctacctgttccagctgaccgtgaccagcagcgaccaccccgaggacaccgccaacgtgaccgtgaccgtgctgagcaccaagcagaccgaggactactgcctggccagcaacaaggtgggcagatgcagaggcagcttccccagatggtactacgaccccaccgagcagatctgcaagagcttcgtgtacggcggctgcctgggcaacaagaacaactacctgagagaggaggagtgcatcctggcctgcagaggcgtgcagggcggccccctgagaggcagcagcggcgcccaggccaccttcccccagggccccagcatggagagaagacaccccgtgtgcagcggcacctgccagcccacccagttcagatgcagcaacggctgctgcatcgacagcttcctggagtgcgacgacacccccaactgccccgacgccagcgacgaggccgcctgcgagaagtacaccagcggcttcgacgagctgcagagaatccacttccccagcgacaagggccactgcgtggacctgcccgacaccggcctgtgcaaggagagcatccccagatggtactacaaccccttcagcgagcactgcgccagattcacctacggcggctgctacggcaacaagaacaacttcgaggaggagcagcagtgcctggagagctgcagaggcatcagcaagaaggacgtgttcggcctgagaagagagatccccatccccagcaccggcagcgtggagatggccgtggccgtgttcctggtgatctgcatcgtggtggtggtggccatcctgggctactgcttcttcaagaaccagagaaaggacttccacggccaccaccaccaccccccccccacccccgccagcagcaccgtgagcaccaccgaggacaccgagcacctggtgtacaaccacaccaccagacccctgtag

SEQ ID NO: 3922 - DNA, 1803 bp, synthetic construct
  misc_feature 1..1803: note = source = /note="Description of Artificial Sequence: Synthetic coding sequence"
  source 1..1803: mol_type = other DNA
atgcagggccccctgctgctgcccggcctgtgcttcctgctgagcctgttcggcgccgtgacccagaagaccaagaccagctgcgccaagtgcccccccaacgccagctgcgtgaacaacacccactgcacctgcaaccacggctacaccagcggcagcggccagaagctgttcaccttccccctggagacctgcaacgacaccaccagcagcaagaccaccgagggcagaaaggagctgcagaagatcgtggacaagttcgagagcctgctgaccaaccagaccctgtggagaaccgagggcagacaggagatcagcagcaccgccaccaccatcctgagagacgtggagagcaaggtgctggagaccgccctgaaggaccccgagcagaaggtgctgaagatccagaacgacagcgtggccatcgagacccaggccatcaccgacaactgcagcgaggagagaaagaccttcaacctgaacgtgcagatgaacagcatggacatcagatgcagcgacatcatccagggcgacacccagggccccagcgccatcgccttcatcagctacagcagcctgggcaacatcatcaacgccaccttcttcgaggagatggacaagaaggaccaggtgtacctgaacagccaggtggtgagcgccgccatcggccccaagagaaacgtgagcctgagcaagagcgtgaccctgaccttccagcacgtgaagatgacccccagcaccaagaaggtgttctgcgtgtactggaagagcaccggccagggcagccagtggagcagagacggctgcttcctgatccacgtgaacaagagccacaccatgtgcaactgcagccacctgagcagcttcgccgtgctgatggccctgaccagccaggaggaggaccccgtgctgaccgtgatcacctacgtgggcctgagcgtgagcctgctgtgcctgctgctggccgccctgaccttcctgctgtgcaaggccatcagaaacaccagcaccagcctgcacctgcagctgagcctgtgcctgttcctggcccacctgctgttcctggtgggcatcgacagaaccgagcccaaggtgctgtgcagcatcatcgccggcgccctgcactacctgtacctggccgccttcacctggatgctgctggagggcgtgcacctgttcctgaccgccagaaacctgaccgtggtgaactacagcagcatcaacagactgatgaagtggatcatgttccccgtgggctacggcgtgcccgccgtgaccgtggccatcagcgccgccagctggccccacctgtacggcaccgccgacagatgctggctgcacctggaccagggcttcatgtggagcttcctgggccccgtgtgcgccatcttcagcgccaacctggtgctgttcatcctggtgttctggatcctgaagagaaagctgagcagcctgaacagcgaggtgagcaccatccagaacaccagaatgctggccttcaaggccaccgcccagctgttcatcctgggctgcacctggtgcctgggcctgctgcaggtgggccccgccgcccaggtgatggcctacctgttcaccatcatcaacagcctgcagggcttcttcatcttcctggtgtactgcctgctgagccagcaggtgcagaagcagtaccagaagtggttcagagagatcgtgaagagcaagagcgagagcgagacctacaccctgagcagcaagatgggccccgacagcaagcccagcgagggcgacgtgttccccggccaggtgaagagaaagtactag

SEQ ID NO: 3923 - DNA, 660 bp, synthetic construct
  misc_feature 1..660: note = source = /note="Description of Artificial Sequence: Synthetic coding sequence"
  source 1..660: mol_type = other DNA
atgaagctgctgctgtgggcctgcatcgtgtgcgtggccttcgccagaaagagaagattccccttcatcggcgaggacgacaacgacgacggccaccccctgcaccccagcctgaacatcccctacggcatcagaaacctgcccccccccctgtactacagacccgtgaacaccgtgcccagctaccccggcaacacctacaccgacaccggcctgcccagctacccctggatcctgaccagccccggcttcccctacgtgtaccacatcagaggcttccccctggccacccagctgaacgtgccccccctgccccccagaggcttccccttcgtgccccccagcagattcttcagcgccgccgccgcccccgccgccccccccatcgccgccgagcccgccgccgccgcccccctgaccgccacccccgtggccgccgagcccgccgccggcgcccccgtggccgccgagcccgccgccgaggcccccgtgggcgccgagcccgccgccgaggcccccgtggccgccgagcccgccgccgaggcccccgtgggcgtggagcccgccgccgaggagcccagccccgccgagcccgccaccgccaagcccgccgcccccgagccccaccccagccccagcctggagcaggccaaccagtag

SEQ ID NO: 3924 - DNA, 1743 bp, synthetic construct
  misc_feature 1..1743: note = source = /note="Description of Artificial Sequence: Synthetic coding sequence"
  source 1..1743: mol_type = other DNA
atgcacctgagcgccgtgttcaacgccctgctggtgagcgtgctggccgccgtgctgtggaagcacgtgagactgagagagcacgccgccaccctggaggaggagctggccctgagcagacaggccaccgagcccgcccccgccctgagaatcgactaccccaaggccctgcagatcctgatggagggcggcacccacatggtgtgcaccggcagaacccacaccgacagaatctgcagattcaagtggctgtgctacagcaacgaggccgaggagttcatcttcttccacggcaacaccagcgtgatgctgcccaacctgggcagcagaagattccagcccgccctgctggacctgagcaccgtggaggaccacaacacccagtacttcaacttcgtggagctgcccgccgccgccctgagattcatgcccaagcccgtgttcgtgcccgacgtggccctgatcgccaacagattcaaccccgacaacctgatgcacgtgttccacgacgacctgctgcccctgttctacaccctgagacagttccccggcctggcccacgaggccagactgttcttcatggagggctggggcgagggcgcccacttcgacctgtacaagctgctgagccccaagcagcccctgctgagagcccagctgaagaccctgggcagactgctgtgcttcagccacgccttcgtgggcctgagcaagatcaccacctggtaccagtacggcttcgtgcagccccagggccccaaggccaacatcctggtgagcggcaacgagatcagacagttcgccagattcatgaccgagaagctgaacgtgagccacaccggcgtgcccctgggcgaggagtacatcctggtgttcagcagaacccagaacagactgatcctgaacgaggccgagctgctgctggccctggcccaggagttccagatgaagaccgtgaccgtgagcctggaggaccacaccttcgccgacgtggtgagactggtgagcaacgccagcatgctggtgagcatgcacggcgcccagctggtgaccaccctgttcctgcccagaggcgccaccgtggtggagctgttcccctacgccgtgaaccccgaccactacaccccctacaagaccctggccatgctgcccggcatggacctgcagtacgtggcctggagaaacatgatgcccgagaacaccgtgacccaccccgagagaccctgggaccagggcggcatcacccacctggacagagccgagcaggccagaatcctgcagagcagagaggtgcccagacacctgtgctgcagaaaccccgagtggctgttcagaatctaccaggacaccaaggtggacatccccagcctgatccagaccatcagaagagtggtgaagggcagacccggccccagaaagcagaagtggaccgtgggcctgtaccccggcaaggtgagagaggccagatgccaggccagcgtgcacggcgccagcgaggccagactgaccgtgagctggcagatcccctggaacctgaagtacctgaaggtgagagaggtgaagtacgaggtgtggctgcaggagcagggcgagaacacctacgtgccctacatcctggccctgcagaaccacaccttcaccgagaacatcaagcccttcaccacctacctggtgtgggtgagatgcatcttcaacaagatcctgctgggccccttcgccgacgtgctggtgtgcaacacctag

SEQ ID NO: 3925 - DNA, 5130 bp, synthetic construct
  misc_feature 1..5130: note = source = /note="Description of Artificial Sequence: Synthetic coding sequence"
  source 1..5130: mol_type = other DNA
atgggcttcctgcccaagctgctgctgctggccagcttcttccccgccggccaggccagctggggcgtgagcagcccccaggacgtgcagggcgtgaagggcagctgcctgctgatcccctgcatcttcagcttccccgccgacgtggaggtgcccgacggcatcaccgccatctggtactacgactacagcggccagagacaggtggtgagccacagcgccgaccccaagctggtggaggccagattcagaggcagaaccgagttcatgggcaaccccgagcacagagtgtgcaacctgctgctgaaggacctgcagcccgaggacagcggcagctacaacttcagattcgagatcagcgaggtgaacagatggagcgacgtgaagggcaccctggtgaccgtgaccgaggagcccagagtgcccaccatcgccagccccgtggagctgctggagggcaccgaggtggacttcaactgcagcaccccctacgtgtgcctgcaggagcaggtgagactgcagtggcagggccaggaccccgccagaagcgtgaccttcaacagccagaagttcgagcccaccggcgtgggccacctggagaccctgcacatggccatgagctggcaggaccacggcagaatcctgagatgccagctgagcgtggccaaccacagagcccagagcgagatccacctgcaggtgaagtacgcccccaagggcgtgaagatcctgctgagccccagcggcagaaacatcctgcccggcgagctggtgaccctgacctgccaggtgaacagcagctaccccgccgtgagcagcatcaagtggctgaaggacggcgtgagactgcagaccaagaccggcgtgctgcacctgccccaggccgcctggagcgacgccggcgtgtacacctgccaggccgagaacggcgtgggcagcctggtgagcccccccatcagcctgcacatcttcatggccgaggtgcaggtgagccccgccggccccatcctggagaaccagaccgtgaccctggtgtgcaacacccccaacgaggcccccagcgacctgagatacagctggtacaagaaccacgtgctgctggaggacgcccacagccacaccctgagactgcacctggccaccagagccgacaccggcttctacttctgcgaggtgcagaacgtgcacggcagcgagagaagcggccccgtgagcgtggtggtgaaccacccccccctgacccccgtgctgaccgccttcctggagacccaggccggcctggtgggcatcctgcactgcagcgtggtgagcgagcccctggccaccctggtgctgagccacggcggccacatcctggccagcaccagcggcgacagcgaccacagccccagattcagcggcaccagcggccccaacagcctgagactggagatcagagacctggaggagaccgacagcggcgagtacaagtgcagcgccaccaacagcctgggcaacgccaccagcaccctggacttccacgccaacgccgccagactgctgatcagccccgccgccgaggtggtggagggccaggccgtgaccctgagctgcagaagcggcctgagccccacccccgacgccagattcagctggtacctgaacggcgccctgctgcacgagggccccggcagcagcctgctgctgcccgccgccagcagcaccgacgccggcagctaccactgcagagccagagacggccacagcgccagcggccccagcagccccgccgtgctgaccgtgctgtacccccccagacagcccaccttcaccaccagactggacctggacgccgccggcgccggcgccggcagaagaggcctgctgctgtgcagagtggacagcgacccccccgccagactgcagctgctgcacaaggacagagtggtggccaccagcctgcccagcggcggcggctgcagcacctgcggcggctgcagccccagaatgaaggtgaccaaggcccccaacctgctgagagtggagatccacaaccccctgctggaggaggagggcctgtacctgtgcgaggccagcaacgccctgggcaacgccagcaccagcgccaccttcaacggccaggccaccgtgctggccatcgcccccagccacaccctgcaggagggcaccgaggccaacctgacctgcaacgtgagcagagaggccgccggcagccccgccaacttcagctggttcagaaacggcgtgctgtgggcccagggccccctggagaccgtgaccctgctgcccgtggccagaaccgacgccgccctgtacgcctgcagaatcctgaccgaggccggcgcccagctgagcacccccgtgctgctgagcgtgctgtacccccccgacagacccaagctgagcgccctgctggacatgggccagggccacatggccctgttcatctgcaccgtggacagcagacccctggccctgctggccctgttccacggcgagcacctgctggccaccagcctgggcccccaggtgcccagccacggcagattccaggccaaggccgaggccaacagcctgaagctggaggtgagagagctgggcctgggcgacagcggcagctacagatgcgaggccaccaacgtgctgggcagcagcaacaccagcctgttcttccaggtgagaggcgcctgggtgcaggtgagccccagccccgagctgcaggagggccaggccgtggtgctgagctgccaggtgcacaccggcgtgcccgagggcaccagctacagatggtacagagacggccagcccctgcaggagagcaccagcgccaccctgagattcgccgccatcaccctgacccaggccggcgcctaccactgccaggcccaggcccccggcagcgccaccaccagcctggccgcccccatcagcctgcacgtgagctacgcccccagacacgtgaccctgaccaccctgatggacaccggccccggcagactgggcctgctgctgtgcagagtggacagcgacccccccgcccagctgagactgctgcacggcgacagactggtggccagcaccctgcagggcgtgggcggccccgagggcagcagccccagactgcacgtggccgtggcccccaacaccctgagactggagatccacggcgccatgctggaggacgagggcgtgtacatctgcgaggccagcaacaccctgggccaggccagcgccagcgccgacttcgacgcccaggccgtgaacgtgcaggtgtggcccggcgccaccgtgagagagggccagctggtgaacctgacctgcctggtgtggaccacccaccccgcccagctgacctacacctggtaccaggacggccagcagagactggacgcccacagcatccccctgcccaacgtgaccgtgagagacgccaccagctacagatgcggcgtgggcccccccggcagagcccccagactgagcagacccatcaccctggacgtgctgtacgcccccagaaacctgagactgacctacctgctggagagccacggcggccagctggccctggtgctgtgcaccgtggacagcagaccccccgcccagctggccctgagccacgccggcagactgctggccagcagcaccgccgccagcgtgcccaacaccctgagactggagctgagaggcccccagcccagagacgagggcttctacagctgcagcgccagaagccccctgggccaggccaacaccagcctggagctgagactggagggcgtgagagtgatcctggcccccgaggccgccgtgcccgagggcgcccccatcaccgtgacctgcgccgaccccgccgcccacgcccccaccctgtacacctggtaccacaacggcagatggctgcaggagggccccgccgccagcctgagcttcctggtggccaccagagcccacgccggcgcctacagctgccaggcccaggacgcccagggcaccagaagcagcagacccgccgccctgcaggtgctgtacgccccccaggacgccgtgctgagcagcttcagagacagcagagccagaagcatggccgtgatccagtgcaccgtggacagcgagccccccgccgagctggccctgagccacgacggcaaggtgctggccaccagcagcggcgtgcacagcctggccagcggcaccggccacgtgcaggtggccagaaacgccctgagactgcaggtgcaggacgtgcccgccggcgacgacacctacgtgtgcaccgcccagaacctgctgggcagcatcagcaccatcggcagactgcaggtggagggcgccagagtggtggccgagcccggcctggacgtgcccgagggcgccgccctgaacctgagctgcagactgctgggcggccccggccccgtgggcaacagcaccttcgcctggttctggaacgacagaagactgcacgccgagcccgtgcccaccctggccttcacccacgtggccagagcccaggccggcatgtaccactgcctggccgagctgcccaccggcgccgccgccagcgcccccgtgatgctgagagtgctgtacccccccaagacccccaccatgatggtgttcgtggagcccgagggcggcctgagaggcatcctggactgcagagtggacagcgagcccctggccagcctgaccctgcacctgggcagcagactggtggccagcagccagccccagggcgcccccgccgagccccacatccacgtgctggccagccccaacgccctgagagtggacatcgaggccctgagacccagcgaccagggcgagtacatctgcagcgccagcaacgtgctgggcagcgccagcaccagcacctacttcggcgtgagagccctgcacagactgcaccagttccagcagctgctgtgggtgctgggcctgctggtgggcctgctgctgctgctgctgggcctgggcgcctgctacacctggagaagaagaagagtgtgcaagcagagcatgggcgagaacagcgtggagatggccttccagaaggagaccacccagctgatcgaccccgacgccgccacctgcgagaccagcacctgcgccccccccctgggctag

SEQ ID NO: 3926 - DNA, 693 bp, synthetic construct
  misc_feature 1..693: note = source = /note="Description of Artificial Sequence: Synthetic coding sequence"
  source 1..693: mol_type = other DNA
atgtgcgtgacctaccacaacggcaccggctactgcaagtgccccgagggcttcctgggcgagtactgccagcacagagacccctgcgagaagaacagatgccagaacggcggcacctgcgtggcccaggccatgctgggcaaggccacctgcagatgcgccagcggcttcaccggcgaggactgccagtacagcaccagccacccctgcttcgtgagcagaccctgcctgaacggcggcacctgccacatgctgagcagagacacctacgagtgcacctgccaggtgggcttcaccggcaaggagtgccagtggaccgacgcctgcctgagccacccctgcgccaacggcagcacctgcaccaccgtggccaaccagttcagctgcaagtgcctgaccggcttcaccggccagaagtgcgagaccgacgtgaacgagtgcgacatccccggccactgccagcacggcggcacctgcctgaacctgcccggcagctaccagtgccagtgcctgcagggcttcaccggccagtactgcgacagcctgtacgtgccctgcgcccccagcccctgcgtgaacggcggcacctgcagacagaccggcgacttcaccttcgagtgcaactgcctgcccgccacctggcccatcttccccaagctgctgagcctgcaggagaaggagagctactgctag

SEQ ID NO: 3927 - DNA, 660 bp, synthetic construct
  misc_feature 1..660: note = source = /note="Description of Artificial Sequence: Synthetic coding sequence"
  source 1..660: mol_type = other DNA
atgttcgtgagctacctgatcctgaccctgctgcacgtgcagaccgccgtgctggccagacccggcggcgagagcatcggctgcgacgactacctgggcagcgacaaggtggtggacaagtgcggcgtgtgcggcggcgacaacaccggctgccaggtggtgagcggcgtgttcaagcacgccctgaccagcctgggctaccacagagtggtggagatccccgagggcgccaccaagatcaacatcaccgagatgtacaagagcaacaagaagaagagccacctgaagcccgccaccagaggcagccagttcagcagcgtgaaggtgtgcagcgtgcccgccgcctgcaagctgctgggcacccccggcagagccagacagcccgtgcccgcccccagagagctggagcacgacaagaacagcccccactgcgcctacctgagcctgtacctgaccagcctggcccagagcagctggagagtgttcagcctgttcagctacgtgctgatctacctgttcagcaagtacctggccttcaacaccctgttcgccctgaagagaatggccctgcagagagacagaaaggagaagaccagagcctggtgcatcttcatcaagctgtgcggcagagagatccagatcctgcccggccccgtgtag

SEQ ID NO: 3928 - DNA, 363 bp, synthetic construct
  misc_feature 1..363: note = source = /note="Description of Artificial Sequence: Synthetic coding sequence"
  source 1..363: mol_type = other DNA
atggacaacgtgcagcccaagatcaagcacagacccttctgcttcagcgtgaagggccacgtgaagatgctgagactggccctgaccgtgaccagcatgaccttcttcatcatcgcccaggcccccgagccctacatcgtgatcaccggcttcgaggtgaccgtgatcctgttcttcatcctgctgtacgtgctgagactggacagactgatgaagtggctgttctggcccctgctggtgttcgccctggtgaccgccgtgtgctgcctggccgacggcgccctgatctacagaaagctgctgttcaaccccagcggcccctaccagaagaagcccgtgcacgagaagaaggaggtgctgtag

SEQ ID NO: 3929 - DNA, 864 bp, synthetic construct
  misc_feature 1..864: note = source = /note="Description of Artificial Sequence: Synthetic coding sequence"
  source 1..864: mol_type = other DNA
atggccccctggagccaccccagcgcccagctgcagcccgtgggcggcgacgccgtgagccccgccctgatggtgctgctgtgcctgggcaacctgagcaaggccaccctgtgggccgagcccggcagcgtgatcagcagaggcaacagcgtgaccatcagatgccagggcaccctggaggcccaggagtacagactggtgaaggagggcagccccgagccctgggacacccagaaccccctggagcccaagaacaaggccagattcagcatccccagcatgaccgagcaccacgccggcagatacagatgctactactacagccccgccggctggagcgagcccagcgaccccctggagctggtggtgaccggcttctacaacaagcccaccctgagcgccctgcccagccccgtggtgaccagcggcgagaacgtgaccctgcagtgcggcagcagactgagattcgacagattcatcctgaccgaggagggcgaccacaagctgagctggaccctggacagccagctgacccccagcggccagttccaggccctgttccccgtgggccccgtgacccccagccacagatggatgctgagatgctacggcagcagaagacacatcctgcaggtgtggagcgagcccagcgacctgctggagatccccgtgagcggcgccgccgacaacctgagccccagccagaacaagagcgacagcggcaccgccagccacctgcaggactacgccgtggagaacctgatcagaatgggcatggccggcctgatcctggtggtgctgggcatcctgatcttccaggactggcacagccagagaagcccccaggccgccgccggcagatag

SEQ ID NO: 3930 - DNA, 438 bp, synthetic construct; identical to SEQ ID NO: 3551
  misc_feature 1..438: note = source = /note="Description of Artificial Sequence: Synthetic coding sequence"
  source 1..438: mol_type = other DNA

SEQ ID NO: 3931 - DNA, 1776 bp, synthetic construct
  misc_feature 1..1776: note = source = /note="Description of Artificial Sequence: Synthetic coding sequence"
  source 1..1776: mol_type = other DNA
atgcagcaggacggcctgggcgtgggcaccagaaacggcagcggcaagggcagaagcgtgcaccccagctggccctggtgcgcccccagacccctgagatacttcggcagagacgccagagccagaagagcccagaccgccgccatggccctggccatccaggtgaccgtgagcaacccctaccacgtggtgatcctgttccagcccgtgaccctgccctgcacctaccagatgaccagcacccccacccagcccatcgtgatctggaagtacaagagcttctgcagagacagaatcgccgacgccttcagccccgccagcgtggacaaccagctgaacgcccagctggccgccggcaaccccggctacaacccctacgtggagtgccaggacagcgtgagaaccgtgagagtggtggccaccaagcagggcaacgccgtgaccctgggcgactactaccagggcagaagaatcaccatcaccggcaacgccgacctgaccttcgaccagaccgcctggggcgacagcggcgtgtactactgcagcgtggtgagcgcccaggacctgcagggcaacaacgaggcctacgccgagctgatcgtgctgggcagaaccagcggcgtggccgagctgctgcccggcttccaggccggccccatcgaggactggctgttcgtggtggtggtgtgcctggccgccttcctgatcttcctgctgctgggcatctgctggtgccagtgctgcccccacacctgctgctgctacgtgagatgcccctgctgccccgacaagtgctgctgccccgaggccctgtacgccgccggcaaggccgccaccagcggcgtgcccagcatctacgcccccagcacctacgcccacctgagccccgccaagaccccccccccccccgccatgatccccatgggccccgcctacaacggctaccccggcggctaccccggcgacgtggacagaagcagcagcgtgagaagcggctacagaatccaggccagccagcaggacgacagcatgagagtgctgtactacatggagaaggagctggccaacttcgaccccagcagacccggcccccccagcggcagagtggagagagccatgagcgaggtgaccagcctgcacgaggacgactggagaagcagacccagcagaggccccgccctgacccccatcagagacgaggagtggggcggccacagccccagaagccccagaggctgggaccaggagcccgccagagagcaggccggcggcggctggagagccagaagacccagagccagaagcgtggacgccctggacgacctgaccccccccagcaccgccgagagcggcagcagaagccccaccagcaacggcggcagaagcagagcctacatgccccccagaagcagaagcagagacgacctgtacgaccaggacgacagcagagacttccccagaagcagagacccccactacgacgacttcagaagcagagagagaccccccgccgaccccagaagccaccaccacagaaccagagaccccagagacaacggcagcagaagcggcgacctgccctacgacggcagactgctggaggaggccgtgagaaagaagggcagcgaggagagaagaagaccccacaaggaggaggaggaggaggcctactacccccccgccccccccccctacagcgagaccgacagccaggccagcagagagagaagactgaagaagaacctggccctgagcagagagagcctggtggtgtag

SEQ ID NO: 3932 - DNA, 678 bp, synthetic construct
  misc_feature 1..678: note = source = /note="Description of Artificial Sequence: Synthetic coding sequence"
  source 1..678: mol_type = other DNA
atgaacagatgccccagaagatgcagaagccccctgggccaggccgccagaagcctgtaccagctggtgaccggcagcctgagccccgacagcgtggacgacgagttcgagctgagcaccgtgtgccacagacccgagggcctggagcagctgcaggagcagaccaagttcaccagaaaggagctgcaggtgctgtacagaggcttcaagaacgagtgccccagcggcatcgtgaacgaggagaacttcaagcagatctacagccagttcttcccccagggcgacagcagcacctacgccaccttcctgttcaacgccttcgacaccaaccacgacggcagcgtgagcttcgaggacttcgtggccggcctgagcgtgatcctgagaggcaccgtggacgacagactgaactgggccttcaacctgtacgacctgaacaaggacggctgcatcaccaaggaggagatgctggacatcatgaagagcatctacgacatgatgggcaagtacacctaccccgccctgagagaggaggcccccagagagcacgtggagagcttcttccagaagatggacagaaacaaggacggcgtggtgaccatcgaggagttcatcgagagctgccagaaggacgagaacatcatgagaagcatgcagctgttcgacaacgtgatctag

SEQ ID NO: 3933 - DNA, 705 bp, synthetic construct
  misc_feature 1..705: note = source = /note="Description of Artificial Sequence: Synthetic coding sequence"
  source 1..705: mol_type = other DNA
atgcccgccagcagccccttcctgctggcccccaagggcccccccggcaacatgggcggccccgtgagagagcccgccctgagcgtggccctgtggctgagctggggcgccgccctgggcgccgtggcctgcgccatggccctgctgacccagcagaccgagctgcagagcctgagaagagaggtgagcagactgcagggcaccggcggccccagccagaacggcgagggctacccctggcagagcctgcccgagcagagcagcgacgccctggaggcctgggagaacggcgagagaagcagaaagagaagagccgtgctgacccagaagcagaagaacgacagcgacgtgaccgaggtgatgtggcagcccgccctgagaagaggcagaggcctgcaggcccagggctacggcgtgagaatccaggacgccggcgtgtacctgctgtacagccaggtgctgttccaggacgtgaccttcaccatgggccaggtggtgagcagagagggccagggcagacaggagaccctgttcagatgcatcagaagcatgcccagccaccccgacagagcctacaacagctgctacagcgccggcgtgttccacctgcaccagggcgacatcctgagcgtgatcatccccagagccagagccaagctgaacctgagcccccacggcaccttcctgggcttcgtgaagctgtag

SEQ ID NO: 3934 - DNA, 2400 bp, synthetic construct
  misc_feature 1..2400: note = source = /note="Description of Artificial Sequence: Synthetic coding sequence"
  source 1..2400: mol_type = other DNA
atgaagcccatgctgaaggacttcagcaacctgctgctggtggtgctgtgcgactacgtgctgggcgaggccgagtacctgctgctgagagagcccggccacgtggccctgagcaacgacaccgtgtacgtggacttccagtacttcgacggcgccaacggcaccctgagaaacgtgagcgtgctgctgctggaggccaacaccaaccagaccgtgaccaccaagtacctgctgaccaaccagagccagggcaccctgaagttcgagtgcttctacttcaaggaggccggcgactactggttcaccatgacccccgaggccaccgacaacagcacccccttcccctggtgggagaagagcgccttcctgaaggtggagtggcccgtgttccacgtggacctgaacagaagcgccaaggccgccgagggcaccttccaggtgggcctgttcaccagccagcccctgtgccccttccccgtggacaagcccaacatcgtggtggacgtgatcttcaccaacagcctgcccgaggccagaagaaacagcagacagcccctggagatcagaaccagcaagagaaccgagctggcccagggccagtgggtggagttcggctgcgcccccctgggccccgaggcctacgtgaccgtggtgctgaagctgctgggcagagacagcgtgatcaccagcaccggccccatcgacctggcccagaagttcggctacaagctggtgatggtgcccgagctgacctgcgagagcggcgtggaggtgaccgtgctgccccccccctgcaccttcgtgcagggcgtggtgaccgtgttcaaggaggcccccagataccccggcaagagaaccatccacctggccgagaacagcctgcccctgggcgagagaagaaccatcttcaactgcaccctgttcgacatgggcaagaacaagtactgcttcgacttcggcatcagcagcagaagccacttcagcgccaaggaggagtgcatgctgatccagagaaacaccgccttccagcccagcagccccagccccctgcagccccagggccccgtgaagagcaacaacatcgtgaccgtgaccggcatcagcctgtgcctgttcatcatcatcgccaccgtgctgatcaccctgtggagaagattcggcagacccgccaagtgcagcacccccgccagacacaacagcatccacagccccagcttcagaaagaacagcgacgaggagaacatctgcgagctgagcgagcagagaggcagcttcagcgacggcggcgacggccccaccggcagccccggcgacaccggcatccccctgacctacagaagaagcggccccgtgccccccgaggacgacgccagcggcagcgagagcttccagagcaacgcccagaagatcatcccccccctgttcagctacagactggcccagcagcagctgaaggagatgaagaagaagggcctgaccgagaccaccaaggtgtaccacgtgagccagagccccctgaccgacaccgccatcgacgccgcccccagcgcccccctggacctggagagccccgaggaggccgccgccaacaagttcagaatcaagagccccttccccgagcagcccgccgtgagcgccggcgagagaccccccagcagactggacctgaacgtgacccaggccagctgcgccatcagccccagccagaccctgatcagaaagagccaggccagacacgtgggcagcagaggcggccccagcgagagaagccacgccagaaacgcccacttcagaagaaccgccagcttccacgaggccagacaggccagacccttcagagagagaagcatgagcaccctgacccccagacaggcccccgcctacagcagcagaaccagaacctgcgagcaggccgaggacagattcagaccccagagcagaggcgcccacctgttccccgagaagctggagcacttccaggaggccagcggcaccagaggccccctgaaccccctgcccaagagctacaccctgggccagcccctgagaaagcccgacctgggcgaccaccaggccggcctggtggccggcatcgagagaaccgagccccacagagccagaagaggccccagccccagccacaagagcgtgagcagaaagcagagcagccccatcagccccaaggacaactaccagagagtgagcagcctgagccccagccagtgcagaaaggacaagtgccagagcttccccacccaccccgagttcgccttctacgacaacaccagcttcggcctgaccgaggccgagcagagaatgctggacctgcccggctacttcggcagcaacgaggaggacgagaccaccagcaccctgagcgtggagaagctggtgatctag

SEQ ID NO: 3935 - DNA, 927 bp, synthetic construct
  misc_feature 1..927: note = source = /note="Description of Artificial Sequence: Synthetic coding sequence"
  source 1..927: mol_type = other DNA
atgagactgctgcccgagtggttcctgctgctgttcggcccctggctgctgagaaaggccgtgagcgcccagatccccgagagcggcagaccccagtacctgggcctgagacccgccgccgccggcgccggcgcccccggccagcagctgcccgagcccagaagcagcgacggcctgggcgtgggcagagcctggagctgggcctggcccaccaaccacaccggcgccctggccagagccggcgccgccggcgccctgcccgcccagagaaccaagagaaagcccagcatcaaggccgccagagccaagaagatcttcggctggggcgacttctacttcagagtgcacaccctgaagttcagcctgctggtgaccggcaagatcgtggaccacgtgaacggcaccttcagcgtgtacttcagacacaacagcagcagcctgggcaacctgagcgtgagcatcgtgccccccagcaagagagtggagttcggcggcgtgtggctgcccggccccgtgccccaccccctgcagagcaccctggccctggagggcgtgctgcccggcctgggcccccccctgggcatggccgccgccgccgccggccccggcctgggcggcagcctgggcggcgccctggccggccccctgggcggcgccctgggcgtgcccggcgccaaggagagcagagccttcaactgccacgtggagtacgagaagaccaacagagccagaaagcacagaccctgcctgtacgaccccagccaggtgtgcttcaccgagcacacccagagccaggccgcctggctgtgcgccaagcccttcaaggtgatctgcatcttcgtgagcttcctgagcttcgactacaagctggtgcagaaggtgtgccccgactacaacttccagagcgagcacccctacttcggctag

SEQ ID NO: 3936 - DNA, 795 bp, synthetic construct
  misc_feature 1..795: note = source = /note="Description of Artificial Sequence: Synthetic coding sequence"
  source 1..795: mol_type = other DNA
atgaagctgggctgcgtgctgatggcctgggccctgtacctgagcctgggcgtgctgtgggtggcccagatgctgctggccgccagcttcgagaccctgcagtgcgagggccccgtgtgcaccgaggagagcagctgccacaccgaggacgacctgaccgacgccagagaggccggcttccaggtgaaggcctacaccttcagcgagcccttccacctgatcgtgagctacgactggctgatcctgcagggccccgccaagcccgtgttcgagggcgacctgctggtgctgagatgccaggcctggcaggactggcccctgacccaggtgaccttctacagagacggcagcgccctgggcccccccggccccaacagagagttcagcatcaccgtggtgcagaaggccgacagcggccactaccactgcagcggcatcttccagagccccggccccggcatccccgagaccgccagcgtggtggccatcaccgtgcagggcgccagcagcagcgccgccccccccaccctgaaccccgccccccagaagagcgccgcccccggcaccgcccccgaggaggcccccggccccctgccccccccccccacccccagcagcgaggaccccggcttcagcagccccctgggcatgcccgacccccacctgtaccaccagatgggcctgctgctgaagcacatgcaggacgtgagagtgctgctgggccacctgctgatggagctgagagagctgagcggccacagaaagcccggcaccaccaaggccaccgccgagtag

SEQ ID NO: 3937 - DNA, 1362 bp, synthetic construct
  misc_feature 1..1362: note = source = /note="Description of Artificial Sequence: Synthetic coding sequence"
  source 1..1362: mol_type = other DNA
atgctgagaatcctgtgcctggccctgtgcagcctgctgaccggcaccagagccgaccccggcgccctgctgagactgggcatggacatcatgaaccaggtgcagagcgccatggacgagagccacatcctggagaagatggccgccgaggccggcaagaagcagcccggcatgaagcccatcaagggcatcaccaacctgaaggtgaaggacgtgcagctgcccgtgatcaccctgaacttcgtgcccggcgtgggcatcttccagtgcgtgagcaccggcatgaccgtgaccggcaagagcttcatgggcggcaacatggagatcatcgtggccctgaacatcaccgccaccaacagactgctgagagacgaggagaccggcctgcccgtgttcaagagcgagggctgcgaggtgatcctggtgaacgtgaagaccaacctgcccagcaacatgctgcccaagatggtgaacaagttcctggacagcaccctgcacaaggtgctgcccggcctgatgtgccccgccatcgacgccgtgctggtgtacgtgaacagaaagtggaccaacctgagcgaccccatgcccgtgggccagatgggcaccgtgaagtacgtgctgatgagcgcccccgccaccaccgccagctacatccagctggacttcagccccgtggtgcagcagcagaagggcaagaccatcaagctggccgacgccggcgaggccctgaccttccccgagggctacgccaagggcagcagccagctgctgctgcccgccaccttcctgagcgccgagctggccctgctgcagaagagcttccacgtgaacatccaggacaccatgatcggcgagctgcccccccagaccaccaagaccctggccagattcatccccgaggtggccgtggcctaccccaagagcaagcccctgaccacccagatcaagatcaagaagccccccaaggtgaccatgaagaccggcaagagcctgctgcacctgcacagcaccctggagatgttcgccgccagatggagaagcaaggcccccatgagcctgttcctgctggaggtgcacttcaacctgaaggtgcagtacagcgtgcacgagaaccagctgcagatggccaccagcctggacagactgctgagcctgagcagaaagagcagcagcatcggcaacttcaacgagagagagctgaccggcttcatcaccagctacctggaggaggcctacatccccgtggtgaacgacgtgctgcaggtgggcctgcccctgcccgacttcctggccatgaactacaacctggccgagctggacatcgtggagaacgccctgatgctggacctgaagctgggctag

SEQ ID NO: 3938 - DNA, 1323 bp, synthetic construct
  misc_feature 1..1323: note = source = /note="Description of Artificial Sequence: Synthetic coding sequence"
  source 1..1323: mol_type = other DNA
atgagcgccagaggcagatgggagggcggcggcagaagagcctgcagaggcagcctgggcctggccagagcccagggcgccgagagagtgaccagcagcgagcagagacccgccatggccagcctgggcctgctgctgctgctgctgctgaccgccctgccccccctgtggagcagcagcctgcccggcctggacaccgccgagagcaaggccaccatcgccgacctgatcctgagcgccctggagagagccaccgtgttcctggagcagagactgcccgagatcaacctggacggcatggtgggcgtgagagtgctggaggagcagctgaagagcgtgagagagaagtgggcccaggagcccctgctgcagcccctgagcctgagagtgggcatgctgggcgagaagctggaggccgccatccagagaagcctgcactacctgaagctgagcgaccccaagtacctgagagagttccagctgaccctgcagcccggcttctggaagctgccccacgcctggatccacaccgacgccagcctggtgtaccccaccttcggcccccaggacagcttcagcgaggagagaagcgacgtgtgcctggtgcagctgctgggcaccggcaccgacagcagcgagccctgcggcctgagcgacctgtgcagaagcctgatgaccaagcccggctgcagcggctactgcctgagccaccagctgctgttcttcctgtgggccagaatgagaggctgcacccagggccccctgcagcagagccaggactacatcaacctgttctgcgccaacatgatggacctgaacagaagagccgaggccatcggctacgcctaccccaccagagacatcttcatggagaacatcatgttctgcggcatgggcggcttcagcgacttctacaagctgagatggctggaggccatcctgagctggcagaagcagcaggagggctgcttcggcgagcccgacgccgaggacgaggagctgagcaaggccatccagtaccagcagcacttcagcagaagagtgaagagaagagagaagcagttccccgacagcagaagcgtggcccaggccggcgtgcagtggagaaacctgggcagcctgcagcccctgccccccggcttcaagcagttcagctgcctgatcctgcccagcagctgggactacagaagcgtgcccccctacctggccaacttctacatcttcctggtggagaccggcttccaccacgtggcccacgccggcctggagctgctgatcagcagagacccccccaccagcggcagccagagcgtgggcctgtag

SEQ ID NO: 3939 - DNA, 708 bp, synthetic construct
  misc_feature 1..708: note = source = /note="Description of Artificial Sequence: Synthetic coding sequence"
  source 1..708: mol_type = other DNA
atgaagtacgtgttctacctgggcgtgctggccggcaccttcttcttcgccgacagcagcgtgcagaaggaggaccccgccccctacctggtgtacctgaagagccacttcaacccctgcgtgggcgtgctgatcaagcccagctgggtgctggcccccgcccactgctacctgcccaacctgaaggtgatgctgggcaacttcaagagcagagtgagagacggcaccgagcagaccatcaaccccatccagatcgtgagatactggaactacagccacagcgccccccaggacgacctgatgctgatcaagctggccaagcccgccatgctgaaccccaaggtgcagcccctgaccctggccaccaccaacgtgagacccggcaccgtgtgcctgctgagcggcctggactggagccaggagaacagcggcagacaccccgacctgagacagaacctggaggcccccgtgatgagcgacagagagtgccagaagaccgagcagggcaagagccacagaaacagcctgtgcgtgaagttcgtgaaggtgttcagcagaatcttcggcgaggtggccgtggccaccgtgatctgcaaggacaagctgcagggcatcgaggtgggccacttcatgggcggcgacgtgggcatctacaccaacgtgtacaagtacgtgagctggatcgagaacaccgccaaggacaagtag

SEQ ID NO: 3940 - DNA, 426 bp, synthetic construct
  misc_feature 1..426: note = source = /note="Description of Artificial Sequence: Synthetic coding sequence"
  source 1..426: mol_type = other DNA
atgctgaagaagatcagcgtgggcgtggccggcgacctgaacaccgtgaccatgaagctgggctgcgtgctgatggcctgggccctgtacctgagcctgggcgtgctgtgggtggcccagatgctgctgggcgccagcagcagcgccgccccccccaccctgaaccccgccccccagaagagcgccgcccccggcaccgcccccgaggaggcccccggccccctgccccccccccccacccccagcagcgaggaccccggcttcagcagccccctgggcatgcccgacccccacctgtaccaccagatgggcctgctgctgaagcacatgcaggacgtgagagtgctgctgggccacctgctgatggagctgagagagctgagcggccacagaaagcccggcaccaccaaggccaccgccgagtag

SEQ ID NO: 3941 - DNA, 2886 bp, synthetic construct
  misc_feature 1..2886: note = source = /note="Description of Artificial Sequence: Synthetic coding sequence"
  source 1..2886: mol_type = other DNA
atgctggcccccagaggcgccgccgtgctgctgctgcacctggtgctgcagagatggctggccgccggcgcccaggccaccccccaggtgttcgacctgctgcccagcagcagccagagactgaaccccggcgccctgctgcccgtgctgaccgaccccgccctgaacgacctgtacgtgatcagcaccttcaagctgcagaccaagagcagcgccaccatcttcggcctgtacagcagcaccgacaacagcaagtacttcgagttcaccgtgatgggcagactgaacaaggccatcctgagatacctgaagaacgacggcaaggtgcacctggtggtgttcaacaacctgcagctggccgacggcagaagacacagaatcctgctgagactgagcaacctgcagagaggcgccggcagcctggagctgtacctggactgcatccaggtggacagcgtgcacaacctgcccagagccttcgccggccccagccagaagcccgagaccatcgagctgagaaccttccagagaaagccccaggacttcctggaggagctgaagctggtggtgagaggcagcctgttccaggtggccagcctgcaggactgcttcctgcagcagagcgagcccctggccgccaccggcaccggcgacttcaacagacagttcctgggccagatgacccagctgaaccagctgctgggcgaggtgaaggacctgctgagacagcaggtgaaggagaccagcttcctgagaaacaccatcgccgagtgccaggcctgcggccccctgaagttccagagccccacccccagcaccgtggtgccccccgccccccccgccccccccaccagaccccccagaagatgcgacagcaacccctgcttcagaggcgtgcagtgcaccgacagcagagacggcttccagtgcggcccctgccccgagggctacaccggcaacggcatcacctgcatcgacgtggacgagtgcaagtaccacccctgctaccccggcgtgcactgcatcaacctgagccccggcttcagatgcgacgcctgccccgtgggcttcaccggccccatggtgcagggcgtgggcatcagcttcgccaagagcaacaagcaggtgtgcaccgacatcgacgagtgcagaaacggcgcctgcgtgcccaacagcatctgcgtgaacaccctgggcagctacagatgcggcccctgcaagcccggctacaccggcgaccagatcagaggctgcaaggccgagagaaactgcagaaaccccgagctgaacccctgcagcgtgaacgcccagtgcatcgaggagagacagggcgacgtgacctgcgtgtgcggcgtgggctgggccggcgacggctacatctgcggcaaggacgtggacatcgacagctaccccgacgaggagctgccctgcagcgccagaaactgcaagaaggacaactgcaagtacgtgcccaacagcggccaggaggacgccgacagagacggcatcggcgacgcctgcgacgaggacgccgacggcgacggcatcctgaacgagcaggacaactgcgtgctgatccacaacgtggaccagagaaacagcgacaaggacatcttcggcgacgcctgcgacaactgcctgagcgtgctgaacaacgaccagaaggacaccgacggcgacggcagaggcgacgcctgcgacgacgacatggacggcgacggcatcaagaacatcctggacaactgccccaagttccccaacagagaccagagagacaaggacggcgacggcgtgggcgacgcctgcgacagctgccccgacgtgagcaaccccaaccagagcgacgtggacaacgacctggtgggcgacagctgcgacaccaaccaggacagcgacggcgacggccaccaggacagcaccgacaactgccccaccgtgatcaacagcgcccagctggacaccgacaaggacggcatcggcgacgagtgcgacgacgacgacgacaacgacggcatccccgacctggtgccccccggccccgacaactgcagactggtgcccaaccccgcccaggaggacagcaacagcgacggcgtgggcgacatctgcgagagcgacttcgaccaggaccaggtgatcgacagaatcgacgtgtgccccgagaacgccgaggtgaccctgaccgacttcagagcctaccagaccgtggtgctggaccccgagggcgacgcccagatcgaccccaactgggtggtgctgaaccagggcatggagatcgtgcagaccatgaacagcgaccccggcctggccgtgggctacaccgccttcaacggcgtggacttcgagggcaccttccacgtgaacacccagaccgacgacgactacgccggcttcatcttcggctaccaggacagcagcagcttctacgtggtgatgtggaagcagaccgagcagacctactggcaggccacccccttcagagccgtggccgagcccggcatccagctgaaggccgtgaagagcaagaccggccccggcgagcacctgagaaacagcctgtggcacaccggcgacaccagcgaccaggtgagactgctgtggaaggacagcagaaacgtgggctggaaggacaaggtgagctacagatggttcctgcagcacagaccccaggtgggctacatcagagtgagattctacgagggcagcgagctggtggccgacagcggcgtgaccatcgacaccaccatgagaggcggcagactgggcgtgttctgcttcagccaggagaacatcatctggagcaacctgaagtacagatgcaacgacaccatccccgaggacttccaggagttccagacccagaacttcgacagattcgacaactag

SEQ ID NO: 3942 - DNA, 300 bp, synthetic construct
  misc_feature 1..300: note = source = /note="Description of Artificial Sequence: Synthetic coding sequence"
  source 1..300: mol_type = other DNA
atggacaacgtgcagcccaagatcaagcacagacccttctgcttcagcgtgaagggccacgtgaagatgctgagactggacatcatcaacagcctggtgaccaccgtgttcatgctgatcgtgagcgtgctggccctgatccccgagaccaccaccctgaccgtgggcggcggcgtgttcgccctggtgaccgccgtgtgctgcctggccgacggcgccctgatctacagaaagctgctgttcaaccccagcggcccctaccagaagaagcccgtgcacgagaagaaggaggtgctgtag

SEQ ID NO: 3943 - DNA, 408 bp, synthetic construct
  misc_feature 1..408: note = source = /note="Description of Artificial Sequence: Synthetic coding sequence"
  source 1..408: mol_type = other DNA
atgagcccccacctgaccgccctgctgggcctggtgctgtgcctggcccagaccatccacacccaggagggcgccctgcccagacccagcatcagcgccgagcccggcaccgtgatcagccccggcagccacgtgaccttcatgtgcagaggccccgtgggcgtgcagaccttcagactggagagagaggacagagccaagtacaaggacagctacaacgtgttcagactgggccccagcgagagcgaggccagattccacatcgacagcgtgagcgagggcaacgccggcctgtacagatgcctgtactacaagccccccggctggagcgagcacagcgacttcctggagctgctggtgaagggcaccgtgcccggcaccgaggccagcggcttcgacgccccctag

SEQ ID NO: 3944 - DNA, 231 bp, synthetic construct
  misc_feature 1..231: note = source = /note="Description of Artificial Sequence: Synthetic coding sequence"
  source 1..231: mol_type = other DNA
atgctgccctgcctggccctgctgctgctgatggagctgagcgtgtgcaccgtggccggcgacggcggcgaggagcagaccctgagcaccgaggccgagacctgggagggcgccggccccagcatccagctgcagctgcaggaggtgaagaccggcaaggccagccagttcttcggcctgatgggcaagagagtgggcggcagagaggacgaggcccagggcagcgagtag

SEQ ID NO: 3945 - DNA, 684 bp, synthetic construct
  misc_feature 1..684: note = source = /note="Description of Artificial Sequence: Synthetic coding sequence"
  source 1..684: mol_type = other DNA
atgagaggccagggcagaaaggagagcctgagcgacagcagagacctggacggcagctacgaccagctgaccgacagcgtggacgacgagttcgagctgagcaccgtgtgccacagacccgagggcctggagcagctgcaggagcagaccaagttcaccagaaaggagctgcaggtgctgtacagaggcttcaagaaccccggcgccctgagcttccaggagtgccccagcggcatcgtgaacgaggagaacttcaagcagatctacagccagttcttcccccagggcgacagcagcacctacgccaccttcctgttcaacgccttcgacaccaaccacgacggcagcgtgagcttcgaggacttcgtggccggcctgagcgtgatcctgagaggcaccgtggacgacagactgaactgggccttcaacctgtacgacctgaacaaggacggctgcatcaccaaggaggagatgctggacatcatgaagagcatctacgacatgatgggcaagtacacctaccccgccctgagagaggaggcccccagagagcacgtggagagcttcttccagaagatggacagaaacaaggacggcgtggtgaccatcgaggagttcatcgagagctgccagaaggacgagaacatcatgagaagcatgcagctgttcgacaacgtgatctag

SEQ ID NO: 3946 - DNA, 876 bp, synthetic construct
  misc_feature 1..876: note = source = /note="Description of Artificial Sequence: Synthetic coding sequence"
  source 1..876: mol_type = other DNA
atgatgagcgccaccggccccggcagaaagatgggcagcagaggccagggcctgctgctggcctactgcctgctgctggccttcgccagcggcctggtgctgagcagagtgccccacgtgcagggcgagcagcaggagtgggagggcaccgaggagctgcccagcccccccgaccacgccgagagagccgaggagcagcacgagaagtacagacccagccaggaccagggcctgcccgccagcagatgcctgagatgctgcgaccccggcaccagcatgtaccccgccaccgccgtgccccagatcaacatcaccatcctgaagggcgagaagggcgacagaggcgacagaggcctgcagggcaagtacggcaagaccggcagcgccggcgccagaggccacaccggccccaagggccagaagggcagcatgggcgcccccggcgagagatgcaagagccactacgccgccttcagcgtgggcagaaagaagcccatgcacagcaaccactactaccagaccgtgatcttcgacaccgagttcgtgaacctgtacgaccacttcaacatgttcaccggcaagttctactgctacgtgcccggcctgtacttcttcagcctgaacgtgcacacctggaaccagaaggagacctacctgcacatcatgaagaacgaggaggaggtggtgatcctgttcgcccaggtgggcgacagaagcatcatgcagagccagagcctgatgctggagctgagagagcaggaccaggtgtgggtgagactgtacaagggcgagagagagaacgccatcttcagcgaggagctggacacctacatcaccttcagcggctacctggtgaagcacgccaccgagccctag

SEQ ID NO: 3947 - DNA, 213 bp, synthetic construct
  misc_feature 1..213: note = source = /note="Description of Artificial Sequence: Synthetic coding sequence"
  source 1..213: mol_type = other DNA
atggagagaggcgccggcgccaagctgctgcccctgctgctgctgctgagagccaccggcttcacctgcgcccagaccgacggcagaaacggctacaccgccgtgatcgaggtgaccagcggcggcccctggggcgactgggcctggcccgagatgtgccccgacggcttcttcgccagcggcttcagcctgaagctgggcagaatggagtag

SEQ ID NO: 3948 - DNA, 402 bp, synthetic construct
  misc_feature 1..402: note = source = /note="Description of Artificial Sequence: Synthetic coding sequence"
  source 1..402: mol_type = other DNA
atgggcagcagcggcctgctgagcctgctggtgctgttcgtgctgctggccaacgtgcagggccccggcctgaccgactggctgttccccagaagatgccccaagatcagagaggagtgcgagttccaggagagagacgtgtgcaccaaggacagacagtgccaggacaacaagaagtgctgcgtgttcagctgcggcaagaagtgcctggacctgaagcaggacgtgtgcgagatgcccaaggagaccggcccctgcctggcctacttcctgcactggtggtacgacaagaaggacaacacctgcagcatgttcgtgtacggcggctgccagggcaacaacaacaacttccagagcaaggccaactgcctgaacacctgcaagaacaagagattcccctag

SEQ ID NO: 3949 - DNA, 771 bp, synthetic construct
  misc_feature 1..771: note = source = /note="Description of Artificial Sequence: Synthetic coding sequence"
  source 1..771: mol_type = other DNA
atgttccagaccggcggcctgatcgtgttctacggcctgctggcccagaccatggcccagttcggcggcctgcccgtgcccctggaccagaccctgcccctgaacgtgaaccccgccctgcccctgagccccaccggcctggccggcagcctgaccaacgccctgagcaacggcctgctgagcggcggcctgctgggcatcctggagaacctgcccctgctggacatcctgaagcccggcggcggcaccagcggcggcctgctgggcggcctgctgggcaaggtgaccagcgtgatccccggcctgaacaacatcatcgacatcaaggtgaccgacccccagctgctggagctgggcctggtgcagagccccgacggccacagactgtacgtgaccatccccctgggcatcaagctgcaggtgaacacccccctggtgggcgccagcctgctgagactggccgtgaagctggacatcaccgccgagatcctggccgtgagagacaagcaggagagaatccacctggtgctgggcgactgcacccacagccccggcagcctgcagatcagcctgctggacggcctgggccccctgcccatccagggcctgctggacagcctgaccggcatcctgaacaaggtgctgcccgagctggtgcagggcaacgtgtgccccctggtgaacgaggtgctgagaggcctggacatcaccctggtgcacgacatcgtgaacatgctgatccacggcctgcagttcgtgatcaaggtgtag

SEQ ID NO: 3950 - DNA, 1386 bp, synthetic construct
  misc_feature 1..1386: note = source = /note="Description of Artificial Sequence: Synthetic coding sequence"
  source 1..1386: mol_type = other DNA
atgagcctggacatccagagcctggacatccagtgcgaggagctgagcgacgccagatgggccgagctgctgcccctgctgcagcagtgccaggtggtgagactggacgactgcggcctgaccgaggccagatgcaaggacatcagcagcgccctgagagtgaaccccgccctggccgagctgaacctgagaagcaacgagctgggcgacgtgggcgtgcactgcgtgctgcagggcctgcagacccccagctgcaagatccagaagctgagcctgcagaactgctgcctgaccggcgccggctgcggcgtgctgagcagcaccctgagaaccctgcccaccctgcaggagctgcacctgagcgacaacctgctgggcgacgccggcctgcagctgctgtgcgagggcctgctggacccccagtgcagactggagaagctgcagctggagtactgcagcctgagcgccgccagctgcgagcccctggccagcgtgctgagagccaagcccgacttcaaggagctgaccgtgagcaacaacgacatcaacgaggccggcgtgagagtgctgtgccagggcctgaaggacagcccctgccagctggaggccctgaagctggagagctgcggcgtgaccagcgacaactgcagagacctgtgcggcatcgtggccagcaaggccagcctgagagagctggccctgggcagcaacaagctgggcgacgtgggcatggccgagctgtgccccggcctgctgcaccccagcagcagactgagaaccctgtggatctgggagtgcggcatcaccgccaagggctgcggcgacctgtgcagagtgctgagagccaaggagagcctgaaggagctgagcctggccggcaacgagctgggcgacgagggcgccagactgctgtgcgagaccctgctggagcccggctgccagctggagagcctgtgggtgaagagctgcagcttcaccgccgcctgctgcagccacttcagcagcgtgctggcccagaacagattcctgctggagctgcagatcagcaacaacagactggaggacgccggcgtgagagagctgtgccagggcctgggccagcccggcagcgtgctgagagtgctgtggctggccgactgcgacgtgagcgacagcagctgcagcagcctggccgccaccctgctggccaaccacagcctgagagagctggacctgagcaacaactgcctgggcgacgccggcatcctgcagctggtggagagcgtgagacagcccggctgcctgctggagcagctggtgctgtacgacatctactggagcgaggagatggaggacagactgcaggccctggagaaggacaagcccagcctgagagtgatcagctag

SEQ ID NO: 3951 - DNA, 534 bp, synthetic construct
  misc_feature 1..534: note = source = /note="Description of Artificial Sequence: Synthetic coding sequence"
  source 1..534: mol_type = other DNA
atgagactgctgatcctgacctgcctggtggccgtggccctggccagacccaagctgcccctgagataccccgagagactgcagaaccccagcgagagcagcgagcccatccccctggagagcagagaggagtacatgaacggcatgaacagacagagaaacatcctgagagagaagcagaccgacgagatcaagaactgcgtggtggccgagcccgagaagatggagagcagcatcagcagcagcagcgaggagatgagcctgagcaagtgcgccgagcagttctgcagactgaacgagtacaaccagctgcagctgcagaagatgagcaagcaggagcagatcagaagaatgaacgagaacagccacgtgcaggtgcccttccagcagctgaaccagctggccgcctacccctacgccgtgtggtactacccccagatcatgcagtacgtgcccttcccccccttcagcgacatcagcaaccccaccgcccacgagaactacgagaagaacaacgtgatgctgcagtggtag

SEQ ID NO: 3952 - DNA, 3054 bp, synthetic construct
  misc_feature 1..3054: note = source = /note="Description of Artificial Sequence: Synthetic coding sequence"
  source 1..3054: mol_type = other DNA
atggacctgatcagaggcgtgctgctgagactgctgctgctggccagcagcctgggccccggcgccgtgagcctgagagccgccatcagaaagcccggcaaggtgggcccccccctggacatcaagctgggcgccctgaactgcaccgccttcagcatccagtggaagatgcccagacaccccggcagccccatcctgggctacaccgtgttctacagcgaggtgggcgccgacaagagcctgcaggagcagctgcacagcgtgcccctgagcagagacatccccaccaccgaggaggtgatcggcgacctgaagcccggcaccgagtacagagtgagcatcgccgcctacagccaggccggcaagggcagactgagcagccccagacacgtgaccaccctgagccaggacagctgcctgccccccgccgccccccagcagccccacgtgatcgtggtgagcgacagcgaggtggccctgagctggaagcccggcgccagcgagggcagcgcccccatccagtactacagcgtggagttcatcagacccgacttcgacaagaagtggaccagcatccacgagagaatccagatggacagcatggtgatcaagggcctggaccccgacaccaactaccagttcgccgtgagagccatgaacagccacggccccagccccagaagctggcccagcgacatcatcagaaccctgtgccccgaggaggccggcagcggcagatacggccccagatacatcaccgacatgggcgccggcgaggacgacgagggcttcgaggacgacctggacctggacatcagcttcgaggaggtgaagcccctgcccgccaccaagggcggcaacaagaagttcctggtggagagcaagaagatgagcatcagcaaccccaagaccatcagcagactgatcccccccaccagcgccagcctgcccgtgaccaccgtggccccccagcccatccccatccagagaaagggcaagaacggcgtggccatcatgagcagactgttcgacatgccctgcgacgagaccctgtgcagcgccgacagcttctgcgtgaacgactacacctggggcggcagcagatgccagtgcaccctgggcaagggcggcgagagctgcagcgaggacatcgtgatccagtacccccagttcttcggccacagctacgtgaccttcgagcccctgaagaacagctaccaggccttccagatcaccctggagttcagagccgaggccgaggacggcctgctgctgtactgcggcgagaacgagcacggcagaggcgacttcatgagcctggccatcatcagaagaagcctgcagttcagattcaactgcggcaccggcgtggccatcatcgtgagcgagaccaagatcaagctgggcggctggcacaccgtgatgctgtacagagacggcctgaacggcctgctgcagctgaacaacggcacccccgtgaccggccagagccagggccagtacagcaagatcaccttcagaacccccctgtacctgggcggcgcccccagcgcctactggctggtgagagccaccggcaccaacagaggcttccagggctgcgtgcagagcctggccgtgaacggcagaagaatcgacatgagaccctggcccctgggcaaggccctgagcggcgccgacgtgggcgagtgcagcagcggcatctgcgacgaggccagctgcatccacggcggcacctgcaccgccatcaaggccgacagctacatctgcctgtgccccctgggcttcaagggcagacactgcgaggacgccttcaccctgaccatcccccagttcagagagagcctgagaagctacgccgccaccccctggcccctggagccccagcactacctgagcttcatggagttcgagatcaccttcagacccgacagcggcgacggcgtgctgctgtacagctacgacaccggcagcaaggacttcctgagcatcaacctggccggcggccacgtggagttcagattcgactgcggcagcggcaccggcgtgctgagaagcgaggaccccctgaccctgggcaactggcacgagctgagagtgagcagaaccgccaagaacggcatcctgcaggtggacaagcagaagatcgtggagggcatggccgagggcggcttcacccagatcaagtgcaacaccgacatcttcatcggcggcgtgcccaactacgacgacgtgaagaagaacagcggcgtgctgaagcccttcagcggcagcatccagaagatcatcctgaacgacagaaccatccacgtgaagcacgacttcaccagcggcgtgaacgtggagaacgccgcccacccctgcgtgagagccccctgcgcccacggcggcagctgcagacccagaaaggagggctacgactgcgactgccccctgggcttcgagggcctgcactgccagaaggagtgcggcaactactgcctgaacaccatcatcgaggccatcgagatcccccagttcatcggcagaagctacctgacctacgacaaccccgacatcctgaagagagtgagcggcagcagaagcaacgtgttcatgagattcaagaccaccgccaaggacggcctgctgctgtggagaggcgacagccccatgagacccaacagcgacttcatcagcctgggcctgagagacggcgccctggtgttcagctacaacctgggcagcggcgtggccagcatcatggtgaacggcagcttcaacgacggcagatggcacagagtgaaggccgtgagagacggccagagcggcaagatcaccgtggacgactacggcgccagaaccggcaagagccccggcatgatgagacagctgaacatcaacggcgccctgtacgtgggcggcatgaaggagatcgccctgcacaccaacagacagtacatgagaggcctggtgggctgcatcagccacttcaccctgagcaccgactaccacatcagcctggtggaggacgccgtggacggcaagaacatcaacacctgcggcgccaagtag

SEQ ID NO: 3953 - DNA, 1893 bp, synthetic construct
  misc_feature 1..1893: note = source = /note="Description of Artificial Sequence: Synthetic coding sequence"
  source 1..1893: mol_type = other DNA
atgcagcaggacggcctgggcgtgggcaccagaaacggcagcggcaagggcagaagcgtgcaccccagctggccctggtgcgcccccagacccctgagatacttcggcagagacgccagagccagaagagcccagaccgccgccatggccctgctggccggcggcctgagcagaggcctgggcagccaccccgccgccgccggcagagacgccgtggtgttcgtgtggctgctgctgagcacctggtgcaccgcccccgccagagccatccaggtgaccgtgagcaacccctaccacgtggtgatcctgttccagcccgtgaccctgccctgcacctaccagatgaccagcacccccacccagcccatcgtgatctggaagtacaagagcttctgcagagacagaatcgccgacgccttcagccccgccagcgtggacaaccagctgaacgcccagctggccgccggcaaccccggctacaacccctacgtggagtgccaggacagcgtgagaaccgtgagagtggtggccaccaagcagggcaacgccgtgaccctgggcgactactaccagggcagaagaatcaccatcaccggcaacgccgacctgaccttcgaccagaccgcctggggcgacagcggcgtgtactactgcagcgtggtgagcgcccaggacctgcagggcaacaacgaggcctacgccgagctgatcgtgctggactggctgttcgtggtggtggtgtgcctggccgccttcctgatcttcctgctgctgggcatctgctggtgccagtgctgcccccacacctgctgctgctacgtgagatgcccctgctgccccgacaagtgctgctgccccgaggccctgtacgccgccggcaaggccgccaccagcggcgtgcccagcatctacgcccccagcacctacgcccacctgagccccgccaagaccccccccccccccgccatgatccccatgggccccgcctacaacggctaccccggcggctaccccggcgacgtggacagaagcagcagcgccggcggccagggcagctacgtgcccctgctgagagacaccgacagcagcgtggccagcgaggtgagaagcggctacagaatccaggccagccagcaggacgacagcatgagagtgctgtactacatggagaaggagctggccaacttcgaccccagcagacccggcccccccagcggcagagtggagagagccatgagcgaggtgaccagcctgcacgaggacgactggagaagcagacccagcagaggccccgccctgacccccatcagagacgaggagtggggcggccacagccccagaagccccagaggctgggaccaggagcccgccagagagcaggccggcggcggctggagagccagaagacccagagccagaagcgtggacgccctggacgacctgaccccccccagcaccgccgagagcggcagcagaagccccaccagcaacggcggcagaagcagagcctacatgccccccagaagcagaagcagagacgacctgtacgaccaggacgacagcagagacttccccagaagcagagacccccactacgacgacttcagaagcagagagagaccccccgccgaccccagaagccaccaccacagaaccagagaccccagagacaacggcagcagaagcggcgacctgccctacgacggcagactgctggaggaggccgtgagaaagaagggcagcgaggagagaagaagaccccacaaggaggaggaggaggaggcctactacccccccgccccccccccctacagcgagaccgacagccaggccagcagagagagaagactgaagaagaacctggccctgagcagagagagcctggtggtgtag

SEQ ID NO: 3954 - DNA, 750 bp, synthetic construct; identical to SEQ ID NO: 3566
  misc_feature 1..750: note = source = /note="Description of Artificial Sequence: Synthetic coding sequence"
  source 1..750: mol_type = other DNA

SEQ ID NO: 3955 - DNA, 3057 bp, synthetic construct; identical to SEQ ID NO: 3590
  misc_feature 1..3057: note = source = /note="Description of Artificial Sequence: Synthetic coding sequence"
  source 1..3057: mol_type = other DNA

SEQ ID NO: 3956 - DNA, 1311 bp, synthetic construct
  misc_feature 1..1311: note = source = /note="Description of Artificial Sequence: Synthetic coding sequence"
  source 1..1311: mol_type = other DNA
atgcagggcacccccggcggcggcaccagacccggccccagccccgtggacagaagaaccctgctggtgttcagcttcatcctggccgccgccctgggccagatgaacttcaccggcgaccaggtgctgagagtgctggccaaggacgagaagcagctgagcctgctgggcgacctggagggcctgaagccccagaaggtggacttctggagaggccccgccagacccagcctgcccgtggacatgagagtgcccttcagcgagctgaaggacatcaaggcctacctggagagccacggcctggcctacagcatcatgatcaaggacatccaggtgctgctggacgaggagagacaggccatggccaagagcagaagactggagagaagcaccaacagcttcagctacagcagctaccacaccctggaggagatctacagctggatcgacaacttcgtgatggagcacagcgacatcgtgagcaagatccagatcggcaacagcttcgagaaccagagcatcctggtgctgaagttcagcaccggcggcagcagacaccccgccatctggatcgacaccggcatccacagcagagagtggatcacccacgccaccggcatctggaccgccaacaagatcgtgagcgactacggcaaggacagagtgctgaccgacatcctgaacgccatggacatcttcatcgagctggtgaccaaccccgacggcttcgccttcacccacagcatgaacagactgtggagaaagaacaagagcatcagacccggcatcttctgcatcggcgtggacctgaacagaaactggaagagcggcttcggcggcaacggcagcaacagcaacccctgcagcgagacctaccacggccccagcccccagagcgagcccgaggtggccgccatcgtgaacttcatcaccgcccacggcaacttcaaggccctgatcagcatccacagctacagccagatgctgatgtacccctacggcagactgctggagcccgtgagcaaccagagagagctgtacgacctggccaaggacgccgtggaggccctgtacaaggtgcacggcatcgagtacatcttcggcagcatcagcaccaccctgtacgtggccagcggcatcaccgtggactgggcctacgacagcggcatcaagtacgccttcagcttcgagctgagagacaccggccagtacggcttcctgctgcccgccacccagatcatccccaccgcccaggagacctggatggccctgagaaccatcatggagcacaccctgaaccacccctactag

SEQ ID NO: 3957 - DNA, 492 bp, synthetic construct
  misc_feature 1..492: note = source = /note="Description of Artificial Sequence: Synthetic coding sequence"
  source 1..492: mol_type = other DNA
atgttccagggcctgctgctgctgctgctgctgagcatgggcggcacctgggccagcaaggagcccctgagacccagatgcagacccatcaacgccaccctggccgtggagaaggagggctgccccgtgtgcatcaccgtgaacaccaccatctgcgccggctactgccccaccatgaccagagtgctgcagggcgtgctgcccgccctgccccaggtggtgtgcaactacagagacgtgagattcgagagcatcagactgcccggctgccccagaggcgtgaaccccgtggtgagctacgccgtggccctgagctgccagtgcgccctgtgcagaagaagcaccaccgactgcggcggccccaaggaccaccccctgacctgcgacgaccccagattccaggacagcagcagcagcaaggcccccccccccagcctgcccagccccagcagactgcccggccccagcgacacccccatcctgccccagtag

SEQ ID NO: 3958 - DNA, 213 bp, synthetic construct; identical to SEQ ID NO: 3856
  misc_feature 1..213: note = source = /note="Description of Artificial Sequence: Synthetic coding sequence"
  source 1..213: mol_type = other DNA

SEQ ID NO: 3959 - DNA, 1098 bp, synthetic construct
  misc_feature 1..1098: note = source = /note="Description of Artificial Sequence: Synthetic coding sequence"
  source 1..1098: mol_type = other DNA
atgtggctgctgctgaccatggccagcctgatcagcgtgctgggcaccacccacggcctgttcggcaagctgcaccccggcagccccgaggtgaccatgaacatcagccagatgatcacctactggggctaccccaacgaggagtacgaggtggtgaccgaggacggctacatcctggaggtgaacagaatcccctacggcaagaagaacagcggcaacaccgacgccggctacgacgtgtggctgggcaacagcagaggcaacacctgggccagaagaaacctgtactacagccccgacagcgtggagttctgggccttcagcttcgacgagatggccaagtacgacctgcccgccaccatcgacttcatcgtgaagaagaccggccagaagcagctgcactacgtgggccacagccagggcaccaccatcggcttcatcgccttcagcaccaaccccagcctggccaagagaatcaagaccttctacgccctggcccccgtggccaccgtgaagtacaccaagagcctgatcaacaagctgagattcgtgccccagagcctgttcaagttcatcttcggcgacaagatcttctacccccacaacttcttcgaccagttcctggccaccgaggtgtgcagcagagagatgctgaacctgctgtgcagcaacgccctgttcatcatctgcggcttcgacagcaagaacttcaacaccagcagactggacgtgtacctgagccacaaccccgccggcaccagcgtgcagaacatgttccactggacccaggccgtgaagagcggcaagttccaggcctacgactggggcagccccgtgcagaacagaatgcactacgaccagagccagcccccctactacaacgtgaccgccatgaacgtgcccatcgccgtgtggaacggcggcaaggacctgctggccgacccccaggacgtgggcctgctgctgcccaagctgcccaacctgatctaccacaaggagatccccttctacaaccacctggacttcatctgggccatggacgccccccaggaggtgtacaacgacatcgtgagcatgatcagcgaggacaagaagtag

SEQ ID NO: 3960 - DNA, 2535 bp, synthetic construct
  misc_feature 1..2535: note = source = /note="Description of Artificial Sequence: Synthetic coding sequence"
  source 1..2535: mol_type = other DNA
atgggccccggcgcccccttcgccagagtgggctggcccctgcccctgctggtggtgatggccgccggcgtggcccccgtgtgggccagccacagcccccacctgcccagaccccacagcagagtgcccccccaccccagcagcgagagaagagccgtgtacatcggcgccctgttccccatgagcggcggctggcccggcggccaggcctgccagcccgccgtggagatggccctggaggacgtgaacagcagaagagacatcctgcccgactacgagctgaagctgatccaccacgacagcaagtgcgaccccggccaggccaccaagtacctgtacgagctgctgtacaacgaccccatcaagatcatcctgatgcccggctgcagcagcgtgagcaccctggtggccgaggccgccagaatgtggaacctgatcgtgctgagctacggcagcagcagccccgccctgagcaacagacagagattccccaccttcttcagaacccaccccagcgccaccctgcacaaccccaccagagtgaagctgttcgagaagtggggctggaagaagatcgccaccatccagcagaccaccgaggtgttcaccagcaccctggacgacctggaggagagagtgaaggaggccggcatcgagatcaccttcagacagagcttcttcagcgaccccgccgtgcccgtgaagaacctgaagagacaggacgccagaatcatcgtgggcctgttctacgagaccgaggccagaaaggtgttctgcgaggtgtacaaggagagactgttcggcaagaagtacgtgtggttcctgatcggctggtacgccgacaactggttcaagatctacgaccccagcatcaactgcaccgtggacgagatgaccgaggccgtggagggccacatcaccaccgagatcgtgatgctgaaccccgccaacaccagaagcatcagcaacatgaccagccaggagttcgtggagaagctgaccaagagactgaagagacaccccgaggagaccggcggcttccaggaggcccccctggcctacgacgccatctgggccctggccctggccctgaacaagaccagcggcggcggcggcagaagcggcgtgagactggaggacttcaactacaacaaccagaccatcaccgaccagatctacagagccatgaacagcagcagcttcgagggcgtgagcggccacgtggtgttcgacgccagcggcagcagaatggcctggaccctgatcgagcagctgcagggcggcagctacaagaagatcggctactacgacagcaccaaggacgacctgagctggagcaagaccgacaagtggatcggcggcagcccccccgccgaccagaccctggtgatcaagaccttcagattcctgagccagaagctgttcatcagcgtgagcgtgctgagcagcctgggcatcgtgctggccgtggtgtgcctgagcttcaacatctacaacagccacgtgagatacatccagaacagccagcccaacctgaacaacctgaccgccgtgggctgcagcctggccctggccgccgtgttccccctgggcctggacggctaccacatcggcagaaaccagttccccttcgtgtgccaggccagactgtggctgctgggcctgggcttcagcctgggctacggcagcatgttcaccaagatctggtgggtgcacaccgtgttcaccaagaaggaggagaagaaggagtggagaaagaccctggagccctggaagctgtacgccaccgtgggcctgctggtgggcatggacgtgctgaccctggccatctggcagatcgtggaccccctgcacagaaccatcgagaccttcgccaaggaggagcccaaggaggacatcgacgtgagcatcctgccccagctggagcactgcagcagcagaaagatgaacacctggctgggcatcttctacggctacaagggcctgctgctgctgctgggcatcttcctggcctacgagaccaagagcgtgagcaccgagaagatcaacgaccacagagccgtgggcatggccatctacaacgtggccgtgctgtgcctgatcaccgcccccgtgaccatgatcctgagcagccagcaggacgccgccttcgccttcgccagcctggccatcgtgttcagcagctacatcaccctggtggtgctgttcgtgcccaagatgagaagactgatcaccagaggcgagtggcagagcgaggcccaggacaccatgaagaccggcagcagcaccaacaacaacgaggaggagaagagcagactgctggagaaggagaacagagagctggagaagatcatcgccgagaaggaggagagagtgagcgagctgagacaccagctgcagagcagacagcagctgagaagcagaagacacccccccaccccccccgagcccagcggcggcctgcccagaggcccccccgagccccccgacagactgagctgcgacggcagcagagtgcacctgctgtacaagtag

SEQ ID NO: 3961 - DNA, 1020 bp, synthetic construct
  misc_feature 1..1020: note = source = /note="Description of Artificial Sequence: Synthetic coding sequence"
  source 1..1020: mol_type = other DNA
atggtgagcaagagcagatggaagctgctggccatgctggccctggtgctggtggtgatggtgtggtacagcatcagcagagaggacagatacatcgagctgttctacttccccatccccgagaagaaggagccctgcctgcagggcgaggccgagagcaaggccagcaagctgttcggcaagctgagccccctgtgcagctacagcagagaccagcccatcttcctgagactggaggactacttctgggtgaagacccccagcgcctacgagctgccctacggcaccaagggcagcgaggacctgctgctgagagtgctggccatcaccagcagcagcatccccaagaacatccagagcctgagatgcagaagatgcgtggtggtgggcaacggccacagactgagaaacagcagcctgggcgacgccatcaacaagtacgacgtggtgatcagactgaacaacgcccccgtggccggctacgagggcgacgtgggcagcaagaccaccatgagactgttctaccccgagagcgcccacttcgaccccaaggtggagaacaaccccgacaccctgctggtgctggtggccttcaaggccatggacttccactggatcgagaccatcctgagcgacaagaagagagtgagaaagggcttctggaagcagccccccctgatctgggacgtgaaccccaagcagatcagaatcctgaaccccttcttcatggagatcgccgccgacaagctgctgagcctgcccatgcagcagcccagaaagatcaagcagaagcccaccaccggcctgctggccatcaccctggccctgcacctgtgcgacctggtgcacatcgccggcttcggctaccccgacgcctacaacaagaagcagaccatccactactacgagcagatcaccctgaagagcatggccggcagcggccacaacgtgagccaggaggccctggccatcaagagaatgctggagatgggcgccatcaagaacctgaccagcttctag

SEQ ID NO: 3962 - DNA, 1386 bp, synthetic construct; identical to SEQ ID NO: 3950
  misc_feature 1..1386: note = source = /note="Description of Artificial Sequence: Synthetic coding sequence"
  source 1..1386: mol_type = other DNA

SEQ ID NO: 3963 - DNA, 1695 bp, synthetic construct
  misc_feature 1..1695: note = source = /note="Description of Artificial Sequence: Synthetic coding sequence"
  source 1..1695: mol_type = other DNA
atggcccccaagaagctgagctgcctgagaagcctgctgctgcccctgagcctgaccctgctgctgccccaggccgacaccagaagcttcgtggtggacagaggccacgacagattcctgctggacggcgcccccttcagatacgtgagcggcagcctgcactacttcagagtgcccagagtgctgtgggccgacagactgctgaagatgagatggagcggcctgaacgccatccagttctacgtgccctggaactaccacgagccccagcccggcgtgtacaacttcaacggcagcagagacctgatcgccttcctgaacgaggccgccctggccaacctgctggtgatcctgagacccggcccctacatctgcgccgagtgggagatgggcggcctgcccagctggctgctgagaaagcccgagatccacctgagaaccagcgaccccgccgacaacatgaccaagatcttcaccctgctgagaaagtacgagccccacggccccctggtgaacagcgagtactacaccggctggctggactactggggccagaaccacagcaccagaagcgtgagcgccgtgaccaagggcctggagaacatgctgaagctgggcgccagcgtgaacatgtacatgttccacggcggcaccaacttcggctactggaacggcgccgacaagaagggcagattcctgcccatcaccaccagctacgactacgacgcccccatcagcgaggccggcgaccccacccccaagctgttcgccctgagagacgtgatcagcaagttccaggaggtgcccctgggccccctgcccccccccagccccaagatgatgctgggccccgtgaccctgcacctggtgggccacctgctggccttcctggacctgctgtgccccagaggccccatccacagcatcctgcccatgaccttcgaggccgtgaagcaggaccacggcttcatgctgtacagaacctacatgacccacaccatcttcgagcccacccccttctgggtgcccaacaacggcgtgcacgacagagcctacgtgatggtggacggcgtgttccagggcgtggtggagagaaacatgagagacaagctgttcctgaccggcaagctgggcagcaagctggacatcctggtggagaacatgggcagactgagcttcggcagcaacagcagcgacttcaagggcctgctgaagccccccatcctgggccagaccatcctgacccagtggatgatgttccccctgaagatcgacaacctggtgaagtggtggttccccctgcagctgcccaagtggccctacccccaggcccccagcggccccaccttctacagcaagaccttccccatcctgggcagcgtgggcgacaccttcctgtacctgcccggctggaccaagggccaggtgtggatcaacggcttcaacctgggcagatactggaccaagcagggcccccagcagaccctgtacgtgcccagattcctgctgttccccagaggcgccctgaacaagatcaccctgctggagctggaggacgtgcccctgcagccccaggtgcagttcctggacaagcccatcctgaacagcaccagcaccctgcacagaacccacatcaacagcctgagcgccgacaccctgagcgccagcgagcccatggagctgagcggccactag

SEQ ID NO: 3964 - DNA, 1317 bp, synthetic construct
  misc_feature 1..1317: note = source = /note="Description of Artificial Sequence: Synthetic coding sequence"
  source 1..1317: mol_type = other DNA
atgatgtacgcccccgtggagttcagcgaggccgagttcagcagagccgagtaccagagaaagcagcagttctgggacagcgtgagactggccctgttcaccctggccatcgtggccatcatcggcatcgccatcggcatcgtgacccacttcgtggtggaggacgacaagagcttctactacctggccagcttcaaggtgaccaacatcaagtacaaggagaactacggcatcagaagcagcagagagttcatcgagagaagccaccagatcgagagaatgatgagcagaatcttcagacacagcagcgtgggcggcagattcatcaagagccacgtgatcaagctgagccccgacgagcagggcgtggacatcctgatcgtgctgatcttcagataccccagcaccgacagcgccgagcagatcaagaagaagatcgagaaggccctgtaccagagcctgaagaccaagcagctgagcctgaccatcaacaagcccagcttcagactgacccccatcgacagcaagaagatgagaaacctgctgaacagcagatgcggcatcagaatgaccagcagcaacatgcccctgcccgccagcagcagcacccagagaatcgtgcagggcagagagaccgccatggagggcgagtggccctggcaggccagcctgcagctgatcggcagcggccaccagtgcggcgccagcctgatcagcaacacctggctgctgaccgccgcccactgcttctggaagaacaaggaccccacccagtggatcgccaccttcggcgccaccatcaccccccccgccgtgaagagaaacgtgagaaagatcatcctgcacgagaactaccacagagagaccaacgagaacgacatcgccctggtgcagctgagcaccggcgtggagttcagcaacatcgtgcagagagtgtgcctgcccgacagcagcatcaagctgccccccaagaccagcgtgttcgtgaccggcttcggcagcatcgtggacgacggccccatccagaacaccctgagacaggccagagtggagaccatcagcaccgacgtgtgcaacagaaaggacgtgtacgacggcctgatcacccccggcatgctgtgcgccggcttcatggagggcaagatcgacgcctgcaagggcgacagcggcggccccctggtgtacgacaaccacgacatctggtacatcgtgggcatcgtgagctggggccagagctgcgccctgcccaagaagcccggcgtgtacaccagagtgaccaagtacagagactggatcgccagcaagaccggcatgtag

SEQ ID NO: 3965 - DNA, 4392 bp, synthetic construct
  misc_feature 1..4392: note = source = /note="Description of Artificial Sequence: Synthetic coding sequence"
  source 1..4392: mol_type = other DNA
atggagcccagactgttctgctggaccaccctgttcctgctggccggctggtgcctgcccggcctgccctgccccagcagatgcctgtgcttcaagagcaccgtgagatgcatgcacctgatgctggaccacatcccccaggtgccccagcagaccaccgtgctggacctgagattcaacagaatcagagagatccccggcagcgccttcaagaagctgaagaacctgaacaccctgctgctgaacaacaaccacatcagaaagatcagcagaaacgccttcgagggcctggagaacctgctgtacctgtacctgtacaagaacgagatccacgccctggacaagcagaccttcaagggcctgatcagcctggagcacctgtacatccacttcaaccagctggagatgctgcagcccgagaccttcggcgacctgctgagactggagagactgttcctgcacaacaacaagctgagcaagatccccgccggcagcttcagcaacctggacagcctgaagagactgagactggacagcaacgccctggtgtgcgactgcgacctgatgtggctgggcgagctgctgcagggcttcgcccagcacggccacacccaggccgccgccacctgcgagtaccccagaagactgcacggcagagccgtggccagcgtgaccgtggaggagttcaactgccagagccccagaatcaccttcgagccccaggacgtggaggtgcccagcggcaacaccgtgtacttcacctgcagagccgagggcaaccccaagcccgagatcatctggatccacaacaaccacagcctggacctggaggacgacaccagactgaacgtgttcgacgacggcaccctgatgatcagaaacaccagagagagcgaccagggcgtgtaccagtgcatggccagaaacagcgccggcgaggccaagacccagagcgccatgctgagatacagcagcctgcccgccaagcccagcttcgtgatccagccccaggacaccgaggtgctgatcggcaccagcaccaccctggagtgcatggccaccggccacccccaccccctgatcacctggaccagagacaacggcctggagctggacggcagcagacacgtggccaccagcagcggcctgtacctgcagaacatcacccagagagaccacggcagattcacctgccacgccaacaacagccacggcaccgtgcaggccgccgccaacatcatcgtgcaggcccccccccagttcaccgtgacccccaaggaccaggtggtgctggaggagcacgccgtggagtggctgtgcgaggccgacggcaaccccccccccgtgatcgtgtggaccaagaccggcggccagctgcccgtggagggccagcacaccgtgctgagcagcggcaccctgagaatcgacagagccgcccagcacgaccagggccagtacgagtgccaggccgtgagcagcctgggcgtgaagaaggtgagcgtgcagctgaccgtgaagcccaaggccctggccgtgttcacccagctgccccaggacaccagcgtggaggtgggcaagaacatcaacatcagctgccacgcccagggcgagccccagcccatcatcacctggaacaaggagggcgtgcagatcaccgagagcggcaagttccacgtggacgacgagggcaccctgaccatctacgacgccggcttccccgaccagggcagatacgagtgcgtggccagaaacagcttcggcctggccgtgaccaacatgttcctgaccgtgaccgccatccagggcagacaggccggcgacgacttcgtggagagcagcatcctggacgccgtgcagagagtggacagcgccatcaacagcaccagaagacacctgttcagccagaagccccacaccagcagcgacctgctggcccagttccactaccccagagaccccctgatcgtggagatggccagagccggcgagatcttcgagcacaccctgcagctgatcagagagagagtgaagcagggcctgaccgtggacctggagggcaaggagttcagatacaacgacctggtgagccccagaagcctgagcctgatcgccaacctgagcggctgcaccgccagaagacccctgcccaactgcagcaacagatgcttccacgccaagtacagagcccacgacggcacctgcaacaacctgcagcagcccacctggggcgccgccctgaccgccttcgccagactgctgcagcccgcctacagagacggcatcagagcccccagaggcctgggcctgcccgtgggcagcagacagcccctgcccccccccagactggtggccaccgtgtgggccagagccgccgccgtgacccccgaccacagctacaccagaatgctgatgcactggggctggttcctggagcacgacctggaccacaccgtgcccgccctgagcaccgccagattcagcgacggcagaccctgcagcagcgtgtgcaccaacgaccccccctgcttccccatgaacaccagacacgccgaccccagaggcacccacgccccctgcatgctgttcgccagaagcagccccgcctgcgccagcggcagacccagcgccaccgtggacagcgtgtacgccagagagcagatcaaccagcagaccgcctacatcgacggcagcaacgtgtacggcagcagcgagagagagagccaggccctgagagaccccagcgtgcccagaggcctgctgaagaccggcttcccctggccccccagcggcaagcccctgctgcccttcagcaccggcccccccaccgagtgcgccagacaggagcaggagagcccctgcttcctggccggcgaccacagagccaacgagcacctggccctggccgccatgcacaccctgtggttcagagagcacaacagaatggccaccgagctgagcgccctgaacccccactgggagggcaacaccgtgtaccaggaggccagaaagatcgtgggcgccgagctgcagcacatcacctacagccactggctgcccaaggtgctgggcgaccccggcaccagaatgctgagaggctacagaggctacaaccccaacgtgaacgccggcatcatcaacagcttcgccaccgccgccttcagattcggccacaccctgatcaaccccatcctgtacagactgaacgccaccctgggcgagatcagcgagggccacctgcccttccacaaggccctgttcagccccagcagaatcatcaaggagggcggcatcgaccccgtgctgagaggcctgttcggcgtggccgccaagtggagagcccccagctacctgctgagccccgagctgacccagagactgttcagcgccgcctacagcgccgccgtggacagcgccgccaccatcatccagagaggcagagaccacggcatccccccctacgtggacttcagagtgttctgcaacctgaccagcgtgaagaacttcgaggacctgcagaacgagatcaaggacagcgagatcagacagaagctgagaaagctgtacggcagccccggcgacatcgacctgtggcccgccctgatggtggaggacctgatccccggcaccagagtgggccccaccctgatgtgcctgttcgtgacccagttccagagactgagagacggcgacagattctggtacgagaaccccggcgtgttcacccccgcccagctgacccagctgaagcaggccagcctgagcagagtgctgtgcgacaacggcgacagcatccagcaggtgcaggccgacgtgttcgtgaaggccgagtacccccaggactacctgaactgcagcgagatccccaaggtggacctgagagtgtggcaggactgctgcgccgactgcagaagcagaggccagttcagagccgtgacccaggagagccagaagaagagaagcgcccagtacagctaccccgtggacaaggacatggagctgagccacctgagaagcagacagcaggacaagatctacgtgggcgaggacgccagaaacgtgaccgtgctggccaagaccaagttcagccaggacttcagcaccttcgccgccgagatccaggagaccatcaccgccctgagagagcagatcaacaagctggaggccagactgagacaggccggctgcaccgacgtgagaggcgtgcccagaaaggccgaggagagatggatgaaggaggactgcacccactgcatctgcgagagcggccaggtgacctgcgtggtggagatctgcccccccgccccctgccccagccccgagctggtgaagggcacctgctgccccgtgtgcagagacagaggcatgcccagcgacagccccgagaagagatag

SEQ ID NO: 3966 - DNA, 1206 bp, synthetic construct
  misc_feature 1..1206: note = source = /note="Description of Artificial Sequence: Synthetic coding sequence"
  source 1..1206: mol_type = other DNA
atgggcctgaaggccctgtgcctgggcctgctgtgcgtgctgttcgtgagccacttctacacccccatgcccgacaacatcgaggagagctggaagatcatggccctggacgccatcgccaagacctgcaccttcaccgccatgtgcttcgagaacatgagaatcatgagatacgaggagttcatcagcatgatcttcagactggactacacccagcccctgagcgacgagtacatcaccgtgaccgacaccaccttcgtggacatccccgtgagactgtacctgcccaagagaaagagcgagaccagaagaagagccgtgatctacttccacggcggcggcttctgcttcggcagcagcaagcagagagccttcgacttcctgaacagatggaccgccaacaccctggacgccgtggtggtgggcgtggactacagactggccccccagcaccacttccccgcccagttcgaggacggcctggccgccgtgaagttcttcctgctggagaagatcctgaccaagtacggcgtggaccccaccagaatctgcatcgccggcgacagcagcggcggcaacctggccaccgccgtgacccagcaggtgcagaacgacgccgagatcaagcacaagatcaagatgcaggtgctgctgtaccccggcctgcagatcaccgacagctacctgcccagccacagagagaacgagcacggcatcgtgctgaccagagacgtggccatcaagctggtgagcctgtacttcaccaaggacgaggccctgccctgggccatgagaagaaaccagcacatgcccctggagagcagacacctgttcaagttcgtgaactggagcatcctgctgcccgagaagtacagaaaggactacgtgtacaccgagcccatcctgggcggcctgagctacagcctgcccggcctgaccgacagcagagccctgcccctgctggccaacgacagccagctgcagaacctgcccctgacctacatcctgacctgccagcacgacctgctgagagacgacggcctgatgtacgtgaccagactgagaaacgtgggcgtgcaggtggtgcacgagcacatcgaggacggcatccacggcgccctgagcttcatgaccagccccttctacctgagactgggcctgagaatcagagacatgtacgtgagctggctggacaagaacctgtag

SEQ ID NO: 3967 - DNA, 264 bp, synthetic construct; identical to SEQ ID NO: 3796
  misc_feature 1..264: note = source = /note="Description of Artificial Sequence: Synthetic coding sequence"
  source 1..264: mol_type = other DNA

SEQ ID NO: 3968 - DNA, 813 bp, synthetic construct
  misc_feature 1..813: note = source = /note="Description of Artificial Sequence: Synthetic coding sequence"
  source 1..813: mol_type = other DNA
atgagaggccagggcagaaaggagagcctgagcgacagcagagacctggacggcagctacgaccagctgaccggccacccccccggccccaccaagaaggccctgaagcagagattcctgaagctgctgccctgctgcggcccccaggccctgcccagcgtgagcgagaccctggccgcccccgccagcctgagaccccacagacccagactgctggaccccgacagcgtggacgacgagttcgagctgagcaccgtgtgccacagacccgagggcctggagcagctgcaggagcagaccaagttcaccagaaaggagctgcaggtgctgtacagaggcttcaagaacgagtgccccagcggcatcgtgaacgaggagaacttcaagcagatctacagccagttcttcccccagggcgacagcagcacctacgccaccttcctgttcaacgccttcgacaccaaccacgacggcagcgtgagcttcgaggacttcgtggccggcctgagcgtgatcctgagaggcaccgtggacgacagactgaactgggccttcaacctgtacgacctgaacaaggacggctgcatcaccaaggaggagatgctggacatcatgaagagcatctacgacatgatgggcaagtacacctaccccgccctgagagaggaggcccccagagagcacgtggagagcttcttccagaagatggacagaaacaaggacggcgtggtgaccatcgaggagttcatcgagagctgccagaaggacgagaacatcatgagaagcatgcagctgttcgacaacgtgatctag

SEQ ID NO: 3969 - DNA, 819 bp, synthetic construct
  misc_feature 1..819: note = source = /note="Description of Artificial Sequence: Synthetic coding sequence"
  source 1..819: mol_type = other DNA
atgcacctgagactgatcagctggctgttcatcatcctgaacttcatggagtacatcggcagccagaacgccagcagaggcagaagacagagaagaatgcaccccaacgtgagccagggctgccagggcggctgcgccacctgcagcgactacaacggctgcctgagctgcaagcccagactgttcttcgccctggagagaatcggcatgaagcagatcggcgtgtgcctgagcagctgccccagcggctactacggcaccagataccccgacatcaacaagtgcaccaagtgcaaggccgactgcgacacctgcttcaacaagaacttctgcaccaagtgcaagagcggcttctacctgcacctgggcaagtgcctggacaactgccccgagggcctggaggccaacaaccacaccatggagtgcgtgagcatcgtgcactgcgaggtgagcgagtggaacccctggagcccctgcaccaagaagggcaagacctgcggcttcaagagaggcaccgagaccagagtgagagagatcatccagcaccccagcgccaagggcaacctgtgcccccccaccaacgagaccagaaagtgcaccgtgcagagaaagaagtgccagaagggcgagagaggcaagaagggcagagagagaaagagaaagaagcccaacaagggcgagagcaaggaggccatccccgacagcaagagcctggagagcagcaaggagatccccgagcagagagagaacaagcagcagcagaagaagagaaaggtgcaggacaagcagaagagcgtgagcgtgagcaccgtgcactag

SEQ ID NO: 3970 - DNA, 294 bp, synthetic construct
  misc_feature 1..294: note = source = /note="Description of Artificial Sequence: Synthetic coding sequence"
  source 1..294: mol_type = other DNA
atggccaagagcttccccgtgttcagcctgctgagcttcatcctgatccacctggtgctgagcagcgtgagcggccccagacactggtggccccccagaggcatcatcaaggtgaagtgcccctacgagaaggtgaacctgagctggtacaacggcaccgtgaacccctgccccggcctgtaccagcccatctgcggcaccaacttcatcacctacgacaacccctgcatcctgtgcgtggagagcctgaagagccacggcagaatcagattctaccacgacggcaagtgctag

SEQ ID NO: 3971 - DNA, 726 bp, synthetic construct; identical to SEQ ID NO: 3658
  misc_feature 1..726: note = source = /note="Description of Artificial Sequence: Synthetic coding sequence"
  source 1..726: mol_type = other DNA

SEQ ID NO: 3972 - DNA, 1827 bp, synthetic construct
  misc_feature 1..1827: note = source = /note="Description of Artificial Sequence: Synthetic coding sequence"
  source 1..1827: mol_type = other DNA
atggccagagccagagccggcgccctgctggccctgtgggtgctgggcgccgccgcccacccccagtgcctggacttcagaccccccttcagacccacccagcccctgagactgtgcgcccagtacagcgacttcggctgctgcgacgagggcagagacgccgagctgaccagaagattctgggccctggccagcagagtggacgccgccgagtgggccgcctgcgccggctacgccagagacctgctgtgccaggagtgcagcccctacgccgcccacctgtacgacgccgaggaccccttcacccccctgagaaccgtgcccggcctgtgccaggactactgcctggacatgtggcacaagtgcagaggcctgttcagacacctgagcaccgaccaggagctgtgggccctggagggcaacctggccagattctgcagatacctgagcctggacgacaccgactactgcttcccctacctgctggtgaacaagaacctgaacagcaacctgggccacgtggtggccgacgccaagggctgcctgcagctgtgcctggaggaggtggccaacggcctgagaaaccccgtggccatggtgcacgccagagacggcacccacagattcttcgtggccgagcaggtgggcctggtgtgggcctacctgcccgacagaagcagactgggcaagcccttcctgaacatcagcagagtggtgctgaccagcccctgggagggcgacgagagaggcttcctgggcatcgccttccaccccagcttccagcacaacagaagactgtacgtgtactacagcgtgggcatcagaagcagcgagtggatcagaatcagcgagttcagagtgagcgaggacgacgagaacgccgtggaccacagcagcgagagaatcatcctggaggtgaaggagcccgccagcaaccacaacggcggccagctgctgttcggcgacgacggctacctgtacatcttcaccggcgacggcggcatggccggcgaccccttcggcaccttcggcaacgcccagaacaagagcgccctgctgggcaaggtgctgagaatcgacgtggacagaaaggagagaggcctgccctacggcatcccccccgacaaccccttcgtgggcgaccccgccgcccagcccgaggtgtacgccctgggcgtgagaaacatgtggagatgcagcttcgacagaggcgaccccagcagcggcaccggcagaggcagactgttctgcggcgacgtgggccagaacaagttcgaggaggtggacgtggtggagagaggcggcaactacggctggagagccagagagggcttcgagtgctacgacagaagcctgtgcgccaacaccagcctgaacgacctgctgcccatcttcgcctacccccacaccgtgggcaagagcgtgaccggcggctacgtgtacagaggctgcgagtaccccaacctgaacggcctgtacatcttcggcgacttcatgagcggcagactgatgagcctgcaggagaaccccggcaccggccagtggcagtacagcgagatctgcatgggccacggccagacctgcgagttccccggcctgatcaacaactactacccctacatcatcagcttcggcgaggacgaggccggcgagctgtacttcatgagcaccggcgagcccagcgccaccgcccccagaggcgtggtgtacaagatcatcgacgccagcagctgcaaggccagaagcgccatgcccggctacgtgcccgcccccagcgtgtgcagcagcctgaccagccagcccttcatcctgcagtggtggaagtag

SEQ ID NO: 3973 - DNA, 351 bp, synthetic construct
  misc_feature 1..351: note = source = /note="Description of Artificial Sequence: Synthetic coding sequence"
  source 1..351: mol_type = other DNA
atggccccccccagcgtgcccctggtgctgctgctggtgctgctgctgagcctggccgagacccccgccagcgcccccgcccacagaggcagaggcggctggaccctgaacagcgccggctacctgctgggccccgtgctgcacctgccccagatgggcgaccaggacggcaagagagagaccgccctggagatcctggacctgtggaaggccatcgacggcctgccctacagccaccccccccagcccagcaagagaaacgtgatggagaccttcgccaagcccgagatcggcgacctgggcatgctgagcatgaagatccccaaggaggaggacgtgctgaagagctag

SEQ ID NO: 3974 - DNA, 3618 bp, synthetic construct
  misc_feature 1..3618: note = source = /note="Description of Artificial Sequence: Synthetic coding sequence"
  source 1..3618: mol_type = other DNA
atgagaaagcccagaagaaagagcagacagaacgccgagggcagaagaagccccagcccctacagcctgaagtgcagccccaccagagagaccctgacctacgcccaggcccagagaatcgtggaggtggacatcgacggcagactgcacagaatcagcatctacgaccccctgaagatcatcaccgaggacgagctgaccgcccaggacatcaccgagtgcaacagcaacaaggagaacagcgagcagccccagttccccggcaagagcaagaagcccagcagcaagggcaagaagaaggagagctgcagcaagcacgccagcggcaccagcttccacctgccccagcccagcttcagaatggtggacagcggcatccagcccgaggccccccccctgcccgccgcctactacagatacatcgagaagccccccgaggacctggacgccgaggtggagtacgacatggacgaggaggacctggcctggctggacatggtgaacgagaagagaagagtggacggccacagcctggtgagcgccgacaccttcgagctgctggtggacagactggagaaggagagctacctggagagcagaagcagcggcgcccagcagagcctgatcgacgaggacgccttctgctgcgtgtgcctggacgacgagtgccacaacagcaacgtgatcctgttctgcgacatctgcaacctggccgtgcaccaggagtgctacggcgtgccctacatccccgagggccagtggctgtgcagatgctgcctgcagagccccagcagacccgtggactgcatcctgtgccccaacaagggcggcgccttcaagcagaccagcgacggccactgggcccacgtggtgtgcgccatctggatccccgaggtgtgcttcgccaacaccgtgttcctggagcccatcgagggcatcgacaacatcccccccgccagatggaagctgacctgctacatctgcaagcagaagggcctgggcgccgccatccagtgccacaaggtgaactgctacaccgccttccacgtgacctgcgcccagagagccggcctgttcatgaagatcgagcccatgagagagaccagcctgaacggcaccatcttcaccgtgagaaagaccgcctactgcgaggcccacagcccccccggcgccgccaccgccagaagaaagggcgacagccccagaagcatcagcgagaccggcgacgaggagggcctgaaggagggcgacggcgaggaggaggaggaggaggaggtggaggaggaggagcaggaggcccagggcggcgtgagcggcagcctgaagggcgtgcccaagaagagcaagatgagcctgaagcagaagatcaagaaggagcccgaggaggccggccaggacacccccagcaccctgcccatgctggccgtgccccagatccccagctacagactgaacaagatctgcagcggcctgagcttccagagaaagaaccagttcatgcagagactgcacaactactggctgctgaagagacaggccagaaacggcgtgcccctgatcagaagactgcacagccacctgcagagccagagaaacgccgagcagagagagcaggacgagaagaccagcgccgtgaaggaggagctgaagtactggcagaagctgagacacgacctggagagagccagactgctgatcgagctgatcagaaagagagagaagctgaagagagagcaggtgaaggtgcagcaggccgccatggagctggagctgatgcccttcaacgtgctgctgagaaccaccctggacctgctgcaggagaaggaccccgcccacatcttcgccgagcccgtgaacctgagcgaggtgcccgactacctggagttcatcagcaagcccatggacttcagcaccatgagaagaaagctggagagccacctgtacagaaccctggaggagttcgaggaggacttcaacctgatcgtgaccaactgcatgaagtacaacgccaaggacaccatcttccacagagccgccgtgagactgagagacctgggcggcgccatcctgagacacgccagaagacaggccgagaacatcggctacgaccccgagagaggcacccacctgcccgagagccccaagctggaggacttctacagattcagctgggaggacgtggacaacatcctgatccccgagaacagagcccacctgagccccgaggtgcagctgaaggagctgctggagaagctggacctggtgagcgccatgagaagcagcggcgccagaaccagaagagtgagactgctgagaagagagatcaacgccctgagacagaagctggcccagcccccccccccccagccccccagcctgaacaagaccgtgagcaacggcgagctgcccgccggcccccagggcgacgccgccgtgctggagcaggccctgcaggaggagcccgaggacgacggcgacagagacgacagcaagctgccccccccccccaccctggagcccaccggccccgcccccagcctgagcgagcaggagagcccccccgagccccccaccctgaagcccatcaacgacagcaagccccccagcagattcctgaagcccagaaaggtggaggaggacgagctgctggagaagagccccctgcagctgggcaacgagcccctgcagagactgctgagcgacaacggcatcaacagactgagcctgatggcccccgacacccccgccggcacccccctgagcggcgtgggcagaagaaccagcgtgctgttcaagaaggccaagaacggcgtgaagctgcagagaagccccgacagagtgctggagaacggcgaggaccacggcgtggccggcagccccgccagccccgccagcatcgaggaggagagacacagcagaaagagacccagaagcagaagctgcagcgagagcgagggcgagagaagcccccagcaggaggaggagaccggcatgaccaacggcttcggcaagcacaccgagagcggcagcgacagcgagtgcagcctgggcctgagcggcggcctggccttcgaggcctgcagcggcctgaccccccccaagagaagcagaggcaagcccgccctgagcagagtgcccttcctggagggcgtgaacggcgacagcgactacaacggcagcggcagaagcctgctgctgcccttcgaggacagaggcgacctggagcccctggagctggtgtgggccaagtgcagaggctaccccagctaccccgccctgatcatcgaccccaagatgcccagagagggcctgctgcacaacggcgtgcccatccccgtgccccccctggacgtgctgaagctgggcgagcagaagcaggccgaggccggcgagaagctgttcctggtgctgttcttcgacaacaagagaacctggcagtggctgcccagagacaaggtgctgcccctgggcgtggaggacaccgtggacaagctgaagatgctggagggcagaaagaccagcatcagaaagagcgtgcaggtggcctacgacagagccatgatccacctgagcagagtgagaggcccccacagcttcgtgaccagcagctacctgtag

SEQ ID NO: 3975 - DNA, 1977 bp, synthetic construct
  misc_feature 1..1977: note = source = /note="Description of Artificial Sequence: Synthetic coding sequence"
  source 1..1977: mol_type = other DNA
atgttcgtgagctacctgatcctgaccctgctgcacgtgcagaccgccgtgctggccagacccggcggcgagagcatcggctgcgacgactacctgggcagcgacaaggtggtggacaagtgcggcgtgtgcggcggcgacaacaccggctgccaggtggtgagcggcgtgttcaagcacgccctgaccagcctgggctaccacagagtggtggagatccccgagggcgccaccaagatcaacatcaccgagatgtacaagagcaacaactacctggccctgagaagcagaagcggcagaagcatcatcaacggcaactgggccatcgacagacccggcaagtacgagggcggcggcaccatgttcacctacaagagacccaacgagatcagcagcaccgccggcgagagcttcctggccgagggccccaccaacgagatcctggacgtgtacatgatccaccagcagcccaaccccggcgtgcactacgagtacgtgatcatgggcaccaacgccatcagcccccaggtgcccccccacagaagacccggcgagcccttcaacggccagatggtgaccgagggcagaagccaggaggagggcgagcagaagggcagaaacgaggagaaggaggacctgagaggcgaggcccccgagatgttcaccagcgagagcgcccagaccttccccgtgagacaccccgacagattcagcccccacagacccgacaacctggtgccccccgccccccagccccccagaagaagcagagaccacaactggaagcagctgggcaccaccgagtgcagcaccacctgcggcaagggcagccagtaccccatcttcagatgcgtgcacagaagcacccacgaggaggcccccgagagctactgcgacagcagcatgaagcccacccccgaggaggagccctgcaacatcttcccctgccccgccttctgggacatcggcgagtggagcgagtgcagcaagacctgcggcctgggcatgcagcacagacaggtgctgtgcagacaggtgtacgccaacagaagcctgaccgtgcagccctacagatgccagcacctggagaagcccgagaccaccagcacctgccagctgaagatctgcagcgagtggcagatcagaaccgactggaccagctgcagcgtgccctgcggcgtgggccagagaaccagagacgtgaagtgcgtgagcaacatcggcgacgtggtggacgacgaggagtgcaacatgaagctgagacccaacgacatcgagaactgcgacatgggcccctgcgccaagagctggttcctgaccgagtggagcgagagatgcagcgccgagtgcggcgccggcgtgagaaccagaagcgtggtgtgcatgaccaaccacgtgagcagcctgcccctggagggctgcggcaacaacagacccgccgaggccaccccctgcgacaacggcccctgcaccggcaaggtggagtggttcgccggcagctggagccagtgcagcatcgagtgcggcagcggcacccagcagagagaggtgatctgcgtgagaaagaacgccgacaccttcgaggtgctggaccccagcgagtgcagcttcctggagaagccccccagccagcagagctgccacctgaagccctgcggcgccaagtggttcagcaccgagtggagcatgtgcagcaagagctgccagggcggcttcagagtgagagaggtgagatgcctgagcgacgacatgaccctgagcaacctgtgcgacccccagctgaagcccgaggagagagagagctgcaacccccaggactgcgtgcccgaggtggacgagaactgcaaggacaagtactacaactgcaacgtggtggtgcaggccagactgtgcgtgtacaactactacaagaccgcctgctgcgccagctgcaccagagtggccaacagacagaccggcttcctgggcagcagatag

SEQ ID NO: 3976 - DNA, 708 bp, synthetic construct
  misc_feature 1..708: note = source = /note="Description of Artificial Sequence: Synthetic coding sequence"
  source 1..708: mol_type = other DNA
atgagacccctggccggcggcctgctgaaggtggtgttcgtggtgttcgccagcctgtgcgcctggtacagcggctacctgctggccgagctgatccccgacgcccccctgagcagcgccgcctacagcatcagaagcatcggcgagagacccgtgctgaaggcccccgtgcccaagagacagaagtgcgaccactggaccccctgccccagcgacacctacgcctacagactgctgagcggcggcggcagaagcaagtacgccaagatctgcttcgaggacaacctgctgatgggcgagcagctgggcaacgtggccagaggcatcaacatcgccatcgtgaactacgtgaccggcaacgtgaccgccaccagatgcttcgacatgtacgagggcgacaacagcggccccatgaccaagttcatccagagcgccgcccccaagagcctgctgttcatggtgacctacgacgacggcagcaccagactgaacaacgacgccaagaacgccatcgaggccctgggcagcaaggagatcagaaacatgaagttcagaagcagctgggtgttcatcgccgccaagggcctggagctgcccagcgagatccagagagagaagatcaaccacagcgacgccaagaacaacagatacagcggctggcccgccgagatccagatcgagggctgcatccccaaggagagaagctag

SEQ ID NO: 3977 - DNA, 759 bp, synthetic construct
  misc_feature 1..759: note = source = /note="Description of Artificial Sequence: Synthetic coding sequence"
  source 1..759: mol_type = other DNA
atgagaggccagggcagaaaggagagcctgagcgacagcagagacctggacggcagctacgaccagctgaccggccacccccccggccccaccaagaaggccctgaagcagagattcctgaagctgctgccctgctgcggcccccaggccctgcccagcgtgagcgagaacagcgtggacgacgagttcgagctgagcaccgtgtgccacagacccgagggcctggagcagctgcaggagcagaccaagttcaccagaaaggagctgcaggtgctgtacagaggcttcaagaacgagtgccccagcggcatcgtgaacgaggagaacttcaagcagatctacagccagttcttcccccagggcgacagcagcacctacgccaccttcctgttcaacgccttcgacaccaaccacgacggcagcgtgagcttcgaggacttcgtggccggcctgagcgtgatcctgagaggcaccgtggacgacagactgaactgggccttcaacctgtacgacctgaacaaggacggctgcatcaccaaggaggagatgctggacatcatgaagagcatctacgacatgatgggcaagtacacctaccccgccctgagagaggaggcccccagagagcacgtggagagcttcttccagaagatggacagaaacaaggacggcgtggtgaccatcgaggagttcatcgagagctgccagaaggacgagaacatcatgagaagcatgcagctgttcgacaacgtgatctag

SEQ ID NO: 3978 - DNA, 312 bp, synthetic construct
  misc_feature 1..312: note = source = /note="Description of Artificial Sequence: Synthetic coding sequence"
  source 1..312: mol_type = other DNA
atgagcggcagaggcaagggcggcaagggcctgggcaagggcggcgccaagagacacagaaaggtgctgagagacaacatccagggcatcaccaagcccgccatcagaagactggccagaagaggcggcgtgaagagaatcagcggcctgatctacgaggagaccagaggcgtgctgaaggtgttcctggagaacgtgatcagagacgccgtgacctacaccgagcacgccaagagaaagaccgtgaccgccatggacgtggtgtacgccctgaagagacagggcagaaccctgtacggcttcggcggctag

SEQ ID NO: 3979 - DNA, 3120 bp, synthetic construct
  misc_feature 1..3120: note = source = /note="Description of Artificial Sequence: Synthetic coding sequence"
  source 1..3120: mol_type = other DNA
atggaggtgaccgccgtggccacccagggcggctacggcagcagcgactgggtgaccagctacctgctgatgttcagcgacggcggcagaaactggaagcagtacagaagagaggagagcatctggggcttccccggcaacaccaacgccgacagcgtggtgcactacagactgcagccccccttcgaggccagattcctgagattcctgcccctggcctggaaccccagaggcagaatcggcatgagaatcgaggtgtacggctgcgcctacaagagcgaggtggtgtacttcgacggccagagcgccctgctgtacagactggacaagaagcccctgaagcccatcagagacgtgatcagcctgaagttcaaggccatgcagagcaacggcatcctgctgcacagagagggccagcacggcaaccacatcaccctggagctgatcaagggcaagctggtgttcttcctgaacagcggcaacgccaagctgcccagcaccatcgcccccgtgaccctgaccctgggcagcctgctggacgaccagcactggcacagcgtgctgatcgagctgctggacacccaggtgaacttcaccgtggacaagcacacccaccacttccaggccaagggcgacagcagctacctggacctgaacttcgagatcagcttcggcggcatccccacccccggcagaagcagagccttcagaagaaagagcttccacggctgcctggagaacctgtactacaacggcgtggacgtgaccgagctggccaagaagcacaagccccagatcctgatgatgggcaacgtgagcttcagctgcccccagccccagaccgtgcccgtgaccttcctgagcagcagaagctacctggccctgcccggcaacagcggcgaggacaaggtgagcgtgaccttccagttcagaacctggaacagagccggccacctgctgttcggcgagctgagaagaggcagcggcagcttcgtgctgttcctgaaggacggcaagctgaagctgagcctgttccagcccggccagagccccagaaacgtgaccgccggcgccggcctgaacgacggccagtggcacagcgtgagcttcagcgccaagtggagccacatgaacgtggtggtggacgacgacaccgccgtgcagcccctggtggccgtgctgatcgacagcggcgacacctactacttcggcggctgcctggacaacagcagcggcagcggctgcaagagccccctgggcggcttccagggctgcctgagactgatcaccatcggcgacaaggccgtggaccccatcctggtgcagcagggcgccctgggcagcttcagagacctgcagatcgacagctgcggcatcaccgacagatgcctgcccagctactgcgagcacggcggcgagtgcagccagagctgggacaccttcagctgcgactgcctgggcaccggctacaccggcgagacctgccacagcagcctgtacgagcagagctgcgaggcccacaagcacagaggcaaccccagcggcctgtactacatcgacgccgacggcagcggccccctgggccccttcctggtgtactgcaacatgaccgccgacgccgcctggaccgtggtgcagcacggcggccccgacgccgtgaccctgagaggcgcccccagcggccaccccagaagcgccgtgagcttcgcctacgccgccggcgccggccagctgagaagcgccgtgaacctggccgagagatgcgagcagagactggccctgagatgcggcaccgccagaagacccgacagcagagacggcacccccctgagctggtgggtgggcagaaccaacgagacccacaccagctggggcggcagcctgcccgacgcccagaagtgcacctgcggcctggagggcaactgcatcgacagccagtactactgcaactgcgacgccggcagaaacgagtggaccagcgacaccatcgtgctgagccagaaggagcacctgcccgtgacccagatcgtgatgaccgacgccggcagaccccacagcgaggccgcctacaccctgggccccctgctgtgcagaggcgaccagagcttctggaacagcgccagcttcaacaccgagaccagctacctgcacttccccgccttccacggcgagctgaccgccgacgtgtgcttcttcttcaagaccaccgtgagcagcggcgtgttcatggagaacctgggcatcaccgacttcatcagaatcgagctgagagcccccaccgaggtgaccttcagcttcgacgtgggcaacggcccctgcgaggtgaccgtgcagagccccacccccttcaacgacaaccagtggcaccacgtgagagccgagagaaacgtgaagggcgccagcctgcaggtggaccagctgccccagaagatgcagcccgcccccgccgacggccacgtgagactgcagctgaacagccagctgttcatcggcggcaccgccaccagacagagaggcttcctgggctgcatcagaagcctgcagctgaacggcgtggccctggacctggaggagagagccaccgtgacccccggcgtggagcccggctgcgccggccactgcagcacctacggccacctgtgcagaaacggcggcagatgcagagagaagagaagaggcgtgacctgcgactgcgccttcagcgcctacgacggccccttctgcagcaacgagatcagcgcctacttcgccaccggcagcagcatgacctaccacttccaggagcactacaccctgagcgagaacagcagcagcctggtgagcagcctgcacagagacgtgaccctgaccagagagatgatcaccctgagcttcagaaccaccagaacccccagcctgctgctgtacgtgagcagcttctacgaggagtacctgagcgtgatcctggccaacaacggcagcctgcagatcagatacaagctggacagacaccagaaccccgacgccttcaccttcgacttcaagaacatggccgacggccagctgcaccaggtgaagatcaacagagaggaggccgtggtgatggtggaggtgatcccccagatgcagaagagcaactag

SEQ ID NO: 3980 - DNA, 1257 bp, synthetic construct
  misc_feature 1..1257: note = source = /note="Description of Artificial Sequence: Synthetic coding sequence"
  source 1..1257: mol_type = other DNA
atgagaagcctgctgctgctgagcgccttctgcctgctggaggccgccctggccgccgaggtgaagaagcccgccgccgccgccgcccccggcaccgccgagaagctgagccccaaggccgccaccctggccgagagaagcgccggcctggccttcagcctgtaccaggccatggccaaggaccaggccgtggagaacatcctggtgagccccgtggtggtggccagcagcctgggcctggtgagcctgggcggcaaggccaccaccgccagccaggccaaggccgtgctgagcgccgagcagctgagagacgaggaggtgcacgccggcctgggcgagctgctgagaagcctgagcaacagcaccgccagaaacgtgacctggaagctgggcagcagactgtacggccccagcagcgtgagcttcgccgacgacttcgtgagaagcagcaagcagcactacaactgcgagcacagcaagatcaacttcagagacaagagaagcgccctgcagagcatcaacgagtgggccgcccagaccaccgacggcaagctgcccgaggtgaccaaggacgtggagagaaccgacggcgccctgctggtgaacgccatgttcttcaagccccactgggacgagaagttccaccacaagatggtggacaacagaggcttcatggtgaccagaagctacaccgtgggcgtgatgatgatgcacagaaccggcctgtacaactactacgacgacgagaaggagaagctgcagatcgtggagatgcccctggcccacaagctgagcagcctgatcatcctgatgccccaccacgtggagcccctggagagactggagaagctgctgaccaaggagcagctgaagatctggatgggcaagatgcagaagaaggccgtggccatcagcctgcccaagggcgtggtggaggtgacccacgacctgcagaagcacctggccggcctgggcctgaccgaggccatcgacaagaacaaggccgacctgagcagaatgagcggcaagaaggacctgtacctggccagcgtgttccacgccaccgccttcgagctggacaccgacggcaaccccttcgaccaggacatctacggcagagaggagctgagaagccccaagctgttctacgccgaccaccccttcatcttcctggtgagagacacccagagcggcagcctgctgttcatcggcagactggtgagacccaagggcgacaagatgagagacgagctgtag

SEQ ID NO: 3981 - DNA, 378 bp, synthetic construct
  misc_feature 1..378: note = source = /note="Description of Artificial Sequence: Synthetic coding sequence"
  source 1..378: mol_type = other DNA
atgcagctgctgaaggccctgtgggccctggccggcgccgccctgtgctgcttcctggtgctggtgatccacgcccagttcctgaaggagggccagctggccgccggcacctgcgagatcgtgaccctggacagagacagcagccagcccagaagaaccatcgccagacagaccgccagatgcgcctgcagaaagggccagatcgccggcaccaccagagccagacccgcctgcgtggacgccagaatcatcaagaccaagcagtggtgcgacatgctgccctgcctggagggcgagggctgcgacctgctgatcaacagaagcggctggacctgcacccagcccggcggcagaatcaagaccaccaccgtgagctag

SEQ ID NO: 3982 - DNA, 5859 bp, synthetic construct
  misc_feature 1..5859: note = source = /note="Description of Artificial Sequence: Synthetic coding sequence"
  source 1..5859: mol_type = other DNA
atgcccgccctgggccccgccctgctgcaggccctgtgggccggctgggtgctgaccctgcagcccctgccccccaccgccttcacccccaacggcacctacctgcagcacctggccagagaccccaccagcggcaccctgtacctgggcgccaccaacttcctgttccagctgagccccggcctgcagctggaggccaccgtgagcaccggccccgtgctggacagcagagactgcctgccccccgtgatgcccgacgagtgcccccaggcccagcccaccaacaaccccaaccagctgctgctggtgagccccggcgccctggtggtgtgcggcagcgtgcaccagggcgtgtgcgagcagagaagactgggccagctggagcagctgctgctgagacccgagagacccggcgacacccagtacgtggccgccaacgaccccgccgtgagcaccgtgggcctggtggcccagggcctggccggcgagcccctgctgttcgtgggcagaggctacaccagcagaggcgtgggcggcggcatcccccccatcaccaccagagccctgtggccccccgacccccaggccgccttcagctacgaggagaccgccaagctggccgtgggcagactgagcgagtacagccaccacttcgtgagcgccttcgccagaggcgccagcgcctacttcctgttcctgagaagagacctgcaggcccagagcagagccttcagagcctacgtgagcagagtgtgcctgagagaccagcactactacagctacgtggagctgcccctggcctgcgagggcggcagatacggcctgatccaggccgccgccgtggccaccagcagagaggtggcccacggcgaggtgctgttcgccgccttcagcagcgccgccccccccaccgtgggcagaccccccagcgccgccgccggcgccagcggcgccagcgccctgtgcgccttccccctggacgaggtggacagactggccaacagaaccagagacgcctgctacaccagagagggcagagccgaggacggcaccgaggtggcctacatcgagtacgacgtgaacagcgactgcgcccagctgcccgtggacaccctggacgcctacccctgcggcagcgaccacacccccagccccatggccagcagagtgcccctggaggccacccccatcctggagtggcccggcatccagctgaccgccgtggccgtgaccatggaggacggccacaccatcgccttcctgggcgacagccagggccagctgcacagagtgtacctgggccccggcagcgacggccacccctacagcacccagagcatccagcagggcagcgccgtgagcagagacctgaccttcgacggcaccttcgagcacctgtacgtgatgacccagagcaccctgctgaaggtgcccgtggccagctgcgcccagcacctggactgcgccagctgcctggcccacagagacccctactgcggctggtgcgtgctgctgggcagatgcagcagaagaagcgagtgcagcagaggccagggccccgagcagtggctgtggagcttccagcccgagctgggctgcctgcaggtggccgccatgagccccgccaacatcagcagagaggagaccagagaggtgttcctgagcgtgcccgacctgccccccctgtggcccggcgagagctacagctgccacttcggcgagcaccagagccccgccctgctgaccggcagcggcgtgatgtgccccagccccgaccccagcgaggcccccgtgctgcccagaggcgccgactacgtgagcgtgagcgtggagctgagattcggcgccgtggtgatcgccaagaccagcctgagcttctacgactgcgtggccgtgaccgagctgagacccagcgcccagtgccaggcctgcgtgagcagcagatggggctgcaactggtgcgtgtggcagcacctgtgcacccacaaggccagctgcgacgccggccccatggtggccagccaccagagccccctggtgagccccgacccccccgccagaggcgacggcgacagcgccgagctggagggcccccccgcccccctgatcctgcccagcagcctggactaccagtacgacacccccggcctgtgggagctggaggaggccaccctgggcgccagcagctgcccctgcgtggagagcgtgcagggcagcaccctgatgcccgtgcacgtggagagagagatcagactgctgggcagaaacctgcacctgttccaggacggccccggcgacaacgagtgcgtgatggagctggagggcctggaggtggtggtggaggccagagtggagtgcgagcccccccccgacacccagtgccacgtgacctgccagcagcaccagctgagctacgaggccctgcagcccgagctgagagtgggcctgttcctgagaagagccggcagactgagagtggacagcgccgagggcctgcacgtggtgctgtacgactgcagcgtgggccacggcgactgcagcagatgccagaccgccatgccccagtacggctgcgtgtggtgcgagggcgagagacccagatgcgtgaccagagaggcctgcggcgaggccgaggccgtggccacccagtgccccgcccccctgatccacagcgtggagcccctgaccggccccgtggacggcggcaccagagtgaccatcagaggcagcaacctgggccagcacgtgcaggacgtgctgggcatggtgaccgtggccggcgtgccctgcgccgtggacgcccaggagtacgaggtgagcagcagcctggtgtgcatcaccggcgccagcggcgaggaggtggccggcgccaccgccgtggaggtgcccggcagaggcagaggcgtgagcgagcacgacttcgcctaccaggaccccaaggtgcacagcatcttccccgccagaggccccagagccggcggcaccagactgaccctgaacggcagcaagctgctgaccggcagactggaggacatcagagtggtggtgggcgaccagccctgccacctgctgcccgagcagcagagcgagcagctgagatgcgagaccagccccagacccacccccgccaccctgcccgtggccgtgtggttcggcgccaccgagagaagactgcagagaggccagttcaagtacaccctggaccccaacatcaccagcgccggccccaccaagagcttcctgagcggcggcagagagatctgcgtgagaggccagaacctggacgtggtgcagacccccagaatcagagtgaccgtggtgagcagaatgctgcagcccagccagggcctgggcagaagaagaagagtggtgcccgagaccgcctgcagcctgggccccagctgcagcagccagcagttcgaggagccctgccacgtgaacagcagccagctgatcacctgcagaacccccgccctgcccggcctgcccgaggacccctgggtgagagtggagttcatcctggacaacctggtgttcgacttcgccaccctgaaccccacccccttcagctacgaggccgaccccaccctgcagcccctgaaccccgaggaccccaccatgcccttcagacacaagcccggcagcgtgttcagcgtggagggcgagaacctggacctggccatgagcaaggaggaggtggtggccatgatcggcgacggcccctgcgtggtgaagaccctgaccagacaccacctgtactgcgagccccccgtggagcagcccctgcccagacaccacgccctgagagaggcccccgacagcctgcccgagttcaccgtgcagatgggcaacctgagattcagcctgggccacgtgcagtacgacggcgagagccccggcgccttccccgtggccgcccaggtgggcctgggcgtgggcaccagcctgctggccctgggcgtgatcatcatcgtgctgatgtacagaagaaagagcaagcaggccctgagagactacaagaaggtgcagatccagctggagaacctggagagcagcgtgagagacagatgcaagaaggagttcaccgacctgatgaccgagatgaccgacctgaccagcgacctgctgggcagcggcatccccttcctggactacaaggtgtacgccgagagaatcttcttccccggccacagagagagccccctgcacagagacctgggcgtgcccgagagcagaagacccaccgtggagcagggcctgggccagctgagcaacctgctgaacagcaagctgttcctgaccaagttcatccacaccctggagagccagagaaccttcagcgccagagacagagcctacgtggccagcctgctgaccgtggccctgcacggcaagctggagtacttcaccgacatcctgagaaccctgctgagcgacctggtggcccagtacgtggccaagaaccccaagctgatgctgagaagaaccgagaccgtggtggagaagctgctgaccaactggatgagcatctgcctgtacaccttcgtgagagacagcgtgggcgagcccctgtacatgctgttcagaggcatcaagcaccaggtggacaagggccccgtggacagcgtgaccggcaaggccaagtacaccctgaacgacaacagactgctgagagaggacgtggagtacagacccctgaccctgaacgccctgctggccgtgggccccggcgccggcgaggcccagggcgtgcccgtgaaggtgctggactgcgacaccatcagccaggccaaggagaagatgctggaccagctgtacaagggcgtgcccctgacccagagacccgaccccagaaccctggacgtggagtggagaagcggcgtggccggccacctgatcctgagcgacgaggacgtgaccagcgaggtgcagggcctgtggagaagactgaacaccctgcagcactacaaggtgcccgacggcgccaccgtggccctggtgccctgcctgaccaagcacgtgctgagagagaaccaggactacgtgcccggcgagagaacccccatgctggaggacgtggacgagggcggcatcagaccctggcacctggtgaagcccagcgacgagcccgagccccccagacccagaagaggcagcctgagaggcggcgagagagagagagccaaggccatccccgagatctacctgaccagactgctgagcatgaagggcaccctgcagaagttcgtggacgacctgttccaggtgatcctgagcaccagcagacccgtgcccctggccgtgaagtacttcttcgacctgctggacgagcaggcccagcagcacggcatcagcgaccaggacaccatccacatctggaagaccaacagcctgcccctgagattctggatcaacatcatcaagaacccccagttcgtgttcgacgtgcagaccagcgacaacatggacgccgtgctgctggtgatcgcccagaccttcatggacgcctgcaccctggccgaccacaagctgggcagagacagccccatcaacaagctgctgtacgccagagacatccccagatacaagagaatggtggagagatactacgccgacatcagacagaccgtgcccgccagcgaccaggagatgaacagcgtgctggccgagctgagctggaactacagcggcgacctgggcgccagagtggccctgcacgagctgtacaagtacatcaacaagtactacgaccagatcatcaccgccctggaggaggacggcaccgcccagaagatgcagctgggctacagactgcagcagatcgccgccgccgtggagaacaaggtgaccgacctgtag

SEQ ID NO: 3983 - DNA, 342 bp, synthetic construct
  misc_feature 1..342: note = source = /note="Description of Artificial Sequence: Synthetic coding sequence"
  source 1..342: mol_type = other DNA
atgctggtgctgttcctgctgggcaccgtgttcctgctgtgcccctactggggcgagctgcacgaccccatcaaggccaccgagatcatgtgctacgagtgcaagaagtaccacctgggcctgtgctacggcgtgatgaccagctgcagcctgaagcacaagcagagctgcgccgtggagaacttctacatcctgaccagaaagggccagagcatgtaccactacagcaagctgagctgcatgaccagctgcgaggacatcaacttcctgggcttcaccaagagagtggagctgatctgctgcgaccacagcaactactgcaacctgcccgagggcgtgtag

SEQ ID NO: 3984 - DNA, 6408 bp, synthetic construct; identical to SEQ ID NO: 3686
  misc_feature 1..6408: note = source = /note="Description of Artificial Sequence: Synthetic coding sequence"
  source 1..6408: mol_type = other DNA

SEQ ID NO: 3985 - DNA, 390 bp, synthetic construct
  misc_feature 1..390: note = source = /note="Description of Artificial Sequence: Synthetic coding sequence"
  source 1..390: mol_type = other DNA
atgagacccctgaagcccggcgcccccctgcccgccctgttcctgctggccctggccctgagcccccacggcgcccacggcagacccagaggcagaagaggcgccagagtgaccgacaaggagcccaagcccctgctgttcctgcccgccgccggcgccggcagaacccccagcggcagcagaagcgccgagatcttccccagagacagcaacctgaaggacaagttcatcaagcacttcaccggccccgtgaccttcagccccgagtgcagcaagcacttccacagactgtactacaacaccagagagtgcagcacccccgcctactacaagagatgcgccagactgctgaccagactggccgtgagccccctgtgcagccagacctag

SEQ ID NO: 3986 - DNA, 252 bp, synthetic construct
  misc_feature 1..252: note = source = /note="Description of Artificial Sequence: Synthetic coding sequence"
  source 1..252: mol_type = other DNA
atgagactgagcgtgtgcctgctgatggtgagcctggccctgtgctgctaccaggcccacgccctggtgtgccccgccgtggccagcgagatcaccgtgttcctgttcctgagcgacgccgccgtgaacctgcaggtggccaagctgaaccccccccccgaggccctggccgccaagctggaggtgaagcactgcaccgaccagatcagcttcaagaagagactgagcctgaagaagagctggtggaagtag

SEQ ID NO: 3987 - DNA, 1455 bp, synthetic construct; identical to SEQ ID NO: 3795
  misc_feature 1..1455: note = source = /note="Description of Artificial Sequence: Synthetic coding sequence"
  source 1..1455: mol_type = other DNA

SEQ ID NO: 3988 - DNA, 159 bp, synthetic construct
  misc_feature 1..159: note = source = /note="Description of Artificial Sequence: Synthetic coding sequence"
  source 1..159: mol_type = other DNA
atgaagctgtgcgtgaccgtgctgagcctgctggtgctggtggccgccttctgcagcctggccctgagcgcccccagcaacaagcccctggaggccagcaagagcgccctgacccccgtgagccccggcagcagaagcacctgcatgacctggaactag

SEQ ID NO: 3989 - DNA, 675 bp, synthetic construct
  misc_feature 1..675: note = source = /note="Description of Artificial Sequence: Synthetic coding sequence"
  source 1..675: mol_type = other DNA
atgagagtgagcggcgtgctgagactgctggccctgatcttcgccatcgtgaccacctggatgttcatcagaagctacatgagcttcagcatgaagaccatcagactgcccagatggctggccgccagccccaccaaggagatccaggtgaagaagtacaagtgcggcctgatcaagccctgccccgccaactacttcgccttcaagatctgcagcggcgccgccaacgtggtgggccccaccatgtgcttcgaggacagaatgatcatgagccccgtgaagaacaacgtgggcagaggcctgaacatcgccctggtgaacggcaccaccggcgccgtgctgggccagaaggccttcgacatgtacagcggcgacgtgatgcacctggtgaagttcctgaaggagatccccggcggcgccctggtgctggtggccagctacgacgaccccggcaccaagatgaacgacgagagcagaaagctgttcagcgacctgggcagcagctacgccaagcagctgggcttcagagacagctgggtgttcatcggcgccaaggacctgagaggcaagagccccttcgagcagttcctgaagaacagccccgacaccaacaagtacgagggctggcccgagctgctggagatggagggctgcatgccccccaagcccttctag

SEQ ID NO: 3990 - DNA, 1404 bp, synthetic construct
  misc_feature 1..1404: note = source = /note="Description of Artificial Sequence: Synthetic coding sequence"
  source 1..1404: mol_type = other DNA
atgctgatcttctggaccatcaccctgttcctgctgggcgccgccaagggcaaggaggtgtgctacgaggacctgggctgcttcagcgacaccgagccctggggcggcaccgccatcagacccctgaagatcctgccctggagccccgagaagatcggcaccagattcctgctgtacaccaacgagaaccccaacaacttccagatcctgctgctgagcgaccccagcaccatcgaggccagcaacttccagatggacagaaagaccagattcatcatccacggcttcatcgacaagggcgacgagagctgggtgaccgacatgtgcaagaagctgttcgaggtggaggaggtgaactgcatctgcgtggactggaagaagggcagccaggccacctacacccaggccgccaacaacgtgagagtggtgggcgcccaggtggcccagatgctggacatcctgctgaccgagtacagctacccccccagcaaggtgcacctgatcggccacagcctgggcgcccacgtggccggcgaggccggcagcaagacccccggcctgagcagaatcaccggcctggaccccgtggaggccagcttcgagagcacccccgaggaggtgagactggaccccagcgacgccgacttcgtggacgtgatccacaccgacgccgcccccctgatccccttcctgggcttcggcaccaaccagcagatgggccacctggacttcttccccaacggcggcgagagcatgcccggctgcaagaagaacgccctgagccagatcgtggacctggacggcatctgggccggcaccagagacttcgtggcctgcaaccacctgagaagctacaagtactacctggagagcatcctgaaccccgacggcttcgccgcctacccctgcaccagctacaagagcttcgagagcgacaagtgcttcccctgccccgaccagggctgcccccagatgggccactacgccgacaagttcgccggcagaaccagcgaggagcagcagaagttcttcctgaacaccggcgaggccagcaacttcgccagatggagatacggcgtgagcatcaccctgagcggcagaaccgccaccggccagatcaaggtggccctgttcggcaacaagggcaacacccaccagtacagcatcttcagaggcatcctgaagcccggcagcacccacagctacgagttcgacgccaagctggacgtgggcaccatcgagaaggtgaagttcctgtggaacaacaacgtgatcaaccccaccctgcccaaggtgggcgccaccaagatcaccgtgcagaagggcgaggagaagaccgtgtacaacttctgcagcgaggacaccgtgagagaggacaccctgctgaccctgaccccctgctag

SEQ ID NO: 3991 - DNA, 237 bp, synthetic construct
  misc_feature 1..237: note = source = /note="Description of Artificial Sequence: Synthetic coding sequence"
  source 1..237: mol_type = other DNA
atgggcagcggcctgcccctggtgctgctgctgaccctgctgggcagcagccacggcaccggccccggcatgaccctgcagctgaagctgaaggagagcttcctgaccaacagcagctacgagagcagcttcctggagctgctggagaagctgtgcctgctgctgcacctgcccagcggcaccagcgtgaccctgcaccacgccagaagccagcaccacgtggtgtgcaacacctag

SEQ ID NO: 3992 - DNA, 291 bp, synthetic construct
  misc_feature 1..291: note = source = /note="Description of Artificial Sequence: Synthetic coding sequence"
  source 1..291: mol_type = other DNA
atggagcacaaggaggtggtgctgctgctgctgctgttcctgaagagcggccagggcgagcccctggacgactacgtgaacacccagggccccagcctgttcagcgtgaccaagaagcagctgggcgccggcagcagagaggagtgcgccgccaagtgcgaggaggacaaggagttcacctgcagagccttccagtaccacagcaaggagcagcagtgcgtgatcatggccgagaacagaaagagcagcatcatcatcagaatgagagacgccgtgctgttcgagaagtag

SEQ ID NO: 3993 - DNA, 1083 bp, synthetic construct
  misc_feature 1..1083: note = source = /note="Description of Artificial Sequence: Synthetic coding sequence"
  source 1..1083: mol_type = other DNA
atgggcctgctgctgctggtgcccctgctgctgctgcccggcagctacggcctgcccttctacaacggcttctactacagcaacagcgccaacgaccagaacctgggcaacggccacggcaaggacctgctgaacggcgtgaagctggtggtggagacccccgaggagaccctgttcacctaccagggcgccagcgtgatcctgccctgcagatacagatacgagcccgccctggtgagccccagaagagtgagagtgaagtggtggaagctgagcgagaacggcgcccccgagaaggacgtgctggtggccatcggcctgagacacagaagcttcggcgactaccagggcagagtgcacctgagacaggacaaggagcacgacgtgagcctggagatccaggacctgagactggaggactacggcagatacagatgcgaggtgatcgacggcctggaggacgagagcggcctggtggagctggagctgagaggcgtggtgttcccctaccagagccccaacggcagataccagttcaacttccacgagggccagcaggtgtgcgccgagcaggccgccgtggtggccagcttcgagcagctgttcagagcctgggaggagggcctggactggtgcaacgccggctggctgcaggacgccaccgtgcagtaccccatcatgctgcccagacagccctgcggcggccccggcctggcccccggcgtgagaagctacggccccagacacagaagactgcacagatacgacgtgttctgcttcgccaccgccctgaagggcagagtgtactacctggagcaccccgagaagctgaccctgaccgaggccagagaggcctgccaggaggacgacgccaccatcgccaaggtgggccagctgttcgccgcctggaagttccacggcctggacagatgcgacgccggctggctggccgacggcagcgtgagataccccgtggtgcacccccaccccaactgcggcccccccgagcccggcgtgagaagcttcggcttccccgacccccagagcagactgtacggcgtgtactgctacagacagcactag

SEQ ID NO: 3994 - DNA, 810 bp, synthetic construct
  misc_feature 1..810: note = source = /note="Description of Artificial Sequence: Synthetic coding sequence"
  source 1..810: mol_type = other DNA
atgatcagaaccctgctgctgagcaccctggtggccggcgccctgagctgcggcgaccccacctaccccccctacgtgaccagagtggtgggcggcgaggaggccagacccaacagctggccctggcaggtgagcctgcagtacagcagcaacggcaagtggtaccacacctgcggcggcagcctgatcgccaacagctgggtgctgaccgccgcccactgcatcagcagcagcagaacctacagagtgggcctgggcagacacaacctgtacgtggccgagagcggcagcctggccgtgagcgtgagcaagatcgtggtgcacaaggactggaacagcaaccagatcagcaagggcaacgacatcgccctgctgaagctggccaaccccgtgagcctgaccgacaagatccagctggcctgcctgccccccgccggcaccatcctgcccaacaactacccctgctacgtgaccggctggggcagactgcagaccaacggcgccgtgcccgacgtgctgcagcagggcagactgctggtggtggactacgccacctgcagcagcagcgcctggtggggcagcagcgtgaagaccagcatgatctgcgccggcggcgacggcgtgatcagcagctgcaacggcgacagcggcggccccctgaactgccaggccagcgacggcagatggcaggtgcacggcatcgtgagcttcggcagcagactgggctgcaactactaccacaagcccagcgtgttcaccagagtgagcaactacatcgactggatcaacagcgtgatcgccaacaactag

SEQ ID NO: 3995 - DNA, 1122 bp, synthetic construct
  misc_feature 1..1122: note = source = /note="Description of Artificial Sequence: Synthetic coding sequence"
  source 1..1122: mol_type = other DNA
atgctgccctggctgctggtgttcagcgccctgggcatccaggcctggggcgacagcagctggaacaagacccaggccaagcaggtgagcgagggcctgcagtacctgttcgagaacatcagccagctgaccgagaagggcctgcccaccgacgtgagcaccaccgtgagcagaaaggcctggggcgccgaggccgtgggctgcagcatccagctgaccacccccgtgaacgtgctggtgatccaccacgtgcccggcctggagtgccacgaccagaccgtgtgcagccagagactgagagagctgcaggcccaccacgtgcacaacaacagcggctgcgacgtggcctacaacttcctggtgggcgacgacggcagagtgtacgagggcgtgggctggaacatccagggcgtgcacacccagggctacaacaacatcagcctgggcttcgccttcttcggcaccaagaagggccacagccccagccccgccgccctgagcgccatggagaacctgatcacctacgccgtgcagaagggccacctgagcagcagctacgtgcagcccctgctgggcaagggcgagaactgcctggcccccagacagaagaccagcctgaagaaggcctgccccggcgtggtgcccagaagcgtgtggggcgccagagagacccactgccccagaatgaccctgcccgccaagtacggcatcatcatccacaccgccggcagaacctgcaacatcagcgacgagtgcagactgctggtgagagacatccagagcttctacatcgacagactgaagagctgcgacatcggctacaacttcctggtgggccaggacggcgccatctacgagggcgtgggctggaacgtgcagggcagcagcacccccggctacgacgacatcgccctgggcatcaccttcatgggcaccttcaccggcatcccccccaacgccgccgccctggaggccgcccaggacctgatccagtgcgccatggtgaagggctacctgacccccaactacctgctggtgggccacagcgacgtggccagaaccctgagccccggccaggccctgtacaacatcatcagcacctggccccacttcaagcactag

SEQ ID NO: 3996 - DNA, 327 bp, synthetic construct
  misc_feature 1..327: note = source = /note="Description of Artificial Sequence: Synthetic coding sequence"
  source 1..327: mol_type = other DNA
atgagacagagactgctgcccagcgtgaccagcctgctgctggtggccctgctgttccccggcagcagccaggccagacacgtgaaccacagcgccaccgaggccctgggcgagctgagagagagagcccccggccagggcaccaacggcttccagctgctgagacacgccgtgaagagagacctgctgccccccagaacccccccctaccagggcgacgtgccccccggcatcagaaacaccatctgccacatgcagcagggcatctgcagactgttcttctgccacagcggcaccggccagcagcacagacagagatgcggctag

SEQ ID NO: 3997 - DNA, 708 bp, synthetic construct
  misc_feature 1..708: note = source = /note="Description of Artificial Sequence: Synthetic coding sequence"
  source 1..708: mol_type = other DNA
atgagcccccccctgctgaagctgggcgccgtgctgagcaccatggccatgatcagcaactggatgagccagaccctgcccagcctggtgggcctgaacaccaccagactgagcacccccgacaccctgacccagatcagccccaaggagggctggcaggtgtacagcagcgcccaggaccccgacggcagatgcatctgcaccgtggtggcccccgagcagaacctgtgcagcagagacgccaagagcagacagctgagacagctgctggagaaggtgcagaacatgagccagagcatcgaggtgctgaacctgagaacccagagagacttccagtacgtgctgaagatggagacccagatgaagggcctgaaggccaagttcagacagatcgaggacgacagaaagaccctgatgaccaagcacttccaggagctgaaggagaagatggacgagctgctgcccctgatccccgtgctggagcagtacaagaccgacgccaagctgatcacccagttcaaggaggagatcagaaacctgagcgccgtgctgaccggcatccaggaggagatcggcgcctacgactacgaggagctgcaccagagagtgctgagcctggagaccagactgagagactgcatgaagaagctgatcgacctgaagaagagaaaggaggaggagaagagacagcagaagggcgaggcctag

SEQ ID NO: 3998 - DNA, 606 bp, synthetic construct
  misc_feature 1..606: note = source = /note="Description of Artificial Sequence: Synthetic coding sequence"
  source 1..606: mol_type = other DNA
atgaacctgaactgccccccctgcgtgaccggcctgagagtgtggagcagctgcagaagcaagcccaacagcagagccagaagctgcagaagctgcaccggcgccagcagaaccctgcccagccaccacatgagccacgtggagtgccccagcggcatcgtgaacgaggagaacttcaagcagatctacagccagttcttcccccagggcgacagcagcacctacgccaccttcctgttcaacgccttcgacaccaaccacgacggcagcgtgagcttcgaggacttcgtggccggcctgagcgtgatcctgagaggcaccgtggacgacagactgaactgggccttcaacctgtacgacctgaacaaggacggctgcatcaccaaggaggagatgctggacatcatgaagagcatctacgacatgatgggcaagtacacctaccccgccctgagagaggaggcccccagagagcacgtggagagcttcttccagaagatggacagaaacaaggacggcgtggtgaccatcgaggagttcatcgagagctgccagaaggacgagaacatcatgagaagcatgcagctgttcgacaacgtgatctag

SEQ ID NO: 3999 - DNA, 693 bp, synthetic construct
  misc_feature 1..693: note = source = /note="Description of Artificial Sequence: Synthetic coding sequence"
  source 1..693: mol_type = other DNA
atgagactggccggccccctgagaatcgtggtgctggtggtgagcgtgggcgtgacctggatcgtggtgagcatcctgctgggcggccccggcagcggcttccccagaatccagcagctgttcaccagccccgagagcagcgtgaccgccgcccccagagccagaaagtacaagtgcggcctgccccagccctgccccgaggagcacctggccttcagagtggtgagcggcgccgccaacgtgatcggccccaagatctgcctggaggacaagatgctgatgagcagcgtgaaggacaacgtgggcagaggcctgaacatcgccctggtgaacggcgtgagcggcgagctgatcgaggccagagccttcgacatgtgggccggcgacgtgaacgacctgctgaagttcatcagacccctgcacgagggcaccctggtgttcgtggccagctacgacgaccccgccaccaagatgaacgaggagaccagaaagctgttcagcgagctgggcagcagaaacgccaaggagctggccttcagagacagctgggtgttcgtgggcgccaagggcgtgcagaacaagagccccttcgagcagcacgtgaagaacagcaagcacagcaacaagtacgagggctggcccgaggccctggagatggagggctgcatccccagaagaagcaccgccagctag

SEQ ID NO: 4000 - DNA, 684 bp, synthetic construct
  misc_feature 1..684: note = source = /note="Description of Artificial Sequence: Synthetic coding sequence"
  source 1..684: mol_type = other DNA
atgagagtggccggcgccgccaagctggtggtggccgtggccgtgttcctgctgaccttctacgtgatcagccaggtgttcgagatcaagatggacgccagcctgggcaacctgttcgccagaagcgccctggacaccgccgccagaagcaccaagccccccagatacaagtgcggcatcagcaaggcctgccccgagaagcacttcgccttcaagatggccagcggcgccgccaacgtggtgggccccaagatctgcctggaggacaacgtgctgatgagcggcgtgaagaacaacgtgggcagaggcatcaacgtggccctggccaacggcaagaccggcgaggtgctggacaccaagtacttcgacatgtggggcggcgacgtggcccccttcatcgagttcctgaaggccatccaggacggcaccatcgtgctgatgggcacctacgacgacggcgccaccaagctgaacgacgaggccagaagactgatcgccgacctgggcagcaccagcatcaccaacctgggcttcagagacaactgggtgttctgcggcggcaagggcatcaagaccaagagccccttcgagcagcacatcaagaacaacaaggacaccaacaagtacgagggctggcccgaggtggtggagatggagggctgcatcccccagaagcaggactag

SEQ ID NO: 4001 - DNA, 1656 bp, synthetic construct
  misc_feature 1..1656: note = source = /note="Description of Artificial Sequence: Synthetic coding sequence"
  source 1..1656: mol_type = other DNA
atggaggacagcgacagcgccgccaagcagctgggcctggccgaggccgccgccgccggcggcgaggccgaggagcccgtgctgagcagagacgaggacagcgaggaggacgccgacagcgaggccgagagagagacccccagagtgaccgccgtggccgtgatggccgccgagcccggccacatggacatgggcgccgaggccctgcccggccccgacgaggccgccgccgccgccgccttcgccgaggtgaccaccgtgaccgtggccaacgtgggcgccgccgccgacaacgtgttcaccaccagcgtggccaacgccgccagcatcagcggccacgtgctgagcggcagaaccgccctgcagatcggcgacagcctgaacaccgagaaggccaccctgatcgtggtgcacaccgacggcagcatcgtggagaccaccggcctgaagggccccgccgcccccctgacccccggcccccagagcccccccacccccctggcccccggccaggagaagggcggcaccaagtacaactgggaccccagcgtgtacgacagcgagctgcccgtgagatgcagaaacatcagcggcaccctgtacaagaacagactgggcagcggcggcagaggcagatgcatcaagcagggcgagaactggtacagccccaccgagttcgaggccatggccggcagagccagcagcaaggactggaagagaagcatcagatacgccggcagacccctgcagtgcctgatccaggacggcatcctgaacccccacgccgccagctgcacctgcgccgcctgctgcgacgacatgaccctgagcggccccgtgagactgttcgtgccctacaagagaagaaagaaggagaacgagctgcccaccacccccgtgaagaaggacagccccaagaacatcaccctgctgcccgccaccgccgccaccaccttcaccgtgacccccagcggccagatcaccaccagcggcgccctgaccttcgacagagccagcaccgtggaggccaccgccgtgatcagcgagagccccgcccagggcgacgtgttcgccggcgccaccgtgcaggaggccagcgtgcagcccccctgcagagccagccaccccgagccccactaccccggctaccaggacagctgccagatcgcccccttccccgaggccgccctgcccaccagccaccccaagatcgtgctgaccagcctgcccgccctggccgtgcccccccccacccccaccaaggccgccccccccgccctggtgaacggcctggagctgagcgagcccagaagctggctgtacctggaggagatggtgaacagcctgctgaacaccgcccagcagctgaagaccctgttcgagcaggccaagcacgccagcacctacagagaggccgccaccaaccaggccaagatccacgccgacgccgagagaaaggagcagagctgcgtgaactgcggcagagaggccatgagcgagtgcaccggctgccacaaggtgaactactgcagcaccttctgccagagaaaggactggaaggaccaccagcacatctgcggccagagcgccgccgtgaccgtgcaggccgacgaggtgcacgtggccgagagcgtgatggagaaggtgaccgtgtag

SEQ ID NO: 4002 - DNA, 2022 bp, synthetic construct
  misc_feature 1..2022: note = source = /note="Description of Artificial Sequence: Synthetic coding sequence"
  source 1..2022: mol_type = other DNA
atgaagcccggcggcttctggctgcacctgaccctgctgggcgccagcctgcccgccgccctgggctggatggaccccggcaccagcagaggccccgacgtgggcgtgggcgagagccaggccgaggagcccagaagcttcgaggtgaccagaagagagggcctgagcagccacaacgagctgctggccagctgcggcaagaagttctgcagcagaggcagcagatgcgtgctgagcctggcccccgaggacagagtgagcgtgaccaccgtgaccgtgggcctgagcaccgtgctgacctgcgccgtgcacggcgacctgagaccccccatcatctggaagagaaacggcctgaccctgaacttcctggacctggaggacatcaacgacttcggcgaggacgacagcctgtacatcaccaaggtgaccaccatccacatgggcaactacacctgccacgccagcggccacgagcagctgttccagacccacgtgctgcaggtgaacgtgccccccgtgatcagagtgtaccccgagagccaggcccaggagcccggcgtggccgccagcctgagatgccacgccgagggcatccccatgcccagaatcacctggctgaagaacggcgtggacgtgagcacccagatgagcaagcagctgagcctgctggccaacggcagcgagctgcacatcagcagcgtgagatacgaggacaccggcgcctacacctgcatcgccaagaacgaggtgggcgtggacgaggacatcagcagcctgttcatcgaggacagcgccagaaagaccctggccaacatcctgtggagagaggagggcctgagcgtgggcaacatgttctacgtgttcagcgacgacggcatcatcgtgatccaccccgtggactgcgagatccagagacacctgaagcccaccgagaagatcttcatgagctacgaggagatctgcccccagagagagaagaacgccacccagccctgccagtgggtgagcgccgtgaacgtgagaaacagatacatctacgtggcccagcccgccctgagcagagtgctggtggtggacatccaggcccagaaggtgctgcagagcatcggcgtggaccccctgcccgccaagctgagctacgacaagagccacgaccaggtgtgggtgctgagctggggcgacgtgcacaagagcagacccagcctgcaggtgatcaccgaggccagcaccggccagagccagcacctgatcagaacccccttcgccggcgtggacgacttcttcatcccccccaccaacctgatcatcaaccacatcagattcggcttcatcttcaacaagagcgaccccgccgtgcacaaggtggacctggagaccatgatgcccctgaagaccatcggcctgcaccaccacggctgcgtgccccaggccatggcccacacccacctgggcggctacttcttcatccagtgcagacaggacagccccgccagcgccgccagacagctgctggtggacagcgtgaccgacagcgtgctgggccccaacggcgacgtgaccggcaccccccacaccagccccgacggcagattcatcgtgagcgccgccgccgacagcccctggctgcacgtgcaggagatcaccgtgagaggcgagatccagaccctgtacgacctgcagatcaacagcggcatcagcgacctggccttccagagaagcttcaccgagagcaaccagtacaacatctacgccgccctgcacaccgagcccgacctgctgttcctggagctgagcaccggcaaggtgggcatgctgaagaacctgaaggagccccccgccggccccgcccagccctggggcggcacccacagaatcatgagagacagcggcctgttcggccagtacctgctgacccccgccagagagagcctgttcctgatcaacggcagacagaacaccctgagatgcgaggtgagcggcatcaagggcggcaccaccgtggtgtgggtgggcgaggtgtag

SEQ ID NO: 4003 - DNA, 2007 bp, synthetic construct
  misc_feature 1..2007: note = source = /note="Description of Artificial Sequence: Synthetic coding sequence"
  source 1..2007: mol_type = other DNA
atggacctggtgctgaagagatgcctgctgcacctggccgtgatcggcgccctgctggccgtgggcgccaccaaggtgcccagaaaccaggactggctgggcgtgagcagacagctgagaaccaaggcctggaacagacagctgtaccccgagtggaccgaggcccagagactggactgctggagaggcggccaggtgagcctgaaggtgagcaacgacggccccaccctgatcggcgccaacgccagcttcagcatcgccctgaacttccccggcagccagaaggtgctgcccgacggccaggtgatctgggtgaacaacaccatcatcaacggcgaccaggtgtggggcggccagcccgtgtacccccaggagaccgacgacgcctgcatcttccccgacggcggcccctgccccagcggcagctggagccagaagagaagcttcgtgtacgtgtggaagacctggggccagtactggcaggtgctgggcggccccgtgagcggcctgagcatcggcaccggcagagccatgctgggcacccacaccatggaggtgaccgtgtaccacagaagaggcagcagaagctacgtgcccctggcccacagcagcagcgccttcaccatcaccgaccaggtgcccttcagcgtgagcgtgagccagctgagagccctggacggcggcaacaagcacttcctgagaaaccagcccctgaccttcgccctgcagctgcacgaccccagcggctacctggccgaggccgacctgagctacacctgggacttcggcgacagcagcggcaccctgatcagcagagccctggtggtgacccacacctacctggagcccggccccgtgaccgcccaggtggtgctgcaggccgccatccccctgaccagctgcggcagcagccccgtgcccggcaccaccgacggccacagacccaccgccgaggcccccaacaccaccgccggccaggtgcccaccaccgaggtggtgggcaccacccccggccaggcccccaccgccgagcccagcggcaccaccagcgtgcaggtgcccaccaccgaggtgatcagcaccgcccccgtgcagatgcccaccgccgagagcaccggcatgacccccgagaaggtgcccgtgagcgaggtgatgggcaccaccctggccgagatgagcacccccgaggccaccggcatgacccccgccgaggtgagcatcgtggtgctgagcggcaccaccgccgcccaggtgaccaccaccgagtgggtggagaccaccgccagagagctgcccatccccgagcccgagggccccgacgccagcagcatcatgagcaccgagagcatcaccggcagcctgggccccctgctggacggcaccgccaccctgagactggtgaagagacaggtgcccctggactgcgtgctgtacagatacggcagcttcagcgtgaccctggacatcgtgcagggcatcgagagcgccgagatcctgcaggccgtgcccagcggcgagggcgacgccttcgagctgaccgtgagctgccagggcggcctgcccaaggaggcctgcatggagatcagcagccccggctgccagccccccgcccagagactgtgccagcccgtgctgcccagccccgcctgccagctggtgctgcaccagatcctgaagggcggcagcggcacctactgcctgaacgtgagcctggccgacaccaacagcctggccgtggtgagcacccagctgatcatgcccgtgcccggcatcctgctgaccggccaggaggccggcctgggccaggtgcccctgatcgtgggcatcctgctggtgctgatggccgtggtgctggccagcctgatctacagaagaagactgatgaagcaggacttcagcgtgccccagctgccccacagcagcagccactggctgagactgcccagaatcttctgcagctgccccatcggcgagaacagccccctgctgagcggccagcaggtgtag

SEQ ID NO: 4004 - DNA, 1746 bp, synthetic construct
  misc_feature 1..1746: note = source = /note="Description of Artificial Sequence: Synthetic coding sequence"
  source 1..1746: mol_type = other DNA
atgcagcaggacggcctgggcgtgggcaccagaaacggcagcggcaagggcagaagcgtgcaccccagctggccctggtgcgcccccagacccctgagatacttcggcagagacgccagagccagaagagcccagaccgccgccatggccctgctggccggcggcctgagcagaggcctgggcagccaccccgccgccgccggcagagacgccgtggtgttcgtgtggctgctgctgagcacctggtgcaccgcccccgccagagccatccaggtgaccgtgagcaacccctaccacgtggtgatcctgttccagcccgtgaccctgccctgcacctaccagatgaccagcacccccacccagcccatcgtgatctggaagtacaagagcttctgcagagacagaatcgccgacgccttcagccccgccagcgtggacaaccagctgaacgcccagctggccgccggcaaccccggctacaacccctacgtggagtgccaggacagcgtgagaaccgtgagagtggtggccaccaagcagggcaacgccgtgaccctgggcgactactaccagggcagaagaatcaccatcaccggcaacgccgacctgaccttcgaccagaccgcctggggcgacagcggcgtgtactactgcagcgtggtgagcgcccaggacctgcagggcaacaacgaggcctacgccgagctgatcgtgctggtgtacgccgccggcaaggccgccaccagcggcgtgcccagcatctacgcccccagcacctacgcccacctgagccccgccaagaccccccccccccccgccatgatccccatgggccccgcctacaacggctaccccggcggctaccccggcgacgtggacagaagcagcagcgccggcggccagggcagctacgtgcccctgctgagagacaccgacagcagcgtggccagcgaggtgagaagcggctacagaatccaggccagccagcaggacgacagcatgagagtgctgtactacatggagaaggagctggccaacttcgaccccagcagacccggcccccccagcggcagagtggagagagccatgagcgaggtgaccagcctgcacgaggacgactggagaagcagacccagcagaggccccgccctgacccccatcagagacgaggagtggggcggccacagccccagaagccccagaggctgggaccaggagcccgccagagagcaggccggcggcggctggagagccagaagacccagagccagaagcgtggacgccctggacgacctgaccccccccagcaccgccgagagcggcagcagaagccccaccagcaacggcggcagaagcagagcctacatgccccccagaagcagaagcagagacgacctgtacgaccaggacgacagcagagacttccccagaagcagagacccccactacgacgacttcagaagcagagagagaccccccgccgaccccagaagccaccaccacagaaccagagaccccagagacaacggcagcagaagcggcgacctgccctacgacggcagactgctggaggaggccgtgagaaagaagggcagcgaggagagaagaagaccccacaaggaggaggaggaggaggcctactacccccccgccccccccccctacagcgagaccgacagccaggccagcagagagagaagactgaagaagaacctggccctgagcagagagagcctggtggtgtag

SEQ ID NO: 4005 - DNA, 1959 bp, synthetic construct
  misc_feature 1..1959: note = source = /note="Description of Artificial Sequence: Synthetic coding sequence"
  source 1..1959: mol_type = other DNA
atgcccccccccctgcccctgctgctgctgaccgtgctggtggtggccgccgccagacccggctgcgagttcgagagaaaccccgccggcgagtgccacagaccccccgccgccgacagcgccacctgcgtggacctgcagctgagaacctgcagcgacgccgcctacaaccacaccaccttccccaacctgctgcagcacagaagctgggaggtggtggaggccagcagcgagtacatcctgctgagcgtgctgcaccagctgctggagggccagtgcaaccccgacctgagactgctgggctgcgccgtgctggcccccagatgcgagggcggctgggtgagaagaccctgcagacacatctgcgagggcctgagagaggtgtgccagcccgccttcgacgccatcgacatggcctggccctacttcctggactgccacagatacttcaccagagaggacgagggctgctacgaccccctggagaagctgagaggcggcctggaggccgacgaggccctgcccagcggcctgccccccaccttcatcagattcagccaccacagctacgcccagatggtgagagtgctgagaagaaccgccagcagatgcgcccacgtggccagaacctacagcatcggcagaagcttcgacggcagagagctgctggtgatcgagttcagcagcagacccggccagcacgagctgatggagcccgaggtgaagctgatcggcaacatccacggcaacgaggtggccggcagagagatgctgatctacctggcccagtacctgtgcagcgagtacctgctgggcaaccccagaatccagagactgctgaacaccaccagaatccacctgctgcccagcatgaaccccgacggctacgaggtggccgccgccgagggcgccggctacaacggctggaccagcggcagacagaacgcccagaacctggacctgaacagaaacttccccgacctgaccagcgagtactacagactggccgagaccagaggcgccagaagcgaccacatccccatcccccagcactactggtggggcaaggtggcccccgagaccaaggccatcatgaagtggatgcagaccatccccttcgtgctgagcgccagcctgcacggcggcgacctggtggtgagctaccccttcgacttcagcaagcacccccaggaggagaagatgttcagccccacccccgacgagaagatgttcaagctgctgagcagagcctacgccgacgtgcaccccatgatgatggacagaagcgagaacagatgcggcggcaacttcctgaagagaggcagcatcatcaacggcgccgactggtacagcttcaccggcggcatgagcgacttcaactacctgcacaccaactgcttcgagatcaccgtggagctgggctgcgtgaagttcccccccgaggaggccctgtacatcctgtggcagcacaacaaggagagcctgctgaacttcgtggagaccgtgcacagaggcatcaagggcgtggtgaccgacaagttcggcaagcccgtgaagaacgccagaatcagcgtgaagggcatcagacacgacatcaccaccgcccccgacggcgactactggagactgctgccccccggcatccacatcgtgatcgcccaggcccccggctacgccaaggtgatcaagaaggtgatcatccccgccagaatgaagagagccggcagagtggacttcatcctgcagcccctgggcatgggccccaagaacttcatccacggcctgagaagaaccggcccccacgaccccctgggcggcgccagcagcctgggcgaggccaccgagcccgaccccctgagagccagaagacagcccagcgccgacggcagcaagccctggtggtggagctacttcaccagcctgagcacccacagacccagatggctgctgaagtactag

SEQ ID NO: 4006 - DNA, 279 bp, synthetic construct
  misc_feature 1..279: note = source = /note="Description of Artificial Sequence: Synthetic coding sequence"
  source 1..279: mol_type = other DNA
atgaagctgtgcgtgaccgtgctgagcctgctggtgctggtggccgccttctgcagcctggccctgagcgcccccatgggcagcgacccccccaccgcctgctgcttcagctacaccgccagaaagctgcccagaaacttcgtggtggactactacgagaccagcagcctgtgcagccagcccgccgtggtgggcttcctgggcagaaagggcaagcaggtgtgcgccgaccccagcgagagctgggtgcaggagtacgtgtacgacctggagctgtag

SEQ ID NO: 4007 - DNA, 249 bp, synthetic construct
  misc_feature 1..249: note = source = /note="Description of Artificial Sequence: Synthetic coding sequence"
  source 1..249: mol_type = other DNA
atgagacagagactgctgcccagcgtgaccagcctgctgctggtggccctgctgttccccggcagcagccaggccagacacgtgaaccacagcgccaccgaggccctgggcgagctgagagagagagcccccggccagggcaccaacggcttccagctgctgagacacgccgtgaagagagacctgctgccccccagaacccccccctaccagggcaccggccagcagcacagacagagatgcggctag

SEQ ID NO: 4008 - DNA, 411 bp, synthetic construct
  misc_feature 1..411: note = source = /note="Description of Artificial Sequence: Synthetic coding sequence"
  source 1..411: mol_type = other DNA
atggacaacgtgcagcccaagatcaagcacagacccttctgcttcagcgtgaagggccacgtgaagatgctgagactggccctgaccgtgaccagcatgaccttcttcatcatcgcccaggcccccgagccctacatcgtgatcaccggcttcgaggtgaccgtgatcctgttcttcatcctgctgtacgtgctgagactggacagactgatgaagtggctgttctggcccctgctggacatcatcaacagcctggtgaccaccgtgttcatgctgatcgtgagcgtgctggccctgatccccgagaccaccaccctgaccgtgggcggcggcgtgttcgccctggtgaccgccgtgtgctgcctggccgacggcgccctgatctacagaaagctgctgttcctgagatag

SEQ ID NO: 4009 - DNA, 1068 bp, synthetic construct
  misc_feature 1..1068: note = source = /note="Description of Artificial Sequence: Synthetic coding sequence"
  source 1..1068: mol_type = other DNA
atgcagctgaccacctgcctgagagagaccctgttcaccggcgccagccagaagaccagcctgtggtggctgggcatcgccagcttcggcgtgcccgagaagctgggctgcgccaacctgcccctgaacagcagacagaaggagctgtgcaagagaaagccctacctgctgcccagcatcagagagggcgccagactgggcatccaggagtgcggcagccagttcagacacgagagatggaactgcatgatcaccgccgccgccaccaccgcccccatgggcgccagccccctgttcggctacgagctgagcagcggcaccaaggagaccgccttcatctacgccgtgatggccgccggcctggtgcacagcgtgaccagaagctgcagcgccggcaacatgaccgagtgcagctgcgacaccaccctgcagaacggcggcagcgccagcgagggctggcactggggcggctgcagcgacgacgtgcagtacggcatgtggttcagcagaaagttcctggacttccccatcggcaacaccaccggcaaggagaacaaggtgctgctggccatgaacctgcacaacaacgaggccggcagacaggccgtggccaagctgatgagcgtggactgcagatgccacggcgtgagcggcagctgcgccgtgaagacctgctggaagaccatgagcagcttcgagaagatcggccacctgctgaaggacaagtacgagaacagcatccagatcagcgacaagaccaagagaaagatgagaagaagagagaaggaccagagaaagatccccatccacaaggacgacctgctgtacgtgaacaagagccccaactactgcgtggaggacaagaagctgggcatccccggcacccagggcagagagtgcaacagaaccagcgagggcgccgacggctgcaacctgctgtgctgcggcagaggctacaacacccacgtggtgagacacgtggagagatgcgagtgcaagttcatctggtgctgctacgtgagatgcagaagatgcgagagcatgaccgacgtgcacacctgcaagtag

SEQ ID NO: 4010 - DNA, 2916 bp, synthetic construct
  misc_feature 1..2916: note = source = /note="Description of Artificial Sequence: Synthetic coding sequence"
  source 1..2916: mol_type = other DNA
atgctgagaagacccgcccccgccctggcccccgccgccagactgctgctggccggcctgctgtgcggcggcggcgtgtgggccgccagagtgaacaagcacaagccctggctggagcccacctaccacggcatcgtgaccgagaacgacaacaccgtgctgctggacccccccctgatcgccctggacaaggacgcccccctgagattcgccggcgagatctgcggcttcaagatccacggccagaacgtgcccttcgacgccgtggtggtggacaagagcaccggcgagggcgtgatcagaagcaaggagaagctggactgcgagctgcagaaggactacagcttcaccatccaggcctacgactgcggcaagggccccgacggcaccaacgtgaagaagagccacaaggccaccgtgcacatccaggtgaacgacgtgaacgagtacgcccccgtgttcaaggagaagagctacaaggccaccgtgatcgagggcaagcagtacgacagcatcctgagagtggaggccgtggacgccgactgcagcccccagttcagccagatctgcagctacgagatcatcacccccgacgtgcccttcaccgtggacaaggacggctacatcaagaacaccgagaagctgaactacggcaaggagcaccagtacaagctgaccgtgaccgcctacgactgcggcaagaagagagccaccgaggacgtgctggtgaagatcagcatcaagcccacctgcacccccggctggcagggctggaacaacagaatcgagtacgagcccggcaccggcgccctggccgtgttccccaacatccacctggagacctgcgacgagcccgtggccagcgtgcaggccaccgtggagctggagaccagccacatcggcaagggctgcgacagagacacctacagcgagaagagcctgcacagactgtgcggcgccgccgccggcaccgccgagctgctgcccagccccagcggcagcctgaactggaccatgggcctgcccaccgacaacggccacgacagcgaccaggtgttcgagttcaacggcacccaggccgtgagaatccccgacggcgtggtgagcgtgagccccaaggagcccttcaccatcagcgtgtggatgagacacggccccttcggcagaaagaaggagaccatcctgtgcagcagcgacaagaccgacatgaacagacaccactacagcctgtacgtgcacggctgcagactgatcttcctgttcagacaggaccccagcgaggagaagaagtacagacccgccgagttccactggaagctgaaccaggtgtgcgacgaggagtggcaccactacgtgctgaacgtggagttccccagcgtgaccctgtacgtggacggcaccagccacgagcccttcagcgtgaccgaggactaccccctgcaccccagcaagatcgagacccagctggtggtgggcgcctgctggcaggagttcagcggcgtggagaacgacaacgagaccgagcccgtgaccgtggccagcgccggcggcgacctgcacatgacccagttcttcagaggcaacctggccggcctgaccctgagaagcggcaagctggccgacaagaaggtgatcgactgcctgtacacctgcaaggagggcctggacctgcaggtgctggaggacagcggcagaggcgtgcagatccaggcccaccccagccagctggtgctgaccctggagggcgaggacctgggcgagctggacaaggccatgcagcacatcagctacctgaacagcagacagttccccacccccggcatcagaagactgaagatcaccagcaccatcaagtgcttcaacgaggccacctgcatcagcgtgccccccgtggacggctacgtgatggtgctgcagcccgaggagcccaagatcagcctgagcggcgtgcaccacttcgccagagccgccagcgagttcgagagcagcgagggcgtgttcctgttccccgagctgagaatcatcagcaccatcaccagagaggtggagcccgagggcgacggcgccgaggaccccaccgtgcaggagagcctggtgagcgaggagatcgtgcacgacctggacacctgcgaggtgaccgtggagggcgaggagctgaaccacgagcaggagagcctggaggtggacatggccagactgcagcagaagggcatcgaggtgagcagcagcgagctgggcatgaccttcaccggcgtggacaccatggccagctacgaggaggtgctgcacctgctgagatacagaaactggcacgccagaagcctgctggacagaaagttcaagctgatctgcagcgagctgaacggcagatacatcagcaacgagttcaaggtggaggtgaacgtgatccacaccgccaaccccatggagcacgccaaccacatggccgcccagccccagttcgtgcaccccgagcacagaagcttcgtggacctgagcggccacaacctggccaacccccaccccttcgccgtggtgcccagcaccgccaccgtggtgatcgtggtgtgcgtgagcttcctggtgttcatgatcatcctgggcgtgttcagaatcagagccgcccacagaagaaccatgagagaccaggacaccggcaaggagaacgagatggactgggacgacagcgccctgaccatcaccgtgaaccccatggagacctacgaggaccagcacagcagcgaggaggaggaggaggaggaggaggaggaggagagcgaggacggcgaggaggaggacgacatcaccagcgccgagagcgagagcagcgaggaggaggagggcgagcagggcgacccccagaacgccaccagacagcagcagctggagtgggacgacagcaccctgagctactag

SEQ ID NO: 4011 - DNA, 564 bp, synthetic construct
  misc_feature 1..564: note = source = /note="Description of Artificial Sequence: Synthetic coding sequence"
  source 1..564: mol_type = other DNA
atggtggccgccaccgtggccgccgcctggctgctgctgtgggccgccgcctgcgcccagcaggagcaggacttctacgacttcaaggccgtgaacatcagaggcaagctggtgagcctggagaagtacagaggcagcgtgagcctggtggtgaacgtggccagcgagtgcggcttcaccgaccagcactacagagccctgcagcagctgcagagagacctgggcccccaccacttcaacgtgctggccttcccctgcaaccagttcggccagcaggagcccgacagcaacaaggagatcgagagcttcgccagaagaacctacagcgtgagcttccccatgttcagcaagatcgccgtgaccggcaccggcgcccaccccgccttcaagtacctggcccagaccagcggcaaggagcccacctggaacttctggaagtacctggtggcccccgacggcaaggtggtgggcgcctgggaccccaccgtgagcgtggaggaggtgagaccccagatcaccgccctggtgagaaagctgatcctgctgaagagagaggacctgtag

SEQ ID NO: 4012 - DNA, 303 bp, synthetic construct
  misc_feature 1..303: note = source = /note="Description of Artificial Sequence: Synthetic coding sequence"
  source 1..303: mol_type = other DNA
atgtggggcttcctggtgctgaaggccagatggctggtgacccccgtgagaaccctggccaccgaggccggccagaagcccagcctgagaggcctgctggacgtgggcaacatccagcacagagccgccagagccagaggcctgaccagaggcgtgatcagagtgagcccccaggagagaagccagcagaaccagagcgcccccaagggccccacccccagcaccagacccaagcccagaaccctgggcccccaggcccacagcctggccctgcagagcgtggacctgctgttcagaccctag

SEQ ID NO: 4013 - DNA, 2352 bp, synthetic construct
  misc_feature 1..2352: note = source = /note="Description of Artificial Sequence: Synthetic coding sequence"
  source 1..2352: mol_type = other DNA
atgagatggcagtgcggcaccagattcagaggcctgagacccgccgtggccccctggaccgccctgctggccctgggcctgcccggctgggtgctggccgtgagcgccaccgccgccgccgtggtgcccgagcagcacgccagcgtggccggccagcaccccctggactggctgctgaccgacagaggccccttccacagagcccaggagtacgccgacttcatggagagatacagacagggcttcaccaccagatacagaatctacagagagttcgccagatggaaggtgaacaacctggccctggagagaaaggacttcttcagcctgcccctgcccctggcccccgagttcatcagaaacatcagactgctgggcagaagacccaacctgcagcaggtgaccgagaacctgatcaagaagtacggcacccacttcctgctgagcgccaccctgggcggcgaggagagcctgaccatcttcgtggacaagcagaagctgggcagaaagaccgagaccaccggcggcgccagcatcatcggcggcagcggcaacagcaccgccgtgagcctggagaccctgcaccagctggccgccagctacttcatcgacagagagagcaccctgagaagactgcaccacatccagatcgccaccggcgccatcaaggtgaccgagaccagaaccggccccctgggctgcagcaactacgacaacctggacagcgtgagcagcgtgctggtgcagagccccgagaacaaggtgcagctgctgggcctgcaggtgctgctgcccgagtacctgagagagagattcgtggccgccgccctgagctacatcacctgcagcagcgagggcgagctggtgtgcaaggagaacgactgctggtgcaagtgcagccccaccttccccgagtgcaactgccccgacgccgacatccaggccatggaggacagcctgctgcagatccaggacagctgggccacccacaacagacagttcgaggagagcgaggagttccaggccctgctgaagagactgcccgacgacagattcctgaacagcaccgccatcagccagttctgggccatggacaccagcctgcagcacagataccagcagctgggcgccggcctgaaggtgctgttcaagaagacccacagaatcctgagaagactgttcaacctgtgcaagagatgccacagacagcccagattcagactgcccaaggagagaagcctgagctactggtggaacagaatccagagcctgctgtactgcggcgagagcaccttccccggcaccttcctggagcagagccacagctgcacctgcccctacgaccagagcagctgccagggccccatcccctgcgccctgggcgagggccccgcctgcgcccactgcgcccccgacaacagcaccagatgcggcagctgcaaccccggctacgtgctggcccagggcctgtgcagacccgaggtggccgagagcctggagaacttcctgggcctggagaccgacctgcaggacctggagctgaagtacctgctgcagaagcaggacagcagaatcgaggtgcacagcatcttcatcagcaacgacatgagactgggcagctggttcgaccccagctggagaaagagaatgctgctgaccctgaagagcaacaagtacaagcccggcctggtgcacgtgatgctggccctgagcctgcagatctgcctgaccaagaacagcaccctggagcccgtgatggccatctacgtgaaccccttcggcggcagccacagcgagagctggttcatgcccgtgaacgagggcagcttccccgactgggagagaaccaacgtggacgccgccgcccagtgccagaactggaccatcaccctgggcaacagatggaagaccttcttcgagaccgtgcacgtgtacctgagaagcagaatcaagagcctggacgacagcagcaacgagaccatctactacgagcccctggagatgaccgaccccagcaagaacctgggctacatgaagatcaacaccctgcaggtgttcggctacagcctgcccttcgaccccgacgccatcagagacctgatcctgcagctggactacccctacacccagggcagccaggacagcgccctgctgcagctgatcgagctgagagacagagtgaaccagctgagcccccccggcaaggtgagactggacctgttcagctgcctgctgagacacagactgaagctggccaacaacgaggtgggcagaatccagagcagcctgagagccttcaacagcaagctgcccaaccccgtggagtacgagaccggcaagctgtgcagctag

SEQ ID NO: 4014 - DNA, 2016 bp, synthetic construct
  misc_feature 1..2016: note = source = /note="Description of Artificial Sequence: Synthetic coding sequence"
  source 1..2016: mol_type = other DNA
atggcccagctgttcctgcccctgctggccgccctggtgctggcccaggcccccgccgccctggccgacgtgctggagggcgacagcagcgaggacagagccttcagagtgagaatcgccggcgacgcccccctgcagggcgtgctgggcggcgccctgaccatcccctgccacgtgcactacctgagacccccccccagcagaagagccgtgctgggcagccccagagtgaagtggaccttcctgagcagaggcagagaggccgaggtgctggtggccagaggcgtgagagtgaaggtgaacgaggcctacagattcagagtggccctgcccgcctaccccgccagcctgaccgacgtgagcctggccctgagcgagctgagacccaacgacagcggcatctacagatgcgaggtgcagcacggcatcgacgacagcagcgacgccgtggaggtgaaggtgaagggcgtggtgttcctgtacagagagggcagcgccagatacgccttcagcttcagcggcgcccaggaggcctgcgccagaatcggcgcccacatcgccacccccgagcagctgtacgccgcctacctgggcggctacgagcagtgcgacgccggctggctgagcgaccagaccgtgagataccccatccagacccccagagaggcctgctacggcgacatggacggcttccccggcgtgagaaactacggcgtggtggaccccgacgacctgtacgacgtgtactgctacgccgaggacctgaacggcgagctgttcctgggcgacccccccgagaagctgaccctggaggaggccagagcctactgccaggagagaggcgccgagatcgccaccaccggccagctgtacgccgcctgggacggcggcctggaccactgcagccccggctggctggccgacggcagcgtgagataccccatcgtgacccccagccagagatgcggcggcggcctgcccggcgtgaagaccctgttcctgttccccaaccagaccggcttccccaacaagcacagcagattcaacgtgtactgcttcagagacagcgcccagcccagcgccatccccgaggccagcaaccccgccagcaaccccgccagcgacggcctggaggccatcgtgaccgtgaccgagaccctggaggagctgcagctgccccaggaggccaccgagagcgagagcagaggcgccatctacagcatccccatcatggaggacggcggcggcggcagcagcacccccgaggaccccgccgaggcccccagaaccctgctggagttcgagacccagagcatggtgccccccaccggcttcagcgaggaggagggcaaggccctggaggaggaggagaagtacgaggacgaggaggagaaggaggaggaggaggaggaggaggaggtggaggacgaggccctgtgggcctggcccagcgagctgagcagccccggccccgaggccagcctgcccaccgagcccgccgcccaggaggagagcctgagccaggcccccgccagagccgtgctgcagcccggcgccagccccctgcccgacggcgagagcgaggccagcagaccccccagagtgcacggcccccccaccgagaccctgcccacccccagagagagaaacctggccagccccagccccagcaccctggtggaggccagagaggtgggcgaggccaccggcggccccgagctgagcggcgtgcccagaggcgagagcgaggagaccggcagcagcgagggcgcccccagcctgctgcccgccaccagagcccccgagggcaccagagagctggaggcccccagcgaggacaacagcggcagaaccgcccccgccggcaccagcgtgcaggcccagcccgtgctgcccaccgacagcgccagcagaggcggcgtggccgtggtgcccgccagcggcaacagcgcccagggcagcaccgccctgagcatcctgctgctgttcttccccctgcagctgtgggtgacctag

SEQ ID NO: 4015 - DNA, 375 bp, synthetic construct
  misc_feature 1..375: note = source = /note="Description of Artificial Sequence: Synthetic coding sequence"
  source 1..375: mol_type = other DNA
atgtacaagctggccagctgctgcctgctgttcatcggcttcctgaaccccctgctgagcctgcccctgctggacagcagagagatcagcttccagctgagcgccccccacgaggacgccagactgacccccgaggagctggagagagccagcctgctgcagatcctgcccgagatgctgggcgccgagagaggcgacatcctgagaaaggccgacagcagcaccaacatcttcaaccccagaggcaacctgagaaagttccaggacttcagcggccaggaccccaacatcctgctgagccacctgctggccagaatctggaagccctacaagaagagagagacccccgactgcttctggaagtactgcgtgtag

SEQ ID NO: 4016 - DNA, 1326 bp, synthetic construct
  misc_feature 1..1326: note = source = /note="Description of Artificial Sequence: Synthetic coding sequence"
  source 1..1326: mol_type = other DNA
atggagttcgagttcgacagactgagagccttccaggccatgcaggtgcactgcaacaacatgcacaccctgggcgccagactgcccggcggcgtggagtgcagattcagaagaggccccgccatggcctgggagggcgagcccatgagacacaacctgggcggcaacctgggcgaccccagagccagagccgtgagcgtgcccctgggcggcagagtggccagattcctgcagtgcagattcctgttcgccggcccctggctgctgttcagcgagatcagcttcatcagcgacgtggtgaacaacagcagccccgccctgggcggcaccttcccccccgccccctggtggccccccggccccccccccaccaacttcagcagcctggagctggagcccagaggccagcagcccgtggccaaggccgagggcagccccaccgccatcctgatcggctgcctggtggccatcatcctgctgctgctgctgatcatcgccctgatgctgtggagactgcactggagaagactgctgagcaaggtgctggagagccaccccagaaccagaagccccggcctggtgggcatcagacccacccccctgcccgtgagccccatggccctgagatgctgcagccccatccagcccaccgccagcttctggcccctgacccccgtgcccctggaggccagagcccccccccacccccccggccccaacccccccacccccagaggcgtgaccggcggcaacacctacgccgtgcccgccctgccccccggcgccgtgggcgacggcccccccagagtggacttccccagaagcagactgagattcaaggagaagctgggcgagggccagttcggcgaggtgcacctgtgcgaggtggacagcccccaggacctggtgagcctggacttccccctgaacgtgagaaagggccaccccctgctggtggccgtgaagatcctgagacccgacgccaccaagaacgccagaaacgacttcctgaaggaggtgaagatcatgagcagactgaaggaccccaacatcatcagactgctgggcgtgtgcgtgcaggacgaccccctgtgcatgatcaccgactacatggagaacggcgacctgaaccagttcctgagcgcccaccagctggaggacaaggccgccgagggcgcccccggcgacggccaggccgcccagggccccaccatcagctaccccatgctgctgcacgtggccgcccagatcgccagcggcatgagatacctggccaccctgaacttcgtgcacttctggggcgagagacacagattcctgcactag

SEQ ID NO: 4017 - DNA, 1950 bp, synthetic construct
  misc_feature 1..1950: note = source = /note="Description of Artificial Sequence: Synthetic coding sequence"
  source 1..1950: mol_type = other DNA
atgcagcaggacggcctgggcgtgggcaccagaaacggcagcggcaagggcagaagcgtgcaccccagctggccctggtgcgcccccagacccctgagatacttcggcagagacgccagagccagaagagcccagaccgccgccatggccctgctggccggcggcctgagcagaggcctgggcagccaccccgccgccgccggcagagacgccgtggtgttcgtgtggctgctgctgagcacctggtgcaccgcccccgccagagccatccaggtgaccgtgagcaacccctaccacgtggtgatcctgttccagcccgtgaccctgccctgcacctaccagatgaccagcacccccacccagcccatcgtgatctggaagtacaagagcttctgcagagacagaatcgccgacgccttcagccccgccagcgtggacaaccagctgaacgcccagctggccgccggcaaccccggctacaacccctacgtggagtgccaggacagcgtgagaaccgtgagagtggtggccaccaagcagggcaacgccgtgaccctgggcgactactaccagggcagaagaatcaccatcaccggcaacgccgacctgaccttcgaccagaccgcctggggcgacagcggcgtgtactactgcagcgtggtgagcgcccaggacctgcagggcaacaacgaggcctacgccgagctgatcgtgctgggcagaaccagcggcgtggccgagctgctgcccggcttccaggccggccccatcgaggactggctgttcgtggtggtggtgtgcctggccgccttcctgatcttcctgctgctgggcatctgctggtgccagtgctgcccccacacctgctgctgctacgtgagatgcccctgctgccccgacaagtgctgctgccccgaggccctgtacgccgccggcaaggccgccaccagcggcgtgcccagcatctacgcccccagcacctacgcccacctgagccccgccaagaccccccccccccccgccatgatccccatgggccccgcctacaacggctaccccggcggctaccccggcgacgtggacagaagcagcagcgccggcggccagggcagctacgtgcccctgctgagagacaccgacagcagcgtggccagcgaggtgagaagcggctacagaatccaggccagccagcaggacgacagcatgagagtgctgtactacatggagaaggagctggccaacttcgaccccagcagacccggcccccccagcggcagagtggagagagccatgagcgaggtgaccagcctgcacgaggacgactggagaagcagacccagcagaggccccgccctgacccccatcagagacgaggagtggggcggccacagccccagaagccccagaggctgggaccaggagcccgccagagagcaggccggcggcggctggagagccagaagacccagagccagaagcgtggacgccctggacgacctgaccccccccagcaccgccgagagcggcagcagaagccccaccagcaacggcggcagaagcagagcctacatgccccccagaagcagaagcagagacgacctgtacgaccaggacgacagcagagacttccccagaagcagagacccccactacgacgacttcagaagcagagagagaccccccgccgaccccagaagccaccaccacagaaccagagaccccagagacaacggcagcagaagcggcgacctgccctacgacggcagactgctggaggaggccgtgagaaagaagggcagcgaggagagaagaagaccccacaaggaggaggaggaggaggcctactacccccccgccccccccccctacagcgagaccgacagccaggccagcagagagagaagactgaagaagaacctggccctgagcagagagagcctggtggtgtag

SEQ ID NO: 4018 - DNA, 402 bp, synthetic construct
  misc_feature 1..402: note = source = /note="Description of Artificial Sequence: Synthetic coding sequence"
  source 1..402: mol_type = other DNA
atgagcgagagagtggagagaaactggagcaccggcggctggctgctggccctgtgcctggcctggctgtggacccacctgaccctggccgccctgcagccccccaccgccaccgtgctggtgcagcagggcacctgcgaggtgatcgccgcccacagatgctgcaacagaaacagaatcgaggagagaagccagaccgtgaagtgcagctgcttcagcggccaggtggccggcaccaccagagccaagcccagctgcgtggacgccagcatcgtgctgcagagatggtggtgccagatggagccctgcctgcccggcgaggagtgcaaggtgctgcccgacctgagcggctggagctgcagcagcggccacaaggtgaagaccaccaaggtgaccagatag

SEQ ID NO: 4019 - DNA, 699 bp, synthetic construct
  misc_feature 1..699: note = source = /note="Description of Artificial Sequence: Synthetic coding sequence"
  source 1..699: mol_type = other DNA
atggtggccgccaacaccagagcccccgaggacaccagagcccccgccggccccaagcccagcagctgcgagtgggccgtgtgctgggcccccgccagatgcagaatcagcgccaccgcctgcggcaacagctgggacagacccgccggcagaacccagctgctgtggacccccgccgcccccaccgccatggccgaggtgggccccggccacacccccgcccaccccagccagggcgccgtgccccccagcagagccgccgccgagccccacctgaagcccagccccagcgagctgcagaccgccggccccgccgccaccatccccgccagactgtgcaccagaaagcccagactggtgtacacccagtgctggtacgtgaaggagcccaagcaccccgagatcgtgaccccctggggcaccgccgccagacacagctggagacagcaccagatgctgagcgccagcgagagaagatgcctgcccagagacgtggagcagaagctgggccccgagcacaccggcccctgcctggacgagcagggcagagaggccgagctggccagaagcggccccagcgccgccggccccgtgagactgaagcccggcctggtgcccggcctgttcctgctgagctgcaccaccagccccagcacctgcctgcccgtgggccaggagggcgagagaggcatgctgtag

SEQ ID NO: 4020 - DNA, 711 bp, synthetic construct
  misc_feature 1..711: note = source = /note="Description of Artificial Sequence: Synthetic coding sequence"
  source 1..711: mol_type = other DNA
atgtgcgtgacctaccacaacggcaccggctactgcaagtgccccgagggcttcctgggcgagtactgccagcacagagacccctgcgagaagaacagatgccagaacggcggcacctgcgtggcccaggccatgctgggcaaggccacctgcagatgcgccagcggcttcaccggcgaggactgccagtacagcaccagccacccctgcttcgtgagcagaccctgcctgaacggcggcacctgccacatgctgagcagagacacctacgagtgcacctgccaggtgggcttcaccggcaaggagtgccagtggaccgacgcctgcctgagccacccctgcgccaacggcagcacctgcaccaccgtggccaaccagttcagctgcaagtgcctgaccggcttcaccggccagaagtgcgagaccgacgtgaacgagtgcgacatccccggccactgccagcacggcggcacctgcctgaacctgcccggcagctaccagtgccagtgcctgcagggcttcaccggccagtactgcgacagcctgtacgtgccctgcgcccccagcccctgcgtgaacggcggcacctgcagacagaccggcgacttcaccttcgagtgcaactgcctgcccgagaccgtgagaagaggcaccgagctgtgggagagagacagagaggtgtggaacggcaaggagcacgacgagaactag

SEQ ID NO: 4021 - DNA, 204 bp, synthetic construct
  misc_feature 1..204: note = source = /note="Description of Artificial Sequence: Synthetic coding sequence"
  source 1..204: mol_type = other DNA
atggacaacgtgcagcccaagatcaagcacagacccttctgcttcagcgtgaagggccacgtgaagatgctgagactggtgttcgccctggtgaccgccgtgtgctgcctggccgacggcgccctgatctacagaaagctgctgttcaaccccagcggcccctaccagaagaagcccgtgcacgagaagaaggaggtgctgtag

SEQ ID NO: 4022 - DNA, 75 bp, synthetic construct
  misc_feature 1..75: note = source = /note="Description of Artificial Sequence: Synthetic coding sequence"
  source 1..75: mol_type = other DNA
atgctggtggacggccccagcgagagacccgccctgtgcttcctgctgctggccgtggccatgagcttcttctag

SEQ ID NO: 4023 - DNA, 3345 bp, synthetic construct
  misc_feature 1..3345: note = source = /note="Description of Artificial Sequence: Synthetic coding sequence"
  source 1..3345: mol_type = other DNA
atgctggccagcagcagcagaatcagagccgcctggaccagagccctgctgctgcccctgctgctggccggccccgtgggctgcctgagcagacaggagctgttccccttcggccccggccagggcgacctggagctggaggacggcgacgacttcgtgagccccgccctggagctgagcggcgccctgagattctacgacagaagcgacatcgacgccgtgtacgtgaccaccaacggcatcatcgccaccagcgagccccccgccaaggagagccaccccggcctgttcccccccaccttcggcgccgtggcccccttcctggccgacctggacaccaccgacggcctgggcaaggtgtactacagagaggacctgagccccagcatcacccagagagccgccgagtgcgtgcacagaggcttccccgagatcagcttccagcccagcagcgccgtggtggtgacctgggagagcgtggccccctaccagggccccagcagagaccccgaccagaagggcaagagaaacaccttccaggccgtgctggccagcagcgacagcagcagctacgccatcttcctgtaccccgaggacggcctgcagttccacaccaccttcagcaagaaggagaacaaccaggtgcccgccgtggtggccttcagccagggcagcgtgggcttcctgtggaagagcaacggcgcctacaacatcttcgccaacgacagagagagcgtggagaacctggccaagagcagcaacagcggccagcagggcgtgtgggtgttcgagatcggcagccccgccaccaccaacggcgtggtgcccgccgacgtgatcctgggcaccgaggacggcgccgagtacgacgacgaggacgaggactacgacctggccaccaccagactgggcctggaggacgtgggcaccacccccttcagctacaaggccctgagaagaggcggcgccgacacctacagcgtgcccagcgtgctgagccccagaagagccgccaccgagagacccctgggcccccccaccgagagaaccagaagcttccagctggccgtggagaccttccaccagcagcacccccaggtgatcgacgtggacgaggtggaggagaccggcgtggtgttcagctacaacaccgacagcagacagacctgcgccaacaacagacaccagtgcagcgtgcacgccgagtgcagagactacgccaccggcttctgctgcagctgcgtggccggctacaccggcaacggcagacagtgcgtggccgagggcagcccccagagagtgaacggcaaggtgaagggcagaatcttcgtgggcagcagccaggtgcccatcgtgttcgagaacaccgacctgcacagctacgtggtgatgaaccacggcagaagctacaccgccatcagcaccatccccgagaccgtgggctacagcctgctgcccctggcccccgtgggcggcatcatcggctggatgttcgccgtggagcaggacggcttcaagaacggcttcagcatcaccggcggcgagttcaccagacaggccgaggtgaccttcgtgggccaccccggcaacctggtgatcaagcagagattcagcggcatcgacgagcacggccacctgaccatcgacaccgagctggagggcagagtgccccagatccccttcggcagcagcgtgcacatcgagccctacaccgagctgtaccactacagcaccagcgtgatcaccagcagcagcaccagagagtacaccgtgaccgagcccgagagagacggcgccagccccagcagaatctacacctaccagtggagacagaccatcaccttccaggagtgcgtgcacgacgacagcagacccgccctgcccagcacccagcagctgagcgtggacagcgtgttcgtgctgtacaaccaggaggagaagatcctgagatacgccctgagcaacagcatcggccccgtgagagagggcagccccgacgccctgcagaacccctgctacatcggcacccacggctgcgacaccaacgccgcctgcagacccggccccagaacccagttcacctgcgagtgcagcatcggcttcagaggcgacggcagaacctgctacgaggtggagaagaccagatgccagcacgagagagagcacatcctgggcgccgccggcgccaccgacccccagagacccatcccccccggcctgttcgtgcccgagtgcgacgcccacggccactacgcccccacccagtgccacggcagcaccggctactgctggtgcgtggacagagacggcagagaggtggagggcaccagaaccagacccggcatgacccccccctgcctgagcaccgtggccccccccatccaccagggccccgccgtgcccaccgccgtgatccccctgccccccggcacccacctgctgttcgcccagaccggcaagatcgagagactgcccctggagggcaacaccatgagaaagaccgaggccaaggccttcctgcacgtgcccgccaaggtgatcatcggcctggccttcgactgcgtggacaagatggtgtactggaccgacatcaccgagcccagcatcggcagagccagcctgcacggcggcgagcccaccaccatcatcagacaggacctgggcagccccgagggcatcgccgtggaccacctgggcagaaacatcttctggaccgacagcaacctggacagaatcgaggtggccaagctggacggcacccagagaagagtgctgttcgagaccgacctggtgaaccccagaggcatcgtgaccgacagcgtgagaggcaacctgtactggaccgactggaacagagacaaccccaagatcgagaccagctacatggacggcaccaacagaagaatcctggtgcaggacgacctgggcctgcccaacggcctgaccttcgacgccttcagcagccagctgtgctgggtggacgccggcaccaacagagccgagtgcctgaaccccagccagcccagcagaagaaaggccctggagggcctgcagtaccccttcgccgtgaccagctacggcaagaacctgtacttcaccgactggaagatgaacagcgtggtggccctggacctggccatcagcaaggagaccgacgccttccagccccacaagcagaccagactgtacggcatcaccaccgccctgagccagtgcccccagggccacaactactgcagcgtgaacaacggcggctgcacccacctgtgcctggccacccccggcagcagaacctgcagatgccccgacaacaccctgggcgtggactgcatcgagcagaagtag

SEQ ID NO: 4024 - DNA, 2172 bp, synthetic construct
  misc_feature 1..2172: note = source = /note="Description of Artificial Sequence: Synthetic coding sequence"
  source 1..2172: mol_type = other DNA
atgggcagcagatgcgccctggccctggccgtgctgagcgccctgctgtgccaggtgtggagcagcggcgtgttcgagctgaagctgcaggagttcgtgaacaagaagggcctgctgggcaacagaaactgctgcagaggcggcgccggcccccccccctgcgcctgcagaaccttcttcagagtgtgcctgaagcactaccaggccagcgtgagccccgagcccccctgcacctacggcagcgccgtgacccccgtgctgggcgtggacagcttcagcctgcccgacggcggcggcgccgacagcgccttcagcaaccccatcagattccccttcggcttcacctggcccggcaccttcagcctgatcatcgaggccctgcacaccgacagccccgacgacctggccaccgagaaccccgagagactgatcagcagactggccacccagagacacctgaccgtgggcgaggagtggagccaggacctgcacagcagcggcagaaccgacctgaagtacagctacagattcgtgtgcgacgagcactactacggcgagggctgcagcgtgttctgcagacccagagacgacgccttcggccacttcacctgcggcgagagaggcgagaaggtgtgcaaccccggctggaagggcccctactgcaccgagcccatctgcctgcccggctgcgacgagcagcacggcttctgcgacaagcccggcgagtgcaagtgcagagtgggctggcagggcagatactgcgacgagtgcatcagataccccggctgcctgcacggcacctgccagcagccctggcagtgcaactgccaggagggctggggcggcctgttctgcaaccaggacctgaactactgcacccaccacaagccctgcaagaacggcgccacctgcaccaacaccggccagggcagctacacctgcagctgcagacccggctacaccggcgccacctgcgagctgggcatcgacgagtgcgaccccagcccctgcaagaacggcggcagctgcaccgacctggagaacagctacagctgcacctgcccccccggcttctacggcaagatctgcgagctgagcgccatgacctgcgccgacggcccctgcttcaacggcggcagatgcagcgacagccccgacggcggctacagctgcagatgccccgtgggctacagcggcttcaactgcgagaagaagatcgactactgcagcagcagcccctgcagcaacggcgccaagtgcgtggacctgggcgacgcctacctgtgcagatgccaggccggcttcagcggcagacactgcgacgacaacgtggacgactgcgccagcagcccctgcgccaacggcggcacctgcagagacggcgtgaacgacttcagctgcacctgcccccccggctacaccggcagaaactgcagcgcccccgtgagcagatgcgagcacgccccctgccacaacggcgccacctgccacgagagaggccacagatacgtgtgcgagtgcgccagaggctacggcggccccaactgccagttcctgctgcccgagctgccccccggccccgccgtggtggacctgaccgagaagctggagggccagggcggccccttcccctgggtggccgtgtgcgccggcgtgatcctggtgctgatgctgctgctgggctgcgccgccgtggtggtgtgcgtgagactgagactgcagaagcacagaccccccgccgacccctgcagaggcgagaccgagaccatgaacaacctggccaactgccagagagagaaggacatcagcgtgagcatcatcggcgccacccagatcaagaacaccaacaagaaggccgacttccacggcgaccacagcgccgacaagaacggcttcaaggccagataccccgccgtggactacaacctggtgcaggacctgaagggcgacgacaccgccgtgagagacgcccacagcaagagagacaccaagtgccagccccagggcagcagcggcgaggagaagggcacccccaccaccctgagaggcggcgaggccagcgagagaaagagacccgacagcggctgcagcaccagcaaggacaccaagtaccagagcgtgtacgtgatcagcgaggagaaggacgagtgcgtgatcgccaccgaggtgtag

SEQ ID NO: 4025 - DNA, 981 bp, synthetic construct
  misc_feature 1..981: note = source = /note="Description of Artificial Sequence: Synthetic coding sequence"
  source 1..981: mol_type = other DNA
atggccgcccccgccagcgtgatgggccccctgggccccagcgccctgggcctgctgctgctgctgctggtggtggccccccccagagtggccgccctggtgcacagacagcccgagaaccagggcatcagcctgaccggcagcgtggcctgcggcagacccagcatggagggcaagatcctgggcggcgtgcccgcccccgagagaaagtggccctggcaggtgagcgtgcactacgccggcctgcacgtgtgcggcggcagcatcctgaacgagtactgggtgctgagcgccgcccactgcttccacagagacaagaacatcaagatctacgacatgtacgtgggcctggtgaacctgagagtggccggcaaccacacccagtggtacgaggtgaacagagtgatcctgcaccccacctacgagatgtaccaccccatcggcggcgacgtggccctggtgcagctgaagaccagaatcgtgttcagcgagagcgtgctgcccgtgtgcctggccacccccgaggtgaacctgaccagcgccaactgctgggccaccggctggggcctggtgagcaagcagggcgagaccagcgacgagctgcaggagatgcagctgcccctgatcctggagccctggtgccacctgctgtacggccacatgagctacatcatgcccgacatgctgtgcgccggcgacatcctgaacgccaagaccgtgtgcgagggcgacagcggcggccccctggtgtgcgagttcaacagaagctggctgcagatcggcatcgtgagctggggcagaggctgcagcaaccccctgtaccccggcgtgtacgccagcgtgagctacttcagcaagtggatctgcgacaacatcgagatcacccccacccccgcccagcccgcccccgccctgagccccgccctgggccccaccctgagcgtgctgatggccatgctggccggctggagcgtgctgtag

SEQ ID NO: 4026 - DNA, 1596 bp, synthetic construct
  misc_feature 1..1596: note = source = /note="Description of Artificial Sequence: Synthetic coding sequence"
  source 1..1596: mol_type = other DNA
atgagcctggccgcctactgcgtgatctgctgcagaagaatcggcaccagcaccagcccccccaagagcggcacccactggagagacatcagaaacatcatcaagttcaccggcagcctgatcctgggcggcagcctgttcctgacctacgaggtgctggccctgaagaaggccgtgaccctggacacccaggtggtggagagagagaagatgaagagctacatctacgtgcacaccgtgagcctggacaagggcgagaaccacggcatcgcctggcaggccagaaaggagctgcacaaggccgtgagaaaggtgctggccaccagcgccaagatcctgagaaaccccttcgccgaccccttcagcaccgtggacatcgaggaccacgagtgcgccgtgtggctgctgctgagaaagagcaagagcgacgacaagaccaccagactggaggccgtgagagagatgagcgagacccaccactggcacgactaccagtacagaatcatcgcccaggcctgcgaccccaagaccctgatcggcctggccagaagcgaggagagcgacctgagattcttcctgctgcccccccccctgcccagcctgaaggaggacagcagcaccgaggaggagctgagacagctgctggccagcctgccccagaccgagctggacgagtgcatccagtacttcaccagcctggccctgagcgagagcagccagagcctggccgcccagaagggcggcctgtggtgcttcggcggcaacggcctgccctacgccgagagcttcggcgaggtgcccagcgccaccgtggagatgttctgcctggaggccatcgtgaagcacagcgagatcagcacccactgcgacaagatcgaggccaacggcggcctgcagctgctgcagagactgtacagactgcacaaggactgccccaaggtgcagagaaacatcatgagagtgatcggcaacatggccctgaacgagcacctgcacagcagcatcgtgagaagcggctgggtgagcatcatggccgaggccatgaagagcccccacatcatggagagcagccacgccgccagaatcctggccaacctggacagagagaccgtgcaggagaagtaccaggacggcgtgtacgtgctgcacccccagtacagaaccagccagcccatcaaggccgacgtgctgttcatccacggcctgatgggcgccgccttcaagacctggagacagcaggacagcgagcaggccgtgatcgagaagcccatggaggacgaggacagatacaccacctgctggcccaagacctggctggccaaggactgccccgccctgagaatcatcagcgtggagtacgacaccagcctgagcgactggagagccagatgccccatggagagaagaagcctgctgagcatcagcagcggcatcgtggagggcctggagagccccctgcacagcgaggccaccaacttcctgggcagcagcgagctgctggtgctgggcatcggccagtggttcggctaccacatcgcctgggaggtgttcctgagcaagagatgctgctggaagcccctgagaagccagaagtag

SEQ ID NO: 4027 - DNA, 1596 bp, synthetic construct; identical to SEQ ID NO: 4026
  misc_feature 1..1596: note = source = /note="Description of Artificial Sequence: Synthetic coding sequence"
  source 1..1596: mol_type = other DNA

SEQ ID NO: 4028 - DNA, 1965 bp, synthetic construct
  misc_feature 1..1965: note = source = /note="Description of Artificial Sequence: Synthetic coding sequence"
  source 1..1965: mol_type = other DNA
atgagcctggccgcctactgcgtgatctgctgcagaagaatcggcaccagcaccagcccccccaagagcggcacccactggagagacatcagaaacatcatcaagttcaccggcagcctgatcctgggcggcagcctgttcctgacctacgaggtgctggccctgaagaaggccgtgaccctggacacccaggtggtggagagagagaagatgaagagctacatctacgtgcacaccgtgagcctggacaagggcgagaaccacggcatcgcctggcaggccagaaaggagctgcacaaggccgtgagaaaggtgctggccaccagcgccaagatcctgagaaaccccttcgccgaccccttcagcaccgtggacatcgaggaccacgagtgcgccgtgtggctgctgctgagaaagagcaagagcgacgacaagaccaccagactggaggccgtgagagagatgagcgagacccaccactggcacgactaccagtacagaatcatcgcccaggcctgcgaccccaagaccctgatcggcctggccagaagcgaggagagcgacctgagattcttcctgctgcccccccccctgcccagcctgaaggaggacagcagcaccgaggaggagctgagacagctgctggccagcctgccccagaccgagctggacgagtgcatccagtacttcaccagcctggccctgagcgagagcagccagagcctggccgcccagaagggcggcctgtggtgcttcggcggcaacggcctgccctacgccgagagcttcggcgaggtgcccagcgccaccgtggagatgttctgcctggaggccatcgtgaagcacagcgagatcagcacccactgcgacaagatcgaggccaacggcggcctgcagctgctgcagagactgtacagactgcacaaggactgccccaaggtgcagagaaacatcatgagagtgatcggcaacatggccctgaacgagcacctgcacagcagcatcgtgagaagcggctgggtgagcatcatggccgaggccatgaagagcccccacatcatggagagcagccacgccgccagaatcctggccaacctggacagagagaccgtgcaggagaagtaccaggacggcgtgtacgtgctgcacccccagtacagaaccagccagcccatcaaggccgacgtgctgttcatccacggcctgatgggcgccgccttcaagacctggagacagcaggacagcgagcaggccgtgatcgagaagcccatggaggacgaggacagatacaccacctgctggcccaagacctggctggccaaggactgccccgccctgagaatcatcagcgtggagtacgacaccagcctgagcgactggagagccagatgccccatggagagaaagagcatcgccttcagaagcaacgagctgctgagaaagctgagagccgccggcgtgggcgacagacccgtggtgtggatcagccacagcatgggcggcctgctggtgaagaagatgctgctggaggccagcaccaagcccgagatgagcaccgtgatcaacaacaccagaggcatcatcttctacagcgtgccccaccacggcagcagactggccgagtacagcgtgaacatcagatacctgctgttccccagcctggaggtgaaggagctgagcaaggacagccccgccctgaagaccctgcaggacgacttcctggagttcgccaaggacaagaacttccaggtgctgaacttcgtggagaccctgcccacctacatcggcagcatgatcaagctgcacgtggtgcccgtggagagcgccgacctgggcatcggcgacctgatccccgtggacgtgaaccacctgaacatctgcaagcccaagaagaaggacgccttcctgtaccagagaaccctgcagttcatcagagaggccctggccaaggacctggagaactag

SEQ ID NO: 4029 - DNA, 1509 bp, synthetic construct
  misc_feature 1..1509: note = source = /note="Description of Artificial Sequence: Synthetic coding sequence"
  source 1..1509: mol_type = other DNA
atggcccagagatgcgtgtgcgtgctggccctggtggccatgctgctgctggtgttccccaccgtgagcagaagcatgggccccagaagcggcgagcaccagagagccagcagaatccccagccagttcagcaaggaggagagagtggccatgaaggaggccctgaagggcgccatccagatccccaccgtgaccttcagcagcgagaagagcaacaccaccgccctggccgagttcggcaagtacatccacaaggtgttccccaccgtggtgagcaccagcttcatccagcacgaggtggtggaggagtacagccacctgttcaccatccagggcagcgaccccagcctgcagccctacctgctgatggcccacttcgacgtggtgcccgcccccgaggagggctgggaggtgccccccttcagcggcctggagagagacggcatcatctacggcagaggcaccctggacgacaagaacagcgtgatggccctgctgcaggccctggagctgctgctgatcagaaagtacatccccagaagaagcttcttcatcagcctgggccacgacgaggagagcagcggcaccggcgcccagagaatcagcgccctgctgcagagcagaggcgtgcagctggccttcatcgtggacgagggcggcttcatcctggacgacttcatccccaacttcaagaagcccatcgccctgatcgccgtgagcgagaagggcagcatgaacctgatgctgcaggtgaacatgaccagcggccacagcagcgccccccccaaggagaccagcatcggcatcctggccgccgccgtgagcagactggagcagacccccatgcccatcatcttcggcagcggcaccgtggtgaccgtgctgcagcagctggccaacgagttccccttccccgtgaacatcatcctgagcaacccctggctgttcgagcccctgatcagcagattcatggagagaaaccccctgaccaacgccatcatcagaaccaccaccgccctgaccatcttcaaggccggcgtgaagttcaacgtgatcccccccgtggcccaggccaccgtgaacttcagaatccaccccggccagaccgtgcaggaggtgctggagctgaccaagaacatcgtggccgacaacagagtgcagttccacgtgctgagcgccttcgaccccctgcccgtgagccccagcgacgacaaggccctgggctaccagctgctgagacagaccgtgcagagcgtgttccccgaggtgaacatcaccgcccccgtgaccagcatcggcaacaccgacagcagattcttcaccaacctgaccaccggcatctacagattctaccccatctacatccagcccgaggacttcaagagaatccacggcgtgaacgagaagatcagcgtgcaggcctacgagacccaggtgaagttcatcttcgagctgatccagaacgccgacaccgaccaggagcccgtgagccacctgcacaagctgtag

SEQ ID NO: 4030 - DNA, 999 bp, synthetic construct
  misc_feature 1..999: note = source = /note="Description of Artificial Sequence: Synthetic coding sequence"
  source 1..999: mol_type = other DNA
atgagactgctggccttcctgagcctgctggccctggtgctgcaggagaccggcaccgccagcctgcccagaaaggagagaaagagaagagaggagcagatgcccagagagggcgacagcttcgaggtgctgcccctgagaaacgacgtgctgaaccccgacaactacggcgaggtgatcgacctgagcaactacgaggagctgaccgactacggcgaccagctgcccgaggtgaaggtgaccagcctggcccccgccaccagcatcagccccgccaagagcaccaccgcccccggcacccccagcagcaaccccaccatgaccagacccaccaccgccggcctgctgctgagcagccagcccaaccacggcctgcccacctgcctggtgtgcgtgtgcctgggcagcagcgtgtactgcgacgacatcgacctggaggacatcccccccctgcccagaagaaccgcctacctgtacgccagattcaacagaatcagcagaatcagagccgaggacttcaagggcctgaccaagctgaagagaatcgacctgagcaacaacctgatcagcagcatcgacaacgacgccttcagactgctgcacgccctgcaggacctgatcctgcccgagaaccagctggaggccctgcccgtgctgcccagcggcatcgagttcctggacgtgagactgaacagactgcagagcagcggcatccagcccgccgccttcagagccatggagaagctgcagttcctgtacctgagcgacaacctgctggacagcatccccggccccctgcccctgagcctgagaagcgtgcacctgcagaacaacctgatcgagaccatgcagagagacgtgttctgcgaccccgaggagcacaagcacaccagaagacagctggaggacatcagactggacggcaaccccatcaacctgagcctgttccccagcgcctacttctgcctgcccagactgcccatcggcagattcacctag

SEQ ID NO: 4031 - DNA, 1401 bp, synthetic construct
  misc_feature 1..1401: note = source = /note="Description of Artificial Sequence: Synthetic coding sequence"
  source 1..1401: mol_type = other DNA
atggtgagaagcgtggcctgggccggcttcatggtgctgctgatgatcccctggggcagcgccgccaagctggtgtgctacttcaccaactgggcccagtacagacagggcgaggccagattcctgcccaaggacctggaccccagcctgtgcacccacctgatctacgccttcgccggcatgaccaaccaccagctgagcaccaccgagtggaacgacgagaccctgtaccaggagttcaacggcctgaagaagatgaaccccaagctgaagaccctgctggccatcggcggctggaacttcggcacccagaagttcaccgacatggtggccaccgccaacaacagacagaccttcgtgaacagcgccatcagattcctgagaaagtacagcttcgacggcctggacctggactgggagtaccccggcagccagggcagccccgccgtggacaaggagagattcaccaccctggtgcaggacctggccaacgccttccagcaggaggcccagaccagcggcaaggagagactgctgctgagcgccgccgtgcccgccggccagacctacgtggacgccggctacgaggtggacaagatcgcccagaacctggacttcgtgaacctgatggcctacgacttccacggcagctgggagaaggtgaccggccacaacagccccctgtacaagagacaggaggagagcggcgccgccgccagcctgaacgtggacgccgccgtgcagcagtggctgcagaagggcacccccgccagcaagctgatcctgggcatgcccacctacggcagaagcttcaccctggccagcagcagcgacaccagagtgggcgcccccgccaccggcagcggcacccccggccccttcaccaaggagggcggcatgctggcctactacgaggtgtgcagctggaagggcgccaccaagcagagaatccaggaccagaaggtgccctacatcttcagagacaaccagtgggtgggcttcgacgacgtggagagcttcaagaccaaggtgagctacctgaagcagaagggcctgggcggcgccatggtgtgggccctggacctggacgacttcgccggcttcagctgcaaccagggcagataccccctgatccagaccctgagacaggagctgagcctgccctacctgcccagcggcacccccgagctggaggtgcccaagcccggccagcccagcgagcccgagcacggccccagccccggccaggacaccttctgccagggcaaggccgacggcctgtaccccaaccccagagagagaagcagcttctacagctgcgccgccggcagactgttccagcagagctgccccaccggcctggtgttcagcaacagctgcaagtgctgcacctggaactag

SEQ ID NO: 4032 - DNA, 1596 bp, synthetic construct
  misc_feature 1..1596: note = source = /note="Description of Artificial Sequence: Synthetic coding sequence"
  source 1..1596: mol_type = other DNA
atgagactgtgcctgggcagaccccaccccagaggccacagcagagtgggcaagagcgagagaggcagaggcgccagaggcctggccagacagagaaccctggaggacgaggaggagcaggagagagagagaagaagaagacacagaaacctgagcagcaccaccgacgacgaggcccccagactgagccagaacggcgacagacaggccagcgccagcgagagactgcccagcgtggaggaggccgaggtgcccaagcccctgccccccgccagcaaggacgaggacgaggacatccagagcatcctgagaaccagacaggagagaagacagagaagacaggtggtggaggccgcccaggcccccatccaggagagactggaggccgaggagggcagaaacagcctgagccccgtgcaggccacccagaagcccctggtgagcaagaaggagctggagatcccccccagaagaagactgagcagagagcagagaggcccctgggccctggaggaggagagcctggtgggcagagagcccgaggagagaaagaagggcgtgcccgagaagagccccgtgctggagaagagcagcatgcccaagaagaccgcccccgagaagagcctggtgagcgacaagaccagcatcagcgagaaggtgctggccagcgagaagaccagcctgagcgagaagatcgccgtgagcgagaagagaaacagcagcgagaagaagagcgtgctggagaagaccagcgtgagcgagaagagcctggcccccggcatggccctgggcagcggcagaagactggtgagcgagaaggccagcatcttcgagaaggccctggccagcgagaagagccccaccgccgacgccaagcccgcccccaagagagccaccgccagcgagcagcccctggcccaggagccccccgccagcggcggcagccccgccaccaccaaggagcagagaggcagagccctgcccggcaagaacctgcccagcctggccaagcagggcgccagcgacccccccaccgtggccagcagactgccccccgtgaccctgcaggtgaagatccccagcaaggaggaggaggccgacatgagcagccccacccagagaacctacagcagcagcctgaagagaagcagccccagaaccatcagcttcagaatgaagcccaagaaggagaacagcgagaccaccctgaccagaagcgccagcatgaagctgcccgacaacaccgtgaagctgggcgagaagctggagagataccacaccgccatcagaagaagcgagagcgtgaagagcagaggcctgccctgcaccgagctgttcgtggcccccgtgggcgtggccagcaagagacacctgttcgagaaggagctggccggccagagcagagccgagcccgccagcagcagaaaggagaacctgagactgagcggcgtggtgaccagcagactgaacctgtggatcagcagaacccaggagagcggcgaccaggacccccaggaggcccagaaggccagcagcgccaccgagagaacccagtggggccagaagagcgacagcagcctggacgccgaggtgtag

SEQ ID NO: 4033 - DNA, 1782 bp, synthetic construct
  misc_feature 1..1782: note = source = /note="Description of Artificial Sequence: Synthetic coding sequence"
  source 1..1782: mol_type = other DNA
atgaaggccgacctgaagcagcaccaccaccactggagcatcttcagctacatcagactgagactgcccagcatgctgctgctgttcagcgtgatcctgatcagctgggtgagcaccgtgggcggcgagggcaccctgtgcgacttccccaagatccaccacggcttcctgtacgacgaggaggactacaaccccttcagccaggtgcccaccggcgaggtgttctactacagctgcgagtacaacttcgtgagccccagcaagagcttctggaccagaatcacctgcaccgaggagggctggagccccacccccaagtgcctgagaatgtgcagcttccccttcgtgaagaacggccacagcgagagcagcggcctgatccacctggagggcgacaccgtgcagatcatctgcaacaccggctacagcctgcagaacaacgagaagaacatcagctgcgtggagagaggctggagcaccccccccatctgcagcttcaccaagggcgagtgccacgtgcccatcctggaggccaacgtggacgcccagcccaagaaggagagctacaaggtgggcgacgtgctgaagttcagctgcagaaagaacctgatcagagtgggcagcgacagcgtgcagtgctaccagttcggctggagccccaacttccccacctgcaagggccaggtgagaagctgcggcccccccccccagctgagcaacggcgaggtgaaggagatcagaaaggaggagtacggccacaacgaggtggtggagtacgactgcaaccccaacttcatcatcaacggccccaagaagatccagtgcgtggacggcgagtggaccaccctgcccacctgcgtggagcaggtgaagacctgcggctacatccccgagctggagtacggctacgtgcagcccagcgtgcccccctaccagcacggcgtgagcgtggaggtgaactgcagaaacgagtacgccatgatcggcaacaacatgatcacctgcatcaacggcatctggaccgagctgcccatgtgcgtggccacccaccagctgaagagatgcaagatcgccggcgtgaacatcaagaccctgctgaagctgagcggcaaggagttcaaccacaacagcagaatcagatacagatgcagcgacatcttcagatacagacacagcgtgtgcatcaacggcaagtggaaccccgaggtggactgcaccgagaagagagagcagttctgccccccccccccccagatccccaacgcccagaacatgaccaccaccgtgaactaccaggacggcgagaaggtggccgtgctgtgcaaggagaactacctgctgcccgaggccaaggagatcgtgtgcaaggacggcagatggcagagcctgcccagatgcgtggagagcaccgcctactgcggccccccccccagcatcaacaacggcgacaccaccagcttccccctgagcgtgtacccccccggcagcaccgtgacctacagatgccagagcttctacaagctgcagggcagcgtgaccgtgacctgcagaaacaagcagtggagcgagccccccagatgcctggacccctgcgtggtgagcgaggagaacatgaacaagaacaacatccagctgaagtggagaaacgacggcaagctgtacgccaagaccggcgacgccgtggagttccagtgcaagttcccccacaaggccatgatcagcagcccccccttcagagccatctgccaggagggcaagttcgagtaccccatctgcgagtag

SEQ ID NO: 4034 - DNA, 2301 bp, synthetic construct
  misc_feature 1..2301: note = source = /note="Description of Artificial Sequence: Synthetic coding sequence"
  source 1..2301: mol_type = other DNA
atgatctggagaagcagagccggcgccgagctgttcagcctgatggccctgtgggagtggatcgccctgagcctgcactgctgggtgctggccgtggccgccgtgagcgaccagcacgccaccagccccttcgactggctgctgagcgacaagggccccttccacagaagccaggagtacaccgacttcgtggacagaagcagacagggcttcagcaccagatacaagatctacagagagttcggcagatggaaggtgaacaacctggccgtggagagaagaaacttcctgggcagccccctgcccctggcccccgagttcttcagaaacatcagactgctgggcagaagacccaccctgcagcagatcaccgagaacctgatcaagaagtacggcacccacttcctgctgagcgccaccctgggcggcgaggagagcctgaccatcttcgtggacaagagaaagctgagcaagagagccgagggcagcgacagcaccaccaacagcagcagcgtgaccctggagaccctgcaccagctggccgccagctacttcatcgacagagacagcaccctgagaagactgcaccacatccagatcgccagcaccgccatcaaggtgaccgagaccagaaccggccccctgggctgcagcaactacgacaacctggacagcgtgagcagcgtgctggtgcagagccccgagaacaagatccagctgcagggcctgcaggtgctgctgcccgactacctgcaggagagattcgtgcaggccgccctgagctacatcgcctgcaacagcgagggcgagttcatctgcaaggagaacgactgctggtgccactgcggccccaagttccccgagtgcaactgccccagcatggacatccaggccatggaggagaacctgctgagaatcaccgagacctggaaggcctacaacagcgacttcgaggagagcgacgagttcaagctgttcatgaagagactgcccatgaactacttcctgaacaccagcaccatcatgcacctgtggaccatggacagcaacttccagagaagatacgagcagctggagaacagcatgaagcagctgttcctgaaggcccagaagatcgtgcacaagctgttcagcctgagcaagagatgccacaagcagcccctgatcagcctgcccagacagagaaccagcacctactggctgaccagaatccagagcttcctgtactgcaacgagaacggcctgctgggcagcttcagcgaggagacccacagctgcacctgccccaacgaccaggtggtgtgcaccgccttcctgccctgcaccgtgggcgacgccagcgcctgcctgacctgcgcccccgacaacagaaccagatgcggcacctgcaacaccggctacatgctgagccagggcctgtgcaagcccgaggtggccgagagcaccgaccactacatcggcttcgagaccgacctgcaggacctggagatgaagtacctgctgcagaagaccgacagaagaatcgaggtgcacgccatcttcatcagcaacgacatgagactgaacagctggttcgaccccagctggagaaagagaatgctgctgaccctgaagagcaacaagtacaagagcagcctggtgcacatgatcctgggcctgagcctgcagatctgcctgaccaagaacagcaccctggagcccgtgctggccgtgtacgtgaaccccttcggcggcagccacagcgagagctggttcatgcccgtgaacgagaacagcttccccgactgggagagaaccaagctggacctgcccctgcagtgctacaactggaccctgaccctgggcaacaagtggaagaccttcttcgagaccgtgcacatctacctgagaagcagaatcaagagcaacggccccaacggcaacgagagcatctactacgagcccctggagttcatcgaccccagcagaaacctgggctacatgaagatcaacaacatccaggtgttcggctacagcatgcacttcgaccccgaggccatcagagacctgatcctgcagctggactacccctacacccagggcagccaggacagcgccctgctgcagctgctggagatcagagacagagtgaacaagctgagcccccccggccagagaagactggacctgttcagctgcctgctgagacacagactgaagctgagcaccagcgaggtggtgagaatccagagcgccctgcaggccttcaacgccaagctgcccaacaccatggactacgacaccaccaagctgtgcagctag

SEQ ID NO: 4035 - DNA, 1815 bp, synthetic construct
  misc_feature 1..1815: note = source = /note="Description of Artificial Sequence: Synthetic coding sequence"
  source 1..1815: mol_type = other DNA
atgagaagatgcaacagcggcagcggccccccccccagcctgctgctgctgctgctgtggctgctggccgtgcccggcgccaacgccgcccccagaagcgccctgtacagccccagcgaccccctgaccctgctgcaggccgacaccgtgagaggcgccgtgctgggcagcagaagcgcctgggccgtggagttcttcgccagctggtgcggccactgcatcgccttcgcccccacctggaaggccctggccgaggacgtgaaggcctggagacccgccctgtacctggccgccctggactgcgccgaggagaccaacagcgccgtgtgcagagacttcaacatccccggcttccccaccgtgagattcttcaaggccttcaccaagaacggcagcggcgccgtgttccccgtggccggcgccgacgtgcagaccctgagagagagactgatcgacgccctggagagccaccacgacacctggccccccgcctgcccccccctggagcccgccaagctggaggagatcgacggcttcttcgccagaaacaacgaggagtacctggccctgatcttcgagaagggcggcagctacctgggcagagaggtggccctggacctgagccagcacaagggcgtggccgtgagaagagtgctgaacaccgaggccaacgtggtgagaaagttcggcgtgaccgacttccccagctgctacctgctgttcagaaacggcagcgtgagcagagtgcccgtgctgatggagagcagaagcttctacaccgcctacctgcagagactgagcggcctgaccagagaggccgcccagaccaccgtggcccccaccaccgccaacaagatcgcccccaccgtgtggaagctggccgacagaagcaagatctacatggccgacctggagagcgccctgcactacatcctgagaatcgaggtgggcagattccccgtgctggagggccagagactggtggccctgaagaagttcgtggccgtgctggccaagtacttccccggcagacccctggtgcagaacttcctgcacagcgtgaacgagtggctgaagagacagaagagaaacaagatcccctacagcttcttcaagaccgccctggacgacagaaaggagggcgccgtgctggccaagaaggtgaactggatcggctgccagggcagcgagccccacttcagaggcttcccctgcagcctgtgggtgctgttccacttcctgaccgtgcaggccgccagacagaacgtggaccacagccaggaggccgccaaggccaaggaggtgctgcccgccatcagaggctacgtgcactacttcttcggctgcagagactgcgccagccacttcgagcagatggccgccgccagcatgcacagagtgggcagccccaacgccgccgtgctgtggctgtggagcagccacaacagagtgaacgccagactggccggcgcccccagcgaggacccccagttccccaaggtgcagtggccccccagagagctgtgcagcgcctgccacaacgagagactggacgtgcccgtgtgggacgtggaggccaccctgaacttcctgaaggcccacttcagccccagcaacatcatcctggacttccccgccgccggcagcgccgccagaagagacgtgcagaacgtggccgccgcccccgagctggccatgggcgccctggagctggagagcagaaacagcaccctggaccccggcaagcccgagatgatgaagagccccaccaacaccaccccccacgtgcccgccgagggccccgagctgatctag

SEQ ID NO: 4036 - DNA, 2244 bp, synthetic construct
  misc_feature 1..2244: note = source = /note="Description of Artificial Sequence: Synthetic coding sequence"
  source 1..2244: mol_type = other DNA
atgagaagatgcaacagcggcagcggccccccccccagcctgctgctgctgctgctgtggctgctggccgtgcccggcgccaacgccgcccccagaagcgccctgtacagccccagcgaccccctgaccctgctgcaggccgacaccgtgagaggcgccgtgctgggcagcagaagcgcctgggccgtggagttcttcgccagctggtgcggccactgcatcgccttcgcccccacctggaaggccctggccgaggacgtgaaggcctggagacccgccctgtacctggccgccctggactgcgccgaggagaccaacagcgccgtgtgcagagacttcaacatccccggcttccccaccgtgagattcttcaaggccttcaccaagaacggcagcggcgccgtgttccccgtggccggcgccgacgtgcagaccctgagagagagactgatcgacgccctggagagccaccacgacacctggccccccgcctgcccccccctggagcccgccaagctggaggagatcgacggcttcttcgccagaaacaacgaggagtacctggccctgatcttcgagaagggcggcagctacctgggcagagaggtggccctggacctgagccagcacaagggcgtggccgtgagaagagtgctgaacaccgaggccaacgtggtgagaaagttcggcgtgaccgacttccccagctgctacctgctgttcagaaacggcagcgtgagcagagtgcccgtgctgatggagagcagaagcttctacaccgcctacctgcagagactgagcggcctgaccagagaggccgcccagaccaccgtggcccccaccaccgccaacaagatcgcccccaccgtgtggaagctggccgacagaagcaagatctacatggccgacctggagagcgccctgcactacatcctgagaatcgaggtgggcagattccccgtgctggagggccagagactggtggccctgaagaagttcgtggccgtgctggccaagtacttccccggcagacccctggtgcagaacttcctgcacagcgtgaacgagtggctgaagagacagaagagaaacaagatcccctacagcttcttcaagaccgccctggacgacagaaaggagggcgccgtgctggccaagaaggtgaactggatcggctgccagggcagcgagccccacttcagaggcttcccctgcagcctgtgggtgctgttccacttcctgaccgtgcaggccgccagacagaacgtggaccacagccaggaggccgccaaggccaaggaggtgctgcccgccatcagaggctacgtgcactacttcttcggctgcagagactgcgccagccacttcgagcagatggccgccgccagcatgcacagagtgggcagccccaacgccgccgtgctgtggctgtggagcagccacaacagagtgaacgccagactggccggcgcccccagcgaggacccccagttccccaaggtgcagtggccccccagagagctgtgcagcgcctgccacaacgagagactggacgtgcccgtgtgggacgtggaggccaccctgaacttcctgaaggcccacttcagccccagcaacatcatcctggacttccccgccgccggcagcgccgccagaagagacgtgcagaacgtggccgccgcccccgagctggccatgggcgccctggagctggagagcagaaacagcaccctggaccccggcaagcccgagatgatgaagagccccaccaacaccaccccccacgtgcccgccgagggccccgaggccagcagaccccccaagctgcaccccggcctgagagccgcccccggccaggagccccccgagcacatggccgagctgcagagaaacgagcaggagcagcccctgggccagtggcacctgagcaagagagacaccggcgccgccctgctggccgagagcagagccgagaagaacagactgtggggccccctggaggtgagaagagtgggcagaagcagcaagcagctggtggacatccccgagggccagctggaggccagagccggcagaggcagaggccagtggctgcaggtgctgggcggcggcttcagctacctggacatcagcctgtgcgtgggcctgtacagcctgagcttcatgggcctgctggccatgtacacctacttccaggccaagatcagagccctgaagggccacgccggccaccccgccgcctag

SEQ ID NO: 4037 - DNA, 1476 bp, synthetic construct
  misc_feature 1..1476: note = source = /note="Description of Artificial Sequence: Synthetic coding sequence"
  source 1..1476: mol_type = other DNA
atgaagaccttcacctggaccctgggcgtgctgttcttcctgctggtggacaccggccactgcagaggcggccagttcaagatcaagaagatcaaccagagaagataccccagagccaccgacggcaaggaggaggccaagaagtgcgcctacaccttcctggtgcccgagcagagaatcaccggccccatctgcgtgaacaccaagggccaggacgccagcaccatcaaggacatgatcaccagaatggacctggagaacctgaaggacgtgctgagcagacagaagagagagatcgacgtgctgcagctggtggtggacgtggacggcaacatcgtgaacgaggtgaagctgctgagaaaggagagcagaaacatgaacagcagagtgacccagctgtacatgcagctgctgcacgagatcatcagaaagagagacaacagcctggagctgagccagctggagaacaagatcctgaacgtgaccaccgagatgctgaagatggccaccagatacagagagctggaggtgaagtacgccagcctgaccgacctggtgaacaaccagagcgtgatgatcaccctgctggaggagcagtgcctgagaatcttcagcagacaggacacccacgtgagcccccccctggtgcaggtggtgccccagcacatccccaacagccagcagtacacccccggcctgctgggcggcaacgagatccagagagaccccggctaccccagagacctgatgcccccccccgacctggccaccagccccaccaagagccccttcaagatcccccccgtgaccttcatcaacgagggccccttcaaggactgccagcaggccaaggaggccggccacagcgtgagcggcatctacatgatcaagcccgagaacagcaacggccccatgcagctgtggtgcgagaacagcctggaccccggcggctggaccgtgatccagaagagaaccgacggcagcgtgaacttcttcagaaactgggagaactacaagaagggcttcggcaacatcgacggcgagtactggctgggcctggagaacatctacatgctgagcaaccaggacaactacaagctgctgatcgagctggaggactggagcgacaagaaggtgtacgccgagtacagcagcttcagactggagcccgagagcgagttctacagactgagactgggcacctaccagggcaacgccggcgacagcatgatgtggcacaacggcaagcagttcaccaccctggacagagacaaggacatgtacgccggcaactgcgcccacttccacaagggcggctggtggtacaacgcctgcgcccacagcaacctgaacggcgtgtggtacagaggcggccactacagaagcaagcaccaggacggcatcttctgggccgagtacagaggcggcagctacagcctgagagccgtgcagatgatgatcaagcccatcgactag

SEQ ID NO: 4038 - DNA, 2484 bp, synthetic construct
  misc_feature 1..2484: note = source = /note="Description of Artificial Sequence: Synthetic coding sequence"
  source 1..2484: mol_type = other DNA
atgatgtgcctgaagatcctgagaatcagcctggccatcctggccggctgggccctgtgcagcgccaacagcgagctgggctggaccagaaagaagagcctggtggagagagagcacctgaaccaggtgctgctggagggcgagagatgctggctgggcgccaaggtgagaagacccagagccagcccccagcaccacctgttcggcgtgtaccccagcagagccggcaactacctgagaccctaccccgtgggcgagcaggagatccaccacaccggcagaagcaagcccgacaccgagggcaacgccgtgagcctggtgccccccgacctgaccgagaaccccgccggcctgagaggcgccgtggaggagcccgccgccccctgggtgggcgacagccccatcggccagagcgagctgctgggcgacgacgacgcctacctgggcaaccagagaagcaaggagagcctgggcgaggccggcatccagaagggcagcgccatggccgccaccaccaccaccgccatcttcaccaccctgaacgagcccaagcccgagacccagagaagaggctgggccaagagcagacagagaagacaggtgtggaagagaagagccgaggacggccagggcgacagcggcatcagcagccacttccagccctggcccaagcacagcctgaagcacagagtgaagaagagcccccccgaggagagcaaccagaacggcggcgagggcagctacagagaggccgagaccttcaacagccaggtgggcctgcccatcctgtacttcagcggcagaagagagagactgctgctgagacccgaggtgctggccgagatccccagagaggccttcaccgtggaggcctgggtgaagcccgagggcggccagaacaaccccgccatcatcgccggcgtgttcgacaactgcagccacaccgtgagcgacaagggctgggccctgggcatcagaagcggcaaggacaagggcaagagagacgccagattcttcttcagcctgtgcaccgacagagtgaagaaggccaccatcctgatcagccacagcagataccagcccggcacctggacccacgtggccgccacctacgacggcagacacatggccctgtacgtggacggcacccaggtggccagcagcctggaccagagcggccccctgaacagccccttcatggccagctgcagaagcctgctgctgggcggcgacagcagcgaggacggccactacttcagaggccacctgggcaccctggtgttctggagcaccgccctgccccagagccacttccagcacagcagccagcacagcagcggcgaggaggaggccaccgacctggtgctgaccgccagcttcgagcccgtgaacaccgagtgggtgcccttcagagacgagaagtaccccagactggaggtgctgcagggcttcgagcccgagcccgagatcctgagccccctgcagccccccctgtgcggccagaccgtgtgcgacaacgtggagctgatcagccagtacaacggctactggcccctgagaggcgagaaggtgatcagataccaggtggtgaacatctgcgacgacgagggcctgaaccccatcgtgagcgaggagcagatcagactgcagcacgaggccctgaacgaggccttcagcagatacaacatcagctggcagctgagcgtgcaccaggtgcacaacagcaccctgagacacagagtggtgctggtgaactgcgagcccagcaagatcggcaacgaccactgcgaccccgagtgcgagcaccccctgaccggctacgacggcggcgactgcagactgcagggcagatgctacagctggaacagaagagacggcctgtgccacgtggagtgcaacaacatgctgaacgacttcgacgacggcgactgctgcgacccccaggtggccgacgtgagaaagacctgcttcgaccccgacagccccaagagagcctacatgagcgtgaaggagctgaaggaggccctgcagctgaacagcacccacttcctgaacatctacttcgccagcagcgtgagagaggacctggccggcgccgccacctggccctgggacaaggacgccgtgacccacctgggcggcatcgtgctgagccccgcctactacggcatgcccggccacaccgacaccatgatccacgaggtgggccacgtgctgggcctgtaccacgtgttcaagggcgtgagcgagagagagagctgcaacgacccctgcaaggagaccgtgcccagcatggagaccggcgacctgtgcgccgacaccgcccccacccccaagagcgagctgtgcagagagcccgagcccaccagcgacacctgcggcttcaccagattccccggcgcccccttcaccaactacatgagctacaccggcatcaccaccgtgctgttctgcttcctgctgagaatccacggcggcctgtag

SEQ ID NO: 4039 - DNA, 5376 bp, synthetic construct
  misc_feature 1..5376: note = source = /note="Description of Artificial Sequence: Synthetic coding sequence"
  source 1..5376: mol_type = other DNA
atgatgtgcctgaagatcctgagaatcagcctggccatcctggccggctgggccctgtgcagcgccaacagcgagctgggctggaccagaaagaagagcctggtggagagagagcacctgaaccaggtgctgctggagggcgagagatgctggctgggcgccaaggtgagaagacccagagccagcccccagcaccacctgttcggcgtgtaccccagcagagccggcaactacctgagaccctaccccgtgggcgagcaggagatccaccacaccggcagaagcaagcccgacaccgagggcaacgccgtgagcctggtgccccccgacctgaccgagaaccccgccggcctgagaggcgccgtggaggagcccgccgccccctgggtgggcgacagccccatcggccagagcgagctgctgggcgacgacgacgcctacctgggcaaccagagaagcaaggagagcctgggcgaggccggcatccagaagggcagcgccatggccgccaccaccaccaccgccatcttcaccaccctgaacgagcccaagcccgagacccagagaagaggctgggccaagagcagacagagaagacaggtgtggaagagaagagccgaggacggccagggcgacagcggcatcagcagccacttccagccctggcccaagcacagcctgaagcacagagtgaagaagagcccccccgaggagagcaaccagaacggcggcgagggcagctacagagaggccgagaccttcaacagccaggtgggcctgcccatcctgtacttcagcggcagaagagagagactgctgctgagacccgaggtgctggccgagatccccagagaggccttcaccgtggaggcctgggtgaagcccgagggcggccagaacaaccccgccatcatcgccggcgtgttcgacaactgcagccacaccgtgagcgacaagggctgggccctgggcatcagaagcggcaaggacaagggcaagagagacgccagattcttcttcagcctgtgcaccgacagagtgaagaaggccaccatcctgatcagccacagcagataccagcccggcacctggacccacgtggccgccacctacgacggcagacacatggccctgtacgtggacggcacccaggtggccagcagcctggaccagagcggccccctgaacagccccttcatggccagctgcagaagcctgctgctgggcggcgacagcagcgaggacggccactacttcagaggccacctgggcaccctggtgttctggagcaccgccctgccccagagccacttccagcacagcagccagcacagcagcggcgaggaggaggccaccgacctggtgctgaccgccagcttcgagcccgtgaacaccgagtgggtgcccttcagagacgagaagtaccccagactggaggtgctgcagggcttcgagcccgagcccgagatcctgagccccctgcagccccccctgtgcggccagaccgtgtgcgacaacgtggagctgatcagccagtacaacggctactggcccctgagaggcgagaaggtgatcagataccaggtggtgaacatctgcgacgacgagggcctgaaccccatcgtgagcgaggagcagatcagactgcagcacgaggccctgaacgaggccttcagcagatacaacatcagctggcagctgagcgtgcaccaggtgcacaacagcaccctgagacacagagtggtgctggtgaactgcgagcccagcaagatcggcaacgaccactgcgaccccgagtgcgagcaccccctgaccggctacgacggcggcgactgcagactgcagggcagatgctacagctggaacagaagagacggcctgtgccacgtggagtgcaacaacatgctgaacgacttcgacgacggcgactgctgcgacccccaggtggccgacgtgagaaagacctgcttcgaccccgacagccccaagagagcctacatgagcgtgaaggagctgaaggaggccctgcagctgaacagcacccacttcctgaacatctacttcgccagcagcgtgagagaggacctggccggcgccgccacctggccctgggacaaggacgccgtgacccacctgggcggcatcgtgctgagccccgcctactacggcatgcccggccacaccgacaccatgatccacgaggtgggccacgtgctgggcctgtaccacgtgttcaagggcgtgagcgagagagagagctgcaacgacccctgcaaggagaccgtgcccagcatggagaccggcgacctgtgcgccgacaccgcccccacccccaagagcgagctgtgcagagagcccgagcccaccagcgacacctgcggcttcaccagattccccggcgcccccttcaccaactacatgagctacaccgacgacaactgcaccgacaacttcacccccaaccaggtggccagaatgcactgctacctggacctggtgtaccagcagtggaccgagagcagaaagcccacccccatccccatcccccccatggtgatcggccagaccaacaagagcctgaccatccactggctgccccccatcagcggcgtggtgtacgacagagccagcggcagcctgtgcggcgcctgcaccgaggacggcaccttcagacagtacgtgcacaccgccagcagcagaagagtgtgcgacagcagcggctactggacccccgaggaggccgtgggcccccccgacgtggaccagccctgcgagcccagcctgcaggcctggagccccgaggtgcacctgtaccacatgaacatgaccgtgccctgccccaccgagggctgcagcctggagctgctgttccagcaccccgtgcaggccgacaccctgaccctgtgggtgaccagcttcttcatggagagcagccaggtgctgttcgacaccgagatcctgctggagaacaaggagagcgtgcacctgggccccctggacaccttctgcgacatccccctgaccatcaagctgcacgtggacggcaaggtgagcggcgtgaaggtgtacaccttcgacgagagaatcgagatcgacgccgccctgctgaccagccagccccacagccccctgtgcagcggctgcagacccgtgagataccaggtgctgagagacccccccttcgccagcggcctgcccgtggtggtgacccacagccacagaaagttcaccgacgtggaggtgacccccggccagatgtaccagtaccaggtgctggccgaggccggcggcgagctgggcgaggccagcccccccctgaaccacatccacggcgccccctactgcggcgacggcaaggtgagcgagagactgggcgaggagtgcgacgacggcgacctggtgagcggcgacggctgcagcaaggtgtgcgagctggaggagggcttcaactgcgtgggcgagcccagcctgtgctacatgtacgagggcgacggcatctgcgagcccttcgagagaaagaccagcatcgtggactgcggcatctacacccccaagggctacctggaccagtgggccaccagagcctacagcagccacgaggacaagaagaagtgccccgtgagcctggtgaccggcgagccccacagcctgatctgcaccagctaccaccccgacctgcccaaccacagacccctgaccggctggttcccctgcgtggccagcgagaacgagacccaggacgacagaagcgagcagcccgagggcagcctgaagaaggaggacgaggtgtggctgaaggtgtgcttcaacagacccggcgaggccagagccatcttcatcttcctgaccaccgacggcctggtgcccggcgagcaccagcagcccaccgtgaccctgtacctgaccgacgtgagaggcagcaaccacagcctgggcacctacggcctgagctgccagcacaaccccctgatcatcaacgtgacccaccaccagaacgtgctgttccaccacaccaccagcgtgctgctgaacttcagcagccccagagtgggcatcagcgccgtggccctgagaaccagcagcagaatcggcctgagcgcccccagcaactgcatcagcgaggacgagggccagaaccaccagggccagagctgcatccacagaccctgcggcaagcaggacagctgccccagcctgctgctggaccacgccgacgtggtgaactgcaccagcatcggccccggcctgatgaagtgcgccatcacctgccagagaggcttcgccctgcaggccagcagcggccagtacatcagacccatgcagaaggagatcctgctgacctgcagcagcggccactgggaccagaacgtgagctgcctgcccgtggactgcggcgtgcccgaccccagcctggtgaactacgccaacttcagctgcagcgagggcaccaagttcctgaagagatgcagcatcagctgcgtgccccccgccaagctgcagggcctgagcccctggctgacctgcctggaggacggcctgtggagcctgcccgaggtgtactgcaagctggagtgcgacgccccccccatcatcctgaacgccaacctgctgctgccccactgcctgcaggacaaccacgacgtgggcaccatctgcaagtacgagtgcaagcccggctactacgtggccgagagcgccgagggcaaggtgagaaacaagctgctgaagatccagtgcctggagggcggcatctgggagcagggcagctgcatccccgtggtgtgcgagccccccccccccgtgttcgagggcatgtacgagtgcaccaacggcttcagcctggacagccagtgcgtgctgaactgcaaccaggagagagagaagctgcccatcctgtgcaccaaggagggcctgtggacccaggagttcaagctgtgcgagaacctgcagggcgagtgcccccccccccccagcgagctgaacagcgtggagtacaagtgcgagcagggctacggcatcggcgccgtgtgcagccccctgtgcgtgatcccccccagcgaccccgtgatgctgcccgagaacatcaccgccgacaccctggagcactggatggagcccgtgaaggtgcagagcatcgtgtgcaccggcagaagacagtggcaccccgaccccgtgctggtgcactgcatccagagctgcgagcccttccaggccgacggctggtgcgacaccatcaacaacagagcctactgccactacgacggcggcgactgctgcagcagcaccctgagcagcaagaaggtgatccccttcgccgccgactgcgacctggacgagtgcacctgcagagaccccaaggccgaggagaaccagtag

SEQ ID NO: 4040 - DNA, 702 bp, synthetic construct
  misc_feature 1..702: note = source = /note="Description of Artificial Sequence: Synthetic coding sequence"
  source 1..702: mol_type = other DNA
atgaaggaccccctggccaaggacgagagaatctacgtgaccaactactactacggcaacaccctggtggagttcagaaacctggagaacttcaagcagggcagatggagcaacagctacaagctgccctacagctggatcggcaccggccacgtggtgtacaacggcgccttctactacaacagagccttcaccagaaacatcatcaagtacgacctgaagcagagatacgtggccgcctgggccatgctgcacgacgtggcctacgaggaggccaccccctggagatggcagggccacagcgacgtggacttcgccgtggacgagaacggcctgtggctgatctaccccgccctggacgacgagggcttcagccaggaggtgatcgtgctgagcaagctgaacgccgccgacctgagcacccagaaggagaccacctggagaaccggcctgagaagaaacttctacggcaactgcttcgtgatctgcggcgtgctgtacgccgtggacagctacaaccagagaaacgccaacatcagctacgccttcgacacccacaccaacacccagatcgtgcccagactgctgttcgagaacgagtacagctacaccacccagatcgactacaaccccaaggacagactgctgtacgcctgggacaacggccaccaggtgacctaccacgtgatcttcgcctactag

SEQ ID NO: 4041 - DNA, 579 bp, synthetic construct
  misc_feature 1..579: note = source = /note="Description of Artificial Sequence: Synthetic coding sequence"
  source 1..579: mol_type = other DNA
atgctgaagaagatcagcgtgggcgtggccggcgacctgaacaccgtgaccatgaagctgggctgcgtgctgatggcctgggccctgtacctgagcctgggcgtgctgtgggtggcccagatgctgctggccgccagcttcgagaccctgcagtgcgagggccccgtgtgcaccgaggagagcagctgccacaccgaggacgacctgaccgacgccagagaggccggcttccaggtgaaggcctacaccttcagcgagcccttccacctgatcgtgagctacggcgccagcagcagcgccgccccccccaccctgaaccccgccccccagaagagcgccgcccccggcaccgcccccgaggaggcccccggccccctgccccccccccccacccccagcagcgaggaccccggcttcagcagccccctgggcatgcccgacccccacctgtaccaccagatgggcctgctgctgaagcacatgcaggacgtgagagtgctgctgggccacctgctgatggagctgagagagctgagcggccacagaaagcccggcaccaccaaggccaccgccgagtag

SEQ ID NO: 4042 - DNA, 459 bp, synthetic construct
  misc_feature 1..459: note = source = /note="Description of Artificial Sequence: Synthetic coding sequence"
  source 1..459: mol_type = other DNA
atgctgctggccgccagcttcgagaccctgcagtgcgagggccccgtgtgcaccgaggagagcagctgccacaccgaggacgacctgaccgacgccagagaggccggcttccaggtgaaggcctacaccttcagcgagcccttccacctgatcgtgagctacggcgccagcagcagcgccgccccccccaccctgaaccccgccccccagaagagcgccgcccccggcaccgcccccgaggaggcccccggccccctgccccccccccccacccccagcagcgaggaccccggcttcagcagccccctgggcatgcccgacccccacctgtaccaccagatgggcctgctgctgaagcacatgcaggacgtgagagtgctgctgggccacctgctgatggagctgagagagctgagcggccacagaaagcccggcaccaccaaggccaccgccgagtag

SEQ ID NO: 4043 - DNA, 1098 bp, synthetic construct
  misc_feature 1..1098: note = source = /note="Description of Artificial Sequence: Synthetic coding sequence"
  source 1..1098: mol_type = other DNA
atgaagctgggctgcgtgctgatggcctgggccctgtacctgagcctgggcgtgctgtgggtggcccagatgctgctggccgccggctgccacgccgccgccagcttcgagaccctgcagtgcgagggccccgtgtgcaccgaggagagcagctgccacaccgaggacgacctgaccgacgccagagaggccggcttccaggtgaaggcctacaccttcagcgagcccttccacctgatcgtgagctacgactggctgatcctgcagggccccgccaagcccgtgttcgagggcgacctgctggtgctgagatgccaggcctggcaggactggcccctgacccaggtgaccttctacagagacggcagcgccctgggcccccccggccccaacagagagttcagcatcaccgtggtgcagaaggccgacagcggccactaccactgcagcggcatcttccagagccccggccccggcatccccgagaccgccagcgtggtggccatcaccgtgcaggagctgttccccgcccccatcctgagagccgtgcccagcgccgagccccaggccggcagccccatgaccctgagctgccagaccaagctgcccctgcagagaagcgccgccagactgctgttcagcttctacaaggacggcagaatcgtgcagagcagaggcctgagcagcgagttccagatccccaccgccagcgaggaccacagcggcagctactggtgcgaggccgccaccgaggacaaccaggtgtggaagcagagcccccagctggagatcagagtgcagggcgccagcagcagcgccgccccccccaccctgaaccccgccccccagaagagcgccgcccccggcaccgcccccgaggaggcccccggccccctgccccccccccccacccccagcagcgaggaccccggcttcagcagccccctgggcatgcccgacccccacctgtaccaccagatgggcctgctgctgaagcacatgcaggacgtgagagtgctgctgggccacctgctgatggagctgagagagctgagcggccacagaaagcccggcaccaccaaggccaccgccgagtag

SEQ ID NO: 4044 - DNA, 711 bp, synthetic construct
  misc_feature 1..711: note = source = /note="Description of Artificial Sequence: Synthetic coding sequence"
  source 1..711: mol_type = other DNA
atgctgaagaagatcagcgtgggcgtggccggcgacctgaacaccgtgaccatgaagctgggctgcgtgctgatggcctgggccctgtacctgagcctgggcgtgctgtgggtggcccagatgctgctggagctgttccccgcccccatcctgagagccgtgcccagcgccgagccccaggccggcagccccatgaccctgagctgccagaccaagctgcccctgcagagaagcgccgccagactgctgttcagcttctacaaggacggcagaatcgtgcagagcagaggcctgagcagcgagttccagatccccaccgccagcgaggaccacagcggcagctactggtgcgaggccgccaccgaggacaaccaggtgtggaagcagagcccccagctggagatcagagtgcagggcgccagcagcagcgccgccccccccaccctgaaccccgccccccagaagagcgccgcccccggcaccgcccccgaggaggcccccggccccctgccccccccccccacccccagcagcgaggaccccggcttcagcagccccctgggcatgcccgacccccacctgtaccaccagatgggcctgctgctgaagcacatgcaggacgtgagagtgctgctgggccacctgctgatggagctgagagagctgagcggccacagaaagcccggcaccaccaaggccaccgccgagtag

SEQ ID NO: 4045 - DNA, 1149 bp, synthetic construct
  misc_feature 1..1149: note = source = /note="Description of Artificial Sequence: Synthetic coding sequence"
  source 1..1149: mol_type = other DNA
atgctgaagaagatcagcgtgggcgtggccggcgacctgaacaccgtgaccatgaagctgggctgcgtgctgatggcctgggccctgtacctgagcctgggcgtgctgtgggtggcccagatgctgctggccgccggctgccacgccgccgccagcttcgagaccctgcagtgcgagggccccgtgtgcaccgaggagagcagctgccacaccgaggacgacctgaccgacgccagagaggccggcttccaggtgaaggcctacaccttcagcgagcccttccacctgatcgtgagctacgactggctgatcctgcagggccccgccaagcccgtgttcgagggcgacctgctggtgctgagatgccaggcctggcaggactggcccctgacccaggtgaccttctacagagacggcagcgccctgggcccccccggccccaacagagagttcagcatcaccgtggtgcagaaggccgacagcggccactaccactgcagcggcatcttccagagccccggccccggcatccccgagaccgccagcgtggtggccatcaccgtgcaggagctgttccccgcccccatcctgagagccgtgcccagcgccgagccccaggccggcagccccatgaccctgagctgccagaccaagctgcccctgcagagaagcgccgccagactgctgttcagcttctacaaggacggcagaatcgtgcagagcagaggcctgagcagcgagttccagatccccaccgccagcgaggaccacagcggcagctactggtgcgaggccgccaccgaggacaaccaggtgtggaagcagagcccccagctggagatcagagtgcagggcgccagcagcagcgccgccccccccaccctgaaccccgccccccagaagagcgccgcccccggcaccgcccccgaggaggcccccggccccctgccccccccccccacccccagcagcgaggaccccggcttcagcagccccctgggcatgcccgacccccacctgtaccaccagatgggcctgctgctgaagcacatgcaggacgtgagagtgctgctgggccacctgctgatggagctgagagagctgagcggccacagaaagcccggcaccaccaaggccaccgccgagtag

SEQ ID NO: 4046 - DNA, 738 bp, synthetic construct
  misc_feature 1..738: note = source = /note="Description of Artificial Sequence: Synthetic coding sequence"
  source 1..738: mol_type = other DNA
atgagcagactgagagccctgctgggcctgggcctgctggtggccggcagcagagtgcccagaatcaagagccagaccatcgcctgcagaagcggccccacctggtggggcccccagagactgaacagcggcggcagatgggacagcgaggtgatggccagcaccgtggtgaagtacctgagccaggaggaggcccaggccgtggaccaggagctgttcaacgagtaccagttcagcgtggaccagctgatggagctggccggcctgagctgcgccaccgccatcgccaaggcctacccccccaccagcatgagcagaagcccccccaccgtgctggtgatctgcggccccggcaacaacggcggcgacggcctggtgtgcgccagacacctgaagctgttcggctacgagcccaccatctactaccccaagagacccaacaagcccctgttcaccgccctggtgacccagtgccagaagatggacatccccttcctgggcgagatgcccgccgagcccatgaccatcgacgagctgtacgagctggtggtggacgccatcttcggcttcagcttcaagggcgacgtgagagagcccttccacagcatcctgagcgtgctgaagggcctgaccgtgcccatcgccagcatcgacatccccagcggcgccggcatccagaaggtgggctggggcagactgggcccctacccccccgacagctgcccccaccaggtgtag

SEQ ID NO: 4047 - DNA, 783 bp, synthetic construct
  misc_feature 1..783: note = source = /note="Description of Artificial Sequence: Synthetic coding sequence"
  source 1..783: mol_type = other DNA
atgagcagactgagagccctgctgggcctgggcctgctggtggccggcagcagagtgcccagaatcaagagccagaccatcgcctgcagaagcggccccacctggtggggcccccagagactgaacagcggcggcagatgggacagcgaggtgatggccagcaccgtggtgaagtacctgagccaggaggaggcccaggccgtggaccaggagctgttcaacgagtaccagttcagcgtggaccagctgatggagctggccggcctgagctgcgccaccgccatcgccaaggcctacccccccaccagcatgagcagaagcccccccaccgtgctggtgatctgcggccccggcaacaacggcggcgacggcctggtgtgcgccagacacctgaagctgttcggctacgagcccaccatctactaccccaagagacccaacaagcccctgttcaccgccctggtgacccagtgccagaagatggacatccccttcctgggcgagatgcccgccgagctgcagggcagatgcagcggcaccgtgccccagcaccccgagtgccccgagggcacccactgcgcccactgccagcacagacacagcctgagaatgggcagaggcgagggcaagtgctggagagaccccgccagactggcccacatcccccacagcccccagaagatctgcaaccccgtgtacagaagcctgcccctgcccggcggcagcttctgcgccacctgcagcggcgaggaggtgcccgccgagcccgccaccctgccctag

SEQ ID NO: 4048 - DNA, 867 bp, synthetic construct
  misc_feature 1..867: note = source = /note="Description of Artificial Sequence: Synthetic coding sequence"
  source 1..867: mol_type = other DNA
atgagcagactgagagccctgctgggcctgggcctgctggtggccggcagcagagtgcccagaatcaagagccagaccatcgcctgcagaagcggccccacctggtggggcccccagagactgaacagcggcggcagatgggacagcgaggtgatggccagcaccgtggtgaagtacctgagccaggaggaggcccaggccgtggaccaggagctgttcaacgagtaccagttcagcgtggaccagctgatggagctggccggcctgagctgcgccaccgccatcgccaaggcctacccccccaccagcatgagcagaagcccccccaccgtgctggtgatctgcggccccggcaacaacggcggcgacggcctggtgtgcgccagacacctgaagctgttcggctacgagcccaccatctactaccccaagagacccaacaagcccctgttcaccgccctggtgacccagtgccagaagatggacatccccttcctgggcgagatgcccgccgagcccatgaccatcgacgagctgtacgagctggtggtggacgccatcttcggcttcagcttcaagggcgacgtgagagagcccttccacagcatcctgagcgtgctgaagggcctgaccgtgcccatcgccagcatcgacatccccagcggctgggacgtggagaagggcaacgccggcggcatccagcccgacctgctgatcagcctgaccgcccccaagaagagcgccacccagttcaccggcagataccactacctgggcggcagattcgtgccccccgccctggagaagaagtaccagctgaacctgcccccctaccccgacaccgagtgcgtgtacagactgcagtag

SEQ ID NO: 4049 - DNA, 879 bp, synthetic construct
  misc_feature 1..879: note = source = /note="Description of Artificial Sequence: Synthetic coding sequence"
  source 1..879: mol_type = other DNA
atgcacctgagactgatcagctggctgttcatcatcctgaacttcatggagtacatcggcagccagaacgccagcagaggcagaagacagagaagaatgcaccccaacgtgagccagggctgccagggcggctgcgccacctgcagcgactacaacggctgcctgagctgcaagcccagactgttcttcgccctggagagaatcggcatgaagcagatcggcgtgtgcctgagcagctgccccagcggctactacggcaccagataccccgacatcaacaagtgcaccaagtgcaaggccgactgcgacacctgcttcaacaagaacttctgcaccaagtgcaagagcggcttctacctgcacctgggcaagtgcctggacaactgccccgagggcctggaggccaacaaccacaccatggagtgcgtgagcatcgtgcactgcgaggtgagcgagtggaacccctggagcccctgcaccaagaagggcaagacctgcggcttcaagagaggcaccgagaccagagtgagagagatcatccagcaccccagcgccaagggcaacctgtgcccccccaccaacgagaccagaaagtgcaccgtgcagagaaagaagtgccagaagggcgagagaggcaagaagggcagagagagaaagagaaagaagcccaacaagggcgagagcaaggaggccatccccgacagcaagagcctggagagcagcaaggagatccccgagcagagagagaacaagcagcagcagaagaagagaaaggtgcaggacaagcagaagagcggcatcgaggtgaccctggccgagggcctgaccagcgtgagccagagaacccagcccaccccctgcagaagaagatacctgtag

SEQ ID NO: 4050 - DNA, 2871 bp, synthetic construct
  misc_feature 1..2871: note = source = /note="Description of Artificial Sequence: Synthetic coding sequence"
  source 1..2871: mol_type = other DNA
atggagacccaggagctgagaggcgccctggccctgctgctgctgtgcttcttcaccagcgccagccaggacctgcaggtgatcgacctgctgaccgtgggcgagagcagacagatggtggccgtggccgagaagatcagaaccgccctgctgaccgccggcgacatctacctgctgagcaccttcagactgccccccaagcagggcggcgtgctgttcggcctgtacagcagacaggacaacaccagatggctggaggccagcgtggtgggcaagatcaacaaggtgctggtgagataccagagagaggacggcaaggtgcacgccgtgaacctgcagcaggccggcctggccgacggcagaacccacaccgtgctgctgagactgagaggccccagcagacccagccccgccctgcacctgtacgtggactgcaagctgggcgaccagcacgccggcctgcccgccctggcccccatcccccccgccgaggtggacggcctggagatcagaaccggccagaaggcctacctgagaatgcagggcttcgtggagagcatgaagatcatcctgggcggcagcatggccagagtgggcgccctgagcgagtgccccttccagggcgacgagagcatccacagcgccgtgaccaacgccctgcacagcatcctgggcgagcagaccaaggccctggtgacccagctgaccctgttcaaccagatcctggtggagctgagagacgacatcagagaccaggtgaaggagatgagcctgatcagaaacaccatcatggagtgccaggtgtgcggcttccacgagcagagaagccactgcagccccaacccctgcttcagaggcgtggactgcatggaggtgtacgagtaccccggctacagatgcggcccctgcccccccggcctgcagggcaacggcacccactgcagcgacatcaacgagtgcgcccacgccgacccctgcttccccggcagcagctgcatcaacaccatgcccggcttccactgcgaggcctgccccagaggctacaagggcacccaggtgagcggcgtgggcatcgactacgccagagccagcaagcaggtgtgcaacgacatcgacgagtgcaacgacggcaacaacggcggctgcgaccccaacagcatctgcaccaacaccgtgggcagcttcaagtgcggcccctgcagactgggcttcctgggcaaccagagccagggctgcctgcccgccagaacctgccacagccccgcccacagcccctgccacatccacgcccactgcctgttcgagagaaacggcgccgtgagctgccagtgcaacgtgggctgggccggcaacggcaacgtgtgcggcaccgacaccgacatcgacggctaccccgaccaggccctgccctgcatggacaacaacaagcactgcaagcaggacaactgcctgctgacccccaacagcggccaggaggacgccgacaacgacggcgtgggcgaccagtgcgacgacgacgccgacggcgacggcatcaagaacgtggaggacaactgcagactgttccccaacaaggaccagcagaacagcgacaccgacagcttcggcgacgcctgcgacaactgccccaacgtgcccaacaacgaccagaaggacaccgacggcaacggcgagggcgacgcctgcgacaacgacgtggacggcgacggcatccccaacggcctggacaactgccccaaggtgcccaaccccctgcagaccgacagagacgaggacggcgtgggcgacgcctgcgacagctgccccgagatgagcaaccccacccagaccgacgccgacagcgacctggtgggcgacgtgtgcgacaccaacgaggacagcgacggcgacggccaccaggacaccaaggacaactgcccccagctgcccaacagcagccagctggacagcgacaacgacggcctgggcgacgagtgcgacggcgacgacgacaacgacggcatccccgactacgtgccccccggccccgacaactgcagactggtgcccaaccccaaccagaaggacagcgacggcaacggcgtgggcgacgtgtgcgaggacgacttcgacaacgacgccgtggtggaccccctggacgtgtgccccgagagcgccgaggtgaccctgaccgacttcagagcctaccagaccgtggtgctggaccccgagggcgacgcccagatcgaccccaactgggtggtgctgaaccagggcatggagatcgtgcagaccatgaacagcgaccccggcctggccgtgggctacaccgccttcaacggcgtggacttcgagggcaccttccacgtgaacaccgtgaccgacgacgactacgccggcttcctgttcagctaccaggacagcggcagattctacgtggtgatgtggaagcagaccgagcagacctactggcaggccacccccttcagagccgtggcccagcccggcctgcagctgaaggccgtgaccagcgtgagcggccccggcgagcacctgagaaacgccctgtggcacaccggccacacccccgaccaggtgagactgctgtggaccgaccccagaaacgtgggctggagagacaagaccagctacagatggcagctgctgcacagaccccaggtgggctacatcagagtgaagctgtacgagggcccccagctggtggccgacagcggcgtgatcatcgacaccagcatgagaggcggcagactgggcgtgttctgcttcagccaggagaacatcatctggagcaacctgcagtacagatgcaacgacaccgtgcccgaggacttcgagcccttcagaagacagctgctgcagggcagagtgtag

SEQ ID NO: 4051 - DNA, 1110 bp, synthetic construct
  misc_feature 1..1110: note = source = /note="Description of Artificial Sequence: Synthetic coding sequence"
  source 1..1110: mol_type = other DNA
atgctgccctggctgctggtgttcagcgccctgggcatccaggcctggggcgacagcagctggaacaagacccaggccaagcaggtgagcgagggcctgcagtacctgttcgagaacatcagccagctgaccgagaaggacgtgagcaccaccgtgagcagaaaggcctggggcgccgaggccgtgggctgcagcatccagctgaccacccccgtgaacgtgctggtgatccaccacgtgcccggcctggagtgccacgaccagaccgtgtgcagccagagactgagagagctgcaggcccaccacgtgcacaacaacagcggctgcgacgtggcctacaacttcctggtgggcgacgacggcagagtgtacgagggcgtgggctggaacatccagggcgtgcacacccagggctacaacaacatcagcctgggcttcgccttcttcggcaccaagaagggccacagccccagccccgccgccctgagcgccatggagaacctgatcacctacgccgtgcagaagggccacctgagcagcagctacgtgcagcccctgctgggcaagggcgagaactgcctggcccccagacagaagaccagcctgaagaaggcctgccccggcgtggtgcccagaagcgtgtggggcgccagagagacccactgccccagaatgaccctgcccgccaagtacggcatcatcatccacaccgccggcagaacctgcaacatcagcgacgagtgcagactgctggtgagagacatccagagcttctacatcgacagactgaagagctgcgacatcggctacaacttcctggtgggccaggacggcgccatctacgagggcgtgggctggaacgtgcagggcagcagcacccccggctacgacgacatcgccctgggcatcaccttcatgggcaccttcaccggcatcccccccaacgccgccgccctggaggccgcccaggacctgatccagtgcgccatggtgaagggctacctgacccccaactacctgctggtgggccacagcgacgtggccagaaccctgagccccggccaggccctgtacaacatcatcagcacctggccccacttcaagcactag

SEQ ID NO: 4052 - DNA, 675 bp, synthetic construct
  misc_feature 1..675: note = source = /note="Description of Artificial Sequence: Synthetic coding sequence"
  source 1..675: mol_type = other DNA
atggagaagatccccttcgtgctgggcggcaacctgcagggcggcgagctggtggtggcctacccctacgacctggtgagaagcccctggaagacccaggagcacacccccacccccgacgaccacgtgttcagatggctggcctacagctacgccagcacccacagactgatgaccgacgccagaagaagagtgtgccacaccgaggacttccagaaggaggagggcaccgtgaacggcgccagctggcacaccgtggccggcagcctgaacgacttcagctacctgcacaccaactgcttcgagctgagcatctacgtgggctgcgacaagtacccccacgagagccagctgcccgaggagtgggagaacaacagagagagcctgatcgtgttcatggagcaggtgcacagaggcatcaagggcctggtgagagacagccacggcaagggcatccccaacgccatcatcagcgtggagggcatcaaccacgacatcagaaccggcagagtgagcctgcagaagctgagcctggcctgcagaagagtgagatgcgccttcgccctgagcagcagcagcaccatgatcgtgagacccccccagccctacggcaccgtgccccacagcagccccgaccccgtgaccaccaagatcagccccctgagaaacttctag

SEQ ID NO: 4053 - DNA, 285 bp, synthetic construct
  misc_feature 1..285: note = source = /note="Description of Artificial Sequence: Synthetic coding sequence"
  source 1..285: mol_type = other DNA
atgcccgtgatcgccggcggcatcctggccgccctgctgctgctgatcgtggtggtgctgtgcctgtacttcaagatccacaacgccctgaaggccgccaaggagcccgaggccgtggccgtgaagaaccacaaccccgacaaggtgtggtgggccaagaacagccaggccaagaccatcgccaccgagagctgccccgccctgcagtgctgcgagggctacagaatgtgcgccagcttcgacagcctgcccccctgctgctgcgacatcaacgagggcctgtag

SEQ ID NO: 4054 - DNA, 285 bp, synthetic construct; identical to SEQ ID NO: 4053
  misc_feature 1..285: note = source = /note="Description of Artificial Sequence: Synthetic coding sequence"
  source 1..285: mol_type = other DNA

SEQ ID NO: 4055 - DNA, 1026 bp, synthetic construct
  misc_feature 1..1026: note = source = /note="Description of Artificial Sequence: Synthetic coding sequence"
  source 1..1026: mol_type = other DNA
atggtgcccgccgccggcgccctgctgtgggtgctgctgctgaacctgggccccagagccgccggcgcccagggcctgacccagacccccaccgagatgcagagagtgagcctgagattcggcggccccatgaccagaagctacagaagcaccgccagaaccggcctgcccagaaagaccagaatcatcctggaggacgagaacgacgccatggccgacgccgacagactggccggccccgccgccgccgagctgctggccgccaccgtgagcaccggcttcagcagaagcagcgccatcaacgaggaggacggcagcagcgaggagggcgtggtgatcaacgccggcaaggacagcaccagcagagagctgcccagcgccacccccaacaccgccggcagcagcagcaccagattcatcgccaacagccaggagcccgagatcagactgaccagcagcctgcccagaagccccggcagaagcaccgaggacctgcccggcagccaggccaccctgagccagtggagcacccccggcagcacccccagcagatggcccagccccagccccaccgccatgcccagccccgaggacctgagactggtgctgatgccctggggcccctggcactgccactgcaagagcggcaccatgagcagaagcagaagcggcaagctgcacggcctgagcggcagactgagagtgggcgccctgagccagctgagaaccgagcacaagccctgcacctaccagcagtgcccctgcaacagactgagagaggagtgccccctggacaccagcctgtgcaccgacaccaactgcgccagccagagcaccaccagcaccagaaccaccaccacccccttccccaccatccacctgagaagcagccccagcctgccccccgccagcccctgccccgccctggccttctggaagagagtgagaatcggcctggaggacatctggaacagcctgagcagcgtgttcaccgagatgcagcccatcgacagaaaccagagatag

SEQ ID NO: 4056 - DNA, 366 bp, synthetic construct
  misc_feature 1..366: note = source = /note="Description of Artificial Sequence: Synthetic coding sequence"
  source 1..366: mol_type = other DNA
atggacgtgctgttcgtggccatcttcgccgtgcccctgatcctgggccaggagtacgaggacgaggagagactgggcgaggacgagtactaccaggtggtgtactactacaccgtgacccccagctacgacgacttcagcgccgacttcaccatcgactacagcatcttcgagagcgaggacagactgaacagactggacaaggacatcaccgaggccatcgagaccaccatcagcctggagaccgccagagccgaccaccccaagcccgtgaccgtgaagcccgtgaccaccgagcccgtggaggagggctgctacgacagcctggacggcagcctggccagaggcaactggaagatcaagtag

SEQ ID NO: 4057 - DNA, 396 bp, synthetic construct
  misc_feature 1..396: note = source = /note="Description of Artificial Sequence: Synthetic coding sequence"
  source 1..396: mol_type = other DNA
atggacgtgctgttcgtggccatcttcgccgtgcccctgatcctgggccaggagtacgaggacgaggagagactgggcgaggacgagtactaccaggtggtgtactactacaccgtgacccccagctacgacgacttcagcgccgacttcaccatcgactacagcatcttcgagagcgaggacagactgaacagactggacaaggacatcaccgaggccatcgagaccaccatcagcctggagaccgccagagccgaccaccccaagcccgtgaccgtgaagcccgtgaccaccgagcccagccccgacctgaacgacgccgtgagcagcctgagaagccccatccccctgctgctgagctgcgccttcgtgcaggtgggcatgtacttcatgtag

SEQ ID NO: 4058 - DNA, 396 bp, synthetic construct; identical to SEQ ID NO: 4057
  misc_feature 1..396: note = source = /note="Description of Artificial Sequence: Synthetic coding sequence"
  source 1..396: mol_type = other DNA

SEQ ID NO: 4059 - DNA, 312 bp, synthetic construct; identical to SEQ ID NO: 3978
  misc_feature 1..312: note = source = /note="Description of Artificial Sequence: Synthetic coding sequence"
  source 1..312: mol_type = other DNA

SEQ ID NO: 4060 - DNA, 312 bp, synthetic construct; identical to SEQ ID NO: 3978
  misc_feature 1..312: note = source = /note="Description of Artificial Sequence: Synthetic coding sequence"
  source 1..312: mol_type = other DNA

SEQ ID NO: 4061 - DNA, 1404 bp, synthetic construct
  misc_feature 1..1404: note = source = /note="Description of Artificial Sequence: Synthetic coding sequence"
  source 1..1404: mol_type = other DNA
atgctgggcatctggatcgtggccttcctgttcttcggcaccagcagaggcaaggaggtgtgctacgagagactgggctgcttcaaggacggcctgccctggaccagaaccttcagcaccgagctggtgggcctgccctggagccccgagaagatcaacaccagattcctgctgtacaccatccacaaccccaacgcctaccaggagatcagcgccgtgaacagcagcaccatccaggccagctacttcggcaccgacaagatcaccagaatcaacatcgccggctggaagaccgacggcaagtggcagagagacatgtgcaacgtgctgctgcagctggaggacatcaactgcatcaacctggactggatcaacggcagcagagagtacatccacgccgtgaacaacctgagagtggtgggcgccgaggtggcctacttcatcgacgtgctgatgaagaagttcgagtacagccccagcaaggtgcacctgatcggccacagcctgggcgcccacctggccggcgaggccggcagcagaatccccggcctgggcagaatcaccggcctggaccccgccggccccttcttccacaacacccccaaggaggtgagactggaccccagcgacgccaacttcgtggacgtgatccacaccaacgccgccagaatcctgttcgagctgggcgtgggcaccatcgacgcctgcggccacctggacttctaccccaacggcggcaagcacatgcccggctgcgaggacctgatcacccccctgctgaagttcaacttcaacgcctacaagaaggagatggccagcttcttcgactgcaaccacgccagaagctaccagttctacgccgagagcatcctgaaccccgacgccttcatcgcctacccctgcagaagctacaccagcttcaaggccggcaactgcttcttctgcagcaaggagggctgccccaccatgggccacttcgccgacagattccacttcaagaacatgaagaccaacggcagccactacttcctgaacaccggcagcctgagccccttcgccagatggagacacaagctgagcgtgaagctgagcggcagcgaggtgacccagggcaccgtgttcctgagagtgggcggcgccgtgagaaagaccggcgagttcgccatcgtgagcggcaagctggagcccggcatgacctacaccaagctgatcgacgccgacgtgaacgtgggcaacatcaccagcgtgcagttcatctggaagaagcacctgttcgaggacagccagaacaagctgggcgccgagatggtgatcaacaccagcggcaagtacggctacaagagcaccttctgcagccaggacatcatgggccccaacatcctgcagaacctgaagccctgctag

SEQ ID NO: 4062 - DNA, 1287 bp, synthetic construct
  misc_feature 1..1287: note = source = /note="Description of Artificial Sequence: Synthetic coding sequence"
  source 1..1287: mol_type = other DNA
atgatcaccggcgtgttcagcatgagactgtggacccccgtgggcgtgctgaccagcctggcctactgcctgcaccagagaagagtggccctggccgagctgcaggaggccgacggccagtgccccgtggacagaagcctgctgaagctgaagatggtgcaggtggtgttcagacacggcgccagaagccccctgaagcccctgcccctggaggagcaggtggagtggaacccccagctgctggaggtgcccccccagacccagttcgactacaccgtgaccaacctggccggcggccccaagccctacagcccctacgacagccagtaccacgagaccaccctgaagggcggcatgttcgccggccagctgaccaaggtgggcatgcagcagatgttcgccctgggcgagagactgagaaagaactacgtggaggacatccccttcctgagccccaccttcaacccccaggaggtgttcatcagaagcaccaacatcttcagaaacctggagagcaccagatgcctgctggccggcctgttccagtgccagaaggagggccccatcatcatccacaccgacgaggccgacagcgaggtgctgtaccccaactaccagagctgctggagcctgagacagagaaccagaggcagaagacagaccgccagcctgcagcccggcatcagcgaggacctgaagaaggtgaaggacagaatgggcatcgacagcagcgacaaggtggacttcttcatcctgctggacaacgtggccgccgagcaggcccacaacctgcccagctgccccatgctgaagagattcgccagaatgatcgagcagagagccgtggacaccagcctgtacatcctgcccaaggaggacagagagagcctgcagatggccgtgggccccttcctgcacatcctggagagcaacctgctgaaggccgtggacagcgccaccgcccccgacaagatcagaaagctgtacctgtacgccgcccacgacgtgaccttcatccccctgctgatgaccctgggcatcttcgaccacaagtggccccccttcgccgtggacctgaccatggagctgtaccagcacctggagagcaaggagtggttcgtgcagctgtactaccacggcaaggagcaggtgcccagaggctgccccgacggcctgtgccccctggacatgttcctgaacgccatgagcgtgtacaccctgagccccgagaagtaccacgccctgtgcagccagacccaggtgatggaggtgggcaacgaggagtag

SEQ ID NO: 4063 - DNA, 711 bp, synthetic construct; identical to SEQ ID NO: 4020
  misc_feature 1..711: note = source = /note="Description of Artificial Sequence: Synthetic coding sequence"
  source 1..711: mol_type = other DNA

SEQ ID NO: 4064 - DNA, 990 bp, synthetic construct
  misc_feature 1..990: note = source = /note="Description of Artificial Sequence: Synthetic coding sequence"
  source 1..990: mol_type = other DNA
atggtgaccaaggccttcgtgctgctggccatcttcgccgaggccagcgccaagagctgcgcccccaacaaggccgacgtgatcctggtgttctgctaccccaagaccatcatcaccaagatccccgagtgcccctacggctgggaggtgcaccagctggccctgggcggcctgtgctacaacggcgtgcacgagggcggctactaccagttcgtgatccccgacctgagccccaagaacaagagctactgcggcacccagagcgagtacaagccccccatctaccacttctacagccacatcgtgagcaacgacaccaccgtgatcgtgaagaaccagcccgtgaactacagcttcagctgcacctaccacagcacctacctggtgaaccaggccgccttcgaccagagagtggccaccgtgcacgtgaagaacggcagcatgggcaccttcgagagccagctgagcctgaacttctacaccaacgccaagttcagcatcaagaaggaggcccccttcgtgctggaggccagcgagatcggcagcgacctgttcgccggcgtggaggccaagggcctgagcatcagattcaaggtggtgctgaacagctgctgggccacccccagcgccgacttcatgtaccccctgcagtggcagctgatcaacaagggctgccccaccgacgagaccgtgctggtgcacgagaacggcagagaccacagagccaccttccagttcaacgccttcagattccagaacatccccaagctgagcaaggtgtggctgcactgcgagaccttcatctgcgacagcgagaagctgagctgccccgtgacctgcgacaagagaaagagactgctgagagaccagaccggcggcgtgctggtggtggagctgagcctgagaagcagaggcttcagcagcctgtacagcttcagcgacgtgctgcaccacctgatcatgatgctgggcatctgcgccgtgctgtag

SEQ ID NO: 4065 - DNA, 1161 bp, synthetic construct
  misc_feature 1..1161: note = source = /note="Description of Artificial Sequence: Synthetic coding sequence"
  source 1..1161: mol_type = other DNA
atggcccagtggcactgcagccagagaacccaggccggcggccacggcgtgggcgagagactggcccagtgccaggaccagagcagcagacacgccgccgagctgagagacttcaagaacaagatgctgcccctgctggaggtggccgagaaggagagagaggccctgagaaccgaggccgacaccatcagcggcagagtggacagactggagagagaggtggactacctggagacccagaaccccgccctgccctgcgtggagttcgacgagaaggtgaccggcggccccggcaccaagggcaagggcagaagaaacgagaagtacgacatggtgaccgactgcggctacaccatcagccaggtgagaagcatgaagatcctgaagagattcggcggccccgccggcctgtggaccaaggaccccctgggccagaccgagaagatctacgtgctggacggcacccagaacgacaccgccttcgtgttccccagactgagagacttcaccctggccatggccgccagaaaggccagcagagtgagagtgcccttcccctgggtgggcaccggccagctggtgtacggcggcttcctgtacttcgccagaagaccccccggcagacccggcggcggcggcgagatggagaacaccctgcagctgatcaagttccacctggccaacagaaccgtggtggacagcagcgtgttccccgccgagggcctgatccccccctacggcctgaccgccgacacctacatcgacctggccgccgacgaggagggcctgtgggccgtgtacgccaccagagaggacgacagacacctgtgcctggccaagctggacccccagaccctggacaccgagcagcagtgggacaccccctgccccagagagaacgccgaggccgccttcgtgatctgcggcaccctgtacgtggtgtacaacaccagacccgccagcagagccagaatccagtgcagcttcgacgccagcggcaccctgacccccgagagagccgccctgccctacttccccagaagatacggcgcccacgccagcctgagatacaaccccagagagagacagctgtacgcctgggacgacggctaccagatcgtgtacaagctggagatgagaaagaaggaggaggaggtgtag

SEQ ID NO: 4066 - DNA, 510 bp, synthetic construct
  misc_feature 1..510: note = source = /note="Description of Artificial Sequence: Synthetic coding sequence"
  source 1..510: mol_type = other DNA
atgagcgagagagtggagagaaactggagcaccggcggctggctgctggccctgtgcctggcctggctgtggacccacctgaccctggccgccctgcagccccccaccgccaccgtgctggtgcagcagggcacctgcgaggtgatcgccgcccacagatgctgcaacagaaacagaatcgaggagagaagccagaccgtgaagtgcagctgcttcagcggccaggtggccggcaccaccagagccaagcccagctgcgtggacgacctgctgctggccgcccactgcgccagaagagaccccagagccgccctgagactgctgctgccccagccccccagcagctgcagagacggcggcgtgagatggagccccgcctgcagaggcagaagcgtgagatgcagcagaacctgcagagacggcgccgccgccgtggacaccaagagcaagccccccagaagccacgacagcagctggggcagcagacccggccaggagagactggactag

SEQ ID NO: 4067 - DNA, 693 bp, synthetic construct; identical to SEQ ID NO: 3999
  misc_feature 1..693: note = source = /note="Description of Artificial Sequence: Synthetic coding sequence"
  source 1..693: mol_type = other DNA

SEQ ID NO: 4068 - DNA, 1176 bp, synthetic construct
  misc_feature 1..1176: note = source = /note="Description of Artificial Sequence: Synthetic coding sequence"
  source 1..1176: mol_type = other DNA
atgctgagacccggcggcgccgaggaggccgcccagctgcccctgagaagagccagcgcccccgtgcccgtgcccagccccgccgcccccgacggcagcagagccagcgccagactgggcctggcctgcctgctgctgctgctgctgctgaccctgcccgccagagtggacaccagctggtggtacatcggcgccctgggcgccagagtgatctgcgacaacatccccggcctggtgagcagacagagacagctgtgccagagataccccgacatcatgagaagcgtgggcgagggcgccagagagtggatcagagagtgccagcaccagttcagacaccacagatggaactgcaccaccctggacagagaccacaccgtgttcggcagagtgatgctgagaagcagcagagaggccgccttcgtgtacgccatcagcagcgccggcgtggtgcacgccatcaccagagcctgcagccagggcgagctgagcgtgtgcagctgcgacccctacaccagaggcagacaccacgaccagagaggcgacttcgactggggcggctgcagcgacaacatccactacggcgtgagattcgccaaggccttcgtggacgccaaggagaagagactgaaggacgccagagccctgatgaacctgcacaacaacagatgcggcagaaccgccgtgagaagattcctgaagctggagtgcaagtgccacggcgtgagcggcagctgcaccctgagaacctgctggagagccctgagcgacttcagaagaaccggcgactacctgagaagaagatacgacggcgccgtgcaggtgatggccacccaggacggcgccaacttcaccgccgccagacagggctacagaagagccaccagaaccgacctggtgtacttcgacaacagccccgactactgcgtgctggacaaggccgccggcagcctgggcaccgccggcagagtgtgcagcaagaccagcaagggcaccgacggctgcgagatcatgtgctgcggcagaggctacgacaccaccagagtgaccagagtgacccagtgcgagtgcaagttccactggtgctgcgccgtgagatgcaaggagtgcagaaacaccgtggacgtgcacacctgcaaggcccccaagaaggccgagtggctggaccagacctag

SEQ ID NO: 4069 - DNA, 1119 bp, synthetic construct
  misc_feature 1..1119: note = source = /note="Description of Artificial Sequence: Synthetic coding sequence"
  source 1..1119: mol_type = other DNA
atgctggacggcctgggcgtggtggccatcagcatcttcggcatccagctgaagaccgagggcagcctgagaaccgccgtgcccggcatccccacccagagcgccttcaacaagtgcctgcagagatacatcggcgccctgggcgccagagtgatctgcgacaacatccccggcctggtgagcagacagagacagctgtgccagagataccccgacatcatgagaagcgtgggcgagggcgccagagagtggatcagagagtgccagcaccagttcagacaccacagatggaactgcaccaccctggacagagaccacaccgtgttcggcagagtgatgctgagaagcagcagagaggccgccttcgtgtacgccatcagcagcgccggcgtggtgcacgccatcaccagagcctgcagccagggcgagctgagcgtgtgcagctgcgacccctacaccagaggcagacaccacgaccagagaggcgacttcgactggggcggctgcagcgacaacatccactacggcgtgagattcgccaaggccttcgtggacgccaaggagaagagactgaaggacgccagagccctgatgaacctgcacaacaacagatgcggcagaaccgccgtgagaagattcctgaagctggagtgcaagtgccacggcgtgagcggcagctgcaccctgagaacctgctggagagccctgagcgacttcagaagaaccggcgactacctgagaagaagatacgacggcgccgtgcaggtgatggccacccaggacggcgccaacttcaccgccgccagacagggctacagaagagccaccagaaccgacctggtgtacttcgacaacagccccgactactgcgtgctggacaaggccgccggcagcctgggcaccgccggcagagtgtgcagcaagaccagcaagggcaccgacggctgcgagatcatgtgctgcggcagaggctacgacaccaccagagtgaccagagtgacccagtgcgagtgcaagttccactggtgctgcgccgtgagatgcaaggagtgcagaaacaccgtggacgtgcacacctgcaaggcccccaagaaggccgagtggctggaccagacctag

SEQ ID NO: 4070 - DNA, 1242 bp, synthetic construct
  misc_feature 1..1242: note = source = /note="Description of Artificial Sequence: Synthetic coding sequence"
  source 1..1242: mol_type = other DNA
atggagaacatgctgctgtggctgatcttcttcacccccggctggaccctgatcgacggcagcgagatggagtgggacttcatgtggcacctgagaaaggtgcccagaatcgtgagcgagagaaccttccacctgaccagccccgccttcgaggccgacgccaagatgatggtgaacaccgtgtgcggcatcgagtgccagaaggagctgcccacccccagcctgagcgagctggaggactacctgagctacgagaccgtgttcgagaacggcaccagaaccctgaccagagtgaaggtgcaggacctggtgctggagcccacccagaacatcaccaccaagggcgtgagcgtgagaagaaagagacaggtgtacggcaccgacagcagattcagcatcctggacaagagattcctgaccaacttccccttcagcaccgccgtgaagctgagcaccggctgcagcggcatcctgatcagcccccagcacgtgctgaccgccgcccactgcgtgcacgacggcaaggactacgtgaagggcagcaagaagctgagagtgggcctgctgaagatgagaaacaagagcggcggcaagaagagaagaggcagcaagagaagcagaagagaggccagcggcggcgaccagagagagggcaccagagagcacctgagagagagagccaagggcggcagaagaagaaagaagagcggcagaggccagagaatcgccgagggcagacccagcttccagtggaccagagtgaagaacacccacatccccaagggctgggccagaggcggcatgggcgacgccaccctggactacgactacgccctgctggagctgaagagagcccacaagaagaagtacatggagctgggcatcagccccaccatcaagaagatgcccggcggcatgatccacttcagcggcttcgacaacgacagagccgaccagctggtgtacagattctgcagcgtgagcgacgagagcaacgacctgctgtaccagtactgcgacgccgagagcggcagcaccggcagcggcgtgtacctgagactgaaggaccccgacaagaagaactggaagagaaagatcatcgccgtgtacagcggccaccagtgggtggacgtgcacggcgtgcagaaggactacaacgtggccgtgagaatcacccccctgaagtacgcccagatctgcctgtggatccacggcaacgacgccaactgcgcctacggctag

SEQ ID NO: 4071 - DNA, 1143 bp, synthetic construct
  misc_feature 1..1143: note = source = /note="Description of Artificial Sequence: Synthetic coding sequence"
  source 1..1143: mol_type = other DNA
atgggcgccaccaccatggaccagaagagcctgtgggccggcagcgcctacaagctggtgtgctacttcaccaactggagccaggacagacaggagcccggcaagttcacccccgagaacatcgaccccttcctgtgcagccacctgatctacagcttcgccagcatcgagaacaacaaggtgatcatcaaggacaagagcgaggtgatgctgtaccagaccatcaacagcctgaagaccaagaaccccaagctgaagatcctgctgagcatcggcggctacctgttcggcagcaagggcttccaccccatggtggacagcagcaccagcagactggagttcatcaacagcatcatcctgttcctgagaaaccacaacttcgacggcctggacgtgagctggatctaccccgaccagaaggagaacacccacttcaccgtgctgatccacgagctggccgaggccttccagaaggacttcaccaagagcaccaaggagagactgctgctgaccgccggcgtgagcgccggcagacagatgatcgacaacagctaccaggtggagaagctggccaaggacctggacttcatcaacctgctgagcttcgacttccacggcagctgggagaagcccctgatcaccggccacaacagccccctgagcaagggctggcaggacagaggccccagcagctactacaacgtggagtacgccgtgggctactggatccacaagggcatgcccagcgagaaggtggtgatgggcatccccacctacggccacagcttcaccctggccagcgccgagaccaccgtgggcgcccccgccagcggccccggcgccgccggccccatcaccgagagcagcggcttcctggcctactacgagatctgccagttcctgaagggcgccaagatcaccagactgcaggaccagcaggtgccctacgccgtgaagggcaaccagtgggtgggctacgacgacgtgaagagcatggagaccaaggtgcagttcctgaagaacctgaacctgggcggcgccatgatctggagcatcgacatggacgacttcaccggcaagagctgcaaccagggcccctaccccctggtgcaggccgtgaagagaagcctgggcagcctgtag

SEQ ID NO: 4072 - DNA, 1173 bp, synthetic construct
  misc_feature 1..1173: note = source = /note="Description of Artificial Sequence: Synthetic coding sequence"
  source 1..1173: mol_type = other DNA
atgggcgccaccaccatggaccagaagagcctgtgggccggcgtggtggtgctgctgctgctgcagggcggcagcgcctacaagctggtgtgctacttcaccaactggagccaggacagacaggagcccggcaagttcacccccgagaacatcgaccccttcctgtgcagccacctgatctacagcttcgccagcatcgagaacaacaaggtgatcatcaaggacaagagcgaggtgatgctgtaccagaccatcaacagcctgaagaccaagaaccccaagctgaagatcctgctgagcatcggcggctacctgttcggcagcaagggcttccaccccatggtggacagcagcaccagcagactggagttcatcaacagcatcatcctgttcctgagaaaccacaacttcgacggcctggacgtgagctggatctaccccgaccagaaggagaacacccacttcaccgtgctgatccacgagctggccgaggccttccagaaggacttcaccaagagcaccaaggagagactgctgctgaccgccggcgtgagcgccggcagacagatgatcgacaacagctaccaggtggagaagctggccaaggacctggacttcatcaacctgctgagcttcgacttccacggcagctgggagaagcccctgatcaccggccacaacagccccctgagcaagggctggcaggacagaggccccagcagctactacaacgtggagtacgccgtgggctactggatccacaagggcatgcccagcgagaaggtggtgatgggcatccccacctacggccacagcttcaccctggccagcgccgagaccaccgtgggcgcccccgccagcggccccggcgccgccggccccatcaccgagagcagcggcttcctggcctactacgagatctgccagttcctgaagggcgccaagatcaccagactgcaggaccagcaggtgccctacgccgtgaagggcaaccagtgggtgggctacgacgacgtgaagagcatggagaccaaggtgcagttcctgaagaacctgaacctgggcggcgccatgatctggagcatcgacatggacgacttcaccggcaagagctgcaaccagggcccctaccccctggtgcaggccgtgaagagaagcctgggcagcctgtag

SEQ ID NO: 4073 - DNA, 2202 bp, synthetic construct
  misc_feature 1..2202: note = source = /note="Description of Artificial Sequence: Synthetic coding sequence"
  source 1..2202: mol_type = other DNA
atggccggcggcagagagacctgcctgcccctgatcggcttcatcctgatctgcctgaagatggtggccagcgccaagagcgcccccgagatccccaccatcgaccaggcctacagcaagctgagcaacagcatcaccgtggagtgggccaccgtgcccggcgccaccagctacctgctgaccgccgaggacggcgacaccgtgatcgagaccaccgtggccaacagccccggcaccgtgaccggcctgaaggccgccacctggtacgagatcaccatcagaagcatcagcgccgccggcagaagccaggccagcccccccaagcaggccaagaccgtgctggccgcccccatcctggaggtgagcagccccagcagcgacagcatcctggtgcagtgggaggccgtgtacatggccatcgccttcagcgtgagcatcatgagagccaacggcctgggcagcatctggaaggagaacaccaccaacaccagcctgaccttcaccagcctggaggccggcaccctgtacaccatcaaggcctacgcctggaacgccaacagaatccccggcgacgacagcacctgcaaccagagaaccagccccagagcccccgccaacatccaggtgagcttcgacagcggcgccctgaaggccagcttcagctgggccagagccgagggcgccttcaactacaccgtgatggccctgagcgacagcagcgagctgacctgcagcaccaccttcagcagctgcaccatcagcagcctgcagtgcggcaccgagtacctgatcagcgtgctggccagcaacgacgccggcagcagcaagagcagcagcgccatgaccctgaagaccgtggcctgcgcccccggcagagtgaccatccaggaggacccccccggccacctgagcgtggcctggagcagcgtggacctgggcgactactacgtggtgttcgtgaagagcgacgacggcctggaggtgcactgcaacaccagcctgacccagtgcaacttcctgagcgagtgcggcttcacctacttcatcagcgtgttcgtgtacaacaaggccggccagagccccctgggcgacatcttcaactacaccaccgccccctgctgccccagcgacatcaaccccgtgctggtgagcagcgacagagtggagatcgtgtggagccccgtgagaggcgccgagctgtacgagaccaaggccgtggacggctacaacatggtggagtgcaacgacaccacccccgcctgcaccctgagcgccctggagtgcgacaccaagtacaacatcaccgtgtacagcttcaacgaggtgagaggcagcaacatgagctgcaccccccagttcatcaccaccgccccctgcagccccgagatcaagaacgtgagcagagacgccttcagcatgatcaacgtgcactggagaagcaccaacgacgacgccacctacaccgtgaccgcccagggcgagaagggcctgtaccagtgcagcagcaccggcgagagctgcaccatgagaggcctgccctgcggcagcgtgttcagcgtgaccgccgtggccgagacccaggccggcagaagcctgcccagctacagcgtgcccctggagaccgtgccctgctgccccaccggcctgaccgtgacccagatcacccagagcgtgatcaacgtgagctggaccatcggcagagtggcccagacccacgtggccgtgctggagagccacaccggccagagcaagtgccacacccaccagaaccactgcctgctgggctgcatcacctgcggcatcaactacaccgtgaccctgaaggccatcagcgccaccggcctgaccgccgactgcagctaccagagctacttcagcggcgcctgctgccccctgggcgtgaagctgtacagactgggccccaacggcatcagaatctactggcaggccagcagaggcagcgccaactacagcaccgacctgtacggcagcaagggcatcttcacctgcacccccagcgccggcctgagcttctgcgacgtgaccgagatcccctgcggcgacgtgtacaccgtgatggtgagccccgtggccaagaccggcctgaagctgaccttctgccccaagaagatctacagcgtgacctgcagcggcagcaccctgggcatggtgatctacagaggcaagagaaacgaggagtag

SEQ ID NO: 4074 - DNA, 555 bp, synthetic construct
  misc_feature 1..555: note = source = /note="Description of Artificial Sequence: Synthetic coding sequence"
  source 1..555: mol_type = other DNA
atgagaggccagggcagaaaggagagcctgagcgacagcagagacctggacggcagctacgaccagctgaccgacagcgtggacgacgagttcgagctgagcaccgtgtgccacagacccgagggcctggagcagctgcaggagcagaccaagttcaccagaaaggagctgcaggtgctgtacagaggcttcaagaacgagtgccccagcggcatcgtgaacgaggagaacttcaagcagatctacagccagttcttcccccagggcgacagcagcacctacgccaccttcctgttcaacgccttcgacaccaaccacgacggcagcgtgagcttcgaggagatgctggacatcatgaagagcatctacgacatgatgggcaagtacacctaccccgccctgagagaggaggcccccagagagcacgtggagagcttcttccagaagatggacagaaacaaggacggcgtggtgaccatcgaggagttcatcgagagctgccagaaggacgagaacatcatgagaagcatgcagctgttcgacaacgtgatctag

SEQ ID NO: 4075 - DNA, 759 bp, synthetic construct
  misc_feature 1..759: note = source = /note="Description of Artificial Sequence: Synthetic coding sequence"
  source 1..759: mol_type = other DNA
atgagaggccagggcagaaaggagagcctgagcgacagcagagacctggacggcagctacgaccagctgaccggccacccccccggccccaccaagaaggccctgaagcagagattcctgaagctgctgccctgctgcggcccccaggccctgcccagcgtgagcgagagcaacgtggacgacgagttcgagctgagcaccgtgtgccacagacccgagggcctggagcagctgcaggagcagaccaagttcaccagaaaggagctgcaggtgctgtacagaggcttcaagaacgagtgccccagcggcatcgtgaacgaggagaacttcaagcagatctacagccagttcttcccccagggcgacagcagcacctacgccaccttcctgttcaacgccttcgacaccaaccacgacggcagcgtgagcttcgaggacttcgtggccggcctgagcgtgatcctgagaggcaccgtggacgacagactgaactgggccttcaacctgtacgacctgaacaaggacggctgcatcaccaaggaggagatgctggacatcatgaagagcatctacgacatgatgggcaagtacacctaccccgccctgagagaggaggcccccagagagcacgtggagagcttcttccagaagatggacagaaacaaggacggcgtggtgaccatcgaggagttcatcgagagctgccagaaggacgagaacatcatgagaagcatgcagctgttcgacaacgtgatctag

SEQ ID NO: 4076 - DNA, 1377 bp, synthetic construct
  misc_feature 1..1377: note = source = /note="Description of Artificial Sequence: Synthetic coding sequence"
  source 1..1377: mol_type = other DNA
atgcaggccaccagcaacctgctgaacctgctgctgctgagcctgttcgccggcctggaccccagcaagacccagatcagccccaaggagggctggcaggtgtacagcagcgcccaggaccccgacggcagatgcatctgcaccgtggtggcccccgagcagaacctgtgcagcagagacgccaagagcagacagctgagacagctgctggagaaggtgcagaacatgagccagagcatcgaggtgctgaacctgagaacccagagagacttccagtacgtgctgaagatggagacccagatgaagggcctgaaggccaagttcagacagatcgaggacgacagaaagaccctgatgaccaagcacttccaggagctgaaggagaagatggacgagctgctgcccctgatccccgtgctggagcagtacaagaccgacgccaagctgatcacccagttcaaggaggagatcagaaacctgagcgccgtgctgaccggcatccaggaggagatcggcgcctacgactacgaggagctgcaccagagagtgctgagcctggagaccagactgagagactgcatgaagaagctgacctgcggcaagctgatgaagatcaccggccccgtgaccgtgaagaccagcggcaccagattcggcgcctggatgaccgaccccctggccagcgagaagaacaacagagtgtggtacatggacagctacaccaacaacaagatcgtgagagagtacaagagcatcgccgacttcgtgagcggcgccgagagcagaacctacaacctgcccttcaagtgggccggcaccaaccacgtggtgtacaacggcagcctgtacttcaacaagtaccagagcaacatcatcatcaagtacagcttcgacatgggcagagtgctggcccagagaagcctggagtacgccggcttccacaacgtgtacccctacacctggggcggcttcagcgacatcgacctgatggccgacgagatcggcctgtgggccgtgtacgccaccaaccagaacgccggcaacatcgtgatcagccagctgaaccaggacaccctggaggtgatgaagagctggagcaccggctaccccaagagaagcgccggcgagagcttcatgatctgcggcaccctgtacgtgaccaacagccacctgaccggcgccaaggtgtactacagctacagcaccaagaccagcacctacgagtacaccgacatccccttccacaaccagtacttccacatcagcatgctggactacaacgccagagacagagccctgtacgcctggaacaacggccaccaggtgctgttcaacgtgaccctgttccacatcatcaagaccgaggacgacacctag

SEQ ID NO: 4077 - DNA, 915 bp, synthetic construct
  misc_feature 1..915: note = source = /note="Description of Artificial Sequence: Synthetic coding sequence"
  source 1..915: mol_type = other DNA
atgctgcccccccccagacccgccgccgccctggccctgcccgtgctgctgctgctgctggtggtgctgacccccccccccaccggcgccagacccagccccggccccgactacctgagaagaggctggatgagactgctggccgagggcgagggctgcgccccctgcagacccgaggagtgcgccgcccccagaggctgcctggccggcagagtgagagacgcctgcggctgctgctgggagtgcgccaacctggagggccagctgtgcgacctggaccccagcgcccacttctacggccactgcggcgagcagctggagtgcagactggacaccggcggcgacctgagcagaggcgaggtgcccgagcccctgtgcgcctgcagaagccagagccccctgtgcggcagcgacggccacacctacagccagatctgcagactgcaggaggccgccagagccagacccgacgccaacctgaccgtggcccaccccggcccctgcgagagcggcccccagatcgtgagccacccctacgacacctggaacgtgaccggccaggacgtgatcttcggctgcgaggtgttcgcctaccccatggccagcatcgagtggagaaaggacggcctggacatccagctgcccggcgacgacccccacatcagcgtgcagttcagaggcggcccccagagattcgaggtgaccggctggctgcagatccaggccgtgagacccagcgacgagggcacctacagatgcctgggcagaaacgccctgggccaggtggaggcccccgccagcctgaccgtgctgacccccgaccagctgaacagcaccggcatcccccagctgagaagcctgaacctggtgcccgaggaggaggccgagagcgaggagaacgacgactactactag

SEQ ID NO: 4078 - DNA, 327 bp, synthetic construct
  misc_feature 1..327: note = source = /note="Description of Artificial Sequence: Synthetic coding sequence"
  source 1..327: mol_type = other DNA
atgacccccagcagactgccctggctgctgagctgggtgagcgccaccgcctggagagccgccagaagccccctgctgtgccacagcctgagaaagaccagcagcagccagggcggcaagagcgagctggtgaagcagagcctgaagaagcccaagctgcccgagggcagattcgacgcccccgaggacagccacctggagaaggagcccctggagaagttccccgacgacgtgaaccccgtgaccaaggagaagggcggccccagaggccccgagcccaccagatacggcgactgggagagaaagggcagatgcatcgacttctag

SEQ ID NO: 4079 - DNA, 663 bp, synthetic construct
  misc_feature 1..663: note = source = /note="Description of Artificial Sequence: Synthetic coding sequence"
  source 1..663: mol_type = other DNA
atggccggcctgagcagaggcagcgccagagccctgctggccgccctgctggccagcaccctgctggccctgctggtgagccccgccagaggcagaggcggcagagaccacggcgactgggacgaggccagcagactgccccccctgccccccagagaggacgccgccagagtggccagattcgtgacccacgtgagcgactggggcgccctggccaccatcagcaccctggaggccgtgagaggcagacccttcgccgacgtgctgagcctgagcgacggcccccccggcgccggcagcggcgtgccctacttctacctgagccccctgcagctgagcgtgagcaacctgcaggagaacccctacgccaccctgaccatgaccctggcccagaccaacttctgcaagaagcacggcttcgacccccagagccccctgtgcgtgcacatcatgctgagcggcaccgtgaccaaggtgaacgagaccgagatggacatcgccaagcacagcctgttcatcagacaccccgagatgaagacctggcccagcagccacaactggttcttcgccaagctgaacatcaccaacatctgggtgctggactacttcggcggccccaagatcgtgacccccgaggagtactacaacgtgaccgtgcagtag

SEQ ID NO: 4080 - DNA, 2760 bp, synthetic construct
  misc_feature 1..2760: note = source = /note="Description of Artificial Sequence: Synthetic coding sequence"
  source 1..2760: mol_type = other DNA
atgggcctgttcagaggcttcgtgttcctgctggtgctgtgcctgctgcaccagagcaacaccagcttcatcaagctgaacaacaacggcttcgaggacatcgtgatcgtgatcgaccccagcgtgcccgaggacgagaagatcatcgagcagatcgaggacatggtgaccaccgccagcacctacctgttcgaggccaccgagaagagattcttcttcaagaacgtgagcatcctgatccccgagaactggaaggagaacccccagtacaagagacccaagcacgagaaccacaagcacgccgacgtgatcgtggccccccccaccctgcccggcagagacgagccctacaccaagcagttcaccgagtgcggcgagaagggcgagtacatccacttcacccccgacctgctgctgggcaagaagcagaacgagtacggcccccccggcaagctgttcgtgcacgagtgggcccacctgagatggggcgtgttcgacgagtacaacgaggaccagcccttctacagagccaagagcaagaagatcgaggccaccagatgcagcgccggcatcagcggcagaaacagagtgtacaagtgccagggcggcagctgcctgagcagagcctgcagaatcgacagcaccaccaagctgtacggcaaggactgccagttcttccccgacaaggtgcagaccgagaaggccagcatcatgttcatgcagagcatcgacagcgtggtggagttctgcaacgagaagacccacaaccaggaggcccccagcctgcagaacatcaagtgcaacttcagaagcacctgggaggtgatcagcaacagcgaggacttcaagaacaccatccccatggtgacccccccccccccccccgtgttcagcctgctgaagatcagccagagaatcgtgtgcctggtgctggacaagagcggcagcatgggcggcaaggacagactgaacagaatgaaccaggccgccaagcacttcctgctgcagaccgtggagaacggcagctgggtgggcatggtgcacttcgacagcaccgccaccatcgtgaacaagctgatccagatcaagagcagcgacgagagaaacaccctgatggccggcctgcccacctaccccctgggcggcaccagcatctgcagcggcatcaagtacgccttccaggtgatcggcgagctgcacagccagctggacggcagcgaggtgctgctgctgaccgacggcgaggacaacaccgccagcagctgcatcgacgaggtgaagcagagcggcgccatcgtgcacttcatcgccctgggcagagccgccgacgaggccgtgatcgagatgagcaagatcaccggcggcagccacttctacgtgagcgacgaggcccagaacaacggcctgatcgacgccttcggcgccctgaccagcggcaacaccgacctgagccagaagagcctgcagctggagagcaagggcctgaccctgaacagcaacgcctggatgaacgacaccgtgatcatcgacagcaccgtgggcaaggacaccttcttcctgatcacctggaacagcctgccccccagcatcagcctgtgggaccccagcggcaccatcatggagaacttcaccgtggacgccaccagcaagatggcctacctgagcatccccggcaccgccaaggtgggcacctgggcctacaacctgcaggccaaggccaaccccgagaccctgaccatcaccgtgaccagcagagccgccaacagcagcgtgccccccatcaccgtgaacgccaagatgaacaaggacgtgaacagcttccccagccccatgatcgtgtacgccgagatcctgcagggctacgtgcccgtgctgggcgccaacgtgaccgccttcatcgagagccagaacggccacaccgaggtgctggagctgctggacaacggcgccggcgccgacagcttcaagaacgacggcgtgtacagcagatacttcaccgcctacaccgagaacggcagatacagcctgaaggtgagagcccacggcggcgccaacaccgccagactgaagctgagaccccccctgaacagagccgcctacatccccggctgggtggtgaacggcgagatcgaggccaacccccccagacccgagatcgacgaggacacccagaccaccctggaggacttcagcagaaccgccagcggcggcgccttcgtggtgagccaggtgcccagcctgcccctgcccgaccagtacccccccagccagatcaccgacctggacgccaccgtgcacgaggacaagatcatcctgacctggaccgcccccggcgacaacttcgacgtgggcaaggtgcagagatacatcatcagaatcagcgccagcatcctggacctgagagacagcttcgacgacgccctgcaggtgaacaccaccgacctgagccccaaggaggccaacagcaaggagagcttcgccttcaagcccgagaacatcagcgaggagaacgccacccacatcttcatcgccatcaagagcatcgacaagagcaacctgaccagcaaggtgagcaacatcgcccaggtgaccctgttcatcccccaggccaaccccgacgacatcgaccccacccccacccccacccccacccccacccccgacaagagccacaacagcggcgtgaacatcagcaccctggtgctgagcgtgatcggcagcgtggtgatcgtgaacttcatcctgagcaccaccatctag

SEQ ID NO: 4081 - DNA, 1938 bp, synthetic construct
  misc_feature 1..1938: note = source = /note="Description of Artificial Sequence: Synthetic coding sequence"
  source 1..1938: mol_type = other DNA
atggcccccagcgccgaccccggcatgagcagaatgctgcccttcctgctgctgctgtggttcctgcccatcaccgagggcagccagagagccgagcccatgttcaccgccgtgaccaacagcgtgctgccccccgactacgacagcaaccccacccagctgaactacggcgtggccgtgaccgacgtggaccacgacggcgacttcgagatcgtggtggccggctacaacggccccaacctggtgctgaagtacgacagagcccagaagagactggtgaacatcgccgtggacgagagaagcagcccctactacgccctgagagacagacagggcaacgccatcggcgtgaccgcctgcgacatcgacggcgacggcagagaggagatctacttcctgaacaccaacaacgccttcagcggcgtggccacctacaccgacaagctgttcaagttcagaaacaacagatgggaggacatcctgagcgacgaggtgaacgtggccagaggcgtggccagcctgttcgccggcagaagcgtggcctgcgtggacagaaagggcagcggcagatacagcatctacatcgccaactacgcctacggcaacgtgggccccgacgccctgatcgagatggaccccgaggccagcgacctgagcagaggcatcctggccctgagagacgtggccgccgaggccggcgtgagcaagtacaccggcggcagaggcgtgagcgtgggccccatcctgagcagcagcgccagcgacatcttctgcgacaacgagaacggccccaacttcctgttccacaacagaggcgacggcaccttcgtggacgccgccgccagcgccggcgtggacgacccccaccagcacggcagaggcgtggccctggccgacttcaacagagacggcaaggtggacatcgtgtacggcaactggaacggcccccacagactgtacctgcagatgagcacccacggcaaggtgagattcagagacatcgccagccccaagttcagcatgcccagccccgtgagaaccgtgatcaccgccgacttcgacaacgaccaggagctggagatcttcttcaacaacatcgcctacagaagcagcagcgccaacagactgttcagagtgatcagaagagagcacggcgaccccctgatcgaggagctgaaccccggcgacgccctggagcccgagggcagaggcaccggcggcgtggtgaccgacttcgacggcgacggcatgctggacctgatcctgagccacggcgagagcatggcccagcccctgagcgtgttcagaggcaaccagggcttcaacaacaactggctgagagtggtgcccagaaccagattcggcgccttcgccagaggcgccaaggtggtgctgtacaccaagaagagcggcgcccacctgagaatcatcgacggcggcagcggctacctgtgcgagatggagcccgtggcccacttcggcctgggcaaggacgaggccagcagcgtggaggtgacctggcccgacggcaagatggtgagcagaaacgtggccagcggcgagatgaacagcgtgctggagatcctgtaccccagagacgaggacaccctgcaggaccccgcccccctggagtgcggccagggcttcagccagcaggagaacggccactgcatggacaccaacgagtgcatccagttccccttcgtgtgccccagagacaagcccgtgtgcgtgaacacctacggcagctacagatgcagaaccaacaagaagtgcagcagaggctacgagcccaacgaggacggcaccgcctgcgtggcccaggtggccttcctgggcggctacagcagcgccgccagcagaatcagcgagcccctgagcagagccagctacctgagcctgggcctgggcctgtgcctgcagctgtacgccctgtag

SEQ ID NO: 4082 - DNA, 1986 bp, synthetic construct
  misc_feature 1..1986: note = source = /note="Description of Artificial Sequence: Synthetic coding sequence"
  source 1..1986: mol_type = other DNA
atggcccccagcgccgaccccggcatgagcagaatgctgcccttcctgctgctgctgtggttcctgcccatcaccgagggcagccagagagccgagcccatgttcaccgccgtgaccaacagcgtgctgccccccgactacgacagcaaccccacccagctgaactacggcgtggccgtgaccgacgtggaccacgacggcgacttcgagatcgtggtggccggctacaacggccccaacctggtgctgaagtacgacagagcccagaagagactggtgaacatcgccgtggacgagagaagcagcccctactacgccctgagagacagacagggcaacgccatcggcgtgaccgcctgcgacatcgacggcgacggcagagaggagatctacttcctgaacaccaacaacgccttcagcggcgtggccacctacaccgacaagctgttcaagttcagaaacaacagatgggaggacatcctgagcgacgaggtgaacgtggccagaggcgtggccagcctgttcgccggcagaagcgtggcctgcgtggacagaaagggcagcggcagatacagcatctacatcgccaactacgcctacggcaacgtgggccccgacgccctgatcgagatggaccccgaggccagcgacctgagcagaggcatcctggccctgagagacgtggccgccgaggccggcgtgagcaagtacaccggcggcagaggcgtgagcgtgggccccatcctgagcagcagcgccagcgacatcttctgcgacaacgagaacggccccaacttcctgttccacaacagaggcgacggcaccttcgtggacgccgccgccagcgccggcgtggacgacccccaccagcacggcagaggcgtggccctggccgacttcaacagagacggcaaggtggacatcgtgtacggcaactggaacggcccccacagactgtacctgcagatgagcacccacggcaaggtgagattcagagacatcgccagccccaagttcagcatgcccagccccgtgagaaccgtgatcaccgccgacttcgacaacgaccaggagctggagatcttcttcaacaacatcgcctacagaagcagcagcgccaacagactgttcagagtgatcagaagagagcacggcgaccccctgatcgaggagctgaaccccggcgacgccctggagcccgagggcagaggcaccggcggcgtggtgaccgacttcgacggcgacggcatgctggacctgatcctgagccacggcgagagcatggcccagcccctgagcgtgttcagaggcaaccagggcttcaacaacaactggctgagagtggtgcccagaaccagattcggcgccttcgccagaggcgccaaggtggtgctgtacaccaagaagagcggcgcccacctgagaatcatcgacggcggcagcggctacctgtgcgagatggagcccgtggcccacttcggcctgggcaaggacgaggccagcagcgtggaggtgacctggcccgacggcaagatggtgagcagaaacgtggccagcggcgagatgaacagcgtgctggagatcctgtaccccagagacgaggacaccctgcaggaccccgcccccctggagtgcggccagggcttcagccagcaggagaacggccactgcatggacaccaacgagtgcatccagttccccttcgtgtgccccagagacaagcccgtgtgcgtgaacacctacggcagctacagatgcagaaccaacaagaagtgcagcagaggctacgagcccaacgaggacggcaccgcctgcgtgggcaccctgggccagagccccggccccagacccaccacccccaccgccgccgccgccaccgccgccgccgccgccgccgccggcgccgccaccgccgcccccgtgctggtggacggcgacctgaacctgggcagcgtggtgaaggagagctgcgagcccagctgctag

SEQ ID NO: 4083 - DNA, 1230 bp, synthetic construct
  misc_feature 1..1230: note = source = /note="Description of Artificial Sequence: Synthetic coding sequence"
  source 1..1230: mol_type = other DNA
atggccctgacccccggctggggcagcagcgccggccccgtgagacccgagctgtggctgctgctgtgggccgccgcctggagactgggcgccagcgcctgccccgccctgtgcacctgcaccggcaccaccgtggactgccacggcaccggcctgcaggccatccccaagaacatccccagaaacaccgagagactggagctgaacggcaacaacatcaccagaatccacaagaacgacttcgccggcctgaagcagctgagagtgctgcagctgatggagaaccagatcggcgccgtggagagaggcgccttcgacgacatgaaggagctggagagactgagactgaacagaaaccagctgcacatgctgcccgagctgctgttccagaacaaccaggccctgagcagactggacctgagcgagaacgccatccaggccatccccagaaaggccttcagaggcgccaccgacctgaagaacctgcagctggacaagaaccagatcagctgcatcgaggagggcgccttcagagccctgagaggcctggaggtgctgaccctgaacaacaacaacatcaccaccatccccgtgagcagcttcaaccacatgcccaagctgagaaccttcagactgcacagcaaccacctgttctgcgactgccacctggcctggctgagccagtggctgagacagagacccaccatcggcctgttcacccagtgcagcggccccgccagcctgagaggcctgaacgtggccgaggtgcagaagagcgagttcagctgcagcggccagggcgaggccggcagagtgcccacctgcaccctgagcagcggcagctgccccgccatgtgcacctgcagcaacggcatcgtggactgcagaggcaagggcctgaccgccatccccgccaacctgcccgagaccatgaccgagatcagactggagctgaacggcatcaagagcatcccccccggcgccttcagcccctacagaaagctgagaagaatcgacctgagcaacaaccagatcgccgagatcgcccccgacgccttccagggcctgagaagcctgaacagcctgcacaccggccccgtgacctgcccccacaccaccggcacccacagcagccactgcagagccttcgccgtggccgtgccccacagcagaaacgacctggaggccatgttcgaggaggaggtgcccagaatcttctacagcgcctag

SEQ ID NO: 4084 - DNA, 1143 bp, synthetic construct
  misc_feature 1..1143: note = source = /note="Description of Artificial Sequence: Synthetic coding sequence"
  source 1..1143: mol_type = other DNA
atggccctgacccccggctggggcagcagcgccggccccgtgagacccgagctgtggctgctgctgtgggccgccgcctggagactgggcgccagcgcctgccccgccctgtgcacctgcaccggcaccaccgtggactgccacggcaccggcctgcaggccatccccaagaacatccccagaaacaccgagagactggagctgaacggcaacaacatcaccagaatccacaagaacgacttcgccggcctgaagcagctgagagtgctgcagctgatggagaaccagatcggcgccgtggagagaggcgccttcgacgacatgaaggagctggagagactggacctgagcgagaacgccatccaggccatccccagaaaggccttcagaggcgccaccgacctgaagaacctgcagctggacaagaaccagatcagctgcatcgaggagggcgccttcagagccctgagaggcctggaggtgctgaccctgaacaacaacaacatcaccaccatccccgtgagcagcttcaaccacatgcccaagctgagaaccttcagactgcacagcaaccacctgttctgcgactgccacctggcctggctgagccagtggctgagacagagacccaccatcggcctgttcacccagtgcagcggccccgccagcctgagaggcctgaacgtggccgaggtgcagaagagcgagttcagctgcagcggccagggcgaggccggcagagtgcccacctgcaccctgagcagcggcagctgccccgccatgtgcacctgcagcaacggcatcgtggactgcagaggcaagggcctgaccgccatccccgccaacctgcccgagaccatgaccgagatcagactggagctgaacggcatcaagagcatcccccccggcgccttcagcccctacagaaagctgagaagaatcgacctgagcaacaaccagatcgccgagatcgcccccgacgccttccagggcctgagaagcctgaacagcctggtgctgtacggcaacaagatcaccgacctgcccagaggcgtgttcggcggcctgtacaccctgcagctgctgctgctgaacgccaacaagatcaactgcatcagacccgacgccttccaggacctgtag

SEQ ID NO: 4085 - DNA, 2448 bp, synthetic construct
  misc_feature 1..2448: note = source = /note="Description of Artificial Sequence: Synthetic coding sequence"
  source 1..2448: mol_type = other DNA
atggccctgacccccggctggggcagcagcgccggccccgtgagacccgagctgtggctgctgctgtgggccgccgcctggagactgggcgccagcgcctgccccgccctgtgcacctgcaccggcaccaccgtggactgccacggcaccggcctgcaggccatccccaagaacatccccagaaacaccgagagactggagctgaacggcaacaacatcaccagaatccacaagaacgacttcgccggcctgaagcagctgagagtgctgcagctgatggagaaccagatcggcgccgtggagagaggcgccttcgacgacatgaaggagctggagagactgagactgaacagaaaccagctgcacatgctgcccgagctgctgttccagaacaaccaggccctgagcagactggacctgagcgagaacgccatccaggccatccccagaaaggccttcagaggcgccaccgacctgaagaacctgcagctggacaagaaccagatcagctgcatcgaggagggcgccttcagagccctgagaggcctggaggtgctgaccctgaacaacaacaacatcaccaccatccccgtgagcagcttcaaccacatgcccaagctgagaaccttcagactgcacagcaaccacctgttctgcgactgccacctggcctggctgagccagtggctgagacagagacccaccatcggcctgttcacccagtgcagcggccccgccagcctgagaggcctgaacgtggccgaggtgcagaagagcgagttcagctgcagcggccagggcgaggccggcagagtgcccacctgcaccctgagcagcggcagctgccccgccatgtgcacctgcagcaacggcatcgtggactgcagaggcaagggcctgaccgccatccccgccaacctgcccgagaccatgaccgagatcagactggagctgaacggcatcaagagcatcccccccggcgccttcagcccctacagaaagctgagaagaatctgccccctgagcttctgcagcccctgcagagacctgagcaacaaccagatcgccgagatcgcccccgacgccttccagggcctgagaagcctgaacagcctggtgctgtacggcaacaagatcaccgacctgcccagaggcgtgttcggcggcctgtacaccctgcagctgctgctgctgaacgccaacaagatcaactgcatcagacccgacgccttccaggacctgcagaacctgagcctgctgagcctgtacgacaacaagatccagagcctggccaagggcaccttcaccagcctgagagccatccagaccctgcacctggcccagaaccccttcatctgcgactgcaacctgaagtggctggccgacttcctgagaaccaaccccatcgagaccagcggcgccagatgcgccagccccagaagactggccaacaagagaatcggccagatcaagagcaagaagttcagatgcagcgccaaggagcagtacttcatccccggcaccgaggactaccagctgaacagcgagtgcaacagcgacgtggtgtgcccccacaagtgcagatgcgaggccaacgtggtggagtgcagcagcctgaagctgaccaagatccccgagagaatcccccagagcaccgccgagctgagactgaacaacaacgagatcagcatcctggaggccaccggcatgttcaagaagctgacccacctgaagaagatcaacctgagcaacaacaaggtgagcgagatcgaggacggcgccttcgagggcgccgccagcgtgagcgagctgcacctgaccgccaaccagctggagagcatcagaagcggcatgttcagaggcctggacggcctgagaaccctgatgctgagaaacaacagaatcagctgcatccacaacgacagcttcaccggcctgagaaacgtgagactgctgagcctgtacgacaaccagatcaccaccgtgagccccggcgccttcgacaccctgcagagcctgagcaccctgaacctgctggccaaccccttcaactgcaactgccagctggcctggctgggcggctggctgagaaagagaaagatcgtgaccggcaaccccagatgccagaaccccgacttcctgagacagatccccctgcaggacgtggccttccccgacttcagatgcgaggagggccaggaggagggcggctgcctgcccagaccccagtgcccccaggagtgcgcctgcctggacaccgtggtgagatgcagcaacaagcacctgagagccctgcccaagggcatccccaagaacgtgaccgagctgtacctggacggcaaccagttcaccctggtgcccggccagctgagcaccttcaagtacctgcagctggtgatcctgagctacaacgccctgcagtgcatcccccccctggccttccagtag

SEQ ID NO: 4086 - DNA, 4386 bp, synthetic construct
  misc_feature 1..4386: note = source = /note="Description of Artificial Sequence: Synthetic coding sequence"
  source 1..4386: mol_type = other DNA
atggccctgacccccggctggggcagcagcgccggccccgtgagacccgagctgtggctgctgctgtgggccgccgcctggagactgggcgccagcgcctgccccgccctgtgcacctgcaccggcaccaccgtggactgccacggcaccggcctgcaggccatccccaagaacatccccagaaacaccgagagactggagctgaacggcaacaacatcaccagaatccacaagaacgacttcgccggcctgaagcagctgagagtgctgcagctgatggagaaccagatcggcgccgtggagagaggcgccttcgacgacatgaaggagctggagagactgagactgaacagaaaccagctgcacatgctgcccgagctgctgttccagaacaaccaggccctgagcagactggacctgagcgagaacgccatccaggccatccccagaaaggccttcagaggcgccaccgacctgaagaacctgcagctggacaagaaccagatcagctgcatcgaggagggcgccttcagagccctgagaggcctggaggtgctgaccctgaacaacaacaacatcaccaccatccccgtgagcagcttcaaccacatgcccaagctgagaaccttcagactgcacagcaaccacctgttctgcgactgccacctggcctggctgagccagtggctgagacagagacccaccatcggcctgttcacccagtgcagcggccccgccagcctgagaggcctgaacgtggccgaggtgcagaagagcgagttcagctgcagcggccagggcgaggccggcagagtgcccacctgcaccctgagcagcggcagctgccccgccatgtgcacctgcagcaacggcatcgtggactgcagaggcaagggcctgaccgccatccccgccaacctgcccgagaccatgaccgagatcagactggagctgaacggcatcaagagcatcccccccggcgccttcagcccctacagaaagctgagaagaatcgacctgagcaacaaccagatcgccgagatcgcccccgacgccttccagggcctgagaagcctgaacagcctggtgctgtacggcaacaagatcaccgacctgcccagaggcgtgttcggcggcctgtacaccctgcagctgctgctgctgaacgccaacaagatcaactgcatcagacccgacgccttccaggacctgcagaacctgagcctgctgagcctgtacgacaacaagatccagagcctggccaagggcaccttcaccagcctgagagccatccagaccctgcacctggcccagaaccccttcatctgcgactgcaacctgaagtggctggccgacttcctgagaaccaaccccatcgagaccagcggcgccagatgcgccagccccagaagactggccaacaagagaatcggccagatcaagagcaagaagttcagatgcagcgccaaggagcagtacttcatccccggcaccgaggactaccagctgaacagcgagtgcaacagcgacgtggtgtgcccccacaagtgcagatgcgaggccaacgtggtggagtgcagcagcctgaagctgaccaagatccccgagagaatcccccagagcaccgccgagctgagactgaacaacaacgagatcagcatcctggaggccaccggcatgttcaagaagctgacccacctgaagaagatcaacctgagcaacaacaaggtgagcgagatcgaggacggcgccttcgagggcgccgccagcgtgagcgagctgcacctgaccgccaaccagctggagagcatcagaagcggcatgttcagaggcctggacggcctgagaaccctgatgctgagaaacaacagaatcagctgcatccacaacgacagcttcaccggcctgagaaacgtgagactgctgagcctgtacgacaaccagatcaccaccgtgagccccggcgccttcgacaccctgcagagcctgagcaccctgaacctgctggccaaccccttcaactgcaactgccagctggcctggctgggcggctggctgagaaagagaaagatcgtgaccggcaaccccagatgccagaaccccgacttcctgagacagatccccctgcaggacgtggccttccccgacttcagatgcgaggagggccaggaggagggcggctgcctgcccagaccccagtgcccccaggagtgcgcctgcctggacaccgtggtgagatgcagcaacaagcacctgagagccctgcccaagggcatccccaagaacgtgaccgagctgtacctggacggcaaccagttcaccctggtgcccggccagctgagcaccttcaagtacctgcagctggtggacctgagcaacaacaagatcagcagcctgagcaacagcagcttcaccaacatgagccagctgaccaccctgatcctgagctacaacgccctgcagtgcatcccccccctggccttccagggcctgagaagcctgagactgctgagcctgcacggcaacgacatcagcaccctgcaggagggcatcttcgccgacgtgaccagcctgagccacctggccatcggcgccaaccccctgtactgcgactgccacctgagatggctgagcagctgggtgaagaccggctacaaggagcccggcatcgccagatgcgccggcccccaggacatggagggcaagctgctgctgaccacccccgccaagaagttcgagtgccagggcccccccaccctggccgtgcaggccaagtgcgacctgtgcctgagcagcccctgccagaaccagggcacctgccacaacgaccccctggaggtgtacagatgcgcctgccccagcggctacaagggcagagactgcgaggtgagcctggacagctgcagcagcggcccctgcgagaacggcggcacctgccacgcccaggagggcgaggacgcccccttcacctgcagctgccccaccggcttcgagggccccacctgcggcgtgaacaccgacgactgcgtggaccacgcctgcgccaacggcggcgtgtgcgtggacggcgtgggcaactacacctgccagtgccccctgcagtacgagggcaaggcctgcgagcagctggtggacctgtgcagccccgacctgaacccctgccagcacgaggcccagtgcgtgggcacccccgacggccccagatgcgagtgcatgcccggctacgccggcgacaactgcagcgagaaccaggacgactgcagagaccacagatgccagaacggcgcccagtgcatggacgaggtgaacagctacagctgcctgtgcgccgagggctacagcggccagctgtgcgagatccccccccacctgcccgcccccaagagcccctgcgagggcaccgagtgccagaacggcgccaactgcgtggaccagggcaacagacccgtgtgccagtgcctgcccggcttcggcggccccgagtgcgagaagctgctgagcgtgaacttcgtggacagagacacctacctgcagttcaccgacctgcagaactggcccagagccaacatcaccctgcaggtgagcaccgccgaggacaacggcatcctgctgtacaacggcgacaacgaccacatcgccgtggagctgtaccagggccacgtgagagtgagctacgaccccggcagctaccccagcagcgccatctacagcgccgagaccatcaacgacggccagttccacaccgtggagctggtggccttcgaccagatggtgaacctgagcatcgacggcggcagccccatgaccatggacaacttcggcaagcactacaccctgaacagcgaggcccccctgtacgtgggcggcatgcccgtggacgtgaacagcgccgccttcagactgtggcagatcctgaacggcaccggcttccacggctgcatcagaaacctgtacatcaacaacgagctgcaggacttcaccaagacccagatgaagcccggcgtggtgcccggctgcgagccctgcagaaagctgtactgcctgcacggcatctgccagcccaacgccacccccggccccatgtgccactgcgaggccggctgggtgggcctgcactgcgaccagcccgccgacggcccctgccacggccacaagtgcgtgcacggccagtgcgtgcccctggacgccctgagctacagctgccagtgccaggacggctacagcggcgccctgtgcaaccagagccccagcgccggcggcaccctgagcggcaccttcaccagaagcagaggcgccatgcccagcgccagacccagagccccctgccacggctggagcgccggcgccagagcccaggccagagccgccgccagagccttcggctag

SEQ ID NO: 4087 - DNA, 570 bp, synthetic construct
  misc_feature 1..570: note = source = /note="Description of Artificial Sequence: Synthetic coding sequence"
  source 1..570: mol_type = other DNA
atggaggccaccggcaccgacgaggtggacaagctgaagaccaagttcatcagcgcctggaacaacatgaagtacagctgggtgctgaagaccaagacctacttcagcagaaacagccccgtgctgctgctgggcaagtgctaccacttcaagtacgaggacgaggacaagaccctgcccgccgagagcggctgcaccatcgaggaccacgtgatcgccggcaacgtggaggagttcagaaaggacttcatcagcagaatctggctgacctacagagaggagttcccccagatcgagggcagcgccctgaccaccgactgcggctggggctgcaccctgagaaccggccagatgctgctggcccagggcctgatcctgcacttcctgggcagagcctggacctggcccgacgccctgaacatcgagaacagcgacagcgagagctggaccagccacaccgtgaagaagttcaccgccagcttcgaggccagcctgagcggcgagagagagttcaagacccccaccatcagcctgaaggagaccatcggcaagtacagcgacgaccactag

SEQ ID NO: 4088 - DNA, 1377 bp, synthetic construct; identical to SEQ ID NO: 3771
  misc_feature 1..1377: note = source = /note="Description of Artificial Sequence: Synthetic coding sequence"
  source 1..1377: mol_type = other DNA

SEQ ID NO: 4089 - DNA, 8178 bp, synthetic construct
  misc_feature 1..8178: note = source = /note="Description of Artificial Sequence: Synthetic coding sequence"
  source 1..8178: mol_type = other DNA
atggagcagaccgactgcaagccctaccagcccctgcccaaggtgaagcacgagatggacctggcctacaccagcagcagcgacgagagcgaggacggcagaaagcccagacagagctacaacagcagagagaccctgcacgagtacaaccaggagctgagaatgaactacaacagccagagcagaaagagaaaggaggtggagaagagcacccaggagatggagttctgcgagaccagccacaccctgtgcagcggctaccagaccgacatgcacagcgtgagcagacacggctaccagctggagatgggcagcgacgtggacaccgagaccgagggcgccgccagccccgaccacgccctgagaatgtggatcagaggcatgaagagcgagcacagcagctgcctgagcagcagagccaacagcgccctgagcctgaccgacaccgaccacgagagaaagagcgacggcgagaacggcttcaagttcagccccgtgtgctgcgacatggaggcccaggccggcagcacccaggacgtgcagagcagcccccacaaccagttcaccttcagacccctgccccccccccccccccccccccacgcctgcacctgcgccagaaagcccccccccgccgccgacagcctgcagagaagaagcatgaccaccagaagccagcccagccccgccgcccccgccccccccaccagcacccaggacagcgtgcacctgcacaacagctgggtgctgaacagcaacatccccctggagaccagacacttcctgttcaagcacggcagcggcagcagcgccatcttcagcgccgccagccagaactaccccctgaccagcaacaccgtgtacagccccccccccagacccctgcccagaagcaccttcagcagacccgccttcaccttcaacaagccctacagatgctgcaactggaagtgcaccgccctgagcgccaccgccatcaccgtgaccctggccctgctgctggcctacgtgatcgccgtgcacctgttcggcctgacctggcagctgcagcccgtggagggcgagctgtacgccaacggcgtgagcaagggcaacagaggcaccgagagcatggacaccacctacagccccatcggcggcaaggtgagcgacaagagcgagaagaaggtgttccagaagggcagagccatcgacaccggcgaggtggacatcggcgcccaggtgatgcagaccatcccccccggcctgttctggagattccagatcaccatccaccaccccatctacctgaagttcaacatcagcctggccaaggacagcctgctgggcatctacggcagaagaaacatcccccccacccacacccagttcgacttcgtgaagctgatggacggcaagcagctggtgaagcaggacagcaagggcagcgacgacacccagcacagccccagaaacctgatcctgaccagcctgcaggagaccggcttcatcgagtacatggaccagggcccctggtacctggccttctacaacgacggcaagaagatggagcaggtgttcgtgctgaccaccgccatcgagatcatggacgactgcagcaccaactgcaacggcaacggcgagtgcatcagcggccactgccactgcttccccggcttcctgggccccgactgcgccagagacagctgccccgtgctgtgcggcggcaacggcgagtacgagaagggccactgcgtgtgcagacacggctggaagggccccgagtgcgacgtgcccgaggagcagtgcatcgaccccacctgcttcggccacggcacctgcatcatgggcgtgtgcatctgcgtgcccggctacaagggcgagatctgcgaggaggaggactgcctggaccccatgtgcagcaaccacggcatctgcgtgaagggcgagtgccactgcagcaccggctggggcggcgtgaactgcgagacccccctgcccgtgtgccaggagcagtgcagcggccacggcaccttcctgctggacgccggcgtgtgcagctgcgaccccaagtggaccggcagcgactgcagcaccgagctgtgcaccatggagtgcggcagccacggcgtgtgcagcagaggcatctgccagtgcgaggagggctgggtgggccccacctgcgaggagagaagctgccacagccactgcaccgagcacggccagtgcaaggacggcaagtgcgagtgcagccccggctgggagggcgaccactgcaccatcgcccactacctggacgccgtgagagacggctgccccggcctgtgcttcggcaacggcagatgcaccctggaccagaacggctggcactgcgtgtgccaggtgggctggagcggcaccggctgcaacgtggtgatggagatgctgtgcggcgacaacctggacaacgacggcgacggcctgaccgactgcgtggaccccgactgctgccagcagagcaactgctacatcagccccctgtgccagggcagccccgaccccctggacctgatccagcagagccagaccctgttcagccagcacaccagcagactgttctacgacagaatcaagttcctgatcggcaaggacagcacccacgtgatcccccccgaggtgagcttcgacagcagaagagcctgcgtgatcagaggccaggtggtggccatcgacggcacccccctggtgggcgtgaacgtgagcttcctgcaccacagcgactacggcttcaccatcagcagacaggacggcagcttcgacctggtggccatcggcggcatcagcgtgatcctgatcttcgacagaagccccttcctgcccgagaagagaaccctgtggctgccctggaaccagttcatcgtggtggagaaggtgaccatgcagagagtggtgagcgacccccccagctgcgacatcagcaacttcatcagccccaaccccatcgtgctgcccagccccctgaccagcttcggcggcagctgccccgagagaggcaccatcgtgcccgagctgcaggtggtgcaggaggagatccccatccccagcagcttcgtgagactgagctacctgagcagcagaacccccggctacaagaccctgctgagaatcctgctgacccacagcaccatccccgtgggcatgatcaaggtgcacctgaccgtggccgtggagggcagactgacccagaagtggttccccgccgccatcaacctggtgtacaccttcgcctggaacaagaccgacatctacggccagaaggtgtggggcctggccgaggccctggtgagcgtgggctacgagtacgagacctgccccgacttcatcctgtgggagcagagaaccgtggtgctgcagggcttcgagatggacgccagcaacctgggcggctggagcctgaacaagcaccacatcctgaacccccagagcggcatcatccacaagggcaacggcgagaacatgttcatcagccagcagccccccgtgatcagcaccatcatgggcaacggccaccagagaagcgtggcctgcaccaactgcaacggccccgcccacaacaacaagctgttcgcccccgtggccctggccagcggccccgacggcagcgtgtacgtgggcgacttcaacttcgtgagaagaatcttccccagcggcaacagcgtgagcatcctggagctgagcaccagccccgcccacaagtactacctggccatggaccccgtgagcgagagcctgtacctgagcgacaccaacaccagaaaggtgtacaagctgaagagcctggtggagaccaaggacctgagcaagaacttcgaggtggtggccggcaccggcgaccagtgcctgcccttcgaccagagccactgcggcgacggcggcagagccagcgaggccagcctgaacagccccagaggcatcaccgtggacagacacggcttcatctacttcgtggacggcaccatgatcagaaagatcgacgagaacgccgtgatcaccaccgtgatcggcagcaacggcctgaccagcacccagcccctgagctgcgacagcggcatggacatcacccaggtgagactggagtggcccaccgacctggccgtgaaccccatggacaacagcctgtacgtgctggacaacaacatcgtgctgcagatcagcgagaacagaagagtgagaatcatcgccggcagacccatccactgccaggtgcccggcatcgaccacttcctggtgagcaaggtggccatccacagcaccctggagagcgccagagccatcagcgtgagccacagcggcctgctgttcatcgccgagaccgacgagagaaaggtgaacagaatccagcaggtgaccaccaacggcgagatctacatcatcgccggcgcccccaccgactgcgactgcaagatcgaccccaactgcgactgcttcagcggcgacggcggctacgccaaggacgccaagatgaaggcccccagcagcctggccgtgagccccgacggcaccctgtacgtggccgacctgggcaacgtgagaatcagaaccatcagcagaaaccaggcccacctgaacgacatgaacatctacgagatcgccagccccgccgaccaggagctgtaccagttcaccgtgaacggcacccacctgcacaccctgaacctgatcaccagagactacgtgtacaacttcacctacaacagcgagggcgacctgggcgccatcaccagcagcaacggcaacagcgtgcacatcagaagagacgccggcggcatgcccctgtggctggtggtgcccggcggccaggtgtactggctgaccatcagcagcaacggcgtgctgaagagagtgagcgcccagggctacaacctggccctgatgacctaccccggcaacaccggcctgctggccaccaagagcaacgagaacggctggaccaccgtgtacgagtacgaccccgagggccacctgaccaacgccaccttccccaccggcgaggtgagcagcttccacagcgacctggagaagctgaccaaggtggagctggacaccagcaacagagagaacgtgctgatgagcaccaacctgaccgccaccagcaccatctacatcctgaagcaggagaacacccagagcacctacagagtgaaccccgacggcagcctgagagtgaccttcgccagcggcatggagatcggcctgagcagcgagccccacatcctggccggcgccgtgaaccccaccctgggcaagtgcaacatcagcctgcccggcgagcacaacgccaacctgatcgagtggagacagagaaaggagcagaacaagggcaacgtgagcgccttcgagagaagactgagagcccacaacagaaacctgctgagcatcgacttcgaccacatcaccagaaccggcaagatctacgacgaccacagaaagttcaccctgagaatcctgtacgaccagaccggcagacccatcctgtggagccccgtgagcagatacaacgaggtgaacatcacctacagccccagcggcctggtgaccttcatccagagaggcacctggaacgagaagatggagtacgaccagagcggcaagatcatcagcagaacctgggccgacggcaagatctggagctacacctacctggagaagagcgtgatgctgctgctgcacagccagagaagatacatcttcgagtacgaccagcccgactgcctgctgagcgtgaccatgcccagcatggtgagacacagcctgcagaccatgctgagcgtgggctactacagaaacatctacaccccccccgacagcagcaccagcttcatccaggactacagcagagacggcagactgctgcagaccctgcacctgggcaccggcagaagagtgctgtacaagtacaccaagcaggccagactgagcgaggtgctgtacgacaccacccaggtgaccctgacctacgaggagagcagcggcgtgatcaagaccatccacctgatgcacgacggcttcatctgcaccatcagatacagacagaccggccccctgatcggcagacagatcttcagattcagcgaggagggcctggtgaacgccagattcgactacagctacaacaacttcagagtgaccagcatgcaggccgtgatcaacgagacccccctgcccatcgacctgtacagatacgtggacgtgagcggcagaaccgagcagttcggcaagttcagcgtgatcaactacgacctgaaccaggtgatcaccaccaccgtgatgaagcacaccaagatcttcagcgccaacggccaggtgatcgaggtgcagtacgagatcctgaaggccatcgcctactggatgaccatccagtacgacaacgtgggcagaatggtgatctgcgacatcagagtgggcgtggacgccaacatcaccagatacttctacgagtacgacgccgacggccagctgcagaccgtgagcgtgaacgacaagacccagtggagatacagctacgacctgaacggcaacatcaacctgctgagccacggcaagagcgccagactgacccccctgagatacgacctgagagacagaatcaccagactgggcgagatccagtacaagatggacgaggacggcttcctgagacagagaggcaacgacatcttcgagtacaacagcaacggcctgctgcagaaggcctacaacaaggccagcggctggaccgtgcagtactactacgacggcctgggcagaagagtggccagcaagagcagcctgggccagcacctgcagttcttctacgccgacctgaccaaccccatcagagtgacccacctgtacaaccacaccagcagcgagatcaccagcctgtactacgacctgcagggccacctgatcgccatggagctgagcagcggcgaggagtactacgtggcctgcgacaacaccggcacccccctggccgtgttcagcagcagaggccaggtgatcaaggagatcctgtacaccccctacggcgacatctaccacgacacctaccccgacttccaggtgatcatcggcttccacggcggcctgtacgacttcctgaccaagctggtgcacctgggccagagagactacgacgtggtggccggcagatggaccacccccaaccaccacatctggaagcagctgaacctgctgcccaagcccttcaacctgtacagcttcgagaacaactaccccgtgggcaagatccaggacgtggccaagtacaccaccgacatcagaagctggctggagctgttcggcttccagctgcacaacgtgctgcccggcttccccaagcccgagctggagaacctggagctgacctacgagctgctgagactgcagaccaagacccaggagtgggaccccggcaagaccatcctgggcatccagtgcgagctgcagaagcagctgagaaacttcatcagcctggaccagctgcccatgacccccagatacaacgacggcagatgcctggagggcggcaagcagcccagattcgccgccgtgcccagcgtgttcggcaagggcatcaagttcgccatcaaggacggcatcgtgaccgccgacatcatcggcgtggccaacgaggacagcagaagactggccgccatcctgaacaacgcccactacctggagaacctgcacttcaccatcgagggcagagacacccactacttcatcaagctgggcagcctggaggaggacctggtgctgatcggcaacaccggcggcagaagaatcctggagaacggcgtgaacgtgaccgtgagccagatgaccagcgtgctgaacggcagaaccagaagattcgccgacatccagctgcagcacggcgccctgtgcttcaacatcagatacggcaccaccgtggaggaggagaagaaccacgtgctggagatcgccagacagagagccgtggcccaggcctggaccaaggagcagagaagactgcaggagggcgaggagggcatcagagcctggaccgagggcgagaagcagcagctgctgagcaccggcagagtgcagggctacgacggctacttcgtgctgagcgtggagcagtacctggagctgagcgacagcgccaacaacatccacttcatgagacagagcgagatcggcagaagatag

SEQ ID NO: 4090 - DNA, 204 bp, synthetic construct
  misc_feature 1..204: note = source = /note="Description of Artificial Sequence: Synthetic coding sequence"
  source 1..204: mol_type = other DNA
atgaagatccagctgttcttcttcatcctgcacttctgggtgaccatcctgcccgccaagaagaagtaccccgagtacggcagcctggacctgagaagagagtgcagaatcggcaacggccagtgcaagaaccagtgccacgagaacgagatcagaatcgcctactgcatcagacccggcacccactgctgcctgcagcagtag

SEQ ID NO: 4091 - DNA, 831 bp, synthetic construct
  misc_feature 1..831: note = source = /note="Description of Artificial Sequence: Synthetic coding sequence"
  source 1..831: mol_type = other DNA
atgaagcagatcctgcaccccgccctggagaccaccgcctgcaccaaccacttcaacgccgacccctgcagcaccggcttcgtgttccccgccatgaccctgttccccgtgctgctgttcctggtggccggcctgctgcccagcttccccgccaacgaggacaaggaccccgccttcaccgccctgctgaccacccagacccaggtgcagagagagatcgtgaacaagcacaacgagctgagaagagccgtgagcccccccgccagaaacatgctgaagatggagtggaacaaggaggccgccgccaacgcccagaagtgggccaaccagtgcaactacagacacagcaaccccaaggacagaatgaccagcctgaagtgcggcgagaacctgtacatgagcagcgccagcagcagctggagccaggccatccagagctggttcgacgagtacaacgacttcgacttcggcgtgggccccaagacccccaacgccgtggtgggccactacacccaggtggtgtggtacagcagctacctggtgggctgcggcaacgcctactgccccaaccagaaggtgctgaagtactactacgtgtgccagtactgccccgccggcaactgggccaacagactgtacgtgccctacgagcagggcgccccctgcgccagctgccccgacaactgcgacgacggcctgtgcaccaacggctgcaagtacgaggacctgtacagcaactgcaagagcctgaagctgaccctgacctgcaagcaccagctggtgagagacagctgcaaggccagctgcaactgcagcaacagcatctactag

SEQ ID NO: 4092 - DNA, 1350 bp, synthetic construct
  misc_feature 1..1350: note = source = /note="Description of Artificial Sequence: Synthetic coding sequence"
  source 1..1350: mol_type = other DNA
atgctggccgagtggggcgcctgcctgctgctggccgtggccctgctgggccccggcctgcaggcccaggccatggagggcgtgaagtgcggcggcgtgctgagcgcccccagcggcaacttcagcagccccaacttccccagactgtacccctacaacaccgagtgcagctggctgatcgtggtggccgagggcagcagcgtgctgctgaccttccacgccttcgacctggagtaccacgacacctgcagcttcgacttcctggagatctacaacggcgccagccccgacaagggcaacctgctgggcagattctgcggcaaggtgccccccccccccttcaccagcagctggcacgtgatgagcgtgatcttccacagcgacaagcacgtggccagccacggcttcagcgccggctaccagaaggacgtgtgcggcggcgtgctgaccggcctgagcggcgtgctgaccagccccgagtaccccaacaactaccccaacagcatggagtgccactgggtgatcagagccgccggccccgcccacgtgaagctggtgttcgtggacttccaggtggagggcaacgaggagtgcacctacgactacgtggccgtgctgggcggccccggccccaccagaggccaccactactgcggcagcaccagaccccccaccctggtgagcctgggccacgagctgcaggtggtgttcaagagcgacttcaacatcggcggcagaggcttcaaggcctactacttcagcggcgagtgccaggaggtgtacatggccatgagaggcaacttcagcagcccccagtaccccagcagctaccccaacaacatcagatgccactggaccatcagactgccccccggctaccaggtgaaggtgttcttcctggacctggacctggaggagcccaacagcctgaccaagacctgcgacttcgaccacctggccgccttcgacggcgccagcgaggaggcccccctgctgggcaactggtgcggccaccacctgcccccccccgtgaccagcagccacaaccagctgctgctgctgctgcacaccgacagaagcaccaccagaagaggcttcagcgtggcctacatcggcggccagctgggctgcggcagcggcagcaccgagggcgagggcgaggccctgcagccccagagcctgcagagccccagcagcatcccccccgtgtgccccgccccccccatgaacggcctgctgcagctgctgctgcactggctgcacccctgccccctgagcggccccctgagactggacggcaccgcccccgcctgcttccactactgcagagccagcttccccagcttctag

SEQ ID NO: 4093 - DNA, 1434 bp, synthetic construct; identical to SEQ ID NO: 3532
  misc_feature 1..1434: note = source = /note="Description of Artificial Sequence: Synthetic coding sequence"
  source 1..1434: mol_type = other DNA

SEQ ID NO: 4094 - DNA, 1479 bp, synthetic construct
  misc_feature 1..1479: note = source = /note="Description of Artificial Sequence: Synthetic coding sequence"
  source 1..1479: mol_type = other DNA
atgggcagcgccccctgggcccccgtgctgctgctggccctgggcctgagaggcctgcaggccggcgccagaagagcccccgaccccggcttccaggagagattcttccagcagagactggaccacttcaacttcgagagattcggcaacaagaccttcccccagagattcctggtgagcgacagattctgggtgagaggcgagggccccatcttcttctacaccggcaacgagggcgacgtgtgggccttcgccaacaacagcgccttcgtggccgagctggccgccgagagaggcgccctgctggtgttcgccgagcacagatactacggcaagagcctgcccttcggcgcccagagcacccagagaggccacaccgagctgctgaccgtggagcaggccctggccgacttcgccgagctgctgagagccctgagaagagacctgggcgcccaggacgcccccgccatcgccttcggcggcagctacggcggcatgctgagcgcctacctgagaatgaagtacccccacctggtggccggcgccctggccgccagcgcccccgtgctggccgtggccggcctgggcgacagcaaccagttcttcagagacgtgaccgccgacttcgagggccagagccccaagtgcacccagggcgtgagagaggccttcagacagatcaaggacctgttcctgcagggcgcctacgacaccgtgagatgggagttcggcacctgccagcccctgagcgacgagaaggacctgacccagctgttcatgttcgccagaaacgccttcaccgtgctggccatgatggactacccctaccccaccgacttcctgggccccctgcccgccaaccccgtgaaggtgggctgcgacagactgctgagcgaggcccagagaatcaccggcctgagagccctggccggcctggtgtacaacgccagcggcagcgagcactgctacgacatctacagactgtaccacagctgcgccgaccccaccggctgcggcaccggccccgacgccagagcctgggactaccaggcctgcaccgagatcaacctgaccttcgccagcaacaacgtgaccgacatgttccccgacctgcccttcaccgacgagctgagacagagatactgcctggacacctggggcgtgtggcccagacccgactggctgctgaccagcttctggggcggcgacctgagagccgccagcaacatcatcttcagcaacggcaacctggacccctgggccggcggcggcatcagaagaaacctgagcgccagcgtgatcgccgtgaccatccagggcggcgcccaccacctggacctgagagccagccaccccgaggaccccgccagcgtggtggaggccagaaagctggaggccaccatcatcggcgagtgggtgaaggccgccagaagagagcagcagcccgccctgagaggcggccccagactgagcctgtag

SEQ ID NO: 4095 - DNA, 2850 bp, synthetic construct
  misc_feature 1..2850: note = source = /note="Description of Artificial Sequence: Synthetic coding sequence"
  source 1..2850: mol_type = other DNA
atgatcctgagcctgctgttcagcctgggcggccccctgggctggggcctgctgggcgcctgggcccaggccagcagcaccagcctgagcgacctgcagagcagcagaacccccggcgtgtggaaggccgaggccgaggacaccggcaaggaccccgtgggcagaaactggtgcccctaccccatgagcaagctggtgaccctgctggccctgtgcaagaccgagaagttcctgatccacagccagcagccctgcccccagggcgcccccgactgccagaaggtgaaggtgatgtacagaatggcccacaagcccgtgtaccaggtgaagcagaaggtgctgaccagcctggcctggagatgctgccccggctacaccggccccaactgcgagcaccacgacagcatggccatccccgagcccgccgaccccggcgacagccaccaggagccccaggacggccccgtgagcttcaagcccggccacctggccgccgtgatcaacgaggtggaggtgcagcaggagcagcaggagcacctgctgggcgacctgcagaacgacgtgcacagagtggccgacagcctgcccggcctgtggaaggccctgcccggcaacctgaccgccgccgtgatggaggccaaccagaccggccacgagttccccgacagaagcctggagcaggtgctgctgccccacgtggacaccttcctgcaggtgcacttcagccccatctggagaagcttcaaccagagcctgcacagcctgacccaggccatcagaaacctgagcctggacgtggaggccaacagacaggccatcagcagagtgcaggacagcgccgtggccagagccgacttccaggagctgggcgccaagttcgaggccaaggtgcaggagaacacccagagagtgggccagctgagacaggacgtggaggacagactgcacgcccagcacttcaccctgcacagaagcatcagcgagctgcaggccgacgtggacaccaagctgaagagactgcacaaggcccaggaggcccccggcaccaacggcagcctggtgctggccacccccggcgccggcgccagacccgagcccgacagcctgcaggccagactgggccagctgcagagaaacctgagcgagctgcacatgaccaccgccagaagagaggaggagctgcagtacaccctggaggacatgagagccaccctgaccagacacgtggacgagatcaaggagctgtacagcgagagcgacgagaccttcgaccagatcagcaaggtggagagacaggtggaggagctgcaggtgaaccacaccgccctgagagagctgagagtgatcctgatggagaagagcctgatcatggaggagaacaaggaggaggtggagagacagctgctggagctgaacctgaccctgcagcacctgcagggcggccacgccgacctgatcaagtacgtgaaggactgcaactgccagaagctgtacctggacctggacgtgatcagagagggccagagagacgccaccagagccctggaggagacccaggtgagcctggacgagagaagacagctggacggcagcagcctgcaggccctgcagaacgccgtggacgccgtgagcctggccgtggacgcccacaaggccgagggcgagagagccagagccgccaccagcagactgagaagccaggtgcaggccctggacgacgaggtgggcgccctgaaggccgccgccgccgaggccagacacgaggtgagacagctgcacagcgccttcgccgccctgctggaggacgccctgagacacgaggccgtgctggccgccctgttcggcgaggaggtgctggaggagatgagcgagcagacccccggccccctgcccctgagctacgagcagatcagagtggccctgcaggacgccgccagcggcctgcaggagcaggccctgggctgggacgagctggccgccagagtgaccgccctggagcaggccagcgagccccccagacccgccgagcacctggagcccagccacgacgccggcagagaggaggccgccaccaccgccctggccggcctggccagagagctgcagagcctgagcaacgacgtgaagaacgtgggcagatgctgcgaggccgaggccggcgccggcgccgccagcctgaacgccagcctgcacggcctgcacaacgccctgttcgccacccagagaagcctggagcagcaccagagactgttccacagcctgttcggcaacttccagggcctgatggaggccaacgtgagcctggacctgggcaagctgcagaccatgctgagcagaaagggcaagaagcagcagaaggacctggaggcccccagaaagagagacaagaaggaggccgagcccctggtggacatcagagtgaccggccccgtgcccggcgccctgggcgccgccctgtgggaggccggcagccccgtggccttctacgccagcttcagcgagggcaccgccgccctgcagaccgtgaagttcaacaccacctacatcaacatcggcagcagctacttccccgagcacggctacttcagagcccccgagagaggcgtgtacctgttcgccgtgagcgtggagttcggccccggccccggcaccggccagctggtgttcggcggccaccacagaacccccgtgtgcaccaccggccagggcagcggcagcaccgccaccgtgttcgccatggccgagctgcagaagggcgagagagtgtggttcgagctgacccagggcagcatcaccaagagaagcctgagcggcaccgccttcggcggcttcctgatgttcaagacctag

SEQ ID NO: 4096 - DNA, 246 bp, synthetic construct
  misc_feature 1..246: note = source = /note="Description of Artificial Sequence: Synthetic coding sequence"
  source 1..246: mol_type = other DNA
atgagactgctggtgctgagcagcctgctgtgcatcctgctgctgtgcttcagcatcttcagcaccgagggcaagagaagacccgccaaggcctggagcggcagaagaaccagactgtgctgccacagagtgcccagccccaacagcaccaacctgaagggccaccacgtgagactgtgcaagccctgcaagctggagcccgagcccagactgtgggtggtgcccggcgccctgccccaggtgtag

SEQ ID NO: 4097 - DNA, 690 bp, synthetic construct
  misc_feature 1..690: note = source = /note="Description of Artificial Sequence: Synthetic coding sequence"
  source 1..690: mol_type = other DNA
atgagcttcctgcaggaccccagcttcttcaccatgggcatgtggagcatcggcgccggcgccctgggcgccgccgccctggccctgctgctggccaacaccgacgtgttcctgagcaagccccagaaggccgccctggagtacctggaggacatcgacctgaagaccctggagaaggagcccagaaccttcaaggccaaggagctgtgggagaagaacggcgccgtgatcatggccgtgagaagacccggctgcttcctgtgcagagaggaggccgccgacctgagcagcctgaagagcatgctggaccagctgggcgtgcccctgtacgccgtggtgaaggagcacatcagaaccgaggtgaaggacttccagccctacttcaagggcgagatcttcctggacgagaagaagaagttctacggcccccagagaagaaagatgatgttcatgggcttcatcagactgggcgtgtggtacaacttcttcagagcctggaacggcggcttcagcggcaacctggagggcgagggcttcatcctgggcggcgtgttcgtggtgggcagcggcaagcagggcatcctgctggagcacagagagaaggagttcggcgacaaggtgaacctgctgagcgtgctggaggccgccaagatgatcaagccccagaccctggccagcgagaagaagtag

SEQ ID NO: 4098 - DNA, 657 bp, synthetic construct
  misc_feature 1..657: note = source = /note="Description of Artificial Sequence: Synthetic coding sequence"
  source 1..657: mol_type = other DNA
atgggcatgtggagcatcggcgccggcgccctgggcgccgccgccctggccctgctgctggccaacaccgacgtgttcctgagcaagccccagaaggccgccctggagtacctggaggacatcgacctgaagaccctggagaaggagcccagaaccttcaaggccaaggagctgtgggagaagaacggcgccgtgatcatggccgtgagaagacccggctgcttcctgtgcagagaggaggccgccgacctgagcagcctgaagagcatgctggaccagctgggcgtgcccctgtacgccgtggtgaaggagcacatcagaaccgaggtgaaggacttccagccctacttcaagggcgagatcttcctggacgagaagaagaagttctacggcccccagagaagaaagatgatgttcatgggcttcatcagactgggcgtgtggtacaacttcttcagagcctggaacggcggcttcagcggcaacctggagggcgagggcttcatcctgggcggcgtgttcgtggtgggcagcggcaagcagggcatcctgctggagcacagagagaaggagttcggcgacaaggtgaacctgctgagcgtgctggaggccgccaagatgatcaagccccagaccctggccagcgagaagaagtag

SEQ ID NO: 4099 - DNA, 690 bp, synthetic construct; identical to SEQ ID NO: 4097
  misc_feature 1..690: note = source = /note="Description of Artificial Sequence: Synthetic coding sequence"
  source 1..690: mol_type = other DNA

SEQ ID NO: 4100 - DNA, 690 bp, synthetic construct; identical to SEQ ID NO: 4097
  misc_feature 1..690: note = source = /note="Description of Artificial Sequence: Synthetic coding sequence"
  source 1..690: mol_type = other DNA

SEQ ID NO: 4101 - DNA, 1248 bp, synthetic construct; identical to SEQ ID NO: 3809
  misc_feature 1..1248: note = source = /note="Description of Artificial Sequence: Synthetic coding sequence"
  source 1..1248: mol_type = other DNA

SEQ ID NO: 4102 - DNA, 240 bp, synthetic construct
  misc_feature 1..240: note = source = /note="Description of Artificial Sequence: Synthetic coding sequence"
  source 1..240: mol_type = other DNA
atggccccccagaccctgctgcccgtgctggtgctgtgcgtgctgctgctgcaggcccagggcggctacagagacaagaagagaatgcagaagacccagctgagccccgagatcaaggtgtgccagcagcagcccaagctgtacctgtgcaagcacctgtgcgagagccacagagactgccaggccaacaacatctgctgcagcacctactgcggcaacgtgtgcatgagcatcctgtag

SEQ ID NO: 4103 - DNA, 486 bp, synthetic construct
  misc_feature 1..486: note = source = /note="Description of Artificial Sequence: Synthetic coding sequence"
  source 1..486: mol_type = other DNA
atgggcctgagcggcctgctgcccatcctggtgcccttcatcctgctgggcgacatccaggagcccggccacgccgagggcatcctgggcaagccctgccccaagatcaaggtggagtgcgaggtggaggagatcgaccagtgcaccaagcccagagactgccccgagaacatgaagtgctgccccttcagcagaggcaagaagtgcctggacttcagaaagatctacgccgtgtgccacagaagactggcccccgcctggcccccctaccacaccggcggcaccatcaagaagaccaagatctgcagcgagttcatctacggcggcagccagggcaacaacaacaacttccagaccgaggccatctgcctggtgacctgcaagaagtaccacaagagcgccctgctgtacaccatcagaagaagcctgaacaacctgcaggacctggcccacaaccccggcctgagccccagagtgcccgactag

SEQ ID NO: 4104 - DNA, 261 bp, synthetic construct
  misc_feature 1..261: note = source = /note="Description of Artificial Sequence: Synthetic coding sequence"
  source 1..261: mol_type = other DNA
atgggcctgagcggcctgctgcccatcctggtgcccttcatcctgctgggcgacatccaggagcccggccacgccgagggcatcctgggcaagccctgccccaagatcaaggtggagtgcgaggtggaggagatcgaccagtgcaccaagcccagagactgccccgagaacatgaagtgctgccccttcagcagaggcaagaagtgcctggacttcagaaaggtgagcctgaccctgtaccacaaggaggagctggagtag

SEQ ID NO: 4105 - DNA, 375 bp, synthetic construct
  misc_feature 1..375: note = source = /note="Description of Artificial Sequence: Synthetic coding sequence"
  source 1..375: mol_type = other DNA
atgcccgcctgcagactgggccccctggccgccgccctgctgctgagcctgctgctgttcggcttcaccctggtgagcggcaccggcgccgagaagaccggcgtgtgccccgagctgcaggccgaccagaactgcacccaggagtgcgtgagcgacagcgagtgcgccgacaacctgaagtgctgcagcgccggctgcgccaccttctgcagcctgcccaacgacaaggagggcagctgcccccaggtgaacatcaacttcccccagctgggcctgtgcagagaccagtgccaggtggacagccagtgccccggccagatgaagtgctgcagaaacggctgcggcaaggtgagctgcgtgacccccaacttctag

SEQ ID NO: 4106 - DNA, 1428 bp, synthetic construct
  misc_feature 1..1428: note = source = /note="Description of Artificial Sequence: Synthetic coding sequence"
  source 1..1428: mol_type = other DNA
atggccgacatgcagaacctggtggagagactggagagagccgtgggcagactggaggccgtgagccacaccagcgacatgcacagaggctacgccgacagccccagcaaggccggcgccgccccctacgtgcaggccttcgacagcctgctggccggccccgtggccgagtacctgaagatcagcaaggagatcggcggcgacgtgcagaagcacgccgagatggtgcacaccggcctgaagctggagagagccctgctggtgaccgccagccagtgccagcagcccgccgagaacaagctgagcgacctgctggcccccatcagcgagcagatcaaggaggtgatcaccttcagagagaagaacagaggcagcaagctgttcaaccacctgagcgccgtgagcgagagcatccaggccctgggctgggtggccatggcccccaagcccggcccctacgtgaaggagatgaacgacgccgccatgttctacaccaacagagtgctgaaggagtacaaggacgtggacaagaagcacgtggactgggtgaaggcctacctgagcatctggaccgagctgcaggcctacatcaaggagttccacaccaccggcctggcctggagcaagaccggccccgtggccaaggagctgagcggcctgcccagcggccccagcgccggcagctgccccccccccccccccccctgccccccccccccccccgtgagcaccatcagctgcagctacgagagcgccagcagaagcagcctgttcgcccagatcaaccagggcgagagcatcacccacgccctgaagcacgtgagcgacgacatgaagacccacaagaaccccgccctgaaggcccagagcggccccgtgagaagcggccccaagcccttcagcgcccccaagccccagaccagccccagccccaagagagccaccaagaaggagcccgccgtgctggagctggagggcaagaagtggagagtggagaaccaggagaacgtgagcaacctggtgatcgaggacaccgagctgaagcaggtggcctacatctacaagtgcgtgaacaccaccctgcagatcaagggcaagatcaacagcatcaccgtggacaactgcaagaagctgggcctggtgttcgacgacgtggtgggcatcgtggagatcatcaacagcaaggacgtgaaggtgcaggtgatgggcaaggtgcccaccatcagcatcaacaagaccgacggctgccacgcctacctgagcaagaacagcctggactgcgagatcgtgagcgccaagagcagcgagatgaacgtgctgatccccaccgagggcggcgacttcaacgagttccccgtgcccgagcagttcaagaccctgtggaacggccagaagctggtgaccaccgtgaccgagatcgccggctag

SEQ ID NO: 4107 - DNA, 438 bp, synthetic construct
  misc_feature 1..438: note = source = /note="Description of Artificial Sequence: Synthetic coding sequence"
  source 1..438: mol_type = other DNA
atggccgacatgcagaacctggtggagagactggagagagccgtgggcagactggaggccgtgagccacaccagcgacatgcacagaggctacgccgacagccccagcaaggccggcgccgccccctacgtgcaggcctacatcaaggagttccacaccaccggcctggcctggagcaagaccggccccgtggccaaggagctgagcggcctgcccagcggccccagcgccggcagctgccccccccccccccccccctgccccccccccccccccgtgagcaccatcagctgcagctacgagagcgccagcagaagcagcctgttcgcccagatcaaccagggcgagagcatcacccacgccctgaagcacgtgagcgacgacatgaagacccacaagaaccccgccctgaaggcccagagcggccccgtgagatag

SEQ ID NO: 4108 - DNA, 1428 bp, synthetic construct; identical to SEQ ID NO: 4106
  misc_feature 1..1428: note = source = /note="Description of Artificial Sequence: Synthetic coding sequence"
  source 1..1428: mol_type = other DNA

SEQ ID NO: 4109 - DNA, 1425 bp, synthetic construct; identical to SEQ ID NO: 3898
  misc_feature 1..1425: note = source = /note="Description of Artificial Sequence: Synthetic coding sequence"
  source 1..1425: mol_type = other DNA

SEQ ID NO: 4110 - DNA, 1425 bp, synthetic construct; identical to SEQ ID NO: 3898
  misc_feature 1..1425: note = source = /note="Description of Artificial Sequence: Synthetic coding sequence"
  source 1..1425: mol_type = other DNA

SEQ ID NO: 4111 - DNA, 1428 bp, synthetic construct; identical to SEQ ID NO: 4106
  misc_feature 1..1428: note = source = /note="Description of Artificial Sequence: Synthetic coding sequence"
  source 1..1428: mol_type = other DNA

SEQ ID NO: 4112 - DNA, 1209 bp, synthetic construct
  misc_feature 1..1209: note = source = /note="Description of Artificial Sequence: Synthetic coding sequence"
  source 1..1209: mol_type = other DNA
atgaccgccctgcccggccccctgtggctgctgggcctggccctgtgcgccctgggcggcggcggccccggcctgagacccccccccggctgcccccagagaagactgggcgccagagagagaagagacgtgcagagagagatcctggccgtgctgggcctgcccggcagacccagacccagagccccccccgccgccagcagactgcccgccagcgcccccctgttcatgctggacctgtaccacgccatggccggcgacgacgacgaggacggcgcccccgccgagagaagactgggcagagccgacctggtgatgagcttcgtgaacatggtggagagagacagagccctgggccaccaggagccccactggaaggagttcagattcgacctgacccagatccccgccggcgaggccgtgaccgccgccgagttcagaatctacaaggtgcccagcatccacctgctgaacagaaccctgcacgtgagcatgttccaggtggtgcaggagcagagcaacagagagagcgacctgttcttcctggacctgcagaccctgagagccggcgacgagggctggctggtgctggacgtgaccgccgccagcgactgctggctgctgaagagacacaaggacctgggcctgagactgtacgtggagaccgaggacggccacagcgtggaccccggcctggccggcctgctgggccagagagcccccagaagccagcagcccttcgtggtgaccttcttcagagccagccccagccccatcagaacccccagagccgtgagacccctgagaagaagacagcccaagaagagcaacgagctgccccaggccaacagactgcccggcatcttcgacgacgtgcacggcagccacggcagacaggtgtgcagaagacacgagctgtacgtgagcttccaggacctgggctggctggactgggtgatcgccccccagggctacagcgcctactactgcgagggcgagtgcagcttccccctggacagctgcatgaacgccaccaaccacgccatcctgcagagcctggtgcacctgatgatgcccgacgccgtgcccaaggcctgctgcgcccccaccaagctgagcgccaccagcgtgctgtactacgacagcagcaacaacgtgatcctgagaaagcacagaaacatggtggtgaaggcctgcggctgccactag

SEQ ID NO: 4113 - DNA, 804 bp, synthetic construct
  misc_feature 1..804: note = source = /note="Description of Artificial Sequence: Synthetic coding sequence"
  source 1..804: mol_type = other DNA
atggccgccatcagaatgggcaagctgaccaccatgcccgccggcctgatctacgccagcgtgagcgtgcacgccgccaagcaggaggagagcaagaagcagctggtgaagcccgagcagctgcccatctacaccgccccccccctgcagagcaagtacgtggaggagcagcccggccacctgcagatgggcttcgccagcatcagaaccgccaccggctgctacatcggctggtgcaagggcgtgtacgtgttcgtgaagaacggcatcatggacaccgtgcagttcggcaaggacgcctacgtgtacctgaagaacccccccagagacttcctgcccaagatgggcgtgatcaccgtgagcggcctggccggcctggtgagcgccagaaagggcagcaagttcaagaagatcacctaccccctgggcctggccaccctgggcgccaccgtgtgctaccccgtgcagagcgtgatcatcgccaaggtgaccgccaagagatacatgctgcaggccagcaagttcctggagcagctgaaccactgcggccagaaggccgccaagaagagccacagcctgaacctgaagaagaccaagctgggcagcagcagcgagatcgaggtgcccgccaagaccacccacgtgctgaagcacagcgtgcccctgcccaccgagctgagcagcgaggccaagaccaagagcgagagcaccagcggcgccacccagttcatgcccgaccccaagctgatggaccacggccagagccaccccgaggacatcgacatgtacagcaccagaagctag

SEQ ID NO: 4114 - DNA, 807 bp, synthetic construct
  misc_feature 1..807: note = source = /note="Description of Artificial Sequence: Synthetic coding sequence"
  source 1..807: mol_type = other DNA
atggccgccatcagaatgggcaagctgaccaccatgcccgccggcctgatctacgccagcgtgagcgtgcacgccgccaagcaggaggagagcaagaagcagctggtgaagcccgagcagctgcccatctacaccgccccccccctgcagagcaagtacgtggaggagcagcccggccacctgcagatgggcttcgccagcatcagaaccgccaccggctgctacatcggctggtgcaagggcgtgtacgtgttcgtgaagaacggcatcatggacaccgtgcagttcggcaaggacgcctacgtgtacctgaagaacccccccagagacttcctgcccaagatgggcgtgatcaccgtgagcggcctggccggcctggtgagcgccagaaagggcagcaagttcaagaagatcacctaccccctgggcctggccaccctgggcgccaccgtgtgctaccccgtgcagagcgtgatcatcgccaaggtgaccgccaagaaggtgtacgccaccagccagcagatcttcggcgccgtgaagagcctgtggaccaagagcagcaaggaggagagcctgcccaagcccaaggagaagaccaagctgggcagcagcagcgagatcgaggtgcccgccaagaccacccacgtgctgaagcacagcgtgcccctgcccaccgagctgagcagcgaggccaagaccaagagcgagagcaccagcggcgccacccagttcatgcccgaccccaagctgatggaccacggccagagccaccccgaggacatcgacatgtacagcaccagaagctag

SEQ ID NO: 4115 - DNA, 3672 bp, synthetic construct
  misc_feature 1..3672: note = source = /note="Description of Artificial Sequence: Synthetic coding sequence"
  source 1..3672: mol_type = other DNA
atggcccccctgagagccctgctgagctacctgctgcccctgcactgcgccctgtgcgccgccgccggcagcagaacccccgagctgcacctgagcggcaagctgagcgactacggcgtgaccgtgccctgcagcaccgacttcagaggcagattcctgagccacgtggtgagcggccccgccgccgccagcgccggcagcatggtggtggacaccccccccaccctgcccagacacagcagccacctgagagtggccagaagccccctgcaccccggcggcaccctgtggcccggcagagtgggcagacacagcctgtacttcaacgtgaccgtgttcggcaaggagctgcacctgagactgagacccaacagaagactggtggtgcccggcagcagcgtggagtggcaggaggacttcagagagctgttcagacagcccctgagacaggagtgcgtgtacaccggcggcgtgaccggcatgcccggcgccgccgtggccatcagcaactgcgacggcctggccggcctgatcagaaccgacagcaccgacttcttcatcgagcccctggagagaggccagcaggagaaggaggccagcggcagaacccacgtggtgtacagaagagaggccgtgcagcaggagtgggccgagcccgacggcgacctgcacaacgaggccttcggcctgggcgacctgcccaacctgctgggcctggtgggcgaccagctgggcgacaccgagagaaagagaagacacgccaagcccggcagctacagcatcgaggtgctgctggtggtggacgacagcgtggtgagattccacggcaaggagcacgtgcagaactacgtgctgaccctgatgaacatcgtggacgagatctaccacgacgagagcctgggcgtgcacatcaacatcgccctggtgagactgatcatggtgggctacagacagagcctgagcctgatcgagagaggcaaccccagcagaagcctggagcaggtgtgcagatgggcccacagccagcagagacaggaccccagccacgccgagcaccacgaccacgtggtgttcctgaccagacaggacttcggccccagcggctacgcccccgtgaccggcatgtgccaccccctgagaagctgcgccctgaaccacgaggacggcttcagcagcgccttcgtgatcgcccacgagaccggccacgtgctgggcatggagcacgacggccagggcaacggctgcgccgacgagaccagcctgggcagcgtgatggcccccctggtgcaggccgccttccacagattccactggagcagatgcagcaagctggagctgagcagatacctgcccagctacgactgcctgctggacgaccccttcgaccccgcctggccccagccccccgagctgcccggcatcaactacagcatggacgagcagtgcagattcgacttcggcagcggctaccagacctgcctggccttcagaaccttcgagccctgcaagcagctgtggtgcagccaccccgacaacccctacttctgcaagaccaagaagggcccccccctggacggcaccgagtgcgcccccggcaagtggtgcttcaagggccactgcatctggaagagccccgagcagacctacggccaggacggcggctggagcagctggaccaagttcggcagctgcagcagaagctgcggcggcggcgtgagaagcagaagcagaagctgcaacaaccccagccccgcctacggcggcagactgtgcctgggccccatgttcgagtaccaggtgtgcaacagcgaggagtgccccggcacctacgaggacttcagagcccagcagtgcgccaagagaaacagctactacgtgcaccagaacgccaagcacagctgggtgccctacgagcccgacgacgacgcccagaagtgcgagctgatctgccagagcgccgacaccggcgacgtggtgttcatgaaccaggtggtgcacgacggcaccagatgcagctacagagacccctacagcgtgtgcgccagaggcgagtgcgtgcccgtgggctgcgacaaggaggtgggcagcatgaaggccgacgacaagtgcggcgtgtgcggcggcgacaacagccactgcagaaccgtgaagggcaccctgggcaaggccagcaagcaggccggcgccctgaagctggtgcagatccccgccggcgccagacacatccagatcgaggccctggagaagagcccccacagaatcgtggtgaagaaccaggtgaccggcagcttcatcctgaaccccaagggcaaggaggccaccagcagaaccttcaccgccatgggcctggagtgggaggacgccgtggaggacgccaaggagagcctgaagaccagcggccccctgcccgaggccatcgccatcctggccctgccccccaccgagggcggccccagaagcagcctggcctacaagtacgtgatccacgaggacctgctgcccctgatcggcagcaacaacgtgctgctggaggagatggacacctacgagtgggccctgaagagctgggccccctgcagcaaggcctgcggcggcggcatccagttcaccaagtacggctgcagaagaagaagagaccaccacatggtgcagagacacctgtgcgaccacaagaagagacccaagcccatcagaagaagatgcaaccagcacccctgcagccagcccgtgtgggtgaccgaggagtggggcgcctgcagcagaagctgcggcaagctgggcgtgcagaccagaggcatccagtgcctgctgcccctgagcaacggcacccacaaggtgatgcccgccaaggcctgcgccggcgacagacccgaggccagaagaccctgcctgagagtgccctgccccgcccagtggagactgggcgcctggagccagtgcagcgccacctgcggcgagggcatccagcagagacaggtggtgtgcagaaccaacgccaacagcctgggccactgcgagggcgacagacccgacaccgtgcaggtgtgcagcctgcccgcctgcggcggcaaccaccagaacagcaccgtgagagccgacgtgtgggagctgggcacccccgagggccagtgggtgccccagagcgagcccctgcaccccatcaacaagatcagcagcaccgagccctgcaccggcgacagaagcgtgttctgccagatggaggtgctggacagatactgcagcatccccggctaccacagactgtgctgcgtgagctgcatcaagaaggccagcggccccaaccccggccccgaccccggccccaccagcctgccccccttcagcacccccggcagccccctgcccggcccccaggaccccgccgacgccgccgagccccccggcaagcccaccggcagcgaggaccaccagcacggcagagccacccagctgcccggcgccctggacaccagcagccccggcacccagcaccccttcgcccccgagacccccatccccggcgccagctggagcatcagccccaccacccccggcggcctgccctggggctggacccagacccccacccccgtgcccgaggacaagggccagcccggcgaggacctgagacaccccggcaccagcctgcccgccgccagccccgtgacctag

SEQ ID NO: 4116 - DNA, 3681 bp, synthetic construct
  misc_feature 1..3681: note = source = /note="Description of Artificial Sequence: Synthetic coding sequence"
  source 1..3681: mol_type = other DNA
atggcccccctgagagccctgctgagctacctgctgcccctgcactgcgccctgtgcgccgccgccggcagcagaacccccgagctgcacctgagcggcaagctgagcgactacggcgtgaccgtgccctgcagcaccgacttcagaggcagattcctgagccacgtggtgagcggccccgccgccgccagcgccggcagcatggtggtggacaccccccccaccctgcccagacacagcagccacctgagagtggccagaagccccctgcaccccggcggcaccctgtggcccggcagagtgggcagacacagcctgtacttcaacgtgaccgtgttcggcaaggagctgcacctgagactgagacccaacagaagactggtggtgcccggcagcagcgtggagtggcaggaggacttcagagagctgttcagacagcccctgagacaggagtgcgtgtacaccggcggcgtgaccggcatgcccggcgccgccgtggccatcagcaactgcgacggcctggccggcctgatcagaaccgacagcaccgacttcttcatcgagcccctggagagaggccagcaggagaaggaggccagcggcagaacccacgtggtgtacagaagagaggccgtgcagcaggagtgggccgagcccgacggcgacctgcacaacgaggccttcggcctgggcgacctgcccaacctgctgggcctggtgggcgaccagctgggcgacaccgagagaaagagaagacacgccaagcccggcagctacagcatcgaggtgctgctggtggtggacgacagcgtggtgagattccacggcaaggagcacgtgcagaactacgtgctgaccctgatgaacatcgtggacgagatctaccacgacgagagcctgggcgtgcacatcaacatcgccctggtgagactgatcatggtgggctacagacagagcctgagcctgatcgagagaggcaaccccagcagaagcctggagcaggtgtgcagatgggcccacagccagcagagacaggaccccagccacgccgagcaccacgaccacgtggtgttcctgaccagacaggacttcggccccagcggcatgcagggctacgcccccgtgaccggcatgtgccaccccctgagaagctgcgccctgaaccacgaggacggcttcagcagcgccttcgtgatcgcccacgagaccggccacgtgctgggcatggagcacgacggccagggcaacggctgcgccgacgagaccagcctgggcagcgtgatggcccccctggtgcaggccgccttccacagattccactggagcagatgcagcaagctggagctgagcagatacctgcccagctacgactgcctgctggacgaccccttcgaccccgcctggccccagccccccgagctgcccggcatcaactacagcatggacgagcagtgcagattcgacttcggcagcggctaccagacctgcctggccttcagaaccttcgagccctgcaagcagctgtggtgcagccaccccgacaacccctacttctgcaagaccaagaagggcccccccctggacggcaccgagtgcgcccccggcaagtggtgcttcaagggccactgcatctggaagagccccgagcagacctacggccaggacggcggctggagcagctggaccaagttcggcagctgcagcagaagctgcggcggcggcgtgagaagcagaagcagaagctgcaacaaccccagccccgcctacggcggcagactgtgcctgggccccatgttcgagtaccaggtgtgcaacagcgaggagtgccccggcacctacgaggacttcagagcccagcagtgcgccaagagaaacagctactacgtgcaccagaacgccaagcacagctgggtgccctacgagcccgacgacgacgcccagaagtgcgagctgatctgccagagcgccgacaccggcgacgtggtgttcatgaaccaggtggtgcacgacggcaccagatgcagctacagagacccctacagcgtgtgcgccagaggcgagtgcgtgcccgtgggctgcgacaaggaggtgggcagcatgaaggccgacgacaagtgcggcgtgtgcggcggcgacaacagccactgcagaaccgtgaagggcaccctgggcaaggccagcaagcaggccggcgccctgaagctggtgcagatccccgccggcgccagacacatccagatcgaggccctggagaagagcccccacagaatcgtggtgaagaaccaggtgaccggcagcttcatcctgaaccccaagggcaaggaggccaccagcagaaccttcaccgccatgggcctggagtgggaggacgccgtggaggacgccaaggagagcctgaagaccagcggccccctgcccgaggccatcgccatcctggccctgccccccaccgagggcggccccagaagcagcctggcctacaagtacgtgatccacgaggacctgctgcccctgatcggcagcaacaacgtgctgctggaggagatggacacctacgagtgggccctgaagagctgggccccctgcagcaaggcctgcggcggcggcatccagttcaccaagtacggctgcagaagaagaagagaccaccacatggtgcagagacacctgtgcgaccacaagaagagacccaagcccatcagaagaagatgcaaccagcacccctgcagccagcccgtgtgggtgaccgaggagtggggcgcctgcagcagaagctgcggcaagctgggcgtgcagaccagaggcatccagtgcctgctgcccctgagcaacggcacccacaaggtgatgcccgccaaggcctgcgccggcgacagacccgaggccagaagaccctgcctgagagtgccctgccccgcccagtggagactgggcgcctggagccagtgcagcgccacctgcggcgagggcatccagcagagacaggtggtgtgcagaaccaacgccaacagcctgggccactgcgagggcgacagacccgacaccgtgcaggtgtgcagcctgcccgcctgcggcggcaaccaccagaacagcaccgtgagagccgacgtgtgggagctgggcacccccgagggccagtgggtgccccagagcgagcccctgcaccccatcaacaagatcagcagcaccgagccctgcaccggcgacagaagcgtgttctgccagatggaggtgctggacagatactgcagcatccccggctaccacagactgtgctgcgtgagctgcatcaagaaggccagcggccccaaccccggccccgaccccggccccaccagcctgccccccttcagcacccccggcagccccctgcccggcccccaggaccccgccgacgccgccgagccccccggcaagcccaccggcagcgaggaccaccagcacggcagagccacccagctgcccggcgccctggacaccagcagccccggcacccagcaccccttcgcccccgagacccccatccccggcgccagctggagcatcagccccaccacccccggcggcctgccctggggctggacccagacccccacccccgtgcccgaggacaagggccagcccggcgaggacctgagacaccccggcaccagcctgcccgccgccagccccgtgacctag

SEQ ID NO: 4117 - DNA, 762 bp, synthetic construct
  misc_feature 1..762: note = source = /note="Description of Artificial Sequence: Synthetic coding sequence"
  source 1..762: mol_type = other DNA
atggccgccgccaccagaggctgcagaccctggggcagcctgctgggcctgctgggcctggtgagcgccgccgccgccgcctgggacctggccagcctgagatgcaccctgggcgccttctgcgagtgcgacttcagacccgacctgcccggcctggagtgcgacctggcccagcacctggccggccagcacctggccaaggccctggtggtgaaggccctgaaggccttcgtgagagaccccgcccccaccaagcccctggtgctgagcctgcacggctggaccggcaccggcaagagctacgtgagcagcctgctggcccactacctgttccagggcggcctgagaagccccagagtgcaccacttcagccccgtgctgcacttcccccaccccagccacatcgagagatacaagaaggacctgaagagctgggtgcagggcaacctgaccgcctgcggcagaagcctgttcctgttcgacgagatggacaagatgccccccggcctgatggaggtgctgagacccttcctgggcagcagctgggtggtgtacggcaccaactacagaaaggccatcttcatcttcatcagatggggccccgccctgcagtgggcccagtggggcggccacttcagcgaggtgcagctgtacagcctgagcctgtgcagccagcagaaccccgtgccccacggcctgagctgggccttccccgtgcccagcgccaccctgagagacgacatcgtgatcccccccggctag

SEQ ID NO: 4118 - DNA, 966 bp, synthetic construct
  misc_feature 1..966: note = source = /note="Description of Artificial Sequence: Synthetic coding sequence"
  source 1..966: mol_type = other DNA
atggccgccgccaccagaggctgcagaccctggggcagcctgctgggcctgctgggcctggtgagcgccgccgccgccgcctgggacctggccagcctgagatgcaccctgggcgccttctgcgagtgcgacttcagacccgacctgcccggcctggagtgcgacctggcccagcacctggccggccagcacctggccaaggccctggtggtgaaggccctgaaggccttcgtgagagaccccgcccccaccaagcccctggtgctgagcctgcacggctggaccggcaccggcaagagctacgtgagcagcctgctggcccactacctgttccagggcggcctgagaagccccagagtgcaccacttcagccccgtgctgcacttcccccaccccagccacatcgagagatacaagaaggacctgaagagctgggtgcagggcaacctgaccgcctgcggcagaagcctgttcctgttcgacgagatggacaagatgccccccggcctgatggaggtgctgagacccttcctgggcagcagctgggtggtgtacggcaccaactacagaaaggccatcttcatcttcatcagcaacaccggcggcaagcagatcaaccaggtggccctggaggcctggagaagcagaagagacagagaggagatcctgctgcaggagctggagcccgtgatcagcagagccgtgctggacaacccccaccacggcttcagcaacagcggcatcatggaggagagactgctggacgccgtggtgcccttcctgcccctgcagagacaccacgtgagacactgcgtgctgaacgagctggcccagctgggcctggagcccagagacgaggtggtgcaggccgtgctggacagcaccaccttcttccccgaggacgagcagctgttcagcagcaacggctgcaagaccgtggccagcagaatcgccttcttcctgtag

SEQ ID NO: 4119 - DNA, 576 bp, synthetic construct
  misc_feature 1..576: note = source = /note="Description of Artificial Sequence: Synthetic coding sequence"
  source 1..576: mol_type = other DNA
atgcaggtgtggtgcgaccagagacacgaccccggcggctggaccgtgatccagagaagactggacggcagcgtgaacttcttcagaaactgggagacctacaagcagggcttcggcaacatcgacggcgagtactggctgggcctggagaacatctactggctgaccaaccagggcaactacaagctgctggtgaccatggaggactggagcggcagaaaggtgttcgccgagtacgccagcttcagactggagcccgagagcgagtactacaagctgagactgggcagataccacggcaacgccggcgacagcttcacctggcacaacggcaagcagttcaccaccctggacagagaccacgacgtgtacaccggcaactgcgcccactaccagaagggcggctggtggtacaacgcctgcgcccacagcaacctgaacggcgtgtggtacagaggcggccactacagaagcagataccaggacggcgtgtactgggccgagttcagaggcggcagctacagcctgaagaaggtggtgatgatgatcagacccaaccccaacaccttccactag

SEQ ID NO: 4120 - DNA, 1482 bp, synthetic construct
  misc_feature 1..1482: note = source = /note="Description of Artificial Sequence: Synthetic coding sequence"
  source 1..1482: mol_type = other DNA
atgagacccctgtgcgtgacctgctggtggctgggcctgctggccgccatgggcgccgtggccggccaggaggacggcttcgagggcaccgaggagggcagccccagagagttcatctacctgaacagatacaagagagccggcgagagccaggacaagtgcacctacaccttcatcgtgccccagcagagagtgaccggcgccatctgcgtgaacagcaaggagcccgaggtgctgctggagaacagagtgcacaagcaggagctggagctgctgaacaacgagctgctgaagcagaagagacagatcgagaccctgcagcagctggtggaggtggacggcggcatcgtgagcgaggtgaagctgctgagaaaggagagcagaaacatgaacagcagagtgacccagctgtacatgcagctgctgcacgagatcatcagaaagagagacaacgccctggagctgagccagctggagaacagaatcctgaaccagaccgccgacatgctgcagctggccagcaagtacaaggacctggagcacaagtaccagcacctggccaccctggcccacaaccagagcgagatcatcgcccagctggaggagcactgccagagagtgcccagcgccagacccgtgccccagcccccccccgccgccccccccagagtgtaccagccccccacctacaacagaatcatcaaccagatcagcaccaacgagatccagagcgaccagaacctgaaggtgctgcccccccccctgcccaccatgcccaccctgaccagcctgcccagcagcaccgacaagcccagcggcccctggagagactgcctgcaggccctggaggacggccacgacaccagcagcatctacctggtgaagcccgagaacaccaacagactgatgcaggtgtggtgcgaccagagacacgaccccggcggctggaccgtgatccagagaagactggacggcagcgtgaacttcttcagaaactgggagacctacaagcagggcttcggcaacatcgacggcgagtactggctgggcctggagaacatctactggctgaccaaccagggcaactacaagctgctggtgaccatggaggactggagcggcagaaaggtgttcgccgagtacgccagcttcagactggagcccgagagcgagtactacaagctgagactgggcagataccacggcaacgccggcgacagcttcacctggcacaacggcaagcagttcaccaccctggacagagaccacgacgtgtacaccggcaactgcgcccactaccagaagggcggctggtggtacaacgcctgcgcccacagcaacctgaacggcgtgtggtacagaggcggccactacagaagcagataccaggacggcgtgtactgggccgagttcagaggcggcagctacagcctgaagaaggtggtgatgatgatcagacccaaccccaacaccttccactag

SEQ ID NO: 4121 - DNA, 1959 bp, synthetic construct
  misc_feature 1..1959: note = source = /note="Description of Artificial Sequence: Synthetic coding sequence"
  source 1..1959: mol_type = other DNA
atggccgccgccgccctgccccccagacccctgctgctgctgcccctggtgctgctgctgagcggcagacccaccagagccgacagcaaggtgttcggcgacctggaccaggtgagaatgaccagcgagggcagcgactgcagatgcaagtgcatcatgagacccctgagcaaggacgcctgcagcagagtgagaagcggcagagccagagtggaggacttctacaccgtggagaccgtgagcagcggcaccgactgcagatgcagctgcaccgccccccccagcagcctgaacccctgcgagaacgagtggaagatggagaagctgaagaagcaggcccccgagctgctgaagctgcagagcatggtggacctgctggagggcaccctgtacagcatggacctgatgaaggtgcacgcctacgtgcacaaggtggccagccagatgaacaccctggaggagagcatcaaggccaacctgagcagagagaacgaggtggtgaaggacagcgtgagacacctgagcgagcagctgagacactacgagaaccacagcgccatcatgctgggcatcaagaaggagctgagcagactgggcctgcagctgctgcagaaggacgccgccgccgcccccgccacccccgccaccggcaccggcagcaaggcccaggacaccgccagaggcaagggcaaggacatcagcaagtacggcagcgtgcagaagagcttcgccgacagaggcctgcccaagccccccaaggagaagctgctgcaggtggagaagctgagaaaggagagcggcaagggcagcttcctgcagcccaccgccaagcccagagccctggcccagcagcaggccgtgatcagaggcttcacctactacaaggccggcaagcaggaggtgaccgaggccgtggccgacaacaccctgcagggcaccagctggctggagcagctgccccccaaggtggagggcagaagcaacagcgccgagcccaacagcgccgagcaggacgaggccgagcccagaagcagcgagagagtggacctggccagcggcacccccaccagcatccccgccaccaccaccaccgccaccaccacccccacccccaccaccagcctgctgcccaccgagccccccagcggccccgaggtgagcagccagggcagagaggccagctgcgagggcaccctgagagccgtggacccccccgtgagacaccacagctacggcagacacgagggcgcctggatgaaggaccccgccgccagagacgacagaatctacgtgaccaactactactacggcaacagcctggtggagttcagaaacctggagaacttcaagcagggcagatggagcaacatgtacaagctgccctacaactggatcggcaccggccacgtggtgtaccagggcgccttctactacaacagagccttcaccaagaacatcatcaagtacgacctgagacagagattcgtggccagctgggccctgctgcccgacgtggtgtacgaggacaccaccccctggaagtggagaggccacagcgacatcgacttcgccgtggacgagagcggcctgtgggtgatctaccccgccgtggacgacagagacgaggcccagcccgaggtgatcgtgctgagcagactggaccccggcgacctgagcgtgcacagagagaccacctggaagaccagactgagaagaaacagctacggcaactgcttcctggtgtgcggcatcctgtacgccgtggacacctacaaccagcaggagggccaggtggcctacgccttcgacacccacaccggcaccgacgccagaccccagctgcccttcctgaacgagcacgcctacaccacccagatcgactacaaccccaaggagagagtgctgtacgcctgggacaacggccaccagctgacctacaccctgcacttcgtggtgtag

SEQ ID NO: 4122 - DNA, 1641 bp, synthetic construct
  misc_feature 1..1641: note = source = /note="Description of Artificial Sequence: Synthetic coding sequence"
  source 1..1641: mol_type = other DNA
atgaagaaccaggacaagaagaacggcgccgccaagcagagcaaccccaagagcagccccggccagcccgaggccggccccgagggcgcccaggagagacccagccaggccgcccccgccgtggaggccgagggccccggcagcagccaggcccccagaaagcccgagggcgcccaggccagaaccgcccagagcggcgccctgagagacgtgagcgaggagctgagcagacagctggaggacatcctgagcacctactgcgtggacaacaaccagggcggccccggcgaggacggcgcccagggcgagcccgccgagcccgaggacgccgagaagagcagaacctacgtggccagaaacggcgagcccgagcccacccccgtggtgaacggcgagaaggagcccagcaagggcgaccccaacaccgaggagatcagacagagcgacgaggtgggcgacagagaccacagaagaccccaggagaagaagaaggccaagggcctgggcaaggagatcaccctgctgatgcagaccctgaacaccctgagcacccccgaggagaagctggccgccctgtgcaagaagtacgccgagctgctggaggagcacagaaacagccagaagcagatgaagctgctgcagaagaagcagagccagctggtgcaggagaaggaccacctgagaggcgagcacagcaaggccgtgctggccagaagcaagctggagagcctgtgcagagagctgcagagacacaacagaagcctgaaggaggagggcgtgcagagagccagagaggaggaggagaagagaaaggaggtgaccagccacttccaggtgaccctgaacgacatccagctgcagatggagcagcacaacgagagaaacagcaagctgagacaggagaacatggagctggccgagagactgaagaagctgatcgagcagtacgagctgagagaggagcacatcgacaaggtgttcaagcacaaggacctgcagcagcagctggtggacgccaagctgcagcaggcccaggagatgctgaaggaggccgaggagagacaccagagagagaaggacttcctgctgaaggaggccgtggagagccagagaatgtgcgagctgatgaagcagcaggagacccacctgaagcagcagctggccctgtacaccgagaagttcgaggagttccagaacaccctgagcaagagcagcgaggtgttcaccaccttcaagcaggagatggagaagatgaccaagaagatcaagaagctggagaaggagaccaccatgtacagaagcagatgggagagcagcaacaaggccctgctggagatggccgaggagaagaccgtgagagacaaggagctggagggcctgcaggtgaagatccagagactggagaagctgtgcagagccctgcagaccgagagaaacgacctgaacaagagagtgcaggacctgagcgccggcggccagggcagcctgaccgacagcggccccgagagaagacccgagggccccggcgcccaggcccccagcagccccagagtgaccgaggccccctgctaccccggcgcccccagcaccgaggccagcggccagaccggcccccaggagcccaccagcgccagagcctag

SEQ ID NO: 4123 - DNA, 1641 bp, synthetic construct; identical to SEQ ID NO: 4122
  misc_feature 1..1641: note = source = /note="Description of Artificial Sequence: Synthetic coding sequence"
  source 1..1641: mol_type = other DNA

SEQ ID NO: 4124 - DNA, 1392 bp, synthetic construct
  misc_feature 1..1392: note = source = /note="Description of Artificial Sequence: Synthetic coding sequence"
  source 1..1392: mol_type = other DNA
atgcacggcagctgcagcttcctgatgctgctgctgcccctgctgctgctgctggtggccaccaccggccccgtgggcgccctgaccgacgaggagaagagactgatggtggagctgcacaacctgtacagagcccaggtgagccccaccgccagcgacatgctgcacatgagatgggacgaggagctggccgccttcgccaaggcctacgccagacagtgcgtgtggggccacaacaaggagagaggcagaagaggcgagaacctgttcgccatcaccgacgagggcatggacgtgcccctggccatggaggagtggcaccacgagagagagcactacaacctgagcgccgccacctgcagccccggccagatgtgcggccactacacccaggtggtgtgggccaagaccgagagaatcggctgcggcagccacttctgcgagaagctgcagggcgtggaggagaccaacatcgagctgctggtgtgcaactacgagccccccggcaacgtgaagggcaagagaccctaccaggagggcaccccctgcagccagtgccccagcggctaccactgcaagaacagcctgtgcgagcccatcggcagccccgaggacgcccaggacctgccctacctggtgaccgaggcccccagcttcagagccaccgaggccagcgacagcagaaagatgggcacccccagcagcctggccaccggcatccccgccttcctggtgaccgaggtgagcggcagcctggccaccaaggccctgcccgccgtggagacccaggcccccaccagcctggccaccaaggacccccccagcatggccaccgaggcccccccctgcgtgaccaccgaggtgcccagcatcctggccgcccacagcctgcccagcctggacgaggagcccgtgaccttccccaagagcacccacgtgcccatccccaagagcgccgacaaggtgaccgacaagaccaaggtgcccagcagaagccccgagaacagcctggaccccaagatgagcctgaccggcgccagagagctgctgccccacgcccaggaggaggccgaggccgaggccgagctgccccccagcagcgaggtgctggccagcgtgttccccgcccaggacaagcccggcgagctgcaggccaccctggaccacaccggccacaccagcagcaagagcctgcccaacttccccaacaccagcgccaccgccaacgccaccggcggcagagccctggccctgcagagcagcctgcccggcgccgagggccccgacaagcccagcgtggtgagcggcctgaacagcggccccggccacgtgtggggccccctgctgggcctgctgctgctgccccccctggtgctggccggcatcttctag

SEQ ID NO: 4125 - DNA, 459 bp, synthetic construct
  misc_feature 1..459: note = source = /note="Description of Artificial Sequence: Synthetic coding sequence"
  source 1..459: mol_type = other DNA
atgatgctgccccagtggctgctgctgctgttcctgctgttcttcttcctgttcctgctgaccagaggcagcctgagccccaccaagtacaacctgctggagctgaaggagagctgcatcagaaaccaggactgcgagaccggctgctgccagagagcccccgacaactgcgagagccactgcgccgagaagggcagcgagggcagcctgtgccagacccaggtgttcttcggccagtacagagcctgcccctgcctgagaaacctgacctgcatctacagcaagaacgagaagtggctgagcatcgcctacggcagatgccagaagatcggcagacagaagctggccaagaagatgttcctggtgctgccccccagctgctgcctgctgctgctgcacctgctgagcagcctgcccagagccctgtgcagcccctgcagccccgagccccccccctag

SEQ ID NO: 4126 - DNA, 366 bp, synthetic construct
  misc_feature 1..366: note = source = /note="Description of Artificial Sequence: Synthetic coding sequence"
  source 1..366: mol_type = other DNA
atgatgctgccccagtggctgctgctgctgttcctgctgttcttcttcctgttcctgctgaccagaggcagcctgagccccaccaagtacaacctgctggagctgaaggagagctgcatcagaaaccaggactgcgagaccggctgctgccagagagcccccgacaactgcgagagccactgcgccgagaagggcagcgagggcagcctgtgccagacccaggtgttcttcggccagtacagagcctgcccctgcctgagaaacctgacctgcatctacagcaagaacgagaagtggctgagcatcgcctacggcagatgccagaagatcggcagacagaagctggccaagaagatgttcttctag

SEQ ID NO: 4127 - DNA, 1122 bp, synthetic construct
  misc_feature 1..1122: note = source = /note="Description of Artificial Sequence: Synthetic coding sequence"
  source 1..1122: mol_type = other DNA
atgagactgctggcctggctgatcttcctggccaactggggcggcgccagagccgagcccggcaagttctggcacatcgccgacctgcacctggaccccgactacaaggtgagcaaggaccccttccaggtgtgccccagcgccggcagccagcccgtgcccgacgccggcccctggggcgactacctgtgcgacagcccctgggccctgatcaacagcagcatctacgccatgaaggagatcgagcccgagcccgacttcatcctgtggaccggcgacgacaccccccacgtgcccgacgagaagctgggcgaggccgccgtgctggagatcgtggagagactgaccaagctgatcagagaggtgttccccgacaccaaggtgtacgccgccctgggcaaccacgacttccaccccaagaaccagttccccgccggcagcaacaacatctacaaccagatcgccgagctgtggaagccctggctgagcaacgagagcatcgccctgttcaagaagggcgccttctactgcgagaagctgcccggccccagcggcgccggcagaatcgtggtgctgaacaccaacctgtactacaccagcaacgccctgaccgccgacatggccgaccccggccagcagttccagtggctggaggacgtgctgaccgacgccagcaaggccggcgacatggtgtacatcgtgggccacgtgccccccggcttcttcgagaagacccagaacaaggcctggttcagagagggcttcaacgagaagtacctgaaggtggtgagaaagcaccacagagtgatcgccggccagttcttcggccaccaccacaccgacagcttcagaatgctgtacgacgacgccggcgtgcccatcagcgccatgttcatcacccccggcgtgaccccctggaagaccaccctgcccggcgtggtgaacggcgccaacaaccccgccatcagagtgttcgagtacgacagagccaccctgagcctgaaggtgagaagccccgccgaggccagaggcggcggctgggagggcctgaagtgcatcaccaccttcccccacagccagctgatccacctgcccctgaccaccgagccccaggagggctag

SEQ ID NO: 4128 - DNA, 810 bp, synthetic construct
  misc_feature 1..810: note = source = /note="Description of Artificial Sequence: Synthetic coding sequence"
  source 1..810: mol_type = other DNA
atgagactgctggcctggctgatcttcctggccaactggggcggcgccagagccgagcccgaggaggcccagggcccctgcgcccaggagaagggcaagggccccccccccaccagcatcctggccagcctggcccccggcctggaggccggcaagttctggcacatcgccgacctgcacctggaccccgactacaaggtgagcaaggaccccttccaggtgtgccccagcgccggcagccagcccgtgcccgacgccggcccctggggcgactacctgtgcgacagcccctgggccctgatcaacagcagcatctacgccatgaaggagatcgagcccgagcccgacttcatcctgtggaccggcgacgacaccccccacgtgcccgacgagaagctgggcgaggccgccgtgctggagatcgtggagagactgaccaagctgatcagagaggtgttccccgacaccaaggtgtacgccgccctgggcaaccacgacttccaccccaagaaccagttccccgccggcagcaacaacatctacaaccagatcgccgagctgtggaagccctggctgagcaacgagagcatcgccctgttcaagaagggcgccttctactgcgagaagctgcccggccccagcggcgccggcagaatcgtggtgctgaacaccaacctgtactacaccagcaacgccctgaccgccgacatggccgaccccggccagcagttccagtggctggaggacgtgctgaccgacgccagcaaggccggcgacatggtgtacatcgtgggccacgtgcccccctag

SEQ ID NO: 4129 - DNA, 1368 bp, synthetic construct
  misc_feature 1..1368: note = source = /note="Description of Artificial Sequence: Synthetic coding sequence"
  source 1..1368: mol_type = other DNA
atgagactgctggcctggctgatcttcctggccaactggggcggcgccagagccgagcccggcaagttctggcacatcgccgacctgcacctggaccccgactacaaggtgagcaaggaccccttccaggtgtgccccagcgccggcagccagcccgtgcccgacgccggcccctggggcgactacctgtgcgacagcccctgggccctgatcaacagcagcatctacgccatgaaggagatcgagcccgagcccgacttcatcctgtggaccggcgacgacaccccccacgtgcccgacgagaagctgggcgaggccgccgtgctggagatcgtggagagactgaccaagctgatcagagaggtgttccccgacaccaaggtgtacgccgccctgggcaaccacgacttccaccccaagaaccagttccccgccggcagcaacaacatctacaaccagatcgccgagctgtggaagccctggctgagcaacgagagcatcgccctgttcaagaagggcgccttctactgcgagaagctgcccggccccagcggcgccggcagaatcgtggtgctgaacaccaacctgtactacaccagcaacgccctgaccgccgacatggccgaccccggccagcagttccagtggctggaggacgtgctgaccgacgccagcaaggccggcgacatggtgtacatcgtgggccacgtgccccccggcttcttcgagaagacccagaacaaggcctggttcagagagggcttcaacgagaagtacctgaaggtggtgagaaagcaccacagagtgatcgccggccagttcttcggccaccaccacaccgacagcttcagaatgctgtacgacgacgccggcgtgcccatcagcgccatgttcatcacccccggcgtgaccccctggaagaccaccctgcccggcgtggtgaacggcgccaacaaccccgccatcagagtgttcgagtacgacagagccaccctgagcctgaaggacatggtgacctacttcatgaacctgagccaggccaacgcccagggcacccccagatgggagctggagtaccagctgaccgaggcctacggcgtgcccgacgccagcgcccacagcatgcacaccgtgctggacagaatcgccggcgaccagagcaccctgcagagatactacgtgtacaacagcgtgagctacagcgccggcgtgtgcgacgaggcctgcagcatgcagcacgtgtgcgccatgagacaggtggacatcgacgcctacaccacctgcctgtacgccagcggcaccacccccgtgccccagctgcccctgctgctgatggccctgctgggcctgtgcaccctggtgctgtag

SEQ ID NO: 4130 - DNA, 867 bp, synthetic construct
  misc_feature 1..867: note = source = /note="Description of Artificial Sequence: Synthetic coding sequence"
  source 1..867: mol_type = other DNA
atggccctggcccccccccccagaggcctgtggcaggccaaggacatcagccccatcgtgaaggccgccagaagagacggcgagctgctgctgagcgcccagctggacagcgaggagagagaccccggcgtgcccagacccagcccctacgccccctacatcctggtgtacgccaacgacctggccatcagcgagcccaacagcgtggccgtgaccctgcagagatacgaccccttccccgccggcgaccccgagcccagagccgcccccaacaacagcgccgaccccagagtgagaagagccgcccaggccaccggccccctgcaggacaacgagctgcccggcctggacgagagaccccccagagcccacgcccagcacttccacaagcaccagctgtggcccagccccttcagagccctgaagcccagacccggcagaaaggacagaagaaagaagggccaggaggtgttcatggccgccagccaggtgctggacttcgacgagaagaccatgcagaaggccagaagaaagcagtgggacgagcccagagtgtgcagcagaagatacctgaaggtggacttcgccgacatcggctggaacgagtggatcatcagccccaagagcttcgacgcctactactgcgccggcgcctgcgagttccccatgcccaagatcgtgagacccagcaaccacgccaccatccagagcatcgtgagagccgtgggcatcatccccggcatccccgagccctgctgcgtgcccgacaagatgaacagcctgggcgtgctgttcctggacgagaacagaaacgtggtgctgaaggtgtaccccaacatgagcgtggacacctgcgcctgcagatag

SEQ ID NO: 4131 - DNA, 1626 bp, synthetic construct
  misc_feature 1..1626: note = source = /note="Description of Artificial Sequence: Synthetic coding sequence"
  source 1..1626: mol_type = other DNA
atgcccttcagactgctgatccccctgggcctgctgtgcgccctgctgccccagcaccacggcgcccccggccccgacggcagcgcccccgaccccgcccactacagcttcagcctgaccctgatcgacgccctggacaccctgctgatcctgggcaacgtgagcgagttccagagagtggtggaggtgctgcaggacagcgtggacttcgacatcgacgtgaacgccagcgtgttcgagaccaacatcagagtggtgggcggcctgctgagcgcccacctgctgagcaagaaggccggcgtggaggtggaggccggctggccctgcagcggccccctgctgagaatggccgaggaggccgccagaaagctgctgcccgccttccagacccccaccggcatgccctacggcaccgtgaacctgctgcacggcgtgaaccccggcgagacccccgtgacctgcaccgccggcatcggcaccttcatcgtggagttcgccaccctgagcagcctgaccggcgaccccgtgttcgaggacgtggccagagtggccctgatgagactgtgggagagcagaagcgacatcggcctggtgggcaaccacatcgacgtgctgaccggcaagtgggtggcccaggacgccggcatcggcgccggcgtggacagctacttcgagtacctggtgaagggcgccatcctgctgcaggacaagaagctgatggccatgttcctggagtacaacaaggccatcagaaactacaccagattcgacgactggtacctgtgggtgcagatgtacaagggcaccgtgagcatgcccgtgttccagagcctggaggcctactggcccggcctgcagagcctgatcggcgacatcgacaacgccatgagaaccttcctgaactactacaccgtgtggaagcagttcggcggcctgcccgagttctacaacatcccccagggctacaccgtggagaagagagagggctaccccctgagacccgagctgatcgagagcgccatgtacctgtacagagccaccggcgaccccaccctgctggagctgggcagagacgccgtggagagcatcgagaagatcagcaaggtggagtgcggcttcgccaccatcaaggacctgagagaccacaagctggacaacagaatggagagcttcttcctggccgagaccgtgaagtacctgtacctgctgttcgaccccaccaacttcatccacaacaacggcagcaccttcgacgccgtgatcaccccctacggcgagtgcatcctgggcgccggcggctacatcttcaacaccgaggcccaccccatcgaccccgccgccctgcactgctgccagagactgaaggaggagcagtgggaggtggaggacctgatgagagagttctacagcctgaagagaagcagaagcaagttccagaagaacaccgtgagcagcggcccctgggagccccccgccagacccggcaccctgttcagccccgagaaccacgaccaggccagagagagaaagcccgccaagcagaaggtgcccctgctgagctgccccagccagcccttcaccagcaagctggccctgctgggccaggtgttcctggacagcagctag

SEQ ID NO: 4132 - DNA, 1737 bp, synthetic construct
  misc_feature 1..1737: note = source = /note="Description of Artificial Sequence: Synthetic coding sequence"
  source 1..1737: mol_type = other DNA
atgcccttcagactgctgatccccctgggcctgctgtgcgccctgctgccccagcaccacggcgcccccggccccgacggcagcgcccccgaccccgcccactacagagagagagtgaaggccatgttctaccacgcctacgacagctacctggagaacgccttccccttcgacgagctgagacccctgacctgcgacggccacgacacctggggcagcttcagcctgaccctgatcgacgccctggacaccctgctgatcctgggcaacgtgagcgagttccagagagtggtggaggtgctgcaggacagcgtggacttcgacatcgacgtgaacgccagcgtgttcgagaccaacatcagagtggtgggcggcctgctgagcgcccacctgctgagcaagaaggccggcgtggaggtggaggccggctggccctgcagcggccccctgctgagaatggccgaggaggccgccagaaagctgctgcccgccttccagacccccaccggcatgccctacggcaccgtgaacctgctgcacggcgtgaaccccggcgagacccccgtgacctgcaccgccggcatcggcaccttcatcgtggagttcgccaccctgagcagcctgaccggcgaccccgtgttcgaggacgtggccagagtggccctgatgagactgtgggagagcagaagcgacatcggcctggtgggcaaccacatcgacgtgctgaccggcaagtgggtggcccaggacgccggcatcggcgccggcgtggacagctacttcgagtacctggtgaagggcgccatcctgctgcaggacaagaagctgatggccatgttcctggagtacaacaaggccatcagaaactacaccagattcgacgactggtacctgtgggtgcagatgtacaagggcaccgtgagcatgcccgtgttccagagcctggaggcctactggcccggcctgcagagcctgatcggcgacatcgacaacgccatgagaaccttcctgaactactacaccgtgtggaagcagttcggcggcctgcccgagttctacaacatcccccagggctacaccgtggagaagagagagggctaccccctgagacccgagctgatcgagagcgccatgtacctgtacagagccaccggcgaccccaccctgctggagctgggcagagacgccgtggagagcatcgagaagatcagcaaggtggagtgcggcttcgccaccatcaaggacctgagagaccacaagctggacaacagaatggagagcttcttcctggccgagaccgtgaagtacctgtacctgctgttcgaccccaccaacttcatccacaacaacggcagcaccttcgacgccgtgatcaccccctacggcgagtgcatcctgggcgccggcggctacatcttcaacaccgaggcccaccccatcgaccccgccgccctgcactgctgccagagactgaaggaggagcagtgggaggtggaggacctgatgagagagttctacagcctgaagagaagcagaagcaagttccagaagaacaccgtgagcagcggcccctgggagccccccgccagacccggcaccctgttcagccccgagaaccacgaccaggccagagagagaaagcccgccaagcagaaggtgcccctgctgagctgccccagccagcccttcaccagcaagctggccctgctgggccaggtgttcctggacagcagctag

SEQ ID NO: 4133 - DNA, 495 bp, synthetic construct
  misc_feature 1..495: note = source = /note="Description of Artificial Sequence: Synthetic coding sequence"
  source 1..495: mol_type = other DNA
atgagaagctgctacgtggcccaggccggcctgaagctgcccggcagcagcgacccccccgccagcgccagccagagcaccagaatcaccgccagcggctacggcccccccagcagcagacccagcagcagagtggtgaacggcgaggacgccgtgccctacagctggccctggcaggtgagcctgcagtacgagaagagcggcagcttctaccacacctgcggcggcagcctgatcgcccccgactgggtggtgaccgccggccactgcatcagcagcagcagaacctaccaggtggtgctgggcgagtacgacagagccgtgaaggagggccccgagcaggtgatccccatcaacagcggcgacctgttcgtgcaccccctgtggaacagaagctgcgtggcctgcggcaacgacatcgccctgatcaagctgagcagaagcgcccagctgggcgacgccgtgcagctggccagcctgccccccgccggctag

SEQ ID NO: 4134 - DNA, 3663 bp, synthetic construct
  misc_feature 1..3663: note = source = /note="Description of Artificial Sequence: Synthetic coding sequence"
  source 1..3663: mol_type = other DNA
atgcccggcctgctgaactggatcaccggcgccgccctgcccctgaccgccagcgacgtgaccagctgcgtgagcggctacgccctgggcctgaccgccagcctgacctacggcaacctggaggcccagcccttccagggcctgttcgtgtaccccctggacgagtgcaccaccgtgatcggcttcgaggccgtgatcgccgacagagtggtgaccgtgcagatcaaggacaaggccaagctggagagcggccacttcgacgccagccacgtgagaagccccaccgtgaccggcaacatcctgcaggacggcgtgagcatcgccccccacagctgcacccccggcaaggtgaccctggacgaggacctggagagaatcctgttcgtggccaacctgggcaccatcgcccccatggagaacgtgaccatcttcatcagcaccagcagcgagctgcccaccctgcccagcggcgccgtgagagtgctgctgcccgccgtgtgcgcccccaccgtgccccagttctgcaccaagagcaccggcaccagcaaccagcaggcccagggcaaggacagacactgcttcggcgcctgggcccccggcagctggaacaagctgtgcctggccaccctgctgaacaccgaggtgagcaaccccatggagtacgagttcaacttccagctggagatcagaggcccctgcctgctggccggcgtggagagccccacccacgagatcagagccgacgccgcccccagcgccagaagcgccaagagcatcatcatcaccctggccaacaagcacaccttcgacagacccgtggagatcctgatccaccccagcgagccccacatgccccacgtgctgatcgagaagggcgacatgaccctgggcgagttcgaccagcacctgaagggcagaaccgacttcatcaagggcatgaagaagaagagcagagccgagagaaagaccgagatcatcagaaagagactgcacaaggacatcccccaccacagcgtgatcatgctgaacttctgccccgacctgcagagcgtgcagccctgcctgagaaaggcccacggcgagttcatcttcctgatcgacagaagcagcagcatgagcggcatcagcatgcacagagtgaaggacgccatgctggtggccctgaagagcctgatgcccgcctgcctgttcaacatcatcggcttcggcagcaccttcaagagcctgttccccagcagccagacctacagcgaggacagcctggccatggcctgcgacgacatccagagaatgaaggccgacatgggcggcaccaacatcctgagccccctgaagtgggtgatcagacagcccgtgcacagaggccaccccagactgctgttcgtgatcaccgacggcgccgtgaacaacaccggcaaggtgctggagctggtgagaaaccacgccttcagcaccagatgctacagcttcggcatcggccccaacgtgtgccacagactggtgaagggcctggccagcgtgagcgagggcagcgccgagctgctgatggagggcgagagactgcagcccaagatggtgaagagcctgaagaaggccatggcccccgtgctgagcgacgtgaccgtggagtggatcttccccgagaccaccgaggtgctggtgagccccgtgagcgccagcagcctgttccccggcgagagactggtgggctacggcatcgtgtgcgacgccagcctgcacatcagcaaccccagaagcgacaagagaagaagatacagcatgctgcacagccaggagagcggcagcagcgtgttctaccacagccaggacgacggccccggcctggagggcggcgactgcgccaagaacagcggcgcccccttcatcctgggccaggccaagaacgccagactggccagcggcgacagcaccaccaagcacgacctgaacctgagccagagaagaagagcctacagcaccaaccagatcaccaaccacaagcccctgcccagagccaccatggccagcgaccccatgcccgccgccaagagataccccctgagaaaggccagactgcaggacctgaccaaccagaccagcctggacgtgcagagatggcagatcgacctgcagcccctgctgaacagcggccaggacctgaaccagggccccaagctgagaggccccggcgccagaagacccagcctgctgccccagggctgccagcccttcctgccctggggccaggagacccaggcctggagccccgtgagagagagaaccagcgacagcagaagccccggcgacctggagcccagccaccaccccagcgccttcgagaccgagaccagcagcgactgggacccccccgccgagagccaggagagagccagccccagcagacccgccacccccgcccccgtgctgggcaaggccctggtgaagggcctgcacgacagccagagactgcagtgggaggtgagcttcgagctgggcacccccggccccgagagaggcggcgcccaggacgccgacctgtggagcgagaccttccaccacctggccgccagagccatcatcagagacttcgagcagctggccgagagagagggcgagatcgagcagggcagcaacagaagataccaggtgagcgccctgcacaccagcaaggcctgcaacatcatcagcaagtacaccgccttcgtgcccgtggacgtgagcaagagcagatacctgcccaccgtggtggagtaccccaacagcgccgccctgagaatgctgggcagcagagccctggcccagcagtggagaggcaccagcagcggcttcggcagaccccagaccatgctgggcgaggacagcgcccccggcaacggcaagttccaggccctgaacatggaggccagccccaccgccctgttcagcgaggccagaagccccggcagagagaagcacggcgccagcgagggcccccagagaagcctggccaccaacaccctgagcagcatgaaggccagcgagaacctgttcggcagctggctgaacctgaacaagagcagactgctgaccagagccgccaagggcttcctgagcaagcccctgatcaaggccgtggagagcaccagcggcaaccagagcttcgactacatccccctggtgagcctgcagctggccagcggcgccttcctgctgaacgaggccttctgcgaggccacccacatccccatggagaagctgaagtggaccagccccttcacctgccacagagtgagcctgaccaccagacccagcgagagcaagacccccagcccccagctgtgcaccagcagcccccccagacaccccagctgcgacagcttcagcctggagcccctggccaagggcaagctgggcctggagcccagagccgtggtggagcacaccggcaagctgtgggccaccgtggtgggcctggcctggctggagcacagcagcgccagctacttcaccgagtgggagctggtggccgccaaggccaacagctggctggagcagcaggaggtgcccgagggcagaacccagggcaccctgaaggccgccgccagacagctgttcgtgctgctgagacactgggacgagaacctggagttcaacatgctgtgctacaaccccaactacgtgtag

SEQ ID NO: 4135 - DNA, 3051 bp, synthetic construct
  misc_feature 1..3051: note = source = /note="Description of Artificial Sequence: Synthetic coding sequence"
  source 1..3051: mol_type = other DNA
atgcccggcctgctgaactggatcaccggcgccgccctgcccctgaccgccagcgacgtgaccagctgcgtgagcggctacgccctgggcctgaccgccagcctgacctacggcaacctggaggcccagcccttccagggcctgttcgtgtaccccctggacgagtgcaccaccgtgatcggcttcgaggccgtgatcgccgacagagtggtgaccgtgcagatcaaggacaaggccaagctggagagcggccacttcgacgccagccacgtgagaagccccaccgtgaccggcaacatcctgcaggacggcgtgagcatcgccccccacagctgcacccccggcaaggtgaccctggacgaggacctggagagaatcctgttcgtggccaacctgggcaccatcgcccccatggagaacgtgaccatcttcatcagcaccagcagcgagctgcccaccctgcccagcggcgccgtgagagtgctgctgcccgccgtgtgcgcccccaccgtgccccagttctgcaccaagagcaccggcaccagcaaccagcaggcccagggcaaggacagacactgcttcggcgcctgggcccccggcagctggaacaagctgtgcctggccaccctgctgaacaccgaggtgagcaaccccatggagtacgagttcaacttccagctggagatcagaggcccctgcctgctggccggcgtggagagccccacccacgagatcagagccgacgccgcccccagcgccagaagcgccaagagcatcatcatcaccctggccaacaagcacaccttcgacagacccgtggagatcctgatccaccccagcgagccccacatgccccacgtgctgatcgagaagggcgacatgaccctgggcgagttcgaccagcacctgaagggcagaaccgacttcatcaagggcatgaagaagaagagcagagccgagagaaagaccgagatcatcagaaagagactgcacaaggacatcccccaccacagcgtgatcatgctgaacttctgccccgacctgcagagcgtgcagccctgcctgagaaaggcccacggcgagttcatcttcctgatcgacagaagcagcagcatgagcggcatcagcatgcacagagtgaaggacgccatgctggtggccctgaagagcctgatgcccgcctgcctgttcaacatcatcggcttcggcagcaccttcaagagcctgttccccagcagccagacctacagcgaggacagcctggccatggcctgcgacgacatccagagaatgaaggccgacatgggcggcaccaacatcctgagccccctgaagtgggtgatcagacagcccgtgcacagaggccaccccagactgctgttcgtgatcaccgacggcgccgtgaacaacaccggcaaggtgctggagctggtgagaaaccacgccttcagcaccagatgctacagcttcggcatcggccccaacgtgtgccacagactggtgaagggcctggccagcgtgagcgagggcagcgccgagctgctgatggagggcgagagactgcagcccaagatggtgaagagcctgaagaaggccatggcccccgtgctgagcgacgtgaccgtggagtggatcttccccgagaccaccgaggtgctggtgagccccgtgagcgccagcagcctgttccccggcgagagactggtgggctacggcatcgtgtgcgacgccagcctgcacatcagcaaccccagaagcgacaagagaagaagatacagcatgctgcacagccaggagagcggcagcagcgtgttctaccacagccaggacgacggccccggcctggagggcggcgactgcgccaagaacagcggcgcccccttcatcctgggccaggccaagaacgccagactggccagcggcgacagcaccaccaagcacgacctgaacctgagccagagaagaagagcctacagcaccaaccagatcaccaaccacaagcccctgcccagagccaccatggccagcgaccccatgcccgccgccaagagataccccctgagaaaggccagactgcaggacctgaccaaccagaccagcctggacgtgcagagatggcagatcgacctgcagcccctgctgaacagcggccaggacctgaaccagggccccaagctgagaggccccggcgccagaagacccagcctgctgccccagggctgccagcccttcctgccctggggccaggagacccaggcctggagccccgtgagagagagaaccagcgacagcagaagccccggcgacctggagcccagccaccaccccagcgccttcgagaccgagaccagcagcgactgggacccccccgccgagagccaggagagagccagccccagcagacccgccacccccgcccccgtgctgggcaaggccctggtgaagggcctgcacgacagccagagactgcagtgggaggtgagcttcgagctgggcacccccggccccgagagaggcggcgcccaggacgccgacctgtggagcgagaccttccaccacctggccgccagagccatcatcagagacttcgagcagctggccgagagagagggcgagatcgagcagggcagcaacagaagataccaggtgagcgccctgcacaccagcaaggcctgcaacatcatcagcaagtacaccgccttcgtgcccgtggacgtgagcaagagcagatacctgcccaccgtggtggagtaccccaacagcgccgccctgagaatgctgggcagcagagccctggcccagcagtggagaggcaccagcagcggcttcggcagaccccagaccatgctgggcgaggacagcgcccccggcaacggccccagaaagtgcagccagaccctgatgggcttcaagaccaagaccgagaccgagcacagcgtgagaggctggaagcccagaggcgccctgcagaaccagagcgtgctgagcaccagctggagccactggccccccaagcccagaagaaccagcagcacccccgagcccagctag

SEQ ID NO: 4136 - DNA, 3663 bp, synthetic construct; identical to SEQ ID NO: 4134
  misc_feature 1..3663: note = source = /note="Description of Artificial Sequence: Synthetic coding sequence"
  source 1..3663: mol_type = other DNA

SEQ ID NO: 4137 - DNA, 5235 bp, synthetic construct
  misc_feature 1..5235: note = source = /note="Description of Artificial Sequence: Synthetic coding sequence"
  source 1..5235: mol_type = other DNA
atgagactgctgtggggcctgatctgggccagcagcttcttcaccctgagcctgcagaagcccagactgctgctgttcagccccagcgtggtgcacctgggcgtgcccctgagcgtgggcgtgcagctgcaggacgtgcccagaggccaggtggtgaagggcagcgtgttcctgagaaaccccagcagaaacaacgtgccctgcagccccaaggtggacttcaccctgagcagcgagagagacttcgccctgctgagcctgcaggtgcccctgaaggacgccaagagctgcggcctgcaccagctgctgagaggccccgaggtgcagctggtggcccacagcccctggctgaaggacagcctgagcagaaccaccaacatccagggcatcaacctgctgttcagcagcagaagaggccacctgttcctgcagaccgaccagcccatctacaaccccggccagagagtgagatacagagtgttcgccctggaccagaagatgagacccagcaccgacaccatcaccgtgatggtggagaacagccacggcctgagagtgagaaagaaggaggtgtacatgcccagcagcatcttccaggacgacttcgtgatccccgacatcagcgagcccggcacctggaagatcagcgccagattcagcgacggcctggagagcaacagcagcacccagttcgaggtgaagaagtacgtgctgcccaacttcgaggtgaagatcacccccggcaagccctacatcctgaccgtgcccggccacctggacgagatgcagctggacatccaggccagatacatctacggcaagcccgtgcagggcgtggcctacgtgagattcggcctgctggacgaggacggcaagaagaccttcttcagaggcctggagagccagaccaagctggtgaacggccagagccacatcagcctgagcaaggccgagttccaggacgccctggagaagctgaacatgggcatcaccgacctgcagggcctgagactgtacgtggccgccgccatcatcgagtaccccggcggcgagatggaggaggccgagctgaccagctggtacttcgtgagcagccccttcagcctggacctgagcaagaccaagagacacctggtgcccggcgcccccttcctgctgcaggccctggtgagagagatgagcggcagccccgccagcggcatccccgtgaaggtgagcgccaccgtgagcagccccggcagcgtgcccgaggtgcaggacatccagcagaacaccgacggcagcggccaggtgagcatccccatcatcatcccccagaccatcagcgagctgcagctgagcgtgagcgccggcagcccccaccccgccatcgccagactgaccgtggccgccccccccagcggcggccccggcttcctgagcatcgagagacccgacagcagaccccccagagtgggcgacaccctgaacctgaacctgagagccgtgggcagcggcgccaccttcagccactactactacatgatcctgagcagaggccagatcgtgttcatgaacagagagcccaagagaaccctgaccagcgtgagcgtgttcgtggaccaccacctggcccccagcttctacttcgtggccttctactaccacggcgaccaccccgtggccaacagcctgagagtggacgtgcaggccggcgcctgcgagggcaagctggagctgagcgtggacggcgccaagcagtacagaaacggcgagagcgtgaagctgcacctggagaccgacagcctggccctggtggccctgggcgccctggacaccgccctgtacgccgccggcagcaagagccacaagcccctgaacatgggcaaggtgttcgaggccatgaacagctacgacctgggctgcggccccggcggcggcgacagcgccctgcaggtgttccaggccgccggcctggccttcagcgacggcgaccagtggaccctgagcagaaagagactgagctgccccaaggagaagaccaccagaaagaagagaaacgtgaacttccagaaggccatcaacgagaagctgggccagtacgccagccccaccgccaagagatgctgccaggacggcgtgaccagactgcccatgatgagaagctgcgagcagagagccgccagagtgcagcagcccgactgcagagagcccttcctgagctgctgccagttcgccgagagcctgagaaagaagagcagagacaagggccaggccggcctgcagagagccctggagatcctgcaggaggaggacctgatcgacgaggacgacatccccgtgagaagcttcttccccgagaactggctgtggagagtggagaccgtggacagattccagatcctgaccctgtggctgcccgacagcctgaccacctgggagatccacggcctgagcctgagcaagaccaagggcctgtgcgtggccacccccgtgcagctgagagtgttcagagagttccacctgcacctgagactgcccatgagcgtgagaagattcgagcagctggagctgagacccgtgctgtacaactacctggacaagaacctgaccgtgagcgtgcacgtgagccccgtggagggcctgtgcctggccggcggcggcggcctggcccagcaggtgctggtgcccgccggcagcgccagacccgtggccttcagcgtggtgcccaccgccgccgccgccgtgagcctgaaggtggtggccagaggcagcttcgagttccccgtgggcgacgccgtgagcaaggtgctgcagatcgagaaggagggcgccatccacagagaggagctggtgtacgagctgaaccccctggaccacagaggcagaaccctggagatccccggcaacagcgaccccaacatgatccccgacggcgacttcaacagctacgtgagagtgaccgccagcgaccccctggacaccctgggcagcgagggcgccctgagccccggcggcgtggccagcctgctgagactgcccagaggctgcggcgagcagaccatgatctacctggcccccaccctggccgccagcagatacctggacaagaccgagcagtggagcaccctgccccccgagaccaaggaccacgccgtggacctgatccagaagggctacatgagaatccagcagttcagaaaggccgacggcagctacgccgcctggctgagcagaggcagcagcacctggctgaccgccttcgtgctgaaggtgctgagcctggcccaggagcaggtgggcggcagccccgagaagctgcaggagaccagcaactggctgctgagccagcagcaggccgacggcagcttccaggacctgagccccgtgatccacagaagcatgcagggcggcctggtgggcaacgacgagaccgtggccctgaccgccttcgtgaccatcgccctgcaccacggcctggccgtgttccaggacgagggcgccgagcccctgaagcagagagtggaggccagcatcagcaaggccagcagcttcctgggcgagaaggccagcgccggcctgctgggcgcccacgccgccgccatcaccgcctacgccctgaccctgaccaaggcccccgccgacctgagaggcgtggcccacaacaacctgatggccatggcccaggagaccggcgacaacctgtactggggcagcgtgaccggcagccagagcaacgccgtgagccccacccccgcccccagaaaccccagcgaccccatgccccaggcccccgccctgtggatcgagaccaccgcctacgccctgctgcacctgctgctgcacgagggcaaggccgagatggccgaccaggccgccgcctggctgaccagacagggcagcttccagggcggcttcagaagcacccaggacaccgtgatcgccctggacgccctgagcgcctactggatcgccagccacaccaccgaggagagaggcctgaacgtgaccctgagcagcaccggcagaaacggcttcaagagccacgccctgcagctgaacaacagacagatcagaggcctggaggaggagctgcagttcagcctgggcagcaagatcaacgtgaaggtgggcggcaacagcaagggcaccctgaaggtgctgagaacctacaacgtgctggacatgaagaacaccacctgccaggacctgcagatcgaggtgaccgtgaagggccacgtggagtacaccatggaggccaacgaggactacgaggactacgagtacgacgagctgcccgccaaggacgaccccgacgcccccctgcagcccgtgacccccctgcagctgttcgagggcagaagaaacagaagaagaagagaggcccccaaggtggtggaggagcaggagagcagagtgcactacaccgtgtgcatctggagaaacggcaaggtgggcctgagcggcatggccatcgccgacgtgaccctgctgagcggcttccacgccctgagagccgacctggagaagctgaccagcctgagcgacagatacgtgagccacttcgagaccgagggcccccacgtgctgctgtacttcgacagcgtgcccaccagcagagagtgcgtgggcttcgaggccgtgcaggaggtgcccgtgggcctggtgcagcccgccagcgccaccctgtacgactactacaaccccgagagaagatgcagcgtgttctacggcgcccccagcaagagcagactgctggccaccctgtgcagcgccgaggtgtgccagtgcgccgagggcaagtgccccagacagagaagagccctggagagaggcctgcaggacgaggacggctacagaatgaagttcgcctgctactaccccagagtggagtacggcttccaggtgaaggtgctgagagaggacagcagagccgccttcagactgttcgagaccaagatcacccaggtgctgcacttcaccaaggacgtgaaggccgccgccaaccagatgagaaacttcctggtgagagccagctgcagactgagactggagcccggcaaggagtacctgatcatgggcctggacggcgccacctacgacctggagggccacccccagtacctgctggacagcaacagctggatcgaggagatgcccagcgagagactgtgcagaagcaccagacagagagccgcctgcgcccagctgaacgacttcctgcaggagtacggcacccagggctgccaggtgtag

SEQ ID NO: 4138 - DNA, 1242 bp, synthetic construct
  misc_feature 1..1242: note = source = /note="Description of Artificial Sequence: Synthetic coding sequence"
  source 1..1242: mol_type = other DNA
atgaagggcgccctgggcagccccgtggccgccgccggcgccgccatgcaggagagcttcggctgcgtggtggccaacagattccaccagctgctggacgacgagagcgaccccttcgacatcctgagagaggccgagagaagaagacagcagcagctgcagagaaagagaagagacgaggccgccgccgccgccggcgccggccccagaggcggcagaagccccgccggcgccagcggccacagagccggcgccggcggcagaagagagagccagaaggagagaaagagcctgcccgcccccgtggcccagagacccgacagccccggcggcggcctgcaggcccccggccagaagagaacccccagaagaggcgagcagcagggctggaacgacagcagaggccccgagggcatgctggagagagccgagagaagaagctacagagagtacagaccctacgagaccgagagacaggccgacttcaccgccgagaagttccccgacgagaagcccggcgacagattcgacagagacagacccctgagaggcagaggcggccccagaggcggcatgagaggcagaggcagaggcggccccggcaacagagtgttcgacgccttcgaccagagaggcaagagagagttcgagagatacggcggcaacgacaagatcgccgtgagaaccgaggacaacatgggcggctgcggcgtgagaacctggggcagcggcaaggacaccagcgacgtggagcccaccgcccccatggaggagcccaccgtggtggaggagagccagggcacccccgaggaggagagccccgccaaggtgcccgagctggaggtggaggaggagacccaggtgcaggagatgaccctggacgagtggaagaacctgcaggagcagaccagacccaagcccgagttcaacatcagaaagcccgagagcaccgtgcccagcaaggccgtggtgatccacaagagcaagtacagagacgacatggtgaaggacgactacgaggacgacagccacgtgttcagaaagcccgccaacgacatcaccagccagctggagatcaacttcggcaacctgcccagacccggcagaggcgccagaggcggcaccagaggcggcagaggcagaatcagaagagccgagaactacggccccagagccgaggtggtgatgcaggacgtggcccccaaccccgacgaccccgaggacttccccgccctgagctag

SEQ ID NO: 4139 - DNA, 927 bp, synthetic construct
  misc_feature 1..927: note = source = /note="Description of Artificial Sequence: Synthetic coding sequence"
  source 1..927: mol_type = other DNA
atgaagggcgccctgggcagccccgtggccgccgccggcgccgccatgcaggagagcttcggctgcgtggtggccaacagattccaccagctgctggacgacgagagcgaccccttcgacatcctgagagaggccgagagaagaagacagcagcagctgcagagaaagagaagagacgaggccgccgccgccgccggcgccggccccagaggcggcagaagccccgccggcgccagcggccacagagccggcgccggcggcagaagagagagccagaaggagagaaagagcctgcccgcccccgtggcccagagacccgacagccccggcggcggcctgcaggcccccggccagaagagaacccccagaagaggcgagcagcagggctggaacgacagcagaggccccgagggcatgctggagagagccgagagaagaagctacagagagtacagaccctacgagaccgagagacaggccgacttcaccgccgagaagttccccgacgagaaggtgcccgagctggaggtggaggaggagacccaggtgcaggagatgaccctggacgagtggaagaacctgcaggagcagaccagacccaagcccgagttcaacatcagaaagcccgagagcaccgtgcccagcaaggccgtggtgatccacaagagcaagtacagagacgacatggtgaaggacgactacgaggacgacagccacgtgttcagaaagcccgccaacgacatcaccagccagctggagatcaacttcggcaacctgcccagacccggcagaggcgccagaggcggcaccagaggcggcagaggcagaatcagaagagccgagaactacggccccagagccgaggtggtgatgcaggacgtggcccccaaccccgacgaccccgaggacttccccgccctgagctag

SEQ ID NO: 4140 - DNA, 1437 bp, synthetic construct
  misc_feature 1..1437: note = source = /note="Description of Artificial Sequence: Synthetic coding sequence"
  source 1..1437: mol_type = other DNA
atgcccagaagaggctacagcaagcccggcagctggggcagcttctgggccatgctgaccctggtgggcctggtgacccacgccgcccagagagccgacgtgggcggcgaggccgccggcaccagcatcaaccacagccaggccgtgctgcagagactgcaggagctgctgagacagggcaacgccagcgacgtggtgctgagagtgcaggccgccggcaccgacgaggtgagagtgttccacgcccacagactgctgctgggcctgcacagcgagctgttcctggagctgctgagcaaccagagcgaggccgtgctgcaggagccccaggactgcgccgccgtgttcgacaagttcatcagatacctgtactgcggcgagctgaccgtgctgctgacccaggccatccccctgcacagactggccaccaagtacggcgtgagcagcctgcagagaggcgtggccgactacatgagagcccacctggccggcggcgccggccccgccgtgggctggtaccactacgccgtgggcaccggcgacgaggccctgagagagagctgcctgcagttcctggcctggaacctgagcgccgtggccgccagcaccgagtggggcgccgtgagccccgagctgctgtggcagctgctgcagagaagcgacctggtgctgcaggacgagctggagctgttccacgccctggaggcctggctgggcagagccagacccccccccgccgtggccgagagagccctgagagccatcagataccccatgatcccccccgcccagctgttccagctgcaggccagaagcgccgccctggccagacacggccccgccgtggccgacctgctgctgcaggcctaccagttccacgccgccagccccctgcactacgccaagttcttcgacgtgaacggcagcgccttcctgcccagaaactacctggcccccgcctggggcgccccctgggtgatcaacaaccccgccagagacgacagaagcaccagcttccagacccagctgggccccagcggccacgacgccggcagaagagtgacctggaacgtgctgttcagccccagatggctgcccgtgagcctgagacccgtgtacgccgacgccgccggcaccgccctgcccgccgccagacccgaggacggcagacccagactggtggtgacccccgccagcagcggcggcgacgccgccggcgtgagcttccagaagaccgtgctggtgggcgccagacagcagggcagactgctggtgagacacgcctacagcttccaccagagcagcgaggaggccggcgacttcctggcccacgccgacctgcagagaagaaacagcgagtacctggtggagaacgccctgcacctgcacctgatcgtgaagcccgtgtaccacaccctgatcagaacccccaagtag

SEQ ID NO: 4141 - DNA, 477 bp, synthetic construct
  misc_feature 1..477: note = source = /note="Description of Artificial Sequence: Synthetic coding sequence"
  source 1..477: mol_type = other DNA
atgtgctgccccggcggccactacaccctgatcctgagaagaggcaacagattcagaagagagaagagacccgccaaggtgaccggcgcccagaccgaggtgcagctggccccccccctgcccagaggcagagccagaagaagcccctggagcgtgcccatcagcctgagcatcgacagactggagttcgacctgctgtaccccgccatcaagggcgacaccatccagctgtacctgggcgccaagctgctggacagccagggcaaggtgaccaagtggttcaacaacagcgccgccagcctgaccatgcccaccctggacaacatccccttcagcctgatcgtgagccaggacgtggtgaaggccgccgtggccgccgtgctgagccccgaggagttcatggtgctgctggacagcgtgctgcccgagagcgcccacagactgaagagcagcatcggcctgatcaacgagaagtag

SEQ ID NO: 4142 - DNA, 771 bp, synthetic construct; identical to SEQ ID NO: 3949
  misc_feature 1..771: note = source = /note="Description of Artificial Sequence: Synthetic coding sequence"
  source 1..771: mol_type = other DNA

SEQ ID NO: 4143 - DNA, 771 bp, synthetic construct; identical to SEQ ID NO: 3949
  misc_feature 1..771: note = source = /note="Description of Artificial Sequence: Synthetic coding sequence"
  source 1..771: mol_type = other DNA

SEQ ID NO: 4144 - DNA, 657 bp, synthetic construct
  misc_feature 1..657: note = source = /note="Description of Artificial Sequence: Synthetic coding sequence"
  source 1..657: mol_type = other DNA
atgatgtgccccctgtggagactgctgatcttcctgggcctgctggccctgcccctggccccccacaagcagccctggcccggcctggcccaggcccacagagacaacaagagcaccctggccagaatcatcgcccagggcctgatcaagcacaacgccgagagcagaatccagaacatccacttcggcgacagactgaacgccagcgcccaggtggcccccggcctggtgggctggctgatcagcggcagaaagcaccagcagcagcaggagagcagaagcttcgacaacaacatcgtgaagatgtgcgcccacatgagcatcgtggtggagttctggctggagaaggacgagttcggcagaagagacctggtgatcggcaagtgcgacgccgagcccagcagcgtgcacgtggccatcctgaccgaggccatcccccccaagatgaaccagttcctgtacaacctgaaggagaacctgcagaaggtgctgccccacatggtggagagccaggtgtgccccctgatcggcgagatcctgggccagctggacgtgaagctgctgaagagcctgatcgagcaggaggccgcccacgagcccacccaccacgagaccagccagcccagcgcctgccaggccggcgagagccccagctag

SEQ ID NO: 4145 - DNA, 765 bp, synthetic construct
  misc_feature 1..765: note = source = /note="Description of Artificial Sequence: Synthetic coding sequence"
  source 1..765: mol_type = other DNA
atgatgtgccccctgtggagactgctgatcttcctgggcctgctggccctgcccctggccccccacaagcagccctggcccggcctggcccaggcccacagagacaacaagagcaccctggccagaatcatcgcccagggcctgatcaagcacaacgccgagagcagaatccagaacatccacttcggcgacagactgaacgccagcgcccaggtggcccccggcctggtgggctggctgatcagcggcagaaagcaccagcagcagcaggagagcagcatcaacatcaccaacatccagctggactgcggcggcatccagatcagcttccacaaggagtggttcagcgccaacatcagcctggagttcgacctggagctgagacccagcttcgacaacaacatcgtgaagatgtgcgcccacatgagcatcgtggtggagttctggctggagaaggacgagttcggcagaagagacctggtgatcggcaagtgcgacgccgagcccagcagcgtgcacgtggccatcctgaccgaggccatcccccccaagatgaaccagttcctgtacaacctgaaggagaacctgcagaaggtgctgccccacatggtggagagccaggtgtgccccctgatcggcgagatcctgggccagctggacgtgaagctgctgaagagcctgatcgagcaggaggccgcccacgagcccacccaccacgagaccagccagcccagcgcctgccaggccggcgagagccccagctag

SEQ ID NO: 4146 - DNA, 1635 bp, synthetic construct
  misc_feature 1..1635: note = source = /note="Description of Artificial Sequence: Synthetic coding sequence"
  source 1..1635: mol_type = other DNA
atgaagatcagcatgatcaactacaagagcctgctggccctgctgttcatcctggccagctggatcatcttcaccgtgttccagaacagcaccaaggtgtggagcgccctgaacctgagcatcagcctgcactactggaacaacagcaccaagagcctgttccccaagacccccctgatcagcctgaagcccctgaccgagaccgagctgagaatcaaggagatcatcgagaagctggaccagcagatcccccccagacccttcacccacgtgaacaccaccaccagcgccacccacagcaccgccaccatcctgaaccccagagacacctactgcagaggcgaccagctgcacatcctgctggaggtgagagaccacctgggcagaagaaagcagtacggcggcgacttcctgagagccagaatgagcagccccgccctgatggccggcgccagcggcaaggtgaccgacttcaacaacggcacctacctggtgagcttcaccctgttctgggagggccaggtgagcctgagcctgctgctgatccaccccagcgagggcgtgagcgccctgtggagcgccagaaaccagggctacgacagagtgatcttcaccggccagttcgtgaacggcaccagccaggtgcacagcgagtgcggcctgatcctgaacaccaacgccgagctgtgccagtacctggacaacagagaccaggagggcttctactgcgtgagaccccagcacatgccctgcgccgccctgacccacatgtacagcaagaacaagaaggtgagctacctgagcaagcaggagaagagcctgttcgagagaagcaacgtgggcgtggagatcatggagaagttcaacaccatcagcgtgagcaagtgcaacaaggagaccgtggccatgaaggagaagtgcaagttcggcatgaccagcaccatccccagcggccacgtgtggagaaacacctggaaccccgtgagctgcagcctggccaccgtgaagatgaaggagtgcctgagaggcaagctgatctacctgatgggcgacagcaccatcagacagtggatggagtacttcaaggccagcatcaacaccctgaagagcgtggacctgcacgagagcggcaagctgcagcaccagctggccgtggacctggacagaaacatcaacatccagtggcagaagtactgctaccccctgatcggcagcatgacctacagcgtgaaggagatggagtacctgaccagagccatcgacagaaccggcggcgagaagaacaccgtgatcgtgatcagcctgggccagcacttcagacccttccccatcgacgtgttcatcagaagagccctgaacgtgcacaaggccatccagcacctgctgctgagaagccccgacaccatggtgatcatcaagaccgagaacatcagagagatgtacaacgacgccgagagattcagcgacttccacggctacatccagtacctgatcatcaaggacatcttccaggacctgagcgtgagcatcatcgacgcctgggacatcaccatcgcctacggcaccaacaacgtgcaccccccccagcacgtggtgggcaaccagatcaacatcctgctgaactacatctgctag

SEQ ID NO: 4147 - DNA, 1845 bp, synthetic construct
  misc_feature 1..1845: note = source = /note="Description of Artificial Sequence: Synthetic coding sequence"
  source 1..1845: mol_type = other DNA
atgtggatggcctggtgcgtggccgccctgagcgtggtggccgtgtgcggcaccagccacgagaccaacaccgtgctgagagtgaccaaggacgtgctgagcaacgccatcagcggcatgctgcagcagagcgacgccctgcacagcgccctgagagaggtgcccctgggcgtgggcgacatcccctacaacgacttccacgtgagaggccccccccccgtgtacaccaacggcaagaagctggacggcatctaccagtacggccacatcgagaccaacgacaacaccgcccagctgggcggcaagtacagatacggcgagatcctggagagcgagggcagcatcagagacctgagaaacagcggctacagaagcgccgagaacgcctacggcggccacagaggcctgggcagatacagagccgcccccgtgggcagactgcacagaagagagctgcagcccggcgagatcccccccggcgtggccaccggcgccgtgggccccggcggcctgctgggcaccggcggcatgctggccgccgacggcatcctggccggccagggcggcctgctgggcggcggcggcctgctgggcgacggcggcctgctgggcggcggcggcgtgctgggcgtgctgggcgagggcggcatcctgagcaccgtgcagggcatcaccggcctgagaatcgtggagctgaccctgcccagagtgagcgtgagactgctgcccggcgtgggcgtgtacctgagcctgtacaccagagtggccatcaacggcaagagcctgatcggcttcctggacatcgccgtggaggtgaacatcaccgccaaggtgagactgaccatggacagaaccggctaccccagactggtgatcgagagatgcgacaccctgctgggcggcatcaaggtgaagctgctgagaggcctgctgcccaacctggtggacaacctggtgaacagagtgctggccgacgtgctgcccgacctgctgtgccccatcgtggacgtggtgctgggcctggtgaacgaccagctgggcctggtggacagcctgatccccctgggcatcctgggcagcgtgcagtacaccttcagcagcctgcccctggtgaccggcgagttcctggagctggacctgaacaccctggtgggcgaggccggcggcggcctgatcgactaccccctgggctggcccgccgtgagccccaagcccatgcccgagctgccccccatgggcgacaacaccaagagccagctggccatgagcgccaacttcctgggcagcgtgctgaccctgctgcagaagcagcacgccctggacctggacatcaccaacggcatgttcgaggagctgccccccctgaccaccgccaccctgggcgccctgatccccaaggtgttccagcagtaccccgagagctgccccctgatcatcagaatccaggtgctgaacccccccagcgtgatgctgcagaaggacaaggccctggtgaaggtgctggccaccgccgaggtgatggtgagccagcccaaggacctggagaccaccatctgcctgatcgacgtggacaccgagttcctggccagcttcagcaccgagggcgacaagctgatgatcgacgccaagctggagaagaccagcctgaacctgagaaccagcaacgtgggcaacttcgacatcggcctgatggaggtgctggtggagaagatcttcgacctggccttcatgcccgccatgaacgccgtgctgggcagcggcgtgcccctgcccaagatcctgaacatcgacttcagcaacgccgacatcgacgtgctggaggacctgctggtgctgagcgcctag

SEQ ID NO: 4148 - DNA, 1431 bp, synthetic construct
  misc_feature 1..1431: note = source = /note="Description of Artificial Sequence: Synthetic coding sequence"
  source 1..1431: mol_type = other DNA
atgcagcccgtgatgctggccctgtggagcctgctgctgctgtggggcctggccaccccctgccaggagctgctggagaccgtgggcaccctggccagaatcgacaaggacgagctgggcaaggccatccagaacagcctggtgggcgagcccatcctgcagaacgtgctgggcagcgtgaccgccgtgaacagaggcctgctgggcagcggcggcctgctgggcggcggcggcctgctgggccacggcggcgtgttcggcgtggtggaggagctgagcggcctgaagatcgaggagctgaccctgcccaaggtgctgctgaagctgctgcccggcttcggcgtgcagctgagcctgcacaccaaggtgggcatgcactgcagcggccccctgggcggcctgctgcagctggccgccgaggtgaacgtgaccagcagagtggccctggccgtgagcagcagaggcacccccatcctgatcctgaagagatgcagcaccctgctgggccacatcagcctgttcagcggcctgctgcccacccccctgttcggcgtggtggagcagatgctgttcaaggtgctgcccggcctgctgtgccccgtggtggacagcgtgctgggcgtggtgaacgagctgctgggcgccgtgctgggcctggtgagcctgggcgccctgggcagcgtggagttcagcctggccaccctgcccctgatcagcaaccagtacatcgagctggacatcaaccccatcgtgaagagcgtggccggcgacatcatcgacttccccaagagcagagcccccgccaaggtgccccccaagaaggaccacaccagccaggtgatggtgcccctgtacctgttcaacaccaccttcggcctgctgcagaccaacggcgccctggacatggacatcacccccgagctggtgcccagcgacgtgcccctgaccaccaccgacctggccgccctgctgcccgaggccctgggcaagctgcccctgcaccagcagctgctgctgttcctgagagtgagagaggcccccaccgtgaccctgcacaacaagaaggccctggtgagcctgcccgccaacatccacgtgctgttctacgtgcccaagggcacccccgagagcctgttcgagctgaacagcgtgatgaccgtgagagcccagctggcccccagcgccaccaagctgcacatcagcctgagcctggagagactgagcgtgaaggtggccagcagcttcacccacgccttcgacggcagcagactggaggagtggctgagccacgtggtgggcgccgtgtacgcccccaagctgaacgtggccctggacgtgggcatccccctgcccaaggtgctgaacatcaacttcagcaacagcgtgctggagatcgtggagaacgccgtggtgctgaccgtggccagctag

SEQ ID NO: 4149 - DNA, 585 bp, synthetic construct
  misc_feature 1..585: note = source = /note="Description of Artificial Sequence: Synthetic coding sequence"
  source 1..585: mol_type = other DNA
atgcaggacgcccccctgagctgcctgagccccaccaagtggagcagcgtgagcagcgccgacagcaccgagaagagcgccagcggcgccggcaccagaaacctgcccttccagttctgcctgagacaggccctgagaatgaaggccgccggcatcctgaccctgatcggctgcctggtgaccggcgccgagagcaagatctacaccagatgcaagctggccaagatcttcagcagagccggcctggacaactactggggcttcagcctgggcaactggatctgcatggcctactacgagagcggctacaacaccaccgcccagaccgtgctggacgacggcagcatcgactacggcatcttccagatcaacagcttcgcctggtgcagaagaggcaagctgaaggagaacaaccactgccacgtggcctgcagcgccctgatcaccgacgacctgaccgacgccatcatctgcgccagaaagatcgtgaaggagacccagggcatgaactactggcagggctggaagaagcactgcgagggcagagacctgagcgagtggaagaagggctgcgaggtgagctag

SEQ ID NO: 4150 - DNA, 1266 bp, synthetic construct
  misc_feature 1..1266: note = source = /note="Description of Artificial Sequence: Synthetic coding sequence"
  source 1..1266: mol_type = other DNA
atgggcttcctgagccccatctacgtgatcttcttcttcttcggcgtgaaggtgcactgccagtacgagacctaccagtgggacgaggactacgaccaggagcccgacgacgactaccagaccggcttccccttcagacagaacgtggactacggcgtgcccttccaccagtacaccctgggctgcgtgagcgagtgcttctgccccaccaacttccccagcagcatgtactgcgacaacagaaagctgaagaccatccccaacatccccatgcacatccagcagctgtacctgcagttcaacgagatcgaggccgtgaccgccaacagcttcatcaacgccacccacctgaaggagatcaacctgagccacaacaagatcaagagccagaagatcgactacggcgtgttcgccaagctgcccaacctgctgcagctgcacctggagcacaacaacctggaggagttccccttccccctgcccaagagcctggagagactgctgctgggctacaacgagatcagcaagctgcagaccaacgccatggacggcctggtgaacctgaccatgctggacctgtgctacaactacctgcacgacagcctgctgaaggacaagatcttcgccaagatggagaagctgatgcagctgaacctgtgcagcaacagactggagagcatgccccccggcctgcccagcagcctgatgtacctgagcctggagaacaacagcatcagcagcatccccgagaagtacttcgacaagctgcccaagctgcacaccctgagaatgagccacaacaagctgcaggacatcccctacaacatcttcaacctgcccaacatcgtggagctgagcgtgggccacaacaagctgaagcaggccttctacatccccagaaacctggagcacctgtacctgcagaacaacgagatcgagaagatgaacctgaccgtgatgtgccccagcatcgaccccctgcactaccaccacctgacctacatcagagtggaccagaacaagctgaaggagcccatcagcagctacatcttcttctgcttcccccacatccacaccatctactacggcgagcagagaagcaccaacggccagaccatccagctgaagacccaggtgttcagaagattccccgacgacgacgacgagagcgaggaccacgacgaccccgacaacgcccacgagagccccgagcaggagggcgccgagggccacttcgacctgcactactacgagaaccaggagtag

SEQ ID NO: 4151 - DNA, 252 bp, synthetic construct
  misc_feature 1..252: note = source = /note="Description of Artificial Sequence: Synthetic coding sequence"
  source 1..252: mol_type = other DNA
atgctgtgctgctgccccctggccgacgccctgctgatcttcctggagaccggcagctgcttccagcccggccagcagagcgagaccctgagccagaagcagaacaagaccaacaacaagaagtgggccggcggcgccggctgcagacccttcagactgtggtgggtgggcagaagcagaggcgccggcgtgcagctgtacagcaccaagaagggctggatcctgagaggcaagggcggcaccgaggcctag

SEQ ID NO: 4152 - DNA, 2559 bp, synthetic construct
  misc_feature 1..2559: note = source = /note="Description of Artificial Sequence: Synthetic coding sequence"
  source 1..2559: mol_type = other DNA
atgctgcccaccgaggtgccccagagccaccccggccccagcgccctgctgctgctgcagctgctgctgccccccaccagcgccttcttccccaacatctggagcctgctggccgcccccggcagcatcacccaccaggacctgaccgaggaggccgccctgaacgtgaccctgcagctgttcctggagcagcccccccccggcagaccccccctgagactggaggacttcctgggcagaaccctgctggccgacgacctgttcgccgcctacttcggccccggcagcagcagaagattcagagccgccctgggcgaggtgagcagagccaacgccgcccaggacttcctgcccaccagcagaaacgaccccgacctgcacttcgacgccgagagactgggccagggcagagccagactggtgggcgccctgagagagaccgtggtggccgccagagccctggaccacaccctggccagacagagactgggcgccgccctgcacgccctgcaggacttctacagccacagcaactgggtggagctgggcgagcagcagccccacccccacctgctgtggcccagacaggagctgcagaacctggcccaggtggccgaccccacctgcagcgactgcgaggagctgagctgccccagaaactggctgggcttcaccctgctgaccagcggctacttcggcacccacccccccaagccccccggcaagtgcagccacggcggccacttcgacagaagcagcagccagccccccagaggcggcatcaacaaggacagcaccagccccggcttcagcccccaccacatgctgcacctgcaggccgccaagctggccctgctggccagcatccaggccttcagcctgctgagaagcagactgggcgacagagacttcagcagactgctggacatcacccccgccagcagcctgagcttcgtgctggacaccaccggcagcatgggcgaggagatcaacgccgccaagatccaggccagacacctggtggagcagagaagaggcagccccatggagcccgtgcactacgtgctggtgcccttccacgaccccggcttcggccccgtgttcaccaccagcgaccccgacagcttctggcagcagctgaacgagatccacgccctgggcggcggcgacgagcccgagatgtgcctgagcgccctgcagctggccctgctgcacaccccccccctgagcgacatcttcgtgttcaccgacgccagccccaaggacgccttcctgaccaaccaggtggagagcctgacccaggagagaagatgcagagtgaccttcctggtgaccgaggacaccagcagagtgcagggcagagccagaagagagatcctgagccccctgagattcgagccctacaaggccgtggccctggccagcggcggcgaggtgatcttcaccaaggaccagcacatcagagacgtggccgccatcgtgggcgagagcatggccgccctggtgaccctgcccctggacccccccgtggtggtgcccggccagcccctggtgttcagcgtggacggcctgctgcagaagatcaccgtgagaatccacggcgacatcagcagcttctggatcaagaaccccgccggcgtgagccagggccaggaggagggcggcggccccctgggccacaccagaagattcggccagttctggatggtgaccatggacgaccccccccagaccggcacctgggagatccaggtgaccgccgaggacacccccggcgtgagagtgcaggcccagaccagcctggacttcctgttccacttcggcatccccatggaggacggcccccaccccggcctgtaccccctgacccagcccgtggccggcctgcagacccagctgctggtggaggtgaccggcctgggcagcagagccaaccccggcgacccccagccccacttcagccacgtgatcctgagaggcgtgcccgagggcgccgagctgggccaggtgcccctggagcccgtgggcccccccgagagaggcctgctggccgccagcctgagccccaccctgctgagcacccccagacccttcagcctggagctgatcggccaggacgccgccggcagaagactgcacagagccgccccccagcccagcaccgtggtgcccgtgctgctggagctgagcggccccagcggcttcctggcccccggcagcaaggtgcccctgagcctgagaatcgccagcttcagcggcccccaggacctggacctgagaaccttcgtgaaccccagcttcagcctgaccagcaacctgagcagagcccacctggagctgaacgagagcgcctggggcagactgtggctggaggtgcccgacagcgccgcccccgacagcgtggtgatggtgaccgtgaccgccggcggcagagaggccaaccccgtgccccccacccacgccttcctgagactgctggtgagcgcccccgccccccaggtgagaaaccactacttccccagccagggccccgcccaccacccctacagactgatctag

SEQ ID NO: 4153 - DNA, 2676 bp, synthetic construct
  misc_feature 1..2676: note = source = /note="Description of Artificial Sequence: Synthetic coding sequence"
  source 1..2676: mol_type = other DNA
atgctgcccaccgaggtgccccagagccaccccggccccagcgccctgctgctgctgcagctgctgctgccccccaccagcgccttcttccccaacatctggagcctgctggccgcccccggcagcatcacccaccaggacctgaccgaggaggccgccctgaacgtgaccctgcagctgttcctggagcagcccccccccggcagaccccccctgagactggaggacttcctgggcagaaccctgctggccgacgacctgttcgccgcctacttcggccccggcagcagcagaagattcagagccgccctgggcgaggtgagcagagccaacgccgcccaggacttcctgcccaccagcagaaacgaccccgacctgcacttcgacgccgagagactgggccagggcagagccagactggtgggcgccctgagagagaccgtggtggccgccagagccctggaccacaccctggccagacagagactgggcgccgccctgcacgccctgcaggacttctacagccacagcaactgggtggagctgggcgagcagcagccccacccccacctgctgtggcccagacaggagctgcagaacctggcccaggtggccgaccccacctgcagcgactgcgaggagctgagctgccccagaaactggctgggcttcaccctgctgaccagcggctacttcggcacccacccccccaagccccccggcaagtgcagccacggcggccacttcgacagaagcagcagccagccccccagaggcggcatcaacaaggacagcaccagccccggcttcagcccccaccacatgctgcacctgcaggccgccaagctggccctgctggccagcatccaggccttcagcctgctgagaagcagactgggcgacagagacttcagcagactgctggacatcacccccgccagcagcctgagcttcgtgctggacaccaccggcagcatgggcgaggagatcaacgccgccaagatccaggccagacacctggtggagcagagaagaggcagccccatggagcccgtgcactacgtgctggtgcccttccacgaccccggcttcggccccgtgttcaccaccagcgaccccgacagcttctggcagcagctgaacgagatccacgccctgggcggcggcgacgagcccgagatgtgcctgagcgccctgcagctggccctgctgcacaccccccccctgagcgacatcttcgtgttcaccgacgccagccccaaggacgccttcctgaccaaccaggtggagagcctgacccaggagagaagatgcagagtgaccttcctggtgaccgaggacaccagcagagtgcagggcagagccagaagagagatcctgagccccctgagattcgagccctacaaggccgtggccctggccagcggcggcgaggtgatcttcaccaaggaccagcacatcagagacgtggccgccatcgtgggcgagagcatggccgccctggtgaccctgcccctggacccccccgtggtggtgcccggccagcccctggtgttcagcgtggacggcctgctgcagaagatcaccgtgagaatccacggcgacatcagcagcttctggatcaagaaccccgccggcgtgagccagggccaggaggagggcggcggccccctgggccacaccagaagattcggccagttctggatggtgaccatggacgaccccccccagaccggcacctgggagatccaggtgaccgccgaggacacccccggcgtgagagtgcaggcccagaccagcctggacttcctgttccacttcggcatccccatggaggacggcccccaccccggcctgtaccccctgacccagcccgtggccggcctgcagacccagctgctggtggaggtgaccggcctgggcagcagagccaaccccggcgacccccagccccacttcagccacgtgatcctgagaggcgtgcccgagggcgccgagctgggccaggtgcccctggagcccgtgggcccccccgagagaggcctgctggccgccagcctgagccccaccctgctgagcacccccagacccttcagcctggagctgatcggccaggacgccgccggcagaagactgcacagagccgccccccagcccagcaccgtggtgcccgtgctgctggagctgagcggccccagcggcttcctggcccccggcagcaaggtgcccctgagcctgagaatcgccagcttcagcggcccccaggacctggacctgagaaccttcgtgaaccccagcttcagcctgaccagcaacctgagcagagcccacctggagctgaacgagagcgcctggggcagactgtggctggaggtgcccgacagcgccgcccccgacagcgtggtgatggtgaccgtgaccgccggcggcagagaggccaaccccgtgccccccacccacgccttcctgagactgctggtgagcgcccccgccccccaggacagacacaccacccccaccggcagcagcgaccccatcctgaccaccgccacccccgccttcagccccttcaccctggtgacccagggcagagccggcgccggcctggccgccggcagcccctggtggggcaccgtgggcggcgtgctgctgctgctgggcctggccagctggtag

SEQ ID NO: 4154 - DNA, 552 bp, synthetic construct
  misc_feature 1..552: note = source = /note="Description of Artificial Sequence: Synthetic coding sequence"
  source 1..552: mol_type = other DNA
atggtgagaatctggaccaccatcatgatcgtgctgatcctgctgctgagaatcggccccaacaagcccagcctgagcggcagacaggcccccgcccaggcccagaccagcgacctggtgcccagcctgttccccctgggcctgtgggcccccggcttctgcacctggagcagccccgacgaggacaagagacccagaaagcccgtgcccggcaccggcaacagagacagcggcaccagaagaagactgcaggacgccaccgagcaggaccccagacccggcaacgacgtggccagcgccgagaccgccggcccccccagccccagcggcatcagagcccaggacagagcccccagacacagaagagccccccccgccagaatgcccgtggcccccgcccccagcgccgacggcgagcccctgcaggagcagggcggcggcctgttccacagaaccagaagcgtgtacaacggcctggagctgaacacctggatgaaggtggagagactgttcgtggagaagttccaccagagcttcagcctggacaactag

SEQ ID NO: 4155 - DNA, 444 bp, synthetic construct
  misc_feature 1..444: note = source = /note="Description of Artificial Sequence: Synthetic coding sequence"
  source 1..444: mol_type = other DNA
atggccggccccgccggcagccagagcctgggccccctgtgcttccacagcagcccccaggccctgtacaccgtgctgctgatcgtgctggtgatgatgagcctggtgttcggcaagttcgtgcccgtgaactgggagcccccccagcccctgcccttccccaagtacctgagatgctacagatgcctgctggagaccaaggagctgggctgcctgctgggcagcgacatctgcctgacccccgccggcagcagctgcatcaccctgcacaagaagaacagcagcggcagcgacgtgatggtgagcgactgcagaagcaaggagcagatgagcgactgcagcaacaccagaaccagccccgtgagcggcttctggatcttcagccagtactgcttcctggacttctgcaacgacccccagaacagaggcctgtacaccccctag

SEQ ID NO: 4156 - DNA, 447 bp, synthetic construct
  misc_feature 1..447: note = source = /note="Description of Artificial Sequence: Synthetic coding sequence"
  source 1..447: mol_type = other DNA
atgcagaccttccccgtggccggcgccctggaccccgccatcctggacaccagcagcccccaggccctgtacaccgtgctgctgatcgtgctggtgatgatgagcctggtgttcggcaagttcgtgcccgtgaactgggagcccccccagcccctgcccttccccaagtacctgagatgctacagatgcctgctggagaccaaggagctgggctgcctgctgggcagcgacatctgcctgacccccgccggcagcagctgcatcaccctgcacaagaagaacagcagcggcagcgacgtgatggtgagcgactgcagaagcaaggagcagatgagcgactgcagcaacaccagaaccagccccgtgagcggcttctggatcttcagccagtactgcttcctggacttctgcaacgacccccagaacagaggcctgtacaccccctag

SEQ ID NO: 4157 - DNA, 606 bp, synthetic construct
  misc_feature 1..606: note = source = /note="Description of Artificial Sequence: Synthetic coding sequence"
  source 1..606: mol_type = other DNA
atgaaggtgcacatgctggtgggcgtgctggtgatggtgggcttcaccgtgggcaaggtgcccgtgcccgacatcagaacctgccacttctgcctggtggaggaccccagcgtgggctgcatcagcggcagcgagaagtgcaccatcagcagcagcagcctgtgcatggtgatcaccatctactacgacgtgaaggtgagattcatcgtgagaggctgcggccagtacatcagctacagatgccaggagaagagaaacacctacttcgccgagtactggtaccaggcccagtgctgccagtacgactactgcaacagctggagcagcccccagctgcagagcagcctgcccgagccccacgacagacccctggccctgcccctgagcgacagccagatccagtggttctaccaggccctgaacctgagcctgcccctgcccaacttccacgccggcaccgagcccgacggcctggaccccatggtgaccctgagcctgaacctgggcctgagcttcgccgagctgagaagaatgtacctgttcctgaacagcagcggcctgctggtgctgccccaggccggcctgctgaccccccaccccagctag

SEQ ID NO: 4158 - DNA, 345 bp, synthetic construct
  misc_feature 1..345: note = source = /note="Description of Artificial Sequence: Synthetic coding sequence"
  source 1..345: mol_type = other DNA
atgctgggcggcgaggaggccagacccaacagctggccctggcaggtgagcctgcagtacagcagcaacggccagtggtaccacacctgcggcggcagcctgatcgccaacagctgggtgctgaccgccgcccactgcatcagacagatcatcaaggcccacaaggtgctgcagagatgcagcctgatcctgttcttcgtgagagacctgtgcagcagccagctggagctgaccggcgtgagcgccggcagcagcggcatctacagagtgatgctgggccagcacaacctgtacgtggccgagagcggcagcctggccgtgagcgtgagcaagatcgtggtgtag

SEQ ID NO: 4159 - DNA, 810 bp, synthetic construct
  misc_feature 1..810: note = source = /note="Description of Artificial Sequence: Synthetic coding sequence"
  source 1..810: mol_type = other DNA
atgatcagaaccctgctgctgagcaccctggtggccggcgccctgagctgcggcgtgagcacctacgcccccgacatgagcagaatgctgggcggcgaggaggccagacccaacagctggccctggcaggtgagcctgcagtacagcagcaacggccagtggtaccacacctgcggcggcagcctgatcgccaacagctgggtgctgaccgccgcccactgcatcagcagcagcggcatctacagagtgatgctgggccagcacaacctgtacgtggccgagagcggcagcctggccgtgagcgtgagcaagatcgtggtgcacaaggactggaacagcgaccaggtgagcaagggcaacgacatcgccctgctgaagctggccaaccccgtgagcctgaccgacaagatccagctggcctgcctgccccccgccggcaccatcctgcccaacaactacccctgctacgtgaccggctggggcagactgcagaccaacggcgccctgcccgacgacctgaagcagggccagctgctggtggtggactacgccacctgcagcagcagcggctggtggggcagcaccgtgaagaccaacatgatctgcgccggcggcgacggcgtgatctgcacctgcaacggcgacagcggcggccccctgaactgccaggccagcgacggcagatgggaggtgcacggcatcggcagcctgaccagcgtgctgggctgcaactactactacaagcccagcatcttcaccagagtgagcaactacaacgactggatcaacagcgtgatcgccaacaactag

SEQ ID NO: 4160 - DNA, 567 bp, synthetic construct
  misc_feature 1..567: note = source = /note="Description of Artificial Sequence: Synthetic coding sequence"
  source 1..567: mol_type = other DNA
atgttccaccagatctgggccgccctgctgtacttctacggcatcatcctgaacagcatctaccagtgccccgagcacagccagctgaccaccctgggcgtggacggcaaggagttccccgaggtgcacctgggccagtggtacttcatcgccggcgccgcccccaccaaggaggagctggccaccttcgaccccgtggacaacatcgtgttcaacatggccgccggcagcgcccccatgcagctgcacctgagagccaccatcagaatgaaggacggcctgtgcgtgcccagaaagtggatctaccacctgaccgagggcagcaccgacctgagaaccgagggcagacccgacatgaagaccgagctgttcagcagcagctgccccggcggcatcatgctgaacgagaccggccagggctaccagagattcctgctgtacaacagaagcccccacccccccgagaagtgcgtggaggagttcaagagcctgaccagctgcctggacagcaaggccttcctgctgacccccagaaaccaggaggcctgcgagctgagcaacaactag

SEQ ID NO: 4161 - DNA, 390 bp, synthetic construct
  misc_feature 1..390: note = source = /note="Description of Artificial Sequence: Synthetic coding sequence"
  source 1..390: mol_type = other DNA
atggccgccggcagcgcccccatgcagctgcacctgagagccaccatcagaatgaaggacggcctgtgcgtgcccagaaagtggatctaccacctgaccgagggcagcaccgacctgagaaccgagggcagacccgacatgaagaccgagctgttcagcagcagctgccccggcggcatcatgctgaacgagaccggccagggctaccagagattcctgctgtacaacagaagcccccacccccccgagaagtgcgtggaggagttcaagagcctgaccagctgcctggacagcaaggccttcctgctgacccccagaaaccagggcaagggcctgaagagccacaagaccggcctgggcctgaccaagagcagcggcgtgaccggctag

SEQ ID NO: 4162 - DNA, 351 bp, synthetic construct
  misc_feature 1..351: note = source = /note="Description of Artificial Sequence: Synthetic coding sequence"
  source 1..351: mol_type = other DNA
atggccgccggcagcgcccccatgcagctgcacctgagagccaccatcagaatgaaggacggcctgtgcgtgcccagaaagtggatctaccacctgaccgagggcagcaccgacctgagaaccgagggcagacccgacatgaagaccgagctgttcagcagcagctgccccggcggcatcatgctgaacgagaccggccagggctaccagagattcctgctgtacaacagaagcccccacccccccgagaagtgcgtggaggagttcaagagcctgaccagctgcctggacagcaaggccttcctgctgacccccagaaaccaggaggcctgcgagctgagcaacaactag

SEQ ID NO: 4163 - DNA, 435 bp, synthetic construct
  misc_feature 1..435: note = source = /note="Description of Artificial Sequence: Synthetic coding sequence"
  source 1..435: mol_type = other DNA
atgatcagaaccctgctgctgagcaccctggtggccggcgccctgagctgcggcgaccccacctaccccccctacgtgaccagagtggtgggcggcgaggaggccagacccaacagctggccctggcaggtgagcctgcagtacagcagcaacggcaagtggtaccacacctgcggcggcagcctgatcgccaacagctgggtgctgaccgccgcccactgcatcagccagagcatggtgcagtgcgcccacaaggtgctgcagagatgcagcctgatcctgttcttcgtgagagacctgtgcagcagccagctggagctgaccggcgtgagcgccggcagcagcagaacctacagagtgggcctgggcagacacaacctgtacgtggccgagagcggcagcctggccgtgagcgtgagcaagatcgtggtgtag

SEQ ID NO: 4164 - DNA, 204 bp, synthetic construct
  misc_feature 1..204: note = source = /note="Description of Artificial Sequence: Synthetic coding sequence"
  source 1..204: mol_type = other DNA
atgaagctgctgctgctgaccctgaccgtgctgctgctgctgagccagctgacccccggcggcacccagagatgctggaacctgtacggcaagtgcagatacagatgcagcaagaaggagagagtgtacgtgtactgcatcaacaacaagatgtgctgcgtgaagcccaagtaccagcccaaggagagatggtggcccttctag

SEQ ID NO: 4165 - DNA, 231 bp, synthetic construct
  misc_feature 1..231: note = source = /note="Description of Artificial Sequence: Synthetic coding sequence"
  source 1..231: mol_type = other DNA
atgaagctgctgctgctgctgctgaccgtgaccctgctgctggcccaggtgacccccgtgatgaagtgctggggcaagagcggcagatgcagaaccacctgcaaggagagcgaggtgtactacatcctgtgcaagaccgaggccaagtgctgcgtggaccccaagtacgtgcccgtgaagcccaagctgaccgacaccaacaccagcctggagagcaccagcgccgtgtag

SEQ ID NO: 4166 - DNA, 267 bp, synthetic construct
  misc_feature 1..267: note = source = /note="Description of Artificial Sequence: Synthetic coding sequence"
  source 1..267: mol_type = other DNA
atgaagctgctgtacctgttcctggccatcctgctggccatcgaggagcccgtgatcagcgtggagtgctggatggacggccactgcagactgctgtgcaaggacggcgaggacagcatcatcagatgcagaaacagaaagagatgctgcgtgcccagcagatacctgaccatccagcccgtgaccatccacggcatcctgggctggaccaccccccagatgagcaccaccgcccccaagatgaagaccaacatcaccaacagatag

SEQ ID NO: 4167 - DNA, 255 bp, synthetic construct
  misc_feature 1..255: note = source = /note="Description of Artificial Sequence: Synthetic coding sequence"
  source 1..255: mol_type = other DNA
atgaagctgctgtacctgttcctggccatcctgctggccatcgaggagcccgtgatcagcggcaagagacacatcctgagatgcatgggcaacagcggcatctgcagagccagctgcaagaagaacgagcagccctacctgtactgcagaaactgccagagctgctgcctgcagagctacatgagaatcagcatcagcggcaaggaggagaacaccgactggagctacgagaagcagtggcccagactgccctag

SEQ ID NO: 4168 - DNA, 2631 bp, synthetic construct; identical to SEQ ID NO: 3583
  misc_feature 1..2631: note = source = /note="Description of Artificial Sequence: Synthetic coding sequence"
  source 1..2631: mol_type = other DNA

SEQ ID NO: 4169 - DNA, 2742 bp, synthetic construct; identical to SEQ ID NO: 3799
  misc_feature 1..2742: note = source = /note="Description of Artificial Sequence: Synthetic coding sequence"
  source 1..2742: mol_type = other DNA

SEQ ID NO: 4170 - DNA, 2631 bp, synthetic construct; identical to SEQ ID NO: 3583
  misc_feature 1..2631: note = source = /note="Description of Artificial Sequence: Synthetic coding sequence"
  source 1..2631: mol_type = other DNA

SEQ ID NO: 4171 - DNA, 2631 bp, synthetic construct; identical to SEQ ID NO: 3583
  misc_feature 1..2631: note = source = /note="Description of Artificial Sequence: Synthetic coding sequence"
  source 1..2631: mol_type = other DNA

SEQ ID NO: 4172 - DNA, 2760 bp, synthetic construct
  misc_feature 1..2760: note = source = /note="Description of Artificial Sequence: Synthetic coding sequence"
  source 1..2760: mol_type = other DNA
atgggccccgaggccctgagcagcctgctgctgctgctgctggtggccagcggcgacgccgacatgaagggccacttcgaccccgccaagtgcagatacgccctgggcatgcaggacagaaccatccccgacagcgacatcagcgccagcagcagctggagcgacagcaccgccgccagacacagcagactggagagcagcgacggcgacggcgcctggtgccccgccggcagcgtgttccccaaggaggaggagtacctgcaggtggacctgcagagactgcacctggtggccctggtgggcacccagggcagacacgccggcggcctgggcaaggagttcagcagaagctacagactgagatacagcagagacggcagaagatggatgggctggaaggacagatggggccaggaggtgatcagcggcaacgaggaccccgagggcgtggtgctgaaggacctgggcccccccatggtggccagactggtgagattctaccccagagccgacagagtgatgagcgtgtgcctgagagtggagctgtacggctgcctgtggagagacggcctgctgagctacaccgcccccgtgggccagaccatgtacctgagcgaggccgtgtacctgaacgacagcacctacgacggccacaccgtgggcggcctgcagtacggcggcctgggccagctggccgacggcgtggtgggcctggacgacttcagaaagagccaggagctgagagtgtggcccggctacgactacgtgggctggagcaaccacagcttcagcagcggctacgtggagatggagttcgagttcgacagactgagagccttccaggccatgcaggtgcactgcaacaacatgcacaccctgggcgccagactgcccggcggcgtggagtgcagattcagaagaggccccgccatggcctgggagggcgagcccatgagacacaacctgggcggcaacctgggcgaccccagagccagagccgtgagcgtgcccctgggcggcagagtggccagattcctgcagtgcagattcctgttcgccggcccctggctgctgttcagcgagatcagcttcatcagcgacgtggtgaacaacagcagccccgccctgggcggcaccttcccccccgccccctggtggccccccggccccccccccaccaacttcagcagcctggagctggagcccagaggccagcagcccgtggccaaggccgagggcagccccaccgccatcctgatcggctgcctggtggccatcatcctgctgctgctgctgatcatcgccctgatgctgtggagactgcactggagaagactgctgagcaaggccgagagaagagtgctggaggaggagctgaccgtgcacctgagcgtgcccggcgacaccatcctgatcaacaacagacccggccccagagagccccccccctaccaggagcccagacccagaggcaaccccccccacagcgccccctgcgtgcccaacggcagcgccctgctgctgagcaaccccgcctacagactgctgctggccacctacgccagaccccccagaggccccggcccccccacccccgcctgggccaagcccaccaacacccaggcctacagcggcgactacatggagcccgagaagcccggcgcccccctgctgcccccccccccccagaacagcgtgccccactacgccgaggccgacatcgtgaccctgcagggcgtgaccggcggcaacacctacgccgtgcccgccctgccccccggcgccgtgggcgacggcccccccagagtggacttccccagaagcagactgagattcaaggagaagctgggcgagggccagttcggcgaggtgcacctgtgcgaggtggacagcccccaggacctggtgagcctggacttccccctgaacgtgagaaagggccaccccctgctggtggccgtgaagatcctgagacccgacgccaccaagaacgccagcttcagcctgttcagcagaaacgacttcctgaaggaggtgaagatcatgagcagactgaaggaccccaacatcatcagactgctgggcgtgtgcgtgcaggacgaccccctgtgcatgatcaccgactacatggagaacggcgacctgaaccagttcctgagcgcccaccagctggaggacaaggccgccgagggcgcccccggcgacggccaggccgcccagggccccaccatcagctaccccatgctgctgcacgtggccgcccagatcgccagcggcatgagatacctggccaccctgaacttcgtgcacagagacctggccaccagaaactgcctggtgggcgagaacttcaccatcaagatcgccgacttcggcatgagcagaaacctgtacgccggcgactactacagagtgcagggcagagccgtgctgcccatcagatggatggcctgggagtgcatcctgatgggcaagttcaccaccgccagcgacgtgtgggccttcggcgtgaccctgtgggaggtgctgatgctgtgcagagcccagcccttcggccagctgaccgacgagcaggtgatcgagaacgccggcgagttcttcagagaccagggcagacaggtgtacctgagcagaccccccgcctgcccccagggcctgtacgagctgatgctgagatgctggagcagagagagcgagcagagaccccccttcagccagctgcacagattcctggccgaggacgccctgaacaccgtgtag

SEQ ID NO: 4173 - DNA, 1041 bp, synthetic construct
  misc_feature 1..1041: note = source = /note="Description of Artificial Sequence: Synthetic coding sequence"
  source 1..1041: mol_type = other DNA
atgctgaagaagcccctgagcgccgtgacctggctgtgcatcttcatcgtggccttcgtgagccaccccgcctggctgcagaagctgagcaagcacaagacccccgcccagccccagctgaaggccgccaactgctgcgaggaggtgaaggagctgaaggcccaggtggccaacctgagcagcctgctgagcgagctgaacaagaagcaggagagagactgggtgagcgtggtgatgcaggtgatggagctggagagcaacagcaagagaatggagagcagactgaccgacgccgagagcaagtacagcgagatgaacaaccagatcgacatcatgcagctgcaggccgcccagaccgtgacccagaccagcgccgacgccatctacgactgcagcagcctgtaccagaagaactacagaatcagcggcgtgtacaagctgccccccgacgacttcctgggcagccccgagctggaggtgttctgcgacatggagaccagcggcggcggctggaccatcatccagagaagaaagagcggcctggtgagcttctacagagactggaagcagtacaagcagggcttcggcagcatcagaggcgacttctggctgggcaacgagcacatccacagactgagcagacagcccaccagactgagagtggagatggaggactgggagggcaacctgagatacgccgagtacagccacttcgtgctgggcaacgagctgaacagctacagactgttcctgggcaactacaccggcaacgtgggcaacgacgccctgcagtaccacaacaacaccgccttcagcaccaaggacaaggacaacgacaactgcctggacaagtgcgcccagctgagaaagggcggctactggtacaactgctgcaccgacagcaacctgaacggcgtgtactacagactgggcgagcacaacaagcacctggacggcatcacctggtacggctggcacggcagcacctacagcctgaagagagtggagatgaagatcagacccgaggacttcaagccctag

SEQ ID NO: 4174 - DNA, 1056 bp, synthetic construct
  misc_feature 1..1056: note = source = /note="Description of Artificial Sequence: Synthetic coding sequence"
  source 1..1056: mol_type = other DNA
atgaagggcagagccgtgagcttcgaccccctggcctgccagggcctgaacgccagccccggcagcctgaccagccccctgagaagaatcagaagcctgaccggcagagaggtgctgacccccttccccggcctgggcaccgccgccgcccccgcccagggcggcgcccacctgaagccccacagcctggtgctgcccatcaccgccctgccccccccccccctggccctgagaggcagacaggccaccagcaagctgccccccttcctgagcagccccttcccccccagcctgtgcccctgggtgcccgaccccggcttcaaggagaccgccttcctgtacgccgtgagcagcgccgccctgacccacaccctggccagagcctgcagcgccggcagaatggagagatgcacctgcgacgacagccccggcctggagagcagacaggcctggcagtggggcgtgtgcggcgacaacctgaagtacagcaccaagttcctgagcaacttcctgggcagcaagagaggcaacaaggacctgagagccagagccgacgcccacaacacccacgtgggcatcaaggccgtgaagagcggcctgagaaccacctgcaagtgccacggcgtgagcggcagctgcgccgtgagaacctgctggaagcagctgagccccttcagagagaccggccaggtgctgaagctgagatacgacagcgccgtgaaggtgagcagcgccaccaacgaggccctgggcagactggagctgtgggcccccgccagacagggcagcctgaccaagggcctggcccccagaagcggcgacctggtgtacatggaggacagccccagcttctgcagacccagcaagtacagccccggcaccgccggcagagtgtgcagcagagaggccagctgcagcagcctgtgctgcggcagaggctacgacacccagagcagactggtggccttcagctgccactgccaggtgcagtggtgctgctacgtggagtgccagcagtgcgtgcaggaggagctggtgtacacctgcaagcactag

SEQ ID NO: 4175 - DNA, 462 bp, synthetic construct
  misc_feature 1..462: note = source = /note="Description of Artificial Sequence: Synthetic coding sequence"
  source 1..462: mol_type = other DNA
atgaagcacctgagaccccagttccccctgatcctggccatctactgcttctgcatgctgcagatccccagcagcggcttcccccagcccctggccgaccccagcgacggcctggacatcgtgcagctggagcagctggcctactgcctgagccagtgggcccccctgagcagacagcccaaggacaaccaggacatctacaagagattcctgttccactacagcagaacccaggaggccacccaccccgtgaagaccggcttcccccccgtgcaccccctgatgcacctggccgccaagctggccaacagaagaatgaagagaatcctgcagagaggcagcggcaccgccgccgtggacttcaccaagaaggaccacaccgccacctggggcagacccttcttcctgttcagacccagaaacggcagaaacatcgaggacgaggcccagatccagtggtag

SEQ ID NO: 4176 - DNA, 765 bp, synthetic construct
  misc_feature 1..765: note = source = /note="Description of Artificial Sequence: Synthetic coding sequence"
  source 1..765: mol_type = other DNA
atggccgccgccagcgccggcgccaccagactgctgctgctgctgctgatggccgtggccgcccccagcagagccagaggcagcggctgcagagccggcaccggcgccagaggcgccggcgccgagggcagagagggcgaggcctgcggcaccgtgggcctgctgctggagcacagcttcgagatcgacgacagcgccaacttcagaaagagaggcagcctgctgtggaaccagcaggacggcaccctgagcctgagccagagacagctgagcgaggaggagagaggcagactgagagacgtggccgccctgaacggcctgtacagagtgagaatccccagaagacccggcgccctggacggcctggaggccggcggctacgtgagcagcttcgtgcccgcctgcagcctggtggagagccacctgagcgaccagctgaccctgcacgtggacgtggccggcaacgtggtgggcgtgagcgtggtgacccaccccggcggctgcagaggccacgaggtggaggacgtggacctggagctgttcaacaccagcgtgcagctgcagccccccaccaccgcccccggccccgagaccgccgccttcatcgagagactggagatggagcaggcccagaaggccaagaacccccaggagcagaagagcttcttcgccaagtactggcacatcatcctgggcggcgccgtgctgctgaccgccctgagacccgccgcccccggccccgccccccccccccaggaggcctag

SEQ ID NO: 4177 - DNA, 810 bp, synthetic construct
  misc_feature 1..810: note = source = /note="Description of Artificial Sequence: Synthetic coding sequence"
  source 1..810: mol_type = other DNA
atggccgccgccagcgccggcgccaccagactgctgctgctgctgctgatggccgtggccgcccccagcagagccagaggcagcggctgcagagccggcaccggcgccagaggcgccggcgccgagggcagagagggcgaggcctgcggcaccgtgggcctgctgctggagcacagcttcgagatcgacgacagcgccaacttcagaaagagaggcagcctgctgtggaaccagcaggacggcaccctgagcctgagccagagacagctgagcgaggaggagagaggcagactgagagacgtggccgccctgaacggcctgtacagagtgagaatccccagaagacccggcgccctggacggcctggaggccggcggctacgtgagcagcttcgtgcccgcctgcagcctggtggagagccacctgagcgaccagctgaccctgcacgtggacgtggccggcaacgtggtgggcgtgagcgtggtgacccaccccggcggctgcagaggccacgaggtggaggacgtggacctggagctgttcaacaccagcgtgcagctgcagccccccaccaccgcccccggccccgagaccgccgccttcatcgagagactggagatggagcaggcccagaaggccaagaacccccaggagcagaagagcttcttcgccaagtactggatgtacatcatccccgtggtgctgttcctgatgatgagcggcgcccccgacaccggcggccagggcggcggcggcggcggcggcggcggcggcggcagcggcagatgctgcgtgccccccagcctgtag

SEQ ID NO: 4178 - DNA, 480 bp, synthetic construct
  misc_feature 1..480: note = source = /note="Description of Artificial Sequence: Synthetic coding sequence"
  source 1..480: mol_type = other DNA
atgagcagcccccagagaagaaaggccatgccctgggccctgagcctgctgctgatgggcttccagctgctggtgacctacgcctggtgcagcgaggaggagatgggcggcaacaacaagatcgtgcaggaccccatgttcctggccaccgtggagttcgccctgaacaccttcaacgtgcagagcaaggaggagcacgcctacagactgctgagagtgctgagcagctggagagaggacagcatggacagaaagtggagaggcaagatggtgttcagcatgaacctgcagctgagacagaccgtgtgcagaaagttcgaggacgacatcgacaactgccccttccaggagagcctggagctgaacaacgtgagacagggcatcagcttcccccaggtgcacagctgcggctgctgcatgggctgcggcgtgggcaccggcgccgccgacaaggccatccccagagacaagggcaagtag

SEQ ID NO: 4179 - DNA, 1737 bp, synthetic construct
  misc_feature 1..1737: note = source = /note="Description of Artificial Sequence: Synthetic coding sequence"
  source 1..1737: mol_type = other DNA
atgctgctgctgctgctgctggcccccctgttcctgagaccccccggcgccggcggcgcccagacccccaacgccaccagcgagggctgccagatcatccaccccccctgggagggcggcatcagatacagaggcctgaccagagaccaggtgaaggccatcaacttcctgcccgtggactacgagatcgagtacgtgtgcagaggcgagagagaggtggtgggccccaaggtgagaaagtgcctggccaacggcagctggaccgacatggacacccccagcagatgcgtgagaatctgcagcaagagctacctgaccctggagaacggcaaggtgttcctgaccggcggcgacctgcccgccctggacggcgccagagtggacttcagatgcgaccccgacttccacctggtgggcagcagcagaagcatctgcagccagggccagtggagcacccccaagccccactgccaggtgaacagaaccccccacagcgagagaagagccgtgtacatcggcgccctgttccccatgagcggcggctggcccggcggccaggcctgccagcccgccgtggagatggccctggaggacgtgaacagcagaagagacatcctgcccgactacgagctgaagctgatccaccacgacagcaagtgcgaccccggccaggccaccaagtacctgtacgagctgctgtacaacgaccccatcaagatcatcctgatgcccggctgcagcagcgtgagcaccctggtggccgaggccgccagaatgtggaacctgatcgtgctgagctacggcagcagcagccccgccctgagcaacagacagagattccccaccttcttcagaacccaccccagcgccaccctgcacaaccccaccagagtgaagctgttcgagaagtggggctggaagaagatcgccaccatccagcagaccaccgaggtgttcaccagcaccctggacgacctggaggagagagtgaaggaggccggcatcgagatcaccttcagacagagcttcttcagcgaccccgccgtgcccgtgaagaacctgaagagacaggacgccagaatcatcgtgggcctgttctacgagaccgaggccagaaaggtgttctgcgaggtgtacaaggagagactgttcggcaagaagtacgtgtggttcctgatcggctggtacgccgacaactggttcaagatctacgaccccagcatcaactgcaccgtggacgagatgaccgaggccgtggagggccacatcaccaccgagatcgtgatgctgaaccccgccaacaccagaagcatcagcaacatgaccagccaggagttcgtggagaagctgaccaagagactgaagagacaccccgaggagaccggcggcttccaggaggcccccctggcctacgacgccatctgggccctggccctggccctgaacaagaccagcggcggcggcggcagaagcggcgtgagactggaggacttcaactacaacaaccagaccatcaccgaccagatctacagagccatgaacagcagcagcttcgagggcgtgagcggccacgtggtgttcgacgccagcggcagcagaatggcctggaccctgatcgagcagctgcagggcggcagctacaagaagatcggctactacgacagcaccaaggacgacctgagctggagcaagaccgacaagtggatcgtgatcagcagaacccacagccccacctag

SEQ ID NO: 4180 - DNA, 444 bp, synthetic construct
  misc_feature 1..444: note = source = /note="Description of Artificial Sequence: Synthetic coding sequence"
  source 1..444: mol_type = other DNA
atgctgggcctgccctggaagggcggcctgagctgggccctgctgctgctgctgctgggcagccagatcctgctgatctacgcctggcacttccacgagcagagagactgcgacgagcacaacgtgatggccagatacctgcccgccaccgtggagttcgccgtgcacaccttcaaccagcagagcaaggactactacgcctacagactgggccacatcctgaacagctggaaggagcaggtggagagcaagaccgtgttcagcatggagctgctgctgggcagaaccagatgcggcaagttcgaggacgacatcgacaactgccacttccaggagagcaccgagctgaacaacaccttcacctgcttcttcaccatcagcaccagaccctggatgacccagttcagcctgctgaacaagacctgcctggagggcttccactag

SEQ ID NO: 4181 - DNA, 444 bp, synthetic construct
  misc_feature 1..444: note = source = /note="Description of Artificial Sequence: Synthetic coding sequence"
  source 1..444: mol_type = other DNA
atgtggagcctgccccccagcagagccctgagctgcgcccccctgctgctgctgttcagcttccagttcctggtgacctacgcctggagattccaggaggaggaggagtggaacgaccagaagcagatcgccgtgtacctgccccccaccctggagttcgccgtgtacaccttcaacaagcagagcaaggactggtacgcctacaagctggtgcccgtgctggccagctggaaggagcagggctacgacaagatgaccttcagcatgaacctgcagctgggcagaaccatgtgcggcaagttcgaggacgacatcgacaactgccccttccaggagagccccgagctgaacaacacctgcacctgcttcttcaccatcggcatcgagccctggagaaccagattcgacctgtggaacaagacctgcagcggcggccacagctag

SEQ ID NO: 4182 - DNA, 2535 bp, synthetic construct; identical to SEQ ID NO: 3960
  misc_feature 1..2535: note = source = /note="Description of Artificial Sequence: Synthetic coding sequence"
  source 1..2535: mol_type = other DNA

SEQ ID NO: 4183 - DNA, 2700 bp, synthetic construct
  misc_feature 1..2700: note = source = /note="Description of Artificial Sequence: Synthetic coding sequence"
  source 1..2700: mol_type = other DNA
atgctgctgctgctgctgctggcccccctgttcctgagaccccccggcgccggcggcgcccagacccccaacgccaccagcgagggctgccagatcatccaccccccctgggagggcggcatcagatacagaggcctgaccagagaccaggtgaaggccatcaacttcctgcccgtggactacgagatcgagtacgtgtgcagaggcgagagagaggtggtgggccccaaggtgagaaagtgcctggccaacggcagctggaccgacatggacacccccagcagatgcgtgaacagaaccccccacagcgagagaagagccgtgtacatcggcgccctgttccccatgagcggcggctggcccggcggccaggcctgccagcccgccgtggagatggccctggaggacgtgaacagcagaagagacatcctgcccgactacgagctgaagctgatccaccacgacagcaagtgcgaccccggccaggccaccaagtacctgtacgagctgctgtacaacgaccccatcaagatcatcctgatgcccggctgcagcagcgtgagcaccctggtggccgaggccgccagaatgtggaacctgatcgtgctgagctacggcagcagcagccccgccctgagcaacagacagagattccccaccttcttcagaacccaccccagcgccaccctgcacaaccccaccagagtgaagctgttcgagaagtggggctggaagaagatcgccaccatccagcagaccaccgaggtgttcaccagcaccctggacgacctggaggagagagtgaaggaggccggcatcgagatcaccttcagacagagcttcttcagcgaccccgccgtgcccgtgaagaacctgaagagacaggacgccagaatcatcgtgggcctgttctacgagaccgaggccagaaaggtgttctgcgaggtgtacaaggagagactgttcggcaagaagtacgtgtggttcctgatcggctggtacgccgacaactggttcaagatctacgaccccagcatcaactgcaccgtggacgagatgaccgaggccgtggagggccacatcaccaccgagatcgtgatgctgaaccccgccaacaccagaagcatcagcaacatgaccagccaggagttcgtggagaagctgaccaagagactgaagagacaccccgaggagaccggcggcttccaggaggcccccctggcctacgacgccatctgggccctggccctggccctgaacaagaccagcggcggcggcggcagaagcggcgtgagactggaggacttcaactacaacaaccagaccatcaccgaccagatctacagagccatgaacagcagcagcttcgagggcgtgagcggccacgtggtgttcgacgccagcggcagcagaatggcctggaccctgatcgagcagctgcagggcggcagctacaagaagatcggctactacgacagcaccaaggacgacctgagctggagcaagaccgacaagtggatcggcggcagcccccccgccgaccagaccctggtgatcaagaccttcagattcctgagccagaagctgttcatcagcgtgagcgtgctgagcagcctgggcatcgtgctggccgtggtgtgcctgagcttcaacatctacaacagccacgtgagatacatccagaacagccagcccaacctgaacaacctgaccgccgtgggctgcagcctggccctggccgccgtgttccccctgggcctggacggctaccacatcggcagaaaccagttccccttcgtgtgccaggccagactgtggctgctgggcctgggcttcagcctgggctacggcagcatgttcaccaagatctggtgggtgcacaccgtgttcaccaagaaggaggagaagaaggagtggagaaagaccctggagccctggaagctgtacgccaccgtgggcctgctggtgggcatggacgtgctgaccctggccatctggcagatcgtggaccccctgcacagaaccatcgagaccttcgccaaggaggagcccaaggaggacatcgacgtgagcatcctgccccagctggagcactgcagcagcagaaagatgaacacctggctgggcatcttctacggctacaagggcctgctgctgctgctgggcatcttcctggcctacgagaccaagagcgtgagcaccgagaagatcaacgaccacagagccgtgggcatggccatctacaacgtggccgtgctgtgcctgatcaccgcccccgtgaccatgatcctgagcagccagcaggacgccgccttcgccttcgccagcctggccatcgtgttcagcagctacatcaccctggtggtgctgttcgtgcccaagatgagaagactgatcaccagaggcgagtggcagagcgaggcccaggacaccatgaagaccggcagcagcaccaacaacaacgaggaggagaagagcagactgctggagaaggagaacagagagctggagaagatcatcgccgagaaggaggagagagtgagcgagctgagacaccagctgcagagcagacagcagctgagaagcagaagacacccccccaccccccccgagcccagcggcggcctgcccagaggcccccccgagccccccgacagactgagctgcgacggcagcagagtgcacctgctgtacaagtag

SEQ ID NO: 4184 - DNA, 2886 bp, synthetic construct
  misc_feature 1..2886: note = source = /note="Description of Artificial Sequence: Synthetic coding sequence"
  source 1..2886: mol_type = other DNA
atgctgctgctgctgctgctggcccccctgttcctgagaccccccggcgccggcggcgcccagacccccaacgccaccagcgagggctgccagatcatccaccccccctgggagggcggcatcagatacagaggcctgaccagagaccaggtgaaggccatcaacttcctgcccgtggactacgagatcgagtacgtgtgcagaggcgagagagaggtggtgggccccaaggtgagaaagtgcctggccaacggcagctggaccgacatggacacccccagcagatgcgtgagaatctgcagcaagagctacctgaccctggagaacggcaaggtgttcctgaccggcggcgacctgcccgccctggacggcgccagagtggacttcagatgcgaccccgacttccacctggtgggcagcagcagaagcatctgcagccagggccagtggagcacccccaagccccactgccaggtgaacagaaccccccacagcgagagaagagccgtgtacatcggcgccctgttccccatgagcggcggctggcccggcggccaggcctgccagcccgccgtggagatggccctggaggacgtgaacagcagaagagacatcctgcccgactacgagctgaagctgatccaccacgacagcaagtgcgaccccggccaggccaccaagtacctgtacgagctgctgtacaacgaccccatcaagatcatcctgatgcccggctgcagcagcgtgagcaccctggtggccgaggccgccagaatgtggaacctgatcgtgctgagctacggcagcagcagccccgccctgagcaacagacagagattccccaccttcttcagaacccaccccagcgccaccctgcacaaccccaccagagtgaagctgttcgagaagtggggctggaagaagatcgccaccatccagcagaccaccgaggtgttcaccagcaccctggacgacctggaggagagagtgaaggaggccggcatcgagatcaccttcagacagagcttcttcagcgaccccgccgtgcccgtgaagaacctgaagagacaggacgccagaatcatcgtgggcctgttctacgagaccgaggccagaaaggtgttctgcgaggtgtacaaggagagactgttcggcaagaagtacgtgtggttcctgatcggctggtacgccgacaactggttcaagatctacgaccccagcatcaactgcaccgtggacgagatgaccgaggccgtggagggccacatcaccaccgagatcgtgatgctgaaccccgccaacaccagaagcatcagcaacatgaccagccaggagttcgtggagaagctgaccaagagactgaagagacaccccgaggagaccggcggcttccaggaggcccccctggcctacgacgccatctgggccctggccctggccctgaacaagaccagcggcggcggcggcagaagcggcgtgagactggaggacttcaactacaacaaccagaccatcaccgaccagatctacagagccatgaacagcagcagcttcgagggcgtgagcggccacgtggtgttcgacgccagcggcagcagaatggcctggaccctgatcgagcagctgcagggcggcagctacaagaagatcggctactacgacagcaccaaggacgacctgagctggagcaagaccgacaagtggatcggcggcagcccccccgccgaccagaccctggtgatcaagaccttcagattcctgagccagaagctgttcatcagcgtgagcgtgctgagcagcctgggcatcgtgctggccgtggtgtgcctgagcttcaacatctacaacagccacgtgagatacatccagaacagccagcccaacctgaacaacctgaccgccgtgggctgcagcctggccctggccgccgtgttccccctgggcctggacggctaccacatcggcagaaaccagttccccttcgtgtgccaggccagactgtggctgctgggcctgggcttcagcctgggctacggcagcatgttcaccaagatctggtgggtgcacaccgtgttcaccaagaaggaggagaagaaggagtggagaaagaccctggagccctggaagctgtacgccaccgtgggcctgctggtgggcatggacgtgctgaccctggccatctggcagatcgtggaccccctgcacagaaccatcgagaccttcgccaaggaggagcccaaggaggacatcgacgtgagcatcctgccccagctggagcactgcagcagcagaaagatgaacacctggctgggcatcttctacggctacaagggcctgctgctgctgctgggcatcttcctggcctacgagaccaagagcgtgagcaccgagaagatcaacgaccacagagccgtgggcatggccatctacaacgtggccgtgctgtgcctgatcaccgcccccgtgaccatgatcctgagcagccagcaggacgccgccttcgccttcgccagcctggccatcgtgttcagcagctacatcaccctggtggtgctgttcgtgcccaagatgagaagactgatcaccagaggcgagtggcagagcgaggcccaggacaccatgaagaccggcagcagcaccaacaacaacgaggaggagaagagcagactgctggagaaggagaacagagagctggagaagatcatcgccgagaaggaggagagagtgagcgagctgagacaccagctgcagagcagacagcagctgagaagcagaagacacccccccaccccccccgagcccagcggcggcctgcccagaggcccccccgagccccccgacagactgagctgcgacggcagcagagtgcacctgctgtacaagtag

SEQ ID NO: 4185 - DNA, 882 bp, synthetic construct
  misc_feature 1..882: note = source = /note="Description of Artificial Sequence: Synthetic coding sequence"
  source 1..882: mol_type = other DNA
atgaacaacctgagcttcagcgagctgtgctgcctgttctgctgccccccctgccccggcaagatcgccagcaagctggccttcctgccccccgaccccacctacaccctgatgtgcgacgagagcggcagcagatggaccctgcacctgagcgagagagccgactggcagtacagcagcagagagaaggacgccatcgagtgcttcatgaccagaaccagcaagggcaacagaatcgcctgcatgttcgtgagatgcagccccaacgccaagtacaccctgctgttcagccacggcaacgccgtggacctgggccagatgagcagcttctacatcggcctgggcagcagaatcaactgcaacatcttcagctacgactacagcggctacggcgccagcagcggcaagcccaccgagaagaacctgtacgccgacatcgaggccgcctggctggccctgagaaccagatacggcatcagacccgagaacgtgatcatctacggccagagcatcggcaccgtgcccagcgtggacctggccgccagatacgagagcgccgccgtgatcctgcacagccccctgaccagcggcatgagagtggccttccccgacaccaagaagacctactgcttcgacgccttccccaacatcgacaagatcagcaagatcaccagccccgtgctgatcatccacggcaccgaggacgaggtgatcgacttcagccacggcctggccctgttcgagagatgccagagacccgtggagcccctgtgggtggagggcgccggccacaacgacgtggagctgtacggccagtacctggagagactgaagcagttcgtgagccaggagctggtgcagaagcacaaggagggcaagtag

SEQ ID NO: 4186 - DNA, 1155 bp, synthetic construct
  misc_feature 1..1155: note = source = /note="Description of Artificial Sequence: Synthetic coding sequence"
  source 1..1155: mol_type = other DNA
atgtggtacgtgagcaccagaggcgtggcccccagagtgaacttcgagggcgccctgttcagcggctacgcccccgacggcggcctgttcatgcccgaggagctgccccagctggacagaggcaccctgtgccagtggagcaccctgagctaccccggcctggtgaaggagctgtgcgccctgttcatcggcagcgagctgctgcccaaggacgagctgaacgacctgatcgacagagccttcagcagattcagacacagagaggtggtgcacctgagcagactgagaaacggcctgaacgtgctggagctgtggcacggcgtgacctacgccttcaaggacctgagcctgagctgcaccacccagttcctgcagtacttcctggagaagagagagaagcacgtgaccgtggtggtgggcaccagcggcgacaccggcagcgccgccatcgagagcgtgcagggcgccaagaacatggacatcatcgtgctgctgcccaagggccactgcaccaagatccaggagctgcagatgaccaccgtgctgaagcagaacgtgcacgtgttcggcgtggagggcaacagcgacgagctggacgagcccatcaagaccgtgttcgccgacgtggccttcgtgaagaagcacaacctgatgagcctgaacagcatcaactggagcagagtgctggtgcagatggcccaccacttcttcgcctacttccagtgcacccccagcctggacacccaccccctgcccctggtggaggtggtggtgcccaccggcgccgccggcaacctggccgccggctacatcgcccagaagatcggcctgcccatcagactggtggtggccgtgaacagaaacgacatcatccacagaaccgtgcagcagggcgacttcagcctgagcgaggccgtgaagagcaccctggccagcgccatggacatccaggtgccctacaacatggagagagtgttctggctgctgagcggcagcgacagccaggtgaccagagccctgatggagcagttcgagagaacccagagcgtgaacctgcccaaggagctgcacagcaagcacagccccgtgctgcccagaccctgcctgtgcagccaggtgcccggcagctgccccggctgctggcccgacccctag

SEQ ID NO: 4187 - DNA, 2889 bp, synthetic construct
  misc_feature 1..2889: note = source = /note="Description of Artificial Sequence: Synthetic coding sequence"
  source 1..2889: mol_type = other DNA
atgctgagaagacccgcccccgccctggcccccgccgccagactgctgctggccggcctgctgtgcggcggcggcgtgtgggccgccagagtgaacaagcacaagccctggctggagcccacctaccacggcatcgtgaccgagaacgacaacaccgtgctgctggacccccccctgatcgccctggacaaggacgcccccctgagattcgccgagagcttcgaggtgaccgtgaccaaggagggcgagatctgcggcttcaagatccacggccagaacgtgcccttcgacgccgtggtggtggacaagagcaccggcgagggcgtgatcagaagcaaggagaagctggactgcgagctgcagaaggactacagcttcaccatccaggcctacgactgcggcaagggccccgacggcaccaacgtgaagaagagccacaaggccaccgtgcacatccaggtgaacgacgtgaacgagtacgcccccgtgttcaaggagaagagctacaaggccaccgtgatcgagggcaagcagtacgacagcatcctgagagtggaggccgtggacgccgactgcagcccccagttcagccagatctgcagctacgagatcatcacccccgacgtgcccttcaccgtggacaaggacggctacatcaagaacaccgagaagctgaactacggcaaggagcaccagtacaagctgaccgtgaccgcctacgactgcggcaagaagagagccaccgaggacgtgctggtgaagatcagcatcaagcccacctgcacccccggctggcagggctggaacaacagaatcgagtacgagcccggcaccggcgccctggccgtgttccccaacatccacctggagacctgcgacgagcccgtggccagcgtgcaggccaccgtggagctggagaccagccacatcggcaagggctgcgacagagacacctacagcgagaagagcctgcacagactgtgcggcgccgccgccggcaccgccgagctgctgcccagccccagcggcagcctgaactggaccatgggcctgcccaccgacaacggccacgacagcgaccaggtgttcgagttcaacggcacccaggccgtgagaatccccgacggcgtggtgagcgtgagccccaaggagcccttcaccatcagcgtgtggatgagacacggccccttcggcagaaagaaggagaccatcctgtgcagcagcgacaagaccgacatgaacagacaccactacagcctgtacgtgcacggctgcagactgatcttcctgttcagacaggaccccagcgaggagaagaagtacagacccgccgagttccactggaagctgaaccaggtgtgcgacgaggagtggcaccactacgtgctgaacgtggagttccccagcgtgaccctgtacgtggacggcaccagccacgagcccttcagcgtgaccgaggactaccccctgcaccccagcaagatcgagacccagctggtggtgggcgcctgctggcagggcggcgacctgcacatgacccagttcttcagaggcaacctggccggcctgaccctgagaagcggcaagctggccgacaagaaggtgatcgactgcctgtacacctgcaaggagggcctggacctgcaggtgctggaggacagcggcagaggcgtgcagatccaggcccaccccagccagctggtgctgaccctggagggcgaggacctgggcgagctggacaaggccatgcagcacatcagctacctgaacagcagacagttccccacccccggcatcagaagactgaagatcaccagcaccatcaagtgcttcaacgaggccacctgcatcagcgtgccccccgtggacggctacgtgatggtgctgcagcccgaggagcccaagatcagcctgagcggcgtgcaccacttcgccagagccgccagcgagttcgagagcagcgagggcgtgttcctgttccccgagctgagaatcatcagcaccatcaccagagaggtggagcccgagggcgacggcgccgaggaccccaccgtgcaggagagcctggtgagcgaggagatcgtgcacgacctggacacctgcgaggtgaccgtggagggcgaggagctgaaccacgagcaggagagcctggaggtggacatggccagactgcagcagaagggcatcgaggtgagcagcagcgagctgggcatgaccttcaccggcgtggacaccatggccagctacgaggaggtgctgcacctgctgagatacagaaactggcacgccagaagcctgctggacagaaagttcaagctgatctgcagcgagctgaacggcagatacatcagcaacgagttcaaggtggaggtgaacgtgatccacaccgccaaccccatggagcacgccaaccacatggccgcccagccccagttcgtgcaccccgagcacagaagcttcgtggacctgagcggccacaacctggccaacccccaccccttcgccgtggtgcccagcaccgccaccgtggtgatcgtggtgtgcgtgagcttcctggtgttcatgatcatcctgggcgtgttcagaatcagagccgcccacagaagaaccatgagagaccaggacaccggcaaggagaacgagatggactgggacgacagcgccctgaccatcaccgtgaaccccatggagacctacgaggaccagcacagcagcgaggaggaggaggaggaggaggaggaggaggagagcgaggacggcgaggaggaggacgacatcaccagcgccgagagcgagagcagcgaggaggaggagggcgagcagggcgacccccagaacgccaccagacagcagcagctggagtgggacgacagcaccctgagctactag

SEQ ID NO: 4188 - DNA, 2946 bp, synthetic construct
  misc_feature 1..2946: note = source = /note="Description of Artificial Sequence: Synthetic coding sequence"
  source 1..2946: mol_type = other DNA
atgctgagaagacccgcccccgccctggcccccgccgccagactgctgctggccggcctgctgtgcggcggcggcgtgtgggccgccagagtgaacaagcacaagccctggctggagcccacctaccacggcatcgtgaccgagaacgacaacaccgtgctgctggacccccccctgatcgccctggacaaggacgcccccctgagattcgccgagagcttcgaggtgaccgtgaccaaggagggcgagatctgcggcttcaagatccacggccagaacgtgcccttcgacgccgtggtggtggacaagagcaccggcgagggcgtgatcagaagcaaggagaagctggactgcgagctgcagaaggactacagcttcaccatccaggcctacgactgcggcaagggccccgacggcaccaacgtgaagaagagccacaaggccaccgtgcacatccaggtgaacgacgtgaacgagtacgcccccgtgttcaaggagaagagctacaaggccaccgtgatcgagggcaagcagtacgacagcatcctgagagtggaggccgtggacgccgactgcagcccccagttcagccagatctgcagctacgagatcatcacccccgacgtgcccttcaccgtggacaaggacggctacatcaagaacaccgagaagctgaactacggcaaggagcaccagtacaagctgaccgtgaccgcctacgactgcggcaagaagagagccaccgaggacgtgctggtgaagatcagcatcaagcccacctgcacccccggctggcagggctggaacaacagaatcgagtacgagcccggcaccggcgccctggccgtgttccccaacatccacctggagacctgcgacgagcccgtggccagcgtgcaggccaccgtggagctggagaccagccacatcggcaagggctgcgacagagacacctacagcgagaagagcctgcacagactgtgcggcgccgccgccggcaccgccgagctgctgcccagccccagcggcagcctgaactggaccatgggcctgcccaccgacaacggccacgacagcgaccaggtgttcgagttcaacggcacccaggccgtgagaatccccgacggcgtggtgagcgtgagccccaaggagcccttcaccatcagcgtgtggatgagacacggccccttcggcagaaagaaggagaccatcctgtgcagcagcgacaagaccgacatgaacagacaccactacagcctgtacgtgcacggctgcagactgatcttcctgttcagacaggaccccagcgaggagaagaagtacagacccgccgagttccactggaagctgaaccaggtgtgcgacgaggagtggcaccactacgtgctgaacgtggagttccccagcgtgaccctgtacgtggacggcaccagccacgagcccttcagcgtgaccgaggactaccccctgcaccccagcaagatcgagacccagctggtggtgggcgcctgctggcaggagttcagcggcgtggagaacgacaacgagaccgagcccgtgaccgtggccagcgccggcggcgacctgcacatgacccagttcttcagaggcaacctggccggcctgaccctgagaagcggcaagctggccgacaagaaggtgatcgactgcctgtacacctgcaaggagggcctggacctgcaggtgctggaggacagcggcagaggcgtgcagatccaggcccaccccagccagctggtgctgaccctggagggcgaggacctgggcgagctggacaaggccatgcagcacatcagctacctgaacagcagacagttccccacccccggcatcagaagactgaagatcaccagcaccatcaagtgcttcaacgaggccacctgcatcagcgtgccccccgtggacggctacgtgatggtgctgcagcccgaggagcccaagatcagcctgagcggcgtgcaccacttcgccagagccgccagcgagttcgagagcagcgagggcgtgttcctgttccccgagctgagaatcatcagcaccatcaccagagaggtggagcccgagggcgacggcgccgaggaccccaccgtgcaggagagcctggtgagcgaggagatcgtgcacgacctggacacctgcgaggtgaccgtggagggcgaggagctgaaccacgagcaggagagcctggaggtggacatggccagactgcagcagaagggcatcgaggtgagcagcagcgagctgggcatgaccttcaccggcgtggacaccatggccagctacgaggaggtgctgcacctgctgagatacagaaactggcacgccagaagcctgctggacagaaagttcaagctgatctgcagcgagctgaacggcagatacatcagcaacgagttcaaggtggaggtgaacgtgatccacaccgccaaccccatggagcacgccaaccacatggccgcccagccccagttcgtgcaccccgagcacagaagcttcgtggacctgagcggccacaacctggccaacccccaccccttcgccgtggtgcccagcaccgccaccgtggtgatcgtggtgtgcgtgagcttcctggtgttcatgatcatcctgggcgtgttcagaatcagagccgcccacagaagaaccatgagagaccaggacaccggcaaggagaacgagatggactgggacgacagcgccctgaccatcaccgtgaaccccatggagacctacgaggaccagcacagcagcgaggaggaggaggaggaggaggaggaggaggagagcgaggacggcgaggaggaggacgacatcaccagcgccgagagcgagagcagcgaggaggaggagggcgagcagggcgacccccagaacgccaccagacagcagcagctggagtgggacgacagcaccctgagctactag

SEQ ID NO: 4189 - DNA, 678 bp, synthetic construct
  misc_feature 1..678: note = source = /note="Description of Artificial Sequence: Synthetic coding sequence"
  source 1..678: mol_type = other DNA
atgagcggctgcagcaagagatgcaagctgggcttcgtgaagttcgcccagaccatcttcaagctgatcaccggcaccctgagcaaggacaagatcgaggacgagctggagatgaccatggtgtgccacagacccgagggcctggagcagctggaggcccagaccaacttcaccaagagagagctgcaggtgctgtacagaggcttcaagaacgagtgccccagcggcgtggtgaacgaggacaccttcaagcagatctacgcccagttcttcccccacggcgacgccagcacctacgcccactacctgttcaacgccttcgacaccacccagaccggcagcgtgaagttcgaggacttcgtgaccgccctgagcatcctgctgagaggcaccgtgcacgagaagctgagatggaccttcaacctgtacgacatcaacaaggacggctacatcaacaaggaggagatgatggacatcgtgaaggccatctacgacatgatgggcaagtacacctaccccgtgctgaaggaggacacccccagacagcacgtggacgtgttcttccagaagatggacaagaacaaggacggcatcgtgaccctggacgagttcctggagagctgccaggaggacgacaacatcatgagaagcctgcagctgttccagaacgtgatgtag

SEQ ID NO: 4190 - DNA, 420 bp, synthetic construct
  misc_feature 1..420: note = source = /note="Description of Artificial Sequence: Synthetic coding sequence"
  source 1..420: mol_type = other DNA
atgtacaagctggccagctgctgcctgctgttcatcggcttcctgaaccccctgctgagcctgcccctgctggacagcagagagatcagcttccagctgagcgccccccacgaggacgccagactgacccccgaggagctggagagagccagcctgctgcagatcctgcccgagatgctgggcgccgagagaggcgacatcctgagaaaggccgacagcagcaccaacatcttcaaccccagaggcaacctgagaaagttccaggacttcagcggccaggaccccaacatcctgctgagccacctgctggccagaatctggaagccctacaagaagcagagaagaaagctgagacaggacctgagactgtggaagaaggagcccggcctgagaatcttcaagaactacgtgtgggtgtag

SEQ ID NO: 4191 - DNA, 879 bp, synthetic construct
  misc_feature 1..879: note = source = /note="Description of Artificial Sequence: Synthetic coding sequence"
  source 1..879: mol_type = other DNA
atggaggtgaccgccgtggccacccagggcggctacggcagcagcgactgggtgaccagctacctgctgatgttcagcgacggcggcagaaactggaagcagtacagaagagaggagagcatctggggcttccccggcaacaccaacgccgacagcgtggtgcactacagactgcagccccccttcgaggccagattcctgagattcctgcccctggcctggaaccccagaggcagaatcggcatgagaatcgaggtgtacggctgcgcctacaagagcgaggtggtgtacttcgacggccagagcgccctgctgtacagactggacaagaagcccctgaagcccatcagagacgtgatcagcctgaagttcaaggccatgcagagcaacggcatcctgctgcacagagagggccagcacggcaaccacatcaccctggagctgatcaagggcaagctggtgttcttcctgaacagcggcaacgccaagctgcccagcaccatcgcccccgtgaccctgaccctgggcagcctgctggacgaccagcactggcacagcgtgctgatcgagctgctggacacccaggtgaacttcaccgtggacaagcacacccaccacttccaggccaagggcgacagcagctacctggacctgaacttcgagatcagcttcggcggcatccccacccccggcagaagcagagccttcagaagaaagagcttccacggctgcctggagaacctgtactacaacggcgtggacgtgaccgagctggccaagaagcacaagccccagatcctgatgatggagctggcccacggcctgcaggaccagaacctgaagatcagcctgaccgtgtgccaccagaccacccagtag

SEQ ID NO: 4192 - DNA, 783 bp, synthetic construct
  misc_feature 1..783: note = source = /note="Description of Artificial Sequence: Synthetic coding sequence"
  source 1..783: mol_type = other DNA
atgaagaccagcgacggcttcaccctgaacgccgagagctacgtgagcttcaccaccaagctggacatccccaccgccgccaagtacgagtacggcgtgcccctgcagaccagcgacagcttcctgagattccccagcagcctgaccagcagcctgtgcaccgacaacaaccccgccgccttcctggtgaaccaggccgtgaagtgcaccagaaagatcaacctggagcagtgcgaggagatcgaggccctgagcatggccttctacagcagccccgagatcctgagagtgcccgacagcagaaagaaggtgcccatcaccgtgcagagcatcgtgatccagagcctgaacaagaccctgaccagaagagaggacaccgacgtgctgcagcccaccctggtgaacgccggccacttcagcctgtgcgtgaacgtggtgctggaggtgaagtacagcctgacctacaccgacgccggcgaggtgaccaaggccgacctgagcttcgtgctgggcaccgtgagcagcgtggtggtgcccctgcagcagaagttcgagatccacttcctgcagaccgactggagcagccccgtgagcgccagaagcaccgagggcgaggagcccgccgtgggccccggcctgcccagactgagaggccccttctggaagttccccggccccggccacgccggcctgggcgcccaccccctgcaccaccccgtgatccagcaggagggcttcctgcccgcccccagaggcttcggctacagaagcgaggtggactag

SEQ ID NO: 4193 - DNA, 3624 bp, synthetic construct
  misc_feature 1..3624: note = source = /note="Description of Artificial Sequence: Synthetic coding sequence"
  source 1..3624: mol_type = other DNA
atggccagcgtggcctgggccgtgctgaaggtgctgctgctgctgcccacccagacctggagccccgtgggcgccggcaacccccccgactgcgacgcccccctggccagcgccctgcccagaagcagcttcagcagcagcagcgagctgagcagcagccacggccccggcttcagcagactgaacagaagagacggcgccggcggctggacccccctggtgagcaacaagtaccagtggctgcagatcgacctgggcgagagaatggaggtgaccgccgtggccacccagggcggctacggcagcagcgactgggtgaccagctacctgctgatgttcagcgacggcggcagaaactggaagcagtacagaagagaggagagcatctggggcttccccggcaacaccaacgccgacagcgtggtgcactacagactgcagccccccttcgaggccagattcctgagattcctgcccctggcctggaaccccagaggcagaatcggcatgagaatcgaggtgtacggctgcgcctacaagagcgaggtggtgtacttcgacggccagagcgccctgctgtacagactggacaagaagcccctgaagcccatcagagacgtgatcagcctgaagttcaaggccatgcagagcaacggcatcctgctgcacagagagggccagcacggcaaccacatcaccctggagctgatcaagggcaagctggtgttcttcctgaacagcggcaacgccaagctgcccagcaccatcgcccccgtgaccctgaccctgggcagcctgctggacgaccagcactggcacagcgtgctgatcgagctgctggacacccaggtgaacttcaccgtggacaagcacacccaccacttccaggccaagggcgacagcagctacctggacctgaacttcgagatcagcttcggcggcatccccacccccggcagaagcagagccttcagaagaaagagcttccacggctgcctggagaacctgtactacaacggcgtggacgtgaccgagctggccaagaagcacaagccccagatcctgatgatgggcaacgtgagcttcagctgcccccagccccagaccgtgcccgtgaccttcctgagcagcagaagctacctggccctgcccggcaacagcggcgaggacaaggtgagcgtgaccttccagttcagaacctggaacagagccggccacctgctgttcggcgagctgagaagaggcagcggcagcttcgtgctgttcctgaaggacggcaagctgaagctgagcctgttccagcccggccagagccccagaaacgtgaccgccggcgccggcctgaacgacggccagtggcacagcgtgagcttcagcgccaagtggagccacatgaacgtggtggtggacgacgacaccgccgtgcagcccctggtggccgtgctgatcgacagcggcgacacctactacttcggcggctgcctggacaacagcagcggcagcggctgcaagagccccctgggcggcttccagggctgcctgagactgatcaccatcggcgacaaggccgtggaccccatcctggtgcagcagggcgccctgggcagcttcagagacctgcagatcgacagctgcggcatcaccgacagatgcctgcccagctactgcgagcacggcggcgagtgcagccagagctgggacaccttcagctgcgactgcctgggcaccggctacaccggcgagacctgccacagcagcctgtacgagcagagctgcgaggcccacaagcacagaggcaaccccagcggcctgtactacatcgacgccgacggcagcggccccctgggccccttcctggtgtactgcaacatgaccgacgccgcctggaccgtggtgcagcacggcggccccgacgccgtgaccctgagaggcgcccccagcggccaccccagaagcgccgtgagcttcgcctacgccgccggcgccggccagctgagaagcgccgtgaacctggccgagagatgcgagcagagactggccctgagatgcggcaccgccagaagacccgacagcagagacggcacccccctgagctggtgggtgggcagaaccaacgagacccacaccagctggggcggcagcctgcccgacgcccagaagtgcacctgcggcctggagggcaactgcatcgacagccagtactactgcaactgcgacgccggcagaaacgagtggaccagcgacaccatcgtgctgagccagaaggagcacctgcccgtgacccagatcgtgatgaccgacgccggcagaccccacagcgaggccgcctacaccctgggccccctgctgtgcagaggcgaccagagcttctggaacagcgccagcttcaacaccgagaccagctacctgcacttccccgccttccacggcgagctgaccgccgacgtgtgcttcttcttcaagaccaccgtgagcagcggcgtgttcatggagaacctgggcatcaccgacttcatcagaatcgagctgagagcccccaccgaggtgaccttcagcttcgacgtgggcaacggcccctgcgaggtgaccgtgcagagccccacccccttcaacgacaaccagtggcaccacgtgagagccgagagaaacgtgaagggcgccagcctgcaggtggaccagctgccccagaagatgcagcccgcccccgccgacggccacgtgagactgcagctgaacagccagctgttcatcgagatcagcgcctacttcgccaccggcagcagcatgacctaccacttccaggagcactacaccctgagcgagaacagcagcagcctggtgagcagcctgcacagagacgtgaccctgaccagagagatgatcaccctgagcttcagaaccaccagaacccccagcctgctgctgtacgtgagcagcttctacgaggagtacctgagcgtgatcctggccaacaacggcagcctgcagatcagatacaagctggacagacaccagaaccccgacgccttcaccttcgacttcaagaacatggccgacggccagctgcaccaggtgaagatcaacagagaggaggccgtggtgatggtggaggtgaaccagagcaccaagaagcaggtgatcctgagcagcggcaccgagttcaacgccgtgaagagcctgatcctgggcaaggtgctggaggccgccggcgccgaccccgacaccagaagagccgccaccagcggcttcaccggctgcctgagcgccgtgagattcggcagagccgcccccctgaaggccgccctgagacccagcggccccagcagagtgaccgtgagaggccacgtggcccccatggccagatgcgccgccggcgccgccagcggcagccccgccagagagctggcccccagactggccggcggcgccggcagaagcggccccgccgacgagggcgagcccctggtgaacgccgacagaagagacagcgccgtgatcggcggcgtgatcgccgtggtgatcttcatcctgctgtgcatcaccgccatcgccatcagaatctaccagcagagaaagctgagaaaggagaacgagagcaaggtgagcaagaaggaggagtgctag

SEQ ID NO: 4194 - DNA, 2238 bp, synthetic construct
  misc_feature 1..2238: note = source = /note="Description of Artificial Sequence: Synthetic coding sequence"
  source 1..2238: mol_type = other DNA
atggccagcgtggcctgggccgtgctgaaggtgctgctgctgctgcccacccagacctggagccccgtgggcgccggcaacccccccgactgcgacgcccccctggccagcgccctgcccagaagcagcttcagcagcagcagcgagctgagcagcagccacggccccggcttcagcagactgaacagaagagacggcgccggcggctggacccccctggtgagcaacaagtaccagtggctgcagatcgacctgggcgagagaatggaggtgaccgccgtggccacccagggcggctacggcagcagcgactgggtgaccagctacctgctgatgttcagcgacggcggcagaaactggaagcagtacagaagagaggagagcatctggggcttccccggcaacaccaacgccgacagcgtggtgcactacagactgcagccccccttcgaggccagattcctgagattcctgcccctggcctggaaccccagaggcagaatcggcatgagaatcgaggtgtacggctgcgcctacaagagcgaggtggtgtacttcgacggccagagcgccctgctgtacagactggacaagaagcccctgaagcccatcagagacgtgatcagcctgaagttcaaggccatgcagagcaacggcatcctgctgcacagagagggccagcacggcaaccacatcaccctggagctgatcaagggcaagctggtgttcttcctgaacagcggcaacgccaagctgcccagcaccatcgcccccgtgaccctgaccctgggcagcctgctggacgaccagcactggcacagcgtgctgatcgagctgctggacacccaggtgaacttcaccgtggacaagcacacccaccacttccaggccaagggcgacagcagctacctggacctgaacttcgagatcagcttcggcggcatccccacccccggcagaagcagagccttcagaagaaagagcttccacggctgcctggagaacctgtactacaacggcgtggacgtgaccgagctggccaagaagcacaagccccagatcctgatgatgggcaacgtgagcttcagctgcccccagccccagaccgtgcccgtgaccttcctgagcagcagaagctacctggccctgcccggcaacagcggcgaggacaaggtgagcgtgaccttccagttcagaacctggaacagagccggccacctgctgttcggcgagctgagaagaggcagcggcagcttcgtgctgttcctgaaggacggcaagctgaagctgagcctgttccagcccggccagagccccagaaacgtgaccgccggcgccggcctgaacgacggccagtggcacagcgtgagcttcagcgccaagtggagccacatgaacgtggtggtggacgacgacaccgccgtgcagcccctggtggccgtgctgatcgacagcggcgacacctactacttcggcggctgcctggacaacagcagcggcagcggctgcaagagccccctgggcggcttccagggctgcctgagactgatcaccatcggcgacaaggccgtggaccccatcctggtgcagcagggcgccctgggcagcttcagagacctgcagatcgacagctgcggcatcaccgacagatgcctgcccagctactgcgagcacggcggcgagtgcagccagagctgggacaccttcagctgcgactgcctgggcaccggctacaccggcgagacctgccacagcagcctgtacgagcagagctgcgaggcccacaagcacagaggcaaccccagcggcctgtactacatcgacgccgacggcagcggccccctgggccccttcctggtgtactgcaacatgaccgacgccgcctggaccgtggtgcagcacggcggccccgacgccgtgaccctgagaggcgcccccagcggccaccccagaagcgccgtgagcttcgcctacgccgccggcgccggccagctgagaagcgccgtgaacctggccgagagatgcgagcagagactggccctgagatgcggcaccgccagaagacccgacagcagagacggcacccccctgagctggtgggtgggcagaaccaacgagacccacaccagctggggcggcagcctgcccgacgcccagaagtgcacctgcggcctggagggcaactgcatcgacagccagtactactgcaactgcgacgccggcagaaacgagtggtag

SEQ ID NO: 4195 - DNA, 549 bp, synthetic construct
  misc_feature 1..549: note = source = /note="Description of Artificial Sequence: Synthetic coding sequence"
  source 1..549: mol_type = other DNA
atggagccccagctgggccccgaggccgccgccctgagacccggctggctggccctgctgctgtgggtgagcgccctgagctgcagcttcagcctgcccgccagcagcctgagcagcctggtgccccaggtgagaaccagctacaacttcggcagaaccttcctgggcctggacaagtgcaacgcctgcatcggcaccagcatctgcaagaagttcttcaaggaggagatcagaagcgacaactggctggccagccacctgggcctgccccccgacagcctgctgagctaccccgccaactacagcgacgacagcaagatctggagacccgtggagatcttcagactggtgagcaagtaccagaacgagatcagcgacagaagaatctgcgccagcgccagcgcccccaagacctgcagcatcgagagagtgctgagaaagaccgagagattccagaagtggctgcaggccaagagactgacccccgacctggtgcaggactgccaccagggccagagagagctgaagttcctgtgcatgctgagatag

SEQ ID NO: 4196 - DNA, 282 bp, synthetic construct
  misc_feature 1..282: note = source = /note="Description of Artificial Sequence: Synthetic coding sequence"
  source 1..282: mol_type = other DNA
atggacagcctgagaaagatgctgatcagcgtggccatgctgggcgccggcgccggcgtgggctacgccctgctggtgatcgtgacccccggcgagagaagaaagcaggagatgctgaaggagatgcccctgcaggaccccagaagcagagaggaggccgccagaacccagcagctgctgctggccaccctgcaggaggccgccaccacccaggagaacgtggcctggagaaagaactggatggtgggcggcgagggcggcgccggcggcagaagcccctag

SEQ ID NO: 4197 - DNA, 387 bp, synthetic construct
  misc_feature 1..387: note = source = /note="Description of Artificial Sequence: Synthetic coding sequence"
  source 1..387: mol_type = other DNA
atgggcaagagcgccagcaagcagttccacaacgaggtgctgaaggcccacaacgagtacagacagaagcacggcgtgccccccctgaagctgtgcaagaacctgaacagagaggcccagcagtacagcgaggccctggccagcaccagaatcctgaagcacagccccgagagcagcagaggccagtgcggcgagaacctggcctgggccagctacgaccagaccggccacttcaccgccatggtgtggaagaacaccaagaagatgggcgtgggcaaggccagcgccagcgacggcagcagcttcgtggtggccagatacttccccgccggcaacgtggtgaacgagggcttcttcgaggagaacgtgctgccccccaagaagtag

SEQ ID NO: 4198 - DNA, 465 bp, synthetic construct
  misc_feature 1..465: note = source = /note="Description of Artificial Sequence: Synthetic coding sequence"
  source 1..465: mol_type = other DNA
atgggcaagagcgccagcaagcagttccacaacgaggtgctgaaggcccacaacgagtacagacagaagcacggcgtgccccccctgaagctgtgcaagaacctgaacagagaggcccagcagtacagcgaggccctggccagcaccagaatcctgaagcacagccccgagagcagcagaggccagtgcggcgagaacctggcctgggccagctacgaccagaccggcaaggaggtggccgacagatggtacagcgagatcaagaactacaacttccagcagcccggcttcaccagcggcaccggccacttcaccgccatggtgtggaagaacaccaagaagatgggcgtgggcaaggccagcgccagcgacggcagcagcttcgtggtggccagatacttccccgccggcaacgtggtgaacgagggcttcttcgaggagaacgtgctgccccccaagaagtag

SEQ ID NO: 4199 - DNA, 831 bp, synthetic construct
  misc_feature 1..831: note = source = /note="Description of Artificial Sequence: Synthetic coding sequence"
  source 1..831: mol_type = other DNA
atggacagcagcagagagcccaccctgggcagactggacgccgccggcttctggcaggtgtggcagagattcgacgccgacgagaagggctacatcgaggagaaggagctggacgccttcttcctgcacatgctgatgaagctgggcaccgacgacaccgtgatgaaggccaacctgcacaaggtgaagcagcagttcatgaccacccaggacgccagcaaggacggcagaatcagaatgaaggagctggccggcatgttcctgagcgaggacgagaacttcctgctgctgttcagaagagagaaccccctggacagcagcgtggagttcatgcagatctggagaaagtacgacgccgacagcagcggcttcatcagcgccgccgagctgagaaacttcctgagagacctgttcctgcaccacaagaaggccatcagcgaggccaagctggaggagtacaccggcaccatgatgaagatcttcgacagaaacaaggacggcagactggacctgaacgacctggccagaatcctggccctgcaggagaacttcctgctgcagttcaagatggacgcctgcagcaccgaggagagaaagagagacttcgagaagatcttcgcctactacgacgtgagcaagaccggcgccctggagggccccgaggtggacggcttcgtgaaggacatgatggagctggtgcagcccagcatcagcggcgtggacctggacaagttcagagagatcctgctgagacactgcgacgtgaacaaggacggcaagatccagaagagcgagctggccctgtgcctgggcctgaagatcaacccctag

SEQ ID NO: 4200 - DNA, 216 bp, synthetic construct
  misc_feature 1..216: note = source = /note="Description of Artificial Sequence: Synthetic coding sequence"
  source 1..216: mol_type = other DNA
atgcccgccggcgtgcccatgagcacctacctgaagatgttcgccgccagcctgctggccatgtgcgccggcgccgaggtggtgcacagatactacagacccgacctgaccatccccgagatcccccccaagagaggcgagctgaagaccgagctgctgggcctgaaggagagaaagcacaagccccaggtgagccagcaggaggagctgaagtag

SEQ ID NO: 4201 - DNA, 1287 bp, synthetic construct
  misc_feature 1..1287: note = source = /note="Description of Artificial Sequence: Synthetic coding sequence"
  source 1..1287: mol_type = other DNA
atgaagcccatgctgaaggacttcagcaacctgctgctggtggtgctgtgcgactacgtgctgggcgaggccgagtacctgctgctgagagagcccggccacgtggccctgagcaacgacaccgtgtacgtggacttccagtacttcgacggcgccaacggcaccctgagaaacgtgagcgtgctgctgctggaggccaacaccaaccagaccgtgaccaccaagtacctgctgaccaaccagagccagggcaccctgaagttcgagtgcttctacttcaaggaggccggcgactactggttcaccatgacccccgaggccaccgacaacagcacccccttcccctggtgggagaagagcgccttcctgaaggtggagtggcccgtgttccacgtggacctgaacagaagcgccaaggccgccgagggcaccttccaggtgggcctgttcaccagccagcccctgtgccccttccccgtggacaagcccaacatcgtggtggacgtgatcttcaccaacagcctgcccgaggccagaagaaacagcagacagcccctggagatcagaaccagcaagagaaccgagctggcccagggccagtgggtggagttcggctgcgcccccctgggccccgaggcctacgtgaccgtggtgctgaagctgctgggcagagacagcgtgatcaccagcaccggccccatcgacctggcccagaagttcggctacaagctggtgatggtgcccgagctgacctgcgagagcggcgtggaggtgaccgtgctgccccccccctgcaccttcgtgcagggcgtggtgaccgtgttcaaggaggcccccagataccccggcaagagaaccatccacctggccgagaacagcctgcccctgggcgagagaagaaccatcttcaactgcaccctgttcgacatgggcaagaacaagtactgcttcgacttcggcatcagcagcagaagccacttcagcgccaaggaggagtgcatgctgatccagagaaacaccgagacctggggcctgtggcagccctggagccagtgcagcgccacctgcggcgacggcgtgagagagagaagaagagtgtgcctgaccagcttccccagcagccccgtgtgccccggcatgagcctggaggccagcctgtgcagcctggaggagtgcgccggcagattcagaagctgctgccccggctggagcgccatggtgagaagcagactgaccaacagcgccagcagagtgcaggccatcctgctgccccagcccctggcctag

SEQ ID NO: 4202 - DNA, 312 bp, synthetic construct
  misc_feature 1..312: note = source = /note="Description of Artificial Sequence: Synthetic coding sequence"
  source 1..312: mol_type = other DNA
atgaagctgtgcgtgaccgtgctgagcctgctggtgctggtggccgccttctgcagcctggccctgagcgcccccatgggcagcgacccccccaccgcctgctgcttcagctacaccgccagaaagctgcccagaaacttcgtggtggactactacgagaccagcagcctgtgcagccagcccgccgtggtgtacagagagagcgccagcagcgccgcccccggcagaatccccagcaccagagccgccccccacggcccctggagcggcagaggcagatgcctgccccaggccagagacaaggccagatag

SEQ ID NO: 4203 - DNA, 279 bp, synthetic construct
  misc_feature 1..279: note = source = /note="Description of Artificial Sequence: Synthetic coding sequence"
  source 1..279: mol_type = other DNA
atgaagctgtgcgtgaccgtgctgagcctgctggtgctggtggccgccttctgcagcctggccctgagcgcccccatgggcagcgacccccccaccgcctgctgcttcagctacaccgccagaaagctgcccagaaacttcgtggtggactactacgagaccagcagcctgtgcagccagcccgccgtgccctgggacagcaacctgggcaagcaggtgtgcgccgaccccagcgagagctgggtgcaggagtacgtgtacgacctggagctgaactag

SEQ ID NO: 4204 - DNA, 282 bp, synthetic construct
  misc_feature 1..282: note = source = /note="Description of Artificial Sequence: Synthetic coding sequence"
  source 1..282: mol_type = other DNA
atgcaggtgagcaccgccgccctggccgtgctgctgtgcaccatggccctgtgcaaccaggtgctgagcgcccccctggccgccgacacccccaccgcctgctgcttcagctacaccagcagacagatcccccagaacttcatcgccgactacttcgagaccagcagccagtgcagcaagcccagcgtgatcttcctgaccaagagaggcagacaggtgtgcgccgaccccagcgaggagtgggtgcagaagtacgtgagcgacctggagctgagcgcctag

SEQ ID NO: 4205 - DNA, 1869 bp, synthetic construct
  misc_feature 1..1869: note = source = /note="Description of Artificial Sequence: Synthetic coding sequence"
  source 1..1869: mol_type = other DNA
atgggcaagagcgagggccccgtgggcatggtggagagcgccggcagagccggccagaagagacccggcttcctggagggcggcctgctgctgctgctgctgctggtgaccgccgccctggtggccctgggcgtgctgtacgccgacagaagaggcaagcagctgcccagactggccagcagactgtgcttcctgcaggaggagagaaccttcgtgaagagaaagcccagaggcatccccgaggcccaggaggtgagcgaggtgtgcaccacccccggctgcgtgatcgccgccgccagaatcctgcagaacatggaccccaccaccgagccctgcgacgacttctaccagttcgcctgcggcggctggctgagaagacacgtgatccccgagaccaacagcagatacagcatcttcgacgtgctgagagacgagctggaggtgatcctgaaggtggagctggagacccagctggccaaggccaccgtgccccaggaggagagacacgacgtgatcgccctgtaccacagaatgggcctggaggagctgcagagccagttcggcctgaagggcttcaactggaccctgttcatccagaccgtgctgagcagcgtgaagatcaagctgctgcccgacgaggaggtggtggtgtacggcatcccctacctgcagaacctggagaacatcatcgacacctacagcgccagaaccatccagaactacctggtgtggagactggtgctggacagaatcggcagcctgagccagagattcaaggacaccagagtgaactacagaaaggccctgttcggcaccatggtggaggaggtgagatggagagagtgcgtgggctacgtgaacagcaacatggagaacgccgtgggcagcctgtacgtgagagaggccttccccggcgacagcaagagcatggtgagagagctgatcgacaaggtgagaaccgtgttcgtggagaccctggacgagctgggctggatggacgaggagagcaagaagaaggcccaggagaaggccatgagcatcagagagcagatcggccaccccgactacatcctggaggagatgaacagaagactggacgaggagtacagcaacctgaacttcagcgaggacctgtacttcgagaacagcctgcagaacctgaaggtgggcgcccagagaagcctgagaaagctgagagagaaggtggaccccaacctgtggatcatcggcgccgccgtggtgaacgccttctacagccccaacagaaaccagatcgtgttccccgccggcatcctgcagccccccttcttcagcaaggagcagccccaggccctgaacttcggcggcatcggcatggtgatcggccacgagatcacccacggcttcgacgacaacggcagaaacttcgacaagaacggcaacatgatggactggtggagcaacttcagcacccagcacttcagagagcagagcgagtgcatgatctaccagtacggcaactacagctgggacctggccgacgagcagaacgtgaacggcttcaacaccctgggcgagaacatcgccgacaacggcggcgtgagacaggcctacaaggcctacctgaagtggatggccgagggcggcaaggaccagcagctgcccggcctggacctgacccacgagcagctgttcttcatcaactacgcccaggtgtggtgcggcagctacagacccgagttcgccatccagagcatcaagaccgacgtgcacagccccctgaagtacagagtgctgggcagcctgcagaacctggccgccttcgccgacaccttccactgcgccagaggcacccccatgcaccccaaggagagatgcagagtgtggtag

SEQ ID NO: 4206 - DNA, 2340 bp, synthetic construct
  misc_feature 1..2340: note = source = /note="Description of Artificial Sequence: Synthetic coding sequence"
  source 1..2340: mol_type = other DNA
atgggcaagagcgagggccccgtgggcatggtggagagcgccggcagagccggccagaagagacccggcttcctggagggcggcctgctgctgctgctgctgctggtgaccgccgccctggtggccctgggcgtgctgtacgccgacagaagaggcaagcagctgcccagactggccagcagactgtgcttcctgcaggaggagagaaccttcgtgaagagaaagcccagaggcatccccgaggcccaggaggtgagcgaggtgtgcaccacccccggctgcgtgatcgccgccgccagaatcctgcagaacatggaccccaccaccgagccctgcgacgacttctaccagttcgcctgcggcggctggctgagaagacacgtgatccccgagaccaacagcagatacagcatcttcgacgtgctgagagacgagctggaggtgatcctgaaggccgtgctggagaacagcaccgccaaggacagacccgccgtggagaaggccagaaccctgtacagaagctgcatgaaccagagcgtgatcgagaagagaggcagccagcccctgctggacatcctggaggtggtgggcggctggcccgtggccatggacagatggaacgagaccgtgggcctggagtgggagctggagagacagctggccctgatgaacagccagttcaacagaagagtgctgatcgacctgttcatctggaacgacgaccagaacagcagcagacacatcatctacatcgaccagcccaccctgggcatgcccagcagagagtactacttcaacggcggcagcaacagaaaggtgagagaggcctacctgcagttcatggtgagcgtggccaccctgctgagagaggacgccaacctgcccagagacagctgcctggtgcaggaggacatggtgcaggtgctggagctggagacccagctggccaaggccaccgtgccccaggaggagagacacgacgtgatcgccctgtaccacagaatgggcctggaggagctgcagagccagttcggcctgaagggcttcaactggaccctgttcatccagaccgtgctgagcagcgtgaagatcaagctgctgcccgacgaggaggtggtggtgtacggcatcccctacctgcagaacctggagaacatcatcgacacctacagcgccagaaccatccagaactacctggtgtggagactggtgctggacagaatcggcagcctgagccagagattcaaggacaccagagtgaactacagaaaggccctgttcggcaccatggtggaggaggtgagatggagagagtgcgtgggctacgtgaacagcaacatggagaacgccgtgggcagcctgtacgtgagagaggccttccccggcgacagcaagagcatggtgagagagctgatcgacaaggtgagaaccgtgttcgtggagaccctggacgagctgggctggatggacgaggagagcaagaagaaggcccaggagaaggccatgagcatcagagagcagatcggccaccccgactacatcctggaggagatgaacagaagactggacgaggagtacagcaacctgaacttcagcgaggacctgtacttcgagaacagcctgcagaacctgaaggtgggcgcccagagaagcctgagaaagctgagagagaaggtggaccccaacctgtggatcatcggcgccgccgtggtgaacgccttctacagccccaacagaaaccagatcgtgttccccgccggcatcctgcagccccccttcttcagcaaggagcagccccaggccctgaacttcggcggcatcggcatggtgatcggccacgagatcacccacggcttcgacgacaacggcagaaacttcgacaagaacggcaacatgatggactggtggagcaacttcagcacccagcacttcagagagcagagcgagtgcatgatctaccagtacggcaactacagctgggacctggccgacgagcagaacgtgaacggcttcaacaccctgggcgagaacatcgccgacaacggcggcgtgagacaggcctacaaggcctacctgaagtggatggccgagggcggcaaggaccagcagctgcccggcctggacctgacccacgagcagctgttcttcatcaactacgcccaggtgtggtgcggcagctacagacccgagttcgccatccagagcatcaagaccgacgtgcacagccccctgaagtacagagtgctgggcagcctgcagaacctggccgccttcgccgacaccttccactgcgccagaggcacccccatgcaccccaaggagagatgcagagtgtggtag

SEQ ID NO: 4207 - DNA, 258 bp, synthetic construct
  misc_feature 1..258: note = source = /note="Description of Artificial Sequence: Synthetic coding sequence"
  source 1..258: mol_type = other DNA
atgagcgtgcacatgcccgccatgaagatctgcgagaagctgaagaagctggacagccagatctgcgagctgaagtacgagaagaccctggacctggccagcgtggacctgagaaagatgagagtggccgagctgaagcagatcctgcacagctggggcgaggagtgcagagcctgcgccgagaagaccgactacgtgaacctgatccaggagctggcccccaagtacgccgccacccaccccaagaccgagctgtag

SEQ ID NO: 4208 - DNA, 657 bp, synthetic construct
  misc_feature 1..657: note = source = /note="Description of Artificial Sequence: Synthetic coding sequence"
  source 1..657: mol_type = other DNA
atgggcagagtgttcctgaccggcgagaaggccaacagcatcctgaagagataccccagagccaacggcttcttcgaggagatcagacagggcaacatcgagagagagtgcaaggaggagttctgcaccttcgaggaggccagagaggccttcgagaacaacgagaagaccaaggagttctggagcacctacaccaaggcccagcagggcgagagcaacagaggcagcgactggttccagttctacctgaccttccccctgatcttcggcctgttcatcatcctgctggtgatcttcctgatctggagatgcttcctgagaaacaagaccagaagacagaccgtgaccgagggccacatccccttcccccagcacctgaacatcatcacccccccccccccccccgacgaggtgttcgacagcagcggcctgagccccggcttcctgggctacgtggtgggcagaagcgacagcgtgagcaccagactgagcaactgcgaccccccccccacctacgaggaggccaccggccaggtgaacctgcagagaagcgagaccgagccccacctggaccccccccccgagtacgaggacatcgtgaacagcaacagcgccagcgccatccccatggtgcccgtggtgaccaccatcaagtag

SEQ ID NO: 4209 - DNA, 1365 bp, synthetic construct; identical to SEQ ID NO: 3691
  misc_feature 1..1365: note = source = /note="Description of Artificial Sequence: Synthetic coding sequence"
  source 1..1365: mol_type = other DNA

SEQ ID NO: 4210 - DNA, 417 bp, synthetic construct
  misc_feature 1..417: note = source = /note="Description of Artificial Sequence: Synthetic coding sequence"
  source 1..417: mol_type = other DNA
atgacctggagacaggccgtgctgctgagctgcttcagcgccgtggtgctgctgagcatgctgagagagggcaccagcgtgagcgtgggcaccatgcagatggccggcgaggaggccagcgaggacgccaagcagaagatcttcatgcaggagagcgacgccagcaacttcctgaagagaagaggcaagagaagccccaagagcagagacgaggtgaacgtggagaacagacagaagctgagagtggacgagctgagaagagagtactacgaggagcagagaaacgagttcgagaacttcgtggaggagcagaacgacgagcaggaggagagaagcagagaggccgtggagcagtggagacagtggcactacgacggcctgcaccccagctacctgtacaacagacaccacacctag

SEQ ID NO: 4211 - DNA, 729 bp, synthetic construct
  misc_feature 1..729: note = source = /note="Description of Artificial Sequence: Synthetic coding sequence"
  source 1..729: mol_type = other DNA
atggccctgaagaacaagttcagctgcctgtggatcctgggcctgtgcctggtggccaccaccagcagcaagatccccagcatcaccgacccccacttcatcgacaactgcatcgaggcccacaacgagtggagaggcaaggtgaacccccccgccgccgacatgaagtacatgatctgggacaagggcctggccaagatggccaaggcctgggccaaccagtgcaagttcgagcacaacgactgcctggacaagagctacaagtgctacgccgccttcgagtacgtgggcgagaacatctggctgggcggcatcaagagcttcacccccagacacgccatcaccgcctggtacaacgagacccagttctacgacttcgacagcctgagctgcagcagagtgtgcggccactacacccagctggtgtgggccaacagcttctacgtgggctgcgccgtggccatgtgccccaacctgggcggcgccagcaccgccatcttcgtgtgcaactacggccccgccggcaacttcgccaacatgcccccctacgtgagaggcgagagctgcagcctgtgcagcaaggaggagaagtgcgtgaagaacctgtgcagaaccccccagctgatcatccccaaccagaaccccttcctgaagcccaccggcagagccccccagcagaccgccttcaaccccttcagcctgggcttcctgctgctgagaatcttctag

SEQ ID NO: 4212 - DNA, 813 bp, synthetic construct
  misc_feature 1..813: note = source = /note="Description of Artificial Sequence: Synthetic coding sequence"
  source 1..813: mol_type = other DNA
atgctgagacagctgctgctggccgccctgtgcctggccggcccccccgcccccgccagagcctgccagctgcccagcgagtggagacccctgagcgagggctgcagagccgagctggccgagaccatcgtgtacgccagagtgctggccctgcaccccgaggcccccggcctgtacaaccacctgccctggcagtaccacgccggccagggcggcctgttctacagcgccgaggtggagatgctgtgcgaccaggcctggggcagcatgctggaggtgcccgccggcagcagactgaacctgaccggcctgggctacttcagctgccacagccacaccgtggtgcaggactacagctacttcttcttcctgagaatggacgagaactacaacctgctgccccacggcgtgaacttccaggacgccatcttccccgacacccaggagaacagaagaatgttcagcagcctgttccagttcagcaactgcagccagggccagcagctggccaccttcagcagcgactgggagatccaggaggacagcagactgatgtgcagcagcgtgcagaaggccctgttcgaggaggaggaccacgtgaagaagctgcagcagaaggtggccaccctggagaagagaaacagacagctgagagagagagtgaagaaggtgaagagaagcctgagacaggccagaaagaagggcagacacctggagctggccaaccagaagctgagcgagaagctggccgccggcgccctgccccacatcaacgccagaggccccgtgagacccccctacctgagaggctag

SEQ ID NO: 4213 - DNA, 438 bp, synthetic construct
  misc_feature 1..438: note = source = /note="Description of Artificial Sequence: Synthetic coding sequence"
  source 1..438: mol_type = other DNA
atggacgagaactacaacctgctgccccacggcgtgaacttccaggacgccatcttccccgacacccaggagaacagaagaatgttcagcagcctgttccagttcagcaactgcagccagggccagcagctggccaccttcagcagcgactgggagatccaggaggacagcagactgatgtgcagcagcgtgcagaaggccctgttcgaggaggaggaccacgtgaagaagctgcagcagaaggtggccaccctggagaagagaaacagacagctgagagagagagtgaagaaggtgaagagaagcctgagacaggccagaaagaagggcagacacctggagctggccaaccagaagctgagcgagaagctggccgccggcgccctgccccacatcaacgccagaggccccgtgagacccccctacctgagaggctag

SEQ ID NO: 4214 - DNA, 1830 bp, synthetic construct
  misc_feature 1..1830: note = source = /note="Description of Artificial Sequence: Synthetic coding sequence"
  source 1..1830: mol_type = other DNA
atggagctgggctgctggacccagctgggcctgaccttcctgcagctgctgctgatcagcagcctgcccagagagtacaccgtgatcaacgaggcctgccccggcgccgagtggaacatcatgtgcagagagtgctgcgagtacgaccagatcgagtgcgtgtgccccggcaagagagaggtggtgggctacaccatcccctgctgcagaaacgaggagaacgagtgcgacagctgcctgatccaccccggctgcaccatcttcgagaactgcaagagctgcagaaacggcagctggggcggcaccctggacgacttctacgtgaagggcttctactgcgccgagtgcagagccggctggtacggcggcgactgcatgccctgcagcagcagcccctgcttccacgacggcacctgcgtgctggacaaggccggcagctacaagtgcgcctgcctggccggctacaccggccagagatgcgagaacctgctggaggagagaaactgcagcgaccccggcggccccgtgaacggctaccagaagatcaccggcggccccggcctgatcaacggcagacacgccaagatcggcaccgtggtgagcttcttctgcaacaacagctacgtgctgagcggcaacgagaagagaacctgccagcagaacggcgagtggagcggcaagcagcccatctgcatcaaggcctgcagagagcccaagatcagcgacctggtgagaagaagagtgctgcccatgcaggtgcagagcagagagacccccctgcaccagctgtacagcgccgccttcagcaagcagaagctgcagagcgcccccaccaagaagcccgccctgcccttcggcgacctgcccatgggctaccagcacctgcacacccagctgcagtacgagtgcatcagccccttctacagaagactgggcagcagcagaagaacctgcctgagaaccggcaagtggagcggcagagcccccagctgcatccccatctgcggcaagatcgagaacatcaccgcccccaagacccagggcctgagatggccctggcaggccgccatctacagaagaaccagcggcgtgcacgacggcagcctgcacaagggcgcctggttcctggtgtgcagcggcgccctggtgaacgagagaaccgtggtggtggccgcccactgcgtgaccgacctgggcaaggtgaccatgatcaagaccgccgacctgaaggtggtgctgggcaagttctacagagacgacgacagagacgagaagaccatccagagcctgcagatcagcgccatcatcctgcaccccaactacgaccccatcctgctggacgccgacatcgccatcctgaagctgctggacaaggccagaatcagcaccagagtgcagcccatctgcctggccgccagcagagacctgagcaccagcttccaggagagccacatcaccgtggccggctggaacgtgctggccgacgtgagaagccccggcttcaagaacgacaccctgagaagcggcgtggtgagcgtggtggacagcctgctgtgcgaggagcagcacgaggaccacggcatccccgtgagcgtgaccgacaacatgttctgcgccagctgggagcccaccgcccccagcgacatctgcaccgccgagaccggcggcatcgccgccgtgagcttccccggcagagccagccccgagcccagatggcacctgatgggcctggtgagctggagctacgacaagacctgcagccacagactgagcaccgccttcaccaaggtgctgcccttcaaggactggatcgagagaaacatgaagtag

SEQ ID NO: 4215 - DNA, 2163 bp, synthetic construct
  misc_feature 1..2163: note = source = /note="Description of Artificial Sequence: Synthetic coding sequence"
  source 1..2163: mol_type = other DNA
atggagctgggctgctggacccagctgggcctgaccttcctgcagctgctgctgatcagcagcctgcccagagagtacaccgtgatcaacgaggcctgccccggcgccgagtggaacatcatgtgcagagagtgctgcgagtacgaccagatcgagtgcgtgtgccccggcaagagagaggtggtgggctacaccatcccctgctgcagaaacgaggagaacgagtgcgacagctgcctgatccaccccggctgcaccatcttcgagaactgcaagagctgcagaaacggcagctggggcggcaccctggacgacttctacgtgaagggcttctactgcgccgagtgcagagccggctggtacggcggcgactgcatgagatgcggccaggtgctgagagcccccaagggccagatcctgctggagagctaccccctgaacgcccactgcgagtggaccatccacgccaagcccggcttcgtgatccagctgagattcgtgatgctgagcctggagttcgactacatgtgccagtacgactacgtggaggtgagagacggcgacaacagagacggccagatcatcaagagagtgtgcggcaacgagagacccgcccccatccagagcatcggcagcagcctgcacgtgctgttccacagcgacggcagcaagaacttcgacggcttccacgccatctacgaggagatcaccgcctgcagcagcagcccctgcttccacgacggcacctgcgtgctggacaaggccggcagctacaagtgcgcctgcctggccggctacaccggccagagatgcgagaacctgctggaggagagaaactgcagcgaccccggcggccccgtgaacggctaccagaagatcaccggcggccccggcctgatcaacggcagacacgccaagatcggcaccgtggtgagcttcttctgcaacaacagctacgtgctgagcggcaacgagaagagaacctgccagcagaacggcgagtggagcggcaagcagcccatctgcatcaaggcctgcagagagcccaagatcagcgacctggtgagaagaagagtgctgcccatgcaggtgcagagcagagagacccccctgcaccagctgtacagcgccgccttcagcaagcagaagctgcagagcgcccccaccaagaagcccgccctgcccttcggcgacctgcccatgggctaccagcacctgcacacccagctgcagtacgagtgcatcagccccttctacagaagactgggcagcagcagaagaacctgcctgagaaccggcaagtggagcggcagagcccccagctgcatccccatctgcggcaagatcgagaacatcaccgcccccaagacccagggcctgagatggccctggcaggccgccatctacagaagaaccagcggcgtgcacgacggcagcctgcacaagggcgcctggttcctggtgtgcagcggcgccctggtgaacgagagaaccgtggtggtggccgcccactgcgtgaccgacctgggcaaggtgaccatgatcaagaccgccgacctgaaggtggtgctgggcaagttctacagagacgacgacagagacgagaagaccatccagagcctgcagatcagcgccatcatcctgcaccccaactacgaccccatcctgctggacgccgacatcgccatcctgaagctgctggacaaggccagaatcagcaccagagtgcagcccatctgcctggccgccagcagagacctgagcaccagcttccaggagagccacatcaccgtggccggctggaacgtgctggccgacgtgagaagccccggcttcaagaacgacaccctgagaagcggcgtggtgagcgtggtggacagcctgctgtgcgaggagcagcacgaggaccacggcatccccgtgagcgtgaccgacaacatgttctgcgccagctgggagcccaccgcccccagcgacatctgcaccgccgagaccggcggcatcgccgccgtgagcttccccggcagagccagccccgagcccagatggcacctgatgggcctggtgagctggagctacgacaagacctgcagccacagactgagcaccgccttcaccaaggtgctgcccttcaaggactggatcgagagaaacatgaagtag

SEQ ID NO: 4216 - DNA, 1134 bp, synthetic construct
  misc_feature 1..1134: note = source = /note="Description of Artificial Sequence: Synthetic coding sequence"
  source 1..1134: mol_type = other DNA
atggaggccctgctgctgggcgccggcctgctgctgggcgcctacgtgctggtgtactacaacctggtgaaggcccccccctgcggcggcatgggcaacctgagaggcagaaccgccgtggtgaccggcgccaacagcggcatcggcaagatgaccgccctggagctggccagaagaggcgccagagtggtgctggcctgcagaagccaggagagaggcgaggccgccgccttcgacctgagacaggagagcggcaacaacgaggtgatcttcatggccctggacctggccagcctggccagcgtgagagccttcgccaccgccttcctgagcagcgagcccagactggacatcctgatccacaacgccggcatcagcagctgcggcagaaccagagaggccttcaacctgctgctgagagtgaaccacatcggccccttcctgctgacccacctgctgctgccctgcctgaaggcctgcgcccccagcagagtggtggtggtggccagcgccgcccactgcagaggcagactggacttcaagagactggacagacccgtggtgggctggagacaggagctgagagcctacgccgacaccaagctggccaacgtgctgttcgccagagagctggccaaccagctggaggccaccggcgtgacctgctacgccgcccaccccggccccgtgaacagcgagctgttcctgagacacgtgcccggctggctgagacccctgctgagacccctggcctggctggtgctgagagcccccagaggcggcgcccagacccccctgtactgcgccctgcaggagggcatcgagcccctgagcggcagatacttcgccaactgccacgtggaggaggtgccccccgccgccagagacgacagagccgcccacagactgtgggaggccagcaagagactggccggcctgggccccggcgaggacgccgagcccgacgaggacccccagagcgaggacagcgaggcccccagcagcctgagcaccccccaccccgaggagcccaccgtgagccagccctaccccagcccccagagcagccccgacctgagcaagatgacccacagaatccaggccaaggtggagcccgagatccagctgagctag

SEQ ID NO: 4217 - DNA, 381 bp, synthetic construct
  misc_feature 1..381: note = source = /note="Description of Artificial Sequence: Synthetic coding sequence"
  source 1..381: mol_type = other DNA
atgatcagcttccacgtgatcttcctgagcctgggcagaggcaagctgttcctgcccgtgaacttctgcttcctgaagctgaagaacagccaggtgagaatccccaaggacttcacctgcaacctgcacgtgctgttcagaaccgtgcagggcgaggacagaaacaccatgttcagaggccactggagcatctacagcagaaacttccccctggccgtggtgcccgcctacgtgaccgaggacggcaagaacaccagccacagagccagcggccagttctgcaacgccctgagccagggcgagatccccagcagcctgcagctggtgaacagctacgccctggagcccagaaccgacatgccctgcaacttcctgacctag

SEQ ID NO: 4218 - DNA, 876 bp, synthetic construct
  misc_feature 1..876: note = source = /note="Description of Artificial Sequence: Synthetic coding sequence"
  source 1..876: mol_type = other DNA
atggccgtgaccctgagcctgctgctgggcggcagagtgtgcgccgccgtgaccagatgcggcttcgccaccagaggcgtggccggccccggccccatcggcagagagcccgaccccgacagcgactgggagcccgaggagagagagctgcaggaggtggagagcaccctgaagagacagaagcaggccatcagattccagaagatcagaagacagatggaggcccccggcgccccccccagaaccctgacctgggaggccatggagcagatcagatacctgcacgaggagttccccgagagctggagcgtgcccagactggccgagggcttcgacgtgagcaccgacgtgatcagaagagtgctgaagagcaagttcctgcccaccctggagcagaagctgaagcaggaccagaaggtgctgaagaaggccggcctggcccacagcctgcagcacctgagaggcagcggcaacaccagcaagctgctgcccgccggccacagcgtgagcggcagcctgctgatgcccggccacgaggccagcagcaaggaccccaaccacagcaccgccctgaaggtgatcgagagcgacacccacagaaccaacacccccagaagaagaaagggcagaaacaaggagatccaggacctggaggagagcttcgtgcccgtggccgcccccctgggccaccccagagagctgcagaagtacagcagcgacagcgagagccccagaggcaccggcagcggcgccctgcccagcggccagaagctggaggagctgaaggccgaggagcccgacaacttcagcagcaaggtggtgcagagaggcagagagttcttcgacagcaacggcaacttcctgtacagaatctag

SEQ ID NO: 4219 - DNA, 2541 bp, synthetic construct
  misc_feature 1..2541: note = source = /note="Description of Artificial Sequence: Synthetic coding sequence"
  source 1..2541: mol_type = other DNA
atgttcaagtgctggagcgtggtgctggtgctgggcttcatcttcctggagagcgagggcagacccaccaaggagggcggctacggcctgaagagctaccagcccctgatgagactgagacacaaggagaagaaccaggagagcagcagagtgaagggcttcatgatccaggacggccccttcggcagctgcgagaacaagtactgcggcctgggcagacactgcgtgaccagcagagagaccggccaggccgagtgcgcctgcatggacctgtgcaagagacactacaagcccgtgtgcggcagcgacggcgagttctacgagaaccactgcgaggtgcacagagccgcctgcctgaagaagcagaagatcaccatcgtgcacaacgaggactgcttcttcaagggcgacaagtgcaagaccaccgagtacagcaagatgaagaacatgctgctggacctgcagaaccagaagtacatcatgcaggagaacgagaaccccaacggcgacgacatcagcagaaagaagctgctggtggaccagatgttcaagtacttcgacgccgacagcaacggcctggtggacatcaacgagctgacccaggtgatcaagcaggaggagctgggcaaggacctgttcgactgcaccctgtacgtgctgctgaagtacgacgacttcaacgccgacaagcacctggccctggaggagttctacagagccttccaggtgatccagctgagcctgcccgaggaccagaagctgagcatcaccgccgccaccgtgggccagagcgccgtgctgagctgcgccatccagggcaccctgagaccccccatcatctggaagagaaacaacatcatcctgaacaacctggacctggaggacatcaacgacttcggcgacgacggcagcctgtacatcaccaaggtgaccaccacccacgtgggcaactacacctgctacgccgacggctacgagcaggtgtaccagacccacatcttccaggtgaacgtgccccccgtgatcagagtgtaccccgagagccaggccagagagcccggcgtgaccgccagcctgagatgccacgccgagggcatccccaagccccagctgggctggctgaagaacggcatcgacatcacccccaagctgagcaagcagctgaccctgcaggccaacggcagcgaggtgcacatcagcaacgtgagatacgaggacaccggcgcctacacctgcatcgccaagaacgaggccggcgtggacgaggacatcagcagcctgttcgtggaggacagcgccagaaagaccctggccaacatcctgtggagagaggagggcctgggcatcggcaacatgttctacgtgttctacgaggacggcatcaaggtgatccagcccatcgagtgcgagttccagagacacatcaagcccagcgagaagctgctgggcttccaggacgaggtgtgccccaaggccgagggcgacgaggtgcagagatgcgtgtgggccagcgccgtgaacgtgaaggacaagttcatctacgtggcccagcccaccctggacagagtgctgatcgtggacgtgcagagccagaaggtggtgcaggccgtgagcaccgaccccgtgcccgtgaagctgcactacgacaagagccacgaccaggtgtgggtgctgagctggggcaccctggagaagaccagccccaccctgcaggtgatcaccctggccagcggcaacgtgccccaccacaccatccacacccagcccgtgggcaagcagttcgacagagtggacgacttcttcatccccaccaccaccctgatcatcacccacatgagattcggcttcatcctgcacaaggacgaggccgccctgcagaagatcgacctggagaccatgagctacatcaagaccatcaacctgaaggactacaagtgcgtgccccagagcctggcctacacccacctgggcggctactacttcatcggctgcaagcccgacagcaccggcgccgtgagcccccaggtgatggtggacggcgtgaccgacagcgtgatcggcttcaacagcgacgtgaccggcaccccctacgtgagccccgacggccactacctggtgagcatcaacgacgtgaagggcctggtgagagtgcagtacatcaccatcagaggcgagatccaggaggccttcgacatctacaccaacctgcacatcagcgacctggccttccagcccagcttcaccgaggcccaccagtacaacatctacggcagcagcagcacccagaccgacgtgctgttcgtggagctgagcagcggcaaggtgaagatgatcaagagcctgaaggagcccctgaaggccgaggagtggccctggaacagaaagaacagacagatccaggacagcggcctgttcggccagtacctgatgacccccagcaaggacagcctgttcatcctggacggcagactgaacaagctgaactgcgagatcaccgaggtggagaagggcaacaccgtgatctgggtgggcgacgcctag

SEQ ID NO: 4220 - DNA, 291 bp, synthetic construct
  misc_feature 1..291: note = source = /note="Description of Artificial Sequence: Synthetic coding sequence"
  source 1..291: mol_type = other DNA
atgagagtgaccagcgccacctgcgccctgctgctggccctgatctgcagcgtgcagctgggcgacgcctgcctggacatcgacaagctgctggccaacgtggtgttcgacgtgagccaggacctgctgaaggaggagctggccagatacaaccccagccccctgaccgaggagagcttcctgaacgtgcagcagtgcttcgccaacgtgagcgtgaccgagagattcgcccacagcgtggtgatcaagaagatcctgcagagcaacgactgcatcgaggccgccttctag

SEQ ID NO: 4221 - DNA, 1971 bp, synthetic construct
  misc_feature 1..1971: note = source = /note="Description of Artificial Sequence: Synthetic coding sequence"
  source 1..1971: mol_type = other DNA
atgagaaccgtggtgctgaccatgaaggccagcgtgatcgagatgttcctggtgctgctggtgaccggcgtgcacagcaacaaggagaccgccaagaagatcaagagacccaagttcaccgtgccccagatcaactgcgacgtgaaggccggcaagatcatcgaccccgagttcatcgtgaagtgccccgccggctgccaggaccccaagtaccacgtgtacggcaccgacgtgtacgccagctacagcagcgtgtgcggcgccgccgtgcacagcggcgtgctggacaacagcggcggcaagatcctggtgagaaaggtggccggccagagcggctacaagggcagctacagcaacggcgtgcagagcctgagcctgcccagatggagagagagcttcatcgtgctggagagcaagcccaagaagggcgtgacctaccccagcgccctgacctacagcagcagcaagagccccgccgcccaggccggcgagaccaccaaggcctaccagagaccccccatccccggcaccaccgcccagcccgtgaccctgatgcagctgctggccgtgaccgtggccgtggccacccccaccaccctgcccagacccagccccagcgccgccagcaccaccagcatccccagaccccagagcgtgggccacagaagccaggagatggacctgtggagcaccgccacctacaccagcagccagaacagacccagagccgaccccggcctggtgcccaaggaggagctgagcacccagagcctggagcccgtgagcctgggcgaccccaactgcaagatcgacctgagcttcctgatcgacggcagcaccagcatcggcaagagaagattcagaatccagaagcagctgctggccgacgtggcccaggccctggacatcggccccgccggccccctgatgggcgtggtgcagtacggcgacaaccccgccacccacttcaacctgaagacccacaccaacagcagagacctgaagaccgccatcgagaagatcacccagagaggcggcctgagcaacgtgggcagagccatcagcttcgtgaccaagaacttcttcagcaaggccaacggcaacagaagcggcgcccccaacgtggtggtggtgatggtggacggctggcccaccgacaaggtggaggaggccagcagactggccagagagagcggcatcaacatcttcttcatcaccatcgagggcgccgccgagaacgagaagcagtacgtggtggagcccaacttcgccaacaaggccgtgtgcagaaccaacggcttctacagcctgcacgtgcagagctggttcggcctgcacaagaccctgcagcccctggtgaagagagtgtgcgacaccgacagactggcctgcagcaagacctgcctgaacagcgccgacatcggcttcgtgatcgacggcagcagcagcgtgggcaccggcaacttcagaaccgtgctgcagttcgtgaccaacctgaccaaggagttcgagatcagcgacaccgacaccagaatcggcgccgtgcagtacacctacgagcagagactggagttcggcttcgacaagtacagcagcaagcccgacatcctgaacgccatcaagagagtgggctactggagcggcggcaccagcaccggcgccgccatcaacttcgccctggagcagctgttcaagaagagcaagcccaacaagagaaagctgatgatcctgatcaccgacggcagaagctacgacgacgtgagaatccccgccatggccgcccacctgaagggcgtgatcacctacgccatcggcgtggcctgggccgcccaggaggagctggaggtgatcgccacccaccccgccagagaccacagcttcttcgtggacgagttcgacaacctgcaccagtacgtgcccagaatcatccagaacatctgcaccgagttcaacagccagcccagaaactag

SEQ ID NO: 4222 - DNA, 2082 bp, synthetic construct
  misc_feature 1..2082: note = source = /note="Description of Artificial Sequence: Synthetic coding sequence"
  source 1..2082: mol_type = other DNA
atgagaaccgtggtgctgaccatgaaggccagcgtgatcgagatgttcctggtgctgctggtgaccggcgtgcacagcaacaaggagaccgccaagaagatcaagagacccaagttcaccgtgccccagatcaactgcgacgtgaaggccggcaagatcatcgaccccgagttcatcgtgaagtgccccgccggctgccaggaccccaagtaccacgtgtacggcaccgacgtgtacgccagctacagcagcgtgtgcggcgccgccgtgcacagcggcgtgctggacaacagcggcggcaagatcctggtgagaaaggtggccggccagagcggctacaagggcagctacagcaacggcgtgcagagcctgagcctgcccagatggagagagagcttcatcgtgctggagagcaagcccaagaagggcgtgacctaccccagcgccctgacctacagcagcagcaagagccccgccgcccaggccggcgagaccaccaaggcctaccagagaccccccatccccggcaccaccgcccagcccgtgaccctgatgcagctgctggccgtgaccgtggccgtggccacccccaccaccctgcccagacccagccccagcgccgccagcaccaccagcatccccagaccccagagcgtgggccacagaagccaggagatggacctgtggagcaccgccacctacaccagcagccagaacagacccagagccgaccccggcatccagagacaggaccccagcggcgccgccttccagaagcccgtgggcgccgacgtgagcctgggcgagatggacagctggaagcccggcagcgtgctgctggacgagggcctggtgcccaaggaggagctgagcacccagagcctggagcccgtgagcctgggcgaccccaactgcaagatcgacctgagcttcctgatcgacggcagcaccagcatcggcaagagaagattcagaatccagaagcagctgctggccgacgtggcccaggccctggacatcggccccgccggccccctgatgggcgtggtgcagtacggcgacaaccccgccacccacttcaacctgaagacccacaccaacagcagagacctgaagaccgccatcgagaagatcacccagagaggcggcctgagcaacgtgggcagagccatcagcttcgtgaccaagaacttcttcagcaaggccaacggcaacagaagcggcgcccccaacgtggtggtggtgatggtggacggctggcccaccgacaaggtggaggaggccagcagactggccagagagagcggcatcaacatcttcttcatcaccatcgagggcgccgccgagaacgagaagcagtacgtggtggagcccaacttcgccaacaaggccgtgtgcagaaccaacggcttctacagcctgcacgtgcagagctggttcggcctgcacaagaccctgcagcccctggtgaagagagtgtgcgacaccgacagactggcctgcagcaagacctgcctgaacagcgccgacatcggcttcgtgatcgacggcagcagcagcgtgggcaccggcaacttcagaaccgtgctgcagttcgtgaccaacctgaccaaggagttcgagatcagcgacaccgacaccagaatcggcgccgtgcagtacacctacgagcagagactggagttcggcttcgacaagtacagcagcaagcccgacatcctgaacgccatcaagagagtgggctactggagcggcggcaccagcaccggcgccgccatcaacttcgccctggagcagctgttcaagaagagcaagcccaacaagagaaagctgatgatcctgatcaccgacggcagaagctacgacgacgtgagaatccccgccatggccgcccacctgaagggcgtgatcacctacgccatcggcgtggcctgggccgcccaggaggagctggaggtgatcgccacccaccccgccagagaccacagcttcttcgtggacgagttcgacaacctgcaccagtacgtgcccagaatcatccagaacatctgcaccgagttcaacagccagcccagaaactag

SEQ ID NO: 4223 - DNA, 555 bp, synthetic construct
  misc_feature 1..555: note = source = /note="Description of Artificial Sequence: Synthetic coding sequence"
  source 1..555: mol_type = other DNA
atgttctgcctgctgcacctgtgcttctacctggccaacttcgccagcagcatcaagagaacccacgccgtgaacggctgctgcggcctgcagatgatcgccctgtgggcccagagcagcggcaacgccgacgccagagtggaggagatcctggccggcgaggagagaagactggccgccctgctgggcagccagggcatgagattctgggtgtgcctggccgcctgcagagccatgtggggcctggccgccagaagaggcagagccgaggacagcagcagcagccccgtggacgccagcaagttcccctggagaggcggccagcacagaaccaccatgatgccctgcctgctgagagtgggcgtgttcagaccctgccacgtgagacccaccggcgaccccagctgcgacgtgcagccccccagactgggcttcagcagagtgcccgacacccaggtggccttctacggcagcggccactgggaccccacccccttcagcgtgcacagctgcttcttcaacttccaggtgagaaagatcatcttcctgctgtag

SEQ ID NO: 4224 - DNA, 864 bp, synthetic construct
  misc_feature 1..864: note = source = /note="Description of Artificial Sequence: Synthetic coding sequence"
  source 1..864: mol_type = other DNA
atgaccagcgccgcccactactaccccaagctgatgagcatcatgggcaacgtgctgagattcctgcccgccttcgtgagaatgaagcagctgatcgaggagggctacgtgggcgagcccctggtgtgcgaggtgcaggtgcacggcggcagcctgctgggcaagaagtacaactggagctgcgacgacctgatgggcggcggcggcctgcacagcgtgggcacctacatcatcgacctgctgaccttcctgaccggccagaaggccgtgaaggtgcacggcctgctgaagaccttcgtgaagcagaccgaccacatcaagggcatcagacagatcaccagcgacgacttctgcaccttccagatggtgctggagggcggcgtgtgctgcaccgtgaccctgaacttcaacgtgcccggcgagttcaagcaggacgtgaccgtggtgggcagcgccggcagactgctggccgtgggcaccgacctgtacggccagagaaacagcgcccccgagcaggagctgctggtgcaggacgccacccccgtgagcaacagcctgctgcccgagaaggccttcagcgacatccccagcccctacctgagaggcaccatcaagatgatgcaggccgtgagacaggccttccaggaccaggacgacagaagaacctgggacggcagacccctgaccatggccgccaccttcgacgactgcctgtacgccctgtgcgtggtggacaccatcaagagaagcagccagaccggcgagtggcagaacatcgccatcatgaccgaggagcccgagctgagccccgcctacctgatcagcgaggccatgagaagaagcagaatgagcctgtactgctag

SEQ ID NO: 4225 - DNA, 1173 bp, synthetic construct
  misc_feature 1..1173: note = source = /note="Description of Artificial Sequence: Synthetic coding sequence"
  source 1..1173: mol_type = other DNA
atgctgcccggcgtgggcgtgttcggcaccagcctgaccgccagagtgatcatccccctgctgaaggacgagggcttcgccgtgaaggccctgtggggcagaacccaggaggaggccgaggagctggccaaggagatgagcgtgcccttctacaccagcagaatcgacgaggtgctgctgcaccaggacgtggacctggtgtgcatcaacctgcccccccccctgaccagacagatcgccgtgaagaccctgggcatcggcaagaacgtgatctgcgacagaaccgccacccccctggacgccttcagaatgaccagcgccgcccactactaccccaagctgatgagcatcatgggcaacgtgctgagattcctgcccgccttcgtgagaatgaagcagctgatcgaggagggctacgtgggcgagcccctggtgtgcgaggtgcaggtgcacggcggcagcctgctgggcaagaagtacaactggagctgcgacgacctgatgggcggcggcggcctgcacagcgtgggcacctacatcatcgacctgctgaccttcctgaccggccagaaggccgtgaaggtgcacggcctgctgaagaccttcgtgaagcagaccgaccacatcaagggcatcagacagatcaccagcgacgacttctgcaccttccagatggtgctggagggcggcgtgtgctgcaccgtgaccctgaacttcaacgtgcccggcgagttcaagcaggacgtgaccgtggtgggcagcgccggcagactgctggccgtgggcaccgacctgtacggccagagaaacagcgcccccgagcaggagctgctggtgcaggacgccacccccgtgagcaacagcctgctgcccgagaaggccttcagcgacatccccagcccctacctgagaggcaccatcaagatgatgcaggccgtgagacaggccttccaggaccaggacgacagaagaacctgggacggcagacccctgaccatggccgccaccttcgacgactgcctgtacgccctgtgcgtggtggacaccatcaagagaagcagccagaccggcgagtggcagaacatcgccatcatgaccgaggagcccgagctgagccccgcctacctgatcagcgaggccatgagaagaagcagaatgagcctgtactgctag

SEQ ID NO: 4226 - DNA, 5718 bp, synthetic construct
  misc_feature 1..5718: note = source = /note="Description of Artificial Sequence: Synthetic coding sequence"
  source 1..5718: mol_type = other DNA
atgcagagcagactgctgctgctgggcgcccccggcggccacggcggccccgccagcagaagaatgagactgctgctgagacaggtggtgcagagaagacccggcggcgacagacagagacccgaggtgagactgctgcacgccggcagcggcgccgacaccggcgacaccgtgaacatcggcgacgtgagctacaagctgaagatccccaagaaccccgagctggtgccccagaactacatcagcgacagcctggcccagagcgtggtgcagcacctgagatggatcatgcagaaggacctgctgggccaggacgtgttcctgatcggcccccccggccccctgagaagaagcatcgccatgcagtacctggagctgaccaagagagaggtggagtacatcgccctgagcagagacaccaccgagaccgacctgaagcagagaagagagatcagagccggcaccgccttctacatcgaccagtgcgccgtgagagccgccaccgagggcagaaccctgatcctggagggcctggagaaggccgagagaaacgtgctgcccgtgctgaacaacctgctggagaacagagagatgcagctggaggacggcagattcctgatgagcgccgagagatacgacaagctgctgagagaccacaccaagaaggagctggacagctggaagatcgtgagagtgagcgagaacttcagagtgatcgccctgggcctgcccgtgcccagatacagcggcaaccccctggacccccccctgagaagcagattccaggccagagacatctactacctgcccttcaaggaccagctgaagctgctgtacagcatcggcgccaacgtgagcgccgagaaggtgagccagctgctgagcttcgccaccaccctgtgcagccaggagagcagcaccctgggcctgcccgacttccccctggacagcctggccgccgccgtgcagatcctggacagcttccccatgatgcccatcaagcacgccatccagtggctgtacccctacagcatcctgctgggccacgagggcaagatggccgtggagggcgtgctgaagagattcgagctgcaggacagcggcagcagcctgctgcccaaggagatcgtgaaggtggagaagatgatggagaaccacgtgagccaggccagcgtgaccatcagaatcgccgacaaggaggtgaccatcaaggtgcccgccggcaccagactgctgagccagccctgcgccagcgacagattcatccagaccctgagccacaagcagctgcaggccgagatgatgcagagccacatggtgaaggacatctgcctgatcggcggcaagggctgcggcaagaccgtgatcgccaagaacttcgccgacaccctgggctacaacatcgagcccatcatgctgtaccaggacatgaccgccagagacctgctgcagcagagatacaccctgcccaacggcgacaccgcctggagaagcagccccctggtgaacgccgccctggagggcaagctggtgctgctggacggcatccacagagtgaacgccggcaccctggccgtgctgcagagactgatccacgacagagagctgagcctgtacgacggcagcagactgctgagagaggacagatacatgagactgaaggaggagctgcagctgagcgacgagcagctgcagaagagaagcatcttccccatccaccccagcttcagaatcatcgccctggccgagccccccgtgatcggcagcaccgcccaccagtggctgggccccgagttcctgaccatgttcttcttccactacatgaagcccctggtgaagagcgaggagatccaggtgatcaaggagaaggtgcccaacgtgccccaggaggccctggacaagctgctgagcttcacccacaagctgagagagacccaggaccccaccgcccagagcctggccgccagcctgagcaccagacagctgctgagaatcagcagaagactgagccagtaccccaacgagaacctgcacagcgccgtgaccaaggcctgcctgagcagattcctgcccagcctggccagaagcgccctggagaagaacctggccgacgccaccatcgagatcaacaccgacgacaacctggagcccgagctgaaggactacaagtgcgaggtgaccagcggcaccctgagaatcggcgccgtgagcgcccccatctacaacgcccacgagaagatgaaggtgcccgacgtgctgttctacgacaacatccagcacgtgatcgtgatggaggacatgctgaaggacttcctgctgggcgagcacctgctgctggtgggcaaccagggcgtgggcaagaacaagatcgtggacagattcctgcacctgctgaacagacccagagagtacatccagctgcacagagacaccaccgtgcagaccctgaccctgcagcccagcgtgaaggacggcctgatcgtgtacgaggacagccccctggtgaaggccgtgaagctgggccacatcctggtggtggacgaggccgacaaggcccccaccaacgtgacctgcatcctgaagaccctggtggagaacggcgagatgatcctggccgacggcagaagaatcgtggccaacagcgccaacgtgaacggcagagagaacgtggtggtgatccaccccgacttcagaatgatcgtgctggccaacagacccggcttccccttcctgggcaacgacttcttcggcaccctgggcgacatcttcagctgccacgccgtggacaaccccaagccccacagcgagctggagatgctgagacagtacggccccaacgtgcccgagcccatcctgcagaagctggtggccgccttcggcgagctgagaagcctggccgaccagggcatcatcaactacccctacagcaccagagaggtggtgaacatcgtgaagcacctgcagaagttccccaccgagggcctgagcagcgtggtgagaaacgtgttcgacttcgacagctacaacaacgacatgagagagatcctgatcaacaccctgcacaagtacggcatccccatcggcgccaagcccaccagcgtgcagctggccaaggagctgaccctgcccgagcagaccttcatgggctactggaccatcggccaggccagaagcggcatgcagaagctgctgtgccccgtggagacccaccacatcgacatcaagggccccgccctgatcaacatccaggagtaccccatcgagagacacgaggagagaagcctgaacttcaccgaggagtgcgccagctggagaatccccctggacgagatcaacatcatctgcgacatcgccaccagccacgagaacgagcagaacaccctgtacgtggtgacctgcaaccccgccagcctgtacttcatgaacatgaccggcaagagcggcttcttcgtggacttcttcgacatcttccccagaaccgccaacggcgtgtggcaccccttcgtgaccgtggcccccctgggcagccccctgaagggccaggtggtgctgcacgagcagcagagcaacgtgatcctgctgctggacaccaccggcagagccctgcacagactgatcctgcccagcgagaagttcaccagcaagaagcccttctggtggaacaaggaggaggccgagacctacaagatgtgcaaggagttcagccacaagaactggctggtgttctacaaggagaagggcaacagcctgaccgtgctggacgtgctggagggcagaacccacaccatcagcctgcccatcaacctgaagaccgtgttcctggtggccgaggacaagtggctgctggtggagagcaagaccaaccagaagtacctgctgaccaagcccgcccacatcgagagcgagggcagcggcgtgtgccagctgtacgtgctgaaggaggagccccccagcaccggcttcggcgtgacccaggagaccgagttcagcatcccccacaagatcagcagcgaccagctgagcagcgagcacctgagcagcgccgtggagcagaagatcgccagccccaacagaatcctgagcgacgagaagaactacgccaccatcgtggtgggcttccccgacctgatgagccccagcgaggtgtacagctggaagagacccagcagcctgcacaagagaagcggcaccgacaccagcttctacagaggcaagaagaagagaggcacccccaagcagagcaactgcgtgaccctgctggacaccaaccaggtggtgagaatcctgccccccggcgaggtgcccctgaaggacatctaccccaaggacgtgacccccccccagaccagcggctacatcgaggtgaccgacctgcagagcaagaagctgagatacatccccatccccagaagcgagagcctgagcccctacaccacctggctgagcaccatcagcgacaccgacgccctgctggccgagtgggacaagagcggcgtggtgaccgtggacatgggcggccacatcagactgtgggagaccggcctggagagactgcagagaagcctgatggagtggagaaacatgatcggccaggacgacagaaacatgcagatcaccatcaacagagacagcggcgaggacgtgagcagccccaagcacggcaaggaggaccccgacaacatgccccacgtgggcggcaacacctgggccggcggcaccggcggcagagacaccgccggcctgggcggcaagggcggcccctacagactggacgccggccacaccgtgtaccaggtgagccaggccgagaaggacgccgtgcccgaggaggtgaagagagccgccagagagatgggccagagagccttccagcagagactgaaggagatccagatgagcgagtacgacgccgccacctacgagagattcagcggcgccgtgagaagacaggtgcacagcctgagaatcatcctggacaacctgcaggccaagggcaaggagagacagtggctgagacaccaggccaccggcgagctggacgacgccaagatcatcgacggcctgaccggcgagaaggccatctacaagagaagaggcgagctggagccccagctgggcagcccccagcagaagcccaagagactgagactggtggtggacgtgagcggcagcatgtacagattcaacagaatggacggcagactggagagaaccatggaggccgtgtgcatggtgatggaggccttcgagaactacgaggagaagttccagtacgacatcgtgggccacagcggcgacggctacaacatcggcctggtgcccatgaacaagatccccaaggacaacaagcagagactggagatcctgaagaccatgcacgcccacagccagttctgcatgagcggcgaccacaccctggagggcaccgagcacgccatcaaggagatcgtgaaggaggaggccgacgagtacttcgtgatcgtgctgagcgacgccaacctgagcagatacggcatccaccccgccaagttcgcccagatcctgaccagagacccccaggtgaacgccttcgccatcttcatcggcagcctgggcgaccaggccaccagactgcagagaaccctgcccgccggcagaagcttcgtggccatggacaccaaggacatcccccagatcctgcagcagatcttcaccagcaccatgctgagcagcgtgtag

SEQ ID NO: 4227 - DNA, 561 bp, synthetic construct
  misc_feature 1..561: note = source = /note="Description of Artificial Sequence: Synthetic coding sequence"
  source 1..561: mol_type = other DNA
atggaggccctgcccctgctggccgccaccacccccgaccacggcagacacagaagactgctgctgctgcccctgctgctgttcctgctgcccgccggcgccgtgcagggctgggagaccgaggagagacccagaaccagagaggaggagtgccacttctacgccggcggccaggtgtaccccggcgaggccagcagagtgagcgtggccgaccacagcctgcacctgagcaaggccaagatcagcaagcccgccccctactgggagggcaccgccgtgatcgacggcgagttcaaggagctgaagctgaccgactacagaggcaagtacctggtgttcttcttctaccccctggacttcaccttcgtgtgccccaccgagatcatcgccttcggcgacagactggaggagttcagaagcatcaacaccgaggtggtggcctgcagcgtggacagccagttcacccacctggcctggagcgtgagctacacctacatcagaagaaagaagagaatggacctgctgctgaagcacggccagatcaccctggacatgatctag

SEQ ID NO: 4228 - DNA, 816 bp, synthetic construct
  misc_feature 1..816: note = source = /note="Description of Artificial Sequence: Synthetic coding sequence"
  source 1..816: mol_type = other DNA
atggaggccctgcccctgctggccgccaccacccccgaccacggcagacacagaagactgctgctgctgcccctgctgctgttcctgctgcccgccggcgccgtgcagggctgggagaccgaggagagacccagaaccagagaggaggagtgccacttctacgccggcggccaggtgtaccccggcgaggccagcagagtgagcgtggccgaccacagcctgcacctgagcaaggccaagatcagcaagcccgccccctactgggagggcaccgccgtgatcgacggcgagttcaaggagctgaagctgaccgactacagaggcaagtacctggtgttcttcttctaccccctggacttcaccttcgtgtgccccaccgagatcatcgccttcggcgacagactggaggagttcagaagcatcaacaccgaggtggtggcctgcagcgtggacagccagttcacccacctggcctggatcaacacccccagaagacagggcggcctgggccccatcagaatccccctgctgagcgacctgacccaccagatcagcaaggactacggcgtgtacctggaggacagcggccacaccctgagaggcctgttcatcatcgacgacaagggcatcctgagacagatcaccctgaacgacctgcccgtgggcagaagcgtggacgagaccctgagactggtgcaggccttccagtacaccgacaagcacggcgaggtgtgccccgccggctggaagcccggcagcgagaccatcatccccgaccccgccggcaagctgaagtacttcgacaagctgaactag

SEQ ID NO: 4229 - DNA, 558 bp, synthetic construct
  misc_feature 1..558: note = source = /note="Description of Artificial Sequence: Synthetic coding sequence"
  source 1..558: mol_type = other DNA
atggaccacagaagcagactgagaggcaccggcctgaacagaatccccggcacccagagcagagcccccagagtgcccctgcccttccacgtgcagcaggaggccagagagggcgaggactgggagagagagccccccagacagagaccccccatctacgagccccccgagagcgaggagctgcccgacaacgtgatggtgagcaagcccgccccctactgggagggcaccgccgtgatcgacggcgagttcaaggagctgaagctgaccgactacagaggcaagtacctggtgttcttcttctaccccctggacttcaccttcgtgtgccccaccgagatcatcgccttcggcgacagactggaggagttcagaagcatcaacaccgaggtggtggcctgcagcgtggacagccagttcacccacctggcctggatcaacacccccagaagacagggcggcctgggccccatcagaatccccctgctgagcgacctgacccaccagatcagcaaggactacggcgtgtacctggaggacagcggccacaccctgtag

SEQ ID NO: 4230 - DNA, 843 bp, synthetic construct
  misc_feature 1..843: note = source = /note="Description of Artificial Sequence: Synthetic coding sequence"
  source 1..843: mol_type = other DNA
atggccagattctgggtgtgcgtggccggcgccggcttcttcctggccttcctggtgctgcacagcagattctgcggcagccccgtgctgagaaacttcaccttcgccgtgagctggagaaccgagaagatcctgtacagactggacgtgggctggcccaagcaccccgagtacttcaccggcaccaccttctgcgtggccgtggacagcctgaacggcctggtgtacatcggccagagaggcgacaacatccccaagatcctggtgttcaccgaggacggctacttcctgagagcctggaactacaccgtggacaccccccacggcatcttcgccgccagcaccctgtacgagcagagcgtgtggatcaccgacgtgggcagcgacttcatgatcctgtggctgcacggcgagaacggcaccggccccgccaagttcaacatcccccacagcgtgaccctggacagcgccggcagagtgtgggtggccgacagaggcaacaagagaatccaggtgttcgacaaggacaccggcgagtggctgggcgcctggaacaactgcttcaccgaggagggccccagcagcgtgagattcacccccgacggcaagtacctgatcgtggcccagctgaacctgagcagactgagcgtggtggccgccccccccgtgggcagcatcggcgagtgcagcgtgatcagcaccatccagctggccgaccaggtgctgccccacctgctggaggtggacagaaagaccggcgccgtgtacgtggccgagatcggcgccaagcaggtgcagaagtacgtgcccctgaacagctacgtgcccagcttcggcagctag

SEQ ID NO: 4231 - DNA, 1044 bp, synthetic construct
  misc_feature 1..1044: note = source = /note="Description of Artificial Sequence: Synthetic coding sequence"
  source 1..1044: mol_type = other DNA
atggccagattctgggtgtgcgtggccggcgccggcttcttcctggccttcctggtgctgcacagcagattctgcggcagccccgtgctgagaaacttcaccttcgccgtgagctggagaaccgagaagatcctgtacagactggacgtgggctggcccaagcaccccgagtacttcaccggcaccaccttctgcgtggccgtggacagcctgaacggcctggtgtacatcggccagagaggcgacaacatccccaagatcctggtgttcaccgaggacggctacttcctgagagcctggaactacaccgtggacaccccccacggcatcttcgccgccagcaccctgtacgagcagagcgtgtggatcaccgacgtgggcagcggcttcttcggccacaccgtgaagaagtacagcagcttcggcgacctggtgcaggtgctgggcacccccggcaagaagggcaccagcctgaaccccctgcagttcgacaaccccgccgagctgtacgtggaggacaccggcgacatctacatcgtggacggcgacggcggcctgaacaacagactgatcaagctgagccaggacttcatgatcctgtggctgcacggcgagaacggcaccggccccgccaagttcaacatcccccacagcgtgaccctggacagcgccggcagagtgtgggtggccgacagaggcaacaagagaatccaggtgttcgacaaggacaccggcgagtggctgggcgcctggaacaactgcttcaccgaggagggccccagcagcgtgagattcacccccgacggcaagtacctgatcgtggcccagctgaacctgagcagactgagcgtggtggccgccccccccgtgggcagcatcggcgagtgcagcgtgatcagcaccatccagctggccgaccaggtgctgccccacctgctggaggtggacagaaagaccggcgccgtgtacgtggccgagatcggcgccaagcaggtgcagaagtacgtgcccctgaacagctacgtgcccagcttcggcagctag

SEQ ID NO: 4232 - DNA, 1707 bp, synthetic construct
  misc_feature 1..1707: note = source = /note="Description of Artificial Sequence: Synthetic coding sequence"
  source 1..1707: mol_type = other DNA
atggtgctgctgcactggtgcctgctgtggctgctgttccccctgagcagcagaacccagaagctgcccaccagagacgaggagctgttccagatgcagatcagagacaaggccttcttccacgacagcagcgtgatccccgacggcgccgagatcagcagctacctgttcagagacacccccaagagatacttcttcgtggtggaggaggacaacacccccctgagcgtgaccgtgaccccctgcgacgcccccctggagtggaagctgagcctgcaggagctgcccgaggacagaagcggcgagggcagcggcgacctggagcccctggagcagcagaagcagcagatcatcaacgaggagggcaccgagctgttcagctacaagggcaacgacgtggagtacttcatcagcagcagcagccccagcggcctgtaccagctggacctgctgagcaccgagaaggacacccacttcaaggtgtacgccaccaccacccccgagagcgaccagccctaccccgagctgccctacgaccccagagtggacgtgaccagcctgggcagaaccaccgtgaccctggcctggaagcccagccccaccgccagcctgctgaagcagcccatccagtactgcgtggtgatcaacaaggagcacaacttcaagagcctgtgcgccgtggaggccaagctgagcgccgacgacgccttcatgatggcccccaagcccggcctggacttcagccccttcgacttcgcccacttcggcttccccagcgacaacagcggcaaggagagaagcttccaggccaagcccagccccaagctgggcagacacgtgtacagcagacccaaggtggacatccagaagatctgcatcggcaacaagaacatcttcaccgtgagcgacctgaagcccgacacccagtactacttcgacgtgttcgtggtgaacatcaacagcaacatgagcaccgcctacgtgggcaccttcgccagaaccaaggaggaggccaagcagaagaccgtggagctgaaggacggcaagatcaccgacgtgttcgtgaagagaaagggcgccaagttcctgagattcgcccccgtgagcagccaccagaaggtgaccttcttcatccacagctgcctggacgccgtgcagatccaggtgagaagagacggcaagctgctgctgagccagaacgtggagggcatccagcagttccagctgagaggcaagcccaaggccaagtacctggtgagactgaagggcaacaagaagggcgccagcatgctgaagatcctggccaccaccagacccaccaagcagagcttccccagcctgcccgaggacaccagaatcaaggccttcgacaagctgagaacctgcagcagcgccaccgtggcctggctgggcacccaggagagaaacaagttctgcatctacaagaaggaggtggacgacaactacaacgaggaccagaagaagagagagcagaaccagtgcctgggccccgacatcagaaagaagagcgagaaggtgctgtgcaagtacttccacagccagaacctgcagaaggccgtgaccaccgagaccatcaagggcctgcagcccggcaagagctacctgctggacgtgtacgtgatcggccacggcggccacagcgtgaagtaccagagcaaggtggtgaagaccagaaagttctgctag

SEQ ID NO: 4233 - DNA, 489 bp, synthetic construct
  misc_feature 1..489: note = source = /note="Description of Artificial Sequence: Synthetic coding sequence"
  source 1..489: mol_type = other DNA
atgaagggcttcaccgccaccctgttcctgtggaccctgatcttccccagctgcagcggcggcggcggcggcaaggcctggcccacccacgtggtgtgcagcgacagcggcctggaggtgctgtaccagagctgcgaccccctgcaggacttcggcttcagcgtggagaagtgcagcaagcagctgaagagcaacatcaacatcagattcggcatcatcctgagagaggacatcaaggagctgttcctggacctggccctgatgagccagggcagcagcgtgctgaacttcagctaccccatctgcgaggccgccctgcccaagttcagcttctgcggcagaagaaagggcgagcagatctactacgccggccccgtgaacaaccccgagttcaccatcccccagggcgagtaccaggtgctgctggagctgtacaccgagaagagaagcaccgtggcctgcgccaacgccaccatcatgtgcagctag

SEQ ID NO: 4234 - DNA, 1698 bp, synthetic construct
  misc_feature 1..1698: note = source = /note="Description of Artificial Sequence: Synthetic coding sequence"
  source 1..1698: mol_type = other DNA
atggacttcctgctggccctggtgctggtgagcagcctgtacctgcaggccgccgccgagttcgacggcagatggcccagacagatcgtgagcagcatcggcctgtgcagatacggcggcagaatcgactgctgctggggctgggccagacagagctggggccagtgccagcccgtgtgccagcccagatgcaagcacggcgagtgcatcggccccaacaagtgcaagtgccaccccggctacgccggcaagacctgcaaccaggacctgaacgagtgcggcctgaagcccagaccctgcaagcacagatgcatgaacacctacggcagctacaagtgctactgcctgaacggctacatgctgatgcccgacggcagctgcagcagcgccctgacctgcagcatggccaactgccagtacggctgcgacgtggtgaagggccagatcagatgccagtgccccagccccggcctgcagctggcccccgacggcagaacctgcgtggacgtggacgagtgcgccaccggcagagccagctgccccagattcagacagtgcgtgaacaccttcggcagctacatctgcaagtgccacaagggcttcgacctgatgtacatcggcggcaagtaccagtgccacgacatcgacgagtgcagcctgggccagtaccagtgcagcagcttcgccagatgctacaacatcagaggcagctacaagtgcaagtgcaaggagggctaccagggcgacggcctgacctgcgtgtacatccccaaggtgatgatcgagcccagcggccccatccacgtgcccaagggcaacggcaccatcctgaagggcgacaccggcaacaacaactggatccccgacgtgggcagcacctggtggccccccaagaccccctacatcccccccatcatcaccaacagacccaccagcaagcccaccaccagacccacccccaagcccacccccatccccaccccccccccccccccccccctgcccaccgagctgagaacccccctgccccccaccacccccgagagacccaccaccggcctgaccaccatcgcccccgccgccagcaccccccccggcggcatcaccgtggacaacagagtgcagaccgacccccagaagcccagaggcgacgtgttcatccccagacagcccagcaacgacctgttcgagatcttcgagatcgagagaggcgtgagcgccgacgacgaggccaaggacgaccccggcgtgctggtgcacagctgcaacttcgaccacggcctgtgcggctggatcagagagaaggacaacgacctgcactgggagcccatcagagaccccgccggcggccagtacctgaccgtgagcgccgccaaggcccccggcggcaaggccgccagactggtgctgcccctgggcagactgatgcacagcggcgacctgtgcctgagcttcagacacaaggtgaccggcctgcacagcggcaccctgcaggtgttcgtgagaaagcacggcgcccacggcgccgccctgtggggcagaaacggcggccacggctggagacagacccagatcaccctgagaggcgccgacatcaagagcgtggtgttcaagggcgagaagagaagaggccacaccggcgagatcggcctggacgacgtgagcctgaagaagggccactgcagcgaggagagatag

SEQ ID NO: 4235 - DNA, 1413 bp, synthetic construct
  misc_feature 1..1413: note = source = /note="Description of Artificial Sequence: Synthetic coding sequence"
  source 1..1413: mol_type = other DNA
atgaagagaagcgtggccgtgtggctgctggtgggcctgagcctgggcgtgccccagttcggcaagggcgacatctgcgaccccaacccctgcgagaacggcggcatctgcctgcccggcctggccgacggcagcttcagctgcgagtgccccgacggcttcaccgaccccaactgcagcagcgtggtggaggtgggcccctgcacccccaacccctgccacaacggcggcacctgcgagatcagcgaggcctacagaggcgacaccttcatcggctacgtgtgcaagtgccccagaggcttcaacggcatccactgccagcacaacatcaacgagtgcgaggtggagccctgcaagaacggcggcatctgcaccgacctggtggccaactacagctgcgagtgccccggcgagttcatgggcagaaactgccagtacaagtgcagcggccccctgggcatcgagggcggcatcatcagcaaccagcagatcaccgccagcagcacccacagagccctgttcggcctgcagaagtggtacccctactacgccagactgaacaagaagggcctgatcaacgcctggaccgccgccgagaacgacagatggccctggatccagatcaacctgcagagaaagatgagagtgaccggcgtgatcacccagggcgccaagagaatcggcagccccgagtacatcaagagctacaagatcgcctacagcaacgacggcaagacctgggccatgtacaaggtgaagggcaccaacgaggacatggtgttcagaggcaacatcgacaacaacaccccctacgccaacagcttcaccccccccatcaaggcccagtacgtgagactgtacccccaggtgtgcagaagacactgcaccctgagaatggagctgctgggctgcgagctgagcggctgcagcgagcccctgggcatgaagagcggccacatccaggactaccagatcaccgccagcagcatcttcagaaccctgaacatggacatgttcacctgggagcccagaaaggccagactggacaagcagggcaaggtgaacgcctggaccagcggccacaacgaccagagccagtggctgcaggtggacctgctggtgcccaccaaggtgaccggcatcatcacccagggcgccaaggacttcggccacgtgcagttcgtgggcagctacaagctggcctacagcaacgacggcgagcactggaccgtgtaccaggacgagaagcagagaaaggacaaggtgttccagggcaacttcgacaacgacacccacagaaagaacgtgatcgacccccccatctacgccagacacatcagaatcctgccctggagctggtacggcagaatcaccctgagaagcgagctgctgggctgcaccgaggaggagtag

SEQ ID NO: 4236 - DNA, 1254 bp, synthetic construct
  misc_feature 1..1254: note = source = /note="Description of Artificial Sequence: Synthetic coding sequence"
  source 1..1254: mol_type = other DNA
atggccagctacctgtacggcgtgctgttcgccgtgggcctgtgcgcccccatctactgcgtgagccccgccaacgcccccagcgcctaccccagacccagcagcaccaagagcacccccgccagccaggtgtacagcctgaacaccgacttcgccttcagactgtacagaagactggtgctggagacccccagccagaacatcttcttcagccccgtgagcgtgagcaccagcctggccatgctgagcctgggcgcccacagcgtgaccaagacccagatcctgcagggcctgggcttcaacctgacccacacccccgagagcgccatccaccagggcttccagcacctggtgcacagcctgaccgtgcccagcaaggacctgaccctgaagatgggcagcgccctgttcgtgaagaaggagctgcagctgcaggccaacttcctgggcaacgtgaagagactgtacgaggccgaggtgttcagcaccgacttcagcaaccccagcatcgcccaggccagaatcaacagccacgtgaagaagaagacccagggcaaggtggtggacatcatccagggcctggacctgctgaccgccatggtgctggtgaaccacatcttcttcaaggccaagtgggagaagcccttccaccccgagtacaccagaaagaacttccccttcctggtgggcgagcaggtgaccgtgcacgtgcccatgatgcaccagaaggagcagttcgccttcggcgtggacaccgagctgaactgcttcgtgctgcagatggactacaagggcgacgccgtggccttcttcgtgctgcccagcaagggcaagatgagacagctggagcaggccctgagcgccagaaccctgagaaagtggagccacagcctgcagaagagatggatcgaggtgttcatccccagattcagcatcagcgccagctacaacctggagaccatcctgcccaagatgggcatccagaacgtgttcgacaagaacgccgacttcagcggcatcgccaagagagacagcctgcaggtgagcaaggccacccacaaggccgtgctggacgtgagcgaggagggcaccgaggccaccgccgccaccaccaccaagttcatcgtgagaagcaaggacggccccagctacttcaccgtgagcttcaacagaaccttcctgatgatgatcaccaacaaggccaccgacggcatcctgttcctgggcaaggtggagaaccccaccaagagctag

SEQ ID NO: 4237 - DNA, 486 bp, synthetic construct
  misc_feature 1..486: note = source = /note="Description of Artificial Sequence: Synthetic coding sequence"
  source 1..486: mol_type = other DNA
atgctgatgcccgtgcacttcctgctgctgctgctgctgctgctgggcggccccagaaccggcctgccccacaagttctacaaggccaagcccatcttcagctgcctgaacaccgccctgagcgaggccgagaagggccagtgggaggacgccagcctgctgagcaagagaagcttccactacctgagaagcagagacgccagcagcggcgaggaggaggagggcaaggagaagaagaccttccccatcagcggcgccagaggcggcgccagaggcaccagatacagatacgtgagccaggcccagcccagaggcaagcccagacaggacaccgccaagagcccccacagaaccaagttcaccctgagcctggacgtgcccaccaacatcatgaacctgctgttcaacatcgccaaggccaagaacctgagagcccaggccgccgccaacgcccacctgatggcccagatcggcagaaagaagtag

SEQ ID NO: 4238 - DNA, 2091 bp, synthetic construct
  misc_feature 1..2091: note = source = /note="Description of Artificial Sequence: Synthetic coding sequence"
  source 1..2091: mol_type = other DNA
atggccatggccagactgggcagctggctgggcgaggcccagtggctggccctggtgagcctgttcgtggccgccctggccaccgtgggcctgtacctggcccagtgggccctggccagagccagaccccagccccagagaagagccgtggagcccggcgagggccccagacccggcagcgacgccctgctgagctggatcctgaccctgggcagctggagaagccagtggcaggccgcctgggtgaccgccctgaacgaggaggccgagagaaagggcggcccccccttcctgagcttcgaggaggaccccagacagcaggccctggagctggtggtgcaggaggtgagcagcgtgctgagaagcgccgaggagaaggtggtggtgtgccacgtggtgggccaggccatccagttcctggtgagcgagacccccgccctgggcgccggctgcagactgtacgacatgagactgagccccttccacctgcagctggagttccacatgaaggagaagagagaggacctgcagatcagctggagcttcatcagcgtgcccgagatggccgtgaacatccagcccaaggccctgggcgaggaccaggtggccgagaccagcgccatgagcgacgtgctgaaggacatcctgaagcacctggccggcagcgccagccccagcgtggtgctgatcaccaagcccaccaccgtgaaggaggcccagaacctgcagtgcgccgccagcaccgcccaggagagctgcccccccaagccccccagagcccacgagctgaagctgctggtgagaaacatccacgtgctgctgctgagcgagcccggcgccagcggccacatcaacgccgtgtgcgtggtgcagctgaacgaccccgtgcagagattcagcagcaccctgaccaagaacacccccgacctgatgtgggaggaggagttcaccttcgagctgaacgccaagagcaaggagctgcacctgcagatcagcgaggccggcagaagcagcgagggcctgctggccaccgccaccgtgcccctggacctgttcaagaagcagcccagcggcccccagagcttcaccctgaccagcggcagcgcctgcggcagcagcgtgctgggcagcgtgaccgccgagttcagctacatggagcccggcgagctgaagagctggcccatccccccccccgtgcccgccgccaagatcgagaaggacagaaccgtgatgccctgcggcaccgtggtgaccaccgtgaccgccgtgaagaccaagcccagagtggacgtgggcagagccagccccctgagcagcgacagccccgtgaagacccccatcaaggtgaaggtgatcgagaaggacatcagcgtgcaggccatcgcctgcagaagcgcccccgtgagcaagaccctgagcagcagcgacaccgagctgctggtgctgaacggcagcgaccccgtggccgaggtggccatcagacagctgagcgagagcagcaagctgaagctgaagagccccagaaagaagagcaccatcatcatcagcggcatcagcaagaccagcctgagccaggaccacgacgccgccctgatgcagggctacaccgccagcgtggacagcacccaccaggaggacgcccccagccaccccgagagagccgccgccagcgccccccccgaggaggccgagagcgcccaggccagcctggcccccaagccccaggaggacgagctggacagctgggacctggagaaggagccccaggccgccgcctggagcagccaggtgctgctggaccccgacggcgacgagctgagcgagagcagcatgagcgtgctggagcccggcaccgccaagaagcacaagggcggcatcctgagaaagggcgccaagctgttcttcagaagaagacaccagcagaaggaccccggcatgagccagagccacaacgacctggtgttcctggagcagcccgagggcagcagaagaaagggcatcaccctgaccagaatcctgaacaagaagctgctgagcagacacagaaacaagaacaccatgaacggcgcccccgtggagccctgcacctag

SEQ ID NO: 4239 - DNA, 669 bp, synthetic construct
  misc_feature 1..669: note = source = /note="Description of Artificial Sequence: Synthetic coding sequence"
  source 1..669: mol_type = other DNA
atgcccgccagcagccccttcctgctggcccccaagggcccccccggcaacatgggcggccccgtgagagagcccgccctgagcgtggccctgtggctgagctggggcgccgccctgggcgccgtggcctgcgccatggccctgctgacccagcagaccgagctgcagagcctgagaagagaggtgagcagactgcagggcaccggcggccccagccagaacggcgagggctacccctggcagagcctgcccgagcagcacagcgtgctgcacctggtgcccatcaacgccaccagcaaggacgacagcgacgtgaccgaggtgatgtggcagcccgccctgagaagaggcagaggcctgcaggcccagggctacggcgtgagaatccaggacgccggcgtgtacctgctgtacagccaggtgctgttccaggacgtgaccttcaccatgggccaggtggtgagcagagagggccagggcagacaggagaccctgttcagatgcatcagaagcatgcccagccaccccgacagagcctacaacagctgctacagcgccggcgtgttccacctgcaccagggcgacatcctgagcgtgatcatccccagagccagagccaagctgaacctgagcccccacggcaccttcctgggcttcgtgaagctgtag

SEQ ID NO: 4240 - DNA, 2205 bp, synthetic construct
  misc_feature 1..2205: note = source = /note="Description of Artificial Sequence: Synthetic coding sequence"
  source 1..2205: mol_type = other DNA
atgtggggcctgctgctggccctggccgccttcgcccccgccgtgggccccgccctgggcgcccccagaaacagcgtgctgggcctggcccagcccggcaccaccaaggtgcccggcagcacccccgccctgcacagcagccccgcccagccccccgccgagaccgccaacggcaccagcgagcagcacgtgagaatcagagtgatcaagaagaagaaggtgatcatgaagaagagaaagaagctgaccctgaccagacccacccccctggtgaccgccggccccctggtgacccccacccccgccggcaccctggaccccgccgagaagcaggagaccggctgcccccccctgggcctggagagcctgagagtgagcgacagcagactggaggccagcagcagccagagcttcggcctgggcccccacagaggcagactgaacatccagagcggcctggaggacggcgacctgtacgacggcgcctggtgcgccgaggagcaggacgccgacccctggttccaggtggacgccggccaccccaccagattcagcggcgtgatcacccagggcagaaacagcgtgtggagatacgactgggtgaccagctacaaggtgcagttcagcaacgacagcagaacctggtggggcagcagaaaccacagcagcggcatggacgccgtgttccccgccaacagcgaccccgagacccccgtgctgaacctgctgcccgagccccaggtggccagattcatcagactgctgccccagacctggctgcagggcggcgccccctgcctgagagccgagatcctggcctgccccgtgagcgaccccaacgacctgttcctggaggcccccgccagcggcagcagcgaccccctggacttccagcaccacaactacaaggccatgagaaagctgatgaagcaggtgcaggagcagtgccccaacatcaccagaatctacagcatcggcaagagctaccagggcctgaagctgtacgtgatggagatgagcgacaagcccggcgagcacgagctgggcgagcccgaggtgagatacgtggccggcatgcacggcaacgaggccctgggcagagagctgctgctgctgctgatgcagttcctgtgccacgagttcctgagaggcaaccccagagtgaccagactgctgagcgagatgagaatccacctgctgcccagcatgaaccccgacggctacgagatcgcctaccacagaggcagcgagctggtgggctgggccgagggcagatggaacaaccagagcatcgacctgaaccacaacttcgccgacctgaacacccccctgtgggaggcccaggacgacggcaaggtgccccacatcgtgcccaaccaccacctgcccctgcccacctactacaccctgcccaacgccaccgtggcccccgagaccagagccgtgatcaagtggatgaagagaatccccttcgtgctgagcgccaacctgcacggcggcgagctggtggtgagctaccccttcgacatgaccagaaccccctgggccgccagagagctgacccccacccccgacgacgccgtgttcagatggctgagcaccgtgtacgccggcagcaacctggccatgcaggacaccagcagaagaccctgccacagccaggacttcagcgtgcacggcaacatcatcaacggcgccgactggcacaccgtgcccggcagcatgaacgacttcagctacctgcacaccaactgcttcgaggtgaccgtggagctgagctgcgacaagttcccccacgagaacgagctgccccaggagtgggagaacaacaaggacgccctgctgacctacctggagcaggtgagaatgggcatcgccggcgtggtgagagacaaggacaccgagctgggcatcgccgacgccgtgatcgccgtggacggcatcaaccacgacgtgaccaccgcctggggcggcgactactggagactgctgacccccggcgactacatggtgaccgccagcgccgagggctaccacagcgtgaccagaaactgcagagtgaccttcgaggagggccccttcccctgcaacttcgtgctgaccaagacccccaagcagagactgagagagctgctggccgccggcgccaaggtgccccccgacctgagaagaagactggagagactgagaggccagaaggactag

SEQ ID NO: 4241 - DNA, 759 bp, synthetic construct
  misc_feature 1..759: note = source = /note="Description of Artificial Sequence: Synthetic coding sequence"
  source 1..759: mol_type = other DNA
atgagagcccccctgctgccccccgcccccgtggtgctgagcctgctgatcctgggcagcggccactacgccgccggcctggacctgaacgacacctacagcggcaagagagagcccttcagcggcgaccacagcgccgacggcttcgaggtgaccagcagaagcgagatgagcagcggcagcgagatcagccccgtgagcgagatgcccagcagcagcgagcccagcagcggcgccgactacgactacagcgaggagtacgacaacgagccccagatccccggctacatcgtggacgacagcgtgagagtggagcaggtggtgaagcccccccagaacaagaccgagagcgagaacaccagcgacaagcccaagagaaagaagaagggcggcaagaacggcaagaacagaagaaacagaaagaagaagaacccctgcaacgccgagttccagaacttctgcatccacggcgagtgcaagtacatcgagcacctggaggccgtgacctgcaagtgccagcaggagtacttcggcgagagatgcggcgagaagagcatgaagacccacagcatgatcgacagcagcctgagcaagatcgccctggccgccatcgccgccttcatgagcgccgtgatcctgaccgccgtggccgtgatcaccgtgcagctgagaagacagtacgtgagaaagtacgagggcgaggccgaggagagaaagaagctgagacaggagaacggcaacgtgcacgccatcgcctag

SEQ ID NO: 4242 - DNA, 8487 bp, synthetic construct
  misc_feature 1..8487: note = source = /note="Description of Artificial Sequence: Synthetic coding sequence"
  source 1..8487: mol_type = other DNA
atgcccaagagagcccactggggcgccctgagcgtggtgctgatcctgctgtggggccaccccagagtggccctggcctgcccccacccctgcgcctgctacgtgcccagcgaggtgcactgcaccttcagaagcctggccagcgtgcccgccggcatcgccaagcacgtggagagaatcaacctgggcttcaacagcatccaggccctgagcgagaccagcttcgccggcctgaccaagctggagctgctgatgatccacggcaacgagatccccagcatccccgacggcgccctgagagacctgagcagcctgcaggtgttcaagttcagctacaacaagctgagagtgatcaccggccagaccctgcagggcctgagcaacctgatgagactgcacatcgaccacaacaagatcgagttcatccacccccaggccttcaacggcctgaccagcctgagactgctgcacctggagggcaacctgctgcaccagctgcaccccagcaccttcagcaccttcaccttcctggactacttcagactgagcaccatcagacacctgtacctggccgagaacatggtgagaaccctgcccgccagcatgctgagaaacatgcccctgctggagaacctgtacctgcagggcaacccctggacctgcgactgcgagatgagatggttcctggagtgggacgccaagagcagaggcatcctgaagtgcaagaaggacaaggcctacgagggcggccagctgtgcgccatgtgcttcagccccaagaagctgtacaagcacgagatccacaagctgaaggacatgacctgcctgaagcccagcatcgagagccccctgagacagaacagaagcagaagcatcgaggaggagcaggagcaggaggaggacggcggcagccagctgatcctggagaagttccagctgccccagtggagcatcagcctgaacatgaccgacgagcacggcaacatggtgaacctggtgtgcgacatcaagaagcccatggacgtgtacaagatccacctgaaccagaccgacccccccgacatcgacatcaacgccaccgtggccctggacttcgagtgccccatgaccagagagaactacgagaagctgtggaagctgatcgcctactacagcgaggtgcccgtgaagctgcacagagagctgatgctgagcaaggaccccagagtgagctaccagtacagacaggacgccgacgaggaggccctgtactacaccggcgtgagagcccagatcctggccgagcccgagtgggtgatgcagcccagcatcgacatccagctgaacagaagacagagcaccgccaagaaggtgctgctgagctactacacccagtacagccagaccatcagcaccaaggacaccagacaggccagaggcagaagctgggtgatgatcgagcccagcggcgccgtgcagagagaccagaccgtgctggagggcggcccctgccagctgagctgcaacgtgaaggccagcgagagccccagcatcttctgggtgctgcccgacggcagcatcctgaaggcccccatggacgaccccgacagcaagttcagcatcctgagcagcggctggctgagaatcaagagcatggagcccagcgacagcggcctgtaccagtgcatcgcccaggtgagagacgagatggacagaatggtgtacagagtgctggtgcagagccccagcacccagcccgccgagaaggacaccgtgaccatcggcaagaaccccggcgagagcgtgaccctgccctgcaacgccctggccatccccgaggcccacctgagctggatcctgcccaacagaagaatcatcaacgacctggccaacaccagccacgtgtacatgctgcccaacggcaccctgagcatccccaaggtgcaggtgagcgacagcggctactacagatgcgtggccgtgaaccagcagggcgccgaccacttcaccgtgggcatcaccgtgaccaagaagggcagcggcctgcccagcaagagaggcagaagacccggcgccaaggccctgagcagagtgagagaggacatcgtggaggacgagggcggcagcggcatgggcgacgaggagaacaccagcagaagactgctgcaccccaaggaccaggaggtgttcctgaagaccaaggacgacgccatcaacggcgacaagaaggccaagaagggcagaagaaagctgaagctgtggaagcacagcgagaaggagcccgagaccaacgtggccgagggcagaagagtgttcgagagcagaagaagaatcaacatggccaacaagcagatcaaccccgagagatgggccgacatcctggccaaggtgagaggcaagaacctgcccaagggcaccgaggtgccccccctgatcaagaccaccagcccccccagcctgagcctggaggtgaccccccccttccccgccatcagcccccccagcgccagccccgtgcagaccgtgaccagcgccgaggagagcagcgccgacgtgcccctgctgggcgaggaggagcacgtgctgggcaccatcagcagcgccagcatgggcctggagcacaaccacaacggcgtgatcctggtggagcccgaggtgaccagcacccccctggaggaggtggtggacgacctgagcgagaagaccgaggagatcaccagcaccgagggcgacctgaagggcaccgccgcccccaccctgatcagcgagccctacgagcccagccccaccctgcacaccctggacaccgtgtacgagaagcccacccacgaggagaccgccaccgagggctggagcgccgccgacgtgggcagcagccccgagcccaccagcagcgagtacgagccccccctggacgccgtgagcctggccgagagcgagcccatgcagtacttcgaccccgacctggagaccaagagccagcccgacgaggacaagatgaaggaggacaccttcgcccacctgacccccacccccaccatctgggtgaacgacagcagcaccagccagctgttcgaggacagcaccatcggcgagcccggcgtgcccggccagagccacctgcagggcctgaccgacaacatccacctggtgaagagcagcctgagcacccaggacaccctgctgatcaagaagggcatgaaggagatgagccagaccctgcagggcggcaacatgctggagggcgaccccacccacagcagaagcagcgagagcgagggccaggagagcaagagcatcaccctgcccgacagcaccctgggcatcatgagcagcatgagccccgtgaagaagcccgccgagaccaccgtgggcaccctgctggacaaggacaccaccaccgccaccaccacccccagacagaaggtggcccccagcagcaccatgagcacccaccccagcagaagaagacccaacggcagaagaagactgagacccaacaagttcagacacagacacaagcagaccccccccaccaccttcgcccccagcgagaccttcagcacccagcccacccaggcccccgacatcaagatcagcagccaggtggagagcagcctggtgcccaccgcctgggtggacaacaccgtgaacacccccaagcagctggagatggagaagaacgccgagcccaccagcaagggcacccccagaagaaagcacggcaagagacccaacaagcacagatacacccccagcaccgtgagcagcagagccagcggcagcaagcccagccccagccccgagaacaagcacagaaacatcgtgacccccagcagcgagaccatcctgctgcccagaaccgtgagcctgaagaccgagggcccctacgacagcctggactacatgaccaccaccagaaagatctacagcagctaccccaaggtgcaggagaccctgcccgtgacctacaagcccaccagcgacggcaaggagatcaaggacgacgtggccaccaacgtggacaagcacaagagcgacatcctggtgaccggcgagagcatcaccaacgccatccccaccagcagaagcctggtgagcaccatgggcgagttcaaggaggagagcagccccgtgggcttccccggcacccccacctggaaccccagcagaaccgcccagcccggcagactgcagaccggcatccccgtgaccaccagcggcgagaacctgaccgacccccccctgctgaaggagctggaggacgtggacttcaccagcgagttcctgagcagcctgaccgtgagcacccccttccaccaggaggaggccggcagcagcaccaccctgagcagcatcaaggtggaggtggccagcagccaggccgagaccaccaccctggaccaggaccacctggagaccaccgtggccatcctgctgagcgagaccagaccccagaaccacacccccaccgccgccagaatgaaggagcccgccagcagcagccccagcaccatcctgatgagcctgggccagaccaccaccaccaagcccgccctgcccagccccagaatcagccaggccagcagagacagcaaggagaacgtgttcctgaactacgtgggcaaccccgagaccgaggccacccccgtgaacaacgagggcacccagcacatgagcggccccaacgagctgagcacccccagcagcgaccaggacgccttcaacctgagcaccaagctggagctggagaagcaggtgttcggcagcagaagcctgcccagaggccccgacagccagagacaggacggcagagtgcacgccagccaccagctgaccagagtgcccgccaagcccatcctgcccaccgccaccgtgagactgcccgagatgagcacccagagcgccagcagatacttcgtgaccagccagagccccagacactggaccaacaagcccgagatcaccacctaccccagcggcgccctgcccgagaacaagcagttcaccacccccagactgagcagcaccaccatccccctgcccctgcacatgagcaagcccagcatccccagcaagttcaccgacagaagaaccgaccagttcaacggctacagcaaggtgttcggcaacaacaacatccccgaggccagaaaccccgtgggcaagccccccagccccagaatcccccactacagcaacggcagactgcccttcttcaccaacaagaccctgagcttcccccagctgggcgtgaccagaagaccccagatccccaccagccccgcccccgtgatgagagagagaaaggtgatccccggcagctacaacagaatccacagccacagcaccttccacctggacttcggcccccccgccccccccctgctgcacaccccccagaccaccggcagccccagcaccaacctgcagaacatccccatggtgagcagcacccagagcagcatcagcttcatcaccagcagcgtgcagagcagcggcagcttccaccagagcagcagcaagttcttcgccggcggcccccccgccagcaagttctggagcctgggcgagaagccccagatcctgaccaagagcccccagaccgtgagcgtgaccgccgagaccgacaccgtgttcccctgcgaggccaccggcaagcccaagcccttcgtgacctggaccaaggtgagcaccggcgccctgatgacccccaacaccagaatccagagattcgaggtgctgaagaacggcaccctggtgatcagaaaggtgcaggtgcaggacagaggccagtacatgtgcaccgccagcaacctgcacggcctggacagaatggtggtgctgctgagcgtgaccgtgcagcagccccagatcctggccagccactaccaggacgtgaccgtgtacctgggcgacaccatcgccatggagtgcctggccaagggcacccccgccccccagatcagctggatcttccccgacagaagagtgtggcagaccgtgagccccgtggagggcagaatcaccctgcacgagaacagaaccctgagcatcaaggaggccagcttcagcgacagaggcgtgtacaagtgcgtggccagcaacgccgccggcgccgacagcctggccatcagactgcacgtggccgccctgccccccgtgatccaccaggagaagctggagaacatcagcctgccccccggcctgagcatccacatccactgcaccgccaaggccgcccccctgcccagcgtgagatgggtgctgggcgacggcacccagatcagacccagccagttcctgcacggcaacctgttcgtgttccccaacggcaccctgtacatcagaaacctggcccccaaggacagcggcagatacgagtgcgtggccgccaacctggtgggcagcgccagaagaaccgtgcagctgaacgtgcagagagccgccgccaacgccagaatcaccggcaccagccccagaagaaccgacgtgagatacggcggcaccctgaagctggactgcagcgccagcggcgacccctggcccagaatcctgtggagactgcccagcaagagaatgatcgacgccctgttcagcttcgacagcagaatcaaggtgttcgccaacggcaccctggtggtgaagagcgtgaccgacaaggacgccggcgactacctgtgcgtggccagaaacaaggtgggcgacgactacgtggtgctgaaggtggacgtggtgatgaagcccgccaagatcgagcacaaggaggagaacgaccacaaggtgttctacggcggcgacctgaaggtggactgcgtggccaccggcctgcccaaccccgagatcagctggagcctgcccgacggcagcctggtgaacagcttcatgcagagcgacgacagcggcggcagaaccaagagatacgtggtgttcaacaacggcaccctgtacttcaacgaggtgggcatgagagaggagggcgactacacctgcttcgccgagaaccaggtgggcaaggacgagatgagagtgagagtgaaggtggtgaccgcccccgccaccatcagaaacaagacctacctggccgtgcaggtgccctacggcgacgtggtgaccgtggcctgcgaggccaagggcgagcccatgcccaaggtgacctggctgagccccaccaacaaggtgatccccaccagcagcgagaagtaccagatctaccaggacggcaccctgctgatccagaaggcccagagaagcgacagcggcaactacacctgcctggtgagaaacagcgccggcgaggacagaaagaccgtgtggatccacgtgaacgtgcagccccccaagatcaacggcaaccccaaccccatcaccaccgtgagagagatcgccgccggcggcagcagaaagctgatcgactgcaaggccgagggcatccccacccccagagtgctgtgggccttccccgagggcgtggtgctgcccgccccctactacggcaacagaatcaccgtgcacggcaacggcagcctggacatcagaagcctgagaaagagcgacagcgtgcagctggtgtgcatggccagaaacgagggcggcgaggccagactgatcctgcagctgaccgtgctggagcccatggagaagcccatcttccacgaccccatcagcgagaagatcaccgccatggccggccacaccatcagcctgaactgcagcgccgccggcacccccacccccagcctggtgtgggtgctgcccaacggcaccgacctgcagagcggccagcagctgcagagattctaccacaaggccgacggcatgctgcacatcagcggcctgagcagcgtggacgccggcgcctacagatgcgtggccagaaacgccgccggccacaccgagagactggtgagcctgaaggtgggcctgaagcccgaggccaacaagcagtaccacaacctggtgagcatcatcaacggcgagaccctgaagctgccctgcaccccccccggcgccggccagggcagattcagctggaccctgcccaacggcatgcacctggagggcccccagaccctgggcagagtgagcctgctggacaacggcaccctgaccgtgagagaggccagcgtgttcgacagaggcacctacgtgtgcagaatggagaccgagtacggccccagcgtgaccagcatccccgtgatcgtgatcgcctacccccccagaatcaccagcgagcccacccccgtgatctacaccagacccggcaacaccgtgaagctgaactgcatggccatgggcatccccaaggccgacatcacctgggagctgcccgacaagagccacctgaaggccggcgtgcaggccagactgtacggcaacagattcctgcacccccagggcagcctgaccatccagcacgccacccagagagacgccggcttctacaagtgcatggccaagaacatcctgggcagcgacagcaagaccacctacatccacgtgttctag

SEQ ID NO: 4243 - DNA, 3330 bp, synthetic construct
  misc_feature 1..3330: note = source = /note="Description of Artificial Sequence: Synthetic coding sequence"
  source 1..3330: mol_type = other DNA
atgagactgctgctgctggtgcccctgctgctggcccccgcccccggcagcagcgcccccaaggtgagaagacagagcgacacctggggcccctggagccagtggagcccctgcagcagaacctgcggcggcggcgtgagcttcagagagagaccctgctacagccagagaagagacggcggcagcagctgcgtgggccccgccagaagccacagaagctgcagaaccgagagctgccccgacggcgccagagacttcagagccgagcagtgcgccgagttcgacggcgccgagttccagggcagaagatacagatggctgccctactacagcgcccccaacaagtgcgagctgaactgcatccccaagggcgagaacttctactacaagcacagagaggccgtggtggacggcaccccctgcgagcccggcaagagagacgtgtgcgtggacggcagctgcagagtggtgggctgcgaccacgagctggacagcagcaagcaggaggacaagtgcctgagatgcggcggcgacggcaccacctgctaccccgtggccggcaccttcgacgccaacgacctgagcagaggctacaaccagatcctgatcgtgcccatgggcgccaccagcatcctgatcgacgaggccgccgccagcagaaacttcctggccgtgaagaacgtgagaggcgagtactacctgaacggccactggaccatcgaggccgccagagccctgcccgccgccagcaccatcctgcactacgagagaggcgccgagggcgacctggcccccgagagactgcacgccagaggccccaccagcgagcccctggtgatcgagctgatcagccaggagcccaaccccggcgtgcactacgagtaccacctgcccctgagaagacccagccccggcttcagctggagccacggcagctggagcgactgcagcgccgagtgcggcggcggccaccagagcagactggtgttctgcaccatcgaccacgaggcctaccccgaccacatgtgccagagacagcccagacccgccgacagaagaagctgcaacctgcacccctgccccgagaccaagagatggaaggccggcccctgggccccctgcagcgccagctgcggcggcggcagccagagcagaagcgtgtactgcatcagcagcgacggcgccggcatccaggaggccgtggaggaggccgagtgcgccggcctgcccggcaagccccccgccatccaggcctgcaacctgcagagatgcgccgcctggagccccgagccctggggcgagtgcagcgtgagctgcggcgtgggcgtgagaaagagaagcgtgacctgcagaggcgagagaggcagcctgctgcacaccgccgcctgcagcctggaggacagaccccccctgaccgagccctgcgtgcacgaggactgccccctgctgagcgaccaggcctggcacgtgggcacctggggcctgtgcagcaagagctgcagcagcggcaccagaagaagacaggtgatctgcgccatcggcccccccagccactgcggcagcctgcagcacagcaagcccgtggacgtggagccctgcaacacccagccctgccacctgccccaggaggtgcccagcatgcaggacgtgcacacccccgccagcaacccctggatgcccctgggcccccaggagagccccgccagcgacagcagaggccagtggtgggccgcccaggagcaccccagcgccagaggcgaccacagaggcgagagaggcgaccccagaggcgaccagggcacccacctgagcgccctgggccccgcccccagcctgcagcagcccccctaccagcagcccctgagaagcggcagcggcccccacgactgcagacacagcccccacggctgctgccccgacggccacaccgccagcctgggcccccagtggcagggctgccccggcgccccctgccagcagagcagatacggctgctgccccgacagagtgagcgtggccgagggcccccaccacgccggctgcaccaagagctacggcggcgacagcaccggcggcatgcccagaagcagagccgtggccagcaccgtgcacaacacccaccagccccaggcccagcagaacgagcccagcgagtgcagaggcagccagttcggctgctgctacgacaacgtggccaccgccgccggccccctgggcgagggctgcgtgggccagcccagccacgcctaccccgtgagatgcctgctgcccagcgcccacggcagctgcgccgactgggccgccagatggtacttcgtggccagcgtgggccagtgcaacagattctggtacggcggctgccacggcaacgccaacaacttcgccagcgagcaggagtgcatgagcagctgccagggcagcctgcacggccccagaagaccccagcccggcgccagcggcagaagcacccacaccgacggcggcggcagcagccccgccggcgagcaggagcccagccagcacagaaccggcgccgccgtgcagagaaagccctggcccagcggcggcctgtggagacaggaccagcagcccggccccggcgaggccccccacacccaggccttcggcgagtggccctggggccaggagctgggcagcagagcccccggcctgggcggcgacgccggcagccccgccccccccttccacagcagcagctacagaatcagcctggccggcgtggagcccagcctggtgcaggccgccctgggccagctggtgagactgagctgcagcgacgacaccgcccccgagagccaggccgcctggcagaaggacggccagcccatcagcagcgacagacacagactgcagttcgacggcagcctgatcatccaccccctgcaggccgaggacgccggcacctacagctgcggcagcaccagacccggcagagacagccagaagatccagctgagaatcatcggcggcgacatggccgtgctgagcgaggccgagctgagcagattcccccagcccagagaccccgcccaggacttcggccaggccggcgccgccggccccctgggcgccatccccagcagccacccccagcccgccaacagactgagactggaccagaaccagcccagagtggtggacgccagccccggccagagaatcagaatgacctgcagagccgagggcttccccccccccgccatcgagtggcagagagacggccagcccgtgagcagccccagcacccacagacccgcccagggcccctggcagggcctgagaagacccgccagagccggccagctgtag

SEQ ID NO: 4244 - DNA, 405 bp, synthetic construct
  misc_feature 1..405: note = source = /note="Description of Artificial Sequence: Synthetic coding sequence"
  source 1..405: mol_type = other DNA
atgaagagcgtgctgctgctgaccaccctgctggtgcccgcccacctggtggccgcctggagcaacaactacgccgtggactgcccccagcactgcgacagcagcgagtgcaagagcagccccagatgcaagagaaccgtgctggacgactgcggctgctgcagagtgtgcgccgccggcagaggcgagacctgctacagaaccgtgagcggcatggacggcatgaagtgcggccccggcctgagatgccagcccagcaacggcgaggaccccttcggcgaggagttcggcatctgcaaggagcacgacatggccagcggcgacggcaacatcgtgagagaggaggtggtgaaggagaacgccgccggcagccccgtgatgagaaagtggctgaaccccagatag

SEQ ID NO: 4245 - DNA, 555 bp, synthetic construct
  misc_feature 1..555: note = source = /note="Description of Artificial Sequence: Synthetic coding sequence"
  source 1..555: mol_type = other DNA
atgaagagcgtgctgctgctgaccaccctgctggtgcccgcccacctggtggccgcctggagcaacaactacgccgtggactgcccccagcactgcgacagcagcgagtgcaagagcagccccagatgcaagagaaccgtgctggacgactgcggctgctgcagagtgtgcgccgccggcagaggcgagacctgctacagaaccgtgagcggcatggacggcatgaagtgcggccccggcctgagatgccagcccagcaacggcgaggaccccttcggcgaggagttcggcatctgcaaggactgcccctacggcaccttcggcatggactgcagagagacctgcaactgccagagcggcatctgcgacagaggcaccggcaagtgcctgaagttccccttcttccagtacagcgtgaccaagagcagcaacagattcgtgagcctgaccgagcacgacatggccagcggcgacggcaacatcgtgagagaggaggtggtgaaggagaacgccgccggcagccccgtgatgagaaagtggctgaaccccagatag

SEQ ID NO: 4246 - DNA, 597 bp, synthetic construct
  misc_feature 1..597: note = source = /note="Description of Artificial Sequence: Synthetic coding sequence"
  source 1..597: mol_type = other DNA
atgcccatccccgccagccccctgcacccccccctgcccagcctgctgctgtacctgctgctggagctggccggcgtgacccacgtgttccacgtgcagcagaccgagatgagccagaccgtgagcaccggcgagagcatcatcctgagctgcagcgtgcccaacaccctgcccaacggccccgtgctgtggttcaagggcaccggccccaacagaaagctgatctacaacttcaagcagggcaacttccccagagtgaaggagatcggcgacaccaccaagcccggcaacaccgacttcagcaccagaatcagagagatcagcctggccgacgccggcacctactactgcgtgaagttcatcaagggcagagccatcaaggagtaccagagcggcagaggcacccaggtgttcgtgaccgccgagcagaaccccagaccccccaagaacagacccgccggcagagccggcagcagagcccaccacgacgcccacacctgcctgagcgccctgcccgagagaaacagcaccaactacttcgtgcagccctgctgctgcctgagactgctgggcctgaccggcctgctgagcaagtag

SEQ ID NO: 4247 - DNA, 594 bp, synthetic construct
  misc_feature 1..594: note = source = /note="Description of Artificial Sequence: Synthetic coding sequence"
  source 1..594: mol_type = other DNA
atgcccatccccgccagccccctgcacccccccctgcccagcctgctgctgtacctgctgctggagctggccggcgtgacccacgtgttccacgtgcagcagaccgagatgagccagaccgtgagcaccggcgagagcatcatcctgagctgcagcgtgcccaacaccctgcccaacggccccgtgctgtggttcaagggcaccggccccaacagaaagctgatctacaacttcaagcagggcaacttccccagagtgaaggagatcggcgacaccaccaagcccggcaacaccgacttcagcaccagaatcagagagatcagcctggccgacgccggcacctactactgcgtgaagttcatcaagggcagagccatcaaggagtaccagagcggcagaggcacccaggtgttcgtgaccgagcagaaccccagaccccccaagaacagacccgccggcagagccggcagcagagcccaccacgacgcccacacctgcctgagcgccctgcccgagagaaacagcaccaactacttcgtgcagccctgctgctgcctgagactgctgggcctgaccggcctgctgagcaagtag

SEQ ID NO: 4248 - DNA, 1563 bp, synthetic construct
  misc_feature 1..1563: note = source = /note="Description of Artificial Sequence: Synthetic coding sequence"
  source 1..1563: mol_type = other DNA
atgaccaccgacgacaccgaggtgcccgccatgaccctggcccccggccacgccgccctggagacccagaccctgagcgccgagaccagcagcagagccagcacccccgccggccccatccccgaggccgagaccagaggcgccaagagaatcagccccgccagagagaccagaagcttcaccaagaccagccccaacttcatggtgctgatcgccaccagcgtggagaccagcgccgccagcggcagccccgagggcgccggcatgaccaccgtgcagaccatcaccggcagcgaccccagagaggccatcttcgacaccctgtgcaccgacgacatcagcgaggaggccaagaccctgaccatggacatcctgaccctggcccacaccagcaccgaggccaagggcctgagcagcgagagcagcgccagcagcgacggcccccaccccgtgatcacccccagcagagccagcgagagcagcgccagcagcgacggcccccaccccgtgatcacccccagcagagccagcgagagcagcgccagcagcgacggcccccaccccgtgatcacccccagcagagccagcgagagcagcgccagcagcgacggcccccaccccgtgatcacccccagctggagccccggcagcgacgtgaccctgctggccgaggccctggtgaccgtgaccaacatcgaggtgatcaactgcagcatcaccgagatcgagaccaccaccagcagcatccccggcgccagcgacaccgacctgatccccaccgagggcgtgaaggccagcagcaccagcgacccccccgccctgcccgacagcaccaacaccaagccccacatcaccgaggtgaccgccagcgccgagaccctgagcaccgccggcaccaccgagagcgccgcccccgacgccaccatcggcacccccctgcccaccaacagcaccatcgagagagaggtgaccgcccccggcgccaccaccctgagcggcgccctggccaccggcaaccccctggaggagaccagcgccctgagcgtggagacccccagctacgtgaaggtgagcggcgccgcccccgtgagcatcgaggccggcagcgccgtgggcaagaccaccagcttcgccggcagcagcgccagcagctacagccccctggaggccgccctgaagaacttcacccccagcgagaccctgaccaccgacatcgccaccaagggccccttccccaccagcagagaccccctgcccagcgtgccccccaccaccaccaacagcagcagaggcaccaacagcaccctggccaagatcaccaccagcgccaagaccaccatgaagccccccaccgccacccccaccaccgccagaaccagacccaccaccgacgtgagcgccggcgagaacggcggcttcctgctgctgagactgagcgtggccagccccgaggacctgaccgaccccagagtggccgagagactgatgcagcagctgcacagagagctgcacgcccacgccccccacttccaggtgagcctgctgagagtgagaagaggctag

SEQ ID NO: 4249 - DNA, 600 bp, synthetic construct
  misc_feature 1..600: note = source = /note="Description of Artificial Sequence: Synthetic coding sequence"
  source 1..600: mol_type = other DNA
atgctgtggagacagctgatctactggcagctgctggccctgttcttcctgcccttctgcctgtgccaggacgagtacatggagagcccccagaccggcggcctgccccccgactgcagcaagtgctgccaccacggcaacaacggcaacaacggcgccaccggccacaagggcgagaagggctaccccggcatcccccccgagctgcagatcgccttcatggccagcctggccacccacttcagcaaccagaacagcggcatcatcttcagcagcgtggagaccaacatcggcaacttcttcgacgtgatgaccggcagattcggcgcccccgtgagcggcgtgtacttcttcaccttcagcatgatgaagcacgaggacgtggaggaggtgtacgtgtacctgatgcacaacggcaacaccgtgttcagcatgtacagctacgagatgaagggcaagagcgacaccagcagcaaccacgccgtgctgaagctggccaagggcgacgaggtgtggctgagaatgggcaacggcgccctgcacggcgaccaccagagattcagcaccttcgccggcttcctgctgttcgagaccaagtag

SEQ ID NO: 4250 - DNA, 960 bp, synthetic construct
  misc_feature 1..960: note = source = /note="Description of Artificial Sequence: Synthetic coding sequence"
  source 1..960: mol_type = other DNA
atgctgtggagacagctgatctactggcagctgctggccctgttcttcctgcccttctgcctgtgccaggacgagtacatggaggtgagcggcagaaccaacaaggtggtggccagaatcgtgcagagccaccagcagaccggcagaagcggcagcagaagagagaaggtgagagagagaagccaccccaagaccggcaccgtggacaacaacaccagcaccgacctgaagagcctgagacccgacgagctgccccaccccgaggtggacgacctggcccagatcaccaccttctggggccagagcccccagaccggcggcctgccccccgactgcagcaagtgctgccacggcgactacagcttcagaggctaccagggcccccccggcccccccggcccccccggcatccccggcaaccacggcaacaacggcaacaacggcgccaccggccacgagggcgccaagggcgagaagggcgacaagggcgacctgggccccagaggcgagagaggccagcacggccccaagggcgagaagggctaccccggcatcccccccgagctgcagatcgccttcatggccagcctggccacccacttcagcaaccagaacagcggcatcatcttcagcagcgtggagaccaacatcggcaacttcttcgacgtgatgaccggcagattcggcgcccccgtgagcggcgtgtacttcttcaccttcagcatgatgaagcacgaggacgtggaggaggtgtacgtgtacctgatgcacaacggcaacaccgtgttcagcatgtacagctacgagatgaagggcaagagcgacaccagcagcaaccacgccgtgctgaagctggccaagggcgacgaggtgtggctgagaatgggcaacggcgccctgcacggcgaccaccagagattcagcaccttcgccggcttcctgctgttcgagaccaagtag

SEQ ID NO: 4251 - DNA, 855 bp, synthetic construct
  misc_feature 1..855: note = source = /note="Description of Artificial Sequence: Synthetic coding sequence"
  source 1..855: mol_type = other DNA
atgaccaagagcagcctgagacccctgcagaagcagagcccccagaccggcggcctgccccccgactgcagcaagtgctgccacggcgactacagcttcagaggctaccagggcccccccggcccccccggcccccccggcatccccggcaaccacggcaacaacggcaacaacggcgccaccggccacgagggcgccaagggcgagaagggcgacaagggcgacctgggccccagaggcgagagaggccagcacggccccaagggcgagaagggctaccccggcatcccccccgagctgcagatcgccttcatggccagcctggccacccacttcagcaaccagaacagcggcatcatcttcagcagcgtggagaccaacatcggcaacttcttcgacgtgatgaccggcagattcggcgcccccgtgagcggcgtgtacttcttcaccttcagcatgatgaagcacgaggacgtggaggaggtgtacgtgtacctgatgcacaacggcaacaccgtgttcagcatgtacagctacgagatgaagggcaagagcgacaccagcagcaaccacgccgtgctgaagctggccaagggcgacgaggtgtggctgagaatgggcaacggcgccctgcacggcgaccaccagagattcagcaccttcgccggcttcctgctgttcgagaccaagtgccacggcgagacccccgccggccccagagacagcgccgccggcaagagcaaggcctacctgtgccaggccgagtggatctggcccgtgagaaagctgctgcccgtgagctggcccagataccagctgttcggcttcgtgagatggaaggagcagcacatctag

SEQ ID NO: 4252 - DNA, 234 bp, synthetic construct
  misc_feature 1..234: note = source = /note="Description of Artificial Sequence: Synthetic coding sequence"
  source 1..234: mol_type = other DNA
atggccaccagaagcgtgctgctggccctggtggtgctgaacctgctgttctacgtgccccccggcagaagcggccccaacgtgtacatccagaagatcttcgccagctgctggagactgcagggcacctgcagacccaagtgcctgaagaacgagcagtacagaatcctgtgcgacaccatccacctgtgctgcgtgaaccccaagtacctgcccatcctgaccggcaagtag

SEQ ID NO: 4253 - DNA, 237 bp, synthetic construct
  misc_feature 1..237: note = source = /note="Description of Artificial Sequence: Synthetic coding sequence"
  source 1..237: mol_type = other DNA
atgaacctgtgcctgagcgccctgctgttcttcctggtgatcctgctgcccagcggcaagggcatgttcggcaacgacggcgtgaaggtgagaacctgcaccagccagaaggccgtgtgcttcttcggctgcccccccggctacagatggatcgccttctgccacaacatcctgagctgctgcaagaacatgaccagattccagcccccccaggccaaggacccctgggtgcactag

SEQ ID NO: 4254 - DNA, 627 bp, synthetic construct
  misc_feature 1..627: note = source = /note="Description of Artificial Sequence: Synthetic coding sequence"
  source 1..627: mol_type = other DNA
atgggcgcccagggcgcccaggagagcatcaaggccatgtggagagtgcccggcaccaccagaagacccgtgaccggcgagagccccggcatgcacagacccgaggccatgctgctgctgctgaccctggccctgctgggcggccccacctgggccggcaagatgtacggccccggcggcggcaagtacttcagcaccaccgaggactacgaccacgagatcaccggcctgagagtgagcgtgggcctgctgctggtgaagagcgtgcaggtgaagctgggcgacagctgggacgtgaagctgggcgccctgggcggcaacacccaggaggtgaccctgcagcccggcgagtacatcaccaaggtgttcgtggccttccaggccttcctgagaggcatggtgatgtacaccagcaaggacagatacttctacttcggcaagctggacggccagatcagcagcgcctaccccagccaggagggccaggtgctggtgggcatctacggccagtaccagctgctgggcatcaagagcatcggcttcgagtggaactaccccctggaggagcccaccaccgagccccccgtgaacctgacctacagcgccaacagccccgtgggcagatag

SEQ ID NO: 4255 - DNA, 288 bp, synthetic construct
  misc_feature 1..288: note = source = /note="Description of Artificial Sequence: Synthetic coding sequence"
  source 1..288: mol_type = other DNA
atgaagttcctgctgctggtgctggccgccctgggcttcctgacccaggtgatccccgccagcgccggcggcagcaagtgcgtgagcaacacccccggctactgcagaacctgctgccactggggcgagaccgccctgttcatgtgcaacgccagcagaaagtgctgcatcagctacagcttcctgcccaagcccgacctgccccagctgatcggcaaccactggcagagcagaagaagaaacacccagagaaaggacaagaagcagcagaccaccgtgaccagctag

SEQ ID NO: 4256 - DNA, 339 bp, synthetic construct
  misc_feature 1..339: note = source = /note="Description of Artificial Sequence: Synthetic coding sequence"
  source 1..339: mol_type = other DNA
atgttcgtgctgctgtacgtgaccagcttcgccatctgcgccagcggccagcccagaggcaaccagctgaagggcgagaactacagccccagatacatctgcagcatccccggcctgcccggcccccccggcccccccggcgccaacggcagccccggcccccacggcagaatcggcctgcccggcagagacggcagagacggcagaaagggcgagaagggcgagaagggcaccgccggcctgagaggcaagaccggccccctgggcctggccggcgagaagggcgaccagggcgagaccggcaagaagggccccatcggccccgagggcgagaagtag

SEQ ID NO: 4257 - DNA, 300 bp, synthetic construct
  misc_feature 1..300: note = source = /note="Description of Artificial Sequence: Synthetic coding sequence"
  source 1..300: mol_type = other DNA
atgggcctgttcatgatcatcgccatcctgctgttccagaagcccaccgtgaccgagcagctgaagaagtgctggaacaactacgtgcagggccactgcagaaagatctgcagagtgaacgaggtgcccgaggccctgtgcgagaacggcagatactgctgcctgaacatcaaggagctggaggcctgcaagaagatcaccaagccccccagacccaagcccgccaccctggccctgaccctgcaggactacgtgaccatcatcgagaacttccccagcctgaagacccagagcacctag

SEQ ID NO: 4258 - DNA, 336 bp, synthetic construct
  misc_feature 1..336: note = source = /note="Description of Artificial Sequence: Synthetic coding sequence"
  source 1..336: mol_type = other DNA
atgaagagcctgctgttcaccctggccgtgttcatgctgctggcccagctggtgagcggcaactggtacgtgaagaagtgcctgaacgacgtgggcatctgcaagaagaagtgcaagcccgaggagatgcacgtgaagaacggctgggccatgtgcggcaagcagagagactgctgcgtgcccgccgacagaagagccaactaccccgtgttctgcgtgcagaccaagaccaccagaatcagcaccgtgaccgccaccaccgccaccaccaccctgatgatgaccaccgccagcatgagcagcatggcccccacccccgtgagccccaccggctag

SEQ ID NO: 4259 - DNA, 1698 bp, synthetic construct
  misc_feature 1..1698: note = source = /note="Description of Artificial Sequence: Synthetic coding sequence"
  source 1..1698: mol_type = other DNA
atggaggacagcgacagcgccgccaagcagctgggcctggccgaggccgccgccgtggccgccgccgccgccgtggccgccgccgccgccgccgccgccggcggcgaggccgaggagcccgtgctgagcagagacgaggacagcgaggaggacgccgacagcgaggccgagagagagacccccagagtgaccgccgtggccgtgatggccgccgagcccggccacatggacatgggcgccgaggccctgcccggccccgacgaggccgccgccgccgccgccttcgccgaggtgaccaccgtgaccgtggccaacgtgggcgccgccgccgacaacgtgttcaccaccagcgtggccaacgccgccagcatcagcggccacgtgctgagcggcagaaccgccctgcagatcggcgacagcctgaacaccgagaaggccaccctgatcgtggtgcacaccgacggcagcatcgtggagaccaccggcctgaagggccccgccgcccccctgacccccggcccccagagcccccccacccccctggcccccggccaggagaagggcggcaccaagtacaactgggaccccagcgtgtacgacagcgagctgcccgtgagatgcagaaacatcagcggcaccctgtacaagaacagactgggcagcggcggcagaggcagatgcatcaagcagggcgagaactggtacagccccaccgagttcgaggccatggccggcagagccagcagcaaggactggaagagaagcatcagatacgccggcagacccctgcagtgcctgatccaggacggcatcctgaacccccacgccgccagctgcacctgcgccgcctgctgcgacgacatgaccctgagcggccccgtgagactgttcgtgccctacaagagaagaaagaaggagaacgagctgcccaccacccccgtgaagaaggacagccccaagaacatcaccctgctgcccgccaccgccgccaccaccttcaccgtgacccccagcggccagatcaccaccagcggcgccctgaccttcgacagagccagcaccgtggaggccaccgccgtgatcagcgagagccccgcccagggcgacgtgttcgccggcgccaccgtgcaggaggccagcgtgcagcccccctgcagagccagccaccccgagccccactaccccggctaccaggacagctgccagatcgcccccttccccgaggccgccctgcccaccagccaccccaagatcgtgctgaccagcctgcccgccctggccgtgcccccccccacccccaccaaggccgccccccccgccctggtgaacggcctggagctgagcgagcccagaagctggctgtacctggaggagatggtgaacagcctgctgaacaccgcccagcagctgaagaccctgttcgagcaggccaagcacgccagcacctacagagaggccgccaccaaccaggccaagatccacgccgacgccgagagaaaggagcagagctgcgtgaactgcggcagagaggccatgagcgagtgcaccggctgccacaaggtgaactactgcagcaccttctgccagagaaaggactggaaggaccaccagcacatctgcggccagagcgccgccgtgaccgtgcaggccgacgaggtgcacgtggccgagagcgtgatggagaaggtgaccgtgtag

SEQ ID NO: 4260 - DNA, 471 bp, synthetic construct
  misc_feature 1..471: note = source = /note="Description of Artificial Sequence: Synthetic coding sequence"
  source 1..471: mol_type = other DNA
atgaacatcctgatgctgaccttcatcatctgcggcctgctgaccagagtgaccaagggcagcttcgagccccagaagtgctggaagaacaacgtgggccactgcagaagaagatgcctggacaccgagagatacatcctgctgtgcagaaacaagctgagctgctgcatcagcatcatcagccacgagtacaccagaagacccgccttccccgtgatccacctggaggacatcaccctggactacagcgacgtggacagcttcaccggcagccccgtgagcatgctgaacgacctgatcaccttcgacaccaccaagttcggcgagaccatgacccccgagaccaacacccccgagaccaccatgccccccagcgaggccaccacccccgagaccaccatgccccccagcgagaccgccaccagcgagaccatgcccccccccagccagaccgccctgacccacaactag

SEQ ID NO: 4261 - DNA, 837 bp, synthetic construct
  misc_feature 1..837: note = source = /note="Description of Artificial Sequence: Synthetic coding sequence"
  source 1..837: mol_type = other DNA
atgggcggccccagagccctgctggccgccctgtgggccctggaggccgccggcaccgccgccctgagaatcggcgccttcaacatccagagcttcggcgacagcaaggtgagcgaccccgcctgcggcagcatcatcgccaagatcctggccggctacgacctggccctggtgcaggaggtgagagaccccgacctgagcgccgtgagcgccctgatggagcagatcaacagcgtgagcgagcacgagtacagcttcgtgagcagccagcccctgggcagagaccagtacaaggagatgtacctgttcgtgtacagaaaggacgccgtgagcgtggtggacacctacctgtaccccgaccccgaggacgtgttcagcagagagcccttcgtggtgaagttcagcgcccccggcaccgcccagaacctggtgctgatccccctgcacgccgccccccaccaggccgtggccgagatcgacgccctgtacgacgtgtacctggacgtgatcgacaagtggggcaccgacgacatgctgttcctgggcgacttcaacgccgactgcagctacgtgagagcccaggactgggccgccatcagactgagaagcagcgaggtgttcaagtggctgatccccgacagcgccgacaccaccgtgggcaacagcgactgcgcctacgacagaatcgtggcctgcggcgccagactgagaagaagcctgaagccccagagcgccaccgtgcacgacttccaggaggagttcggcctggaccagacccaggccctggccatcagcgaccacttccccgtggaggtgaccctgaagttccacagatag

SEQ ID NO: 4262 - DNA, 3039 bp, synthetic construct
  misc_feature 1..3039: note = source = /note="Description of Artificial Sequence: Synthetic coding sequence"
  source 1..3039: mol_type = other DNA
atggccgaggccgccctggaggccgtgagaagcgagctgagagagttccccgccgccgccagagagctgtgcgtgcccctggccgtgccctacctggacaagccccccacccccctgcacttctacagagactgggtgtgccccaacagaccctgcatcatcagaaacgccctgcagcactggcccgccctgcagaagtggagcctgccctacttcagagccaccgtgggcagcaccgaggtgagcgtggccgtgacccccgacggctacgccgacgccgtgagaggcgacagattcatgatgcccgccgagagaagactgcccctgagcttcgtgctggacgtgctggagggcagagcccagcaccccggcgtgctgtacgtgcagaagcagtgcagcaacctgcccagcgagctgccccagctgctgcccgacctggagagccacgtgccctgggccagcgaggccctgggcaagatgcccgacgccgtgaacttctggctgggcgaggccgccgccgtgaccagcctgcacaaggaccactacgagaacctgtactgcgtggtgagcggcgagaagcacttcctgttccacccccccagcgacagacccttcatcccctacgagctgtacacccccgccacctaccagctgaccgaggagggcaccttcaaggtggtggacgaggaggccatggagaaggccgaggtgagcagaacctgcctgctgaccgtgagagtgctgcaggcccacagactgcccagcaaggacctggtgacccccagcgactgctacgtgaccctgtggctgcccaccgcctgcagccacagactgcagaccagaaccgtgaagaacagcagcagccccgtgtggaaccagagcttccacttcagaatccacagacagctgaagaacgtgatggagctgaaggtgttcgaccaggacctggtgaccggcgacgaccccgtgctgagcgtgctgttcgacgccggcaccctgagagccggcgagttcagaagagagagcttcagcctgagcccccagggcgagggcagactggaggtggagttcagactgcagagcctggccgacagaggcgagtggctggtgagcaacggcgtgctggtggccagagagctgagctgcctgcacgtgcagctggaggagaccggcgaccagaagagcagcgagcacagagtgcagctggtggtgcccggcagctgcgagggcccccaggaggccagcgtgggcaccggcaccttcagattccactgccccgcctgctgggagcaggagctgagcatcagactgcaggacgcccccgaggagcagctgaaggcccccctgagcgccctgcccagcggccaggtggtgagactggtgttccccaccagccaggagcccctgatgagagtggagctgaagaaggaggccggcctgagagagctggccgtgagactgggcttcggcccctgcgccgaggagcaggccttcctgagcagaagaaagcaggtggtggccgccgccctgagacaggccctgcagctggacggcgacctgcaggaggacgagatccccgtggtggccatcatggccaccggcggcggcatcagagccatgaccagcctgtacggccagctggccggcctgaaggagctgggcctgctggactgcgtgagctacatcaccggcgccagcggcagcacctgggccctggccaacctgtacgaggaccccgagtggagccagaaggacctggccggccccaccgagctgctgaagacccaggtgaccaagaacaagctgggcgtgctggcccccagccagctgcagagatacagacaggagctggccgagagagccagactgggctaccccagctgcttcaccaacctgtgggccctgatcaacgaggccctgctgcacgacgagccccacgaccacaagctgagcgaccagagagaggccctgagccacggccagaaccccctgcccatctactgcgccctgaacaccaagggccagagcctgaccaccttcgagttcggcgagtggtgcgagttcagcccctacgaggtgggcttccccaagtacggcgccttcatccccagcgagctgttcggcagcgagttcttcatgggccagctgatgaagagactgcccgagagcagaatctgcttcctggagggcatctggagcaacctgtacgccgccaacctgcaggacagcctgtactgggccagcgagcccagccagttctgggacagatgggtgagaaaccaggccaacctggacaaggagcaggtgcccctgctgaagatcgaggagccccccagcaccgccggcagaatcgccgagttcttcaccgacctgctgacctggagacccctggcccaggccacccacaacttcctgagaggcctgcacttccacaaggactacttccagcacccccacttcagcacctggaaggccaccaccctggacggcctgcccaaccagctgacccccagcgagccccacctgtgcctgctggacgtgggctacctgatcaacaccagctgcctgcccctgctgcagcccaccagagacgtggacctgatcctgagcctggactacaacctgcacggcgccttccagcagctgcagctgctgggcagattctgccaggagcagggcatccccttcccccccatcagccccagccccgaggagcagctgcagcccagagagtgccacaccttcagcgaccccacctgccccggcgcccccgccgtgctgcacttccccctggtgagcgacagcttcagagagtacagcgcccccggcgtgagaagaacccccgaggaggccgccgccggcgaggtgaacctgagcagcagcgacagcccctaccactacaccaaggtgacctacagccaggaggacgtggacaagctgctgcacctgacccactacaacgtgtgcaacaaccaggagcagctgctggaggccctgagacaggccgtgcagagaagaagacagagaagaccccactag

SEQ ID NO: 4263 - DNA, 1548 bp, synthetic construct
  misc_feature 1..1548: note = source = /note="Description of Artificial Sequence: Synthetic coding sequence"
  source 1..1548: mol_type = other DNA
atggcctggccctacttcctggactgccacagatacttcaccagagaggacgagggctgctacgaccccctggagaagctgagaggcggcctggaggccgacgaggccctgcccagcggcctgccccccaccttcatcagattcagccaccacagctacgcccagatggtgagagtgctgagaagaaccgccagcagatgcgcccacgtggccagaacctacagcatcggcagaagcttcgacggcagagagctgctggtgatcgagttcagcagcagacccggccagcacgagctgatggagcccgaggtgaagctgatcggcaacatccacggcaacgaggtggccggcagagagatgctgatctacctggcccagtacctgtgcagcgagtacctgctgggcaaccccagaatccagagactgctgaacaccaccagaatccacctgctgcccagcatgaaccccgacggctacgaggtggccgccgccgagggcgccggctacaacggctggaccagcggcagacagaacgcccagaacctggacctgaacagaaacttccccgacctgaccagcgagtactacagactggccgagaccagaggcgccagaagcgaccacatccccatcccccagcactactggtggggcaaggtggcccccgagaccaaggccatcatgaagtggatgcagaccatccccttcgtgctgagcgccagcctgcacggcggcgacctggtggtgagctaccccttcgacttcagcaagcacccccaggaggagaagatgttcagccccacccccgacgagaagatgttcaagctgctgagcagagcctacgccgacgtgcaccccatgatgatggacagaagcgagaacagatgcggcggcaacttcctgaagagaggcagcatcatcaacggcgccgactggtacagcttcaccggcggcatgagcgacttcaactacctgcacaccaactgcttcgagatcaccgtggagctgggctgcgtgaagttcccccccgaggaggccctgtacatcctgtggcagcacaacaaggagagcctgctgaacttcgtggagaccgtgcacagaggcatcaagggcgtggtgaccgacaagttcggcaagcccgtgaagaacgccagaatcagcgtgaagggcatcagacacgacatcaccaccgcccccgacggcgactactggagactgctgccccccggcatccacatcgtgatcgcccaggcccccggctacgccaaggtgatcaagaaggtgatcatccccgccagaatgaagagagccggcagagtggacttcatcctgcagcccctgggcatgggccccaagaacttcatccacggcctgagaagaaccggcccccacgaccccctgggcggcgccagcagcctgggcgaggccaccgagcccgaccccctgagagccagaagacagcccagcgccgacggcagcaagccctggtggtggagctacttcaccagcctgagcacccacagacccagatggctgctgaagtactag

SEQ ID NO: 4264 - DNA, 285 bp, synthetic construct
  misc_feature 1..285: note = source = /note="Description of Artificial Sequence: Synthetic coding sequence"
  source 1..285: mol_type = other DNA
atgagaaccctggccatcctggccgccatcctgctggtggccctgcaggcccaggccgagcccctgcaggccagagccgacgaggtggccgccgcccccgagcagatcgccgccgacatccccgaggtggtggtgagcctggcctgggacgagagcctggcccccaagcaccccggcagcagaaagaacatggcctgctactgcagaatccccgcctgcatcgccggcgagagaagatacggcacctgcatctaccagggcagactgtgggccttctgctgctag

SEQ ID NO: 4265 - DNA, 420 bp, synthetic construct
  misc_feature 1..420: note = source = /note="Description of Artificial Sequence: Synthetic coding sequence"
  source 1..420: mol_type = other DNA
atgggcaaccccggcggcgtgggcagcgagagaatgagagtggccagaagaaccagaaacgtgtgcagatgccccagagccgccggccccggcgtgcccgagcccagagccgcccccctgcccctgctggccatggcccccccccccgcctgcagaagccccatgagccccccccccccccccctgctgctgctgctgctgagcctggccctgctgggcgccagagccagagccgagcccgccggcagcgccgtgcccgcccagagcagaccctgcgtggactgccacgccttcgagttcatgcagagagccctgcaggacctgagaaagaccgcctgcagcctggacgccagaaccgagaccctgctgctgcaggccgagagaagagccctgtgcgcctgctggcccgccggccactag

SEQ ID NO: 4266 - DNA, 471 bp, synthetic construct
  misc_feature 1..471: note = source = /note="Description of Artificial Sequence: Synthetic coding sequence"
  source 1..471: mol_type = other DNA
atggcccccgccgtgaccagactgctgttcctgcagctggtgctgggccccaccctggtgatggacatcaagatgcagatcggcagcagaaacttctacaccctgagcatcgactaccccagagtgaactaccccaagggcttcagaggctactgcaacggcctgatgagctacatgagaggcaagatgcagaacagcgactgccccaagatccactacgtgatccacgccccctggaaggccatccagaagttctgcaagtacagcgacagcttctgcgagaactacaacgagtactgcaccctgacccaggacagcctgcccatcaccgtgtgcagcctgagccaccagcagccccccaccagctgctactacaacagcaccctgaccaaccagaagctgtacctgctgtgcagcagaaagtacgaggccgaccccatcggcatcgccggcctgtacagcggcatctag

SEQ ID NO: 4267 - DNA, 444 bp, synthetic construct
  misc_feature 1..444: note = source = /note="Description of Artificial Sequence: Synthetic coding sequence"
  source 1..444: mol_type = other DNA
atgatcatcatggtgatcatcttcctggtgctgctgttctgggagaacgaggtgaacgacgaggccgtgatgagcaccctggagcacctgcacgtggactacccccagaacgacgtgcccgtgcccgccagatactgcaaccacatgatcatccagagagtgatcagagagcccgaccacacctgcaagaaggagcacgtgttcatccacgagagacccagaaagatcaacggcatctgcatcagccccaagaaggtggcctgccagaacctgagcgccatcttctgcttccagagcgagaccaagttcaagatgaccgtgtgccagctgatcgagggcaccagataccccgcctgcagataccactacagccccaccgagggcttcgtgctggtgacctgcgacgacctgagacccgacagcttcctgggctacgtgaagtag

SEQ ID NO: 4268 - DNA, 453 bp, synthetic construct; identical to SEQ ID NO: 3797
  misc_feature 1..453: note = source = /note="Description of Artificial Sequence: Synthetic coding sequence"
  source 1..453: mol_type = other DNA

SEQ ID NO: 4269 - DNA, 2742 bp, synthetic construct; identical to SEQ ID NO: 3799
  misc_feature 1..2742: note = source = /note="Description of Artificial Sequence: Synthetic coding sequence"
  source 1..2742: mol_type = other DNA

SEQ ID NO: 4270 - DNA, 453 bp, synthetic construct; identical to SEQ ID NO: 3797
  misc_feature 1..453: note = source = /note="Description of Artificial Sequence: Synthetic coding sequence"
  source 1..453: mol_type = other DNA

SEQ ID NO: 4271 - DNA, 567 bp, synthetic construct; identical to SEQ ID NO: 4160
  misc_feature 1..567: note = source = /note="Description of Artificial Sequence: Synthetic coding sequence"
  source 1..567: mol_type = other DNA

SEQ ID NO: 4272 - DNA, 2535 bp, synthetic construct; identical to SEQ ID NO: 3960
  misc_feature 1..2535: note = source = /note="Description of Artificial Sequence: Synthetic coding sequence"
  source 1..2535: mol_type = other DNA

SEQ ID NO: 4273 - DNA, 237 bp, synthetic construct; identical to SEQ ID NO: 3991
  misc_feature 1..237: note = source = /note="Description of Artificial Sequence: Synthetic coding sequence"
  source 1..237: mol_type = other DNA

SEQ ID NO: 4274 - DNA, 2700 bp, synthetic construct; identical to SEQ ID NO: 4183
  misc_feature 1..2700: note = source = /note="Description of Artificial Sequence: Synthetic coding sequence"
  source 1..2700: mol_type = other DNA

SEQ ID NO: 4275 - DNA, 2886 bp, synthetic construct; identical to SEQ ID NO: 4184
  misc_feature 1..2886: note = source = /note="Description of Artificial Sequence: Synthetic coding sequence"
  source 1..2886: mol_type = other DNA

SEQ ID NO: 4276 - DNA, 2535 bp, synthetic construct; identical to SEQ ID NO: 3960
  misc_feature 1..2535: note = source = /note="Description of Artificial Sequence: Synthetic coding sequence"
  source 1..2535: mol_type = other DNA

SEQ ID NO: 4277 - DNA, 2535 bp, synthetic construct; identical to SEQ ID NO: 3960
  misc_feature 1..2535: note = source = /note="Description of Artificial Sequence: Synthetic coding sequence"
  source 1..2535: mol_type = other DNA

SEQ ID NO: 4278 - DNA, 2700 bp, synthetic construct; identical to SEQ ID NO: 4183
  misc_feature 1..2700: note = source = /note="Description of Artificial Sequence: Synthetic coding sequence"
  source 1..2700: mol_type = other DNA

SEQ ID NO: 4279 - DNA, 2886 bp, synthetic construct; identical to SEQ ID NO: 4184
  misc_feature 1..2886: note = source = /note="Description of Artificial Sequence: Synthetic coding sequence"
  source 1..2886: mol_type = other DNA

SEQ ID NO: 4280 - DNA, 2535 bp, synthetic construct; identical to SEQ ID NO: 3960
  misc_feature 1..2535: note = source = /note="Description of Artificial Sequence: Synthetic coding sequence"
  source 1..2535: mol_type = other DNA

SEQ ID NO: 4281 - DNA, 3090 bp, synthetic construct
  misc_feature 1..3090: note = source = /note="Description of Artificial Sequence: Synthetic coding sequence"
  source 1..3090: mol_type = other DNA
atgccccccaccaagagcgtgagcgagcccgtgcccttcgagaccgaggcccccagcatgaccatcgtgcccaccaccgacatcgagcccgtgaccgtgagaaccgaggccaccgtgaccaccctggcccccaagaccagccagagaaccagaaccagaagacccagacccaagcacaagaccacccccagacccgagaccctgcagaccaagctggacttcggccccatcacccccggcaccagcagcgcccccaccaccaccaccaagagaaccagaagaccccaccccaagcccaagaccaccccccaccccgaggtgccccagaccaagctggtgcccgccaccatcctggagcccgtgctgagaaccgaggccagcggcaccaccgccgtgcccgccaccatcttcgagcccgtgagccccatcaaggaggcccccggcaccaccttcgtgcccgtgaccgacctggagcccgtgaccttcagaaccgagatccccgccaccaccctggccaccaagaccagcaagagaaccagaccccccagacccagacccaagaccacccccagcccccaggcccccgagaccaagcccgtgcccgccaccgtgctggagcccgtgaccctgagacccgaggccagcaccaccctggccagcaagaccagccagagaaccagaagacccagactgagaaccaagaccacccccagacccgaggcccccgagagcaagcccgtgcccaccgccgagctgaagcccgtgaccctgagaaccgagacctgggtgaccacccaggcccccaagaccagccagagaaccagaagacccagacccaagaccaagaccacccccagccccgaggtgccccagaccaagctggtgcccagcaccgacctggagcccggcaccctgagaaccgaggcccccaagaccatggtggtgaccaccgtgctggagcccgacaccttcagaaccaagttccccgagaccaccctggcccccaagacccagagaaccagaagacccagacccagacccaagaccaccagcagccccgaggtgccccagaacaagagcgtgagcgtgaccggcttcgagcccgtggtgcacagcaccgacgcccccggcaccaccttcgccctgaccgagctgcagaccctgatcctgaagcccgtgaccagccccagcctggagatgaccgagagccagcccgtgagcgacgtgctggagagcgtgaccctgagcaccgagagccccaaggagaccatcgcccccgccaagaccgactacgtgtaccccaccgccaaggcccccctgtggcccgaggagcccaagaccgaggtggtggagagcatcacctacgtgagcgagccccccgagaccaccctggagaccagccccctgcccagccagagcatcaccctgcccagccccgacgagccccagaccgagcccgcccccaagcagacccccagagccccccccaagcccaagaccagccccagacccagaatcccccagacccagcccgtgcccaaggtgccccagagagtgaccgccaagcccaagaccagccccagccccgaggtgagctacaccacccccgcccccaaggacgtgctgctgccccacaagccctaccccgaggtgagccagagcgagcccgcccccctggagaccagaggcatccccttcatccccatgatcagccccagccccagccaggaggagctgcagaccaccctggaggagaccgaccagagcacccaggagcccttcaccaccaagatccccagaaccaccgagctggccaagaccacccaggccccccacagattctacaccaccgtgagacccagaaccagcgacaagccccacatcagacccggcgtgaagcaggcccccagacccagcggcgccgacagaaacgtgagcgtggacagcacccaccccaccaagaagcccggcaccagaagaccccccctgccccccagacccacccaccccagaagaaagcccctgccccccaacaacgtgaccggcaagcccggcagcgccggcatcatcagcagcggccccatcaccaccccccccctgagaagcacccccagacccaccggcacccccctggagagaatcgagaccgacatcaagcagcccaccgtgcccgccagcggcgaggagctggagaacatcaccgacttcagcagcagccccaccagagagaccgaccccctgggcaagcccagattcaagggcccccacgtgagatacatccagaagcccgacaacagcccctgcagcatcaccgacagcgtgaagagattccccaaggaggaggccaccgagggcaacgccaccagccccccccagaacccccccaccaacctgaccgtggtgaccgtggagggctgccccagcttcgtgatcctggactgggagaagcccctgaacgacaccgtgaccgagtacgaggtgatcagcagagagaacggcagcttcagcggcaagaacaagagcatccagatgaccaaccagaccttcagcaccgtggagaacctgaagcccaacaccagctacgagttccaggtgaagcccaagaaccccctgggcgagggccccgtgagcaacaccgtggccttcagcaccgagagcgccgaccccagagtgagcgagcccgtgagcgccggcagagacgccatctggaccgagagacccttcaacagcgacagctacagcgagtgcaagggcaagcagtacgtgaagagaacctggtacaagaagttcgtgggcgtgcagctgtgcaacagcctgagatacaagatctacctgagcgacagcctgaccggcaagttctacaacatcggcgaccagagaggccacggcgaggaccactgccagttcgtggacagcttcctggacggcagaaccggccagcagctgaccagcgaccagctgcccatcaaggagggctacttcagagccgtgagacaggagcccgtgcagttcggcgagatcggcggccacacccagatcaactacgtgcagtggtacgagtgcggcaccaccatccccggcaagtggtag

SEQ ID NO: 4282 - DNA, 2355 bp, synthetic construct
  misc_feature 1..2355: note = source = /note="Description of Artificial Sequence: Synthetic coding sequence"
  source 1..2355: mol_type = other DNA
atgaccatcgtgcccaccaccgacatcgagcccgtgaccgtgagaaccgaggccaccgtgaccaccctggcccccaagaccagccagagaaccagaaccagaagacccagacccaagcacaagaccacccccagacccgagaccctgcagaccaagctggacttcggccccatcacccccggcaccagcagcgcccccaccaccaccaccaagagaaccagaagaccccaccccaagcccaagaccaccccccaccccgaggtgccccagaccaagctggcccccaaggtgccccagagaacccacagaccccaccccaagcccaagaccaccctgagccccgaggagctgcagaccgagctggtgcccgtgaccgacctggagcccgtgaccttcagaaccgagatccccgccaccaccctggccaccaagaccagcaagagaaccagaccccccagacccagacccaagaccacccccagcccccaggcccccgagaccaagcccgtgcccgccaccgtgctggagcccgtgaccctgagacccgaggccagcaccaccctggccagcaagaccagccagagaaccagaagacccagactgagaaccaagaccacccccagacccgaggcccccgagagcaagcccgcccccaagcagacccccagagccccccccaagcccaagaccagccccagacccagaatcccccagacccagcccgtgcccaaggtgccccagagagtgaccgccaagcccaagaccagccccagccccgaggtgagctacaccacccccgcccccaaggacgtgctgctgccccacaagccctaccccgaggtgagccagagcgagcccgcccccctggagaccagaggcatccccttcatccccatgatcagccccagccccagccaggaggagctgcagaccaccctggaggagaccgaccagagcacccaggagcccttcaccaccaagatccccagaaccaccgagctggccaagaccacccaggccccccacagattctacaccaccgtgagacccagaaccagcgacaagccccacatcagacccgtgctgaacagaaccaccaccagacccaccagacccaagcccagcggcatgcccagcggcaacggcgtgggcaccggcgtgaagcaggcccccagacccagcggcgccgacagaaacgtgagcgtggacagcacccaccccaccaagaagcccggcaccagaagaccccccctgccccccagacccacccaccccagaagaaagcccctgccccccaacaacgtgaccggcaagcccggcagcgccggcatcatcagcagcggccccatcaccaccccccccctgagaagcacccccagacccaccggcacccccctggagagaatcgagaccgacatcaagcagcccaccgtgcccgccagcggcgaggagctggagaacatcaccgacttcagcagcagccccaccagagagaccgaccccctgggcaagcccagattcaagggcccccacgtgagatacatccagaagcccgacaacagcccctgcagcatcaccgacagcgtgaagagattccccaaggaggaggccaccgagggcaacgccaccagccccccccagaacccccccaccaacctgaccgtggtgaccgtggagggctgccccagcttcgtgatcctggactgggagaagcccctgaacgacaccgtgaccgagtacgaggtgatcagcagagagaacggcagcttcagcggcaagaacaagagcatccagatgaccaaccagaccttcagcaccgtggagaacctgaagcccaacaccagctacgagttccaggtgaagcccaagaaccccctgggcgagggccccgtgagcaacaccgtggccttcagcaccgagagcgccgaccccagagtgagcgagcccgtgagcgccggcagagacgccatctggaccgagagacccttcaacagcgacagctacagcgagtgcaagggcaagcagtacgtgaagagaacctggtacaagaagttcgtgggcgtgcagctgtgcaacagcctgagatacaagatctacctgagcgacagcctgaccggcaagttctacaacatcggcgaccagagaggccacggcgaggaccactgccagttcgtggacagcttcctggacggcagaaccggccagcagctgaccagcgaccagctgcccatcaaggagggctacttcagagccgtgagacaggagcccgtgcagttcggcgagatcggcggccacacccagatcaactacgtgcagtggtacgagtgcggcaccaccatccccggcaagtggtag

SEQ ID NO: 4283 - DNA, 1584 bp, synthetic construct
  misc_feature 1..1584: note = source = /note="Description of Artificial Sequence: Synthetic coding sequence"
  source 1..1584: mol_type = other DNA
atgctgatgctgttcgtgttcggcgtgctgctgcacgaggtgagcctgagcggccagaacgaggccccccccaacacccacagcatccccggcgagcccctgtacaactacgccagcatcagactgcccgaggagcacatccccttcttcctgcacaacaacagacacatcgccaccgtgtgcagaaaggacagcctgtgcccctacaagaagcacctggagaagctgaagtactgctggggctacgagaagagctgcaagcccgagttcagattcggctaccccgtgtgcagctacgtggacatgggctggaccgacaccctggagagcgccgaggacatcttctggaagcaggccgacttcggctacgccagagagagactggaggagatgcacgtgctgtgccagcccaaggagaccagcgacagcagcctggtgtgcagcagatacctgcagtactgcagagccaccaacctgtacctggacctgagaaacatcaagagaaaccacgacagattcaaggaggacttcttccagagcggcgagatcggcggccactgcaagctggacatcagaaccctgaccagcgagggccagagaaagagccccctgcagagctggttcgccgagctgcagagctacacccagctgaacttcagacccatcgaggacgccaagtgcgacatcgtgatcgagaagcccacctacttcatgaagctggacgccggcgtgaacatgtaccaccacttctgcgacttcatcaacctgtacatcacccagcacgtgaacaacagcttcagcaccgacgtgtacatcgtgatgtgggacaccagcagctacggctacggcgacctgttcagcgacacctggaacgccttcaccgactacgacgtgatccacctgaagacctacgacagcaagagagtgtgcttcaaggaggccgtgttcagcctgctgcccagaatgagatacggcctgttctacaacacccccctgatcagcggctgccagaacaccggcctgttcagagccttcgcccagcacgtgctgcacagactgaacatcacccaggagggccccaaggacggcaagatcagagtgaccatcctggccagaagcaccgagtacagaaagatcctgaaccagaacgagctggtgaacgccctgaagaccgtgagcaccttcgaggtgcagatcgtggactacaagtacagagagctgggcttcctggaccagctgagaatcacccacaacaccgacatcttcatcggcatgcacggcgccggcctgacccacctgctgttcctgcccgactgggccgccgtgttcgagctgtacaactgcgaggacgagagatgctacctggacctggccagactgagaggcgtgcactacatcacctggagaagacagaacaaggtgttcccccaggacaagggccaccaccccaccctgggcgagcaccccaagttcaccaactacagcttcgacgtggaggagttcatgtacctggtgctgcaggccgccgaccacgtgctgcagcaccccaagtggcccttcaagaagaagcacgacgagctgtag

SEQ ID NO: 4284 - DNA, 2004 bp, synthetic construct; identical to SEQ ID NO: 3682
  misc_feature 1..2004: note = source = /note="Description of Artificial Sequence: Synthetic coding sequence"
  source 1..2004: mol_type = other DNA

SEQ ID NO: 4285 - DNA, 1101 bp, synthetic construct
  misc_feature 1..1101: note = source = /note="Description of Artificial Sequence: Synthetic coding sequence"
  source 1..1101: mol_type = other DNA
atgcccatgatcagcgtgctgggcaagatgttcctgtggcagagagagggccccggcggcagatggacctgccagaccagcagaagagtgagcagcgaccccgcctgggccgtggagtggatcgagctgcccagaggcctgagcctgagcagcctgggcagcgccagaaccctgagaggctggagcagaagcagcagacccagcagcgtggacagccaggacctgcccgaggtgaacgtgggcgacaccgtggccatgctgcccaagagcagaagagccctgaccatccaggagatcgccgccctggccagaagcagcctgcacggcatcagccaggtggtgaaggaccacgtgaccaagcccaccgccatggcccagggcagagtggcccacctgatcgagtggaagggctggagcaagcccagcgacagccccgccgccctggagagcgccttcagcagctacagcgacctgagcgagggcgagcaggaggccagattcgccgccggcgtggccgagcagttcgccatcgccgaggccaagctgagagcctggagcagcgtggacggcgaggacagcaccgacgacagctacgacgaggacttcgccggcggcatggacaccgacatggccggccagctgcccctgggcccccacctgcaggacctgttcaccggccacagattcagcagacccgtgagacagggcagcgtggagcccgagagcgactgcagccagaccgtgagccccgacaccctgtgcagcagcctgtgcagcctggaggacggcctgctgggcagccccgccagactggccagccagctgctgggcgacgagctgctgctggccaagctgccccccagcagagagagcgccttcagaagcctgggccccctggaggcccaggacagcctgtacaacagccccctgaccgagagctgcctgagccccgccgaggaggagcccgccccctgcaaggactgccagcccctgtgcccccccctgaccggcagctgggagagacagagacaggccagcgacctggccagcagcggcgtggtgagcctggacgaggacgaggccgagcccgaggagcagtag

SEQ ID NO: 4286 - DNA, 5172 bp, synthetic construct
  misc_feature 1..5172: note = source = /note="Description of Artificial Sequence: Synthetic coding sequence"
  source 1..5172: mol_type = other DNA
atgcagttccagctgaccctgttcctgcacctgggctggctgagctacagcaaggcccaggacgactgcaacagaggcgcctgccaccccaccaccggcgacctgctggtgggcagaaacacccagctgatggccagcagcacctgcggcctgagcagagcccagaagtactgcatcctgagctacctggagggcgagcagaagtgcttcatctgcgacagcagattcccctacgacccctacgaccagcccaacagccacaccatcgagaacgtgatcgtgagcttcgagcccgacagagagaagaagtggtggcagagcgagaacggcctggaccacgtgagcatcagactggacctggaggccctgttcagattcagccacctgatcctgaccttcaagaccttcagacccgccgccatgctggtggagagaagcaccgactacggccacaactggaaggtgttcaagtacttcgccaaggactgcgccaccagcttccccaacatcaccagcggccaggcccagggcgtgggcgacatcgtgtgcgacagcaagtacagcgacatcgagcccagcaccggcggcgaggtggtgctgaaggtgctggaccccagcttcgagatcgagaacccctacagcccctacatccaggacctggtgaccctgaccaacctgagaatcaacttcaccaagctgcacaccctgggcgacgccctgctgggcagaagacagaacgacagcctggacaagtactactacgccctgtacgagatgatcgtgagaggcagctgcttctgcaacggccacgccagcgagtgcagacccatgcagaagatgagaggcgacgtgttcagcccccccggcatggtgcacggccagtgcgtgtgccagcacaacaccgacggccccaactgcgagagatgcaaggacttcttccaggacgccccctggagacccgccgccgacctgcaggacaacgcctgcagaagctgcagctgcaacagccacagcagcagatgccacttcgacatgaccacctacctggccagcggcggcctgagcggcggcgtgtgcgaggactgccagcacaacaccgagggccagcactgcgacagatgcagacccctgttctacagagaccccctgaagaccatcagcgacccctacgcctgcatcccctgcgagtgcgaccccgacggcaccatcagcggcggcatctgcgtgagccacagcgaccccgccctgggcagcgtggccggccagtgcctgtgcaaggagaacgtggagggcgccaagtgcgaccagtgcaagcccaaccactacggcctgagcgccaccgaccccctgggctgccagccctgcgactgcaaccccctgggcagcctgcccttcctgacctgcgacgtggacaccggccagtgcctgtgcctgagctacgtgaccggcgcccactgcgaggagtgcaccgtgggctactggggcctgggcaaccacctgcacggctgcagcccctgcgactgcgacatcggcggcgcctacagcaacgtgtgcagccccaagaacggccagtgcgagtgcagaccccacgtgaccggcagaagctgcagcgagcccgcccccggctacttcttcgcccccctgaacttctacctgtacgaggccgaggaggccaccaccctgcagggcctggcccccctgggcagcgagaccttcggccagagccccgccgtgcacgtggtgctgggcgagcccgtgcccggcaaccccgtgacctggaccggccccggcttcgccagagtgctgcccggcgccggcctgagattcgccgtgaacaacatccccttccccgtggacttcaccatcgccatccactacgagacccagagcgccgccgactggaccgtgcagatcgtggtgaacccccccggcggcagcgagcactgcatccccaagaccctgcagagcaagccccagagcttcgccctgcccgccgccaccagaatcatgctgctgcccacccccatctgcctggagcccgacgtgcagtacagcatcgacgtgtacttcagccagcccctgcagggcgagagccacgcccacagccacgtgctggtggacagcctgggcctgatcccccagatcaacagcctggagaacttctgcagcaagcaggacctggacgagtaccagctgcacaactgcgtggagatcgccagcgccatgggcccccaggtgctgcccggcgcctgcgagagactgatcatcagcatgagcgccaagctgcacgacggcgccgtggcctgcaagtgccacccccagggcagcgtgggcagcagctgcagcagactgggcggccagtgccagtgcaagcccctggtggtgggcagatgctgcgacagatgcagcaccggcagctacgacctgggccaccacggctgccacccctgccactgccacccccagggcagcaaggacaccgtgtgcgaccaggtgaccggccagtgcccctgccacggcgaggtgagcggcagaagatgcgacagatgcctggccggctacttcggcttccccagctgccacccctgcccctgcaacagattcgccgagctgtgcgaccccgagaccggcagctgcttcaactgcggcggcttcaccaccggcagaaactgcgagagatgcatcgacggctactacggcaaccccagcagcggccagccctgcagaccctgcctgtgccccgacgaccccagcagcaaccagtacttcgcccacagctgctaccagaacctgtggagcagcgacgtgatctgcaactgcctgcagggctacaccggcacccagtgcggcgagtgcagcaccggcttctacggcaaccccagaatcagcggcgccccctgccagccctgcgcctgcaacaacaacatcgacgtgaccgaccccgagagctgcagcagagtgaccggcgagtgcctgagatgcctgcacaacacccagggcgccaactgccagctgtgcaagcccggccactacggcagcgccctgaaccagacctgcagaagatgcagctgccacgccagcggcgtgagccccatggagtgcccccccggcggcggcgcctgcctgtgcgaccccgtgaccggcgcctgcccctgcctgcccaacgtgaccggcctggcctgcgacagatgcgccgacggctactggaacctggtgcccggcagaggctgccagagctgcgactgcgaccccagaaccagccagagcagccactgcgaccagctgaccggccagtgcccctgcaagctgggctacggcggcaagagatgcagcgagtgccaggagaactactacggcgacccccccggcagatgcatcccctgcgactgcaacagagccggcacccagaagcccatctgcgaccccgacaccggcatgtgcagatgcagagagggcgtgagcggccagagatgcgacagatgcgccagaggccacagccaggagttccccacctgcctgcagtgccacctgtgcttcgaccagtgggaccacaccatcagcagcctgagcaaggccgtgcagggcctgatgagactggccgccaacatggaggacaagagagagaccctgcccgtgtgcgaggccgacttcaaggacctgagaggcaacgtgagcgagatcgagagaatcctgaagcaccccgtgttccccagcggcaagttcctgaaggtgaaggactaccacgacagcgtgagaagacagatcatgcagctgaacgagcagctgaaggccgtgtacgagttccaggacctgaaggacaccatcgagagagccaagaacgaggccgacctgctgctggaggacctgcaggaggagatcgacctgcagagcagcgtgctgaacgccagcatcgccgacagcagcgagaacatcaagaagtactaccacatcagcagcagcgccgagaagaagatcaacgagaccagcagcaccatcaacaccagcgccaacaccagaaacgacctgctgaccatcctggacaccctgaccagcaagggcaacctgagcctggagagactgaagcagatcaagatccccgacatccagatcctgaacgagaaggtgtgcggcgaccccggcaacgtgccctgcgtgcccctgccctgcggcggcgccctgtgcaccggcagaaagggccacagaaagtgcagaggccccggctgccacggcagcctgaccctgagcaccaacgccctgcagaaggcccaggaggccaagagcatcatcagaaacctggacaagcaggtgagaggcctgaagaaccagatcgagagcatcagcgagcaggccgaggtgagcaagaacaacgccctgcagctgagagagaagctgggcaacatcagaaaccagagcgacagcgaggaggagaacatcaacctgttcatcaagaaggtgaagaacttcctgctggaggagaacgtgccccccgaggacatcgagaaggtggccaacggcgtgctggacatccacctgcccatccccagccagaacctgaccgacgagctggtgaagatccagaagcacatgcagctgtgcgaggactacagaaccgacgagaacagactgaacgaggaggccgacggcgcccagaagctgctggtgaaggccaaggccgccgagaaggccgccaacatcctgctgaacctggacaagaccctgaaccagctgcagcaggcccagatcacccagggcagagccaacagcaccatcacccagctgaccgccaacatcaccaagatcaagaagaacgtgctgcaggccgagaaccagaccagagagatgaagagcgagctggagctggccaagcagagaagcggcctggaggacggcctgagcctgctgcagaccaagctgcagagacaccaggaccacgccgtgaacgccaaggtgcaggccgagagcgcccagcaccaggccggcagcctggagaaggagttcgtggagctgaagaagcagtacgccatcctgcagagaaagaccagcaccaccggcctgaccaaggagaccctgggcaaggtgaagcagctgaaggacgccgccgagaagctggccggcgacaccgaggccaagatcagaagaatcaccggctgcttccagaacagcgccagatag

SEQ ID NO: 4287 - DNA, 5286 bp, synthetic construct
  misc_feature 1..5286: note = source = /note="Description of Artificial Sequence: Synthetic coding sequence"
  source 1..5286: mol_type = other DNA
atgcagttccagctgaccctgttcctgcacctgggctggctgagctacagcaaggcccaggacgactgcaacagaggcgcctgccaccccaccaccggcgacctgctggtgggcagaaacacccagctgatggccagcagcacctgcggcctgagcagagcccagaagtactgcatcctgagctacctggagggcgagcagaagtgcttcatctgcgacagcagattcccctacgacccctacgaccagcccaacagccacaccatcgagaacgtgatcgtgagcttcgagcccgacagagagaagaagtggtggcagagcgagaacggcctggaccacgtgagcatcagactggacctggaggccctgttcagattcagccacctgatcctgaccttcaagaccttcagacccgccgccatgctggtggagagaagcaccgactacggccacaactggaaggtgttcaagtacttcgccaaggactgcgccaccagcttccccaacatcaccagcggccaggcccagggcgtgggcgacatcgtgtgcgacagcaagtacagcgacatcgagcccagcaccggcggcgaggtggtgctgaaggtgctggaccccagcttcgagatcgagaacccctacagcccctacatccaggacctggtgaccctgaccaacctgagaatcaacttcaccaagctgcacaccctgggcgacgccctgctgggcagaagacagaacgacagcctggacaagtactactacgccctgtacgagatgatcgtgagaggcagctgcttctgcaacggccacgccagcgagtgcagacccatgcagaagatgagaggcgacgtgttcagcccccccggcatggtgcacggccagtgcgtgtgccagcacaacaccgacggccccaactgcgagagatgcaaggacttcttccaggacgccccctggagacccgccgccgacctgcaggacaacgcctgcagaagctgcagctgcaacagccacagcagcagatgccacttcgacatgaccacctacctggccagcggcggcctgagcggcggcgtgtgcgaggactgccagcacaacaccgagggccagcactgcgacagatgcagacccctgttctacagagaccccctgaagaccatcagcgacccctacgcctgcatcccctgcgagtgcgaccccgacggcaccatcagcggcggcatctgcgtgagccacagcgaccccgccctgggcagcgtggccggccagtgcctgtgcaaggagaacgtggagggcgccaagtgcgaccagtgcaagcccaaccactacggcctgagcgccaccgaccccctgggctgccagccctgcgactgcaaccccctgggcagcctgcccttcctgacctgcgacgtggacaccggccagtgcctgtgcctgagctacgtgaccggcgcccactgcgaggagtgcaccgtgggctactggggcctgggcaaccacctgcacggctgcagcccctgcgactgcgacatcggcggcgcctacagcaacgtgtgcagccccaagaacggccagtgcgagtgcagaccccacgtgaccggcagaagctgcagcgagcccgcccccggctacttcttcgcccccctgaacttctacctgtacgaggccgaggaggccaccaccctgcagggcctggcccccctgggcagcgagaccttcggccagagccccgccgtgcacgtggtgctgggcgagcccgtgcccggcaaccccgtgacctggaccggccccggcttcgccagagtgctgcccggcgccggcctgagattcgccgtgaacaacatccccttccccgtggacttcaccatcgccatccactacgagacccagagcgccgccgactggaccgtgcagatcgtggtgaacccccccggcggcagcgagcactgcatccccaagaccctgcagagcaagccccagagcttcgccctgcccgccgccaccagaatcatgctgctgcccacccccatctgcctggagcccgacgtgcagtacagcatcgacgtgtacttcagccagcccctgcagggcgagagccacgcccacagccacgtgctggtggacagcctgggcctgatcccccagatcaacagcctggagaacttctgcagcaagcaggacctggacgagtaccagctgcacaactgcgtggagatcgccagcgccatgggcccccaggtgctgcccggcgcctgcgagagactgatcatcagcatgagcgccaagctgcacgacggcgccgtggcctgcaagtgccacccccagggcagcgtgggcagcagctgcagcagactgggcggccagtgccagtgcaagcccctggtggtgggcagatgctgcgacagatgcagcaccggcagctacgacctgggccaccacggctgccacccctgccactgccacccccagggcagcaaggacaccgtgtgcgaccaggtgaccggccagtgcccctgccacggcgaggtgagcggcagaagatgcgacagatgcctggccggctacttcggcttccccagctgccacccctgcccctgcaacagattcgccgagctgtgcgaccccgagaccggcagctgcttcaactgcggcggcttcaccaccggcagaaactgcgagagatgcatcgacggctactacggcaaccccagcagcggccagccctgcagaccctgcctgtgccccgacgaccccagcagcaaccagtacttcgcccacagctgctaccagaacctgtggagcagcgacgtgatctgcaactgcctgcagggctacaccggcacccagtgcggcgagtgcagcaccggcttctacggcaaccccagaatcagcggcgccccctgccagccctgcgcctgcaacaacaacatcgacgtgaccgaccccgagagctgcagcagagtgaccggcgagtgcctgagatgcctgcacaacacccagggcgccaactgccagctgtgcaagcccggccactacggcagcgccctgaaccagacctgcagaagatgcagctgccacgccagcggcgtgagccccatggagtgcccccccggcggcggcgcctgcctgtgcgaccccgtgaccggcgcctgcccctgcctgcccaacgtgaccggcctggcctgcgacagatgcgccgacggctactggaacctggtgcccggcagaggctgccagagctgcgactgcgaccccagaaccagccagagcagccactgcgaccagctgaccggccagtgcccctgcaagctgggctacggcggcaagagatgcagcgagtgccaggagaactactacggcgacccccccggcagatgcatcccctgcgactgcaacagagccggcacccagaagcccatctgcgaccccgacaccggcatgtgcagatgcagagagggcgtgagcggccagagatgcgacagatgcgccagaggccacagccaggagttccccacctgcctgcagtgccacctgtgcttcgaccagtgggaccacaccatcagcagcctgagcaaggccgtgcagggcctgatgagactggccgccaacatggaggacaagagagagaccctgcccgtgtgcgaggccgacttcaaggacctgagaggcaacgtgagcgagatcgagagaatcctgaagcaccccgtgttccccagcggcaagttcctgaaggtgaaggactaccacgacagcgtgagaagacagatcatgcagctgaacgagcagctgaaggccgtgtacgagttccaggacctgaaggacaccatcgagagagccaagaacgaggccgacctgctgctggaggacctgcaggaggagatcgacctgcagagcagcgtgctgaacgccagcatcgccgacagcagcgagaacatcaagaagtactaccacatcagcagcagcgccgagaagaagatcaacgagaccagcagcaccatcaacaccagcgccaacaccagaaacgacctgctgaccatcctggacaccctgaccagcaagggcaacctgagcctggagagactgaagcagatcaagatccccgacatccagatcctgaacgagaaggtgtgcggcgaccccggcaacgtgccctgcgtgcccctgccctgcggcggcgccctgtgcaccggcagaaagggccacagaaagtgcagaggccccggctgccacggcagcctgaccctgagcaccaacgccctgcagaaggcccaggaggccaagagcatcatcagaaacctggacaagcaggtgagaggcctgaagaaccagatcgagagcatcagcgagcaggccgaggtgagcaagaacaacgccctgcagctgagagagaagctgggcaacatcagaaaccagagcgacagcgaggaggagaacatcaacctgttcatcaagaaggtgaagaacttcctgctggaggagaacgtgccccccgaggacatcgagaaggtggccaacggcgtgctggacatccacctgcccatccccagccagaacctgaccgacgagctggtgaagatccagaagcacatgcagctgtgcgaggactacagaaccgacgagaacagactgaacgaggaggccgacggcgcccagaagctgctggtgaaggccaaggccgccgagaaggccgccaacatcctgctgaacctggacaagaccctgaaccagctgcagcaggcccagatcacccagggcagagccaacagcaccatcacccagctgaccgccaacatcaccaagatcaagaagaacgtgctgcaggccgagaaccagaccagagagatgaagagcgagctggagctggccaagcagagaagcggcctggaggacggcctgagcctgctgcagaccaagctgcagagacaccaggaccacgccgtgaacgccaaggtgcaggccgagagcgcccagcaccaggccggcagcctggagaaggagttcgtggagctgaagaagcagtacgccatcctgcagagaaagaccagcaccaccggcctgaccaaggagaccctgggcaaggtgaagcagctgaaggacgccgccgagaagctggccggcgacaccgaggccaagatcagaagaatcaccgacctggagagaaagatccaggacctgaacctgagcagacaggccaaggccgaccagctgagaatcctggaggaccaggtggtggccatcaagaacgagatcgtggagcaggagaagaagtacgccagatgctacagctag

SEQ ID NO: 4288 - DNA, 1455 bp, synthetic construct
  misc_feature 1..1455: note = source = /note="Description of Artificial Sequence: Synthetic coding sequence"
  source 1..1455: mol_type = other DNA
atgggcgccgaggccctgcccggccccgacgaggccgccgccgccgccgccttcgccgaggtgaccaccgtgaccgtggccaacgtgggcgccgccgccgacaacgtgttcaccaccagcgtggccaacgccgccagcatcagcggccacgtgctgagcggcagaaccgccctgcagatcggcgacagcctgaacaccgagaaggccaccctgatcgtggtgcacaccgacggcagcatcgtggagaccaccggcctgaagggccccgccgcccccctgacccccggcccccagagcccccccacccccctggcccccggccaggagaagggcggcaccaagtacaactgggaccccagcgtgtacgacagcgagctgcccgtgagatgcagaaacatcagcggcaccctgtacaagaacagactgggcagcggcggcagaggcagatgcatcaagcagggcgagaactggtacagccccaccgagttcgaggccatggccggcagagccagcagcaaggactggaagagaagcatcagatacgccggcagacccctgcagtgcctgatccaggacggcatcctgaacccccacgccgccagctgcacctgcgccgcctgctgcgacgacatgaccctgagcggccccgtgagactgttcgtgccctacaagagaagaaagaaggagaacgagctgcccaccacccccgtgaagaaggacagccccaagaacatcaccctgctgcccgccaccgccgccaccaccttcaccgtgacccccagcggccagatcaccaccagcggcgccctgaccttcgacagagccagcaccgtggaggccaccgccgtgatcagcgagagccccgcccagggcgacgtgttcgccggcgccaccgtgcaggaggccagcgtgcagcccccctgcagagccagccaccccgagccccactaccccggctaccaggacagctgccagatcgcccccttccccgaggccgccctgcccaccagccaccccaagatcgtgctgaccagcctgcccgccctggccgtgcccccccccacccccaccaaggccgccccccccgccctggtgaacggcctggagctgagcgagcccagaagctggctgtacctggaggagatggtgaacagcctgctgaacaccgcccagcagctgaagaccctgttcgagcaggccaagcacgccagcacctacagagaggccgccaccaaccaggccaagatccacgccgacgccgagagaaaggagcagagctgcgtgaactgcggcagagaggccatgagcgagtgcaccggctgccacaaggtgaactactgcagcaccttctgccagagaaagagatggagcctgaccatgctgaccagcctggtgagcatcagctggctgagagccatcctgccctgccagccccccaaggtgctgggcctgtag

SEQ ID NO: 4289 - DNA, 1512 bp, synthetic construct
  misc_feature 1..1512: note = source = /note="Description of Artificial Sequence: Synthetic coding sequence"
  source 1..1512: mol_type = other DNA
atgagcggcgccctgctgtggcccctgctgcccctgctgctgctgctgctgagcgccagagacggcgtgagagccgcccagccccaggcccccggctacctgatcgccgcccccagcgtgttcagagccggcgtggaggaggtgatcagcgtgaccatcttcaacagccccagagaggtgaccgtgcaggcccagctggtggcccagggcgagcccgtggtgcagagccagggcgccatcctggacaagggcaccatcaagctgaaggtgcccaccggcctgagaggccaggccctgctgaaggtgtggggcagaggctggcaggccgaggagggccccctgttccacaaccagaccagcgtgaccgtggacggcagaggcgccagcgtgttcatccagaccgacaagcccgtgtacagaccccagcacagagtgctgatcagcatcttcaccgtgagccccaacctgagacccgtgaacgagaagctggaggcctacatcctggaccccagaggcagcagaatgatcgagtggagacacctgaagcccttctgctgcggcatcaccaacatgagcttccccctgagcgaccagcccgtgctgggcgagtggttcatcttcgtggagatgcagggccacgcctacaacaagagcttcgaggtgcagaagtacgtgctgcccaagttcgagctgctgatcgacccccccagatacatccaggacctggacgcctgcgagaccggcaccgtgagagccagatacaccttcggcaagcccgtggccggcgccctgatgatcaacatgaccgtgaacggcgtgggctactacagccacgaggtgggcagacccgtgctgagaaccaccaagatcctgggcagcagagacttcgacatctgcgtgagagacatgatccccgccgacgtgcccgagcacttcagaggcagagtgagcatctgggccatggtgaccagcgtggacggcagccagcaggtggccttcgacgacagcacccccgtgcagagacagctggtggacatcagatacagcaaggacaccagaaagcagttcaagcccggcctggcctacgtgggcaaggtggagctgagctaccccgacggcagccccgccgagggcgtgaccgtgcagatcaaggccgagctgacccccaaggacaacatctacaccagcgaggtggtgagccagagaggcctggtgggcttcgagatccccagcatccccaccagcgcccagcacgtgtggctggaggtgttccaggagctggaggactacgacgtgagcgacagcttcggcgtgagcagagaggacggccccttctggtgggccggcctgaccgcccagagaagaagaagaagcagcgtgttcccctggccctggggcatcaccaaggacagcggcttcgccttcaccgtgagaagaggcaacggcaccggcggcgacgacagacccagcgagcccgagccccccgccggcagatggcccctgcacagatag

SEQ ID NO: 4290 - DNA, 144 bp, synthetic construct
  misc_feature 1..144: note = source = /note="Description of Artificial Sequence: Synthetic coding sequence"
  source 1..144: mol_type = other DNA
atgaagctgtgcgtgaccgtgctgagcctgctggtgctggtggccgccttctgcagcctggccctgagcgcccccaaggccagcaagagcgccctgacccccgtgagccccggcagcagaagcacctgcatgacctggaactag

SEQ ID NO: 4291 - DNA, 861 bp, synthetic construct
  misc_feature 1..861: note = source = /note="Description of Artificial Sequence: Synthetic coding sequence"
  source 1..861: mol_type = other DNA
atggaggtgtacatcagacacctggagaaggtgctgagaagatacgtgcagagactgcagtggctgctgagcggccccgtgctgtgcagcagaacctggtacagacagagcatggacagaggcgtgatgatgaccgccgccagcggcagcagaagactgttcggcaccgtgctggagagcaaggtgtgcatcctgctggacaccagcggcagcatgggcccctacctgcagcaggtgaagaccgagctggtgctgctgatctgggagcagctgagaaagtgctgcgacagcttcaacctgctgagcttcgccgagagcttccagagctggcaggacaccctggtggagaccaccgacgccgcctgccacgaggccatgcagtgggtgacccacctgcaggcccagggcagcaccagcatcctgcaggccctgctgaaggccttcagcttccacgacctggagggcctgtacctgctgaccgacggcaagcccgacaccagctgcagcctggtgctgaacgaggtgcagaagctgagagagaagagagacgtgaaggtgcacaccatcagcctgaactgcagcgacagagccgccgtggagttcctgagaaagctggccagcttcaccggcggcagataccactgccccgtgggcgaggacaccctgagcaagatccacagcctgctgaccaagggcttcatcaacgagaaggaccccaccctgccccccttcgagggcgacgacctgagaatcctggcccaggagatcaccaaggccagaagcttcctgtggcaggcccagagcttcagaagccagctgcagaagaagaacgacgccgagcccaaggtgaccctgagctag

SEQ ID NO: 4292 - DNA, 3555 bp, synthetic construct
  misc_feature 1..3555: note = source = /note="Description of Artificial Sequence: Synthetic coding sequence"
  source 1..3555: mol_type = other DNA
atgaagaagtacagaaagatcagcatcggctgcttcgccatggccacccagaccagccacgtgttccacggccaggagaacatgttcctggagaaccactgcatcagaagaaacaccggcagagacagcaagaagcccctgaagcagaagaacatgaacggcctgggccagaacagcgacaacggcctgctggtgacccacgtgaaccagacccaggacctgctgagactgcagggcagcgagacccagagcagcgactgggaggacagcgaggactggctgagcgcccacagcctgaagtgccagaagctgaccctggccgacctgatcagccagggcaccgaggtgctggaggagggcaccaacgtggtgcagaagatctgcttcagcacccagatcatcagacacttcgagagcaagctgagcgacaccatcgaggtgtaccaggagagaatccagtggctgaccgagaacagcaagaaggccttcggcctgatcaagggcgccagagtgagcatcctgatcgacgtgagcgccatcagcagcggcccccagaaggaggagttccagaaggacctgatgagcctgatcgacgagcagctgagccacaaggagaagctgttcgtgctgagcttcggcaccaacgccggcagcctgtggcccgaccccatggaggtgagcgccagcaccctgcaggagctgaagctgtgggtgaagaccctgcagcccgacggcggcagcaacctgctgcaggccctgaagaagatcttcaccctgaagggcctggacagcctggtggccatcatgagaagctgccccgaccagcccagcgagatcctgagcgactacatccagcagagcaccatgggcagagacctgatcatccacttcatcacctacagatgcgacgaccagatgccccccgccgtgctgaagaacctggccgaggccgtgagaggctactaccactgctacagccccaagatggagcactacaccagcagagacatggacgagctgctggccgagatccagaaggcccagagcctgctgagccacgtgcaggccctgcagcacagcagcccctgcgaggccctgacctgcaccatggaggagatcagcaccgagatcaccaacggccccctgatcagcctgctgcccaagccccccaagcacgacgcccccctgaccatcgagttccccaacctggacaagaccagcgccgagtggctgaaggtgaacggcctgaaggccaagaagctgagcctgtaccaggtgctggcccccaacgccttcagccccgtggaggagttcgtgcccatcctgcagaagaccgtgagcagcaccatccacgagaaggccatgatccagttcgagtggcacgacggcaccgtgaagaacatccacgtggacccccccttcctgtacaagtaccagcagcagctgagcagagccatgagaatgtacgagagaagaatcgagtggctgagcctggccagcagaagaatctggggcaccgtgtgcgagaagagagtggtggtgctgctggacatcagcgccaccaacagcatgtacatcatccacatccagcacagcctgagactgctgctggaggagcagctgagcaacaaggactgcttcaacctgatcgccttcggcagcaccatcgagagctggagacccgagatggtgcccgtgagccacaacaacctgcagagcgcctggagatgggccctgaacctgagatgcagaggcagcagaaacgtgctgagcgccctgagaaaggccgtggaggtggacttcaaggacaaggacaagcaccagagccagggcatctacctgttcaccggcggcatccccgaccaggacatgcccaccctgagcgcctacatggccgaggcctgcggcggctgcgacctgcagctgaacgtgtgcctgttctacgtgggcgagcccaagatggacaccaccccccccgccagatacgccagccacaccgacaccgccgccgcctacaaggaggtgaccagagccgccggcggcagattccactggttcggcgacaccggcatctacgagagcgacgacatcaacagcatcatgagcgagatggagaaggccctgaactacagccagaagtgcgccttcctgatggccagcctgaagaaccacagcggcaaggtgctgggcagcagcgccctgcccaaggagaagcccaagaccctgcagctgagaagccagcccaagaagctgtgcccccccagacccaccgtgcccctgggcgccagaatgagcatcaaggacgaccccgacagagagaagagcccccccctgaagagcctgaagtggagacccctgagcagcagagtgggcatcagccccgccgccgcccagcccaccaaggagggcatgatggagctgagaagaaagaccaagagcagagaggccgagaccagcctgctgctgttctacaccgagaagggcaacgacgtgggcagcgtgtacaagaagtacccccagggcagaggcctgagaagaaccagcagcagcatcgacctgcccagaaaggacaccgtgtgcagcagccaggagtgggtggccaagtacggcctgaagaagctgaagctggagatcagcagatgcatgggccccaactgcacccaccagaagagcggccagagaagcgccagcgccaagcactgcagcatcttccccagcgtggagatccacggcgtggtgagacacatccagtggacccccagagagatggaggtgtacatcagacacctggagaaggtgctgagaagatacgtgcagagactgcagtggctgctgagcggcagcagaagactgttcggcaccgtgctggagagcaaggtgtgcatcctgctggacaccagcggcagcatgggcccctacctgcagcaggtgaagaccgagctggtgctgctgatctgggagcagctgagaaagtgctgcgacagcttcaacctgctgagcttcgccgagagcttccagagctggcaggacaccctggtggagaccaccgacgccgcctgccacgaggccatgcagtgggtgacccacctgcaggcccagggcagcaccagcatcctgcaggccctgctgaaggccttcagcttccacgacctggagggcctgtacctgctgaccgacggcaagcccgacaccagctgcagcctggtgctgaacgaggtgcagaagctgagagagaagagagacgtgaaggtgcacaccatcagcctgaactgcagcgacagagccgccgtggagttcctgagaaagctggccagcttcaccggcggcagataccactgccccgtgggcgaggacaccctgagcaagatccacagcctgctgaccaagggcttcatcaacgagaaggaccccaccctgccccccttcgagggcgacgacctgagaatcctggcccaggagatcaccaaggccagaagcttcctgtggcaggcccagagcttcagaagccagctgcagaagaagaacgacgccgagcccaaggtgaccctgagctag

SEQ ID NO: 4293 - DNA, 906 bp, synthetic construct; identical to SEQ ID NO: 3587
  misc_feature 1..906: note = source = /note="Description of Artificial Sequence: Synthetic coding sequence"
  source 1..906: mol_type = other DNA

SEQ ID NO: 4294 - DNA, 4722 bp, synthetic construct
  misc_feature 1..4722: note = source = /note="Description of Artificial Sequence: Synthetic coding sequence"
  source 1..4722: mol_type = other DNA
atgagagtgctggcctgcctgctggccgccctggtgggcatccaggccgtggagagactgagactggccgacggcccccacggctgcgccggcagactggaggtgtggcacggcggcagatggggcaccgtgtgcgacgacggctgggacctgagagacgccgccgtggcctgcagacagctgggctgcggcggcgccctggccgcccccggcggcgccttcttcggcgagggcgccggccccgtgtggctgagcgagctggcctgcagaggcaacgagggccagctgggcctgtgccaccacagaggctggaaggcccacatctgcagccacgaggaggacgccggcgtggtgtgcgccggccagagagtggccaacagcagagacgacagcaccagccccctggacggcgccccctggcccggcctgctgctggagctgagccccagcaccgaggagcccctggtgacccacgcccccagacccgccggcaacccccagaacgccagcagaaagaagagccccagacccaagcaggccaagagcaccagagcccccctgctgaccaccggcgcccccagacaggagagactgagactggtgagcggcccccacagatgcgccggcagactggaggtgtggcacggcggcagatggggcaccgtgtgcgacgacggctgggacctgagagacgccgccgtggcctgcagagagctgggctgcggcggcgccctggccgcccccggcggcgccagattcggccccggcgccggccccgtgtggatggacgacgtgggctgcggcggcggcgagcaggccctgagagactgccccagaagcccctggggcagaagcaactgcgaccacagcgaggacgccggcctggtgtgcaccggccccgcccccagactgagactggccgacggcccccacggctgcgccggcagactggaggtgtggcacggcggcagatggggcagcgtgtgcgacgacgcctgggacctgagagacgccgccgtggcctgcagagagctgggctgcggcggcgccctggccgcccccggcggcgccttcttcggcgagggcagcggccccatcatcctggacgacctgagatgcagaggcaacgagaccgccctgagattctgccccgccagaccctggggccagcacgactgccaccacagagaggacgccggcgccgtgtgcgacggcatgcccctgggctacgtgccccccaccgcccccaccgacagcaacaacagcacccccagagaggccgccagcagaccccccagcaccatgaccagccaggcccccggcaccgccggcgtgagccccccccccgccagccccaccgtgctgtgggagcccggccccgaggccggcagcccccagctgagactggtggccggccccagcaagtgcagcggcagactggaggtgtggcacgaccagagatggggcaccgtgtgcgacgacagctgggacatgagagacagcgccgtggtgtgcagagagctgggctgcggcggcccccagcagcccgaccccgccgccggcagattcggctggggcgccggccccatctggctggacgacgtgggctgcgtgggcaccgaggccagcctgagcgactgccccgccgccccctggggcaagcacaactgcgcccacaacgaggacgtgggcgtgacctgcaccggcccccccggcctggacagcatcagcgaccccttcagctggagctggatccccggcctgggcagagacagagacgcctggctgcccggcgagctggccaccaagcccagcgccagcgtgaccgccagcgtgctggagaagaccaccaccaaggcccccggcaagatgcccaagagcaccaagaagtgggtgaccaagaacgccaagagacccaccacccagccccccgtgatgcccaccaccaagcacagcagagcccagagcccccccgacctgaccagccagaccaccgccgccctgaccaccgaggccagcagaagacccaccagcgagttcaccagaagacccaccaccgaggccccccagagatggaccagccacaccaccgccaccctgaccccccaggcccccagagagagaaccaccaagaccatggccatgctgaccacccagggcccccaggagatgaccagcgagagcaccatcaagagcatcccccaggccagcctggagcccagcgccgagatccccgagggcagccccgagagccccaaggaccccgcccccagccccagcgtgagcaccaccggcgagagcggcctgttcagagtgagactggccgacggccccaacagatgcgccggcagactggaggtgtggcacgccggcagatggggcaccgtgtgcgacgacaactgggacctgagagacgccaccgtggcctgctgggagctgggctgcggcaaggtgagacccagagtgggcaagacccactacggccccggcaccggccccatctggctggacgacatgggctgcaagggcagcgaggccagcctgagcgactgccccagcggcgcctggggcaagcacaactgcgaccacgaggaggacgtgggcctgacctgcaccggctacaccgactacgacgactaccccccctggacctgggaccccaccagcagagaggacctggccaagggcaccaccaccgccggcgtgcccggccacaccctgccctggagaaccaccagaagacccggcagcagcagccccgccatcagaagactgcccgacaccggcagcaaggacggctacaagctgccctggacctgggacacccccagcggcagaggcctggccgagggcacccccaccgccggcaagctgggccccaccctgggcgccggcaccaccagaagccccggcagcccccccaccctgagagtgcacggcgacaccggcagccccagaaagccctggcccgagagaagaccccccagacccgccgccaccagaaccgccccccccacccccagccccggccccagcgccagccccggcccccccggccccgccctgaccagcgacagcagcagagagctgaccccccacagcgccctgaccagcgaggccaccagcgacgcccccgacaccagcccccccacccccgaccccgccagcagaaccaaccccgacctgatcctgaccagccccgacttcgccctgagcacccccgacagcagcgtggtgcccgccctgacccccgagcccagccccacccccctgcccaccctgcccaaggagctgaccagcgaccccagcacccccagcgaggtgaccagcctgagccccaccagcgagcaggtgcccgagagcgacaccacccccgacctggacaccaccccctacagcagcaccgtgagcgagtacagcagaagccccgaccccagccccagcccccaccccaccaccacccccgaccccaccatggcccccgaccccatcaccaccctgaaccccaccgtgaccccccacttccccaccaccccccaccccaccaccaccccccaccccaccaccatcacccacagcaccatgatccccgaccccaccaccaccccccagcccttcaccaccatcacccacagcaccatgatccccgaccccaccaccaccccccagcccttcaccaccatgcagcccaccaccaccccccacagcaccaccccccaccccaccaccaccccccaccccaccaccatcacccacagcaccatgatccccgaccccaccaccaccccccagcccttcaccaccatgcagcccaccaccatgccccaccccaccaccaccccccaccccaccaccaccccccaccccaccaccaccccccaccccaccaccaccccccaccccaccatgacccccgaccccaccaccaccccctaccccaccaccacccccgaccccaccaccaccccccaccccaccacccccgaccccagcagcacccccgtgatcaccaccgtgagcctgcccaccagcctgggcaccgagctgagcagccccaccctggcccccaccgtgaagcccagcctgcacccccagctgaccttcaccgcccccgccccccacaccagcaccagccagatccccaccctggagcccagccccgccctggagagcagccccagcagaagcagcaccgccaccagcatggaccccctgagcaccgaggacttcaagccccccagaagccagagccccaacctgacccccccccccacccacaccccccacagcgccagcgacctgaccgtgagccccgaccccctgctgagccccaccgcccaccccctggaccacccccccctggaccccctgaccctgggccccacccccggccagagccccggcccccacggcccctgcgtggcccccaccccccccgtgagagtgatggcctgcgagccccccgccctggtggagctggtggccgccgtgagagacgtgggcggccagctgcagagactgacccaggtggtggagcaggagagacaggagagacaggccctgctgctgggcctgacccagctggtggaggccgccagaggcctgggccagctgggcgaggccgtgaagagactggccgagatggcctggaccaccagcatgcccgcccccaccaccaccacccccgaggaggaggagagacccctgagaggcgacgtgtag

SEQ ID NO: 4295 - DNA, 1911 bp, synthetic construct; identical to SEQ ID NO: 3895
  misc_feature 1..1911: note = source = /note="Description of Artificial Sequence: Synthetic coding sequence"
  source 1..1911: mol_type = other DNA

SEQ ID NO: 4296 - DNA, 2037 bp, synthetic construct
  misc_feature 1..2037: note = source = /note="Description of Artificial Sequence: Synthetic coding sequence"
  source 1..2037: mol_type = other DNA
atgagaaccgtggtgctgaccatgaaggccagcgtgatcgagatgttcctggtgctgctggtgaccggcgtgcacagcaacaaggagaccgccaagaagatcaagagacccaagttcaccgtgccccagatcaactgcgacgtgaaggccggcaagatcatcgaccccgagttcatcgtgaagtgccccgccggctgccaggaccccaagtaccacgtgtacggcaccgacgtgtacgccagctacagcagcgtgtgcggcgccgccgtgcacagcggcgtgctggacaacagcggcggcaagatcctggtgagaaaggtggccggccagagcggctacaagggcagctacagcaacggcgtgcagagcctgagcctgcccagatggagagagagcttcatcgtgctggagagcaagcccaagaagggcgtgacctaccccagcgccctgacctacagcagcagcaagagccccgccgcccaggccggcgagaccaccaaggcctaccagagaccccccatccccggcaccaccgcccagcccgtgaccctgatgcagctgctggccgtgaccgtggccgtggccacccccaccaccctgcccagacccagccccagcgccgccagcaccaccagcatccccagaccccagagcgtgggccacagaagccaggagatggacctgtggagcaccgccacctacaccagcagccagaacagacccagagccgaccccggcatccagagacaggaccccagcggcgccgccttccagaagcccgtgggcgccgacgtgagcctgggcctggtgcccaaggaggagctgagcacccagagcctggagcccgtgagcctgggcgaccccaactgcaagatcgacctgagcttcctgatcgacggcagcaccagcatcggcaagagaagattcagaatccagaagcagctgctggccgacgtggcccaggccctggacatcggccccgccggccccctgatgggcgtggtgcagtacggcgacaaccccgccacccacttcaacctgaagacccacaccaacagcagagacctgaagaccgccatcgagaagatcacccagagaggcggcctgagcaacgtgggcagagccatcagcttcgtgaccaagaacttcttcagcaaggccaacggcaacagaagcggcgcccccaacgtggtggtggtgatggtggacggctggcccaccgacaaggtggaggaggccagcagactggccagagagagcggcatcaacatcttcttcatcaccatcgagggcgccgccgagaacgagaagcagtacgtggtggagcccaacttcgccaacaaggccgtgtgcagaaccaacggcttctacagcctgcacgtgcagagctggttcggcctgcacaagaccctgcagcccctggtgaagagagtgtgcgacaccgacagactggcctgcagcaagacctgcctgaacagcgccgacatcggcttcgtgatcgacggcagcagcagcgtgggcaccggcaacttcagaaccgtgctgcagttcgtgaccaacctgaccaaggagttcgagatcagcgacaccgacaccagaatcggcgccgtgcagtacacctacgagcagagactggagttcggcttcgacaagtacagcagcaagcccgacatcctgaacgccatcaagagagtgggctactggagcggcggcaccagcaccggcgccgccatcaacttcgccctggagcagctgttcaagaagagcaagcccaacaagagaaagctgatgatcctgatcaccgacggcagaagctacgacgacgtgagaatccccgccatggccgcccacctgaagggcgtgatcacctacgccatcggcgtggcctgggccgcccaggaggagctggaggtgatcgccacccaccccgccagagaccacagcttcttcgtggacgagttcgacaacctgcaccagtacgtgcccagaatcatccagaacatctgcaccgagttcaacagccagcccagaaactag

SEQ ID NO: 4297 - DNA, 324 bp, synthetic construct
  misc_feature 1..324: note = source = /note="Description of Artificial Sequence: Synthetic coding sequence"
  source 1..324: mol_type = other DNA
tgaaccgtggccgcccccagcgtgttcatcttcccccccagcgacgagcagctgaagagcggcaccgccagcgtggtgtgcctgctgaacaacttctaccccagagaggccaaggtgcagtggaaggtggacaacgccctgcagagcggcaacagccaggagagcgtgaccgagcaggacagcaaggacagcacctacagcctgagcagcaccctgaccctgagcaaggccgactacgagaagcacaaggtgtacgcctgcgaggtgacccaccagggcctgagcagccccgtgaccaagagcttcaacagaggcgagtgctag

SEQ ID NO: 4298 - DNA, 366 bp, synthetic construct
  misc_feature 1..366: note = source = /note="Description of Artificial Sequence: Synthetic coding sequence"
  source 1..366: mol_type = other DNA
atggtgctgcagacccaggtgttcatcagcctgctgctgtggatcagcggcgcctacggcgacatcgtgatgacccagagccccgacagcctggccgtgagcctgggcgagagagccaccatcaactgcaagagcagccagagcgtgctgtacagcagcaacaacaagaactacctggcctggtaccagcagaagcccggccagccccccaagctgctgatctactgggccagcaccagagagagcggcgtgcccgacagattcagcggcagcggcagcggcaccgacttcaccctgaccatcagcagcctgcaggccgaggacgtggccgtgtactactgccagcagtactacagcaccccctag

SEQ ID NO: 4299 - DNA, 984 bp, synthetic construct
  misc_feature 1..984: note = source = /note="Description of Artificial Sequence: Synthetic coding sequence"
  source 1..984: mol_type = other DNA
gccagcaccaagggccccagcgtgttccccctggccccctgcagcagaagcaccagcgagagcaccgccgccctgggctgcctggtgaaggactacttccccgagcccgtgaccgtgagctggaacagcggcgccctgaccagcggcgtgcacaccttccccgccgtgctgcagagcagcggcctgtacagcctgagcagcgtggtgaccgtgcccagcagcagcctgggcaccaagacctacacctgcaacgtggaccacaagcccagcaacaccaaggtggacaagagagtggagagcaagtacggccccccctgccccagctgccccgcccccgagttcctgggcggccccagcgtgttcctgttcccccccaagcccaaggacaccctgatgatcagcagaacccccgaggtgacctgcgtggtggtggacgtgagccaggaggaccccgaggtgcagttcaactggtacgtggacggcgtggaggtgcacaacgccaagaccaagcccagagaggagcagttcaacagcacctacagagtggtgagcgtgctgaccgtgctgcaccaggactggctgaacggcaaggagtacaagtgcaaggtgagcaacaagggcctgcccagcagcatcgagaagaccatcagcaaggccaagggccagcccagagagccccaggtgtacaccctgccccccagccaggaggagatgaccaagaaccaggtgagcctgacctgcctggtgaagggcttctaccccagcgacatcgccgtggagtgggagagcaacggccagcccgagaacaactacaagaccaccccccccgtgctggacagcgacggcagcttcttcctgtacagcagactgaccgtggacaagagcagatggcaggagggcaacgtgttcagctgcagcgtgatgcacgaggccctgcacaaccactacacccagaagagcctgagcctgagcctgggcaagtag

SEQ ID NO: 4300 - DNA, 981 bp, synthetic construct
  misc_feature 1..981: note = source = /note="Description of Artificial Sequence: Synthetic coding sequence"
  source 1..981: mol_type = other DNA
gccagcaccaagggccccagcgtgttccccctggccccctgcagcagaagcaccagcgagagcaccgccgccctgggctgcctggtgaaggactacttccccgagcccgtgaccgtgagctggaacagcggcgccctgaccagcggcgtgcacaccttccccgccgtgctgcagagcagcggcctgtacagcctgagcagcgtggtgaccgtgcccagcagcaacttcggcacccagacctacacctgcaacgtggaccacaagcccagcaacaccaaggtggacaagaccgtggagagaaagtgctgcgtggagtgccccccctgccccgccccccccgtggccggccccagcgtgttcctgttcccccccaagcccaaggacaccctgatgatcagcagaacccccgaggtgacctgcgtggtggtggacgtgagccacgaggaccccgaggtgcagttcaactggtacgtggacggcgtggaggtgcacaacgccaagaccaagcccagagaggagcagttcaacagcaccttcagagtggtgagcgtgctgaccgtggtgcaccaggactggctgaacggcaaggagtacaagtgcaaggtgagcaacaagggcctgcccgcccccatcgagaagaccatcagcaagaccaagggccagcccagagagccccaggtgtacaccctgccccccagcagagaggagatgaccaagaaccaggtgagcctgacctgcctggtgaagggcttctaccccagcgacatcagcgtggagtgggagagcaacggccagcccgagaacaactacaagaccaccccccccatgctggacagcgacggcagcttcttcctgtacagcaagctgaccgtggacaagagcagatggcagcagggcaacgtgttcagctgcagcgtgatgcacgaggccctgcacaaccactacacccagaagagcctgagcctgagccccggcaagtag

SEQ ID NO: 4301 - DNA, 993 bp, synthetic construct
  misc_feature 1..993: note = source = /note="Description of Artificial Sequence: Synthetic coding sequence"
  source 1..993: mol_type = other DNA
gccagcaccaagggccccagcgtgttccccctggcccccagcagcaagagcaccagcggcggcaccgccgccctgggctgcctggtgaaggactacttccccgagcccgtgaccgtgagctggaacagcggcgccctgaccagcggcgtgcacaccttccccgccgtgctgcagagcagcggcctgtacagcctgagcagcgtggtgaccgtgcccagcagcagcctgggcacccagacctacatctgcaacgtgaaccacaagcccagcaacaccaaggtggacaagaaggtggagcccaagagctgcgacaagacccacacctgccccccctgccccgcccccgagctgctgggcggccccagcgtgttcctgttcccccccaagcccaaggacaccctgatgatcagcagaacccccgaggtgacctgcgtggtggtggacgtgagccacgaggaccccgaggtgaagttcaactggtacgtggacggcgtggaggtgcacaacgccaagaccaagcccagagaggagcagtacaacagcacctacagagtggtgagcgtgctgaccgtgctgcaccaggactggctgaacggcaaggagtacaagtgcaaggtgagcaacaaggccctgcccgcccccatcgagaagaccatcagcaaggccaagggccagcccagagagccccaggtgtacaccctgccccccagcagagacgagctgaccaagaaccaggtgagcctgacctgcctggtgaagggcttctaccccagcgacatcgccgtggagtgggagagcaacggccagcccgagaacaactacaagaccaccccccccgtgctggacagcgacggcagcttcttcctgtacagcaagctgaccgtggacaagagcagatggcagcagggcaacgtgttcagctgcagcgtgatgcacgaggccctgcacaaccactacacccagaagagcctgagcctgagccccggcaagtag

SEQ ID NO: 4302 - DNA, 651 bp, synthetic construct; identical to SEQ ID NO: 3817
  misc_feature 1..651: note = source = /note="Description of Artificial Sequence: Synthetic coding sequence"
  source 1..651: mol_type = other DNA

SEQ ID NO: 4303 - DNA, 762 bp, synthetic construct; identical to SEQ ID NO: 3721
  misc_feature 1..762: note = source = /note="Description of Artificial Sequence: Synthetic coding sequence"
  source 1..762: mol_type = other DNA

SEQ ID NO: 4304 - DNA, 468 bp, synthetic construct
  misc_feature 1..468: note = source = /note="Description of Artificial Sequence: Synthetic coding sequence"
  source 1..468: mol_type = other DNA
atgttccagagactgctgctgctgctgctgctgagcatgggcggcacctgggccagcaaggagcccctgagacccagatgcagacccatcaacgccaccctggccgtggagaaggagggctgccccgtgtgcatcaccgtgaacaccaccatctgcgccggctactgccccaccatgaccagagtgctgcagggcgtgctgcccgccctgccccaggtggtgtgcaactacagagacgtgagattcgagagcatcagactgcccggctgccccagaggcgtgaaccccgtggtgagctacgccgtggccctgagctgccagtgcgccctgtgcagaagaagcaccaccgactgcggcggccccaaggaccaccccctgacctgcgacgaccccagattccaggacagcagcagcagcaaggcccccccccccagcctgcccagccccagcagactgcccggcccctag

SEQ ID NO: 4305 - DNA, 1554 bp, synthetic construct
  misc_feature 1..1554: note = source = /note="Description of Artificial Sequence: Synthetic coding sequence"
  source 1..1554: mol_type = other DNA
atggccgtgagcagaaaggactggagcgccctgagcagcctggccagacagagaaccctggaggacgaggaggagcaggagagagagagaagaagaagacacagaaacctgagcagcaccaccgacgacgaggcccccagactgagccagaacggcgacagacaggccagcgccagcgagagactgcccagcgtggaggaggccgaggtgcccaagcccctgccccccgccagcaaggacgaggacgaggacatccagagcatcctgagaaccagacaggagagaagacagagaagacaggtggtggaggccgcccaggcccccatccaggagagactggaggccgaggagggcagaaacagcctgagccccgtgcaggccacccagaagcccctggtgagcaagaaggagctggagatcccccccagaagaagactgagcagagagcagagaggcccctgggccctggaggaggagagcctggtgggcagagagcccgaggagagaaagaagggcgtgcccgagaagagccccgtgctggagaagagcagcatgcccaagaagaccgcccccgagaagagcctggtgagcgacaagaccagcatcagcgagaaggtgctggccagcgagaagaccagcctgagcgagaagatcgccgtgagcgagaagagaaacagcagcgagaagaagagcgtgctggagaagaccagcgtgagcgagaagagcctggcccccggcatggccctgggcagcggcagaagactggtgagcgagaaggccagcatcttcgagaaggccctggccagcgagaagagccccaccgccgacgccaagcccgcccccaagagagccaccgccagcgagcagcccctggcccaggagccccccgccagcggcggcagccccgccaccaccaaggagcagagaggcagagccctgcccggcaagaacctgcccagcctggccaagcagggcgccagcgacccccccaccgtggccagcagactgccccccgtgaccctgcaggtgaagatccccagcaaggaggaggaggccgacatgagcagccccacccagagaacctacagcagcagcctgaagagaagcagccccagaaccatcagcttcagaatgaagcccaagaaggagaacagcgagaccaccctgaccagaagcgccagcatgaagctgcccgacaacaccgtgaagctgggcgagaagctggagagataccacaccgccatcagaagaagcgagagcgtgaagagcagaggcctgccctgcaccgagctgttcgtggcccccgtgggcgtggccagcaagagacacctgttcgagaaggagctggccggccagagcagagccgagcccgccagcagcagaaaggagaacctgagactgagcggcgtggtgaccagcagactgaacctgtggatcagcagaacccaggagagcggcgaccaggacccccaggaggcccagaaggccagcagcgccaccgagagaacccagtggggccagaagagcgacagcagcctggacgccgaggtgtag

SEQ ID NO: 4306 - DNA, 270 bp, synthetic construct; identical to SEQ ID NO: 3781
  misc_feature 1..270: note = source = /note="Description of Artificial Sequence: Synthetic coding sequence"
  source 1..270: mol_type = other DNA

SEQ ID NO: 4307 - DNA, 1302 bp, synthetic construct
  misc_feature 1..1302: note = source = /note="Description of Artificial Sequence: Synthetic coding sequence"
  source 1..1302: mol_type = other DNA
atgggcaacgcctgctgggagctgtactgcctggagcacggcatccagcccgacggccagatgcccagcgacaagaccatcggcggcggcgacgacagcttcaccaccttcttctgcgagaccggcgccggcaagcacgtgcccagagccgtgttcgtggacctggagcccaccgtgatcgacgagatcagaaacggcccctacagacagctgttccaccccgagcagctgatcaccggcaaggaggacgccgccaacaactacgccagaggccactacaccatcggcaaggagatcatcgaccccgtgctggacagaatcagaaagctgagcgaccagtgcaccggcctgcagggcttcctggtgttccacagcttcggcggcggcaccggcagcggcttcaccagcctgctgatggagagactgagcgtggactacggcaagaagagcaagctggagttcagcatctaccccgccccccaggtgagcaccgccgtggtggagccctacaacagcatcctgaccacccacaccaccctggagcacagcgactgcgccttcatggtggacaacgaggccatctacgacatctgcagaagaaacctggacatcgagagacccacctacaccaacctgaacagactgatcagccagatcgtgagcagcatcaccgccagcctgagattcgacggcgccctgaacgtggacctgaccgagttccagaccaacctggtgccctaccccagaatccacttccccctggccacctacgcccccgtgatcagcgccgagaaggcctaccacgagcagctgagcgtggccgagatcaccaacgcctgcttcgagcccgccaaccagatggtgaagtgcgaccccagacacggcaagtacatggcctgctgcctgctgtacagaggcgacgtggtgcccaaggacgtgaacgccgccatcgccgccatcaagaccaagagaagcatccagttcgtggactggtgccccaccggcttcaaggtgggcatcaactaccagccccccaccgtggtgcccggcggcgacctggccaaggtgcagagagccgtgtgcatgctgagcaacaccaccgccatcgccgaggcctgggccagactggaccacaagttcgacctgatgtacgccaagagagccttcgtgcactggtacgtgggcgagggcatggaggagggcgagttcagcgaggccagagaggacatggccgccctggagaaggactacgaggaggtgggcatcgacagctacgaggacgaggacgagggcgaggagtag

SEQ ID NO: 4308 - DNA, 1965 bp, synthetic construct; identical to SEQ ID NO: 3680
  misc_feature 1..1965: note = source = /note="Description of Artificial Sequence: Synthetic coding sequence"
  source 1..1965: mol_type = other DNA

SEQ ID NO: 4309 - DNA, 1173 bp, synthetic construct
  misc_feature 1..1173: note = source = /note="Description of Artificial Sequence: Synthetic coding sequence"
  source 1..1173: mol_type = other DNA
atgaagttccagggccccctggcctgcctgctgctggccctgtgcctgggcagcggcgaggccggccccctgcagagcggcgaggagagcaccggcaccaacatcggcgaggccctgggccacggcctgggcgacgccctgagcgagggcgtgggcaaggccatcggcaaggaggccggcggcgccgccggcagcaaggtgagcgaggccctgggccagggcaccagagaggccgtgggcaccggcgtgagacaggtgcccggcttcggcgtggccgacgccctgggcaacagagtgggcgaggccgcccacgccctgggcaacaccggccacgagatcggcagacaggccgaggacgtgatcagacacggcgccgacgccgtgagaggcagctggcagggcgtgcccggccacaacggcgcctgggagaccagcggcggccacggcatcttcggcagccagggcggcctgggcggccagggccagggcaaccccggcggcctgggcaccccctgggtgcacggctaccccggcaacagcgccggcagcttcggcatgaacccccagggcgccccctggggccagggcggcaacggcggcccccccaacttcggcaccaacacccagggcgccgtggcccagcccggctacggcagcgtgagagccagcaaccagaacgagggctgcaccaaccccccccccagcggcagcggcggcggcagcagcaacagcggcggcggcagcggcagccagagcggcagcagcggcagcggcagcaacggcgacaacaacaacggcagcagcagcggcggcagcagcagcggcagcagcagcggcggcagcagcggcggcagcagcggcggcagcagcggcaacagcggcggcagcagaggcgacagcggcagcgagagcagctggggcagcagcaccggcagcagcagcggcaaccacggcggcagcggcggcggcaacggccacaagcccggctgcgagaagcccggcaacgaggccagaggcagcggcgagagcggcatccagggcttcagaggccagggcgtgagcagcaacatgagaaacagcgagaccagccccggcatgttcaacttcgacaccttctggaagaacttcaagagcaagctgggcttcatcaactgggacgccatcaacaagtag

SEQ ID NO: 4310 - DNA, 846 bp, synthetic construct; identical to SEQ ID NO: 3888
  misc_feature 1..846: note = source = /note="Description of Artificial Sequence: Synthetic coding sequence"
  source 1..846: mol_type = other DNA

SEQ ID NO: 4311 - DNA, 876 bp, synthetic construct
  misc_feature 1..876: note = source = /note="Description of Artificial Sequence: Synthetic coding sequence"
  source 1..876: mol_type = other DNA
gtgctgagcgccagcggccccggcagaaagatgggcagcagaggccagggcctgctgctggcctactgcctgctgctggccttcgccagcggcctggtgctgagcagagtgccccacgtgcagggcgagcagcaggagtgggagggcaccgaggagctgcccagcccccccgaccacgccgagagagccgaggagcagcacgagaagtacagacccagccaggaccagggcctgcccgccagcagatgcctgagatgctgcgaccccggcaccagcatgtaccccgccaccgccgtgccccagatcaacatcaccatcctgaagggcgagaagggcgacagaggcgacagaggcctgcagggcaagtacggcaagaccggcagcgccggcgccagaggccacaccggccccaagggccagaagggcagcatgggcgcccccggcgagagatgcaagagccactacgccgccttcagcgtgggcagaaagaagcccatgcacagcaaccactactaccagaccgtgatcttcgacaccgagttcgtgaacctgtacgaccacttcaacatgttcaccggcaagttctactgctacgtgcccggcctgtacttcttcagcctgaacgtgcacacctggaaccagaaggagacctacctgcacatcatgaagaacgaggaggaggtggtgatcctgttcgcccaggtgggcgacagaagcatcatgcagagccagagcctgatgctggagctgagagagcaggaccaggtgtgggtgagactgtacaagggcgagagagagaacgccatcttcagcgaggagctggacacctacatcaccttcagcggctacctggtgaagcacgccaccgagccctag

SEQ ID NO: 4312 - DNA, 1002 bp, synthetic construct
  misc_feature 1..1002: note = source = /note="Description of Artificial Sequence: Synthetic coding sequence"
  source 1..1002: mol_type = other DNA
atggtgagcaagagcagatggaagctgctggccatgctggccctggtgctggtggtgatggtgtggtacagcatcagcagagaggacagatacatcgagctgttctacttccccatccccgagaagaaggagccctgcctgcagggcgaggccgagagcaaggccagcaagctgttcggcaactacagcagagaccagcccatcttcctgagactggaggactacttctgggtgaagacccccagcgcctacgagctgccctacggcaccaagggcagcgaggacctgctgctgagagtgctggccatcaccagcagcagcatccccaagaacatccagagcctgagatgcagaagatgcgtggtggtgggcaacggccacagactgagaaacagcagcctgggcgacgccatcaacaagtacgacgtggtgatcagactgaacaacgcccccgtggccggctacgagggcgacgtgggcagcaagaccaccatgagactgttctaccccgagagcgcccacttcgaccccaaggtggagaacaaccccgacaccctgctggtgctggtggccttcaaggccatggacttccactggatcgagaccatcctgagcgacaagaagagagtgagaaagggcttctggaagcagccccccctgatctgggacgtgaaccccaagcagatcagaatcctgaaccccttcttcatggagatcgccgccgacaagctgctgagcctgcccatgcagcagcccagaaagatcaagcagaagcccaccaccggcctgctggccatcaccctggccctgcacctgtgcgacctggtgcacatcgccggcttcggctaccccgacgcctacaacaagaagcagaccatccactactacgagcagatcaccctgaagagcatggccggcagcggccacaacgtgagccaggaggccctggccatcaagagaatgctggagatgggcgccatcaagaacctgaccagcttctag

SEQ ID NO: 4313 - DNA, 312 bp, synthetic construct; identical to SEQ ID NO: 3978
  misc_feature 1..312: note = source = /note="Description of Artificial Sequence: Synthetic coding sequence"
  source 1..312: mol_type = other DNA

SEQ ID NO: 4314 - DNA, 312 bp, synthetic construct; identical to SEQ ID NO: 3978
  misc_feature 1..312: note = source = /note="Description of Artificial Sequence: Synthetic coding sequence"
  source 1..312: mol_type = other DNA

SEQ ID NO: 4315 - DNA, 312 bp, synthetic construct; identical to SEQ ID NO: 3978
  misc_feature 1..312: note = source = /note="Description of Artificial Sequence: Synthetic coding sequence"
  source 1..312: mol_type = other DNA

SEQ ID NO: 4316 - DNA, 312 bp, synthetic construct; identical to SEQ ID NO: 3978
  misc_feature 1..312: note = source = /note="Description of Artificial Sequence: Synthetic coding sequence"
  source 1..312: mol_type = other DNA

SEQ ID NO: 4317 - DNA, 2268 bp, synthetic construct
  misc_feature 1..2268: note = source = /note="Description of Artificial Sequence: Synthetic coding sequence"
  source 1..2268: mol_type = other DNA
atgccccccttcctgctgctggaggccgtgtgcgtgttcctgttcagcagagtgccccccagcctgcccctgcaggaggtgcacgtgagcaaggagaccatcggcaagatcagcgccgccagcaagatgatgtggtgcagcgccgccgtggacatcatgttcctgctggacggcagcaacagcgtgggcaagggcagcttcgagagaagcaagcacttcgccatcaccgtgtgcgacggcctggacatcagccccgagagagtgagagtgggcgccttccagttcagcagcaccccccacctggagttccccctggacagcttcagcacccagcaggaggtgaaggccagaatcaagagaatggtgttcaagggcggcagaaccgagaccgagctggccctgaagtacctgctgcacagaggcctgcccggcggcagaaacgccagcgtgccccagatcctgatcatcgtgaccgacggcaagagccagggcgacgtggccctgcccagcaagcagctgaaggagagaggcgtgaccgtgttcgccgtgggcgtgagattccccagatgggaggagctgcacgccctggccagcgagcccagaggccagcacgtgctgctggccgagcaggtggaggacgccaccaacggcctgttcagcaccctgagcagcagcgccatctgcagcagcgccacccccgactgcagagtggaggcccacccctgcgagcacagaaccctggagatggtgagagagttcgccggcaacgccccctgctggagaggcagcagaagaaccctggccgtgctggccgcccactgccccttctacagctggaagagagtgttcctgacccaccccgccacctgctacagaaccacctgccccggcccctgcgacagccagccctgccagaacggcggcacctgcgtgcccgagggcctggacggctaccagtgcctgtgccccctggccttcggcggcgaggccaactgcgccctgaagctgagcctggagtgcagagtggacctgctgttcctgctggacagcagcgccggcaccaccctggacggcttcctgagagccaaggtgttcgtgaagagattcgtgagagccgtgctgagcgaggacagcagagccagagtgggcgtggccacctacagcagagagctgctggtggccgtgcccgtgggcgagtaccaggacgtgcccgacctggtgtggagcctggacggcatccccttcagaggcggccccaccctgaccggcagcgccctgagacaggccgccgagagaggcttcggcagcgccaccagaaccggccaggacagacccagaagagtggtggtgctgctgaccgagagccacagcgaggacgaggtggccggccccgccagacacgccagagccagagagctgctgctgctgggcgtgggcagcgaggccgtgagagccgagctggaggagatcaccggcagccccaagcacgtgatggtgtacagcgacccccaggacctgttcaaccagatccccgagctgcagggcaagctgtgcagcagacagagacccggctgcagaacccaggccctggacctggtgttcatgctggacaccagcgccagcgtgggccccgagaacttcgcccagatgcagagcttcgtgagaagctgcgccctgcagttcgaggtgaaccccgacgtgacccaggtgggcctggtggtgtacggcagccaggtgcagaccgccttcggcctggacaccaagcccaccagagccgccatgctgagagccatcagccaggccccctacctgggcggcgtgggcagcgccggcaccgccctgctgcacatctacgacaaggtgatgaccgtgcagagaggcgccagacccggcgtgcccaaggccgtggtggtgctgaccggcggcagaggcgccgaggacgccgccgtgcccgcccagaagctgagaaacaacggcatcagcgtgctggtggtgggcgtgggccccgtgctgagcgagggcctgagaagactggccggccccagagacagcctgatccacgtggccgcctacgccgacctgagataccaccaggacgtgctgatcgagtggctgtgcggcgaggccaagcagcccgtgaacctgtgcaagcccagcccctgcatgaacgagggcagctgcgtgctgcagaacggcagctacagatgcaagtgcagagacggctgggagggcccccactgcgagaacagattcctgagaagaccctag

SEQ ID NO: 4318 - DNA, 816 bp, synthetic construct
  misc_feature 1..816: note = source = /note="Description of Artificial Sequence: Synthetic coding sequence"
  source 1..816: mol_type = other DNA
atgatcaccggcgtgttcagcatgagactgtggacccccgtgggcgtgctgaccagcctggcctactgcctgcaccagagaagagtggccctggccgagctgcaggaggccgacggccagtgccccgtggacagaagcctgctgaagctgaagatggtgcaggtggtgttcagacacggcgccagaagccccctgaagcccctgcccctggaggagcaggtggagtggaacccccagctgctggaggtgcccccccagacccagttcgactacaccgtgaccaacctggccggcggccccaagccctacagcccctacgacagccagtaccacgagaccaccctgaagggcggcatgttcgccggccagctgaccaaggtgggcatgcagcagatgttcgccctgggcgagagactgagaaagaactacgtggaggacatccccttcctgagccccaccttcaacccccaggaggtgttcatcagaagcaccaacatcttcagaaacctggagagcaccagatgcctgctggccggcctgttccagtgccagaaggagggccccatcatcatccacaccgacgaggccgacagcgaggtgctgtaccccaactaccagagctgctggagcctgagacagagaaccagaggcagaagacagaccgccagcctgcagcccggcatcagcgaggacctgaagaaggtgaaggacagaatgggcatcgacagcagcgacaaggtggacttcttcatcctgctggacaacgtggccgccgagcaggagaagatgggcagctgcagattccacggcagctag

SEQ ID NO: 4319 - DNA, 1395 bp, synthetic construct
  misc_feature 1..1395: note = source = /note="Description of Artificial Sequence: Synthetic coding sequence"
  source 1..1395: mol_type = other DNA
atggagcacagcgtgtgccccagcagcgccgtgcacctgatccccgtgagcacccccaagaacggcatgagcagcaagagcagaaagagaatcatgcccgaccccgtgaccgagccccccgtgaccgaccccgtgtacgaggccctgctgtactgcaacatccccagcgtggccgagagaagcatggagggccacgccccccaccacttcaagctggtgagcgtgcacgtgttcatcagacacggcgacagataccccctgtacgtgatccccaagaccaagagacccgagatcgactgcaccctggtggccaacagaaagccctaccaccccaagctggaggccttcatcagccacatgagcaagggcagcggcgccagcttcgagagccccctgaacagcctgcccctgtaccccaaccaccccctgtgcgagatgggcgagctgacccagaccggcgtggtgcagcacctgcagaacggccagctgctgagagacatctacctgaagaagcacaagctgctgcccaacgactggagcgccgaccagctgtacctggagaccaccggcaagagcagaaccctgcagagcggcctggccctgctgtacggcttcctgcccgacttcgactggaagaagatctacttcagacaccagcccagcgccctgttctgcagcggcagctgctactgccccgtgagaaaccagtacctggagaaggagcagagaagacagtacctgctgagactgaagaacagccagctggagaagacctacggcgagatggccaagatcgtggacgtgcccaccaagcagctgagagccgccaaccccatcgacagcatgctgtgccacttctgccacaacgtgagcttcccctgcaccagaaacggctgcgtggacatggagcacttcaaggtgatcaagacccaccagatcgaggacgagagagagagaagagagaagaagctgtacttcggctacagcctgctgggcgcccaccccatcctgaaccagaccatcggcagaatgcagagagccaccgagggcagaaaggaggagctgttcgccctgtacagcgcccacgacgtgaccctgagccccgtgctgagcgccctgggcctgagcgaggccagattccccagattcgccgccagactgatcttcgagctgtggcaggacagagagaagcccagcgagcacagcgtgagaatcctgtacaacggcgtggacgtgaccttccacaccagcttctgccaggaccaccacaagagaagccccaagcccatgtgccccctggagaacctggtgagattcgtgaagagagacatgttcgtggccctgggcggcagcggcaccaactactacgacgcctgccacagagagggcttctag

SEQ ID NO: 4320 - DNA, 1443 bp, synthetic construct; identical to SEQ ID NO: 3652
  misc_feature 1..1443: note = source = /note="Description of Artificial Sequence: Synthetic coding sequence"
  source 1..1443: mol_type = other DNA

SEQ ID NO: 4321 - DNA, 1311 bp, synthetic construct; identical to SEQ ID NO: 3956
  misc_feature 1..1311: note = source = /note="Description of Artificial Sequence: Synthetic coding sequence"
  source 1..1311: mol_type = other DNA

SEQ ID NO: 4322 - DNA, 1161 bp, synthetic construct; identical to SEQ ID NO: 4065
  misc_feature 1..1161: note = source = /note="Description of Artificial Sequence: Synthetic coding sequence"
  source 1..1161: mol_type = other DNA

SEQ ID NO: 4323 - DNA, 990 bp, synthetic construct
  misc_feature 1..990: note = source = /note="Description of Artificial Sequence: Synthetic coding sequence"
  source 1..990: mol_type = other DNA
atgagacccccccccgccctggccctggccggcctgtgcctgctggccctgcccgccgccgccgccagctacttcggcctgaccggcagagaggtgctgacccccttccccggcctgggcaccgccgccgcccccgcccagggcggcgcccacctgaagcagtgcgacctgctgaagctgagcagaagacagaagcagctgtgcagaagagagcccggcctggccgagaccctgagagacgccgcccacctgggcctgctggagtgccagttccagttcagacacgagagatggaactgcagcctggagggcagaatgggcctgctgaagagaggcttcaaggagaccgccttcctgtacgccgtgagcagcgccgccctgacccacaccctggccagagcctgcagcgccggcagaatggagagatgcacctgcgacgacagccccggcctggagagcagacaggcctggcagtggggcgtgtgcggcgacaacctgaagtacagcaccaagttcctgagcaacttcctgggcagcaagagaggcaacaaggacctgagagccagagccgacgcccacaacacccacgtgggcatcaaggccgtgaagagcggcctgagaaccacctgcaagtgccacggcgtgagcggcagctgcgccgtgagaacctgctggaagcagctgagccccttcagagagaccggccaggtgctgaagctgagatacgacagcgccgtgaaggtgagcagcgccaccaacgaggccctgggcagactggagctgtgggcccccgccagacagggcagcctgaccaagggcctggcccccagaagcggcgacctggtgtacatggaggacagccccagcttctgcagacccagcaagtacagccccggcaccgccggctggagcgccgtggccagaagccagctgatcaccaccagcaccagcagaatccaggccatcctgcccagccagctgcccgagtag

SEQ ID NO: 4324 - DNA, 579 bp, synthetic construct
  misc_feature 1..579: note = source = /note="Description of Artificial Sequence: Synthetic coding sequence"
  source 1..579: mol_type = other DNA
atgagactggccggccccgagagcagcgtgaccgccgcccccagagccagaaagtacaagtgcggcctgccccagccctgccccgaggagcacctggccttcagagtggtgagcggcgccgccaacgtgatcggccccaagatctgcctggaggacaagatgctgatgagcagcgtgaaggacaacgtgggcagaggcctgaacatcgccctggtgaacggcgtgagcggcgagctgatcgaggccagagccttcgacatgtgggccggcgacgtgaacgacctgctgaagttcatcagacccctgcacgagggcaccctggtgttcgtggccagctacgacgaccccgccaccaagatgaacgaggagaccagaaagctgttcagcgagctgggcagcagaaacgccaaggagctggccttcagagacagctgggtgttcgtgggcgccaagggcgtgcagaacaagagccccttcgagcagcacgtgaagaacagcaagcacagcaacaagtacgagggctggcccgaggccctggagatggagggctgcatccccagaagaagcaccgccagctag

SEQ ID NO: 4325 - DNA, 1053 bp, synthetic construct; identical to SEQ ID NO: 3914
  misc_feature 1..1053: note = source = /note="Description of Artificial Sequence: Synthetic coding sequence"
  source 1..1053: mol_type = other DNA

SEQ ID NO: 4326 - DNA, 189 bp, synthetic construct
  misc_feature 1..189: note = source = /note="Description of Artificial Sequence: Synthetic coding sequence"
  source 1..189: mol_type = other DNA
atgaagatccagctgttcttcttcatcctgcacttctgggtgaccatcctgcccgccagaagcaacttcgagcccaagtacagattcgagagatgcgagaaggtgagaggcatctgcaagaccttctgcgacgacgtggagtacgactacggctactgcatcaagtggagaagccagtgctgcgtgtag

SEQ ID NO: 4327 - DNA, 738 bp, synthetic construct
  misc_feature 1..738: note = source = /note="Description of Artificial Sequence: Synthetic coding sequence"
  source 1..738: mol_type = other DNA
atgaccctgttccccgtgctgctgttcctggtggccggcctgctgcccagcttccccgccaacgaggacaaggaccccgccttcaccgccctgctgaccacccagacccaggtgcagagagagatcgtgaacaagcacaacgagctgagaagagccgtgagcccccccgccagaaacatgctgaagatggagtggaacaaggaggccgccgccaacgcccagaagtgggccaaccagtgcaactacagacacagcaaccccaaggacagaatgaccagcctgaagtgcggcgagaacctgtacatgagcagcgccagcagcagctggagccaggccatccagagctggttcgacgagtacaacgacttcgacttcggcgtgggccccaagacccccaacgccgtggtgggccactacacccaggtggtgtggtacagcagctacctggtgggctgcggcaacgcctactgccccaaccagaaggtgctgaagtactactacgtgtgccagtactgccccgccggcaactgggccaacagactgtacgtgccctacgagcagggcgccccctgcgccagctgccccgacaactgcgacgacggcctgtgcaccaacggctgcaagtacgaggacctgtacagcaactgcaagagcctgaagctgaccctgacctgcaagcaccagctggtgagagacagctgcaaggccagctgcaactgcagcaacagcatctactag

SEQ ID NO: 4328 - DNA, 1341 bp, synthetic construct; identical to SEQ ID NO: 3653
  misc_feature 1..1341: note = source = /note="Description of Artificial Sequence: Synthetic coding sequence"
  source 1..1341: mol_type = other DNA

SEQ ID NO: 4329 - DNA, 585 bp, synthetic construct; identical to SEQ ID NO: 3585
  misc_feature 1..585: note = source = /note="Description of Artificial Sequence: Synthetic coding sequence"
  source 1..585: mol_type = other DNA

SEQ ID NO: 4330 - DNA, 585 bp, synthetic construct; identical to SEQ ID NO: 3585
  misc_feature 1..585: note = source = /note="Description of Artificial Sequence: Synthetic coding sequence"
  source 1..585: mol_type = other DNA

SEQ ID NO: 4331 - DNA, 348 bp, synthetic construct
  misc_feature 1..348: note = source = /note="Description of Artificial Sequence: Synthetic coding sequence"
  source 1..348: mol_type = other DNA
atgaccatgagacacaactggacccccgacctgagccccctgtgggtgctgctgctgtgcgcccacgtggtgaccctgctggtgagagccacccccgtgagccagaccaccaccgccgccaccgccagcgtgagaagcaccaaggacccctgccccagccagccccccgtgttccccgccgccaagcagtgccccgccctggaggtgacctggcccgaggtggaggtgcccctgagctgggccgagggcaacctggccccccaccccagaagccccgccctgcagccccagcagagcaccgccgccggcctgagactgagcaccggccccgccgccgcccagccctag

SEQ ID NO: 4332 - DNA, 528 bp, synthetic construct; identical to SEQ ID NO: 3724
  misc_feature 1..528: note = source = /note="Description of Artificial Sequence: Synthetic coding sequence"
  source 1..528: mol_type = other DNA

SEQ ID NO: 4333 - DNA, 993 bp, synthetic construct
  misc_feature 1..993: note = source = /note="Description of Artificial Sequence: Synthetic coding sequence"
  source 1..993: mol_type = other DNA
atgggcaagctgtgcctgggccccaccctgtgccccgccgccgccgccgaggagagcagagacgccgagcccagaagagagctgctgtgcagcggcagaccctggacctggagagccgccgccagagtgaccaccatgatcccctgggtgctgctggcctgcgccctgccctgcgccgccgaccccctgctgggcgccttcgccagaagagacttcagaaagggcagcccccagctggtgtgcagcctgcccggcccccagggcccccccggcccccccggcgcccccggccccagcggcatgatgggcagaatgggcttccccggcaaggacggccaggacggccacgacggcgacagaggcgacagcggcgaggagggcccccccggcagaaccggcaacagaggcaagcccggccccaagggcaaggccggcgccatcggcagagccggccccagaggccccaagggcgtgaacggcacccccggcaagcacggcacccccggcaagaagggccccaagggcaagaagggcgagcccggcctgcccggcccctgcagctgcggcagcggccacaccaagagcgccttcagcgtggccgtgaccaagagctaccccagagagagactgcccatcaagttcgacaagatcctgatgaacgagggcggccactacaacgccagcagcggcaagttcgtgtgcggcgtgcccggcatctactacttcacctacgacatcaccctggccaacaagcacctggccatcggcctggtgcacaacggccagtacagaatcagaaccttcgacgccaacaccggcaaccacgacgtggccagcggcagcaccatcctggccctgaagcagggcgacgaggtgtggctgcagatcttctacagcgagcagaacggcctgttctacgacccctactggaccgacagcctgttcaccggcttcctgatctacgccgaccaggacgaccccaacgaggtgtag

SEQ ID NO: 4334 - DNA, 390 bp, synthetic construct
  misc_feature 1..390: note = source = /note="Description of Artificial Sequence: Synthetic coding sequence"
  source 1..390: mol_type = other DNA
atgagactgctgctgctggtgcccctgctgctggcccccgcccccggcagcagcgcccccaaggtgagaagacagagcgacacctggggcccctggagccagtggagcccctgcagcagaacctgcggcggcggcgtgagcttcagagagagaccctgctacagccagagaagagacggcggcagcagctgcgtgggccccgccagaagccacagaagctgcagaaccgagagctgccccgacggcgccagagacttcagagccgagcagtgcgccgagttcgacggcgccgagttccagggcagaagatacagatggctgccctactacagcgcccccaacaagtgcgagctgaactgcatccccaagggcctgggcctgcagggctag

SEQ ID NO: 4335 - DNA, 1227 bp, synthetic construct
  misc_feature 1..1227: note = source = /note="Description of Artificial Sequence: Synthetic coding sequence"
  source 1..1227: mol_type = other DNA
atgttcagcaacgccaacagcagaagcaagatgtggctgctgctgaccatggccagcctgatcagcgtgctgggcaccacccacggcctgttcggcaagctgcaccccggcagccccgaggtgaccatgaacatcagccagatgatcacctactggggctaccccaacgaggagtacgaggtggtgaccgaggacggctacatcctggaggtgaacagaatcccctacggcaagaagaacagcggcaacaccggccagagacccgtggtgttcctgcagcacggcctgctggccagcgccaccaactggatcagcaacctgcccaacaacagcctggccttcatcctggccgacgccggctacgacgtgtggctgggcaacagcagaggcaacacctgggccagaagaaacctgtactacagccccgacagcgtggagttctgggccttcagcttcgacgagatggccaagtacgacctgcccgccaccatcgacttcatcgtgaagaagaccggccagaagcagctgcactacgtgggccacagccagggcaccaccatcggcttcatcgccttcagcaccaaccccagcctggccaagagaatcaagaccttctacgccctggcccccgtggccaccgtgaagtacaccaagagcctgatcaacaagctgagattcgtgccccagagcctgttcaagttcatcttcggcgacaagatcttctacccccacaacttcttcgaccagttcctggccaccgaggtgtgcagcagagagatgctgaacctgctgtgcagcaacgccctgttcatcatctgcggcttcgacagcaagaacttcaacaccagcagactggacgtgtacctgagccacaaccccgccggcaccagcgtgcagaacatgttccactggacccaggccgtgaagagcggcaagttccaggcctacgactggggcagccccgtgcagaacagaatgcactacgaccagagccagcccccctactacaacgtgaccgccatgaacgtgcccatcgccgtgtggaacggcggcaaggacctgctggccgacccccaggacgtgggcctgctgctgcccaagctgcccaacctgatctaccacaaggagatccccttctacaaccacctggacttcatctgggccatggacgccccccaggaggtgtacaacgacatcgtgagcatgatcagcgaggacaagaagtag

SEQ ID NO: 4336 - DNA, 393 bp, synthetic construct; identical to SEQ ID NO: 3874
  misc_feature 1..393: note = source = /note="Description of Artificial Sequence: Synthetic coding sequence"
  source 1..393: mol_type = other DNA

SEQ ID NO: 4337 - DNA, 393 bp, synthetic construct; identical to SEQ ID NO: 3874
  misc_feature 1..393: note = source = /note="Description of Artificial Sequence: Synthetic coding sequence"
  source 1..393: mol_type = other DNA

SEQ ID NO: 4338 - DNA, 1731 bp, synthetic construct
  misc_feature 1..1731: note = source = /note="Description of Artificial Sequence: Synthetic coding sequence"
  source 1..1731: mol_type = other DNA
atgatcgtgttcggctgggccgtgttcctggccagcagaagcctgggccagggcctgctgctgaccctggaggagcacatcgcccacttcctgggcaccggcggcgccgccaccaccatgggcaacagctgcatctgcagagacgacagcggcaccgacgacagcgtggacacccagcagcagcaggccgagaacagcgccgtgcccaccgccgacaccagaagccagcccagagaccccgtgagaccccccagaagaggcagaggcccccacgagcccagaagaaagaagcagaacgtggacggcctggtgctggacaccctggccgtgatcagaaccctggtggacaacgaccaggagcccccctacagcatgatcaccctgcacgagatggccgagaccgacgagggctggctggacgtggtgcagagcctgatcagagtgatccccctggaggaccccctgggccccgccgtgatcaccctgctgctggacgagtgccccctgcccaccaaggacgccctgcagaagctgaccgagatcctgaacctgaacggcgaggtggcctgccaggacagcagccaccccgccaagcacagaaacaccagcgccgtgctgggctgcctggccgagaagctggccggccccgccagcatcggcctgctgagccccggcatcctggagtacctgctgcagtgcctgaagctgcagagccaccccaccgtgatgctgttcgccctgatcgccctggagaagttcgcccagaccagcgagaacaagctgaccatcagcgagagcagcatcagcgacagactggtgaccctggagagctgggccaacgaccccgactacctgaagagacaggtgggcttctgcgcccagtggagcctggacaacctgttcctgaaggagggcagacagctgacctacgagaaggtgaacctgagcagcatcagagccatgctgaacagcaacgacgtgagcgagtacctgaagatcagcccccacggcctggaggccagatgcgacgccagcagcttcgagagcgtgagatgcaccttctgcgtggacgccggcgtgtggtactacgaggtgaccgtggtgaccagcggcgtgatgcagatcggctgggccaccagagacagcaagttcctgaaccacgagggctacggcatcggcgacgacgagtacagctgcgcctacgacggctgcagacagctgatctggtacaacgccagaagcaagccccacatccacccctgctggaaggagggcgacaccgtgggcttcctgctggacctgaacgagaagcagatgatcttcttcctgaacggcaaccagctgccccccgagaagcaggtgttcagcagcaccgtgagcggcttcttcgccgccgccagcttcatgagctaccagcagtgcgagttcaacttcggcgccaagcccttcaagtacccccccagcatgaagttcagcaccttcaacgactacgccttcctgaccgccgaggagaagatcatcctgcccagacacagaagactggccctgctgaagcaggtgagcatcagagagaactgctgcagcctgtgctgcgacgaggtggccgacacccagctgaagccctgcggccacagcgacctgtgcatggactgcgccctgcagctggagacctgccccctgtgcagaaaggagatcgtgagcagaatcagacagatcagccacatcagctag

SEQ ID NO: 4339 - DNA, 360 bp, synthetic construct
  misc_feature 1..360: note = source = /note="Description of Artificial Sequence: Synthetic coding sequence"
  source 1..360: mol_type = other DNA
atggccagacccggcatggagagatggagagacagactggccctggtgaccggcgccagcggcggcatcggcgccgccgtggccagagccctggtgcagcagggcctgaaggtggtgggctgcgccagaaccgtgggcaacatcgaggagctggccgccgagtgcaagagcgccggctaccccggcaccctgatcccctacagatgcgacctgagcaacgaggaggacatcctgagcatgttcagcgccatcagaagccagcacagcggcgtggacatctgcatcaacaacgccggcctggccagacccgacaccctgctgagcggcagcaccagcggctggaaggacatgttcaactag

SEQ ID NO: 4340 - DNA, 144 bp, synthetic construct
  misc_feature 1..144: note = source = /note="Description of Artificial Sequence: Synthetic coding sequence"
  source 1..144: mol_type = other DNA
atgcaggtgagcaccgccgccctggccgtgctgctgtgcaccatggccctgtgcaaccaggtgctgagcgccccccaggccggcagaagcgtgctgacccccgtgagaagcggcagcagaaacaccagcgtgacctggagctag

SEQ ID NO: 4341 - DNA, 159 bp, synthetic construct
  misc_feature 1..159: note = source = /note="Description of Artificial Sequence: Synthetic coding sequence"
  source 1..159: mol_type = other DNA
atgcaggtgagcaccgccgccctggccgtgctgctgtgcaccatggccctgtgcaaccaggtgctgagcgcccccctgagcagacccagagaggccggcagaagcgtgctgacccccgtgagaagcggcagcagaaacaccagcgtgacctggagctag
